United States Patent Application Publication US 2005/0228172 A9 - sequence listing, part 176

SEQ ID NO: 788089 - DNA, 597 bp, Homo sapiens
ctataagtttaagtatcttttgattttgccctagatattatttcatgattccttgacttattagtgtctgagtataaagtaaaattttcattacttttcttagactatgaagatcttataatacttttgatattttgttaggtagttttgttgatatttattttaaattttatatgatggattttatttatatagtcactatttatttagatttatccagatgttttgtcctttcttttcttgatttcatttctaaatttctacatttacatstaaaataatttttcttctgcttgaaagacattattatttcatttggtgtaatgtataaatgatatagatagttcccttattttttgttttcctgaacatgaatttatttttttctcatattccataatattttattaggaataaaattctagttaccagttggcttccatttgagaagtcatccctaagtcatattgccactttttgaaggtaatatgctttttcctagaactatttttgagatagtctctttgtcgttaattctctaatatgagctatgtagttgtctccatatttatcatgcttcactctggcacttcctga

SEQ ID NO: 788090 - DNA, 620 bp, Homo sapiens
aagagatgtaaacaacaagacttaaaggcataaaatggtatattatatttatggacacttggagttctcactattaagtgggaggtattgataagaacacatggacatgtagatgggaacaacacacaaaccggggccttctggagtgcagaagttgggaggagggagaggatcaggaaaaataattaatgagtattaggcttaacacctgggtgatgaaataatctgtacaacacatccccatgacacaagtgtacctatgtaacaaatctgcacctttatcccttaacttaaaagttatatatatattwaaaaaaaacagtgaagtttgaagtgatgctaaaagagcaatctggcaataggacatgaaaggtcatgatgctatgtctggaaatctgaaacttactctgtggatgatagagccaaaaatattttaagtataacaacatgatttgatctctgcattaggaagatagccctatggcaatatctggggatgactgcaaaggtaagaaattacaggcaaggaaaccagtgaagaagttactagctataattcaagaatgataaatacttgaatcaggctagtattttagaaggtatgcaaagtaaaggctatc

SEQ ID NO: 788091 - DNA, 465 bp, Homo sapiens
ccttttacactatatcattttaaagtgatacgtgctgagatttcatctatgaaatagtcacccaattacagttcagagaatctccatctgaaaagaggtgaacacaattttcaccttgtgaatattcagaaattgaatccagggaagaaatttactgctagtgaacattgtttgtatatgaaaaatgagaacctaggaagtggctattttcataatgatataaatctggaaacacaactagaaatacacttcagctaagtaagaattgcaaagaamtttgtactcgttcaaatgaaattatttcctggcagggaatttcttttttcagtttctctttaatttcattcagctcaattctattttgtaattaccaccttcataaaaagtaatcataataaccagttcttctgaagatagagaaacaagaatatggccaactaattacaaacgtttgggaacacttat

SEQ ID NO: 788092 - DNA, 639 bp, Homo sapiens
ggaataagttaagaaatgtgatcctaggcttattgtaagggatagactcattctcttatcttctaggagcaatttttcttaatggtttttgaaactgctgaccaaccattgtcattaaaaccctctctcggtttctaaaatactgaattttccttataccttataatcttcttgactactttgacttaacttttgacttagtttctatttacratctaccataaaatagaaatgtttatttaataattatttatattctctctgtgtgtacacataaacacacacacacacttccacaatcctgttagaaagttattatttctaatttataataagaatacaatgaaattgtccatttaataggaaagcccaagataagatagtaaatcctgaagccacaatacaaacacaattcagtctgatttctaagactatgttctctcgtcacgccatgctacatgtgcccttaataccatggttcaacgttcttcagttctcttactgtcatcatttataattgccttttgagagatctcatccattcttaagatttgaatgtccacttctgcatggatggcatgcaacatctccagtactggcattttccatatattgcagtaccactttggaaatgcactg

SEQ ID NO: 788093 - DNA, 656 bp, Homo sapiens
gtgactcttgttatgttttagcaaagagacttgtggcattttgcccctgccctagagatttgtggaactttgaacttgagagagatgatttacggtatctggcaaaagaaatgtctaagcagcaaagcattcaagaggtgactttttagccggacatggtagtgtgcgcctgtagtctcagctactcgggaggccgagacaggagaattgcttgaacccaggagggggaggttgcagtgagctgagatcataccccactgcactccagcctgggtgacagagtgagactyccaaaaaaaaaaagatgtgacttgtgtggtgttaaaagcattcagttttaaaaggaaaacagatcataaaagtctagaaaatttgcagcctgacaatgtgatagaaaagaaaatcccattttctgaggagaaattcaagctggctgcagaaatttgcataagtagcaaggagctgaaagttagtcaccaagacaatggggaaaatgtgtacagggcatgtcagagacctttgtggcagtccttctcctcacaggctgggaggttttagaggaaaaaatggtttcatgaggcaggctcaggttccctctatgtgcagtctagggacctggtgccctgcatcccagctgctctagccatgactaaaag

SEQ ID NO: 788094 - DNA, 627 bp, Homo sapiens
aagtaatcaagtaaagaataatatttactcttcatatagtataatttctttactatatgaagtgtttctagaaatttatgagcaaaagactcaaactcaaaagaaatataggcaagtatataaacaattgatagaaagtaaatgcaggccgtcgcggtggctcacacctgtaatcccagcactttgggaggctgaggcggttkgatcacgaggtcaggagatcgagaccatcctggctaaagcggtgaaaccccgtctctactaaaaaaaattaaccgggttttgtggcgggtgcctgtagtcccagctactcgggaggctgaggcaggagaatggcgtgaacccgggaggtggagcttgcagtgagcccagaatggcgtgaacccagaaggtggagcttgaagtgagccaagattgtgccactgcactccagcctgggcaacagagtgagactccatctcaaaaaaataaataaataaaataaaaataaaaaattaagtaaatgcaaatgacttttaagtatacaaaagtgtattcaagttcaaccataataaaactacaaataaaactctatcaatattctttcacttattagaatagcatatttaataacacaaacttcagcaa

SEQ ID NO: 788095 - DNA, 608 bp, Homo sapiens
cagactggggtgattcatcaaagtgtcaaaatagtgtagggagaaataaaaacacagcctatgtaagctggtagctctaaacatcaaatttccacccaacccacaaaccctacccagaaaaaacttcaaaagggttttgcttaagatgttcccccgcccccttcaggcagtgtacccttaatgatactgtattgattttgtaatgtttaatttaaaagggcagtcaggctagtacataatcttgtgttgaataagacagggtcatttatgtggcagtgcaccagatgaaatgtaaaagtaccaattgactaacaagtacataattcaagccaaatcacattaggagtgtttgtgtagacttaaacaaaaagcataccaasggacggtggtgcatctctccctggaaatcaaacttgcacaaatgatatggagttcttagagttgggattaagaactgacccactgtgggaattcactcttgcctcctgaccagtggtagggactaccctcccatgctttctggttctgtaatagtcaatttttaaatttggaaaaggcaataataattagcctgtatcatagactaattctgagtgttcatgaaacag

SEQ ID NO: 788096 - DNA, 604 bp, Homo sapiens
tattcaggaagaggcagaataagagacccaatacaggaaggctgatcaggaacatgagcagccccagggaagagggaaaagaagaaagggaggcccaaggctgggttcacagactctgttgttcattccagtcacttccttttgggagaattgtttacatgcagcctctgaaggagtgaaggatgcgccataccaaaatacaacagattgttatatggattgttttgagttgaccacattctagatattgcagttttaaaacaggtgggctgamctgtctcttcctgcttgcagcatagcataaagattcctctgggagaggccccatacctgtaccaaggcaagaaaacagacctcatcaccagagactgagcgctggggcctgcaatggacctgaattaatagacttctcaaagtaacccttacttctactacttttacactccccactcctatgtatctcctagtgactcctgtagaaattgactgccccttggctacctattctttgccttgtaatttcttctcaaattgatcattctttgtctaaaaagtataaaagcaacttcctttggctacttcttcacctctctctcttcagaag

SEQ ID NO: 788097 - DNA, 620 bp, Homo sapiens
ggcaagcatttgagacccccaaccgaacacagttcagcaatacctttggtaatccagcataatgtccccaagaacacaaatgtgttatttcttagttgtttgtgaataacaatgatgtcctgtacattcttaagaaactatwtttttaattttgtcaaagtgcaggattgatcataaggtaatacgtgtgtatgtacatataggaaacctgaaccttttcttcagaggagctcaagctatttaatgacaatttgaccatttagagaagggctttgactttgtaatgtttagggtatttgctctggtcaattttccatgtggattcactagctgatgtgtggccatctcagagatggtttggggcctcattccataatttatgtggcagtgactcaaaaggtttagtacacatgataaatggtaacaataccttccacctaaataggggagtgtcattattttcacatatttttggtggcgtaactgataaccaaaacattttgttaaatttacccaaagttttcagcagccctggatgccactacagttaagacatagctgtgtcagaaaggtggcaaactctgccctgccgaaaggcagtcatggaagacagacgcgtt

SEQ ID NO: 788098 - DNA, 512 bp, Homo sapiens
catgcagtttacagtttagtgagaaagatgaaacataaagataaataagtaaaagacgtggtgtattagaaaaaaaataggactaacacttgaaaactaatagaacaggaaagggaatatgaactgtgatgagggtgggatttaaatttaaagtwggtaaccagtgaaggtgacttttaaacaagaatttgaatggtgagagggagctaactcttcagatttctgtgggaagaaaattccaggaagaagacagcacatgcacatgcactatgcaggtaggagaagacgggtatcattagtctgtcagtttattatgtgtcccctactaccagaatggaagctccattgcaacgggtattttatttgtgtggtttacaactaaatccttatagcctagaatagaaatctctgaataaatatgtttgaatgcattaaacaaattaattattctcagtttaccaatgaggaaattgacacacatttaactaatttgcccagagtaccacggtggt

SEQ ID NO: 788099 - DNA, 616 bp, Homo sapiens
ataaaggtgatattctgcctccacctattttgcttcttatttcagaacttgagtggggaagaagggtgctatttattgacttcctcaagaacttcaactatctaatgcatggcttgaaacaaatataaccttgctttctgagtggaatgaagtattatcaacacatatttacctatattttatactactgtttcggtactttcttttttaattgtgattcagaaatatgtgtgcagtagggcctaattatcatattcttatttttcttctcaaacaacaaatcagttgtttcaattaattgtgctgacacttcatgtctctgaggtaaaatgataatctgtacctaaattaggaaaataagtcaaaagaatacggattaagacktttgatggcaaacacctggattttgctcgatgaaggaatataaacttgaccaaaaaagaaaacaacttcaacaactttctttttaaaactattttaccacagattgtgttattttacaaaattgacatattttacccttaataaatctttttaaattctcattgcagtaaagcacacagggagtctcagcagagggtaactctgctctgaattatgatttccttattctttc

SEQ ID NO: 788100 - DNA, 614 bp, Homo sapiens
agcatctattctgccgcccatggatcaaggtgtaatcttattatttaagaaatacattttgtaaggctatcaccgccacagatagtaattcctctgagggatctcagtaaattggaaaccttctgaaaatgattcatcatagtaaatgccgtagagaacatttgtgattcataggaggaggtcaaattattaataataacaggagtttagaggaagttgattacaaccctcatggattactttgaggagttccaagacttcagtggaggaagtaactgcagatgtagtgccaatggcaggacaacaagaattagaagccgagcttgaagaygtgattaaattgctgcaatctcatgataaaactttaatgaatgaggaactgcttctaatggacaagcaaagaaagtggtttcttaaggtggaatctactcctggtgaagatgctgtaaatattgttgaaattacaacaaaggatttagaatattacatcaatttagttggcaaagcagatgcagattttgagaggacttacttcaattttgaaagatgttctactatgggtaaaatgctaccaaacagcattgcatggtacagataactctttaatgaaaaga

SEQ ID NO: 788101 - DNA, 547 bp, Homo sapiens
aagaccttggagatccaccagccctacatctctaaattactgataaggaaaatgaggtccaaagagagccacccagctgttgaataacatgtcttctgactccttacccagtgcttttcttatttgctatttcatcttgagaaacagacatgggtattctgaaagacagttaattaattgaccaaaattgtggagaagaaaacaaaaaagaccgaawtaatagacactgactatgtaattatctggaggaaagagtattggtagtttttaaatctaataaacatacaaatgtccaagaaaaagaaaaaaataataaatatttagttaacatatttcaagttcttttggccaaattataagaagacagcctttaaaaaacagctttccatattcttgaatttattttatagcaaaaatgtgatgtctttgaataaatgacttggcatacaaaactcacagaataaagaattttaaatatattattgtatagtaataatatgctcttttgataaatggtatggctgcaatcattgtatcagcatttttt

SEQ ID NO: 788102 - DNA, 617 bp, Homo sapiens
gtagccccagggtctaacagtttcaaggcctctggaaacaaatgcatttacaataaatgcaaaagctgaaatgtagtattgttagggaaggcatgacttctattgctaaaataatgccttgagctatttcaggcaggtaaatactctaaaatcccgaaaacagtacrttaaagtatacagctgactcttgaacaacgcaggggttagaggtgctgatgtgcagttgaaaatccacatttaacttttaactctcccaaaacataacaactatcagcctggttgaccacaaaccttaacaataacatagtcaattaacacatattttgtatgtcatattctgtcttcttactataaagcaagctagagaaaataaaatgttattaagaaaatcataggaaagaaaaaataaatttactattcattagtggaaattgatcatcaaagatctttatcttgattgtcttcatgttgattaggatgaagaggaagagaaggggttggttttgctgtctcagtggtggcagaggtgaaagaacatccacatataagtgaatccacaccattcaaacatgtgttgttcaagggtcatctgtaatttcaaaacagtggaattataa

SEQ ID NO: 788103 - DNA, 594 bp, Homo sapiens
gaattctcttccagaaggctctaatgtgactcaccattctccagtaaaacctggccggcacatacattttaattcagtctggaactctgtgcagttgcctccattgtagcaagtgagatttgtcttctcattcccacagactgttgagggtaatctgctctgtctagagagataaaagcaagagccacagctgttcatcttgttcatctcattcaagaaaagttttctgataaattcatgtatgtagtcaatgccaagctaattaagtactcaggctggaggagctacaaatgcttaattgtgctgcattatgcaagaatcactttctccagtaaaaagctcctgctggagggttctgtgacaagcatggctatacatcttccatttctacacagttttcrtttgtgagataagatctatgccatggggtggcaataaattttgggttggaaaagaacttgctataactagatttgctgctgctttgctaataaatcaataaaggccataggaaaattgcatctctataaaggccaggaagcaaggacagcactctactacccaagcactcatgtgatttctctattggctttc

SEQ ID NO: 788104 - DNA, 588 bp, Homo sapiens
acttatggtgcattgccttggggtgtaaaaatctccaggccccaagcagaaggccattttgaaatacccataggattacagatactgacaaagtgaaagactttcaggcctgagaaaaatccttttgggagtcagagtaaagtttctatttctttgcttagatcaacactggasgaagacctaatcaaatgtcaagcaacagaacattgaaaaatcgtttctgtgataaatcactagatatctttgggcatataactcaggggtttagaagatagaatggaattatactgacttcattcccatatatttatatggcaagatttcttaagcacttccatttaaaaagaaacacttgctttgattacacgtgttgttctggtcaatcgtgtactagtgaaaaatcataataacaattcaaaagaaatgtttttcaacatttagagccttattgtcacaagcactttttaaaaaacaagtatactgagtgtgtgtgtgtgtgtgtgtgtgtgtatgtcacaaaagacatgataatgaaaaactttcaatcataacagtgttacactgggattaagttttacagaagaggaa

SEQ ID NO: 788105 - DNA, 647 bp, Homo sapiens
acaatgagcaatctgcaaaggaaattacaaaagcttccattgaaaatagcattgaaagaaaaaaatgcttatgaaaactacaaagcattgccaaaagaaattaaagaagagataaatggaaacatatctgatgttcrtggattggaagacataatattgttaacatgtcaatactatcgaaagaaatcaacagattcaattcaatctctatctaaatcccaaagattttttttgcagtaatagaaaaaatcatcctcaaatttatatgaaatagcaagggaacccaaatagcataaataatcttgcaaaggaagaacaaagctgaagaactcatgttttctgattttgtaccttactataaatctataataatcaaaacagtgtggcactggcataaagacagacagacagactaatggaatagaataaagggttcagaaataaactctcacacatacaatcaaaggattttcgacaaggatgttaagaccattcagtgtggaatggacagtcttttcaacaaatggtgctgataaaatgggataaccacatacaaaagaatgaagttggacccttacctagcaccgtatacaaaaattaactcaaaatgaatcaaagaagtaaatataagacctaaaataatgcca

SEQ ID NO: 788106 - DNA, 610 bp, Homo sapiens
cacctttttttttttttttttttttttttttttttttttttaacagtagttacaggctggagttggaaaacgggtaattattaatctttgtactcttagtaggtacataataaatgtccctatttccagacttgaatttagtgactttatgtcttcatgtttctaaggtactgaaracttaagggtcaggtcaaggtaaagtttagactttcttctagagcagtactgcctggtagaaataagatgcaagccatagaggtaatttaaaattttctagcatccacgttttaaaaagtaaaaagaaatcaatgaaattaattttaataatatatattatttaacctaatatagccaaaatatccttttaacatgtaatcaaaataaaaatattgatctattttattttgtttttaaccaatttttgaagtctagtgtgtattttatgcttatagaacatcttcattcaaacaaaccacattccaagacctgaatagccacatgtggctagcggtgatcacattgcacagggcagtcctacaggcaattggggggtatttttcttccttgctttatatttttgagtctgatatttgactgctgacacatggtg

SEQ ID NO: 788107 - DNA, 610 bp, Homo sapiens
cacctttttttttttttttttttttttttttttttttttttaacagtagttacaggctggagttggaaaacgggtaattattaatctttgtactcttagtaggtacataataaatgtccctatttccagacttgaatttagtgactttatgtcttcatgtttctaaggtactgaagacttaagggtcaggtcaaggtaaagtttaractttcttctagagcagtactgcctggtagaaataagatgcaagccatagaggtaatttaaaattttctagcatccacgttttaaaaagtaaaaagaaatcaatgaaattaattttaataatatatattatttaacctaatatagccaaaatatccttttaacatgtaatcaaaataaaaatattgatctattttattttgtttttaaccaatttttgaagtctagtgtgtattttatgcttatagaacatcttcattcaaacaaaccacattccaagacctgaatagccacatgtggctagcggtgatcacattgcacagggcagtcctacaggcaattggggggtatttttcttccttgctttatatttttgagtctgatatttgactgctgacacatggtg

SEQ ID NO: 788108 - DNA, 610 bp, Homo sapiens
cacctttttttttttttttttttttttttttttttttttttaacagtagttacaggctggagttggaaaacgggtaattattaatctttgtactcttagtaggtacataataaatgtccctatttccagacttgaatttagtgactttatgtcttcatgtttctaaggtactgaagacttaagggtcaggtcaaggtaaagtttagactttcttctaragcagtactgcctggtagaaataagatgcaagccatagaggtaatttaaaattttctagcatccacgttttaaaaagtaaaaagaaatcaatgaaattaattttaataatatatattatttaacctaatatagccaaaatatccttttaacatgtaatcaaaataaaaatattgatctattttattttgtttttaaccaatttttgaagtctagtgtgtattttatgcttatagaacatcttcattcaaacaaaccacattccaagacctgaatagccacatgtggctagcggtgatcacattgcacagggcagtcctacaggcaattggggggtatttttcttccttgctttatatttttgagtctgatatttgactgctgacacatggtg

SEQ ID NO: 788109 - DNA, 654 bp, Homo sapiens; identical to SEQ ID NO: 755256

SEQ ID NO: 788110 - DNA, 598 bp, Homo sapiens
tggaagcagcagtgaggttgtctggatacaggacttatgacaactgggttctacttctgggaagtttgtaacttagacctcaacaactcaaaattcatatccagcagaaaagacatattttagagatacgttaatgtagtgtaatcgtgggaattcaggcagctttctcacattggggaaggcatgaagtaagtgccatggggtgaatgaccaaccatagctagcagaggagctgccctgggagatcagggagcacrttcctgtccctgagccttggtgttctcctgcctggaacactctcctcttgacattcacgtgactctctccctctttcttctctgttctctcaaatatcccctcctctatctgggctatctttaaaaagttcctgttctcttttcctctcttcctttcctctgctttatctccctcataggacctagcagggtgtgataacataatacatatttctctgtctatctggttgttgctgggcttttgcccctagcacgtaagctcctgagggaggggccttgctgattgttctgtgttcagctcctagaccagtgcctggcatatagttggggtcagtaagagt

SEQ ID NO: 788111 - DNA, 564 bp, Homo sapiens
agcacagagagaaatgagtcatggtttgtgacctccatggatcctaacatttcttctcattaattccttcacttggtatttactgaatgccagtatgtaccaaatattgagcatgacactgggaataagggtgtccagaagacaaaatctttttcttgatggagttgacggtttaatggagtcatggcataagcttccgaaacagttgaaggatgagtaatacacagaaaattgtcaggagaaaattatgtggggtataaccattgcactagattgttttrtagaggagacagattggcactgaactttgtggctaatattttagaccatgagataggaaatgtattcaaaaggctgaaaattacatgggagagagtaaatatgatcagagatttgacccataggctgttacctggagaatgcttgggtatacattgacttataactaagaaagatgaatttcaattttctgcttaggtatgctgaagaaaaattaaaagtgtaactccagagaagtaagttcagaaagttagcaaaaaaaaaaaaaaaaaaaaaaaaaaaagc

SEQ ID NO: 788112 - DNA, 637 bp, Homo sapiens
aaactcccatcaaataaaatagatagatgccgaggcacagggaaccaacacatacattccagtaaagagataggtcccaaaacagtgaaccaacaaatgcattttaatacatagttagatgtccaggcacagtaagcaacacatacaaatttcaataaataagtagatgccgaggcacagaagaccaacacatacatttcaacaagtagatggatgctgagaccgtgaactaatacacacagtttcaataagcagatagaggctgaggcacagcgaaccaatgcacacatttcartaatggatagatgcccaggcacaaaagacctacacacatttcaataagtagatagatgagaaaaaaattctcattaaataattaattattgtaccacaactttgagaatgctttgaaaaatctttccaaactactgtagcaataaactaaatgggccagttggaaatttcttgctggaaaaaacataatgtgttataggagagatggtttactgaaacgcctaactggtatggtctgtttttgctattaaaacgacgttgccagtggtcaaataaagtagccttttattcctgaatcattgtacctccaatattacaactaattactggactagttttttct

SEQ ID NO: 788113 - DNA, 475 bp, Homo sapiens
atttatgctgtcgatttcactgaagatttattccttcatatcctgtatcatgtttttgatttctttaagttggacttcacctttctctggtgcctccttgattagcttaataactgacctcctgaattctttttctggcaattcagaaatttcatcttggcttggatccattgctggtgagctggtatgatcttttgggggtgttaaggaaactcgttctgtcatattaccagaattgtttttctggttctttctcatttgggtaaagtatgccagagggaagatctgggactcaagcactgctattcaggttattttgtcccatggggtgttccgttratgtggtgttctctctcctccctaggaatggggcttcctgagagtgaaactatagtgattgtttttttcttctgggtctagccatccagcggaactactgggctccagcctggtactggggagtgtctgcagagtc

SEQ ID NO: 788114 - DNA, 605 bp, Homo sapiens
acttcaaccaatttttttttttcggcagtctcgctctgtttcccaggagggaatgcggtggtgccatcttggctcactgcaacctccgcctcctgggttcaagcgattcttctgcctcagcctcccgaggagctgagactacaggcgcccaccaccacacctgtctaatttttgtatttttagtagagagagggtttcaccaggttgatcaggctggtctcgaactcctgaccacaggtggtccacccaccttggcctcccaaagtgctgggattataggtgtgagccactgcccccgggtgcctaatcaaatttcaaggagtttaattgagcaatgaaygattcacgaattgggcagcccccagaatcacagcagattcagagagactccagcacaggcacatggtgggagatttatggacagcaaaaggaaagtgaggtacagaaaaaggaggtgaagtagagaaacaagtggattggataaagttctccagttgccttatttgaccaggatttgagtagttgggtgcatttgattaaccaaaacccagtgattggcatagttgtgggctacggttggtttacaactccgcttgttatagttc

SEQ ID NO: 788115 - DNA, 487 bp, Homo sapiens
atggtggtgggagcctataatcccagctacttgggaggctgaggcaggagaatagcttgaacccagagggcagaggttgcagtgagctgagatcgtgccattgccctcccgcctcagtgacacgagcgaaactccatctccaaaaaaaaaaaaaaaagaaaaagaaaaagacaaaattaattaatgccaaatcaagaatcttgtsttatgactttgccaagtaactttgagtgaaactatgtgtacagagattattttcaatgtaaactttcttgaacatctgtgagtgagaaaacatgttagcttcttggaatataaagtaagacacagtcacctccagtaaaacactggtaacacagtgttggtggaagcaacaaatgttcacaatatttaattaaaggggagcaaaattgtcttctttcctctctgatggagacttaatttgatgttaacttagagtgctgatttataaataaacagtttactc

SEQ ID NO: 788116 - DNA, 632 bp, Homo sapiens
agtttctgcttcctatgccctaagtcaaggtcagatgtagagcagcaagtaatattctgaccagtgaagtttagccaaatgatccaaacagacagtttggtttaaagctgctttagggattcaaatccaaatatcagaaggatcaacaattcttgatcgttttgaatctaaacaaacactaccagtatccttcttgatttttggttgtgcaaaatgattgtctttaaaaactttccagagcagtcaaataaacttctgaargtattagagttatgtcaaatactttaacaactccctttttctgatgaaattatgatcattttgtactgaaaacagaagcatacatttctcataaatcaaaatcactttaagaaaagtagagcaatttgaaacactccaggggaaaggaataacattctactctcatgaataaaaattactggggcctgtctcagcagaaaaagtaattcctgggaagagaagtatctcttatgaaaggcttttccccaaaactggatggttgtgtgggagaggagttggagggtgcagaggaggcacagaaaggaagaaataagcataataggatgagtgagaaccccaaacagagccccactcaaggctgctgtccagga

SEQ ID NO: 788117 - DNA, 535 bp, Homo sapiens
ctgacttgctgccacccaataaacagtcagcatactctccaaacatcaagcttaacaattgcattcccaagcacaaccactcctaggaattaaccaaaaaactacctcagggtgttactttagccctctagttttaaactatgttgtgcaattttaagcatgtgaaaasactagatatttcaaataggacttaagttttccaccatagacacagtagcattaaataagtggtgcacataacacaggttatatttgaaagtgtcttctaaataagaacattctggcctagaacccttccccttcctacctctatcaacacagttgacaggtataagcatttgtaatgcttagacaagatttaacaatttcacttctttaagtgtttttaagaatagtctttcttatgaattttaaaacaaaatgttctcaatttattagtttactaacctctgcttttgtcatacactgtcaaactctttaacatttagaaagactagatgttgtaaattaggatacgtttgcccatttatatata

SEQ ID NO: 788118 - DNA, 522 bp, Homo sapiens
catatctcaattcaataaaagccatattaaagactcacagctagcatcatactaaatggggaaaagctgaaagccttttatctgagaactggaacataacaaggatgcccgcttttaccactgttattcgacatagtactgcaagtcccagatggagtatcagtgatgagaaagaaatgaagagcrtccaaattggaaagaaagaagtcaaattatcccttttttagatgttataatcttatatttgaagaaaactaaagactcaaccaaaaatgattagaactaaaaaacaaattcattaaagttccaggatacaatattaacatacaaaaattagtagcatttctatatgcttacagcacaatcaaaaaaaaagctacaaagtaatccaatttataatagctacaaataaaataaagtacctaggaattaaccaaataagtgaaagttatttacaatgaaaactataaaacattgttgcaaaagattgaaatgacacaaaaaatagaaagtgttccatgt

SEQ ID NO: 788119 - DNA, 522 bp, Homo sapiens
catatctcaattcaataaaagccatattaaagactcacagctagcatcatactaaatggggaaaagctgaaagccttttatctgagaactggaacataacaaggatgcccgcttttaccactgttattcgacatagtactgcaagtcccagatggagtatcagtgatgagaaagaaatgaagagcatccaaattrgaaagaaagaagtcaaattatcccttttttagatgttataatcttatatttgaagaaaactaaagactcaaccaaaaatgattagaactaaaaaacaaattcattaaagttccaggatacaatattaacatacaaaaattagtagcatttctatatgcttacagcacaatcaaaaaaaaagctacaaagtaatccaatttataatagctacaaataaaataaagtacctaggaattaaccaaataagtgaaagttatttacaatgaaaactataaaacattgttgcaaaagattgaaatgacacaaaaaatagaaagtgttccatgt

SEQ ID NO: 788120 - DNA, 593 bp, Homo sapiens
gaggaagagaagacaagttccctgtttgcagatagctctccatgatatgcaggcaccatctgaatgtggacagctgcagcactacagcccctttcaaggacattcctaaaggacaatggcaaagggaaatcttcccagtgagcagaacttcaagaagtgtacctggttgtgcactttggttggaagaagaaatggccagatgtccaattatatattggtttatgggctgtagccaatggttgggccagatggtcagggacttggaagaagcatgattggaaaattggtgacaaatttggggaagagatatgtgtgtggacctctctgagtggtcaaacactgtaaagatatttgtatctcatgtgagtgttcactgaagggtgaccttarcagaggagcattttaataatcaggtggataggacgactcgttctgtggataccactcagcctctttccccagccaccctgtcattgcccaatgggcccgtgagcaaagtggccatggtggcagggatggaggttacacatgggctcagtaacatagacttccactcactaaggctgacccagctacgactgctgttgagtgcc

SEQ ID NO: 788121 - DNA, 528 bp, Homo sapiens
cgggcctcggacctcccctacaggtgagtgactcgcggagtcccagcccggcagagacagggcactggtttccctctaccagagttcctgacccagccgagaacaaaccgcgaagcaagttcagcccaacaacgatggtgaaaagggtcctcctgctcacagtgtgaataacaggtaaaaaatggggatggggaaaaaaactttctaatccactccctggggtcatgttgagggcaagttattagaaagcagaatccataggcagcaaagttaagtgtgtgtgtgtcatagcagcctgaatcgcacacatrccttttccttttgattttctcagaatatgctttcctaaccaaggtaagcttgtagggtgggagggagagaggggaaagaagggagggaaagggtgcagagaagggcttggaggtaaatgtgaccataggacccctcctccctttagttcaatgagcccttcacctgtaattgtgcctggcaaaaatcgtgccttacaaagatactagacttctggat

SEQ ID NO: 788122 - DNA, 606 bp, Homo sapiens
aatattttaacatcatttacactgaaaatctatcacaatactttcttacaaatgcgtcagaatgtatatagaaagatattcattgtgatgtcatttgtaatgcagaaaattgaagacatctctatcaattagggattattcaaataaattatgatgcatctgtaatgtcaaatttgatttgggttttaaaatgaatgcattagattccaatagatgtgcactatatcaaaataataaaaattttgaaatattaaagaaagaattcaggaaagtcctgaagctagaaagcatttttctaacttttaagttcaggggtacaagtgcaagtttgttacataggtaaacatgtrtcatggtggtttgttgtacagattatttcttcacccagctattgagcctagtactcattagttatttttcctggtcctatccctcctcccaaattccaccctctgataggcctcagtgtctgtggttcccctctatgtgtccatgtgtgcttatcctttagctcccacttataagtgaaagcaaacagtattaggttttctatacctgcatcagtttgctaagaatgatggcctctagctccatccctgcaaagga

SEQ ID NO: 788123 - DNA, 599 bp, Homo sapiens
aaggcgttgagtctttgcaatagctctttcctctgttgaagactgtttccatctgctgaaacagtcttctctcagatagctacctgactccctccctctcctgccttagaatttttgcttctctgtgaaggtttttttgactgtcctatttacaattctaactctcaccatcttcagctcctcatctcttcctgcagcaaatacttcctttcaccttctctgcattattttattctttaatacttgtaagcatctgacatactatatattttcccttttcaccaatttagtacctgactttccatgttcccctccttcctacacacacactagaatataaacttaagaagggcgaagattttgtcaggttttttttttttttcactgctctatgcagtacctaraacagtgcttggaacattctaggcattcaatatatatctgttgaaggaaacctcatttcacagttgaagtaattgcagctcaaaccttggcctaggtgacactgggtgtgaataacggcttgaatgacaaaacccagttctgtctgtctcaacacacatcctgagccatcagcatcattttgctgttaatatttt

SEQ ID NO: 788124 - DNA, 585 bp, Homo sapiens
tattttttcaccaaaggactcaattaattgtgggagaggttttccctttcaaattaaaggtaaatatattcatagttttaaaatacttttattttatgttgaggggtactatatgcaggtttgccatatagataaaccagtgtcatgggattctttgtacagattatttcatcactcaggtactaagcctagtacccgatagttatttttttaggatcctctcctcctcaagtaggccccaatatctgttgyttgcctctttgtgttcatgagttctcatcatttagctcccacttataagtgagaacatgcagaatttggttttcttttcctgcattagtttcctaaggataataatagcctccagctccatctatgttcccgcaaaagacgtgatctcattctttttatggctgcatagtattctataatgtataaatgccacattttatttattcaatctgtcattgatgggcatttgggttgattccatgtctttgctattgtgaatagcattgtaatgaatatttgtgtgcctgtgtttttatgatagaacaatttctattcctttgagtatataattat

SEQ ID NO: 788125 - DNA, 627 bp, Homo sapiens
ttattcctatttggatgcctttatttctttctcttgcctgattgttctggcctggacttccaatactatgttgaataggagtggtgagagaagacatccttgtcttgtatcagttttcaaggggaatgtttccaacttttccrcattcagtatgatgttagctgtgggtttgccatagatgacttattattttgatgtttgtcccttcaatacctagtttactgagagttcttaacataaaaagacattgaattttatcaaaagccttttctgcatctattgaggtaatcatgtggtttttgtctttagttatacttatgggatggattacatttatttatttgtgtatgttgaaccaatcttgcattccagggaaaaagcctacttgatcattgtggattaactttttgatgcactgctggatttggtttgcaagtagtttgttaaggatttttgcattaatattcatcaagaatattggcctgaagttttctgtttttgttgtgtctctgccaggttttggtatcagaatgatgccggcctcattgaatgagttgggaggagtccctccttctcaatttttaaaattagtttcagtagaaatgacaccagatcttctttgtacat

SEQ ID NO: 788126 - DNA, 627 bp, Homo sapiens
ttattcctatttggatgcctttatttctttctcttgcctgattgttctggcctggacttccaatactatgttgaataggagtggtgagagaagacatccttgtcttgtatcagttttcaaggggaatgtttccaacttttccgcattcagtatgatgttagctgtgggtttgccatagatgacttattattttgatgtttgtcccttcaatacctagtttactgagagttcttaacataaaaagacattgaattttatcaaaagccttttctgcatctattgaggtaatcatgtggtttttgtctttagttatacttatgsgatggattacatttatttatttgtgtatgttgaaccaatcttgcattccagggaaaaagcctacttgatcattgtggattaactttttgatgcactgctggatttggtttgcaagtagtttgttaaggatttttgcattaatattcatcaagaatattggcctgaagttttctgtttttgttgtgtctctgccaggttttggtatcagaatgatgccggcctcattgaatgagttgggaggagtccctccttctcaatttttaaaattagtttcagtagaaatgacaccagatcttctttgtacat

SEQ ID NO: 788127 - DNA, 521 bp, Homo sapiens
ctgtcttcactgcaactatcttattctaaacatcatcctttcttacttggattattacaacagtttccttgcttctattccacacaacagcaagggtgatctttaaattaaaaaataataaataaataaataaataaaatcactttgttgtcctgcttcaattctccaacaacttcttactgtagctagaataaagtacagaccctttrccatggcccctcagggttctcaaactctggcctatccctgcctatcatgtggcactgactctgctccagctgctcaggccttctttctcatcctcaagcatgctaatctcccttctgatggagagtcttgtgctctgcctggaatgctctggccccagagttatgcatggtttcaagttacagttaactaccatcaccagctgaggtgttttcagaattcccaaaccaaatgaacccctattatatgaaataattactgtgtccatttatttattgtctattgcctgcccatgccatgtaaactcaaagtga

SEQ ID NO: 788128 - DNA, 434 bp, Homo sapiens
tcctccatgtatgcctcactctcccaggcaccttgcctcgagtacatacatgttctggcccctgcagtgagtgtttgaagcactgtgcccatgtctacacaggcccctggagtgagtgagtgaagcactgtgcccatgtctacacaggaccctggagtgagtgtttgaagcactgtgcccatgtctacacaggcccctggagtragtgtttgaagcactgtgcccatgtctacacaggcccaacaaagttgcctccttgggagttttcctagcaaggagaagcaggcagccagactgatcccagggtaactgggcagcagccccacatgtgagctgagacccccggtgcccacctccagactcttcctgtgggtgaaggtggtgtcatgggggtagataacatatagaactgcccactggtgccgggacacccc

SEQ ID NO: 788129 - DNA, 434 bp, Homo sapiens
tcctccatgtatgcctcactctcccaggcaccttgcctcgagtacatacatgttctggcccctgcagtgagtgtttgaagcactgtgcccatgtctacacaggcccctggagtgagtgagtgaagcactgtgcccatgtctacacaggaccctggagtgagtgtttgaagcactgtgcccatgtctacacaggcccctggagtgagtrtttgaagcactgtgcccatgtctacacaggcccaacaaagttgcctccttgggagttttcctagcaaggagaagcaggcagccagactgatcccagggtaactgggcagcagccccacatgtgagctgagacccccggtgcccacctccagactcttcctgtgggtgaaggtggtgtcatgggggtagataacatatagaactgcccactggtgccgggacacccc

SEQ ID NO: 788130 - DNA, 610 bp, Homo sapiens
aagggtaccctgggagtttgagggtaggcccaggggcacctgcttttctggaacatggaggaaaggttgaacagtgacagcagtgagcttggtgaccatggctccagagctccctggacatagaggaagtcgctgctccagcaaacccctatggcccaattcatggaagtagaacaagggcactgactgggtgtgggggcagggtgctgtttcttttttagacagggtcctgctttgttgctcaggctggagtgcagtggcacagtctcaattcactgcaacctctgcctcctgggttcmagccgttctcctgcctcagcctcctgagtagctgggattacaggcatgtgccacgacacccggctaatttttccatttttagtagagtgcggttttaccaagttgcccaggctggtcttgagaactcctgacgtcaagtgatccacccgcctcggcctcctaaagtgctgggattacaggtgtgagccactgcgctgggtcggtgctgtctctttacatgtgtttcttattccctccttcagcaccaatataacgatattatcattcccatttaacagaagaggaagttgaggctcagagagattaaata

SEQ ID NO: 788131 - DNA, 627 bp, Homo sapiens
atgctctcactgcagcctcccaagtagcttatattacaggtgcatgccactgcatctgaccttgtcttttcatcctcttaatagggtctttccaatatttaagaataaaatagtgctatccaagcttgtctggaaaatagtaggcacataatgggtgttayataaatgattcaatagggccattcccaatctgctttaattaacggtcaattcttctctctattgatatcattaatgaattgtgggcctttaaccagttattatccttatctaggccaaagtcctctctgtaattttattgacactattatttcccttcctagatgctttcttcacagatggtgcaaaggtaaatttcagatatgcccagttttaattactgcaagttcccagtgattgaggctaatgtattcaacaaatgaaaacttaaacttatccttcatcacactgactctagggaaagaatgtctattgacacatgccttcattacagtctcatttatctttgctaacatatgaagtgtgagcgtttgttaatccaagcctgatccttgctttgagaaggaacagatcatgatatgaaagcatggaacgaggatgtaccttgccaaggatcattatttttga

SEQ ID NO: 788132 - DNA, 602 bp, Homo sapiens
gtgccaccctggaaagaggtgcatgttggggaaagcaatcccacctgcttcctgctcacgccgcaggccggggagatgtctttgactggacccattgagaaaaaacactttgttctctctgggagcagaggggacggggrgaagggaggtgggtaacaccttggtagtgacaacagccctgagtgccacagaaggatctccaagactgtccagaaaataccaccttcaacatcagaatcttacaaagttcaccatttcccctgcaagcttgggaactttgatctgaggtcttggagaaagtgaccgccactgtgagacccagagaagctcagtagctcactgaaggtcacagagctaggaagcggtgaggctaggacgtggccttgggcggttctgacactgcagtccgtgccctcacctaccacatggggctggtgaggctctagacccaagagaaagagaatgtgagccatgtgtgcaacatcaattttctcatagccacattagaaatagtaaacagaaatgggtaaaattaatcccaatactgtattttatttaacccaatatatccaaaatattgtcattttaagataccataaata

SEQ ID NO: 788133 - DNA, 619 bp, Homo sapiens
gcatcctcctcacaccccacagcctttgacccacgactatcaggagttggtgaataatacacagctccctcacccttccggtgggataaccacgagatgtgtgttccacgctggctcccagagttccccaggaggattcagctccagctgcccccaagagtaactctcatgacaatgtaccttttaytggcatcagtcccttcccctggcttggttcccctactggtgcttcctggggttactacccaaataatccacttgcactcaaatccttgtctcagggtctgcttctggggaaacccaaactaaagcactcctcttagcctcggtttcattatctgtgaaatgggtataatggcagagttgacctcacaggatgattgcaagatgatatctgcaaagcacagagcctggaattactaagcattctccaaaaggaaccactacagttatttttagttgtgcttattttaaactttttaatcattttttttggacagagtctcactccatcacctgggctggagtacagtggcgtgatctaggcacactgcaacttccacctccccggttcaagtaattctcccacctcagcctcccgaatagctgggattacaag

SEQ ID NO: 788134 - DNA, 428 bp, Homo sapiens
acagaggcatgaagctattaaggacgtgcacagggtttgcagctgggctggagcccaggtcttctggctctagttcagttcttcccactgtactgctgagtaggttttctgaccctgaagacaaacatttcagtttcctgctggcttagggctgygtgggctgcaaagaggaggttctggtacagctttcctggaagccagcatttcccagcaaactggggaggagaaaagctaccactgggaggtggcacttttctctccaaagcccttctccatgtgaccttcctgtgaaggtaaggcctgctgccagccacagctgcttcctctcctccaccaatgagccctctgagccctggatcccagccagctgagcgggtacctggcaaccagactcgcaaatgtgtgcccagctttgccctgatgagtgg

SEQ ID NO: 788135 - DNA, 428 bp, Homo sapiens
acagaggcatgaagctattaaggacgtgcacagggtttgcagctgggctggagcccaggtcttctggctctagttcagttcttcccactgtactgctgagtaggttttctgaccctgaagacaaacatttcagtttcctgctggcttagggctgtgtgggctgcaaagaggaggttcyggtacagctttcctggaagccagcatttcccagcaaactggggaggagaaaagctaccactgggaggtggcacttttctctccaaagcccttctccatgtgaccttcctgtgaaggtaaggcctgctgccagccacagctgcttcctctcctccaccaatgagccctctgagccctggatcccagccagctgagcgggtacctggcaaccagactcgcaaatgtgtgcccagctttgccctgatgagtgg

SEQ ID NO: 788136 - DNA, 594 bp, Homo sapiens
aagtatttccccaaccaaactgcctaacttgggagctgataaaaccattttccccacctgaaattctttcccacagttctgtaaacccaaccaaaatgaatattaagaatgccctgctcagaagagtttgactctgcagccagcttttcacctttcccttttcctcctgagattctctttatcaaacattgactttcagcatcaagagaggamgacctctgttggtgtgaggaaagatgagaagttgccctgaggtatgtatagcacagaaaattaatatgtcaaacaaacttcctttaagattaggaatgttgacatttgagttgaatctatgtacttaacaaaatttacttcattatgcaatgctctaaagttactccatgacttaaccaataacatggaggatatatacatatattcttcctaagcaactggaaattacaattcaattaagattattatgctgcatctacaatccatttttataacatattaggcattttctaaatagcagcaagcagctttccccaaatgtaatttcgttaaaagattttacatgctagcagcctaaacagcaccagaagagagatctgg

SEQ ID NO: 788137 - DNA, 684 bp, Homo sapiens
tgtctttacaacttgaagagcttatgggatcctatccttgcatgacacagaaatgtacctgtatctgtagttaatctaaacattgattctgtcctcattttctaaaactgcccaaactcatatcaggtattcaagttaatttaataaactttaattgaacatccacttttaaatacaagcgtgtgccatattctaggaggagaggatgaagagggttataaatacagaaatgagtaagacctggcccctgtactcaagagcttgaaatcaggtggcgagacagacaaaaactgtgagacagaaatagaaccaaattcacacagagaacctgggaagatgagggtttgaagtagcaggaaagttcacataggggataatttttgagatggactttaaaagataggttggagttcacaaatagagacaggaraggaagtcattccaggctgagggaacagcatgaactactcactaaatccttccccatctttccaagtaaaggacctgtttaatatcaaagatttatcagaatcccacaagacagctattgtacttttaatagctattgatggaaaaatacaaaaggacctaaagctactaagaattcagtaatattattgcacaatttatatatttatatgttattaaccacaactagagcaacatatatttgaaatttactca

SEQ ID NO: 788138 - DNA, 558 bp, Homo sapiens
ctccgtctcgatttaaaaaaataaaataaataaataaataaataataaaataaaaaataaatcctaccagctctttttggggaaccagctcggggattcttgtgcctccactgtctgccttgcacttgagaacaagtcctgaaaataaagccttatctaggaagtcctcttggccccatattaatttccattacatggagagccaaggagcctgtggtctgtaacatatgtatatacattatgtgtatgtggtatcttcttatctccagaaaatattgccaaattgctttataaaattccttragagacctctattctaaatgggttttgtgaaacaagtaactcaaaattgaagctgttggaactttatatttaagggaatgtgattatgggacctgagtcatgtaaacaggcagctgcaacctaggcaactgtaaccttgtttttctaattacagattagccttttttcttacttacattattttgtaaaatgtagtaaatgactaaattgagccagggaagactccttcctcttttttttttttttttttttttt

SEQ ID NO: 788139 - DNA, 531 bp, Homo sapiens
agcctgggcgacatagcaagatcccatttcaaaaaaaaaaaaaatcagcaatgtcgagaaagaatggtcccttaaattcttaaagatacctcacaaatgcatcttgccattcttcctcatcccaaatcaacatcaaagcagcacatcatccaagatacagttactaaattcatttagctatattaattaaaataaggagagatgttcctcctctgcagacactgataatacccacatggctaaggcagcacttctccccaagtcctcctctctaacaaggtgtgagctgtaggcytccacttaccctggcaaattccatgggtttaggaagaaggcacatgaccatgacatcgaagcgaacatcacatacggtcttcagccatttggtgacaaactgaggcttcagcttttccaccagacttcccacttcatcatccatcatatacgcagtggagtgaaaccactgaaacaccatggccaccagccgggccaagctttctgtaggcgtgttctcactgggtgtgcagaggc

SEQ ID NO: 788140 - DNA, 612 bp, Homo sapiens
tgtagaggctttggaaaaccgagaaagggaaaaaagaaaattcaattaacacattaaccttccatcttgatgcaatccatagtaacactctgataagtattactgattgtttttcaccatgataagtattactgattgtttttcactatgtaacctttaaactttttaaaacttttaaacatcrtactataaaattgcataactttatgcttaacattattttgtaagcatttggatgtttgatacccttgatttgcatgtcatacggtgatgatgtggattgggcggactcacactgtaaagcaagagcaatactgagccagacctattgtagtgcaaaaatggccccagcacaggaagacttaatgagaatgctacctttctgcaaagtgtagaattaaaatagaaaagaagggtctttaaggaaactggagttcagaaagtaagatttgggggatatgaaaatgtcttgggactagaaagaggtggtgttggcaaacattgtaaatatactaaatgacactgaattattccctttaaaataattcattgttcattatgtgaattttgcctctatttttataaaatgacagaaagtggatggtttgacct

SEQ ID NO: 788141 - DNA, 684 bp, Homo sapiens
ataaaacatttccctcaaagaaaccccaagtccatatggcttcaccagtaaattctattaatcattgaaagaataaataatacaaatcttacataaactctttcagaaattagaagagaaaaaaacattttccaaytcattttatgaggtcagtattactctgtaaatggaaccagatgaagacatcataattaaataaaacaaaacaatatctctcataaatgtaggaacctgaacacttaacttagaaaattaaatctagcaatataatacagcatgacaagatgagttcatcccaagaatgcaagattgcatttcacacacacacacacacacacagacacacacacacacacactcacatatacatatggaccaaatggaaattctagaagtgaaaaatataacaggggggcagaatttggggaatgttggtcaaaggctgcaaaactttagaaagaaaagatatataataaccaaaattaaaaacataattaggaggctaaagaatttgagaacaggaagacatgtcagaaaaagattcagtatgaagcacagaaagatgaaatggtgggggatggggaatacaaaaaataggcataaaaggcataacgttgccaagaaaatcaatgtaatttaccatattaacagaatgaagggaagaaatcatataatcatctcaat

SEQ ID NO: 788142 - DNA, 684 bp, Homo sapiens
ataaaacatttccctcaaagaaaccccaagtccatatggcttcaccagtaaattctattaatcattgaaagaataaataatacaaatcttacataaactctttcagaaattagaagagaaaaaaacattttccaactcattttatgaggtcagtattactctgtaaatggaaccagatgaagacatcataattaaataaaacaaaacaatatctctcataaatgtaggaacctgaacacttaacttagaaaattaaatctagcaatataatacagcatgacaagatgagttcatcccaagaatgcaagattgcatttcacacacacacacacacacacagacacacacacacacacastcacatatacatatggaccaaatggaaattctagaagtgaaaaatataacaggggggcagaatttggggaatgttggtcaaaggctgcaaaactttagaaagaaaagatatataataaccaaaattaaaaacataattaggaggctaaagaatttgagaacaggaagacatgtcagaaaaagattcagtatgaagcacagaaagatgaaatggtgggggatggggaatacaaaaaataggcataaaaggcataacgttgccaagaaaatcaatgtaatttaccatattaacagaatgaagggaagaaatcatataatcatctcaat

SEQ ID NO: 788143 - DNA, 638 bp, Homo sapiens
agctgcttctaacagtgcatacttacattcataagcaaagagattatccaaaactgaaacttaatatttaaaagggaagcagaacataaaaatttggaaaatttgcagcctgaccatgtggtaaaaataaaaacccattttctggggaggaattcaagccagctgcagaaatttgcataagtaaagaggaaccaaatgttaatatccaagacaatggggaaaatttcytgaaggcatttcagagaactttgtgacaccacctcacacggcaggccccaaggcctaggagggaagaatggtttcatgggcagggccccactgccctgcacaacctcaggacactgttctctgtattatagccactccagctccagctgtggctaaaagggctccaaatacatctcagaccactgctccagagagtgcaagccataatcctctgtggcttccatgtggtgttaagccagaggatatgcagagggcaagagttgaggcttgggagccggtgcctagatttcagaggatgtatggaaatgcctggatgtccaggcagaagtctgctgcagggatagagcgttcacggagaacctctactagggcaatacagagttgaagcccgtacacagagtccctatggg

SEQ ID NO: 788144 - DNA, 603 bp, Homo sapiens
aatgggcaaaaatatcatgagaatatacaggatttgaattaaacaattacaaatttaatttcattgacacatgtagaacactgcacaaacaactgccaaatagaagttctttttacattcttgagttctttttaagttctttacacaggaacatttacaaaaatgaccatatgttcaaccctaaagaaagtgttaaaaatggcaatggaatgaaataatacaaagtatgttatctgaccacagaaggataaagctataaatctccttctaaatgacccatgggtcaaagaagaaaccatgaagsatttagaaatcagcatagcacaggatttaggaatcagcatagcagtgagatttaagtcactgcaataaggcaagaagacataaaaggcttatggattgagaaagagatattaaatgtgtattattcaacaataatataattgtgcatattaaagtaatttttaagcaagactaccataataaattattagaagtgaaaagtgacttagcaaagttgctggatacaagaccaatatactaaaaattaattgcatctacatactagcaacaaagagttagacaatgtaatttttagaacat

SEQ ID NO: 788145 - DNA, 603 bp, Homo sapiens
aatgggcaaaaatatcatgagaatatacaggatttgaattaaacaattacaaatttaatttcattgacacatgtagaacactgcacaaacaactgccaaatagaagttctttttacattcttgagttctttttaagttctttacacaggaacatttacaaaaatgaccatatgttcaaccctaaagaaagtgttaaaaatggcaatggaatgaaataatacaaagtatgttatctgaccacagaaggataaagctataaatctccttctaaatgacccatgggtcaaagaagaaaccatgaagcatttagaaatcagcatagcacaggatttagraatcagcatagcagtgagatttaagtcactgcaataaggcaagaagacataaaaggcttatggattgagaaagagatattaaatgtgtattattcaacaataatataattgtgcatattaaagtaatttttaagcaagactaccataataaattattagaagtgaaaagtgacttagcaaagttgctggatacaagaccaatatactaaaaattaattgcatctacatactagcaacaaagagttagacaatgtaatttttagaacat

SEQ ID NO: 788146 - DNA, 528 bp, Homo sapiens
ttatctttatgcttggcagcatggtacctagccacgtggtaccaagagtgactcagacatgccttaccctctctgtgttacacagctcacctccagctagagctgttgaactgtaacacagaagcacccatttctctgctcacaaagtgtcatggtacccaggggcaaaactaactcagacacaatagtactcaagtgttctccatcattccagctcaatccaaagaccctcaacacattccctgaaatgagagatgaagtgcactgacagaattcaaggcatgtttgagacaaacttttctccttgyttaagtcttctcggcaatggttggctctaccattttaaaagacctgcaattgtgtgcaatgaaagtagttccaggctgctgtatcttgctccctttcccacagacatcaccagaagcccaattcatcacattcttaacagcactcttcagatttatctgtcagggcaaaggatccagattaaaaatgaaacaaccatttcacttgcttgacaaggggaga

SEQ ID NO: 788147 - DNA, 580 bp, Homo sapiens
cagacagtcaggaaagctattccaggcactttcacatactagatttgagactttgggaaagactcataaactttttgaaccttagtttttttctttaaaatagaaataaaaatgcctcctataggtacattcctgaggatttcagtgagataacttcatagagcattttttaaaatatcatttataaygccattttattttttgacatcagaaaatatttattactggtttaaaaagacagataacttttagaatgcaataagtgcagtgcatagcaaatggattatgtattaaaactgaatatttaattacagcacaagttcaagaaatttccccataacttagagtgtaagagataaaggtgataaagtattaaataaatgagaaacacagggggaatgatccagaagatctagtacttatgtgtaacaagaattccagaaagagagatcaaagtattcaaaagatcaataatcaaagaaataaagtcattcctggactaaaaaagacaagagtcttcagtttgaaagggttcaccaagtatcatacaatgaatacatcgatacacacatcaagacat

SEQ ID NO: 788148 - DNA, 617 bp, Homo sapiens
ctggagtcttattctatcatatactaaaacctattgtagggtcagcaaggtaatgatgcagtaatagacaaacctacctatggaagagaacacagacctaagaaacagagcctcacatacatggccacctggttaacaataatggcaaaaccacagttcagtgcataaaagtttatcttcatactaaatggtgttgggtctgttggatatctatatggggaaaaaatgtaacttgagctctgttaaggactacattgtgtcctcccaaaattcatatgttgaagtgtcarccttcagtgtaaccacatttggaaacagggtccttaaggaggtaattaaggttaaatgagattataaggaagaggccctaatccaataggactgatttccttatgagaaaagaaattgacactaggagtacatgtgcccagggaagagattatatgaggacacagagagaaggtagccacctgcatgccaaggagagaggcctcaggagaaagcaacactactggcaccttgattttggactccacctccagaatgatgagaaaataaatttccattgtttaagcccaggctgtagtatttcattatggcagccttagcagactaaa

SEQ ID NO: 788149 - DNA, 622 bp, Homo sapiens
tctcaggccatcctggggaggccgtctcagccgaatcccatgggaacatttaggaccattcactgccaacaactcaacagtgactcccagaaaacttgtttatttttagatcgagagtcttgctctgttgcccgggctagawtgcagtggtgcaaccacagctcactgcagcctcaacctcctgggctcaagcaatcctcccccatcaacctcccatagctgggactacaggtgtgctccaccacacccggctaattttttagtgttttgtagagacagagtcttgctgtgttgccaagctggtctctaactcctgggctcacgcaatcctcccacctcagcctcccaaatgcgctggcctcatagattttaaatctgggctcagatggttgatgtcttctttcagtgcaaggactcattgggataggacagagcttatggcccaacagtgcaggacagagaaacacagccagataaggttctgatgagtgagctggttcccagattggtaaactatgtgccaggatacattgttctgcaagattttcctgaagcaaacagtgattgactgatttagttttatctcctggaaagattttctggaaataatcattaatcagtt

SEQ ID NO: 788150 - DNA, 617 bp, Homo sapiens
taacatagctgaatatttgccggaacgtgggagcacggtaggaggcttagggggcctgggcccatgggacgggatcctctgctgggaccccaacaatgctccgtggctctcccctcccaggtggtcagggttccacagatgaagcccctaccttcagcttgggggtgtgggccttgctgccctctgccctgggagctgaataagggaggggccttcactgtccaggatgtcagcttccactcggtacccccagcctcatcagagccttacccaaaggaactgaaatttgggactcggacagatacttgcacgcccacgttcatagcggccaagagacggcagcaactcaggtgtctgttggcagaggcgtggataaaccaaatgtggtccacccatacaacagaatattattcagccttaaaaaggaaggaaattcggatstaggctacagccacggatgaatgttggcaagatcatgctgagtgaaacaacccagctaccaaaggatgcgtcctgcttgagtctccgacacgaggtcctgagagccgtcacgttcatacagatggaaggtagaacggtgggcgccagggtgggcagagggcggggagtcgggggga

SEQ ID NO: 788151 - DNA, 539 bp, Homo sapiens
ctcctgggttcaagggattctcctgccacagcctcctgagtagccagtattacaggcgcccaccaccatgcctggctaatttttgtatttttagtagagacggggtttcgccatgttggttaggttggtcttaaactcctgacctcaagtgatccacccacctcggcttcccaaagacatttttyttaaatttttttttacatatttatatacatgcatacatacatagttttaatataaaattgtgagaaggttcaaggttttttttgcttgtcgaaccctctcccttattgttaacccatgttaacaacttagtatgtgccttttatatttttgttaattttttttatgattataatttataggttggagagtcatgtgttgcataatgaatgatgttttggtcaacgacagaccgtatatatgttggtggtcccataagattataatggagctgaaaaattcctgtctcctagtgacatcatagctgtactgttatcatagcacaatgcattacatttttttttttcccaagacag

SEQ ID NO: 788152 - DNA, 602 bp, Homo sapiens
aataacctttttttttcttttttaaaaaaacaatgttggaggacttacatgccccaatttaaaaccttactcgaaagctacaataataaagacaacgcactgctggcaatggtaagtatatagatcaactagactgagttcagagtacagtattaaacccttatattgatagtaaatgtattttagacaaaggcgccaargtaattaaatgggaggaaagatggtcttttcaagaaacggtactgggacaactggatgtccacttgtaagaaagatgatgttaaacactcactttacaccatatacaacagtcatagctctaaatgtaaagcccaaaactataatacgtctagaaaaaaatgtagaaaaaatacttgtgattttggtttacacaaaggtttcttagatacaatatcaaagcatgatccatgtaagaactcattgataaatcagaattcattaaaacttaaaacttctgctcttcaaaagatggtgtcaaaagaagacaagccacagattggaagaaaatatctgccaagaatatacctgctaaaggacttgtatctagaatatatacagaactctcaaaacttaatgataag

SEQ ID NO: 788153 - DNA, 608 bp, Homo sapiens
gcattctcatgggtgagactctgggaagccattgggcattattgaataaaactaagcaacagcttccctgtgtcccagcagcactagtcacctcacagcccacagaaacctgtgcccacrggcacagggaatgcactcagaggtacagcgtggtttgtaacgactgccacttggaaacaaccacacgcctatcggcagtgggacagagacaccaagggcagcacagtccacagcgggaaactccacagcactgagtgacacacagaaacacaggtggagctgagatgtagaaggctgggtaaaaggccacacgtaagtcactgtttacttacagttcaaaagcaaagctaaactacattgcttaggctttgaagtgggaaagctagaaagaaaagcaacgatgaaaaggctacaaaagtcagggttgcagttacttttggcagcaagaaaggggttctgatagggaaagcacacaggactctggaaagtctgtgctttgaaccaggtgatggttatattggggtttcctttaaacattttattttaaagatgctcctggcatgtgctttagcctttttaaaaatttgtgcagatgtatgaggtacatg

SEQ ID NO: 788154 - DNA, 596 bp, Homo sapiens
atagatttttttttttttttttttgagacagagtttcactcttgttgcccaggctggagtgcaatggcacaatctcggctcaccacaacctctgcctccctggttcaagcgattctcctgcctcagcctcctgagtagctggaactactcagaatgtgccatcaygcctggctaattttgtatttttagtagagatggggtttctccatgttggtcaggctggtctcgaactcctgacctcaggtgatctgcccacctcggcctcccaaagtgctggcatgattacaggcatgagccaccgtgcccggcctcaataataaattttttttaaagatgtaaactgctaacagtttttctactgatctagtagaaacatgctaaaacatggttagactagatggctagtcaaggaatttttgtaagaaatgaaaatataggagtaaataagtgaaatgctttacaataataacagaaagcaagaattttgtcaatatgtgccaaatttttgtttaatgaataatagattaccaatattaaaaatgttgttctgattgtcctgatgttacatatgtgcatatattacatgtattttatat

SEQ ID NO: 788155 - DNA, 668 bp, Homo sapiens
attaaaaataaataaataatttatcagattatctcaagactgcattatattggccgggcgcagtggctcacgcctgtaatcccagcactttgggaggctgaggagggcggatcacgaggtcaggagatcgaaaccatcctggctaacacggtgaaaccccgtctttactaaaaatacaaaaaattagctgggcgtggtggcgggcgcctgtagtcccagctactcgggaggctgaggcaggagaatggcgtgaacccgggaggcggagctcgcagtgagccgagattgcaccactgcactccagcctaggtgacagagcaagactcygtctcaaaaaaaaaaaaaaaaaaaaaaaaaaaagactgcattataaccaaaccaataatatgcatgcttagtttgcattaaaatgcaataaattttggaatgagtcaaatctgaaaaaaaatactaatagaactattaattttaaaagatacgtgtttatactctaaagcatatgtgagggagggctgtgagggtaagccagtcagacaagacttcctagaagtggaggggaaagctgacatgttaatttcattgttttctggttttaaggtctttaagaatgctttggaatgagtcaatacatatatatatattccaccctcttcccttcttgtgagctt

SEQ ID NO: 788156 - DNA, 563 bp, Homo sapiens
gaaataagatatttttctacaccctgattttttgtgtattcctttaggaagagagaacaagtgggcttgtcctcatatatacctgtatatcctcaaagatagagataaacagttaaatctgaataacacctgcatatcatagggcataagaatacttttaagcaagaggttatggctcaaaatcaaatctctatttctaatatctaaagaaacagattctgcaatggtaagtaacctatctctactcattttataaaataattcaaatggtttgcaaagaaaagtcwtgataaaatgctgttgtccatttttttttcagttatttaaaccagtgtgtgggatgtcaacaaaacaaccatgctagatattactattttttaatttaatgttttatatatatatacacacacacacacacacacacacacacacacacacacacacatattacttttttgtgtggtgctggatatttttaaatagcaaaatataaataggtaaaaaggaatgaagctttatgaataaaaaattcgtatataatttgtgtttaatgaaaacagcta

SEQ ID NO: 788157 - DNA, 563 bp, Homo sapiens
gaaataagatatttttctacaccctgattttttgtgtattcctttaggaagagagaacaagtgggcttgtcctcatatatacctgtatatcctcaaagatagagataaacagttaaatctgaataacacctgcatatcatagggcataagaatacttttaagcaagaggttatggctcaaaatcaaatctctatttctaatatctaaagaaacagattctgcaatggtaagtaacctatctctactcattttataaaataattcaaatggtttgcaaagaaaagtcttgataaaatgctgttgtccatttttttttcagttatttaaaccagtgtrtgggatgtcaacaaaacaaccatgctagatattactattttttaatttaatgttttatatatatatacacacacacacacacacacacacacacacacacacacacacatattacttttttgtgtggtgctggatatttttaaatagcaaaatataaataggtaaaaaggaatgaagctttatgaataaaaaattcgtatataatttgtgtttaatgaaaacagcta

SEQ ID NO: 788158 - DNA, 611 bp, Homo sapiens
cgatgtttggttttccattcctgagttacttcacttagaataatagtctccagtttaatccaggttgctgcaaatgccattcattcattcctttttatggctgagtagtattccattatgtatatatcatatatatatatcttgtatatatcatatatatatcttatatatatcatatatatattatatataatatatatcttatatatatcatatatatmttatatataatatatatcttatatatatcatatatatcttatatatagcatatatatcttatagatatatcatagatatatatatcatatatatcttatagatatatcatagatatatcttatatatatcatatatatcatatatatcatatatatcttatatatatcatatatatcttatatatcatatatatcttatatatatcatatatatcatatatatcatatatatcatatatatgatatatatcatatatatatcttatatatcatatatatatcatatatatcttatatatatcatatatatcttatatatatcatatatatatcttatatatatcatatatatttttcttatatatatatattctttatccactcattgat

SEQ ID NO: 788159 - DNA, 687 bp, Homo sapiens
tcagatttcatcttagaaaaatagtatttttttcttcttttttctatcctcacagaagtatactatacacactatttcatactttacttttatcacttgacagggtgccttgaatctctttaaatatcagtacacctagattcattagtttgttctttatattggttgtgtctgcactttgtatgaaacgttctttctcccagattccctccacstaactccccatggcttgagttctcactttatttagtttactgtgcaattttcccttttctgagatcttccatctgttcatccaatattaagtagccacatgttcatcatagcacctgtttaattttcctcaacttttgcctatctgaaataatcttgtgtatctgtttacttgtctgttttctcaccatccaaatagaaggcaaccttcatgaaaacaggtactccatctatcttgttcactgttttgtctttagtttctgaaatagtgcttagtgcatagcagatgtgctttaaatatttgttaagtatgttattccattatatggatgccatatattatttaattaatattatgtttgttttctgttatagacaatactgcaatgaaaatcagtggtcatatatcctgtgcccatttgtgaatatagctgtaagatatattttgaaaagtgtaattactaggtcaaatca

SEQ ID NO: 788160 - DNA, 597 bp, Homo sapiens
ctactcatgtggaccatcattcttggcaattacaaaacagttttaaataatctccagtacaggctgctttactgaagaccaaccctgacttcagcaattatctagcctaaaattggatagtgggtcagcaaagcattayggctaaagggagcttgagatgaacctaggttggaatccaagcattattgtttactagctgtgtagccttctgtgagttatttaatcttcatgattttctgttttttttttctttgtaaagtgaggatgattatagaacttgtggttatgaagggaagtaagataatgcaagtaaagtgtttggcatggtgctgggcacatagtaaacactcaataaattgtatctattatagagaaatccccctaaatatcttcagatgagcttttattattttgttattgtatagtttggtcacactaaggccttataaactttttgaagtacctcttattaaaatgatattatgaagcaccaatagcatgtaaataaggttggctgttgaagataatacacattatatactgtgcactcaaaaagcctaggaattatttacattgaacaaatatgtaatttgaact

SEQ ID NO: 788161 - DNA, 597 bp, Homo sapiens
ctactcatgtggaccatcattcttggcaattacaaaacagttttaaataatctccagtacaggctgctttactgaagaccaaccctgacttcagcaattatctagcctaaaattggatagtgggtcagcaaagcattacggctaaagggagcttgagatgaacctaggttggaatccaagcattattgtttactagctgtgtagccttctgtgagttatttaatcttcatgattttctgttttttttttctttgtaaagtgaggatgattatagaacttgtggttatgaagggaagtaagataatgcaagtaaagtgtttggcatggtgctgggcrcatagtaaacactcaataaattgtatctattatagagaaatccccctaaatatcttcagatgagcttttattattttgttattgtatagtttggtcacactaaggccttataaactttttgaagtacctcttattaaaatgatattatgaagcaccaatagcatgtaaataaggttggctgttgaagataatacacattatatactgtgcactcaaaaagcctaggaattatttacattgaacaaatatgtaatttgaact

SEQ ID NO: 788162 - DNA, 624 bp, Homo sapiens
actctgttaccttcttcttctgttttagactcaataattttatataattagtctttaacttttctgattcttctgcctgtttgagtctgctgtttaattgccgcagttaattttaaaattcactcattttatttttcagctttaaaatttcttcttgtttttttttcttttttrattttaatttttggagatggagtcttgctttgtcaaccaggctgaagtacagtagcacaatcatagcttactgccgacttgaacttcttggcacaagtaatcctccaacctcagcgtcccatgcagctagaactatagtcatacaccagcatgcccagctattttttttagaagttttttctagagactgtgtcttgctatgttgcccatgctagtctcaaacgtctggcctcaagtaatcctcccatttcatcctcctggttcttttttcataatttatatctctgtattgatgttgtaattttgtttctatatatgtgtatatatatatttatatttctgattttctttagttctttgtgtttttctttggctctttaaacatatttaagatggttgttttcaagtcattgtctagtgtcccgtgcctgtgtttattcagggacagtt

SEQ ID NO: 788163 - DNA, 603 bp, Homo sapiens
tttctagttctgcgaagaatgataatgatattttgatgggaattgcactgaatctgcagacggctttgggcaggcagtatggtcattttcacaatattgattctacccatccatgagcatggcatgtgtttcaatttttgtgtgtgtcatctatgatttatttcagcagtgttttgtagttttccttgtagagatcttttacctccttgattaggtacattcctaaatatmtctctcgtttttttttgcagctgttgtaaaggtgattgagttcctgatttgattctcagcttggttgttgttggtgtatagcagtgctactgatttgtgtacattgattttgtatcctgagactttagtgaatttgtttatcagatttagcagcttttttgataagtctttaggattttctaggtatatgatcatatcatcagtgaacagcaacatttgacttcctgtttactgatttagatgccccttatttctttctctttgtctgattgctctggttaggacttccagtactatgttgaatagaaggggtgaaagtgggcatcattgtctttttccagttttctgggggaatgcttttaacttttcccc

SEQ ID NO: 788164 - DNA, 603 bp, Homo sapiens
tttctagttctgcgaagaatgataatgatattttgatgggaattgcactgaatctgcagacggctttgggcaggcagtatggtcattttcacaatattgattctacccatccatgagcatggcatgtgtttcaatttttgtgtgtgtcatctatgatttatttcagcagtgttttgtagttttccttgtagagatcttttacctccttgattaggtacattcctaaatatctctctcgtttttttttgcagctgttgtaaaggtgattgagttcctgatttgattctcarcttggttgttgttggtgtatagcagtgctactgatttgtgtacattgattttgtatcctgagactttagtgaatttgtttatcagatttagcagcttttttgataagtctttaggattttctaggtatatgatcatatcatcagtgaacagcaacatttgacttcctgtttactgatttagatgccccttatttctttctctttgtctgattgctctggttaggacttccagtactatgttgaatagaaggggtgaaagtgggcatcattgtctttttccagttttctgggggaatgcttttaacttttcccc

SEQ ID NO: 788165 - DNA, 616 bp, Homo sapiens
tcagatttagcagcttttttgataagtctttaggattttctaggtatatgatcatatcatcagtgaacagcaacatttgacttcctgtttaytgatttagatgccccttatttctttctctttgtctgattgctctggttaggacttccagtactatgttgaatagaaggggtgaaagtgggcatcattgtctttttccagttttctgggggaatgcttttaacttttccccatttagtataattggctattagtttgtcatagatggcttttattaccttgaagtatgtcccttctatgtgaattttgcttagggttttaatcataaaggatgctgaactttgtcaaaggctttttctgcatctattgagatgatcatatgatttttgtttttaattctgtttatgtgatgtatcacatttattgacttgtgtacattaaagcatccctggtatgaagcccacttgatcatggtgtattatctttttgatatgctgttggatttggttagctagtattaagttgaggatttttgcatctatgttcatcagggatatttggtctgtaggtttcttctttggttatgtcttttgctgattttgtattaggttgatac

SEQ ID NO: 788166 - DNA, 503 bp, Homo sapiens
tactgctggctgattttaacatgtgaaagacatttctctctctgactttcttctgtaggagtgaaaggtacttctgtgtaccactcttgtggtgttggtctcagtttgccttttgttgtagttgcatgtttgcctcctgtttttgcctttttttttttttttttggagacatagtcttgttttgtcgcccaggctggagtgcagtgtcgcgatctcggctcactgcaacctctgcctcctgggttcaagsaattcccctgcctcagcctcccgagtagctgggactacaggtgggctaacatgcctggctaatttttgtattttttttagtggagatggggtttcaccatgttggccaggccgatctcgaactcctgacctccggtgatcggcccacctctgcctcccaaagtgctgggattacaggtgcgaaccaccactcctggccctgtttcatttgttaaacagtaagtaatgtaggatacaatctactcttactggta

SEQ ID NO: 788167 - DNA, 494 bp, Homo sapiens
ttcctgttggttattagtcaagactgagtctggacagagaatgatgttagagagaggtgagattgttcagatttcatctcagtccaccccttcattttccagtcatccttgtgggaactaaatatccttgtttcctagaactagaagtccacttctccactgcatccatttggggaaagtgtctagaaaggccaaatcctrgtgtcaaatttgaatgagcgggaagtaacaccggaaggaaggccacgttggcttgaattctctcccctgggtgctaaggaggaatgtgttcttttttacacatgtgaaacctgagacatagacagttatgggattggccaagtttactgaattagaaagtatctgaatgagtttatctgtctccaaagctcaatactcaatgtgcttactgcactaggtctctaaattacacaggtctggagctgtactgtccgatatcgaagcccctagccacatgtggctttttaaattta

SEQ ID NO: 788168 - DNA, 461 bp, Homo sapiens
gagactgtctctcaaacaaacaaacaatgtaacttagttgtttggagggaattcatagaaaaggagatctgccagtgattttcatgaagttccttcctttactacggcctccttgtgcaagcttaaagtgacttcttgcctggagtatttaaagcacctagtctattcccccatcyccttattctcttaggtctgttttttgtgctttgaccagattcccaaatatatttctgctactcccttgctctgaaaaccttcattggttccctagaggagaacttgttggcctggcattcacattcagggtcttcagcaattaactccagcataaccttccattctcatttgcagttgtcacttgtgaactctgcagtccagccaggctcatctggtcactgtggctggagcgcgtcttgtcctttctctcctttgggcctctgttgacctccctcatgactcta

SEQ ID NO: 788169 - DNA, 588 bp, Homo sapiens
cactctgtcgcccaggctggagtgcagtggtgcaatttcagctcactgcaacctctgcctcctgggttcaagcgattctcctgcctcagcctcccaagtagctgggattataggcgcctgccaccacacccagctaattgtttgtatttagtagagacggagattcaccatgttggtcaggctggtcttgaactcctgacctcaggtgatccactcaccacagccttccaaaatgttgggactgcaggcgtgagccaccgcgcccatccatgaattgcagttttaacatcctgtttatattgctacrcatgcacttagaaacacatagaactgtccttttcttcttatgagcaagttgtcacgtggatgggttgtttgtggattctttgaggtggatgtagctgaagtgactgatgacctcagtaagttcatgtactagtctgttctcacactgctgtaaagatactacccaagactgggtaatttataaataaaaaaagaggtctaattaactcacaggtccgcatggctggggaggcgtcaggaaacttgcagtcatgtcagaaggcgaagaagaagcaggcacct

SEQ ID NO: 788170 - DNA, 570 bp, Homo sapiens
gcttttgcaactcatccttgtaattcaagctattaatattaactgtagtatcctataatacttttatgcattcccttactgatgggcatctaagttgtttttctcattttgttttgcttggcttttggtatgataaaaatactgtggtacacatttttgtacatcttcttgagcacacaraaataagcttctctagggcagagcttatatacaattctgtatagcagtgcctcacagttggggtagaagatgtgggacctgaggtgaccacagccccctaaatgggcacctcctgctatgagcagcctcctcggcttaccccactgtgctctatgagtattatctttctctatgtgtgtcataatggggaaattggaaaatactgccccaagaaataacctagaagtggccatcctgtgtcgtagagtaagcacacttaattaactctgtaagtattgctaaaatattctaagaattattgtaccaatccccatgcctaccttgtcagactggaaaattttttgctggtctgatagatgtgaaatgatatcttgtcttaattgcattttc

SEQ ID NO: 788171 - DNA, 570 bp, Homo sapiens
gcttttgcaactcatccttgtaattcaagctattaatattaactgtagtatcctataatacttttatgcattcccttactgatgggcatctaagttgtttttctcattttgttttgcttggcttttggtatgataaaaatactgtggtacacatttttgtacatcttcttgagcacacagaaayaagcttctctagggcagagcttatatacaattctgtatagcagtgcctcacagttggggtagaagatgtgggacctgaggtgaccacagccccctaaatgggcacctcctgctatgagcagcctcctcggcttaccccactgtgctctatgagtattatctttctctatgtgtgtcataatggggaaattggaaaatactgccccaagaaataacctagaagtggccatcctgtgtcgtagagtaagcacacttaattaactctgtaagtattgctaaaatattctaagaattattgtaccaatccccatgcctaccttgtcagactggaaaattttttgctggtctgatagatgtgaaatgatatcttgtcttaattgcattttc

SEQ ID NO: 788172 - DNA, 595 bp, Homo sapiens
atttgcgtttgcttcgaagataaaggatcccgttcacaaaggaacccctgcttccctttccctactccactcctctgcacctttcgcatagcctcagaccctttgattgcatttatttatttttaagctccggtaccctagatttcactgggagattttaaggcaagaatggagaaagatgggattaagaaaaagagctggctgtgttctagggcaaggttagagaggaattgaaaatcgagggtagatgaatttggggatgttttaaaatttcatttcccacagaagctacctcctttgcactagaacctatttaaattattgggacaggaggaagctaggagtctccgtgggaacaaaaagttaarggctttggagatgcctctttctcttacctctactcaaatgaataaaaagcagctctcctttcaatttagtgactgtacccttcaacacgctcacttccgccgcgaaagtgtgttaatggccagttcccccagggaggccgagctcaggagagtggcccaagacggactcccagaacccctggagctgggctttttattctctaggatggatgctgggaagggccgaa

SEQ ID NO: 788173 - DNA, 595 bp, Homo sapiens
atttgcgtttgcttcgaagataaaggatcccgttcacaaaggaacccctgcttccctttccctactccactcctctgcacctttcgcatagcctcagaccctttgattgcatttatttatttttaagctccggtaccctagatttcactgggagattttaaggcaagaatggagaaagatgggattaagaaaaagagctggctgtgttctagggcaaggttagagaggaattgaaaatcgagggtagatgaatttggggatgttttaaaatttcatttcccacagaagctacctcctttgcactagaacctatttaaattattgggacaggaggaagctaggagtctccgtgggaacaaaaagttaagggctttggagatgccyctttctcttacctctactcaaatgaataaaaagcagctctcctttcaatttagtgactgtacccttcaacacgctcacttccgccgcgaaagtgtgttaatggccagttcccccagggaggccgagctcaggagagtggcccaagacggactcccagaacccctggagctgggctttttattctctaggatggatgctgggaagggccgaa

SEQ ID NO: 788174 - DNA, 576 bp, Homo sapiens
aatggattcccagtttgctggtgagatcttatttttagactgtgatatccttgaggatagagcctgtgcttttcatttctaggtcagtatagggcatgaaatattaggaagtactcaaaactatctgttgaataaacaaagcatggatgaattttttaaaaaccaatgaattggaaaacattgttcttgaatatctctccatagacttgaaatatatcatactatggagaaaggcasacctactttggattttcatgaattagttattttccctgaacctaagtaatatgaatactggcatgaaaatttacaacggtactgtaatcatggtttttttaaaaaaaatttattttctccaatgttgttgatgataataaccaccccttacatatgtcaattgtaagcaagctttttgtaacaagattcacaatgtttcactctaattctcaatacaaatcatcaaggtggatactatcatcaactccatcttacaaatgaagaaagggaggcctcaatgggtttaataacgtgcccaagttaatattgctgtttagctgcagagaggaaccttctgaa

SEQ ID NO: 788175 - DNA, 612 bp, Homo sapiens
atgtaatagctcataattctggaggtcaagaattcaggtgaagccagtggtacagctcacctctgctccacttggtgttgcctgaggtggctcagctggggctggaggtgtcaacatagcttcattcacatgtcttggtcctggctgttggccaggacatctcagttctcctccatgcagcgtgatatggtttggctctgtgtccccactsaaatctcatcttgaattgtactcccacaattctcacatgttgttggagatcatttgaatcgcgcaggtgatttcctccatactgttttcatggtagtgaacaagtgtcacgagatctgatggttttatctggggtttccgcttttgcctctttctcattttctcttgctgccactgtgtaagaagtgccttttgctgctcgccatgattctgagacctccccagccatgtggaactgtaagtctaattaaacttctttttcttcccagtcacttgtatgtctttatcagcagcatgaacacggactaatacacagcctctgtctccagcagtgtcttcattcaacagtctacctagagttttgttatatggcagctggttcctaaagaggtgaaaatggaa

SEQ ID NO: 788176 - DNA, 506 bp, Homo sapiens
agctgtcgtctatatgtaaatgacaagagtgaagagaacctgttgctaagcactgtgaccaattcctgatgcagtccttgaaggttaaccttgtcagactgttagggaaacaagagcataggagagtcagagtcacgtcatttgaagttcagctccatcttgacactaataaggcacattccttgctggtcacaacccacagccctaagatgtttacagttcagaaaacagcttgatgatacctgcaaggacacactcctatgacaatggaatgtccagatgtcccaatatccataacaatgcatgcttstaaggtaattacacgtatgatttgatgtatttacacactatatgactaggagagttttctttgagtcagcaaaaaataagcaattttgccatgctgtcagcccacctgcacagagacatagcttatcttttgcatagaaaagacccccatgtaagaaaaacaaaacaaagatgaagcgttcctcctcttgctttct

SEQ ID NO: 788177 - DNA, 619 bp, Homo sapiens
aacttgaaacacaatgtgatagatgtcttgcttacttagcactggtggcctttcctgtgaagactcagagatgattaaaatgcttatgatcacagaagctgaaagcaggagaaacgatgcttgttacagttattttggacttcctttttgtaaacttcttgagagacagatttttgtctcttttccttgtcatgtactttagggaaaacaggtgtgatctatcacactgaaatttttgccctgaagaaatcacaaaatgcacttactatctaaaaagcttgtgataacagcaaggatcggcgtgtactttgaaacagcatttgrttgacctattttattttcaacatttaaaaaaaaaaacatagagcccaaaaacatattttccttttagaatttcttaatttaaaaataattaagccaaacctgtaaatttattaaaatagattttcaatagtaacagatgccctggggctccccgttagggctttatattgcattgggctttcttataaagacagattttttttttttaattccataaaacaaaaagtacccttaaggcttaaccaaattggaaaaaaaaaacactattctgagaatgtaaattacttcacctctt

SEQ ID NO: 788178 - DNA, 598 bp, Homo sapiens
ttcttgcaggagtaaggtggtattgcattgtggatttcatttgcgtttgcctaatgattagcgatgttgagcattttttttcatatgtttgttggctgtttgtatatcttttttgagaattgtctattgatatcctttgcccgctttttgatgtaattattatttttatttttttcttgctgatttcttcgagtttcttgtagattctggatactagtgctttgtcagatgcatagtttgcaaatattttctcccactttgtaagttgtctgtttactctgctgattatttctyttgctgtacagaagctttttagtttaattaggtctctttttttgttgttgctgttgttgcgtttgcttctggggtcttagtcataaattcttttcctaaaccaattccagaagagtttttctgatgttatcttcagcatttttatggtttcaggtctttacatgtaagtctttgatcccttttgaatagatttttgtataaggtgagagatggggatccagttttattcttttacatgtggctttcccggtgtgtcctttgcccactttatgtttttgtgtgctttgtcaaagatcagttggct

SEQ ID NO: 788179 - DNA, 607 bp, Homo sapiens
aaattttaagtgaaaaatacaatagtaaattaagattacactggggaaaaaaatgcaggtatcactttactccattgttatctgacctagagcttaattaagttttagaaatatgtaataccttccatcattccatcatccttaaattctgttaccaaataatggctaatgttacaaaaagttatactccagagacccaaagcttgacatttacctaatgtatgagaaaatattaccaattaacaataaagaatgatcatatttttaacctcttttacatagcctaataactcagcaaggcctcaacgtctgtgctaatttaaactkccaaatattgactgcagcaaacaagaattatattcagaatttatgagggtactgttaggagtatactgcttacaggtttagatatagtctgttagaattaaaaccaagtttagtgttcatatttacctcatgggctttatcaagcccatattacctcagcttatatatagttaccatttttaggtttttaattgtttgacacttggatgataaatgcagtcattttattctcaagtgcttaaaattaatgtaattaaaagcttagctgactacagaatag

SEQ ID NO: 788180 - DNA, 552 bp, Homo sapiens
agcatttactgtgtgtcacacgctgttttgagtcctggggcaatagcagagaccagaacaggcaaagttcctgccctcaaggagcttgtgcttcacaggggccagggagatgataaacaaaatgaacaagaaaattacagcatccctggtggtaaatgctaggcagaaaacaccaggcagaggccggaagtgcgtgtgtgcgtgggcgtgtgcctcccttttctggctttcatttttttcattgtagtcaagttcacatagggcttactattttaaatactttgaaaatactttgaagtatacaattcagtggcatttagcacattcacgacattgtgcaaatgttaccactctctagttccggaatattttcatyactccaaaaggaaacctcatactcattaagtaatcactccctattccccctaagccagcccctggcaaccaccaatctgccttctgtctctacggatttgcctgttctgtacttttctgtaaatggaatcatatgatatgtggcctttggtgactggctttttcttttttacttag

SEQ ID NO: 788181 - DNA, 520 bp, Homo sapiens
tggttttgcactaaagctgcattgttatagtgtgttatcatgatctctgttgtctatgtgaaaaaaacctgagaaatcaggtaatttgcttatagtcacccagccaagaagccgcagagatagtattctaacagagyttctcaagcttcagtgtgcatacagatcacttggtgatgttgtgaaaactcactttgattcagcatatctagggtagtgctgttattgcgtatttctaacgaggtcccaggagatgctgctgctggtggtcctcggagaacactttgaatagaaagggcgcagaacacattattttctgatctttagcagggcttttctgctccccaagctgccatattccctcttaaggcattgtgaaggtcgcatggaataacagatgtgaaaacaacttaatgtatgtctcaactacatagtaatgcatgctttatggtccctatgttgatatgaatcagctgccactctgtctgcacgtaacagaaattcatctccattaagcctgttg

SEQ ID NO: 788182 - DNA, 520 bp, Homo sapiens
tggttttgcactaaagctgcattgttatagtgtgttatcatgatctctgttgtctatgtgaaaaaaacctgagaaatcaggtaatttgcttatagtcacccagccaagaagccgcagagatagtattctaacagagcttcwcaagcttcagtgtgcatacagatcacttggtgatgttgtgaaaactcactttgattcagcatatctagggtagtgctgttattgcgtatttctaacgaggtcccaggagatgctgctgctggtggtcctcggagaacactttgaatagaaagggcgcagaacacattattttctgatctttagcagggcttttctgctccccaagctgccatattccctcttaaggcattgtgaaggtcgcatggaataacagatgtgaaaacaacttaatgtatgtctcaactacatagtaatgcatgctttatggtccctatgttgatatgaatcagctgccactctgtctgcacgtaacagaaattcatctccattaagcctgttg

SEQ ID NO: 788183 - DNA, 499 bp, Homo sapiens
acaaaagtcctgagacttttgagagagagtcgctctgactggactagcttagcacaggtgcacattcctgaattgatctctggccagggctaggccatgctgtgattggctggacctgtgtcatctgctacatcctcagagctgggacagagacccacctagagctctggagcaagatgagggaggaacagctgctatcaggaggagggagagtggctaccgggaaggtakagggcaaacactgtatccatgtgtgtctctgggccaaaggggctgcatatgaggtcccaccagggtttgcagaggtggggagaaattctgattgctctttctcctctaactttatcttttgctcaccaggtaaagtatagggagagaagggagagattttaaggtatttttcatttcctctcttgaatatttcttcatgcacatatcttatctccccatatacttcctgtggcaagggagttcctcagcttatttgaggcagaacctt

SEQ ID NO: 788184 - DNA, 433 bp, Homo sapiens
tgccaaacagctgtgtttacattcagagccgtagtttatcgctgctggtcctggaagggattgttcaagcttatcttctctagatagcaacgtgctgagggttgcacaattctgacctagattgaaatcagctgcaaaacacctagtcctgaacacacacacgcacacgtctcaggagactcaaggcactgmaactcactgacacattctctcctcaacaggccaactctctcccataatcctgggacctgggccaaggcaaggcggtacggcagcaaaggtcccaggggactttgttgaggcaggactgtttccctgagctgggtgccggcctcctgccccatgtgcctcattctcttgtctttcatgcagggagacagctgggtgagagggcacagagaagaaagacagtaggcatcatgctgcagaagat

SEQ ID NO: 788185 - DNA, 624 bp, Homo sapiens
aagaatgaaaacatagtgatgaatgaccagagggaaaatcagagtgaggggaaaggacagtgtctttagattttgtttaacagagaagaaactttcatctctaaggtgtttgggattttccagtgctaaggttcaccacacaagaaaaaaaattaactgtcctgaattaatatatatgcctttgtaatgatgtcttttttttttttttttttttttttttttgagatggagtctcactatttttgcccaggctggagtgcagtggcgcaatctcrgctcactgcaacctccgcctcccgggttcaagcgattctcctgcctcagcctcccaagtggctgggattacaggcatgtgccactacgcccagctaatttttgtatttttagtagagatggggtttcaccatgttgcccaggctggtcccaaactcctgaactcgggtgatccacctgcctcaggctaccaaagtgttgtgattacaggtgtgagccgctgcacccagcctgtaatgatgtctttaagctaagttcttgtttatgttttatttgaaaatggatccaaattaaaaatgcccacagtttgcctcaagctagttgacaaaagaaagaaagagagaaggagag

SEQ ID NO: 788186 - DNA, 669 bp, Homo sapiens
ggcaactgccaactagtgatatgtggctgggaaggaagacggtggcatttgagaacagttttatggtttggttttcattggctatgactgtcttgaaatgttccgaaagaccatttacacgggttgcataagggtggagtatttccaccgtaattaccttacgtggtactaatttaaagcactccggccactggtggataatattctgtgaaaatgtgcgcatgctgtagcagtggattgcgtctgggtagttaaaaatgctttgaagtcgaaatgagatatgtgcccaaggtgcttgaacaggcaggcgctaagtttgtttttcattgctratgataacctaaatgtgtttttgaattcttgccattgctgaaattaaagcctggtagtaataagtcaccagaaaaaaattagattatatgagcaacatgcactaagcattgaaattatattataaatattaaaaccaatgatcttgttaggattaaaacaaatatttaaactggctacacgtactatccatgccgatctctttatgttgaagtgtcccggaaacgggatgtatggaaccattttttgaactatgaaaacaatcattttcaatcttataaatgactccttgcttttatttttgcttgtagcaaaggacaatttagcaatctgagcagt

SEQ ID NO: 788187 - DNA, 835 bp, Homo sapiens
acttttgtaaagtagaaagaaataataaattcttggatcacgcctgaaatcccaacactttgggaggccaaggcaggtggatcacctgaggtcaggaggtcaagatcagcctggccaacgtggtgaaaccgcatctctactaaaaatacaaaaaaaaaaaaaaattagccaggcgtggtggcacacacctgtagtcccagctactcatgaggctgargcaagagaatcgcttaaaccctggaggcagaggttgcagtaagccaagattgcaccactgcactccagcctaggtgacagagtgagactccatctcacaaaaaaaataaataaaataataaagagagagaaaagaaagaaacaataagtcttgcagaggttagaaagaaggtaaagaaatggttactttgaatggagcaataatcacattttaacataaagattgtccaagatcacagagtaatctgcataattgtgcaaaaattctcatgttacatgactgttctccctgcagtatacactcagcctgttagtttttgtatctagaatcctagaaccttagagctccatggaacctgttttgcatcgtctccttgtttcacagatgaataggctgaagatcagacagtggaaactaagtcctcatgaccacactgtgtgggatcactggacaagctaacattttcttggggtggatggagtccagttatcattgcagggcctgttcttggggcagaagagtcaggaacccttttaactgctttctggttgtctgtaccttttctcgccactactttggtaacttgtatcccccatccctggggacaaaatcttcatt

SEQ ID NO: 788188 - DNA, 835 bp, Homo sapiens
acttttgtaaagtagaaagaaataataaattcttggatcacgcctgaaatcccaacactttgggaggccaaggcaggtggatcacctgaggtcaggaggtcaagatcagcctggccaacgtggtgaaaccgcatctctactaaaaatacaaaaaaaaaaaaaaattagccaggcgtggtggcacacacctgtagtcccagctactcatgaggctgaagcaagagaatcgcttaaaccctggaggcagaggttgcagtaagccaagattgcaccactgcactccagcctaggtgacagagtgagactccatctcacaaaaaaaataaataaaataataaagagagagaaaagaaagaaacaataagtcttgcagaggttagaaagaaggtaaagaaatggttactttgaatggagcaataatcacattttaacataaagattgtccaagatcacaragtaatctgcataattgtgcaaaaattctcatgttacatgactgttctccctgcagtatacactcagcctgttagtttttgtatctagaatcctagaaccttagagctccatggaacctgttttgcatcgtctccttgtttcacagatgaataggctgaagatcagacagtggaaactaagtcctcatgaccacactgtgtgggatcactggacaagctaacattttcttggggtggatggagtccagttatcattgcagggcctgttcttggggcagaagagtcaggaacccttttaactgctttctggttgtctgtaccttttctcgccactactttggtaacttgtatcccccatccctggggacaaaatcttcatt

SEQ ID NO: 788189 - DNA, 835 bp, Homo sapiens
acttttgtaaagtagaaagaaataataaattcttggatcacgcctgaaatcccaacactttgggaggccaaggcaggtggatcacctgaggtcaggaggtcaagatcagcctggccaacgtggtgaaaccgcatctctactaaaaatacaaaaaaaaaaaaaaattagccaggcgtggtggcacacacctgtagtcccagctactcatgaggctgaagcaagagaatcgcttaaaccctggaggcagaggttgcagtaagccaagattgcaccactgcactccagcctaggtgacagagtgagactccatctcacaaaaaaaataaataaaataataaagagagagaaaagaaagaaacaataagtcttgcagaggttagaaagaaggtaaagaaatggttactttgaatggagcaataatcacattttaacataaagattgtccaagatcacagagtaatctgcataattgtgcaaaaattctcatgttacatgactgttctccctgcagtatacactcagcctgttagtttttgtatctagaatcctagaaccttagagctccatggaacctgttttgcatcgtctccttgtttcacagatgaataggctgaagatcagacagtggaaastaagtcctcatgaccacactgtgtgggatcactggacaagctaacattttcttggggtggatggagtccagttatcattgcagggcctgttcttggggcagaagagtcaggaacccttttaactgctttctggttgtctgtaccttttctcgccactactttggtaacttgtatcccccatccctggggacaaaatcttcatt

SEQ ID NO: 788190 - DNA, 436 bp, Homo sapiens
cctgttagtttttgtatctagaatcctagaaccttagagctccatggaacctgttttgcatcgtctccttgtttcacagatgaataggctgaagatcagacagtggaaactaagtcctcatgaccacactgtgtgggatcactggacaagctawcattttcttggggtggatggagtccagttatcattgcagggcctgttcttggggcagaagagtcaggaacccttttaactgctttctggttgtctgtaccttttctcgccactactttggtaacttgtatcccccatccctggggacaaaatcttcatttctagcgttttccaccataaccttgttctggtgctgaaacaagcaaaagcaaagtgctgaaacaagtgtcgatgctggcatatcacagtgtagaatggtgctcctcaaatttaggtggctatg

SEQ ID NO: 788191 - DNA, 586 bp, Homo sapiens
ttgtttatgttctactaacatatttgaatgaagtatacaaaattcagtaactcatatggctatcttaaatgcatggcactaaacatagaaacatctaggaatagcatgggattgctttcctttattattctggtagctctcattatgtacatagtagttgtaacctgagagtgtgtctgtctggccaagcataaatctcaatgtgttcatatgtgtagtgtatgtatgtgtggcatgaagggtagggagaagaagggttgcagagagcttttccttccaaaaatatatatgtttttggcttatttgatggtttygatcatctgtaacttttgtagcaatcatgatttctacatgattcagtgaattaccctgtagtactaatgtaaaacctcaaaaggccatttctctaccaaacatctaagtatgccaactgtgttaacttcataacttatagtcagggtgatcttttatcttcttcacggggtcctgagtgatgttgttctagcgaaacaacaccagaggaaaagggggctcacagaaaagcagcattgagcatgcagaaatgtaaagtatctgcaaagggtta

SEQ ID NO: 788192 - DNA, 586 bp, Homo sapiens
ttgtttatgttctactaacatatttgaatgaagtatacaaaattcagtaactcatatggctatcttaaatgcatggcactaaacatagaaacatctaggaatagcatgggattgctttcctttattattctggtagctctcattatgtacatagtagttgtaacctgagagtgtgtctgtctggccaagcataaatctcaatgtgttcatatgtgtagtgtatgtatgtgtggcatgaagggtagggagaagaagggttgcagagagcttttccttccaaaaatatatatgtttttggcttatttgatggttttgatcatctgtaacttttgtagcaatcatgatttctacatgattcagtgaattaccctgtagtactaatgtaaaacctcaaaaggccatttytctaccaaacatctaagtatgccaactgtgttaacttcataacttatagtcagggtgatcttttatcttcttcacggggtcctgagtgatgttgttctagcgaaacaacaccagaggaaaagggggctcacagaaaagcagcattgagcatgcagaaatgtaaagtatctgcaaagggtta

SEQ ID NO: 788193 - DNA, 586 bp, Homo sapiens
ttgtttatgttctactaacatatttgaatgaagtatacaaaattcagtaactcatatggctatcttaaatgcatggcactaaacatagaaacatctaggaatagcatgggattgctttcctttattattctggtagctctcattatgtacatagtagttgtaacctgagagtgtgtctgtctggccaagcataaatctcaatgtgttcatatgtgtagtgtatgtatgtgtggcatgaagggtagggagaagaagggttgcagagagcttttccttccaaaaatatatatgtttttggcttatttgatggttttgatcatctgtaacttttgtagcaatcatgatttctacatgattcagtgaattaccctgtagtactaatgtaaaacctcaaaaggccatttctytaccaaacatctaagtatgccaactgtgttaacttcataacttatagtcagggtgatcttttatcttcttcacggggtcctgagtgatgttgttctagcgaaacaacaccagaggaaaagggggctcacagaaaagcagcattgagcatgcagaaatgtaaagtatctgcaaagggtta

SEQ ID NO: 788194 - DNA, 669 bp, Homo sapiens
gaactagtccacagtcatcacaggcactaaggatcaggtgaaagcggtgcacacagaagcagccttggcctctgagttaagaaggaagccagggtggagtggatttgaaatgagctggaactgagcaaatataggaacttcatttcatttaagaagctcaactttagagggggcaagagaggtcccctcacaagaatggtagtgagcggcacagaataaacttggagggaggatttttytttcttttgtttttttttgtgacagagtctcactctgtcacccagactggagtgcagtggcgtgatctcagctcactgcaacctccacctcccaggttcaagcgattctcatgcctcagcctcccgagtagctgggattacaggtgtgcaccaccacacccagctatttttttgtatttttattagaaatggggtttcgccacattggccaggctggtcccgaacaactgaactcaggtgagctgcctgcctcagcctcccaaagtgctggaattataggcatgagtccctgcatccagccagatgtttcttaaagagaggagaaacttactcatctaaatgcatagaaggcatcaggagaggggagaagggggcagagtccctgagaaggcaagagggcatgggatccagggcacagacaggatcagcc

SEQ ID NO: 788195 - DNA, 599 bp, Homo sapiens
tcttttttcctaaaaagttgctcttaaggtacccagaatgggattataagaatccttggttaataacacatatatatgattggtttattcatggtctccttttatttatttgattattttaagaaacaaagtaagtgcctaagaacttaccgctgaaataaactttatctrtgttacttccttctgtcccacccatcgttcaatgtacttctcgtcttccctctctccatccagtgtaacccttatgttgaattctgtttatcattttctttttatgtattttttgtaatcctgaaaaaggtgtttgtaaataaaattttaacttgataaaaagtatcgtgctctatatacattttgggagtgtttttttttttctttttttggagacaggatctcgctctgtcacccaggctggagtgcagtggcatgatcacagctcattgtagcctcaacctcctgcctcagcctcctgagtagctgggactacagatgcacaccaccataccctgctaattttttatatttttggtagagacagaatctcattatgttactcaggctggtctctaactcctagactcaaatgattctcccatctt

SEQ ID NO: 788196 - DNA, 691 bp, Homo sapiens
tttgactatggatggtggctcgctgaccactgcttcaggaaataattatggtaattatgaatttttccaatgttttaaacttatttgcctctctctgtgggatgtcaataactcaaacacggccttcaaggccataggatctctgctgcaactgttcwactctccttgctgcagcaaaaaatgtagccatagataatatgtaaattaatagccatgttcccaatacactttatctaccaaagcaaacaggaggtcagatttgactatggatggtggctcactgaccactgcttcaggaaataactatggtaattatgattttttccaatgttttaaacttatttgcagaaattattatacaaattattgatgtttaataaccatgtttgagttattgatatcccacagacagaggaaaatttttgtcccaatgaagaggccgatagttatgatagacaaaaaagtaacatgtgagctcattaactgaataaatatataccactactaatagtagtttgaataattacattgagagaaccaataacagcatatgggtacttgatatgcagtggattatattccatttggtcatgaatttattctctctggagtaaacattctgaataaattgtaagcagttgaaaatttttgaatgtattgatttatgtcaatcattaactgtgcaaaagta

SEQ ID NO: 788197 - DNA, 548 bp, Homo sapiens
gcatattatttaggatgcccagaatcctggaaggctgccatattgtgagtgaatcatttgctttgactgcatggacgacatgagtcatggaggataacttgtggtttgctcaaggtaacaaaacaaaaggtattattttacaaatacaaaaacagtcttaaatcaatcctgtaaggtgtgtggaactgaaagctatagactagaatatttttaaatattctgaaatctcttcatactactctctagctgagtatcagttctgtctttgttctagattatttatccacaatataatcaaatcactctgtattacaacctgttttcatcataagcctcatatcatatgtgttttgtttaaaatattatttattasatggattttattatatatgatagattttatcatactcaagtaattcatactaaagcatttgagtgtgtttcaatttgtaaataatattagaaataagtggagcaaccagctagaaacttaaatatatacatacatatattcatatacatttctgataaaatgtgtaaaaatttag

SEQ ID NO: 788198 - DNA, 621 bp, Homo sapiens
acagtctcctacttataatagtttgacttaacgattttttgatgtcatggtagtgtgaaagcaacacagtagaaaccataatttgagtaatcatgtaaacattctgtttttcacactcagtacaatactcaataaactatataaaatattaaacactttataataaaataagcttcctgttaagatgattttgcccaacttcaggataatgtaactattctgagcataattaaagtagwctaggttaagctaaccttcaggtttaataggttaggagcattaaatacattttttatttatgatattttcaaattacaatgagtttgtttcgatataccatggcttattaagatgtaactcaatatatatagtatatataaatatatatacatatgtgtgtatatatatgtaaggattcaacatatattgattattttctatttatctatgtcttgactaattgcatgataaaaatgatacaaacttaaaataaattttgaaattatctatcaattacaactttctcacattacctatgcatattttgaagcccagaaatttgatttcccaaggtcatagagctaattgacaggatagctgggatcagaaatcaagtactac

SEQ ID NO: 788199 - DNA, 480 bp, Homo sapiens
tgccccagtggaggcttcatgaggcagcgtgagtacaacatcatgaaaaaattggagccagaatcatccagcaaatttactcttgaattcctgatcagataattgtgaaacaaatgtcttgttttaaagttctaaatttaggaaaaattttaattgttatgggcatcacatagttctgtaaagagaaaaatgggtgacagaaacatttgtgatacctttttattcatcacaatccacaaactccctgtttgctagaggtaaattacartaactctcaaattacaaatttttgtttgaagagtaggatatttcctattagaactactcaagcaaaaacactttcttgtttctctgtctatgaggtatgctcttaatattgccactttatttaattttcagaatcgacttaatacatttatgaaagaaaaatgcctgtttggattccctactattccgtaaaaaccccaagcttcctgtcct

SEQ ID NO: 788200 - DNA, 581 bp, Homo sapiens
aagaattaactatcctaaataaataagcacccaatattggaacaccaagatttataaactatctcctctagcagatgacgtaactcaataactagaaatcttgaaaacgttcactaaaagtctcctgaaatgataaagaacctcagtaaagtttcaggatacaaaatcaatttacaaaaataagtaggttttttttttttttttttgaggcagagtttcactcttgttgcccaggctggagtgcaatggcgctatstcagctctcctgggttcaagcgattctcctgcctcagattccagaatagctgggattacaggcatgtgccaccacacccagctaattttgtattttgtagagatgggttttctccatgttggtcaggctggtctcaaattcctgacctcaggtgatccacccaccttggccttccaaagtgctgggaatacaggcgtgagccaccgcgcccggtcagatttttatacaccaacattattcaagctgagagtcaaatcaagagtgcaataccattcacaatatgcaaacacacacacaagaaattatgtaggaatacatataacca

SEQ ID NO: 788201 - DNA, 619 bp, Homo sapiens
tctgcacatggttggatcatgtttctttgttcagccagtctctatctttgaagtgaggaatttaatcaagttacattcaaggctattatttctatgtgatcttttttactatcatattacttttatttgatttttgtttttaatattatttgttcctttcattttctcttattgtttgtcatagtgatttggtggtatactgtagtggtagcatttgaggccattctctttctcattgtgtgtttggtttaccactgaattttatacttttgtgtatgttcttgattataaatgtcatccttttgcttctaagcttaggactctctcragcatttcttgtaggacaggtccagtcgtgataaattccttcagcagttgctcatttggaaagactttatttcttgttcatttatgaaagataatttttaaaaatatatccttgggtgacatttttttttcagcactttgaatgtgtcatttcattctctcctttcctgcaaggtttctgctgagaaattttctgtcagtctgatgagagttcttttataggtgactagatgcttttttcttgctgcttttagtttcttgtcttttactttgtcttagtaaaagacaatgt

SEQ ID NO: 788202 - DNA, 619 bp, Homo sapiens
gtttcccttctccttttttttccactccacccataatattctcatcaactgagtcctctgaaacttctcctttcattatggagaagtatagtgtattggtttaaaaacacagactctagaaccaagctgccggttttaagtcctagctctgccactatctataggacttggacaagttaatcaacttgtctgggctttagtttccctatttaaagtggagcaaataatagtacttacctcatagagttatttggataattaaatgagttaacatttattatcacttagaacagtccctggcatagagtaagtgctatatttatgttttttaaaaaatgggaaaaaaatgtattaggaacctggtcacaaatgttcagtgacttcctgtattccttttctgggcattcatagctctccattatcacaggaccttcttcaggaagcttcytgaacactttccttcaaagcactcatgagctatcctgcctgtttggtcatttatatttttatacctgtgattcttttctctctaataagctatttttctggcattctttatagttccatgaattatatattaggtagattgagaggatcaaaataataataaaagcagcat

SEQ ID NO: 788203 - DNA, 581 bp, Homo sapiens
ttaagcaacacttgactatatacacattaacaataaccactaacatttactaagggctaaccatataccaggcactgtgctaagcccttacatggattatctcaatcctaccaaccctatgaggttggcaggaacctgctggtcagtgacatgtgctgctctctccttgtaccctcatgccccaactccagctcagaaaagagagcaaccagccaggcacagtggctcatgcctgtaatcccaacactttgggaggccaaggtgggccgatcgcttgagaccaggagttagagaccagcctgctcaacataacgaaaccccctctctactaaaaatacaaaaattagctggatgtggtggcacacacctgtaatcccagctactcaggctgaggtacgagaatcacttgaacctgggaggtrgaggttgctgtgagcccagattgtgccactgcactccagcctgggtgacagaatgagaccctgtctcaaaaaaaaaaaaaaaaaaaagtaagtcatggttggctctggaaccagccctgagaaacatgtctcccaattttcttgctggtaactaaagaa

SEQ ID NO: 788204 - DNA, 602 bp, Homo sapiens
tggaggaatgtgggtgtggccgaggtgatggcaagaaaggtgcaagaaagtgagcagtctgcctgtgagtgagcacagatgccggggtgtgtgtgtgtgtgtgtgattttcactgtggggtgtgtctgtgagagctagctgccttacccctccttggcacatagtaggccttccataaatgttggatggatggataaatagattgggaccatcagaccatgggaccatcagaccatgaccactgtaggagtgatgacagctcagcgtccccactcagtgtatctgaccatgtgtgtaagtgcacaaaaatgtggttgtagatgttgctctacattcaaaccttccaggctacactcttccatcagcatgagtcctggagagctgggggaasgtaggaagaggagccttgccttgagttcctaaaccgacccactgcagacacaggctctgattctcttacccagagatgcccatgagctgacattttactcatccctctgcctccaagaaggcctgtattatacgtgtcctcctgggggttggagatgatccctcaagtacacaaaggtcccctggcccttcatctgggaatcatatactcc

SEQ ID NO: 788205 - DNA, 639 bp, Homo sapiens
  misc_feature 209, 210, 211, 212, 213, 214, 215, 216, 217, 218, 219, 220,221, 222, 223, 224, 225, 226, 227, 228, 229, 230, 231, 232,233, 234, 235, 236, 237, 238, 239, 240, 241, 242, 243, 244,245, 246, 247, 248, 249, 250, 251, 252, 253, 254, 255: n = A,T,C or G
  misc_feature 256, 257, 258, 259, 260, 261, 262, 263, 264, 265, 266, 267,268, 269, 270, 271, 272, 273, 274, 275, 276, 277, 278, 279,280, 281, 282, 283, 284, 285, 286, 287, 288, 289, 290, 291,292, 293, 294, 295, 296, 297, 298, 299, 300, 301, 302: n = A,T,C or G
  misc_feature 303, 304, 305, 306, 307, 308: n = A,T,C or G
tctgccggaggatcctacagagggacagagtcctggctcatcttaagaggcccagacctacctccacagcacacagtgcttctgtagagtgctcccggagccaaggaccagggagggctcgtctctagcactgggaccatgagttgtgtaattctgccctggtagataacagtaaatacaggagttccccattatccctcggggacacnnnnnnnnnnnnnnnnnnnnnnnnnnnnnnnnnnnnnnnnnnnnnnnnnnnnnnnnnnnnnnnnnnnnnnnnnnnnnnnnnnnnnnnnnnnnnnnnnnnnctaaagaacctatagtaagagattaacaaaatagaccaattgtaacaatatattgtaataaaattatatggctgtggtctctcaaaatatcctattgtgttgtactcacctattttgaccacataattcacttaattatggaattaagygaaactgtggatcaatggggactacttgattagctaaaactataatagctaacatttatggagcacttactatgtgggcctggaactgctctcaacactttgcattcattaatttgtaactttcacaacagtaccatgaagtaagcactatcatccccatttagagttgaagaaactgactc

SEQ ID NO: 788206 - DNA, 643 bp, Homo sapiens
atacctcattattttatgggaaaatcccaacctagagagaggtatttctagcccagactcagtgtggaggacacgttgcccaagtcctggaagataaggaaagaacagagcaatgtgaatgagactacagaactgccagcctcaagcagggttcaccttcatcactgcccttttcctgctgctgcttggtctggtttgactctgtcgccctcatgtggtgtatacggggaagtgcaggagcttttcccttttgatcatcacaggtaaaaacctgagagtgaaagactggtgaccaacacaaagatgggatcccagttgctcataggatttgcatcttcctcctttttccagggaagaaccccttcctaagcacaagttatccagctgtgacacacggtgaggatgattctccaggaataaaattgtgttggttacaagtccatttttattattgccttggtatgtccattcattgctgctttctctgygaatggttaagatattcttctaggtgacacagaggaaaggaaactggctgtataagagattcagagcctgggacagagagttttggggttttttgattgttaaattcaggctacaaagtaaatggtggaatccatccatggttttgaaaggagca

SEQ ID NO: 788207 - DNA, 626 bp, Homo sapiens
tgatcacagttgtgaaaaaatatgaaatgtgcatattccaatttttagaacattttacacttgttttagctaattttaactcaaaatatctctaagttaaagagtatcagttaagatcagttattgttaactcctcataaagccttttttgtttacttcatgataagttagaatgtgaatttctctaagagtgtgattttttaaattgtgcaagttagatcattttgtttcatggtttcaacaaaactacagggaaatctactcaagctktcagcacatagcacatttgatgatcaacaattatgtgaactttggcatataaattagaaagactgcaaataattagtatttctataacaaaactcattttatttctatttatttatataagatatttcacagcaaataaattaataaaaggaatagaaatgataataattcctcattttaccaactgatagtcatccacagatatataaagtaattcagaatagtaaatctcacacaattcactgatgtctttttaataaaacattatgttcatgtttaataactaatcaaaattattagtatacacatttttgagaattgtatattgttacaactaataacaatatttgtcaatt

SEQ ID NO: 788208 - DNA, 593 bp, Homo sapiens
aggaatgggcatttttcactgcttctgtattgcattataatggaggtcttacccatttaaaaaatttmaaaatacttaaataaatgaaatataccaatttaaaaaaaagttaaagctattattatttgaccccacctgatttgttcatagacaattttaaggaatccacaaaaaagctatttgaaataagtatttagcaggttgtaaaacacataaccagttgcatttcaaagttgtcaaaataaacttggaaataaaaataattccatttacagttgcatgaaaatatataaaatgttcacaggtttaacaacatctgtgccagatctctacactgaaaacatcacagcatcacagaaagaaggttgaacaccttaatatttgcctagatatatcatgttcatgcactgaaatgacttaattttataagttgttgattttccttgaattaattgacacatttagcaaagtataactcatatttccatcaggttgtctgcagagttcaataagctgattctaaaatgtatactggaatgcacattatcagaataatcaaaacaataattaaaaagttataggatttacactac

SEQ ID NO: 788209 - DNA, 667 bp, Homo sapiens
aattaaaaaatacaggatatggatccaaaagtctccagagaaatagttatcataaagagaagacaatcataactactggaaatgaaagacacacttaaagaaatacaaaatacatggaacrtttcaacaatagactagaacaagtagaagaaaaccataagagctagaaacaggctttctaattaacccaatctgacaaatacaaagaaaaaaagattaaaaagaaatgaacaaaaccaccaagaaatttgggattatgtaaaatgaacaaatgtaagaagaattggtgttcctagaaaaattagaaatctaaaagtttggaaaacgtgtttgaggaaatagtcaaggaaattgttcctggattgctagagatctaacatccaaattaaagaagctcaaagaatacctgtgaaattaattccaaaaagaatcatcacctagacacatagtcatcaggttatctaaagtcaagacaaagaaaataatcttaagagctgtgaggtgcgagcatcgggtaacctataaagaaaaacctgtaacattaatagcagatttttcagcagacaccctataagcaagaaggaattgcagtcctatatttagcctccttaaacaaagtaattatgagccaataattttgtatccagcaatgctaagcttcataaat

SEQ ID NO: 788210 - DNA, 633 bp, Homo sapiens
taattatgagccaataattttgtatccagcaatgctaagcttcataaatgaaggatagataaaatctttttcagacaaacaaatgttgagagaatttgccactaccaagtcagcactacaaaaactactaaaaggaattctaaatcttgaaacaaaacttggaatacaccaaaatagaacckctttaaagcataagtctcacagggcctataatactataacacaattaaaaataaaaacagggtattcaggcaacagctagcatgataaatggaacagtacctgacatcttagtactagcattaaatgtaaatggcgtaaatgctccacttaaaaaatacagagtagcagagtggataaacatccaccaaccaaatatctgctgtcttcaagaaactcaactaacacagaaggactcaaataaacttaatgtaaagggatagaaaaagattttctatgcaaattgaaaaaagtgagcaaaagtaactattcttatatcagacaaaacagactttaatgcaacaatagttaaaagagacaaagagagacattatataatgataacaacattttcccaaaaggaaagtattacaatcctaaatacatatgcacctaacactggggatcccaaat

SEQ ID NO: 788211 - DNA, 557 bp, Homo sapiens
ttgctaaagctgtatatatatgagattcatatttttcagaaatatcaattatttgtaaatcatatatatgatgtctaaagctatgtggtgccttattcactcacaaaccattggaatgatataaattaatttttatacttttcttgagaatagcttttatmtctttttctttttttcgactttcacagctataatgacacgaaataaactgcataaccattaactgtacatagttaaagggtaaatcttgataagtttatacacacacatgtgcacacacacacattcatgaacccaccaccataaacaagataataaatatattctttttctcccttcacaacctctaacaccactccacaacaaagagataaactatcactcattcaagtttatctgcacacttgaataaagtaatgaaagcttatgatttctgtgatcacaaatccattttatatcattttccatagtacaaacatttgaacagtgctacttcaaatatattggctgtttgtattattctttgttttcttatactgagttttaagagttcctta

SEQ ID NO: 788212 - DNA, 623 bp, Homo sapiens
ctgcttttattaaattcagattaatcttttcaatgggagactacacagttcttacagatgctaatatataagtgtctatctaatatgtcaggatgaccgagtgattcctaggttagaggcctttggcaatgccatttgtcacctcttttctgtcttttggttttccttattccttcctaaatttctccagcaagccttttattatcatctgagttagaaataatcaattatttcctggaaaatggatagcaattactgactatcccacccatattacaaatgctgtattatgcttattttactyatataataataagtatgcatagctgaaatatctattagattttgaagtttagcatattattaaaaatgacatttttatatttaagcaaaattatgcaaatgtgaaattattgctaaaaataatttcaggataatcatggagaaatgtatcattttgtagatgaaactgaagactcaggaagttgaggtcacttgcccaacttcacatagctcaccaaagtaatgtcttgagtaggtttcaaggtactacataccagggaccaagtagtgatattctcattacaccaccaattatatgaacattggcaaaaacttccaaa

SEQ ID NO: 788213 - DNA, 623 bp, Homo sapiens
ctgcttttattaaattcagattaatcttttcaatgggagactacacagttcttacagatgctaatatataagtgtctatctaatatgtcaggatgaccgagtgattcctaggttagaggcctttggcaatgccatttgtcacctcttttctgtcttttggttttccttattccttcctaaatttctccagcaagccttttattatcatctgagttagaaataatcaattatttcctggaaaatggatagcaattactgactatcccacccatattacaaatgctgtattatgcttattttacttatataataataagtatgcatarctgaaatatctattagattttgaagtttagcatattattaaaaatgacatttttatatttaagcaaaattatgcaaatgtgaaattattgctaaaaataatttcaggataatcatggagaaatgtatcattttgtagatgaaactgaagactcaggaagttgaggtcacttgcccaacttcacatagctcaccaaagtaatgtcttgagtaggtttcaaggtactacataccagggaccaagtagtgatattctcattacaccaccaattatatgaacattggcaaaaacttccaaa

SEQ ID NO: 788214 - DNA, 623 bp, Homo sapiens
ctgcttttattaaattcagattaatcttttcaatgggagactacacagttcttacagatgctaatatataagtgtctatctaatatgtcaggatgaccgagtgattcctaggttagaggcctttggcaatgccatttgtcacctcttttctgtcttttggttttccttattccttcctaaatttctccagcaagccttttattatcatctgagttagaaataatcaattatttcctggaaaatggatagcaattactgactatcccacccatattacaaatgctgtattatgcttattttacttatataataataagtatgcatagctgaaatatctattagattttgaagtttagcatattattaaaaatgrcatttttatatttaagcaaaattatgcaaatgtgaaattattgctaaaaataatttcaggataatcatggagaaatgtatcattttgtagatgaaactgaagactcaggaagttgaggtcacttgcccaacttcacatagctcaccaaagtaatgtcttgagtaggtttcaaggtactacataccagggaccaagtagtgatattctcattacaccaccaattatatgaacattggcaaaaacttccaaa

SEQ ID NO: 788215 - DNA, 607 bp, Homo sapiens
tgtgggttgcaaagaccatgggaaaagtgtcatatctgggccagattgcattgttcctcatggcttcccttggctaggggagggagttccctgaccccttcacttcccttgtgaggtgacaccccaccctgcttcaggttgcccccgtacccactgtctaaccagtctcaatgagatgagctggtacctgtgttggaaaygcagaaatcacccgccttctgcgttgatctagctgggagctgcagactggagctgtttctatttgttcatcttgccagccctatgtatcatattttgaacaatatctgattactttcatttaaatgttttctgcattgtgttcagtgtttgagggaagaagctatctcatattttctttgtcctagagagccaagtgtagtactagtaacattgtgtcaatataattagctctgtgaatttgacttgatgaaaatgagtatgttagttcagatcctctgagaagcctgtcaccaagacaggattaagtgtgtaagaaatgtattatgggaaatggttgtaagagaaaatagggaaggagctgggagaggctcggagagccattggatcacaacccaagtctgactcc

SEQ ID NO: 788216 - DNA, 522 bp, Homo sapiens
ttttggtacagtctttagggttttccatatataaaatgatgtcaactgcagacagggacaattcggtttcttcctttccaatttggatgccttttatttctttcttttgccaaatttctctggctaagacttccagtactgtgttgaatagaagtgagaatggacatccatatcttgttccagttcagcttttcctcattcagcatgatgttagctatgggtttgtcatatatggccattactgttttgaggtacatttcttttacatctaatttgagagttttaaatcatgaagtgatgtggaattttgtcaaatgattttaatgcatttattgaaatgactttgactttwatcatttcttcttctaatgtgatgtatcacatttattgatttacatatagtgaatcatccttgcatccctgggattaattacttgattgtggttgatgatcttttcgatgtggtgttctatttggcttattagtattttgttgaggatatttgcatgtatgttcatcata

SEQ ID NO: 788217 - DNA, 586 bp, Homo sapiens
aacacatccttccatatgctttacatcatctctagataacttataatacataatacattgtaaatggtatgtgaatagttgttatttgtttttaagtttacgttatttttattgttattatttttattttaaagatttttccatctgcagttttccatctgttgtttgaatccacatatgcagaatccaccratagggagggcaactgaacttaattatctgcatccattgtttggcatttagtagtagtagtatttttagagacagggtcttgttgtgttgccgagagtagagtgcagtggctattcacagacattatcatcatagtggcgcactacagccttgaaatcctgggctcaggtgagcctcctacctcagtctcccaagtagctgggactgcaggtatgcgccactgtacccagctgtttggcatttttaaccaaagagtagtttaacctttttcttatttatccagggcttcttaaccatatctaaacatacaatatttagctaccagtactagaactgttgtttgcatttgttaaaaaagaggcataataggaccttctggtctcctactttttgg

SEQ ID NO: 788218 - DNA, 613 bp, Homo sapiens
ggggctccaattgcatccaaatagatgtgagagttgaaagacgcataaggggcttctctcgctttacgatgtcttatttcttctccctctggttgaggaaatgccagggtgaaagggatagccaaatggactaaagcacaagtgccactctagttatttggcagagtgcccagtaaaggtccaccacaataccaccacacatccactcggggatgaacaagggcagactgattgataagctcttgaacattcttaagctcatcgcattccttcaggtctccaaggaatgctaagttttctccttgttgtragagacacaaagtgaacttagtgttgggagatggaagctggttggccctcggggggctgacctgcagggtgctggacttcaggatatagcagagagagcttggcatgactttactccaggctgtagaatcctggaaaagagctaccatgcagcctacgcctggtcgactggaggaccaccttagtggaagggggacaatctgggcctctggcctgccatgtgcacaagcgtaacaattgcttttgtttaatgtgcagatggaatatttgatccattttaaccaggcatttgcatcttggtatc

SEQ ID NO: 788219 - DNA, 425 bp, Homo sapiens
ccccatgaggcaaactcggaaccatattccaagatcttgagacaattataaacactctgctccccacatcttccccattggcctcccatgatctgcatgcaccacaaccaaaatcaaatgactactagcaattaaggaacaatatgtggcaagatcaattaaggtcaattaattgtcaatattgaggtcaatatgtggcaagatgttacagcatattgttaaataaaaaacaaaagactaaaagcagcaaaagtttatatatgtatattatacacratggagaaagagactgtgtatgtgtgagtgtgtgtgcatacatgtgcgtgaacgtataggcaaggactggggggagagaagagtggagagagagaatgaatgaatgaatgaatgtatgtgtgaaggaatgtagaaaagccggctctaca

SEQ ID NO: 788220 - DNA, 643 bp, Homo sapiens
tcccaagtatgccgccctgggatcctgtccggggttggggaggcatgctgtcagcacatgtgagggccttcgcaaagggaatttcacctctgcaagaggcctgacaggccacgtctccctgggaaccaacctcctggggtacgaggtgaggagctgcagatgtgcggtggttagcccctgccctttgcgtgtcatccctatcaagtgtgagaaaggacaggcaggctgcagctaactagtgttcctgaggaaaggggtcagagaaacaatgcagatgctcaagacctaaggctacgtgggagctgcacatagatggatatacttgcaagtgtggggacaatggctgtgcaccccaccatgcctgggtgagggcgtgcagtggcccagattycttggggagtgggacctgtgggcccccataggaaggctggaaaagtcaggccctgctgtctgcacagactctagcctgggaggacacagagtgagggaacatgatggggcctaggggctcctccagcacgtgcctgccctgccctgggcttgcaattgtgattggctggaatccatggaggtggagacaggagccccaggtcaagttgttgctggctgtggcaaaaccaggctccctgcatcctgggggctg

SEQ ID NO: 788221 - DNA, 575 bp, Homo sapiens
ggatgccgcctttgcccagtctgcttcttgatgttgacccatgctcacctggccatgcctcctggggccctccaatgctgtccccagcccctggaaacctgtggcttcgtctctttcccctggcaatgctgactgtctggctggacacccccagctcyggcagggatgcactggccgagggcaggactccatggtggccagtccagccgggtgctgggggcccagactcccaacattgcccactgcccaggagaaaaactctgctgaatctccaccgggaagttctcacctccactgtgacaaaaaaatgccctctgtcccccaagtgcaccctactgcagccagcttctctccccaggtctgcagggcaaatgccccaccccacaggccttccccctgcctgatctgccagccctttccatgcaccagtgaggagcagtctccctgtactccagggactggccttcaggcatcctgggggatggagggtcacagcgaacacagccccccgtgcacgctgcaccctgtatgattaccacacccccaccacatacctgggacccatagagttgtgg

SEQ ID NO: 788222 - DNA, 491 bp, Homo sapiens
tcatttttggaaaactgaattccttccagcttatacattagctggtaagcagtgaagtcttacagaaatggcgaaatcttactaaagataacttacagtagaacgttccgaatgaacaatgcactgaagtgcattgagactcatctagggatgcttactgatatgcagaygcttctaaaaagatttcaatatttttatttaaagactttatgaaggccgggcgcgatggctcacatctgtaatcccagcactttgggaggccaaggcgggtggtcaacatggtgaaacaccatctctattaaaagtacaaaaattagccagccatggtggcgcaggcctgtaatcctggctactcggggggctgaggcatgcctgaactcgggaggcagaggttgcagtgagctgagatggcattactgcattccagcctgggcgacagagccagactctgtctccccccaaaaaaaaagactttatgaaaggcacctaaa

SEQ ID NO: 788223 - DNA, 704 bp, Homo sapiens
ttggatggaatttagacctctaggttctgggatcctaaagaactgaagtaattagccagacatggtggtgttcacctgtagtcccagctacaggttgaggtgggaggatcacttgaacccaggagttttagaggctgcagtgagctatgatcacaccactgcactccagccccagggccacagtgagaccctgtctcaaaaaaaaaaaaaaaamaaggaactgaagtgaagtcagaatatcttcttttcaggccttagagaaagatcgttatgagcatagtcccaaatctggatttctctgaagccaggtcctcccttggcttaccattctgtcttccactgataacttgaggcacgtagccattaactggactgcccagctgttcctggcctagggaggagccagaacccccaaccaatagtaatgaggatggtgatgcgagccttgggtcctccctaacttggctactgtgttacagaagcaatatccaaggcagtgtcatctgcaacaatgctgtgatcgagaagggtgcagacatcaaggactgcttgattggaagtggccagaggattgaagccaaaggtaaaccagattacaatcacagattccatttttacttctcacaccagcactgataatgccaaaggctggtgaggatgtgggaaacaagcacatacgtacactgcgggcgagaacataaatt

SEQ ID NO: 788224 - DNA, 474 bp, Homo sapiens
gaaggaaatatgtccatgaaagacaaaattagtactttacatgtccaaagctcttagtgactctaaaaaaaggtctttagttaacaacaagatctttaattttcccccaaaagatctccagggattttcagatcctcattcccttcaaatctacaaaggtccccaggctcagggcaatgccaaatgttcttgaagtctgctcccttcttccccrttcccagcatcatcatgtgtgtgggaggaactgagttgtttttatcctgctcactgcctaagtacagcagaagccaactgggagttctattccccaatatgctcattgtacaatgcttagttcctagaagggtgggtagaaaagagctgacaggcaaagaagcagtttatagtagctgcatgtttaaaaactgaaattcatctagacaccctgtgtgaacacatttagattttcagcattgctgtgaatgagaccgtaag

SEQ ID NO: 788225 - DNA, 563 bp, Homo sapiens
gtgtagcatataacacaggtacttaaggcataaacaacacagctcagtcagaaacagcccagagttgaaacaaatactattgtgaccttctcactagggatgaagattcagcagttcacaatgaaattgagattaataaaatgctcatgctttaattaataggaacagagaaaccagactctaaaccattccccattgccaatgagtttgttatgttgataatttgatgacaacttcagagacttaaaagcacagggaggctggggagtcstatctagataaaagatttgctaaatgaaattactgaaggtgaacctggaaacattctgtaaagttagctaaattatctttacgttttttagaaatagggtctcactctgttgcccaggctggagtgcagtggcatgatcttagatcattacagtgtcatactcctgggctcaagtgatcctcccagcctcagtctcctaagtagctgggatcacaggtgtgtgacaccatgcctggctcaaattctttttactttgaaggccctgctagaaattgctgctgctctaattcac

SEQ ID NO: 788226 - DNA, 392 bp, Homo sapiens
aatgctgttatcattcgatatctgcaaaagtgtttaaatctgtcagtacagtgaatgccaaacaagtcctgcataattgtgaacaggctgtaggctcatttctctctttgcgttttgatgactttttgctaaactgaatgcaaaatccccaaggatcacaaggaacagacccctccactcaatgtctggttgccatctgttcttagtgtgaaaagaaaggcgtgggtctgaaagmacagggcctagcatacagacggaggtgctgttccatcagcccctctcctgcctctgttcccagagaatgcaccatgtaagagtcactgagaccaaacacatctcatcctctgtgcaactccatcacttccaaaggaaagtgtttgttgtctgatcaa

SEQ ID NO: 788227 - DNA, 501 bp, Homo sapiens
catacacacttgcttttcctataacttcaaagggttcataaacccctcaaactaatccatccaccccagatttaaaaactttactctacagggcagtagctgggttaatttaatttaaaaatgctcagtataatgtgctaaaatcgcagttccaggaacaaagtatttacttaaaaaaaaggtcaaaataacattttataaaaatataaaatccccaaaactaaatgtcagtgctaaaaataacagcacaaaaaataactctatcatccrataacaaatgttcaaagttagtgaaataatatcctatcaaatatcacatcataagtaaataggaacaaatacatttctctaaaagtaacaaaaaattcttttgaaatataacataaaatctaatgttcataattaaccttaaaacatttatagacagtacacatttctctctttttggtaacttccctaatgtcttttttttttttttttttttttaaagagacagggtct

SEQ ID NO: 788228 - DNA, 492 bp, Homo sapiens
aaagaatcaagtcatatgggaattttggggaggctccttaaaggggaggaaattttttaaaaagggaggtaatgcatctttttttcctccatcttgttgcttgaaacttgactataatggctgaagctccagcctctattctagatcatgagaatgagggtcatgacctagggatggcagaacagaaagctaaaaagctaaagagccacatcagctttgaagtgccaactctgtacttcttctacrtaataaacatacatctctatcttacttaagccatttaatttggattttgttatatatggtgaagttgaatcttaactaagacttgctgaaatataaaagaaacttccctagtgctgctagtgtattttgttttctggaattttccaatacaatttctggcaaactttacataacttaaaatgtgagacaaatcaaatttctaattataaaatatgaacaatattgtgtctagtattttttcctgtc

SEQ ID NO: 788229 - DNA, 579 bp, Homo sapiens
ttttacgattttcaaagcagttattataaacttttagatatattttcacacattcttgtttaaaagagaaacatcacctccatttaagaaaaagtaaatattaacatttactacaaataatagatggcatactgaaatattgaatgataatctacaagtttaaaatttcaaaatgtgggccaggcgtggtggctcacgcctgtaatcccagcactttgggaggccgaggcaggcggatcacaaggtcaggagatcgagaccatcctgaccaacatggtgaaaccctgtctctactaaaaatacaaaaaaaaacagctgggcttggtggtgcatgcctgtagtcccagctactagggaggctgaaacaggaraatcacttgaacccaggaggcggaggttgcagtgagctgagattgcaccactgcactccagcctggcaacaaagtgagactccatctcaaaaaaaaaaaaaaaattaaaaatgtgaacaccaattcacttttaatgagcaatcattttaattatttttaataatagagtaagaaaactttattgaattataaatagcaaaaatatcaa

SEQ ID NO: 788230 - DNA, 564 bp, Homo sapiens
tgattaactcagatagtttttttagttcacatctagaatattatacatcatactagttttaaaaactagtttaaaaaaacataattgagctagaaacaatccaaatatgtaccaatgttcaaaggaattggtagctccccaaatatattaggactcttcactttgaaagacaaaatcttaaagatatgattataatctttaagaaggctatagacgagataaacagatttwtttaccaaattttaatttactagatttagggggcacgccctgacactagagttacattaaagataataaaatactgctttatccaataaagtaaatgtatggaagtcattattccaagaccaaacacaggtttagataaattaatgactataagagtcataagataagtattattgaggacatgtttctatcattgaatgtgattgtaactaattggcatgactatctctttggcatacctcttggtgacatgatgagagacggaatattaggctgggtagatgagggatgtgatttaatgtggtaactcagatgcttttatttcaaattatt

SEQ ID NO: 788231 - DNA, 511 bp, Homo sapiens
gcctgactgtgtgtgagctggaacattggtcttttcctgccttcagacttgtactcagactgaatcttataccattagctctcttggttcttaggcctttggactcacactggaactaacaccattggctttcctcagtctccggcctttgcacttggactagaattctatcattggctctcctatgtctccaccttgccaaatgaagatcttgggacttctcagacttcataatcatgtgagttaatttcatataatgaatctatctatctaacctattggttctatttatctagagaattcttattaataaagatttatgaagaactaaggatgttaaataaagctataattayaaaataacagtgagaacaaaaccacaaacctttcttaatatcagtagaatcacacacagaaagcaaaatagagaaaaacagaaaaacagaaaacaaagcttataaagataaaaaatctataaattcagaaaacataatattgaataataaaacta

SEQ ID NO: 788232 - DNA, 596 bp, Homo sapiens
aaaattcatatcaggatgaaatcaagtagattatatctgtaattttcattaagcagatgtcattgcaaaagtaatatgtagggaaagtgcctgatgagatttgatggcaatgcaatacatgccatccaaagaggcagaataataaattatttggcatatcataacatttttatttgttatgtcttatattgcttgttatttttaatattatcagtaaaacaatagacttgattcactcactttgtattttctacatggtaagaatgttaaatgttatcttttataatatgttaagccatgctaatacttacactgttcattttgcaaacaagttgattttgytcttcatttttctttctaagctcagtttccagatctaatattttaatttgtaaagcactctctctagatgacattttctctatttcttcagcaacctgtaatttttatcaaaagagtaaaataaagtgctttctttaaaatatgatttaaagccttgacagttatattgtaccttttttctaaacagatattacttgtatgttatatccaagtttaaagatgttctatcttgaagaagcatatatagcgtaagt

SEQ ID NO: 788233 - DNA, 501 bp, Homo sapiens
ctacaagccagatcacaacacttctgttaaaaaaaaaaatcccagaatttctcatttcttccctagattctatgtgatctgccactctcaggactcagcatgttcctgctttgctgaccttgctgttcttcccacacaccaagctcattgccgctcatttacatttgctgtctcatctgcttggagcattgcctccagggtctttgcaggtttgtgtcttctcatcctttasgtccctgctgaaataccacttccctgattaccctatcagaaataccaacccttctcacattaaagtggttctgattctgctttgttttccacagcatttagcacaaccagaaatgatttatgttttgcttctgtttataagttctctgattataagttctgtgaggacagagactgtctttgtcttgtttactgctgtctcgagcatctaaaatagtgcctggcgcatgataaacactcttaataatgaataagtgggccaggcatggt

SEQ ID NO: 788234 - DNA, 659 bp, Homo sapiens
atttaagaaagataggaaaaataatatgaaaggaagagctctcatttgagtatggcacaaataacagatttggggctataatagcccgaaagcactattaagttaattttgaagacttagataaatatttaagttactttacgtttgaccataatacatgatgtagtggttgtgtgttgggagagagcggggaggggagtacccacaagaaaagcaagtatgtcataatcaacagttcaatttataacattttctgaaaaatgatatgcagagaacatgaatataggagaacttaagacctttctttgttctgtaatccaaaaaataagcttggatccaaggataaatatggggatatttaataagacatttatttttccatgcttattaggttttccattctacagtaatcaagactgtgaaataataaaaagttatttatactacatttttaactttttacaaacttgtcccacttcctccagagttgtcacttgcttctgtggattagattttyattttattaaaaaatatttgatagtgggaaaataattctgttcataatcatgaaatttagaatatttgtaataaactgatgacggtattagattaaatctttccagatttaacacggaacttcaagtcatggttaattttag

SEQ ID NO: 788235 - DNA, 630 bp, Homo sapiens
cactatggtataaatatatttagtttttaaagctatctttaaaaatgtagaaagctaaaaaattttaaaagccaaaaccccctgcggacaatcattgtaacattaagtaagcaacatttccagtttacacttacccataaatatgctagaaaaatattaccataacaatagtattacataataaaatatcaataattaatattaacactttatagaaaaaaacaaaaataaagtaaaatggaaagaactaaagaactattgaactgatcaacaattcttcagttcaagagakattatttctcaacatgttctcccctaagataaataacatgattttggagcacagtaagaagttggcattagtatgctcctttttacacttttcagcttgcaacaaaatcaatttctctttccttttccccttctctaaaacatgaggaaattagcacttactttctcttaactcctctccctcaaatctcgtttttttcccccctattacttcagtgctgttacggtttataacgttttacattctagtctgtaaccagacacagagttacttagtttaggttgttaacatggattcattcaccactggtccttttaaaacaggtccacctttcttga

SEQ ID NO: 788236 - DNA, 576 bp, Homo sapiens
atttcaggagtgagccactgtgccctgccagcaatactattttagtaacgattgttttcattgagcaattgatttcacctagagggaattccttcactcttccagacagcaggctagcatcaatcagggtctcaggttcatttttcagaagggtggttttgcttagcaatctcccaagtgatattaatcgagggtgaatttgaataagggcagtatctcccagactacttgggctatatctttcgtgactccacttggctttctatttctacctttttattgtttctccaatcctcatctttcagcttttcttttcaaccaatcatttccccctacttttattctttatgaacagctctaggcttggtgagattgctgcttcaaagataattattgtaaagtctgtgctatgcaggccaatagttgcaygcaaaacaattttgagtatgaaggtcacagacaagggcactactcaaaactgagaagaaaacagtctacacttggcacaaaccataaccgaaccccagtgtgctgaaggcattttgccttcacctgcacccgttacatatctaattt

SEQ ID NO: 788237 - DNA, 627 bp, Homo sapiens
cagcattctcaatgacaaacatgagtggaactgggtgtgcctcagatctgcaagttgcagttctgcaagttggccactgcgacctaaagtgtggtaccattttaccactgagcttaagccaccaccaaagtttaagccattctatatactatgcataagggagtacagcagcaggtaaattcactttagggggaaaaattcatcaaaactgcttaaatctgtgaaaataaataaaatttaaaagctgtgggaacccccaaaatcactttaagccttgagacgtgactgkgatctgagtcgtatgtggttataacttctgttctcaaattatagattaactagctttcttatttttcttcttctgtacaatgactagagagaattaaatgacatcatggaaaaaaacctctggccttcttaattaatgacccttattgtatattaatttcctattgttgtcctgctttgcttagaccagatgacaaaaacccacaattactacaccctctaaaaaacatgttaaatgtatccttcccaaaaagaaacactgcgtttaacctatcaaatggctgtaactatgtgccaaccttgtacgaataatgttataattttgctaaacactcttct

SEQ ID NO: 788238 - DNA, 622 bp, Homo sapiens
cttcattcttgaagtcaatgagaccaagaacccaccaattccagacacaccaatacattgatcatcagtatcagtttacaaccttaccagcaataccagtgtcatactgtttttgcagaatggtagattaccagartctcactcagtcattaacagttgattcagtttatcattaattcatatgcccaaaatgtctcccagagcaatgccactcaggtttgcaggcttctattctagtttgtcaggttccaaaagcagaagtggtcttggcaacaaatggcctcaccctttcagacatctgatatgattgagctaagagagacaatatcatctcttgctttgagcctctcttgaggtacaaatgtaatagtggattttcctcattacatagctcatttattcattcatcttcaactgctattcctcctctctccctttatcttttgacccatcctttgccacctctgagagacgtgaggttcagccactgtcctgatccagatgtccagcaacaagattagtccagcaggtgtcacaccctcggctcactcttgctgacatagggtagggttagacaggcacagaactagtggggcatcattaccactaggcaatattgttg

SEQ ID NO: 788239 - DNA, 618 bp, Homo sapiens
tctgttagaatttttagacaataaatgtacatttgttgtataaaaaattaattataaaaagagagaaatgtaattcatataatgtatagagcattgttgtttttctttttttttctggtagttttttttttaatttttttagtatttattgatcattcttcggtgtttctcggagagcgggatttggtagggtcataggacaatagtggagagaaggtcagcagataaacatgtgaaaaaaggtctctggttttcccaggcagaggaccctgcrgccttcctcagtgtttgtgtccctgggtacttgagattagggagtggtgatgactcttaacgagcatgctgccttcaagcatctgtttaacaaagcacatcttgcaccgcccttaatccatttaaccctgagttgacacagcatatgtttcagagagcacggggttgggggtaaggttatagattaacagcatcccaaggcagaagaatttttcttagtacagaacaaaatggagtctcctatgtctacttccctctacacagacacaggaacaatccgatctctctttcttttccccacatttcccgcttttctattcgacaaaaccgccatggtcatcacgg

SEQ ID NO: 788240 - DNA, 368 bp, Homo sapiens
taatatatttcacacacactctttaattacaaagctttaattaaaatatttgtctttgtttattaaggttaatattcccacatgattgggaaatgctaatttttatgatctcccatggttctgcgttttacactgatgttgtattagtctgttttgcattgctataaaggaatayctgagctgggcaatttataaagaaaagaagtttgttttggcttacgatactgcagactgtacaagaagcatggtgccagtatctgcttctgatgaggcctcaggaagcttacaatcatggcagaaggaaaaagggagcaagtgtgtcacatggcaagacaggaagcaagagagagataccagtctcttttaaa

SEQ ID NO: 788241 - DNA, 368 bp, Homo sapiens
taatatatttcacacacactctttaattacaaagctttaattaaaatatttgtctttgtttattaaggttaatattcccacatgattgggaaatgctaatttttatgatctcccatggttctgcgttttacactgatgttgtattagtctgttttgcattgctataaaggaatatctgagctgggcaatttataaagaaaagaagtktgttttggcttacgatactgcagactgtacaagaagcatggtgccagtatctgcttctgatgaggcctcaggaagcttacaatcatggcagaaggaaaaagggagcaagtgtgtcacatggcaagacaggaagcaagagagagataccagtctcttttaaa

SEQ ID NO: 788242 - DNA, 609 bp, Homo sapiens
ccacatttagcccccacaacatcaaatgataattgtcataattaactcctatatttccaatagcaaaacttagcttggaatcattcatttaaaaactaatattctggccgggcgtggtgactcacgcctgttatcccagcactttgggagcctgaggtgggtggatcacctgaggtcaggagtttaagaccagcctggccaacttggtgaaacatcatctctactaatatatatatatacacatacatacacacacacacamaaaaaattagccgggcattgtggcaggtgcctgtagtcccagctacttgggaggctgaggcagaagaatcacttgaactgggaagtataggttgcagtgagccaagattgtgccactgcaatccagcctgggtgacagagcaagactaggtctcaaaaaaataaaaaataaaaataaacaaataaatgacgaattaataaaaactaatattcttaagattcaataattaaaatgttccaagaaacaccttcccggggagtataaatacctaaattatacaatgacaatacttgaatacatgaaagtaaactagcattgccctgggtaaacattttataaatttggcc

SEQ ID NO: 788243 - DNA, 626 bp, Homo sapiens
ttcccaagacattatataaatcattgactagctagtactgttttcatttctacattgacatttggattatatttagcatttttctgctgccaaaattatgtcactgatattgctatgtatttcattgccaagtgcctttcacacactaattatcaattttaaatcatgtgattacatcccactcagtatagctgatatagttaagagggaaaaaactccagggaaacagctgcctcttagttaagatgacaggatcttttagtatagtcatggacatttttttttttcttttaagggaggcaaatgacaaaaattgtgcataattctgtattagattcatcccttaagataccataacatcatggacraaattcacagggtaagttgaaaacaaaatgaaacgaaatataaacataatcagaattgtatcctttaatatttattttccaaaaaaaactggaaagttcatcaacaatttgatgggatagacataatcacaccaataaccattcaaaaactcaaatagtctactcaggaaacaagtgactgactgcaactgcgtgtacatccagctccctctgctcgctccctctctctctttctccacaccctattgctctcagtga

SEQ ID NO: 788244 - DNA, 478 bp, Homo sapiens
ataatcagaattgtatcctttaatatttattttccaaaaaaaactggaaagttcatcaacaatttgatgggatagacataatcacaccaataaccattcaaaaactcaaatagtctactcaggaaacaagtgactgactgcaactgcgtgtacatccagctccctctgctcgctccctctctctctttctccacaccctattgctctcagtgagccattcatgtcccagtatttgagctttttagaaatttatttactaagatagacayagtcatatattattgttgctggacaatggatctatcaatcagaaatatctgtaaggttggaaaggattaattaattcaatttatttttattaaatattgagtacatatcaggttttggagatagagtagtgttttgttttttttttccttaaaaaaaaaagacagatgttctctgccctcaagatgtttaaattggggctgggcccaat

SEQ ID NO: 788245 - DNA, 594 bp, Homo sapiens
acctacaaaaacaccattacatacatagaaaggaccatagaagtccttccaggttcaaattcaaattctttaatcagcttcattctgcagaactttatttgcctacgtgctagactcactgttctcatttcccaagttaaatatccaatgagatgcacagcccttgccatccatctgtcctgctttaagttcatgtcagtgtgcaaattcctacagacatcctgagagccatgaacaagacttccttcttttcacgacagttttgggcgtttgggagttttytgggggtgggaggtcttgagttggctttatcatcagttcattgagaacatcattgagaatgccaatttcagctggagaaacaactcatatgaatgaattgcctttacctgaattttaaagacttttctgaaaagtattatttgcaacagggtatctcttgggtattaaagaacatttttacagaggctcactgcagatcaacgagaagtcagcccacagctccaggcatctggagtgtggtgaaaacaatataaaccatcaacatgataggatgtagtcagcctcctgcctagcatgctgtcacattcagag

SEQ ID NO: 788246 - DNA, 594 bp, Homo sapiens
acctacaaaaacaccattacatacatagaaaggaccatagaagtccttccaggttcaaattcaaattctttaatcagcttcattctgcagaactttatttgcctacgtgctagactcactgttctcatttcccaagttaaatatccaatgagatgcacagcccttgccatccatctgtcctgctttaagttcatgtcagtgtgcaaattcctacagacatcctgagagccatgaacaagacttccttcttttcacgacagttttgggcgtttgggagttttttgggggtgggaggtcttgagttggctttatcatcagttcattgagaacatcattgagaatgccaatttcagctggagaaacaactcatatgaatgaattgcctttacctgaattttaaagacttttctgaaaagtattatttgcaacagggtayctcttgggtattaaagaacatttttacagaggctcactgcagatcaacgagaagtcagcccacagctccaggcatctggagtgtggtgaaaacaatataaaccatcaacatgataggatgtagtcagcctcctgcctagcatgctgtcacattcagag

SEQ ID NO: 788247 - DNA, 612 bp, Homo sapiens
ttaacaggatgcagtatgtactctgaattagtgaccaacaaattgttttttctcccaaagccaggacacgactagtctggaaaccaagaggaggatgtggcaaaactcaaaattaaaattaatgatttactctcaaaagcatgtgctcagtctccctaaatctctgagccctgcagatctgttttaggatccagtggagaaagggtactaccagggatcataaaagcaatgacactgaattggaagttaagactgccacgtggcaatcaacccaaatgcccatcaatcaacaagtggattaagaaactgtgatacacacacacacacacacacacacacacacacacacacatatgatggcatacttctcagccataaacaggaatgaattaatggcatttgcagtgacctggatgagaytggagactatcattttaagtgaagtaactcaggaatggaaaaccaaacatcgtatgttctcactcataagtgggagctaagttatgaggctgcaaaggcttaagaatgacacagtggactttgggaactcagggggaaagggtgggaaaggggtgagggataaaagactacaaacagggtgcaatgtgtact

SEQ ID NO: 788248 - DNA, 496 bp, Homo sapiens
cagataaaatcacagtgcctggcactcaatcaaaaattagaaggcatgaaaggaagcagaaaaacacaagccattaggaggagaaagacaaaaaagacgtagagatgttaaagatgatagaattagtggctaaggacaataattgttatttcatatatgtccatataaatagatcaagattaaacatcttaagtagagacatggaatrtataaaaaagacccagatcaaatagatagagatggaaactcaatgttctgagatgaaaaatattttggatgggattaatgacagattaggcattgcaaaaaaaattagtgaactttaagacagcaaaagaaactattcaaaatgaactatggaaagaaaaatgactgaaatgaaaaggaacagagccctggaacaaattcaagtgactaaatatgtttgcaattggaatccctaaagattaggatgagtaaaaaaatatatttgaagaaataatgaccaaaaaatttc

SEQ ID NO: 788249 - DNA, 458 bp, Homo sapiens
gatgaacctgataaagatatgaaaggcctgtacaccaaaactacaaaacatggccgagatttctgaaatctggccaggcatggtggctcacacctttaattccagtactttgggaagctgaggaaggcagatcacttgagcccaagagttcaagtccaacctgggcaamatgacaaaaccccatctctacaacaaaatacaaaaattagccaggcatagtggcacatgcctgtactcctagctacttgggtggctgaggcaggaggatctcctgagcctaggaggttgaggctgtagtgagccatgattacaccactgcactccagcctgtgttgacagactgagaccctgtctcaaaaatatgtatattataaataaataaaaagacttctaaaatcttaaagatctaaataaatgggaagctataccatgttcatgaattgagagattcaatattt

SEQ ID NO: 788250 - DNA, 529 bp, Homo sapiens
ggttgaaaggtacaatgattgaaatgaaaagtttatcagaggggctcaacttcttgtgaaagaattagcagacttgaagatagattgattcagattatacaatccaaagaacacagagaaaaagaatgaagaaaaatgaacagagtctcagagaaatgtgggatatcattaagcacgccaacataaatgtaatgagagtaccagargaacagaagagaaaggatttatttgtatataaaaaccataatgacctgacacatcaattagaatatctaaaattaaaaatagcagccatcccaaatgttagcaacaatgtgaagcaactacagctctcatacactgatgatagaaatgtaaaattgtacaactactttataaaacagtttgacaggtttttaaatggttacacatatatttattatataatgcagcgattcctttcttaggtgtcttacccaagagaaaggaagtcatatgcccatacaaatacttattcataaacattcctaacagcactatttgtaatagt

SEQ ID NO: 788251 - DNA, 529 bp, Homo sapiens
ggttgaaaggtacaatgattgaaatgaaaagtttatcagaggggctcaacttcttgtgaaagaattagcagacttgaagatagattgattcagattatacaatccaaagaacacagagaaaaagaatgaagaaaaatgaacagagtctcagagaaatgtgggatatcattaagcacgccaacataaatgtaatgagagtaccagaagaacagaagagaaaggawttatttgtatataaaaaccataatgacctgacacatcaattagaatatctaaaattaaaaatagcagccatcccaaatgttagcaacaatgtgaagcaactacagctctcatacactgatgatagaaatgtaaaattgtacaactactttataaaacagtttgacaggtttttaaatggttacacatatatttattatataatgcagcgattcctttcttaggtgtcttacccaagagaaaggaagtcatatgcccatacaaatacttattcataaacattcctaacagcactatttgtaatagt

SEQ ID NO: 788252 - DNA, 542 bp, Homo sapiens
agagcttcgaaatcaaacttaatgaataaactggttgatgagtgacttttttttttttttttttttttgagacagagtctcgccctgtcgcccaggttggagttcactggcgcgatctcggctcactgcaagctctgccttccgggttcacgccattctcctgcctcagcctcctgagtagctgggactacaggtgcccgtcaccatgcccggctaattttttttgtatttttagtagagacggggtttcaccgtgttagccaggacggtctcgatctcctgacctcgtgatccgcccgcctcagcctcccaaagtgctaggattacaggcgtgagccaccgcgcccagccgatgagtgactttttaatatgcaagtaaarctggatgcttttgataggtcctggttagtatttagccaacagggtatgcatggattcgcatgtgggaaaagggttgctatccttcaaaatgcatgcctgagatcttcagccattcagaagacattttttaaaccagtaaacagcgttgggcctgttataaa

SEQ ID NO: 788253 - DNA, 602 bp, Homo sapiens
aattcagactctcaccaaatagctgttcaaaatgtagacaggaaaaaaatattgcagaatttgtacaaaagaaaacattacaacataagcctctaaagtttgcctctacagcttttttttaatgagggagaagtttggtaggtgtactgtttttgataaacacaccacataccagaaaaatcacctcaccaaaagckttgtctgtaaatcactctcttaatcctaaaagagctttatgttatacaaatcatctgcagttctctgtagactgtcctaaacaatacctcagagctcttggatctcagccccgaggatggcctattcagcagaaagtctggtcagcctgctgaagctattttcttcagcgtgtcaaggctacagtaatctgctagaaaacaagctgtccaccccttgtagatttcagtctctgattcagcaaatgattataaattatactcaaagctaaaagccaaagaatagggaaaaaaagaacataaaagaaagttctagaatgtgtaggattttggcatctcatcatttcatgctctttaaaaagtgttttcatttaaaaatacacatagaaattagtctcttgaaaatgc

SEQ ID NO: 788254 - DNA, 649 bp, Homo sapiens
acaaaatgctgctcaagtaaaggatccattcaaacatcaagatagatcagcagattttcatgtaacagagtgcaaacaaaaaatttataagattccagattccacatcataacttttaagaaattcaagttttgatgtaataccaagaaaaatatccacaattatattaaaaggctattaaaatactcctcctggctgggtgcactggcttttacctgtaataccagcactttgggaggccaaggtgcatgaaacacttgagaccaggagttcaagactctgttgyccaggctggagtgtgatgccagcatagctcactgcagtcccggactcctgggctcaagtgattcgcctgcttcagtctcccaactagctaggactacaggcatgtactaccatgcccagctaattaaaaaaaattttttttcatagatgaagtcttgctatgttgcccaggcttaaaatgccctccactttttaagccaattatctgtatgaggctgattttcttcatatagttcaaggaaaacaacacattgcaaaaaaactgaatgcccgttaacatccctcaggtgatcttagaactcagctatcttctattaagccagatattagaagtttgcaaaaatataaagcaatgctactcttc

SEQ ID NO: 788255 - DNA, 519 bp, Homo sapiens
ggagacagagtcttgctctgttgcccaggctggagtgcaatgccacgatctcagctcactgcaagctctgcctcccgggttcacaccactctactgcctcagcctcccaagtagctgggactacaggtgcccaccaccacgcctggctaatttttttgtatttttagtagagacggggtttcaccatgttagccmggatggtcttgatctcctgaccttgtgatctgcctgcctcagcctcccaaagtgctgggattacaagcattagccactgtgctcagaccatcttttaacttttaatctatgtgtctttatgtttaaagtggattttctatagacaacataaagttggggcttgttttttaatctactatgagaatctctgtttttaattggtgtatttaagccatttatagttaaagtgattattgatatggctggattaatatctaccatatttttcactgttttctcttcattgtctccctttcttttgtcttctactcttcttgtcttctt

SEQ ID NO: 788256 - DNA, 519 bp, Homo sapiens
ggagacagagtcttgctctgttgcccaggctggagtgcaatgccacgatctcagctcactgcaagctctgcctcccgggttcacaccactctactgcctcagcctcccaagtagctgggactacaggtgcccaccaccacgcctggctaatttttttgtatttttagtagagacggggtttcaccatgttagcccggatggtcttgatctcctgaccttgtgatctgcctgcctcagcctcccaaagtgctgggattacaagcatyagccactgtgctcagaccatcttttaacttttaatctatgtgtctttatgtttaaagtggattttctatagacaacataaagttggggcttgttttttaatctactatgagaatctctgtttttaattggtgtatttaagccatttatagttaaagtgattattgatatggctggattaatatctaccatatttttcactgttttctcttcattgtctccctttcttttgtcttctactcttcttgtcttctt

SEQ ID NO: 788257 - DNA, 618 bp, Homo sapiens
agaggaatggcgcatgattcaacttaatgatattgcacctaagaatgtttctaactggtaagaaaacgcagtatcaaaaatccaaactttaaaacaagtcaactaggtagcagttacaaagatgccttgatttacaaaaggattcaccagaggttttcttttcagcagctttgtaatcctttactttccccattgcgtttcaaaagctatttacaaatttcaggactctatttcataaagcaaatgtcgtttttaaaatgtaataactctaatgataaaagccactttagaaatattgggaaatacaaatatttgaaaaacaaaaaccatgtgcaatcccagcgttaatactctcactattctggtacatttccttggcatcttttaagcaccacttatgcacatcgatgygcgggtcttcggagactgtatttaactcctcggtttcaggcatccggggcggccacccgcgggccgcggtccccagcaggctccggcgagactccttcctttcttttttctgctccacctccctaaaccttccagtttcagccacagatagtctcttccacatatagctagcttcagccctcccacattccatctcaaaacaacaaa

SEQ ID NO: 788258 - DNA, 565 bp, Homo sapiens
cttagagacagtatctcattatgttacccaggctgaagtgcagtggctattcacaggcacgattatagctcactatagcctcaaagtcctgggttcaagcctcctgagtagctagaacttcaggtacatgccaccttgcctggcttcctgctttcttattcactaagaaactttgttctctaaaatcatagattagagacaacttcgtgtttgaaattacatcagtaacaataaaatatcccacctttgcttgaaggacctcagtcattccacacagagaattggcctcaatttacaacccagatgtcaagcttctgataaggggtttccagayacaaaactccatcgctattttaacttcatagtctccaaggaaataggcccttcatccactttgcagtctagacctagagcctgtgtgttgatggcagcagcaggccgtctggagcagccactaccatcattgacatacagccttgttttgctttgagtctaccaaaatactgcttatttaaatttcatctcaactccacacttccccagaatcctatcactctatctgggg

SEQ ID NO: 788259 - DNA, 584 bp, Homo sapiens
tttgaggaagaagaaatatctaataaaataaaaattgggagattataattgagtagagcttaattgctatttctatctaacaggaacttagtgttacttactgatggctttttgaaatgggatcttcagatgaaaaggaagcatagaaactttatgtagaagatttagatgaatatattttagagagaaatagaaaaaggtacatgggagaatgccaaagggaactgtttatttctttttgttgctggaaggaaggtattggaaatcatgcagtgatgagataaatgaagtgggtggctttttgcgatatccagaataatttaagaaatcatagctggatgtgggkacctgtagtcccatagtcccagcttctcaggaggctgaggcgggaagattgcatgagcccaggagtttgaggttgtggtgagctatgattgtgcagctgtactacagccttggtgacagagcgagaccctgtctctatttaaaaaaataaaaaatcacagtggtttgtgtgaggcttgtcatgttttgtttgggtgatgaataatgaaatatggacatgtttactggatctttaaaca

SEQ ID NO: 788260 - DNA, 611 bp, Homo sapiens
attgtgtagttctggagatcagaattttgaaatgtactaacagcagagtgtacattccctgtggagcctccaggggagaacctgtgttcacctttgccagctcccagaggccacctgcattccttggtgcctggccccttcctccatcttcaaagccgacagtgtagcatcttcaagtctctatctctggcctctgcgtctatcctcacatctccttctctgaccgtgaccctcttgcctctctttcccatattagaactcttgtgattacatgggcccatggggtcaatccagtgtactcttcccatcacaagatctgtaccgttaatcgcatctgcagagtccatttgccatgtaaggcaacatcttcacatcccaagggctaagacgtggacagatttggggggatggttattctgcctgccatgactrtgcagggccacggtaagccctcaataaatgctttgtctaatggttataaaacctggattaaggtccttaataacattgaattatttgcaggattctgtatttgtgttccatggctgtctcatcctaccacctggcagagcgcgccacacatcttgacagactctcatgcagttcattca

SEQ ID NO: 788261 - DNA, 539 bp, Homo sapiens
ggataaatcaggcaagatctttgttcttgataaaatttatccttctgtgtaactacccagtgagcttcacagtctcctcacagataaatgtcatttttattttgaaatgtttatatctgctcaacaattaccgcgctcatgtcagtgtgctgaaatgagatcaacccccaaaccagttatcttaattgcaagtacagattttgatactgaatgtatttcamcattctttttttgttgttgttctgttctttgggataaataatagataacacaaaacttccaagtcccagtgcaggatttcgaggtggttgtgctactaggcgttatattagtgtcagagacctgacaaaaccagcctcttttctacaaatccaagaaaagccttctttgtatcagttctgcacatatttttgtataattaccattgctcattgcatcagcaaatcctgccagctctgtgttaaaaatctttctagactattaacgtatttcaccatctccctatcatcaccctggaccaagccaccatcatctcttgc

SEQ ID NO: 788262 - DNA, 625 bp, Homo sapiens
tctattctaatcatgggcaggagtcatcattcctttgccctgatgcatttttttggctcaacacagcaaccctatttcttacttccgctgctggggtagctggctggtctgccttctgcttgctgcaattctcaggcaggattcagactcaagatattaaaattccccagttgcaggagtcccatttgaagctgagtggtcctgtggaagttgaggtgatgaaagcactcactccattcctccttctaggtagtggtgaatggctcttcgtacactggcaactctgtctacaaggtctttctcacaaattctctctggacattttatattctcggtgaggaggaagtactgaatattatcttgagcatctaragttttgcaagttctattgattgattagttcaacttacaacccatttttgaatcagacatccgtcattgtaggctaaaaatgagacaaacttttcacctgacagaaaataaaaacatatatggttttgcagaaaagaaaacaaaaaattaaagcataattttaggcaaaaatttatgaatcattacatatggcttttatttaacaaatttaacaaacactgttgctgcttttccaagaactttatagactaac

SEQ ID NO: 788263 - DNA, 656 bp, Homo sapiens
cagtgctactgctacctacaggatgtggtagctgcatcctcagaagactcaccagtgctctcaaggccatagcacttcatgttcacctccacatgacacataaccatctcccttctttgtgccttagtttacctttctataaaatgggcatagtaatagcatctacttcaaaatgttgccaagtggattaaatttggtattatgtaaagtccttggkggaatggctaataaaaattcatggttattaatagcatcgggtagttaattctcactcaagcaagtctccggctacatagatctctgagatgtttaaggaatagaatcagctatgtcacatagctggattcagaaattgtgaaatgcctcttcttagctttaatcttgctcccttcttaactgtatttcaaggccaccaaggtgacacatgcaagctgttgatagttaggttttgatgtacacatatacacacgctgaacattaaatagatattccctgcaaaacactaggtcccagaaaacagtctcctctgtatttgatgaaataatttcctttctaggatgatactttaaaagacctgaccttcactgacatcacccacatgccagatgagattagtgagccacatagcaaagtttctgatatgaaatagtaataga

SEQ ID NO: 788264 - DNA, 598 bp, Homo sapiens
ccagggtcacaaggtcaggatctctctaaagtacactatgcctgcaggaagcaacagtgccaccacccccaatggaactcagaagcagatagattactgaaaagagctcagacagaaattgatttttcttatctaaattatgggccacgtgaaagttttcaatgcactttgaattataaggaagctgtacttttctaagcataaataggggtgagagaagtttgtgcccctttttatcttatcatcctaccttaatcctaaactttcccacctcaaagggacacacagaatgaaatgttgccttgccattttctctccagattctatcaccttttatcatttacatacggccaactgaggctgaaaactactgcagcttcctcaatacttgcctgcacacaygtgcagtaaatgacaccaatgttaaatgtatcatttagtattcaaggagatgaatccctactttcagatcacacattcattggtacattatcctgaatctccctacagagcactatattctttttctcaatccactaaactctgaactatggatatttcttcccaaggattctaggaaatagtcttgtgatatggc

SEQ ID NO: 788265 - DNA, 500 bp, Homo sapiens
actttcgaagaagctgtttgaatgccagtgaaacgaagtttgattaatttagataagaggatatgccaaacatttcaattgcacttcaattttccctacttttttttttttaaagagcattttcactgtgttgtggggagcagagggtattccaagccccatctaaagaggcatgtggtgtctgacatmtaggccttgcccagtaggcaatccagtgtgacaaggaaagacagaactagctctttgtattccagcaggttgaatgcagcctgatctctgagtgcatgaccagagctagaaaggagtagccaacctgggtcctaaaacttcagactgaggaagcaacccctggccctgagaagtggtatctttcatcaggtatgacacttatggaagaatcagcctcacaaaccatgctgacctgtgccaggagccaggcatggaaataaataaagaccaagcaaatgagaacagataaaggctatttattcagagctata

SEQ ID NO: 788266 - DNA, 632 bp, Homo sapiens
cctatgaaaaattattgtattatcttttagtggttatcagcctgggatcagagaactgtagactatatatgattagtttccatagacatattatgttttatgttttatgcatacacaaaatattattctgaatagagactatgggtctcaacaaactgttaaaaaaatcatcggggcaccaaaaaaaaaggctaagaaatcctatgaaatcaatrgtctcattacaaaactctattcttgaactcattgatatatttgaaatgtcgagtacctaggaaggcctaaggtagtttgtgggaaaaatggagaagatcaagatgtgtaaggcatggtcctgggtagttcaagtctacttggggataataagccacatatttttatgtgtgcccctcataaaagctagacaaagtcactctccaccacatgttcctgttctattttcatcagagcactaataatatttgacattatctcatctgtttccactttacttactgtctgtctctcctactagaatatctatctgtcttattgactgctaaatgtccagacctaaaacagtgcctggctcataataggaagtcaataaatatgcaacacatgtttacatgaataaatgaacaaatgaaaag

SEQ ID NO: 788267 - DNA, 600 bp, Homo sapiens
gtagataatatatccacatggagataaaaacagaggaaggtcagagattgagtgtctgaggcctccccagccatacagaactgtgagtccattaaacctctttccttcataaattactcagtcttgggtatgtcttattagcagcatgagaacagactaacacagggagagagcaaaaagtcttagttttttataaaytaatcccagagtgatattgcatcacttttgccatatgccatttgttaaaagagagtcaccaagtccagctcagagataagggaggagattacacaagggcatgaatcccaggaggtggaatcaccaggagccacctgcacaccacatctattcttgaacttcatctccgactcctctcacctttgtactccaggtgccagacactttggctgccttcctgtcctttgaatacactaagcttgactctaccttagggccttctccctaactattcctctgcctaaaaccccttcctccccagctcttcgtgtggctgactccctttcaggaattcatgcatctgctcagacatcactgccttctgaacacactaaccacagtatgatcttcacccatccctct

SEQ ID NO: 788268 - DNA, 600 bp, Homo sapiens
gtagataatatatccacatggagataaaaacagaggaaggtcagagattgagtgtctgaggcctccccagccatacagaactgtgagtccattaaacctctttccttcataaattactcagtcttgggtatgtcttattagcagcatgagaacagactaacacagggagagagcaaaaagtcttagttttttataaactaatcccagagtgatattgcatcacttttgccatatgccatttgttaaaagagagtcaccaagtccagctcagagataagggaggagattacacaagggcatgaatcccaggaggtggaatcaccaggagccacctgcacaccacatctattcttgaacttcatctccractcctctcacctttgtactccaggtgccagacactttggctgccttcctgtcctttgaatacactaagcttgactctaccttagggccttctccctaactattcctctgcctaaaaccccttcctccccagctcttcgtgtggctgactccctttcaggaattcatgcatctgctcagacatcactgccttctgaacacactaaccacagtatgatcttcacccatccctct

SEQ ID NO: 788269 - DNA, 605 bp, Homo sapiens
caaatgtttatttcctgccatgcatgcctgctgttcatgtctactgtgagttggctctatgtcatcctctctctgggaccaagactgatggggagcactaacttgaaaaattgcatgtcacttcagcagagaacaaaatacatcccatggatcgcatactggcaattggatgctgtagcccaggagtgacacacatcatttcctcttccaactcactggccagaactagtcacacaaccctgcccaaccacaggacagcaaggaaatgcaatgggatcatgtgcctggaatgagagaagtggaacggcactaaggactaccaaagtttattaagtattgaagctgctaaataaggctattcaacaggggaggggaaatgaggggtggcaagtaaacaggkgaaagagttttgttgttgttgttagcatttggattttcttaaactttgaaagattgaagtatgaccatagagataagtgtgcaaatcataaatgtacagctcaatgaattatcagaaagtgaactcatttgtaaaattaccacctagatcaagaaataaaatattaccagttccctagaaacccacgttgtgacccctccaattt

SEQ ID NO: 788270 - DNA, 607 bp, Homo sapiens
ttacctcatgctctctagggggtgtgagttcctgtgttcccttgagcatcactgaataccaggggtatgaggattaatgtcgcccatgacggatgtatctgggccatattacattagtcctctggtcaattagaaaggttgagcctgggctgggctggatggcagagtggggtaaagaggggacagtgagagacagggtgtggtcaagagacagcaggaggaagccactgcaccctgtggtggcaaaggcctcccctagctcctcaatcatttgacttgctattcatttctccrgagccatctgtcctcacagtcctgacgcctgactctaggaactttagccaagattctgactccagcctttacttcataggaagtttgaatttgaattcactgttaaaaaaattatacaggctgtgatttttggatgctggcatcattatttaaaatttacttacttagattaatattaaaaattaagccatgtatttgattgattttatagatcagaggtcaaatttagccaaccagtggcttaatcaagtaatactaacttggagacagccttttctctttcctccttgttgatttcccatatgattataat

SEQ ID NO: 788271 - DNA, 611 bp, Homo sapiens
atgattcaattatctcccactggatccctcccacaaaacattggaattaggggagctaaaattcaagatgagatttgggtagggacacagccaaaccatattattccacctctggcccctccccaaatcttacatcctgacattttaaaaccaatcatgccttcccaacagtcccccaaggtcttaactcatttcagcattgactcaaaagtccacaatccaaagtctcatctgagacaatgctagtgacttccacatatgagcctgtaaaatcaaaagcaagctagttacctgctagatacagtgggggtacaggcattgaataatatacccattttaaatgggaraaattggctaaaacaaaggagctaaaggccctatgcaagtctgaaatccaatagggcagtcaaatcttaaagctccaaaatgatctccattgactccatgtttcacatccaggtcacactgatgtaagaggtggcttcctatggtcttgggaagctccacccctgtggctttgcagggtgcagcctccctccaggctgctttcatggcctgcagcttttccacagacaccgctgagtgtctgcggcttttccaggtgcacggtc

SEQ ID NO: 788272 - DNA, 634 bp, Homo sapiens
attcctttgcatacatgtatgagtacgtctttaagtatctgatactatttttttgttgttgttgttagtggctctactattatcccaattgggcgtagagcctcattgcctctctcatcctttttcataacaatggacggcacatcaagttgttagtttttcatttgcatccttttcttttgtaatctttcactggagaggaagaaataaggataataataataataataactattagaacttgttattgaatgcatacaagacattccctagaaaaatcttagaaatattggtggtggcatgagtactctgtaggtgactgcactgttattgggactctacatacattatctttaattcttacaattagacagggtgtatttattacatccatttttctaatgaaactgagactcaggtcgaattagtaatttcaccaaagttacaaagtttaagtattaaagccasgctaggtgcctcaacgctctaatttctaaacttagactctatcttcaaatttataatgtctctctaatgcatgacagtctttatatgctgattcattatgtcttccaaatccttctgtatctactcagtgtccactagttcaggggagctactgaaaaacctccca

SEQ ID NO: 788273 - DNA, 620 bp, Homo sapiens
agaagtgcaggaatttatcactatatgtttcccactgaatcaaatagattaaaagtcctagaatattactttacatctagagaaaatataagccagaaattataaatgtctgagactttgagagacttaaaatggtccttccttctcttctgtttataagcatggggcacaaaaagctacacagcctgtaatgatgatgcacttttatttaatgcccactgcagacttcacaaacaggggagagccaaagaccatgggaaaaaaacaatggatttgaggtgcctctgctacagagcaagatcagggcctattcaaggaaygttcctatcccattctcatctcccagggtagagggtcctcaccacctttacctggtgagatttcagaactgttgtgaatcacattggtgtctgccatgtctattctatgattctcttcatatggaagtgtttaatgaatgcagtcattctgatcctgttctactgctgtatatttggggagcatgaaaaactaatcttttaagctcatgcttgactagagcaaaacaaatcataatcagattttatgtggagtgtactccattatcacagctggaaagcctgggctttgagcttaatgcc

SEQ ID NO: 788274 - DNA, 540 bp, Homo sapiens
tgagctaggcaaaacataaagaactttatgcattcattcactgcgttattctaaggtttattgcttgctaagtcttgtgggaggaaaaaagatttattctaagagatttattcaaaggtcttttacctacaaggagtttacacttctgcaggttataaacatgtcaacaattctttggcacttaatttttattcttcagcctagattaaggtttttttacatacttatcaactactacacaaaaatcaaaacccctccattcttaacttttaaatacgtcctcagtaaaggagacaagaccagaaattatttcacagaaratatttacaaaaattatagccaagacataggagacaatttagatatgctacactataaaaatggctaccatgggtattttgcttgttggatcccagtatatttggtctttattttagtttaacaggtctcacataaagtcatctactaaaaacacttccattctttaagtccagaattctaagtagaaaaagaaagcattctgattgattcacagaaatc

SEQ ID NO: 788275 - DNA, 628 bp, Homo sapiens
ccttcttcttcatccctatacttaccacatcccaccctcacccccagcaaacctatgtgaactcaagaggtggtagattgaaagaagcttcaatgaagggtacatatgccttagactgaattctgatcaataaatgtaagttaattaagtaaaagtcgggggaaagaaggggcttcaagctcatttatagccaagaagagttagagaagaccatagcattttacactttagaaagatgatttcagaagaagggatatgatgtgatgggccaagagtctaaaatgaaaaatagctaaagaggaattttcaacagtgccatcacattctcagaaaagaagaaaagggccaggcatctagacacctgtgtaactacatgggataaaattttaaaatggggcagaattgttacagaaatactgagttacacttaataagcrcatttctctttgttatatcagctattctttatagcagctctgtgattttggtccaacatggagtagtgaccctacttcgtgaatgaggaaactgaggcccaaggattttagggacttgcctaaagtcacagtgctaataaaaggcagaattaagtttcaagagacctaggtattatggctccatagtgtag

SEQ ID NO: 788276 - DNA, 552 bp, Homo sapiens
cccatgttcatttcagctcaattcacaatagccaagatacggagtcaacctcagtgtcaaacaacagataaatggatttttaaaatgtgatatatatatacaggaaatactatttaaccttaaaaaaagaaggagatcctgttatttgtgacaacatggatgaacctggaggacattatgttaagtgaagtaagccaggcacagaaaaacaaacactgcatggtctcccttatatgtggaatccacaaaaaaatatctcttagaagcagagagtagaagaagggtggttactagagcrtgggagggatgggggaagaaattggagagaagttggtcaaaggatacaaaacttcagttaggagaaagaagttcaagaggtccattgcacaacatggtgactatatagtaaatgtattcaatgtattttacacttgaaaattgctgagagtgtagaatttaagtgttctcaccacaaaagaatgcaaagtatgtgaggtattagatatgctaatgggcttgatttagccattccacaatgcatacatatatcaa

SEQ ID NO: 788277 - DNA, 646 bp, Homo sapiens
gagagtcctctcaatttttttaaccttgccaaaagctgacattcagcttcattggcacagatccttgcttcacagagatatgagctatcgaatcaatgattgctttgtaacacggtttgccatccattccgtggacctaagcatagcatgcaaatgcatcattgaacaaatcccaaaggcataagactgtatgaaaggaaggtaaaataggaaaacatagatggagatgccaggcctaactcatccaccctacataaagcaggcatctctgagtattggctggattcactagaaactcagtgcccatttttcttttttttytttttttttttttttttttttgagatgaagtctcactcttgtctcccaggctggagcacagtggcgtgatcttggctcactgcaacctctgcctctggggttcaagcgattctcctacctcaggctcccaagtacctgggattacaggtgccaagcatggtggcaggtatatttttgtatttttagtagagacagggtttcaccatgttggccaggctggtctcgaactcctgacctcaggtgatcacccgcctcggcctcgcaaagtgctgggactacaggtgtgaactaccacgtctgacctagtgtccatttctctaatcag

SEQ ID NO: 788278 - DNA, 499 bp, Homo sapiens
tttgaggatgaaatgagttaatttttataaaatacttaggatgggatttgaaacataataaattatcaatagattataagctctgttattttaagaaaatagtgctcctcagaccttactttagacaactctcctctagagtataaaatagtctatagagagataaactaggaattctattaattatttttaattggttattttaatacataataaagcaatgttatgtatagattcyatagcttctaggtcagtttttactataagaacactaaaattagagctttgttttaatagaatagcttaggaatttgaaaaactttgaaattgtctcgcttctcatagagcacgtcttccctatacgttcttaaaatattccttctatgaacatgaattaaatgattgcctttaggtcatggttaaaatacacttttaccagagagacaaataaaatgggtacagcccatatgctttaattagatttttttgaaaagctttc

SEQ ID NO: 788279 - DNA, 601 bp, Homo sapiens
ggtaccaatatttcatttttctttacggaatatgttactgaaacaccaggggtttggtctaggtcctgctgctcactgcacagaaagccaatcactgagacagtgagtattgccaggcaagaaggctttaatcaggtgctgcggcccaggagttgggaaatcagtctcaaatcaactgcctgagtgactaaaattaaggctttatatagcagagaagaaatgtaaccatgcatggaagaacaagagttagggaggagcaaagaagaggagtcagtcaacaggaagcaggtagtgggttaggcaatcatgacaaaagagtggtttcacctcccattgcccagatgctgtgatttggtaagtttcaatktcttgctactatctgggaggcctgatggttggatgagaaaggaactcagagaaaacaaatgtaacttactcatgtttcaagactgggagggtcaatttctatgtctattcaaaacaaccatacacatcagtcctatgggacaattgggctggtttcaaatactcattgcatggatatatacaatcttttaaaaatcctttcacctgttggtggacattggattgtttctacttt

SEQ ID NO: 788280 - DNA, 557 bp, Homo sapiens
tttttttttttttttttttttgagacagagtcttgctttgtcaccccaggtagagtgcagaggtgtgatctcagctcactgcaacctctgcctcctgggttcaaacaattatccctgcctcagcctcctgagtagctgggattacaggcacgygccaccatgccaggctaatttttgtttttgtttttttttgtagagatggggtttcaccatttggccaggctggtcttgaactcctgaccacaggtgatctgcccacctcggcctcccaaagtgctgggattacaagcatgtgccaccgtaccctgctgaaagattatttctaacaggcttgtagagaaacgtcggttcatgtaaattagaaattatggggccactttgccattcttcacacctgcaatgaacaggtgtttatctgcagttctgacttatctcttgaactccatttgcatgttatagtgggatgcagctgatgccctgtccagatcttcttcaggccactacatctatatatgcattcatattccagtggctgtgagtgttggctgttggttgac

SEQ ID NO: 788281 - DNA, 594 bp, Homo sapiens
tcccttctctttccttcttcccttgcttccttagagattcctcctgcaatggcttcctcaaaaaagcattttcataagcaacctcatgtcagcctctgcttccacagaagccaatctgagttaagcagctgtttaacttagcatgtccaacataaaattcttgttttcttctcatcccctgcccctgaackttctcctttgcctgtctttcttatctcattgaaagtaacaacacaagtatcaagtgaaaataaaagaatcttctctgatttctttctttctaatgtattattaaattctactgatattaccaatatctattcaaataccaacctagtctaagatactatcatctgtcttctagacttcaactgggttcctaacactgatggtattacacaatttttgcaatgaagtcttacccacctataatccattttccataaagcagcattatcattttctaagtcacacactgtagttttaatacaatcccaaactaacaagcttgaagaaataaaattattgttaaaattgtaaaaattacggagtcttatatttaactaatcatggtacctttcctcaatatcaatt

SEQ ID NO: 788282 - DNA, 594 bp, Homo sapiens
tcccttctctttccttcttcccttgcttccttagagattcctcctgcaatggcttcctcaaaaaagcattttcataagcaacctcatgtcagcctctgcttccacagaagccaatctgagttaagcagctgtttaacttagcatgtccaacataaaattcttgttttcttctcatcccctgcccctgaacgttctcctttgcctgtctttcttatctcattgaaagtaacaacacaagtatcaagtgaaaataaaagaatcttctctgatttctttctttctaatgtattattaaattctactgatattaccaatatctattcaaataccaacctagtctaagatactawcatctgtcttctagacttcaactgggttcctaacactgatggtattacacaatttttgcaatgaagtcttacccacctataatccattttccataaagcagcattatcattttctaagtcacacactgtagttttaatacaatcccaaactaacaagcttgaagaaataaaattattgttaaaattgtaaaaattacggagtcttatatttaactaatcatggtacctttcctcaatatcaatt

SEQ ID NO: 788283 - DNA, 584 bp, Homo sapiens; identical to SEQ ID NO: 748260

SEQ ID NO: 788284 - DNA, 658 bp, Homo sapiens
gatgtctgtgacacagtatcatgtttcaggacaacgacacaaatgctagtctcatttgatgacacaactgcctattttgtttatgtgttatttcattttctttttaaaaatggcgcaatctatttttctaacatctgggcatacattttaaattataataaacaatataaaatcttcccattctaatgagcatgsaaatcaagctctaaaacatgaagagaaggttctttggacatttagtgttgagtacacatttaagtcaaccaatatttactgaggcaaactgtctaaggcagtctgagaatgaaaaggaaagagaatggacatttactggatggggtgggtcagaaagcattttatatatacatgtatatatgtatttatatatatacgtatatatgtatttttctatatatactatacatttatgtgtgtatatatgtgtatgtatatgtatgtatatatgcatgtgtgtatgcatgtgtgtgtgtaaatatatacatacacacacatatatatacgtaggttgaccagctgccttctgccaaaaccttctttagtgagtttgcatagtgagacctcagtggtccacagaaccccttgaagcatcttcctgaataccactgtggccattagcaaccataatcacattaatgca

SEQ ID NO: 788285 - DNA, 584 bp, Homo sapiens
tttcttacttaatttcattagttaggatttctagtatgatgctcaaaaggagtgttaagaggggacatccttatttagttcctggtcttagtggacaaccttttagtttctcactgttaagtatgatttgagttgtagagttttttgtaaatattctttatgtatcaaattgaggaagctcccctctatttctaatttaactgaaagttyttatcatgaaagggtgttggatttcatcaagtgctttttcagcatctattgatattattatgccatttttcttctttggcctgctgatgtgatgaattacataaattgatttttaaatgttaagccagtgtttcataccttgaataaatcccactgggtcatggtatataattctttttatacattgttggatgtgacttctaatattttgttgaaccaatgatttttctgcataaatatattagtttcatcaaaggggaacttttaagataatttaaattcacttatttcctaacatacagcatattcaaatatctattaaaagctatttacatcattttttattttctcttggctattgattttttgaatag

SEQ ID NO: 788286 - DNA, 584 bp, Homo sapiens
tttcttacttaatttcattagttaggatttctagtatgatgctcaaaaggagtgttaagaggggacatccttatttagttcctggtcttagtggacaaccttttagtttctcactgttaagtatgatttgagttgtagagttttttgtaaatattctttatgtatcaaattgaggaagctcccctctatttctaatttaactgaaagtttttatcatgaaagggtgttggatttcatcaagtgctttttcagcayctattgatattattatgccatttttcttctttggcctgctgatgtgatgaattacataaattgatttttaaatgttaagccagtgtttcataccttgaataaatcccactgggtcatggtatataattctttttatacattgttggatgtgacttctaatattttgttgaaccaatgatttttctgcataaatatattagtttcatcaaaggggaacttttaagataatttaaattcacttatttcctaacatacagcatattcaaatatctattaaaagctatttacatcattttttattttctcttggctattgattttttgaatag

SEQ ID NO: 788287 - DNA, 584 bp, Homo sapiens
tttcttacttaatttcattagttaggatttctagtatgatgctcaaaaggagtgttaagaggggacatccttatttagttcctggtcttagtggacaaccttttagtttctcactgttaagtatgatttgagttgtagagttttttgtaaatattctttatgtatcaaattgaggaagctcccctctatttctaatttaactgaaagtttttatcatgaaagggtgttggatttcatcaagtgctttttcagcatctattgatattattatgccatttttcttctttggcctgctgatgygatgaattacataaattgatttttaaatgttaagccagtgtttcataccttgaataaatcccactgggtcatggtatataattctttttatacattgttggatgtgacttctaatattttgttgaaccaatgatttttctgcataaatatattagtttcatcaaaggggaacttttaagataatttaaattcacttatttcctaacatacagcatattcaaatatctattaaaagctatttacatcattttttattttctcttggctattgattttttgaatag

SEQ ID NO: 788288 - DNA, 584 bp, Homo sapiens
tttcttacttaatttcattagttaggatttctagtatgatgctcaaaaggagtgttaagaggggacatccttatttagttcctggtcttagtggacaaccttttagtttctcactgttaagtatgatttgagttgtagagttttttgtaaatattctttatgtatcaaattgaggaagctcccctctatttctaatttaactgaaagtttttatcatgaaagggtgttggatttcatcaagtgctttttcagcatctattgatattattatgccatttttcttctttggcctgctgatgtgatgaattacataaattgatttttaaatgttaagycagtgtttcataccttgaataaatcccactgggtcatggtatataattctttttatacattgttggatgtgacttctaatattttgttgaaccaatgatttttctgcataaatatattagtttcatcaaaggggaacttttaagataatttaaattcacttatttcctaacatacagcatattcaaatatctattaaaagctatttacatcattttttattttctcttggctattgattttttgaatag

SEQ ID NO: 788289 - DNA, 627 bp, Homo sapiens
tgacatagttcacttcaataagactaaatgaaaataggattggcttggggtggggtagggtagaatagaaggaggaatttgagaaggaaaaacgagtaagaacatgtaagtcaatcaaaaatatctccaggcattgcctaatatcttctaggggcaaaatccggcttgttgagaaccagttctttaaagtgamatctctgctctgatctttcaagtactaatttcagaacttaaccatcaaagacaaagtccatgagttactacagtcatcaccgttgtttctcccaagctccactttaacccttattgtcaatgtcaccagaccattatatagatgccatattaccagtagtagtctcaagggaaagagaacataaaacaattaggaaaaaatgtaagttcctcacttccactcacccccactcaaataccaccaagagtccttggagatacagtgaaggcaggtagttattttgtgagtgtgtcttaccagcacacttggtgagctttcatccagtggataagtagcagcaaaggaaagcaagcagaaatcaaatttcaaaaagaagcaacataaagaattttgactatatggccattccttcataacaaagattgatatgatca

SEQ ID NO: 788290 - DNA, 622 bp, Homo sapiens
taactaggaagcatttgtaggaaaaaagtgtatgtgatattaatcaagttttttttcttgcatttctattttgtctggagcaaacagtagctcaagtgagcacttaaaaatggcccagaaaacaaatgatcgaagtcttggcttttgagttccaaaataaagtcctaaaatttacagaactgataaaggtcttaaaagccttttrtttgcaagtgaaaagttttctctactttaaaatggttgtcttaaaaaaaacgcataaaattgtcattaggaaaattaattttaaaaagatctcaaataataaggagatatattactacaaagtagtctttactaaatttttttaaacattttgtcttttgcaaagtaaattttaagtttttttcctctaggtcatagttattcatttatctttctagtttttctactttattttgccaatagaactttagaaaacaattcatcagaaaaatctactttgctttgatagagatcctagcactctttaaaaaactgcttctataaatacacctgcctcttccaattctgtactattccttgttagatttcccctaactgaaatttctcctcatccctctttgcttaaataaattctgtt

SEQ ID NO: 788291 - DNA, 630 bp, Homo sapiens
gatagatatgtttatggcattgattgtggtgatggtttcttgggtgtatacttatctccaaattcatcaagttgtattaaattatgtacatctttttgtaaacaaaatatcctaacagtctctaggtggttattactcagtgtgcctacacaaacatttcttttaacatcaattgaaagttacattgttgttttatcatatagcaatccaattccttggatatgcgaagagaatttctagtctagtctagtcaaaaaaaaattaatatcttgaaccttgagaatacttggtyctcccaaagattccaattaatatgttagatttgtgagagctcacctaatcctctttttcaaatattactacctacaaagtaatgtctcaattggaaaagctcctccttggcttatccttatctaagcactccagaaaggcagtttaagatcagagttgaagataagaatctccggcatcaagtgttatgtgatggttacgctgcacataatccctgtcctgtactagattctgagatagtttccagcatcgcgtctgatttttcattccttgtctggtcccttatttctggcttgaaccataaaccatgaatatgaagttgaattcttcatctatctg

SEQ ID NO: 788292 - DNA, 584 bp, Homo sapiens
gctcttttcagaattgtaactatttttttaggacaaatatgtaacttcctcaaggtccaagcaagtatatgatggcttacaacataatcttcacaatatatgaccaataaacagagttcacagtttctaatttggaattgtggccatttctcaggtcatttttttctctagttataattctttttattgacttagttgattttgtaggaaagaaagttaaaaattccttgattccmttatcaataaatcgagttctattcttaaaaattaaaaaaaaaagaaggtaaagcaagatgggctaatagaagccttcaccaattgcctccccaccccatacatacacaggaacagtaaatttaacaagtatctacacacacacaaaagcaccttcctaagaaccaaaaatcaagtgaacaatctcacagcacctgagatcactggtgctgtgatcactgatgctgtgataactttgtatcactgaaagaaccactgaagaaggtaagaaagacagcctcgaatcaccaacaccatcctgcccctatcccccagcagtggccatgtagcatgaagaatttgggggaggg

SEQ ID NO: 788293 - DNA, 612 bp, Homo sapiens
ctagcttgtgatggtcccaggaaagggatgaaagatccttagtggatgtccaactcaggtatgtcagaaagacaggaaggaaaaaataactccaagacagaattcattggtttatagagatattctttgtcatgttacttaaaaattgatgctacctacagaatcattaactgtaggttaccatgctaagcatggatgttgaaagattaagaactccaattaatttatcctttaatagcttttctaagttccaaaataaaaagctcaaataatatattactaaaataaactcataactgcaaaataaatataattgaaggtgttcctataaattcaataaaattattttaagttgacctaggaaacagattttatgaaattgtcataacrtgctttttaaatttaatttttaaaatgtacaattgacacataataattatgcatatttatgggatacaatgtgaaggtttaatgcacgtatacatagtataatgctcaaatcaggatagttaccatatccatcactttaaacatttattatttctttgtggtgataacatttaagattttctcttctagcagtcttgaaacatatgctatgttgttatcttc

SEQ ID NO: 788294 - DNA, 612 bp, Homo sapiens
ctagcttgtgatggtcccaggaaagggatgaaagatccttagtggatgtccaactcaggtatgtcagaaagacaggaaggaaaaaataactccaagacagaattcattggtttatagagatattctttgtcatgttacttaaaaattgatgctacctacagaatcattaactgtaggttaccatgctaagcatggatgttgaaagattaagaactccaattaatttatcctttaatagcttttctaagttccaaaataaaaagctcaaataatatattactaaaataaactcataactgcaaaataaatataattgaaggtgttcctataaattcaataaaattattttaagttgacctaggaaacagattttatgaaattgtcataacatgctttttaaatttaatttttaaaatgtayaattgacacataataattatgcatatttatgggatacaatgtgaaggtttaatgcacgtatacatagtataatgctcaaatcaggatagttaccatatccatcactttaaacatttattatttctttgtggtgataacatttaagattttctcttctagcagtcttgaaacatatgctatgttgttatcttc

SEQ ID NO: 788295 - DNA, 614 bp, Homo sapiens
atttatgggatacaatgtgaaggtttaatgcacgtatacatagtataatgctcaaatcaggatagttaccatatccatcactttaaacatttattatttctttgtggtgataacatttaagattttctcttctagcagtcttgaaacatatgctatgttgttatcttctatagtcacttactgtgtaataaaaccccaaaacatccttcctgtctaactataatattgtactcattcattggcctctctcaattctgcctttcccaccctccccaggctctggtaaccactattctactctctatttctatgaaatccccttttttagattccacataagactgagatcacgtggtgtttgtctttttctgcttgacttatttcacttaatatgatgtcctccaggtacatccaagtatccaagttgttgcaaatgacagcatttcattctgtttcatggatgaatagtattctattttatatatatatatatatactttttattgattcatctgtagatgggcattttggtygattccatatcttggctattgtgaatagcactgcaataaacatgagtaagcagatgtctctttggtacactgatttcacat

SEQ ID NO: 788296 - DNA, 614 bp, Homo sapiens
ttttaatcccagtgctttgcgaagccaagatggaagggttgtttgaggctgggagttcaagacctgcctgtgcaaaatggcaagaccctatatctgccaaaactttaaaaattagatgtgcatggtggtgtgagcccatagtcctagctgctcagaaagctgaggtgggaggatgacctgagcccaagagtctgaggttataatgagctatgactgcaccactgcactccaggcttggcaacagagcaagacactctcaataaataaataaataaatagcacaaattcattaggaagacataacattcctaaatgtgcttttgcctaataacagggccttgggttatttgagtattcaaagcaaaaatttacagaattgaagacagaatcgaagaatttcacaaatatcattttagcatccttctcaacaaccaytgatagaataataatacaaaaatgatcagtaaagagaaagaatatctgatacagccctactaggtagacttgatatttatagcagaccacccttaacaacaacagaatacatattattttcaatatagtttacaagctggccataaactgtcttaacaaattttaaaagaccaaaatag

SEQ ID NO: 788297 - DNA, 503 bp, Homo sapiens
tgggatactgcattgcacaattttatgggcattatttatgctgtaattgtgctctgtaggtgtcaatcacataggatacatatgaacagcacaatatcctgagtttatgtctggagtaagactactcaattgataaatcctaatggctaaattggttargaggaggaatgagagaaaggagataatattgaaatgatagggaaaaccagactttctgaattaaaccatataatatttgtggttaatattagcgaagtatacatttagtgctgggtgtctactcatcctcagtttcagataatttagcacatgagactgaaatacattataatctgaaggatctgtatttattaatacagttacttctgtaatcacccaatgggttcacccatctgctgcagtcattgagactgcaatattgtagtagagaaagagtttcattaatgcagagctatccaagaagactcactttaaatctaaagacacatacagaataaaagtaa

SEQ ID NO: 788298 - DNA, 585 bp, Homo sapiens
aaactacctatttctgaggttaattttgtattctgttacttttaaggatggtatattgttatagaagtttcttggtaggttgtttctatattagtttcctcttaagactgtaacaaattgccataaaagtagtggcttaaactaccacaaatgtatgctattatagttctagtggcaagaagtttgaaatcaattttattggaytaaagtcaaggtattgacaggactggctccttctggaggctctagggaaaaatctgatttcttacctattttagcttctacaggccttgcttgtcctttggctcattgctccctttgtccatcttcaagccagcagtaaagcatcttcaaatttctttctctctagccttctgcttccttgttatatcaccttctatctgacggactcttcctgcgtccctctgataaggagccttgtgattacaggaaacacatccagattatctaagatgatctcctcatcccaaaagccttaattcaattacatctgcaaagttcttttgccaggcaaaggtcccatattcagacattccaatgatcaggctgtggacctatatgggg

SEQ ID NO: 788299 - DNA, 585 bp, Homo sapiens
aaactacctatttctgaggttaattttgtattctgttacttttaaggatggtatattgttatagaagtttcttggtaggttgtttctatattagtttcctcttaagactgtaacaaattgccataaaagtagtggcttaaactaccacaaatgtatgctattatagttctagtggcaagaagtttgaaatcaattttattggattaaagtcaaggtattgacaggactggctccttctggaggctctagggaaaaatctgatttcttacctattttagcttctacaggccttgcttgtcctttggctcattgctccctttgtccatcttcaagccagcagtaaagcatcttcaaatttctttctctctagccttctgcttccttgttatatcaccttctatctgacggactcttcctgcrtccctctgataaggagccttgtgattacaggaaacacatccagattatctaagatgatctcctcatcccaaaagccttaattcaattacatctgcaaagttcttttgccaggcaaaggtcccatattcagacattccaatgatcaggctgtggacctatatgggg

SEQ ID NO: 788300 - DNA, 589 bp, Homo sapiens
ggatacagcaatgatgaagatatatgtgaattttgtttccatagagcttacttagaaatatgcaagacaatatataatgaaaataaagcaggctgtgaaaacagctaaaaaaaatacaagcataataataaaatagagtttacagatttggaagctatttaagtagggaaaagccaatctttgcaggcaatgtcttagatgagacatgaggataaaaaagcaccaagagttttgctaaaagagagaaagtgcatgtaaagtcctaacctggaaaaccagaaaaaatcaagagttccctttttggatataataattttgagaagtttaggaaatattcaagtgagaatgttgcaagcactagggtaaaagatatgaagttcagcaaagagayctgtgcttgatacagatgtttgagagtcgttaccatacaagctatttaaaaccgtggagcaggatgaaatactgaacatgtgagaaatgatacaaaccaaattttagtgatctgattgtggaaatggaagaagtaaaaagggtctgtcaaggagtgtccagtggaaaaagaaaatgatgaaagataagggataaatgt

SEQ ID NO: 788301 - DNA, 612 bp, Homo sapiens
gttagatgatccacttcagatagaataaatgtgactttagatagaaggtatgttatataagaggaaattataaactaaaacaatgattctctaaaatgagaatctgacaagaaaaacaaaacaacaacaacaacaacaacaacaaaaacacctgtataatcagccacacctccctgccaggccagaaaaaaaaaaaagaaggaaaggataaaggagaggaaaattaaagtaatcatacaatgaagggcatscacatagttacagatttgttaaaaaaaaagtcacattaaataatattcagaatgaaaaagagtcatgactgcacaggctaaacaaattgtagaactgaagataaatttgactcctttgatcacagaagacaattacccaacataattaaataaatgagacacagaaaaatgagaaagcctggatattcctattacttttaaagaaatcgaattgtcaaaaatctcacaattaaaatctcaggccaaaatgttttctctggtgagttaccaaacattaagggaaaaaaaaaaattccaactttacaaaaccgctttcagataataggaaaagataactttttctttctttcttttttttttt

SEQ ID NO: 788302 - DNA, 612 bp, Homo sapiens
cagctcttaaggcggcgtgtcttgagttgttccttcctcccggtgggctcatggtctcgctggcttcaggagtgaagctgcagaccttcacagtgagtgttacagctcataaaggcagtgtggacccaaagagtgagcagtagcaagatttattgcaaagagcaaaagaacaaagcttccacagtgtggaaggggaccggagtgggttgccactgctagctccrgcagcctgcttttattctcttatctggccccacccacatcctgctgattggtagagcctaatggtctgttttgacagggcgctgattggtgcgtttacagtccctgagctagacacaaaggttctccacgtccccaccagattagctagatacacagtgtggacacaaaggttctccaagtccccaccagagtagctagatacagagtgtccattggtgcattcacaaaccctgagctagacacagggtgctgattggcgtatttacaatccctgagctagacataaaggttctccaggtccccaccagactcaggagcccagctggcttcacctagtggatcccgcaccagggctgcaggtggagctgcctgggtcctgcgccctgc

SEQ ID NO: 788303 - DNA, 616 bp, Homo sapiens
atggtgggaggtgcctgtaatcccagctgctcgggaggctgaggcaggagaattgcttgaaccctggaggcggaggttgcagtgagccaagaaggcaccattgcactccagcctgggcaacaagagtgaaactccgtctcaaaaaaaaaaaaaaaccatatatatatatataaaatagctttacaaataattcactttttgatcaacatatgactaaatctgtacatctatyaatataaatatagtaaacaatacattttagaatggttccaaaatataatttacactttcatatattaagagactctcaaatttcaatctcaaaagtttttaaaatttaagtaatgattttcatcaaaaaaagaaaaacctttttttcccacaaaaatagaatgttttatctgcatatagtcaatactattgcatggcacaaacagttcaaatcattaaatattgactcaaaattacctttaagaagttttttcaaatttctcctttctgttactgcttgaaaaatatctatggttatacttaagtcttatgaagactgtatccaactgaattaaagatgtcacattcaattttcacactcctagcagataataaccatgagtca

SEQ ID NO: 788304 - DNA, 616 bp, Homo sapiens
atggtgggaggtgcctgtaatcccagctgctcgggaggctgaggcaggagaattgcttgaaccctggaggcggaggttgcagtgagccaagaaggcaccattgcactccagcctgggcaacaagagtgaaactccgtctcaaaaaaaaaaaaaaaccatatatatatatataaaatagctttacaaataattcactttttgatcaacatatgactaaatctgtacatctatcaatataaatatagtaaacaatacattttagaatggttccaaaatataatttacactttcatatattaagagactctcaaatttcaatctcaaaagtttttaaartttaagtaatgattttcatcaaaaaaagaaaaacctttttttcccacaaaaatagaatgttttatctgcatatagtcaatactattgcatggcacaaacagttcaaatcattaaatattgactcaaaattacctttaagaagttttttcaaatttctcctttctgttactgcttgaaaaatatctatggttatacttaagtcttatgaagactgtatccaactgaattaaagatgtcacattcaattttcacactcctagcagataataaccatgagtca

SEQ ID NO: 788305 - DNA, 623 bp, Homo sapiens
tatatgcatctttttcatggcctttgaatttgctcttgcctcctttttctagtcaaatctgtattattgtgtattgctgcataacaatttacccccaaaacttagcaacttaaaacaacacacattttctatctcagtttctatgggaaatgagtctgggcacggcttatctgggtcctctgggttgcagtctctgtyaaggtgttgatgtgggtctgcagtctcatctgaagctctgactgacgaaggagcaacttcccaagctcacgcagtgattgtccatagcagtcacttcttcacaggctgttgggcaaaggacctcacttccttgctagctagtggccagaggttgccctcatttccttaacaatgcacctcttccacatggcagcttacttcaattcatcaaagcatgcaagctgagaaaaccacagggaggatctgctagcaagacagaaggcactatattttataacctaatcacagaagcagcattccaccaccttcgccatattcttttggctagacacaagtcattaagtccagcttgcaatcaaggataaaagatcacacaagggcatgaatagcagaagatagggaccatctttgaagtctgcctacca

SEQ ID NO: 788306 - DNA, 544 bp, Homo sapiens
tacattgccacaaaagaagaaagaaaaagaactgcatttccttttgtttgtgataaacaggagggcacaatggctggtgttttcaggtcatgatttattggttcagccggaaccactgcaatgctacattcttctaggacactcagcaacacagcaggccwtttaaagaatcccaactggctcccacgctgaatagaaaagaagggaaaagtatcatcccagctagctttggctgaaatgaaaatctgctcgaaccaaaaatagaactctcatggggattgtcttttaaaaagaacggcagggctcagtagttctatgtgacatatgttgaatcatttaaaattttttccctccacatagtttagtcagaaactaaatggctttgaggtaggaaaaaataatgaactttaactcaaaaagacatttcagaaatttcagaccagggcagccaaggtatttgtcagcccaggctattttcctttattccctcttgctcttggaatgtaagtttctaaaactctattgaatggcaatcctgtaatat

SEQ ID NO: 788307 - DNA, 544 bp, Homo sapiens
tacattgccacaaaagaagaaagaaaaagaactgcatttccttttgtttgtgataaacaggagggcacaatggctggtgttttcaggtcatgatttattggttcagccggaaccactgcaatgctacattcttctaggacactcagcaacacagcaggccttttaaagaatcccaactggctcccacgctgaatagaaaagaagggaaaagtatcatcccagctagctttggctgaaatgaaaatctgctcgaaccaaaaatagaactctcatggggattgtcttttaaaaagaacggcagggctcagtagttctatgtgacatatgttgaatcatttaaaattttttccctccacatagtttagtcagaaactaaatggctttgaggtaggraaaaataatgaactttaactcaaaaagacatttcagaaatttcagaccagggcagccaaggtatttgtcagcccaggctattttcctttattccctcttgctcttggaatgtaagtttctaaaactctattgaatggcaatcctgtaatat

SEQ ID NO: 788308 - DNA, 645 bp, Homo sapiens
tactgatttagtgcctttctttccactggctcttctgctaatcaaacaccatgagtacaaggaccgaacctttcttagtcacttaagtatcactgtgcctaggaaagttcttaacacatagctgatgtacaataatttacttgctgaaagaaagaataaaaacctgggctaggtatggactgagcactggtccttaggaaagggactttgctaggccctactcaactccacatgattcgtgagctgtggatatacctcaggcattatatacattgccagtatttgtccatayagttaagtgaaattttttccaattccagccactcctatggggtcttcacatcatgctttctgggaagtttatgcttaagctgcctcaacactgaggttgaacccaacaggagcacattatgcagacataaagccaggatcacgccttcctgagttatatcccatggtccatttgctgggtaactggctttcagcaatttcatgaccatgccacccacacccctctgcaggaggaggatgaggttgtcaggagaatcctgacttcaggagcaaccccagtgaaacgagaatttcaaaaggattcatgagactttggggggtggaaagtcattccagtgccctccaaagagccct

SEQ ID NO: 788309 - DNA, 624 bp, Homo sapiens
acaggaattagagaggggtaagaaagaagagttggtcaaaaggaagctgatggtcagaaaggcaatcatgatgggtgagggttcttgcatctcattgtccggatgtggtgatctcgtaagtttcagttccttcatactatctggaaggcytgatgattggtttcctgaaaaaggaactcagataaggcaaatgtggtttctcaagtttttaagactaggagggtcaatttctatgtttattcaatagaaactataaatatcaattctatgggacaactgggccagtttcacaatcaccgtaactacctagctgttctccaacccctttgtagtactggtgagacatgagccataactgcagaccatgtacagctcattgaagcaagctgttagcatacttgattgacttgtgcaactgctctccaaaaagcaaaaaatgtccacactgtcttcatcaaagacctacgtctggaatctcacagtgcactgtatgaacatagagcaaactagtatctatggcttatatgtgttatcaacttctggcatacatctaattaatgattagaaatttatcatggaaaataactattctggaggcctggttctcatctcagaattatgtat

SEQ ID NO: 788310 - DNA, 657 bp, Homo sapiens
tattctgcctgtctaactgagattttatattctttaaccatctgatatggttttgctgtgtctccacccaaatatcatcttgaactgtagctcacataatctccacatgccatgagagggacccagtgggaggtaattgaatcatggggacgggttttttcttygctgttctcatgatgcagaatgagtctcatgagatccgatggttttataaagggaagctcccctgtacacactctcttgactgctgctatgcaggatgtgcctttgctccttcaccttcctccatgattgtgaggcctccccagccatgtggaactatgagtccatcaaacctctccttctttatcaattacccagtctgtggtatttcttcatataaataaatgaagtatgaaaatggactaatatagtaaattggtaacagaagtggggcactggtaacacaagtggggtactgctatgaagatatccaaaaatgtggaagtgactttggaactgggtaacaggcagaggttggaacacttcagagggctcagaagaaaacaggaaaatgtgggaaagtttggagattcttgttgaatggttttgaccaaaatgctaatagtgatatggacaaggaagtccaggctgaggtggtcttagatggagatgagg

SEQ ID NO: 788311 - DNA, 501 bp, Homo sapiens
ttaatattttcagactgcagttgatggcaggtaactaaaacaacagaaaatgaaaccctggctaaggggggactactctattcttactcacactttgattctaagtcaggaagcagactaatccgcataaagcaattagcaaactgtccatgacaagcagagacagaagttcagaagagaaaacgcagcagtggtcagagtcaccagggaagtttctaaaaagcgtgtacttggatgagactttgaaggacagagaaggctggggaagtgagggggaagaacaagcatttccggcccacgaggggagcagcttgaatgtgatttctctgcacactggtcrggcttcatcacttactagctgcgtggcctttggcaaattacttaacctctgtcaaccttcttttccctaactgcagcaagatcatattggtacctgtctgtaaggctgtactaatgtaattcttatgatgttcttaccacagtgcttgggtcatataaagc

SEQ ID NO: 788312 - DNA, 618 bp, Homo sapiens
tgtaatcccagctacttgggaggctgaggcaggagaaatgcttgaacccgggaggcggaggttgtaatgatcctgggtgacaaagtgagaccctgtctcaaaaattaaaaaataataataaaagcaatttctcatatcagacttaaggtggaagaaaataagcaacaggaaagataataatagcaacaataatagtgatgattaccattttttgagcatttactatgtgccaggcatcatgccatacaccctacatggataaaaatcacatatstccattgtgtagctgaggaaagagacagccagaaactcttaagttgccaagaccacaggtctagtatattgctaaaggaatatttgaaactgcatctgtcaatcttcaaagactgtgctctcagttcctagacccagttacctcttcaaaagtcatggggctgtgacactgacataactcagcaatggggcttctgtgagtggctgacgtcatataatgcagacacaggggtttcataggactcaccaaccctttacacactgtttcccacttaatttgaacaggtagcacttttctataaactgtgtctcccacttatgtcagcaatagtttacaaaacaata

SEQ ID NO: 788313 - DNA, 582 bp, Homo sapiens
tctccaagggagtagttccactattcttataaatcttgggcaaacaggttgaaccatacgcaaatttgcaagctttcttgcacagatttagacagactgttctgaaaaataaaaggtttgtttttcattctctattgtttcttctaagcattccttcctcctcttagtattttgggaagatgaaaattgagagttgaaggaaaaaccaaggacatgagtcttataagcagcaaagacagcagcagaatttatatctactctgagaacactttctagcctctctactgccttcactccakctagaagttttagtcgctgcagaccaaattccaaacctttgctagtgacattcttccacttgaagagcctttgacttcctttctgccactctggatcacagattacaactggatgtaatccccatgtaccctaaaagtcacccccattgtgcaatctacttttgtgttcagaactccccagattttacactttgaacaaatctgcagtactgcccattacaacacaggtgtgcccagtctctccagccgaatcataagctttctcagacctgttgctttcatt

SEQ ID NO: 788314 - DNA, 661 bp, Homo sapiens
aaaggaagatgttgcgatgtcagaggcagccacctactaccgaagcactcagaggagaagtgggaggaaaggaggatgctggatgcagatccaggctctaggagaacctgtcttgtttccctggcccagaagtcagaggaaggtccatgaggataagacctgtggtgaagaaagtcctgcaacagcaagagaacaaggcttctctatttggaattttgtgtttgcaaaaagcgaaaataaagtaactttcaaaaaaaaaatcagcttcgctgggctcagtggctcacccctgtgatcccaacactttgggaggacaaggcaggcagataacttgaggtcaagagtttgagaacagcctggccaacatggcaaaagcccactctactaaaaatacaaaaattagcgtggtggcatgcgcctgtagccccagctaytcgggaggctgaggcaggagaatggcttgaacctgggaggcagaggctgcagtgagccgagatcacaccactgctccaccccaacccaggcaacagagcaagactcctctttaggtcctgctgtctctcatcttccctgccttcctctccagtagtgggacatctcactgctctcacatcatgctgggggcgggggaaaccatgaggctaggacccactgactctga

SEQ ID NO: 788315 - DNA, 661 bp, Homo sapiens
aaaggaagatgttgcgatgtcagaggcagccacctactaccgaagcactcagaggagaagtgggaggaaaggaggatgctggatgcagatccaggctctaggagaacctgtcttgtttccctggcccagaagtcagaggaaggtccatgaggataagacctgtggtgaagaaagtcctgcaacagcaagagaacaaggcttctctatttggaattttgtgtttgcaaaaagcgaaaataaagtaactttcaaaaaaaaaatcagcttcgctgggctcagtggctcacccctgtgatcccaacactttgggaggacaaggcaggcagataacttgaggtcaagagtttgagaacagcctggccaacatggcaaaagcccactctactaaaaatacaaaaattagcgtggtggcatgcgcctgtagccccagctactygggaggctgaggcaggagaatggcttgaacctgggaggcagaggctgcagtgagccgagatcacaccactgctccaccccaacccaggcaacagagcaagactcctctttaggtcctgctgtctctcatcttccctgccttcctctccagtagtgggacatctcactgctctcacatcatgctgggggcgggggaaaccatgaggctaggacccactgactctga

SEQ ID NO: 788316 - DNA, 661 bp, Homo sapiens
aaaggaagatgttgcgatgtcagaggcagccacctactaccgaagcactcagaggagaagtgggaggaaaggaggatgctggatgcagatccaggctctaggagaacctgtcttgtttccctggcccagaagtcagaggaaggtccatgaggataagacctgtggtgaagaaagtcctgcaacagcaagagaacaaggcttctctatttggaattttgtgtttgcaaaaagcgaaaataaagtaactttcaaaaaaaaaatcagcttcgctgggctcagtggctcacccctgtgatcccaacactttgggaggacaaggcaggcagataacttgaggtcaagagtttgagaacagcctggccaacatggcaaaagcccactctactaaaaatacaaaaattagcgtggtggcatgcgcctgtagccccagctactcgggaggctgaggcaggagaatsgcttgaacctgggaggcagaggctgcagtgagccgagatcacaccactgctccaccccaacccaggcaacagagcaagactcctctttaggtcctgctgtctctcatcttccctgccttcctctccagtagtgggacatctcactgctctcacatcatgctgggggcgggggaaaccatgaggctaggacccactgactctga

SEQ ID NO: 788317 - DNA, 661 bp, Homo sapiens
aaaggaagatgttgcgatgtcagaggcagccacctactaccgaagcactcagaggagaagtgggaggaaaggaggatgctggatgcagatccaggctctaggagaacctgtcttgtttccctggcccagaagtcagaggaaggtccatgaggataagacctgtggtgaagaaagtcctgcaacagcaagagaacaaggcttctctatttggaattttgtgtttgcaaaaagcgaaaataaagtaactttcaaaaaaaaaatcagcttcgctgggctcagtggctcacccctgtgatcccaacactttgggaggacaaggcaggcagataacttgaggtcaagagtttgagaacagcctggccaacatggcaaaagcccactctactaaaaatacaaaaattagcgtggtggcatgcgcctgtagccccagctactcgggaggctgaggcaggagaatggcttgaacctgggaggcagaggctgcagtgagccgagatcacrccactgctccaccccaacccaggcaacagagcaagactcctctttaggtcctgctgtctctcatcttccctgccttcctctccagtagtgggacatctcactgctctcacatcatgctgggggcgggggaaaccatgaggctaggacccactgactctga

SEQ ID NO: 788318 - DNA, 591 bp, Homo sapiens
tggaaaaacaaattagaagcagccagcaagactgcagctcctttataccagacacatattttttaaaacaaattataccagaggaaaaaactgtcatttgttaagtatcttttatagtattttgcagcccggttaaaggcagaagaaaaaaaaatgatcacgcacaagtcagaagtcagtccaaagaataagtgttgtttcaggagggggaaaaaaaatcacttattcacagttgttcaacaattttaaaaataatcagtgctgtgtaggaaaagcattaaatattttaacgaggccaaagggatcatgtaacatgtgaatgacgatctaatgtgtccaaagtgtacagtgaacaaacaggttccgctgtcarcctcctaaatgatgttttgaaatagggtggaactttaagaaaagcactcatctcataacatttcattaaattcactgggttttttttgtgaattgaaaaataatgagttttttccccaatgctagacataataaaacatggcttgctttcttataaatgaatcctgccacacaccacatcgaggcttgaaacgccaatatacagagatgcagccccat

SEQ ID NO: 788319 - DNA, 435 bp, Homo sapiens
aggctagcatcatcctgataccaaaacctggcagagacccaacaaaaaaaggaaatttcaggccaatatacctgatgaacattgacacaaaaattcttaataaaatactggcaaaccgaatccagcagcacatcaaaaagcttatccaccacgatcaagtcagcgtcatccgtgggatgcaagtctggttctacattagcaaatcaataaacataamccatcacataaacagaatcaatgacaaaaaccacatgattatctcaacagatgtagaaaaggcttttgacaaaattcaacagcccttcatgctaaaaactttcaataaactaagcgttgatggaatgtgtctcaaaataataaaggctattgatgacaaatccacaaccaatatcatactgaatcggcaaaagctggaagcattccctttgaaaaccg

SEQ ID NO: 788320 - DNA, 560 bp, Homo sapiens
tttattctctatctccatgaattcaattgttttgattgctggattacacaaataagtgagaacatgctatgtttgtctttctgtgcctggcttccatccatgctgttgcaaatggtagtctcattcttttttatagctcaatagtactctattgtgtataaatatcatattttctttatccattcctctgttgatggacatgtaggttacttccaaatcttgactattgtgaatagtgctgcaacaaacatgggagtgcagctgtcacttcaatatactgatttcctttcttttgagtayttacccagcagtgagattgctgaattgtatggtagctctaattctagttttttgaggaacctccaaactgttctctgtagtggttgtaccaatttatattctcaccaacagtgtatgaggattctcttttatccacatccttattagcatttgttactgcttgactcttggataatagccattttaactggactgagatgatgtcttgtacttttgatttgcatttctctgatgatcaataatgttgagcactttgtcat

SEQ ID NO: 788321 - DNA, 624 bp, Homo sapiens
ggattgccaactggatactttgggatcctcttacctttaagtcaacaggttaagaagggagttacagtgttggctggggtgattgacccagactatcaagactaaatcagtctactactccacaacagaggcaaggaagagtatgcacggaattcaggagatccattagggcatctcttagtattaccatgccctgggattaaggtcaatgggaaactataatagcccaacccaggcaggactacaaatgacccagacccttcaggaatgaaggtttgggtcactctaccagaaaaaaaaccagacttgctgaggtgcttgatgaaggcaaagggaatacagaatgggtagtagaagaaggtagtcatcaataccagctatgaccacatgaccagctgcagaaacaaggactgyaattgtcattaatacttcctccttcttttgttaaaaacatgtttgtgcatatatacacttgtactaatatattttatttccttttcctttatcacatgacgtaagatttattgacttcatatcagcatttaagtattgttaactttatgtaatagtatttgggttggtgattagtgtgttcatggttgtacaaaggatagctatattatt

SEQ ID NO: 788322 - DNA, 548 bp, Homo sapiens
tccttgtccatatagtttgaggggtcccttacctctcaaccacagccccaccttcatcttaaataaggactaagttcccctttgttcatcccttgacactgtgggtcagcctcctccactcttctcctggctatagctgactaaaccttagcccctcttcttcctcgccccatcccctttctcaagtcccccttcctctcaatcagagccacagacactgcattatacattatgaaaatgtggttttctgttttgcaaaaacagcgtgaatgttaagtcagataacttgagccttagctttcggatgatgatttatagattagactctttcccattcatagggaaaccccatattggaaattygagctcagcttaactgtacttattcttttttttttttttttttgagacagagtctcgctctgtcgcccaggctggagtgcagcggtgtgatctcggctcactgcaacctccacctcccgggttcatgccattctcctgcctcagcctcccgagtagctgggactacaggcgcctgctaccacatt

SEQ ID NO: 788323 - DNA, 563 bp, Homo sapiens
ttcccctgtttaattaccaaggaaactcaaaatgaggaagaaaggtatgcctggtttccaggacagcaaagactggaggctgctcattctctagttggtcacatgtgaaaaggaatcccaagggacagaggaggtggtgacagtcattaaagaaaggaaagcaggctgagtccctggagtctgcagcaagggaaaaaagaacacatgcagatagcttagatcagggaagtggccctgaggtctcagcagtcagagtttttaagttcctacaatgaactagttcctayatctgtgccacccagagacctgaaagggagcagtcagaattaaatagaaatagaaattaaatagaaagcagccagtaactgtaccagtaactggtacacagaggaatagttactattagcattcccactttatagatgaggaaaccaaggcatagagggtaaagtatcttgtccaaggtcacatagatggtaaataacagagttaggatttaatcctagatgatgtggtcccagagcccatgtttttaattactaccttaattcttcctctgtaaa

SEQ ID NO: 788324 - DNA, 563 bp, Homo sapiens
ttcccctgtttaattaccaaggaaactcaaaatgaggaagaaaggtatgcctggtttccaggacagcaaagactggaggctgctcattctctagttggtcacatgtgaaaaggaatcccaagggacagaggaggtggtgacagtcattaaagaaaggaaagcaggctgagtccctggagtctgcagcaagggaaaaaagaacacatgcagatagcttagatcagggaagtggccctgaggtctcagcagtcagagtttttaagttcctacaatgaactagttcctacatctgtgccacccagagacctgaaagggagcagtcagaattaaatagraatagaaattaaatagaaagcagccagtaactgtaccagtaactggtacacagaggaatagttactattagcattcccactttatagatgaggaaaccaaggcatagagggtaaagtatcttgtccaaggtcacatagatggtaaataacagagttaggatttaatcctagatgatgtggtcccagagcccatgtttttaattactaccttaattcttcctctgtaaa

SEQ ID NO: 788325 - DNA, 631 bp, Homo sapiens
aaataggggcttatgaggttaaggtaattaatggaattttagctcaggtctgacttacagtggatccagtgggtctctggactcatcctgtggtcatttcccagtgccagaatgcataattggcatagacacacttagcagctagcagaaccccctacattggctctctgacaggtagagtgagggctattgtcgtgggaaaggccaaatggaagtcattagagctgactctacctagaaaaatagtaaatcaaaaacaatatgtcatctctagagggattgtggagattagtgccaccatcaaggacttgaaagatgcaagggtggtgattcccaccacatctccgttcaaccctcccatttggcctgtgcagaagtcaaatggatcttggggaatgacagtggattattgtaagcttaaccaagtggtgacttcatttgcagctgctgtaccggatgtggttccattgtttgagcaaattaayacatctcctgatacatggtatgcagccattgacttggcaaatgcctttttctccactcctgttcataatgcccacacaattttctccactcctgttcataatgcccatgcaatttgccttcagctagcaaggccagcaatatacag

SEQ ID NO: 788326 - DNA, 630 bp, Homo sapiens
acccaatagaacataagattaatatggaatgcctttaatgcagcttaaatgaacacttaatctgtttgtaaaattacctgcaatcttagagaattaaaaattaatataaatacaatatggtacctgtattagtcttttctcctgctgctaataaagacataccagagactgggcaatttataaaggaaagaggtttaatggcctcacagtttcacacggctgaagaggcctcacaatcatggcagaaggcaaaggagaaacaaargcacatcttacatgaggcaggcaagacagcatgtgcaggggaaccgcccttttataaaaccatcagatctcatgagactctttcaatctcacaagaccagtgtgggaaaaaaacccacccccatgatagaaccacctcccttcaggttcctcttatgacacgtggggattatggcagctacagttcaagatgagattttggtgggggcacagccaaatcacatcagtacctaataagagttgaggatactttcaatctaaggattaatacaaataatatttgagttgattttaataaattactatcccaagtaccattatgatagttaatgttaataaaacaaataaatgtatacatggaagcac

SEQ ID NO: 788327 - DNA, 630 bp, Homo sapiens
acccaatagaacataagattaatatggaatgcctttaatgcagcttaaatgaacacttaatctgtttgtaaaattacctgcaatcttagagaattaaaaattaatataaatacaatatggtacctgtattagtcttttctcctgctgctaataaagacataccagagactgggcaatttataaaggaaagaggtttaatggcctcacagtttcacacggctgaagaggcctcacaatcatggcagaaggcaaaggagaaacaaaggcacatcttacatgargcaggcaagacagcatgtgcaggggaaccgcccttttataaaaccatcagatctcatgagactctttcaatctcacaagaccagtgtgggaaaaaaacccacccccatgatagaaccacctcccttcaggttcctcttatgacacgtggggattatggcagctacagttcaagatgagattttggtgggggcacagccaaatcacatcagtacctaataagagttgaggatactttcaatctaaggattaatacaaataatatttgagttgattttaataaattactatcccaagtaccattatgatagttaatgttaataaaacaaataaatgtatacatggaagcac

SEQ ID NO: 788328 - DNA, 613 bp, Homo sapiens
tttcatcttgtgtcagttttggtaaattgtatttttaagatatatgtacattgcatccagtttttaaatttattttcagtaaggcttaccttattactatttactgtctatgtgatgtgcagtgatatagctttataattttaaaattaaatttcagatcattacataggatcaagtagaaagaaatttgattaattcaattatttcagcttctaagtattttcattccaaatggacaatgaaaaaaaaatggtgtaaagttgctatatgtataaaattttacattttatttattttatgagtgagaaaatattttagayataaattatttctaaattattatatttaagatcacagttcatttaacctaaaggcaaactatactctttttattgataacatgtttcctggtgtcccatatgtaacattttttcacctttcattgcttaaaattacatttgatataatgattacaattaaaaataaaaatttccagcagccagttggaactgataactggtgatgataatgtgtagatatgtaagcaatgccagtatgataagccaatatctactcattttaaattgacttagcaatcagaaatcacaagtca

SEQ ID NO: 788329 - DNA, 611 bp, Homo sapiens
catttaacctaaaggcaaactatactctttttattgataacatgtttcctggtgtcccatatgtaacattttttcacctttcattgcttaaaattacatttgatataatgattacaattaaaaataaaaatttccagcagccagttggaactgataactggtgatgataatgtgtagatatgtaagcaatgccagtatgataagccaatatctactcattttaaattgacttagcaatcagaaatcacaagtcattctttaacaacaaagcaaaacagaaaacargtaaaaacgtcatctatggtgtatcctattcattttatgataactcagttaataccttgttaactatatattaccttaacagaagagatagagagagacagagtgctttagcagaattcaagaaaacattattagattatttttgaaaacaacaaaaaaagatacataagatattagtatccttcatttctaacaaaagatgatccacaaagctttacaaatagttaatttttttaaggcctgttaataacttgaactgttcaagtttagaaatgaattttcttatagaaaagatgataatttttgtagttgttgtttctcataga

SEQ ID NO: 788330 - DNA, 625 bp, Homo sapiens
aacattattagattatttttgaaaacaacaaaaaaagatacataagatattagtatccttcatttctaacaaaagatgatccacaaagctttacaaatagttaatttttttaaggcctgttaataacttgaactgttcaagtttagaaatgaattttcttatagaaaagatgataawttttgtagttgttgtttctcatagaagatactcaatttttaaacaagaatgcatttaaaacttaatgcctaattcacacttagaacaacagcaaaaaaaaatctgaaaaatcattcttctgatgttcatgttatctcctaatcatacaaaattacctctttccaagtacttctgggaagattaatatgacatccaaaacaacacacatgaaatgcatccaagaaacaagctacattcattcagtataaggggcattgccaaatttgacagggtgttggcacttaatacatgccattactaattttagtatgaaacaggtttcatctctagtgcttttatacttctgaataaatgtagaactgaatcattaaatgccgaaacatttttttctaataccatgggcatcttctgtcattgaactcagtcaatgacattgaacattgttatg

SEQ ID NO: 788331 - DNA, 564 bp, Homo sapiens
tttgattaaaaaaaaaaagagtatacagttctcaagaaaatctggctctagagatgagctttaagtcaacaatatttaggcagagcttatttattcttaggcatagataaaatcccccaagaaagaagtgaaggatgaaagaggaaaaaacaactgtgactacraagcagttttagaaaacacagatattttaatggttgttcaagggagataactttaaccccttctctaactaaagatttcactcctgtagtattatcaagattatcaatggcttttgaggatttcatcttttatatatgttagtaccaaccattttattagggtcaagttcacgaaaataatggtgcaacaatttaaatatttgctctgccctgtcttcatagtatggatttatcttcccaatcatatcacggggtaccccatctaagtaaggcaacgggttactgaataacaagaatttccaatctgtgcattcctaaggccacttgttgaacgtttaatcctgcttatatgtctgagcaggtaatcataattaactggtaattaatgtcatcattttta

SEQ ID NO: 788332 - DNA, 651 bp, Homo sapiens
attttccagtcttatctccccttattcagggctcagagtagttcggttttccagccctatgatgctttaatctctggatttctcttttcccttcaatctttgtttaaaacctgttaaatcttgcctaagctcagctctttcttataattcatggctcagtgcagcaaataatagtcacatatttcttaatatttttacttttttcaacttttcccttagctaaatgttcaggggccacttggtctgctttccaagtaactacggatgactttccaaaatgctttgcctccaaacattccaaacatagcccaaatgtacatctttgcaacttgctgtgtatattacatagtctccaatttgttgttgttgctgttagagcaaaaattgcttatgttatagcacatgtttttttttaagtcagcactccatttcaatattatrtttcttctactagttttggtgagctgggctacggacgatagaactaaacatataatacttcaagacaatagcattctcatgtaactgtctgtgaaatttcaggtcaatgatcaagcttgaggcactctgggggtttctatttaagacggaaggaaggaaaagcagtgtgaaggagtgctaatgagtgatttttatattatagacccagaa

SEQ ID NO: 788333 - DNA, 651 bp, Homo sapiens
attttccagtcttatctccccttattcagggctcagagtagttcggttttccagccctatgatgctttaatctctggatttctcttttcccttcaatctttgtttaaaacctgttaaatcttgcctaagctcagctctttcttataattcatggctcagtgcagcaaataatagtcacatatttcttaatatttttacttttttcaacttttcccttagctaaatgttcaggggccacttggtctgctttccaagtaactacggatgactttccaaaatgctttgcctccaaacattccaaacatagcccaaatgtacatctttgcaacttgctgtgtatattacatagtctccaatttgttgttgttgctgttagagcaaaaattgcttatgttatagcacatgtttttttttaagtcagcactccatttcaatattatgtttcttctactagttttggtgagctgggctacggaygatagaactaaacatataatacttcaagacaatagcattctcatgtaactgtctgtgaaatttcaggtcaatgatcaagcttgaggcactctgggggtttctatttaagacggaaggaaggaaaagcagtgtgaaggagtgctaatgagtgatttttatattatagacccagaa

SEQ ID NO: 788334 - DNA, 567 bp, Homo sapiens
catgtacaggtttgttacacaggtaaacgtgttataggggtttgttttacgcattatttcatcacccaggtgttaagcctagcacccattagttatattttcatttctcataattcatatgctggttacttgctggcttggttgctggtctgtttctcacatycctttcttagctctgtattataaattctcataacgattgacttctagttacattcaacacatggtaggcattggtaggtgtgagtagaaggcaagtcagggtatcactccactcttgttctgcctacagtggcatttctggcagtgcccgtttatccatattggttttagctccttatgaaaaactctttgctatggcctaaatattttgtgctcctttatccctccccccaatttatattttaaaacctaactatcaatgtgatgtactaggatggggcctctggtaggtgaatgattactaccgtccttatcaaagatgctcgcagaactgccttgccctttccaacatgtgaggacacagtgagaatgtgccacctgtaaaccaggaaatgggttctcacc

SEQ ID NO: 788335 - DNA, 595 bp, Homo sapiens
tagagaataaataaaaagaaagagattaaagtaaaacactgatctttgacaacggagtaaaggcaaaccaatgaggaaaagagtcttttcaacaaatgatgcaggaaaactgacatcaagggcaaaaataatattgtaaaagagagtgcacacacagaccttacacccgtcacaaaagttaactaaaaatattaggcacctaatgtaaactacagaaaacatttagaaaatatcataggagaaaatgtasatggccttgtgtttgggaattactttttagatacaacatcacaggaaggatgcatcaaagaaattactaataagttgaactttgctaaaatttaaaacttctgctctgagaaaggcactgaaaagagaatgagaagacaagccaccgactgggggaaaatattttcaaaagatatatttgagaaaggactgccatcaaaactgcataaagaatccttcaaactcaataataagaaaatgaaaagcccaattacaaaatggcaaaatatctgaacagacacctcacaaaagatgatatataggtgaaagacgaacacataaaatgttgtttaaatcatatgtcatt

SEQ ID NO: 788336 - DNA, 595 bp, Homo sapiens
tagagaataaataaaaagaaagagattaaagtaaaacactgatctttgacaacggagtaaaggcaaaccaatgaggaaaagagtcttttcaacaaatgatgcaggaaaactgacatcaagggcaaaaataatattgtaaaagagagtgcacacacagaccttacacccgtcacaaaagttaactaaaaatattaggcacctaatgtaaactacagaaaacatttagaaaatatcataggagaaaatgtagatggccttgtgtttgggwattactttttagatacaacatcacaggaaggatgcatcaaagaaattactaataagttgaactttgctaaaatttaaaacttctgctctgagaaaggcactgaaaagagaatgagaagacaagccaccgactgggggaaaatattttcaaaagatatatttgagaaaggactgccatcaaaactgcataaagaatccttcaaactcaataataagaaaatgaaaagcccaattacaaaatggcaaaatatctgaacagacacctcacaaaagatgatatataggtgaaagacgaacacataaaatgttgtttaaatcatatgtcatt

SEQ ID NO: 788337 - DNA, 560 bp, Homo sapiens
tttcatccctcacccccctcactctctccccttctgagtctccaaaatccattataacattctgtatgcctttgcataaccacagcataactcccacttatgagtgagaatatgcaatatttagtttacccttcctgagttacttcrcttaggaaaatggcctcccatcccatgcaagttgctacaaaagacattatttcattcctttttatggctaagtcatattccatggtgtgtgtatgtgggtgtgtgtgtatatatatatcacattttgtttatccattcattggttgatgggcactagggttgactccatatctttgcaattgtgaactgtgcatgtgagtgcagatatcttttctatataatgactttcttttcctttgggtagatacccagtagtggaattgctagattgaatagtagatcttctattggttgtttgacaaatcttcatactgcttttcatagaggtcgtattaatttacattcccaacaacagcgtatgacatttccaccaacagtgtgtatgcattcccttttcactgtacccatgccaa

SEQ ID NO: 788338 - DNA, 630 bp, Homo sapiens
atgctggtagctaaaattggaattgtctcaatcgatatttgagaaatagagcacatgtttgatatagatttgaggggtttagtctgcactattggtaatttatcagaagggtgaaggagcaggaagactcaagaggaaattcaagtacaaaattggatacaaatttttgagctttcagaaggattagaaatcaaatttaaaacatgttcagtctaagataccaaagagaagtgagggagttcmgaaacaaaactatctgaaacagaagacaaacatagataaccaaatagtggtatatttatagtactcagcaattacaggcaacaaacatttggtgcatgcagaaaaatgaatgaatctttaaaatgttatgctaagcaaaagtagttagacacaaatcaccaaattatgattccacatatatgaatatctaggatagataaaatgaatctctagtaataaaaatcaaatgagtagtcacctagggtagaaaggcatgagggtaggggggtgaggaagacagttaaggggcaataggaagctttatgggatgtggaaattacctaaatctggattaaagtgatggttaaaattgtgtatatatgtatcaacattgaactgtacagtgaa

SEQ ID NO: 788339 - DNA, 473 bp, Homo sapiens
gtctttttaaggaaacaaatgagtccagtttgtcttgtaagtaagagataattcattaatgagattattgctcttcccaagctaggacattagccagcaactggtaaaatgaaccttctttgccaagatcgtatcaaacaaagcaaatatttctctatcagaagtctcagttccaatataaaaaccttctttaaagtaaaagaggtttgtctcaagtaaaaccatccgggggcagtgtgttggagggcaggggcacagccacttgagctgctggctttgtrtagaatatcagtaccgtaccaaggggccaagtcatttacagttagcctcacaggccccttatccattggatacacaggacaataagcaccaaccagccatcacctcaaaatggtaaacatacctcccaggaagccctcaagactttttcaagaaattaaaaatagcaagtcatatttgcataactttcctag

SEQ ID NO: 788340 - DNA, 583 bp, Homo sapiens
agcctcacaggccccttatccattggatacacaggacaataagcaccaaccagccatcacctcaaaatggtaaacatacctcccaggaagccctcaagactttttcaagaaattaaaaatagcaagtcatatttgcataactttcctagacactgccccacaattggaaaacaagaaagaggcctgaagatcccagcagactggaggccttgcaagcttcccttcttctttggtacatccacaggcattgagaggaaggggatggttcrtgctgttgcacgggaggtggtattgatgtagggtggggtgctggccagtgcaggtgtgggcgccttctctgtgcctctgggtggcttgttatttccttttagtgcattgtgatattatccttctgtctttgtgtattctgaatatgagtatttggtaagatatgtgtagtctgaatagaaatttttaattttgatgaagtcaatttcccccaaattaaccaataaatgtaatgcaatccaaatcaaaatcccatttggattttctgagacactcaacaaatgtaacctaagatttaggtgaagaagtaaatgct

SEQ ID NO: 788341 - DNA, 583 bp, Homo sapiens
agcctcacaggccccttatccattggatacacaggacaataagcaccaaccagccatcacctcaaaatggtaaacatacctcccaggaagccctcaagactttttcaagaaattaaaaatagcaagtcatatttgcataactttcctagacactgccccacaattggaaaacaagaaagaggcctgaagatcccagcagactggaggccttgcaagcttcccttcttctttggtacatccacaggcattgagaggaaggggatggttcgtgctgttgcacgggaggtggtattgatgtagggtggggtgctggccagtgcaggtgtgggcgccttctctgtgcctctgggtggcttgttatttccttttagtgcattgtgatattatccttctgtctttgtgtattctgaatatgagtatttkgtaagatatgtgtagtctgaatagaaatttttaattttgatgaagtcaatttcccccaaattaaccaataaatgtaatgcaatccaaatcaaaatcccatttggattttctgagacactcaacaaatgtaacctaagatttaggtgaagaagtaaatgct

SEQ ID NO: 788342 - DNA, 514 bp, Homo sapiens
agatgagagggtgactaggactggccaatgatacataagtgaaagtctggtccggggattctagaaataattttgccctctacaaagagagaaagacatcatccaaaacaaataaaaacatacatgcacacaaagacttgtccccgagtgttcagggcagctttactcataccagcccgtattagtccactttcgtactgtgtccggaattggcggrtttttggtctcactgacttcaagaatgaagccacggaccctcgcgatgagtattacagttcttaaagatagtgtgtccggagtttgttccttctaatattcggacgtgttgagtttcttccttctggtagcttcatgatctcgctggcttcaggactgaagctgcagactttcccggcgaatgtcacagctcttacagcggcacatccgcagctgtttatttctcttggagagctcatggtcttgctggtctcaggaatgaagctgcagactttccccttgagtgttacagctcaaa

SEQ ID NO: 788343 - DNA, 514 bp, Homo sapiens
agatgagagggtgactaggactggccaatgatacataagtgaaagtctggtccggggattctagaaataattttgccctctacaaagagagaaagacatcatccaaaacaaataaaaacatacatgcacacaaagacttgtccccgagtgttcagggcagctttactcataccagcccgtattagtccactttcgtactgtgtccggaattggcggatttttggtctcactgacttcaagaatgaagccacggaccctcgcgatgagtattacagttcttaaagatagtgtgtccggagtttgttccttctaatattcggamgtgttgagtttcttccttctggtagcttcatgatctcgctggcttcaggactgaagctgcagactttcccggcgaatgtcacagctcttacagcggcacatccgcagctgtttatttctcttggagagctcatggtcttgctggtctcaggaatgaagctgcagactttccccttgagtgttacagctcaaa

SEQ ID NO: 788344 - DNA, 500 bp, Homo sapiens
gcttcccctagtggatcccgcaccagggctgtgggtggagctgcctgccactcccacgcctcccgcctgcactcctcagctcttgggcagtccatgggaccgggcgacgtggagcagggggtggcgcccatcagggaggctcaggctgcrtgggagcccactgcgggggtgctcgggcatggcaggctgcaggtcctgaaccctgccccatagggtggcagctgaggccccacaagaattcgagcctggtgtggtcccgccagcagtgctgggggacccggcaccccctctgcagctgctggtccgggtgctaagccctccactgcccggggccagcggcaccggccagccactctgagtgaggggccgcagagcccaggcccacccggaactcgagcgccgaatgcagcccaggttcccgccggcacctcttcctccacacctcccagcaagcagagggagccggctctagcctcagccagcccagagagaggctccca

SEQ ID NO: 788345 - DNA, 407 bp, Homo sapiens
tcaggagcccagctggcttcccctagtggatcccgcaccagggctgtgggtggagctgcctgccactcccacgcctcccgcctgcactcctcagctcttgggcagtccatgggaccgggcgacgtggagcagggggtggcgcccatcagggaggctcaggctgcgtgggagcccactgsgggggtgctcgggcatggcaggctgcaggtcctgaaccctgccccatagggtggcagctgaggccccacaagaattcgagcctggtgtggtcccgccagcagtgctgggggacccggcaccccctctgcagctgctggtccgggtgctaagccctccactgcccggggccagcggcaccggccagccactctgagtgaggggccgcagagcccaggcccacccggaac

SEQ ID NO: 788346 - DNA, 587 bp, Homo sapiens
cagaattatggatcccattagtaaataattacagttatttaccaatgaaatgaaaatactttgtctttcaatttgtgtgtattatttttttcaaatggctactcaattattaggtcatgaatatctactaaattgtttggacctattaataattacccaataaacataaattttaggtatttattttggcctagtggcaccattaaaaaaaaatcactgagayactaagggtactacagaccagaaagtttgggaccctttgtaataaacctgagtaaaaagccaacatgcttaaggagtataaatatacagttagatagaaaaaataagttctaatctttgatagcagagtgggcaactgtagttaacaacaatgtattctatttaaaaatagctagaagagaggacttgaaatgttcccaacgtatagaaatgagaaatagtggaggtgatggagaccccaaatacccgacttgatcattacacagtctatgcatgtgacaaaatatcacatatactccataaatatgtacaaatatgtgtatcaataaaaatgtttgtttaagccaatatgctaagaatggctg

SEQ ID NO: 788347 - DNA, 632 bp, Homo sapiens
gtcaggattctaccagagaaacaaaaccagggtatacatgttaagacactgatttcaaggaactggcatatgcaactgtagggactggctaggaaagttcaaaaaccacagggcaggctgtcaggaaggtcaggctagaaatcttgggcaggagctgatgctgctgtccacagactgaaattcttcttcagggaaacctggattctgctcttaaagcttttcatctgattgaatcaggcccatccagattatctaggataatcttctttacttaaagtaaactgattatagactttaatcacccctacaaaatgcctacacagcaacacccaagtcaatctctgactgagtaactgggcactatactatagccaagttgatacataraactgaccatcatgggagaccatataatttaccattcaaactgagacactcttaagaatgaaagggggagctactcataataacgccaggaaaacgataaactcaaacagtcacaggcaagttaaaacatagaatcaccatatctatggggtaccaaaatctgccttacaaagtcccctgtgtcttaccagggctcaggaagcaaccaaatactctcccacatagtggaagacgtcaaagccatt

SEQ ID NO: 788348 - DNA, 608 bp, Homo sapiens
gtaacattttgtggagagatctgagaatagatattaataaacaatgttttagagtattgtatagaaactcttaaatagcttttttcttataaatattatttttaaattattcaaatattaatgtttatttgaacattagattacagatttttccgtgttttatagtgaaaagatgtgcctaaattaataagaaaatactctctgaaatgttaaaatataaaatcttttgctagtgaccaaatgatattttcgtcttggctatcttgggtggatgtggtgtgcagctggcttaacacagtatcacgtgcaaaataggttattgcatagggrttgattgaattaggatgctttaaaaatgttggatgtattgtctttagagctaatgaagcataaatatcatagtccaattctaggcacatagaatgagctcagttgttacctcttaagtgaattaattaatgaataattgagtaaattgtttaataaatgagtattggaggctgcttagtggcttcattctagacttcggactcgggaatcacactatacatgactatccttcagttcccgagtccgtaaaatgggaattttctctattgagttaattt

SEQ ID NO: 788349 - DNA, 608 bp, Homo sapiens
ctaccagctaaaattttagtgttaaatattgccaaaaaatggttacggttggtcaagatcttccatctgctttctttatgatgaatatgaaatgaacaggcgaacttgcctaataataaatgctcacagattttgtaaatatcttaaaasatttaatacttcaaccagggtaaatcctcctgccttgagattgaagaaacaaaacaaaacaaaacaaaaagccttgcatggacccaacctaaccttgtaaagtgattggggcaaatatcaaatggaagtataataacattttagttataaagaattctagtatgttagataagacaggccattcagacaaatgggtttcagtcactaaagctacactagcaatgctgacatatagaagggacagattcagattgtgtgaaatatgaagcttttataatgttattttttaataattagaatttcttataaaaatgaataaatattataaatctgaaattagatacaattgaatatttaaaataagaaatttggcaaacatcacagacataaaatttagaaagacaaaaagcagactgccttgattaattagtttcctacaacaactctataatatcttt

SEQ ID NO: 788350 - DNA, 608 bp, Homo sapiens
ctaccagctaaaattttagtgttaaatattgccaaaaaatggttacggttggtcaagatcttccatctgctttctttatgatgaatatgaaatgaacaggcgaacttgcctaataataaatgctcacagattttgtaaatatcttaaaagatttaatacttcaaccagggtaaatcctcctgccttgagattgaagaaacaaaacaaaacaaaacaaaaagccttgcatggacccaacctaaccttgtaaagtgattggggcaaatatcaaatggaagtataataacattttagttataaagaattctagtatgttagataagacaggccattcagacaaatgggtttcagtcactaaagctacactagcaatgctgacatatagaagggacagattcagattgtgtgaaatmtgaagcttttataatgttattttttaataattagaatttcttataaaaatgaataaatattataaatctgaaattagatacaattgaatatttaaaataagaaatttggcaaacatcacagacataaaatttagaaagacaaaaagcagactgccttgattaattagtttcctacaacaactctataatatcttt

SEQ ID NO: 788351 - DNA, 624 bp, Homo sapiens
aagtcatcacagaggacagtcgtttgcctgaaagcctttcttgtaccatggggcagtccacaaaatcttattatggaagtgatggcaaagcgtaaaataaatccatgctaccataccgatatgaaaagaattcccaaatggacttccttcagttgaatgccccaaatcaagtaccccttaatgatcagtcagagaaagaggtataaaagggaatatcagagcaaaaagagacagtgatctttattaatcataactgaaataatttaattttgccaagttttcaaaaacgtgtaatcatgtgaacacattrctaacttactggagaaagtcttcagtttattgtaaatctgcccctggaaagaagctattgttcttacatatgtagttattggtcattataatatatctttattttttccctttattgctctattgtaactgtatgacaattaagtctgttgtagagaaaagcaatctgctggtctctgaagtagaatcaatgtaagcatgggtgccacgcaggtggtagccagtggcactttagagactgccaatcactcctttttaacactctcagctgggccccaagatagcccactgtctgtacctgagcccaaaaaggtc

SEQ ID NO: 788352 - DNA, 624 bp, Homo sapiens
aagtcatcacagaggacagtcgtttgcctgaaagcctttcttgtaccatggggcagtccacaaaatcttattatggaagtgatggcaaagcgtaaaataaatccatgctaccataccgatatgaaaagaattcccaaatggacttccttcagttgaatgccccaaatcaagtaccccttaatgatcagtcagagaaagaggtataaaagggaatatcagagcaaaaagagacagtgatctttattaatcataactgaaataatttaattttgccaagttttcaaaaacgtgtaatcatgtgaacacattactaacttactggagaaagtcttcagtttattgtaaatctgcccctggaaagaagctattgttcttacatatgtagttattggtcattataatatatctttattttttccctttattgctctattgtaactgtatgacaattaagtctgttgtagagaaaagcaatctkctggtctctgaagtagaatcaatgtaagcatgggtgccacgcaggtggtagccagtggcactttagagactgccaatcactcctttttaacactctcagctgggccccaagatagcccactgtctgtacctgagcccaaaaaggtc

SEQ ID NO: 788353 - DNA, 666 bp, Homo sapiens
ctcagaatgactgatggtctaattttagaagagatatctcgccaccctaggcatatgtatgtatgtgaggatacatggtgtaaaacaaaaataaaattctaagctccccaggtgactgaatgaatccctaagggcattccaaagttaacctgaaaaactagkagaggtcatgatgggaaaggagggtcagccatggctcattatactctcctccctttggaattcaggcacaactgaccagtattaacattaaaacagaggtcttaggactgacaaagcagactcttggtagcagtaagataccaaattccaactgattctagtatagcatcacatggcgggtaacaggtcctgaaagagattcaaatattttaccgcaaaatatatttctttgacatactttagaatggccctgcaaagctgcctcttatgggggaaatttactttctatagagaatctccttcccttacaaggtcttttcaggagagtctagccccttttaaggtctgatatgaagacacttgtcatctactgtctctgaagcctgctacctggagtcttcatctgcataaccttagcttccacaattcccctgaattcctcaaatttctttctgctgacttcaactatttaagaaaaacctaatgatttcaaccagttgcctg

SEQ ID NO: 788354 - DNA, 666 bp, Homo sapiens
ctcagaatgactgatggtctaattttagaagagatatctcgccaccctaggcatatgtatgtatgtgaggatacatggtgtaaaacaaaaataaaattctaagctccccaggtgactgaatgaatccctaagggcattccaaagttaacctgaaaaactagtagaggtcatgatgggaaaggagggtcagccatggctcattatactctcctccctttggaattcaggcacaactgaccagtattaacattaaaacagaggtcttaggactgacaaagcagactcttggtagcagtaagataccaaattccaactgattctagtatagcatcacatggcgggtaacaggtcctgaaagagattcaaatattttaccgcaaaatatatttctttgacatactttagaatggccctgcaaagctgcctcttatgggggaaatttactttctatagagaatctccttcccttacaaggtcttttcaggagagtctagccccttttaaggtctgatatgaagacacttgtcatctactgtctctgaagcctgctacctggagtcttcatctgcataaccttagcttccacaattcccctgaaytcctcaaatttctttctgctgacttcaactatttaagaaaaacctaatgatttcaaccagttgcctg

SEQ ID NO: 788355 - DNA, 654 bp, Homo sapiens
ttatgtcttgacatacacactaaggaatattgtcatttatttaaaacttttgtaaaagaacattggctgggtagatgagatggaggtttttaatattctcaatatggctgaagctacaaagtatccttaatataaactctgatgtactctagaaagcaaaatctcagaaatcagtaattttttaaaaatgtgcatttatagctgaaattaattcataaatcagtatctattttgatcatcaaaaatttatatttttgcacattttctctcaaatttatgttttctagtagatggatactattggcaagaacatattaaaaattcaataaaagcttaattcatcttacttagaattttaaacatcagtctaccctaactgtagtctttctctacaattaatatttacttttgatgwctactagatgtaaatcatgaaaatttaagaaagtatcgcttttatgagtgacagaaaatacatatctgaatttaactgctattgtttcaaagtacatgtcatccctaattaagaatattcaatagtattacctactttagagttaagttatagttaaccccaaaagagcatatttagtttttcagtagctaattaacaacacatctcttatttatttttaaatgttttattttctgaaa

SEQ ID NO: 788356 - DNA, 642 bp, Homo sapiens
tcttagagtgaaagaaatcagtctggaaggctacacactatataattcttattatatgatattctataaaaggcaaaactgtggaaagattattgatgtcacatctatatttgcagtgacaataaaataatgttttccaacataaaaatcagatatgcaagataattaaggcaactatgcagattttttatcatttggcaggaagtcataagcaacatcttatgcaacctttcttctttcattattttgcctcacttcaggagataaactttaacataagttgttcacattttccttgctctttgagtaagtatgggttgtgtcctaaactttttactgctggttgtccagactctgggtgctgttttgatcctccaggcaaatttgttttagcattcaatcatatcaataaggttcagaatgtaaattctgtcttaccttctttgtacggtgatccaartcttagtttctttttctgtatttttactacatggcttgtatcagtcctactcatgcatgtctctcaagttaggctgtgacttctgtgaatttatgcataaaaacaagagatccctttctctagttatcattccaagatttgctcctcattccttaacctgcagtggttcttctgagttttag

SEQ ID NO: 788357 - DNA, 626 bp, Homo sapiens
tttaaccaatttttttctttcttttcagtaggcagaaatgttttatctttctcttgtgtaattgcactattttggacttccagtacaatgttggatagaagagattgtgagacttcttattgattttaaaggcaatggtttcaacatttttacaggttttttaaatatgatttctattaagttttatatttaacatatttcaattaactttattagtaattagagaaatgcaattgaaattctcaattaaaatatatcaggatttggtttggtttactgctaaagggcatattttatttaaatgcatgagttaattttttttcactgcaatgagaatttggccattggcatgagttagtggctcaaggatatcaggtcargtttttggtgattcccatcgtcttttcatcacgataccaagtggactcctggaactccaacaatcacttctacatttcaagcagcagcattcagaaaattcaactggtaaaatgtttttgtattcttggtagtactaccaaataattctcactgacaaagcttataggtaaaacagacttgaaaaaaatggtttttcatttgggggttattactgtgtattttatatgacagggatatatatatat

SEQ ID NO: 788358 - DNA, 589 bp, Homo sapiens
aaatttatgagagttatgtgagttttcttggggaaaacataaaaattaaggtgaacatttaagatacaagtagatgaagaaaattcgtacatgttattggaaagaagtatcagaaagttgaatagaaaactgtgagagggacatgtctaactaaaaagtcttgcattctattgtaacacatttatcattaacattgtattaataaagcaaatcaaataaacactgtctattatggtcttgtcaattataaaataattacattgcttatgaaaagtaaggatattcaggtagcatagataaaagaygtgcatgtgaaacataaaacatttaattaatagtttctattttccagatttttaatagggtagagacatttttattataattattgatgattatttcctgtgcatggttaaatttttcaatgtctttgtcccataataaagcagaaacacataggaactgaaacatgcctttccagtcattacatgtttgccagtggatgaactgccaaaatttggggttgattgagtcttatgcctcagggaaaacaccccactgaaggtaaatatatgccaatgagtccagc

SEQ ID NO: 788359 - DNA, 602 bp, Homo sapiens
tacatgtaatgatgcttcatgctcctggaattaattttggtataagacaagaggtgcgaattaaaatcgatctttttcttaaaagcaaaccaactgctccagcaccatttgtttaataacttttcccattcacactgacttgtggtcatctttaccacattttatttgctttcaatgaactgagtctgtttgggggttctccaaccctgttttattcctttgccggaaccaaaatgatttaattatagtagatacaacttatatgttaatataaaggctatgtgctcctaaattcttttcttaaagaaaaatgtasctagatgaacataaataatctttttaatagcaaaaaagaaaaatcacatttacaattttgattgggggctggagccaagatggccaaaaaggaacagctctggtctacagctcccagcgtcagcgatgcagaagatgggtgatttctgcatttccatctgaggtactgggttcatctcactagggagtgccagacagtgggtgcaggatagtgggtgcagcacaccctgcactagccaaagcagggcgaggcattgcctcactcgggaagcgcaaggggtcaggga

SEQ ID NO: 788360 - DNA, 619 bp, Homo sapiens
taatacaccaaacaaatgagaaacaaaccataagctgctatatactcatctgcatttctttctttcttaacaattagtgaaaccaggtgaaagaatagattgaaattaagtacctgttgctgctttttcttgcgaattagcccattcgatattagacttcgggatattttggtggggctaagatgaaaagatccacctcgtgatggaattgaccttcagcaggggacagtgaggtgtctgcggttgttcctcttgtgaacaacgccttaaaggcgagaaacagcctactgtacagtgtgccagggaaagcatcacatcggtgggcgtcggtggcaacaccacttacacttcaccctgattttgtttcctccttgcacrtgctcctttgacagggcaggctcccaagcaggtgtgcagtcagggccacaagacacaggcaccccatcccatctcagagtctgacgtcccctcctcccctttgtctctaagcctcatgtaactgagcttatagccgaccatacagaactggcaaacttggtgagatacctttattttttatttcttaaacaagattttaaaatttcataagctctcacgtatcctaacgagaaggcagggc

SEQ ID NO: 788361 - DNA, 612 bp, Homo sapiens
gcacaataatttcagtttcgtgccatctttgttaacacttgttattttctgttttgttttgttttttaataatagccatcctattgggggtgaagtggtatctcattgtggagcaggacttatctagatagtaactgaagaaaaagcattccgaatacttctaggatgtgtccttcctatattggtattactctgtaaccagttcactgcacaagtggcacttttttcagtccaagtagaagcaagtttcttagagctgtttttttttttaaaccctttatttcaacttctttccttcccatatataaaaccacataccattctaacartctgtaatgttgctaccaggtaataaacaagccatactgtatttgggagaggagggtgtgtttcaaagtctagttcattgtaatatcaaaactggtaaaacctctcctctctaaactcagtttgacctcacactgagaaacctttactagtgcagaggagaatgttgctttcttcttgcttgctttatattgtaggggcaaaagggtgtgatcccactcctccccatcataagggtgtccatggcagacactcctataacaaaagacaggttaacaagagaaa

SEQ ID NO: 788362 - DNA, 586 bp, Homo sapiens
accccccatgtctgatgtcgaaatcggcttaaaatgcaccaggactagaatttgcaatatattttgaacattaatgtagaattactatctagtttggaaagtcaataccaaaagacacatgatattcctggccccatgagccaagcttaggagcagtgttctggatccttttcagaatgagaagataggacaaacrtttgattatttgtgctaattaacatgtactttcataatacatacttttttaaaatcagggagtgacatgataggatctaaagtataattaggtccatagtgtcatcaactgtatcttttaagtttacttatcatctgtataattctttagattcagtctgagttatttcaagtcttatagacagtgataatttttatttttgccctagagcagggcagtgttatctgtttgggcagtattaacattttggacaattctctgttgtgggagactgccctatgcgtaataggatgtttagcagcatccttggcgtccaccaactagatgtcagaacatgtctccagatataacaactaaaattgtctccaaatattgccaaatggctgcaca

SEQ ID NO: 788363 - DNA, 561 bp, Homo sapiens
agtcattaaggaaatgcaaaataaaaccatgtgagataccaccactctcctattagaactgtcataaaaatgacaataccaagtattggctagaatggaagcaatgaaaacaratactcatacatcgatggtggtaatgaaaatggcacagtcactttggaaaatagtttggcagtttctacctaccatatgacccagcagtcctgtggtgctttcctgaaaggaaaatacatgttcatacaaaaatgtatacaaatttttattgtggttttatttgtaatcaccccaaactgggaacattccagtgtctttcacttggtgaatggataaacaaactggtctatccatataatggaatgcaacttagcaacaaagaggaaaatctatagatataatcaatatttgtatgttaagttaaagaagccagactataaaagctacattatatgtgattccatttaaatggcattttgaaaaggcaaaaatacaggaatagaaaacagatctgtgattgccaacggctcaggtgtgagagggattgattacctagaggccctacag

SEQ ID NO: 788364 - DNA, 570 bp, Homo sapiens
agtcattaaggaaatgcaaaataaaaccatgtgagataccaccactctcctattagaactgtcataaaaatgacaataccaagtattggctagaatggaagcaatgaaaacagatactcatacatcgatggtggtaatgaaaatggcacagtcactttggaaaatagtttggcagtttctacctaccatatgacccagcagtcctgtggtgctttcctgaaaggaaaatacatgttcawacaaaaatgtatacaaatttttattgtggttttatttgtaatcaccccaaactgggaacattccagtgtctttcacttggtgaatggataaacaaactggtctatccatataatggaatgcaacttagcaacaaagaggaaaatctatagatataatcaatatttgtatgttaagttaaagaagccagactataaaagctacattatatgtgattccatttaaatggcattttgaaaaggcaaaaatacaggaatagaaaacagatctgtgattgccaacggctcaggtgtgagagggattgattacctagaggccctacagacctttctg

SEQ ID NO: 788365 - DNA, 627 bp, Homo sapiens
ataaatatcagatttagcaaagaaacctttaggtcaagaatcagatagtgacagaattcaaatgtcatgtaaaaatcaagtcatcgttcactgactctcatgtataactaatataatgattttaactaggttattctactttctaatttaattcccttaatcatacccagagttccattaattaataaagacaatctctagtttagtttctttatgggaagttttgaaagtactttgcatgaaagaataccattccacagtcagagaacgcagtcagtgatccatgctctggattaaacattcagaactcagtacagagaaaggaacatcacatactccatctttttaactactggtttaaagagacattttcctctttggggagttaaactaagaaaagatatgaaggacttaactttaaaaaacatatattcacatctataaaattgtcrtttggcttaagtattgaaaaaatgaaactattcaaaatttttgaagattttagaagtgagttttggcctatcctaaaatgaataatatgaacatgtaatataacagatgaaaatacccataatctactctggtacaaatgctactaattttaactttactttcatttttaaatta

SEQ ID NO: 788366 - DNA, 577 bp, Homo sapiens
cataaaaaagaatgaaatcttgtcctttgcagcaacatggctgcagctggaggccattatcctaagcaaactaacacagaaacaaaacaaaataccgcatgttctcccttataagtgtgagctaaatattaggtactcatggacataacgatgggaacagtagatactggagactattagatgaggggagagggagaagggcaagggctgaaaagctacctttggggtatatgctcactagctgggtaatggattcatttgttcttcaaatctcagcatgatgcaatatgtcartgcaacaaacctgtacatgttccccctaattctaaaataaaagttgaaaaaaatggaaattcaaggcccataatttcaagaatattcaatacaataaatttacaaaataggttagtaaaatgagacattaacctcgtaattcaaagccatttaaggaatgacagagggctagggagggaaatctgactcaaaaaaaccaaaatgaaatgtatcattgttacaagtagattaatagattgctgtcgagtaaatctcttggaagttaaattttaaaatgaggttg

SEQ ID NO: 788367 - DNA, 584 bp, Homo sapiens
gagaatctatcaggttacactggaaaaacattgattgcctttttccctcaagttcattcagaaagaacaaaaacttcttcccttggataagaaagacacaatcactttcatgaagttccacccatatcccaggatacgaattttttcctcccacatgacactgactcttcattaaaaatattttaatgtsttctagatgccagacatataccaatcctaaaaaataaccacagccaaatagcaagaggaagattatggcataaggcgatggttcttttcaaaggtaagagggtttttaaaaaattactattgttttattttgaaatattttttcatgttggatgcacactaagagcatgacatctttccccagaaatgttactaatgagaagaaataacctaggaagaacccaaataagcaatagcaatttttaaaaccttttatttgtcagaaaaatatcagagtcattaacacatggagccagagatcaaaatagaaacataaggccaatacatttgagactttcttaaggacataatttttaaagacttaaagattgtgaagtaagtatgtttatttacat

SEQ ID NO: 788368 - DNA, 584 bp, Homo sapiens
gagaatctatcaggttacactggaaaaacattgattgcctttttccctcaagttcattcagaaagaacaaaaacttcttcccttggataagaaagacacaatcactttcatgaagttccacccatatcccaggatacgaattttttcctcccacatgacactgactcttcattaaaaatattttaatgtcttstagatgccagacatataccaatcctaaaaaataaccacagccaaatagcaagaggaagattatggcataaggcgatggttcttttcaaaggtaagagggtttttaaaaaattactattgttttattttgaaatattttttcatgttggatgcacactaagagcatgacatctttccccagaaatgttactaatgagaagaaataacctaggaagaacccaaataagcaatagcaatttttaaaaccttttatttgtcagaaaaatatcagagtcattaacacatggagccagagatcaaaatagaaacataaggccaatacatttgagactttcttaaggacataatttttaaagacttaaagattgtgaagtaagtatgtttatttacat

SEQ ID NO: 788369 - DNA, 608 bp, Homo sapiens
aagaatgccaagattgttcaaactgagaaaatcatttataaaagttaccatgtaaattggtcaagagaaaaaaaaattagcatctctgtaaattccaaaaatgcttttgataaatattcctactgatcaaaatattcagtaaaataggaatggatggatacctccttatcatgatacttatttctctctctctctctctctctctctstgtgtgtgtgtgtgtgtgtgtgtgtgtgtgtgtctgtgtgtgcatctatgtgcctgtaatcaagagtcaaacatgcttcaaattaatcaagaaccagaaagttttcctcaatcaccatttacatttaacattgaacaatctaatcaatgcaattgcacagaaagccacaatgagtctatattggaaagaaagcaggagaattatatttacagctgaaataatcagagcttagtaaagtggaagcttactaaaccgatatgtggaaaatcaattgctttcctatagacaaataacagttaaaaattttagtacaagctgcacatgcctgtgtccaatagcaacaaaatcatgaaatagctatttgggaagagccagttagctcctagatgccttcagctgc

SEQ ID NO: 788370 - DNA, 557 bp, Homo sapiens
gaaaattgtgagagaaactaggaaagtggagctctgaaagggatcagagaaaagtcactccctatccctgaggtgggtacatgagtcagagcttgcaggatgtgaggcacacgcagctgctgcagaggaacccaaagggggactggtgcggaagtccatggaaggctggtgcctcctcatggttgtcactgtgtgagcttcagggaartatctgtgggtgcacctggagtcactgccaatggggtgaactggaggcacctggagtcactgcttgtcagtggggtcagcagaggacagagaaggaagatatggcattgggagaaacaaggacaaactgaaacccatcaggacctctgcatctgtccttcaccacctctgactgacaactattgattcatttctgactccaaagtccatgcaagtttctcttgtagccaaccctaacctgggtcaacaggggaaaaaactctggaaaaagtggttcctgagtagctgtcatgacatggtacaaaacattacactttgctgaataactaaaaataaacttcatgagcaat

SEQ ID NO: 788371 - DNA, 540 bp, Homo sapiens
aggtagtacgtgtcctcgtctccatgccgccgcttcttcacaccggcaccaagggcggggacggcaggggggctctgcttgaaggctggaaggccaggcagggcaggcggggtgagcaggcaggaccagagggtgaggcctccttccgggaggagggagacctgccccacccttggggccaatcgattctccaggtgggtccggtggtgagcaacccacagggacgggcaaacctgcggtgccacccaggcctctgaggtgcccttggcccaggacaagcgacttatatgggggctgctctcaggctccgtcagggaggagtctgggcgtggggggccgttcagggactggccctgtccctgggacgcgggctcacattgtgtcctgccaatgtgtccccttcycctcccacacgcgtccagttcccctggccggccgctcaccacgcttgctggcggccccgttcttggcggagctctcgttcagggcctgctgctcccggtagtggtcctcatcagcttttcggtcgcggccaggaca

SEQ ID NO: 788372 - DNA, 600 bp, Homo sapiens
caagtctgagcagccgagctgtgtggcttggtcttggccactctgggggcccctctgggctcacagccccagtatccccagcttgggactcgaggagctaataggtctgtctggagctggcgtgggccctgctgcaggaggactggatgacacccttcctgagccagcccctgcagaggcctccagcttctttgcctcacagggcccggctgcccatctgaggacccaggccggctctcatgagttctaaaagtgaccccgctgaggccgctgcaggggcgtccactcacttccaagctggctgatttcccaagcgtctggctcctggtcacctgctgggagtcctcatgctctctccccamagggccatcaggaatgatccccagtctcaggctcagagaatgacttctgctgccaccccatgccctctgtgcccctcaccagcccccgatgactcagaatcacaagtcactgcagccgcaagtgccctggagaatgtcccatcgcactccaccgtggaacagttggggaaactgaggtcagagacagggagctactggcagaaccagggaagctgcaggtggagtcttccctttgcca

SEQ ID NO: 788373 - DNA, 621 bp, Homo sapiens
ccaaaaatctcattatcaatgtttgtcccaccccctggatccacagggcttcggaggaggagccctgggtgcaggcgacagcattttcctccccagttcgcgcccccccaccctccccccgccccagcatccacagagcccagcagggagggagcgaggaggtgtcactgctcctctgctgggcaccaggcacagctttcccctcccgctggtgcagctgaccagcccgggaygcctggtctgagcagaccagcccatcccacagggcaaggccaccccgtcctgcaggacaaggcagttgagacaaaaccatgaagtcccttgaacctgatgccacacacctggcagggggtgggggtggcagataccctagatgggggaagccagccagagagggggttgctcctgtccttccatgaggatcagctcagaccacatgcagtgcattccaagcatggtgaagaccccatcagcatcctcagaccatgggaggaagggaggcagagctcccacaagctgcctgccaggactccagggagacactctccagaaaccaccagcatcataaaccccagggcaggaggtcagtgtccttagaggggagagagtggacttaggcaa

SEQ ID NO: 788374 - DNA, 629 bp, Homo sapiens
gggattgcaggaggaggggctaaggctgcatgggtgggattgtgggaggaggggctgaggcggcagctctccaggccaggcccccctgcgtccccatctgcagcaagtaaccagtggctcccattgggccccgcagccgagcagctacggtgaacaccgtcctcatcatagaggagactgaggctcagagagcggcgtcactgaccaaagactcagctggcagatgccagagagacagaccccaagcccacacctggaaccctgtgccaggctgggggcaattggcgggcccagctgggggctcagacagtgtcctgcaacccaggggcctcttcccagggccaggctggcccagcgggctccggagcagcyactgtgctttgataggaataaccagggcctcacaaagccaccaactccaatacaactctattcgctcactttgggtttaaaaccctttgggccaaataccactttctctctcaaaatacgttcctgcagtaagatgaggtcatgaatactctctctggcacagaaacagggaaactgagtcaccactccgcccattaggatggcccagcctagcccacctccccccgagagggaagaggtgctggagacatggctgg

SEQ ID NO: 788375 - DNA, 710 bp, Homo sapiens
gaacttctgtgaacaaatgtgaacctgaaagggccagaccttcaagatggatcctgagtggctaagtgggctaggctccgctgttcttgcttgtaatcccatcactttggtaggccagggtgggcggatcacttgagcccctgagtttacgaccagactgggcaacataccaagaccctgttctctacaaaataaataaatactaccccccccccaaataagaatgggtaagtgggcctaaatttaaaatagaatgaagcagccacttgctgactatggttacacaactaccctgacttccccrgaaaacctgcacctttttatctttggtactttctcagctcacctgaaccaaccaatcagggctcaagtgtataaaccaatcagggtttggctgtatcaaccaatgagagctcagctatattgaccaatcagaactaagcaagtttcaatccttcatttgcacatcttgatctgattgggaacctgggcaggaacttttgcgcaaaacttgatgcttccctcattcttgggaactccccttcattttccagtggagggtgcatctccaagtttgcaaactgttttctgtactaaagtctctttcctctaaatttcttttcagagaattttgtgcataatgtaaatggaaacttacagattgtgctgctttgcgtctggtttcttttactcagcataatacgtatatg

SEQ ID NO: 788376 - DNA, 648 bp, Homo sapiens
cagtattcttccccaactctttgagttgcataggttccttttcttggtcttatgtccagagagacaggattttgctcagtcttggctgtgctggaaacttgtctcaggtcaaagtttgagagaaaacaggaaaataaaacaaataggaacctcaccctctgcaggttgcttctccaagttttgattctcttcagtctgcctgttatttttttcactcattgtcctcaggttgttgggttttttgttttgttttgttttttgttttttatttgttttttcattttgtctagaatttttagtcctactcagtaggaaagagggctgaaggaggcttacttcatcctggtgagcatcagaagcctgtggtaatgtaycttaatgccattttttttttttttctgatctgggatcagaaactgtgcgtggtgttggctgccatgtctttcaattttgaacacttctttaatatttcattgttgtgtatgctgtgatatttttgcagagcctgggccagtttggtagaattgctctcaatctctcaccctttcttgaatcaaccttttcaagctttttctcacctcttcaatggacatgctttagccaaggctgctggtaacttccatgttgctaaatccaatggatagtcct

SEQ ID NO: 788377 - DNA, 615 bp, Homo sapiens
tggcagacaaaattcacaggtaggatacaaacttggcaaatatttttcaatgtataaaaccaataagaagttactatctgtatttaaaaaaaaatcctgaaaataaacaaaaaagggaactgataatagtttggatttatgtccctgcccaaatttcatgttaaattggcagaggggcctggtgggaggtgaccagatcatgagggtggacttcccccttgctgttcttgtgatagtgagtgaattttcatgagatctggtggtttaaaagtgtatggcacttccccgttagctctctcyctcctgctctgccatggtaagacgtgcctgcttcccctttgccttccaccatggttgtaagtttcctgaggccttccagtcgtgcttcctgttcagcctgcagaactgtgagtcaactgaaactcttttcttcataaattacccagtctcaggtagttctttatagcagtgtgaaaataaactaatacaggaaacccaatagaaaagtgagaaaaagctgtgagtagaaaattcacagcaagggaaagcaaattggctaacaataaccatttgaagagactgtcaatgtcactattaatttgggaaaaagtgcca

SEQ ID NO: 788378 - DNA, 656 bp, Homo sapiens
ctttgctaaactgagacagtcctgggccatctagacgcttgttcaccctacagtagcctgactcctccaggctcaaacagcaatgtcctagcgccaggccaggtggcctccctgggtagttcctccccaggttccctctgccttctcagtcctgctcctcttatgcatcccttgacagasaggagaggaccaggccccccagcatcaatctgctggacttcagaaaacctgtcctgctgtgatggattttttaattggattgtgacaaacatttaatacctaatagagctcttacccgcacagctaattaagaatgtgactaatctaatttagtgggagtgcagaaaaaaagaaggaaaagccaggagaagggggagcaggatttggggagatgggggtggctggagttgcaaaatgactattgagcttattttttgttcagggtgaggtggggactctgacatataatgtagaaagattgcattaagtttgcaagacaggagcaaaatgttggcaagttgcagagcagccaggcagacaaggacctctcttagcttctcactctgtcccattgtgcatatcggcttgtcgccgctggcttgttagcaatgcctgaatgaacgggctttgtggatcctctaaagctctatggataa

SEQ ID NO: 788379 - DNA, 504 bp, Homo sapiens
acttaaacatacatttgtcatacagcctagcaattgcactttgggcatttatcctagagaaatgaaaacgtatgtctatacaaaaacctgtataagaataactttgtttgtaaccaccaaaaactgggaacaacttagctattcttcaacaggttaaacaaaccctrgtacattcacatcatggaatactactcagcagtaagaaggaatgaactattattgacacacacaacagcctggatggatctagagggtattgtgctgagtgaaaaaagccaacctcaaatggtcacatactgtacgattccacttatgtaacattctgaaatgacaaaattatagagatggaaaacagagggccggatgccaggggttagggagggtggcaagcaggcaggcataactatacagaagcagcctgggagggaggtggttgtggtgatgaactagttctgtatggattgcagtactggttacatgaatctacacactgatgaaatgaca

SEQ ID NO: 788380 - DNA, 616 bp, Homo sapiens
gcaaaagggtttaccaaacaagacggtgcagagagtctcaagtctgtctactccacagcagcctgctctttcctgttgcttttcaaggaatcagcagagggagacctggccagcagctcctgggcagcaaagtatccccagactgtgttcctggtggttggctcaagccactgaagcggtggttaagactcaagaccaggacctggagatkcacaaggaccactgggatactatttcactaataacccaatagaaatggagtcacttccaaggcactctgctttggggaagggcagagtgccatataccttctactgggtaacaggactgaagaaggcacctctacagacttatggcttcactacttgtagtgaaagctcatgactcacaatgcagtttatagttgctcatgaatctttgcaggagtgtttcctataggcagcattttacagggacaaaatatgggaagttttaagattaaaaaaaaaaaaatgactaaactaaaccaaaaatcaaacataacaaaaaaccagaatatcctaagccccaaaccttcaaaataaaataaagtccttgccatttacagtttggagagggaaaaggatttctactttca

SEQ ID NO: 788381 - DNA, 498 bp, Homo sapiens
atgagacccactgggctgcattcccagatggttaaggcattctaagtcacaggatgagatcaacacaagatacaggtcgtaaagaccttgctgataaaacaattgcagtaaagaaagtggctaaatctcaccaaaaccaagatggccacaagagtgacctctggtcatcctcactgctacactcccaccagcgccatgacaggttacagatgcgatgacaacatcaggaagttaccctatatggtctaaaaaggggagacatgaataatctaccccttgtttagcagatcatcaaaaaataaccataaaaatgggcaaccagcagccctyaaggctgctttatctatggagtagccattcttttattcctttactttcctaataaacttgctttcattttactgtatggactccccctgaattctttattgcatgagatccaagaaccctcccttggggtctgggttgggacccctttcctataacaatgggaagaat

SEQ ID NO: 788382 - DNA, 498 bp, Homo sapiens
atgagacccactgggctgcattcccagatggttaaggcattctaagtcacaggatgagatcaacacaagatacaggtcgtaaagaccttgctgataaaacaattgcagtaaagaaagtggctaaatctcaccaaaaccaagatggccacaagagtgacctctggtcatcctcactgctacactcccaccagcgccatgacaggttacagatgcgatgacaacatcaggaagttaccctatatggtctaaaaaggggagacatgaataatctaccccttgtttagcagatcatcaaaaaataaccataaaaatgggcaaccagcagccctcraggctgctttatctatggagtagccattcttttattcctttactttcctaataaacttgctttcattttactgtatggactccccctgaattctttattgcatgagatccaagaaccctcccttggggtctgggttgggacccctttcctataacaatgggaagaat

SEQ ID NO: 788383 - DNA, 572 bp, Homo sapiens
ttactgtatcaaatacctctacctatcctcaaggccttctaccaatttattgccttctttattttatcagttttatttgttttactcttaacatagactatttcacattataaaatagtcatagaaatcgggtagagaaaaactaagaagtccaaatgcacatgttttatttattattattattattwtttttgagacggagccttgctgtgtcgcccaggctggagtgcaatggcaccatcttggctcaatgcaacctctgccacctgggttcaagtgattcttctgcctcagcctcctgaatagctgggattacaggtgcccaccacaatgtccagctaattttttttctagttttagtagagatggggtttcaccatgttggtcaggctgatctcaaactcctgacctcaggtgatccacccgcctcagcttcccaatgtgctgggattataggagtgagccactgcgcccagccaaaatgcacgttttaaagattatttattggctgttcctatcaaatcttttttaaaattctctagttcacattaaagatctggttattcctttac

SEQ ID NO: 788384 - DNA, 526 bp, Homo sapiens
tgggagctcaccatcctcttgttctgatccaaaccagcggctgtttaggtctgctccatagtttttgtcttgggatattgctttgtcataaacatgggaatttgtctctttcctgtatatattatttcctctgtggttttgggtgctttgatcttyctttatcttaaattttttagtggttaacatcctttcataatttcctgagataaagagttcacgagagatacagaccctccataccagcgtgagcgtttcttttacctttaacgtgattgattgtctctagatgtaagttgaaaatatatttctctcagatgttgaaggctttgtaacattgccaagattcttgtgatgttattgaaaggtcagatattgccttagttggtgatcctttgtaagtaacctttattttctctctggaagcttttgatctattattgttattattattatcccgggcactctggaatttcatgatgtgctttggtttttttttttttccacttattgtctttaccatgtagtg

SEQ ID NO: 788385 - DNA, 551 bp, Homo sapiens
ctgagttttagaaaatttttaaaaatttcttggactttctccttattattgttattttttaaagtttttcatagagtcaaggtcccactgtgttgctcaggctggtttcaaactcctggcctcagtttcctttttatttatgttttgtcttcctgaagggccagtgggtcagatgttggatctcctgaactactcctttaattttaataacatcttttatcctctatattaatttctttgtatttgtgtttttctaccctctagatttcttcaactttgtcttytagactttactgaatttttatatctgctttcacctttttgttttccaggagttttttttcttggttactaactattcttttattttatagcatcataatatttttatttaattattcaattaggtttctaaagcagctttgttgagatatgattaacatgcagtaaactatttatatttaaagtatgcattatataagtcttgacatatgtgtacaactgtaaaaccttcaccacaatcaaggagtaaacatatatcaaaccagaaa

SEQ ID NO: 788386 - DNA, 607 bp, Homo sapiens
gacaatctcccctctactatctaagaaggaaaaaaaaaaacttgctcccatgaactggcagcaagaggggccactaatcagccaagaattgctgggtggggagtttcagagtaaactgaaggcacccagcaagctgtggcrtggattattgcagcatcctacaggacagagctgagaaaatggcagtgggtcagcctgggctggggaatgcagagcactcattattgagacgtgcaacttcaaagttaccttttactctaccctagctagttacccaggtataaatcctattgttcttccttcgaaatatattttgccgctagttacccagactggaaacctcagttcccatgagagttcctccccgttttcacccatctttttctaatcagttgtcaagctctaactttcagttattgtcactactgtggccactgttcaagttcagagaccttaaacaaaaatgttgccaaagtcacatgctaataacttgaagatccgttggccccaagccccatccttctcccctaatgacacaagatctcaagttttgtccttggacagtcaagcctcgtgtcagtactggcacagagcgatgcttcataaa

SEQ ID NO: 788387 - DNA, 576 bp, Homo sapiens
acatttacctatttttattgggctgtctttttattacaaattcataataatcccttaattgttcctgaatcagacaggtatagtatagacattttctatgagtctatgacttgcctattcattttcttactgatgtcttttgaaggattgatattttaaattatgattaaatgtatcagtttttctttaaaaaaatgtggtctgttaaagaaggagctgtattcatttcccagggcatccctaacaaatggccacaaactgggaggcttagaacaacggaaatggwttcctttgcagttctggaggctggaagtctgaaatcaaggtgtaggcagggctgtgctccctctgaaggctgtggggaagggtctgctccagacctgtctcccagctgctggaggctgccagcaacacctgctgctcctgtgcttacggctgtgccactccaatctctgcctccattggcacctgaccctctcccctgtgtgtcttgtatcttctcttctgataaggatgcaaatcatattagattagggcctcccctacttctatgtaaccttaactaattacatctgc

SEQ ID NO: 788388 - DNA, 613 bp, Homo sapiens
tacacacatacacatgattttgtttctactgctctagagcaacaatcttgaactatttgctagaatgctcctgacctagtaaaatctcaggaaaggccgacaagtccttacaagttatagagaaatgatgtattaacctattggcctaaacaaaattctgtgagcccagttgtacaaatgtctggaaggttaggtctgtgtgagttaattctgagaaaaaaatgaattcctggattgtagaaattgatgttacagagcttggggctggttgggagtggaagtcccaggaatgtcatctccgggggctccagatggttccatttctccaagggccctgaccctgtgtcattgctgtgtycagccaccaaggggtgactttgacttggcagagttctttgtggtggctttggcagcagtggttctaacaaattcagcctgatggtttgagggagctccagttcctgggtccattctaacttcctaactttgcaaattcctggagtggcctaactaactaaaggaaccactcctaactacaaatgagacctcaagaacaggaaggggtgcagaaacccagctccagggtaatggtgagcaggtcagcacaggggtc

SEQ ID NO: 788389 - DNA, 613 bp, Homo sapiens
tacacacatacacatgattttgtttctactgctctagagcaacaatcttgaactatttgctagaatgctcctgacctagtaaaatctcaggaaaggccgacaagtccttacaagttatagagaaatgatgtattaacctattggcctaaacaaaattctgtgagcccagttgtacaaatgtctggaaggttaggtctgtgtgagttaattctgagaaaaaaatgaattcctggattgtagaaattgatgttacagagcttggggctggttgggagtggaagtcccaggaatgtcatctccgggggctccagatggttccatttctccaagggccctgaccctgtgtcattgctgtgttcagccmccaaggggtgactttgacttggcagagttctttgtggtggctttggcagcagtggttctaacaaattcagcctgatggtttgagggagctccagttcctgggtccattctaacttcctaactttgcaaattcctggagtggcctaactaactaaaggaaccactcctaactacaaatgagacctcaagaacaggaaggggtgcagaaacccagctccagggtaatggtgagcaggtcagcacaggggtc

SEQ ID NO: 788390 - DNA, 613 bp, Homo sapiens
tacacacatacacatgattttgtttctactgctctagagcaacaatcttgaactatttgctagaatgctcctgacctagtaaaatctcaggaaaggccgacaagtccttacaagttatagagaaatgatgtattaacctattggcctaaacaaaattctgtgagcccagttgtacaaatgtctggaaggttaggtctgtgtgagttaattctgagaaaaaaatgaattcctggattgtagaaattgatgttacagagcttggggctggttgggagtggaagtcccaggaatgtcatctccgggggctccagatggttccatttctccaagggccctgaccctgtgtcattgctgtgttcagccacyaaggggtgactttgacttggcagagttctttgtggtggctttggcagcagtggttctaacaaattcagcctgatggtttgagggagctccagttcctgggtccattctaacttcctaactttgcaaattcctggagtggcctaactaactaaaggaaccactcctaactacaaatgagacctcaagaacaggaaggggtgcagaaacccagctccagggtaatggtgagcaggtcagcacaggggtc

SEQ ID NO: 788391 - DNA, 638 bp, Homo sapiens
gattttggatccctattcagtggagagaacattgagtaaaatgagaaaacagcacacacagaaatgcctgtgatgtggctgatgagaggagcaggtggagcagttcctacccaccctaccactatcctggccctgtctccacaagaggtacctttcaatagttatccaaatgtattacattcggatgacgtgttcagacacctgaagaagttaaccaaatggccactcctctttgatgtgctgagggttggtcttctagcccgaccctagctttctccccatgatctgagaaaatggcttccccctctcagggatacttcaggaaagctcagtgtggagaattcgggattacacaaatttatcaatccaaggactcgtcattaaaacactgaaggagscttttaggggagatttcactgattcagcagttattggctgcaacctgctctgttggaaacacagtgttggggatgtggccagggacaacgccggtccccatcctgggggagcttcagcttggaaagtaaatatcttgactgtgctacaaccgtgatttaattcccaaatgtggacatttcacgaatgtgttataagatgtgaagtgtacctttatcacagaacaaacaagaagaagccaa

SEQ ID NO: 788392 - DNA, 514 bp, Homo sapiens
taaattgcatatgctgtttcagtaaacttggaatggggcccaatattctgattttaaacaactaattctattacctttggattcaagttttgtacattgcattaattagttcacaataaaatcacttctaataatttatctcattattgcctaatctagtcaaaattttgtgattcagaatccagttcacaatttcagtccatcagagtcatcataaaagcaagttttaaaaagcacattgatggtcagctaattttcaactgaccacgaagattatttagaggwatccaattacccaagtcttaattattaaaagtttgctgagatgggtcattatgatatgtacataattttatatttgactctttgcttttgattgtcctcaggtgtaaattttaactttttagactgcaaaataaaatttgagatataaatttagggtctgttcatatactacaacatacacattttttattatgaagtgatataaatgatataaaagaaacctgaaagt

SEQ ID NO: 788393 - DNA, 634 bp, Homo sapiens
ccagattgcctttcaagtttagttggagatacagagcactgtagccttcagtggtgaggtttatgggagctcaagttcaaaccactgggaggcacaattcccatttggccagggctggtttaaatgccccttcagtgggcaggcatcaactgaatttggtccaggtttcctttctgccctgacaggacagcactgagttcaatgcytcacaattgctcttttctccctccctcagtacccagagatgctctgcacaccaggcagctgcttccagtgtggggggaggagtggtgtcagcgattcaggactatttttttaatctcttcagtgcttctttcagccatatgaagttaaaaccaggtactgtaagtgctcattttatctttcgttcttatggaggtgtttttctctgtgaaggtagttgttaacttggtatccttgcagggggaagggcaatcggtggagctctctattctaccatcttgctctgtctctcagtattactttgtgtgttttgcgatttgtataaacactgtcatactttgtcatctgaaacacgttttttttttcccttccaatattacatatccaataaatatccatgttgttacatatccatctaggccattctcct

SEQ ID NO: 788394 - DNA, 596 bp, Homo sapiens
tggtcaagatattttcacaaaggtaccaagggaattcagtagggaaaataatggcttttcaacaaatggttctaaaattgttagatatttacatgtaaaaaaaatgagacctgattcatatattgtacccttataaaaattaactcaaaatgtatcacagaataaatacaaaactaaaatataagacttgtaggagaaaatatttatgacccaggtttaagcagagatttcttagatgtaacttgaagagaataatccataaaattaaaacrtgaaaaaaatagttgggcttaatctatgttaaacatttctcctccttggaagacattgataagagaataaacaaacaagtcaaagactggaataaatatttgaaaatcgcatattggaattgtaaccaattaaggaattgtgaccaaaatatacaaaaatctctcaaaacacaacaaaatgaacacagagaactcaatctaaaaactgggtaagaaatttaaacagttacttcactagagaaaatacatggatggaaaataaatgaataaaaagatactcaatattatttataattagggaaataaaattaaaaccacaattag

SEQ ID NO: 788395 - DNA, 674 bp, Homo sapiens
ataaatacattattaaaaagatacatgttggtgaggttatgtagaaactggaacccttgtacattgttggtgggaatgtaacatagtgctgccactacggaaaatagtatagagtttcctcaaaaacttaaaaatakaactgctgtatgatccagcaatcccactgattggtatttatctaaaagaattgaaactcagattttgaagagatagtatttgcacccctattttcattgcaacattatttacagcagccaggatgtggaaaagtgtccattgatggataaatgtgtaaagaaaatgtggtatatacagacaaggaattttattcagcctttaaaaaaaggaaattctgcaatgcaacaacatgaaggaacacggaggacattatactaagttaaataaatgagacacagaagggccagttctaagctctcccgggcctgaaagcttaagtagatgaaaaactcctcccttctcaggcccagccggaagacgcaaggccacttgcgtcagcagcgtgcgtcagcaaggtagcagaagcaggaagagagccagcaagaagacacctaccctggcaggaagacacgtacccgtgaagatagagaaagaggccatccaggtacaacgtagcagttacctcagaataggacacctcctgtttccaggagact

SEQ ID NO: 788396 - DNA, 576 bp, Homo sapiens
ctgagtgttttctggatcctatgatttcctgtttggtttattatctaaattgtttgcatttatcagttactgctgctatgactcaatcattataataacatgatcgaaagcctcctatttaatatctactgcaatgcacatttgctgcactgataatattcaagtctgccaaacaggataagaaaaacaaatgggatagaagaaactcataagatatgctaagcacagttaatgaataatttagcagcttgtraagaaaggaaaagctcataaagatgtgttaggtagaggtggacaaataagttaattacctaagaaacgtgtcagccatagatacagtaactaaaatgtgtgtgttaagcttatatagaaagggctggaagaaacaggataaaagtaatattatgatagttgaagtcctgaaagggttgtaagcatgttattcagccttctagttgctcctcatttgctacaactaagactcaatagcttagttgaactgactttttatgttactcttctgagagaacacagtaaaaagctcaaacacagacaaaagtaggcatcctggaatca

SEQ ID NO: 788397 - DNA, 576 bp, Homo sapiens
ctgagtgttttctggatcctatgatttcctgtttggtttattatctaaattgtttgcatttatcagttactgctgctatgactcaatcattataataacatgatcgaaagcctcctatttaatatctactgcaatgcacatttgctgcactgataatattcaagtctgccaaacaggataagaaaaacaaatgggatagaagaaactcataagatatgctaagcacagttaatgaataatttagcagcttgtgaagaaaggaaaagctcataaagatgtgttaggtagaggtggacaaataagttaattacctaagaaacgtgtcagccatagatacagtaactaaaatgtgtgtgttaagcttatatagaaagggctggaagaaacaggataaaagtaatattatgatagwtgaagtcctgaaagggttgtaagcatgttattcagccttctagttgctcctcatttgctacaactaagactcaatagcttagttgaactgactttttatgttactcttctgagagaacacagtaaaaagctcaaacacagacaaaagtaggcatcctggaatca

SEQ ID NO: 788398 - DNA, 634 bp, Homo sapiens; identical to SEQ ID NO: 739261

SEQ ID NO: 788399 - DNA, 603 bp, Homo sapiens
tctgaggagaaattgaagctggctgcagatatttgcataagtaatgaggagcctaatgttcatccccaagacagtaaagaaaatgtctccagggcatgtcagaggtcttcttgtcagcccctcccatcacagactaggaggcctaggagaaaatggtttcatgggccaggcccagggttcctgtgctgtgtgcaatctatgaagttggtggcctgcatcctggccactccagccatgactaacaggggccaaggtacagctcaagctgttgcttcagaggatggaagcccgaagccttggcagcttacatgtggtgttgagcctgtgggtgcccagaaatcaagaattgaggtttgggaacctctgtctagatttcagaagagttatagaaatgcctggatgcccagacaaaagtttgctgcarggatggggccctcatggagaacctctgctagggcagtgtggaagggaaatgtggggttggagtcccaacacagagtcgctactggggcactgcctagcagagcttgagaagagggccaccatcctccagacctcagaatggtagatccaccgacagcttgcactgtgcacctggaaaag

SEQ ID NO: 788400 - DNA, 543 bp, Homo sapiens; identical to SEQ ID NO: 739262

SEQ ID NO: 788401 - DNA, 615 bp, Homo sapiens
taatagagaatttgccattttaaccatttctaagtgtaatgatttagtggcataaattacattcacaatcttgtgctaccatcaccactatctatttccaaattttttcgccttcacaaacaaattctgtaaccattaagcaataactccccactccttccaacccaactccctggtaacctctaatctgctgtctcttaattcatctgttccagatattttatacaagtgcaattatacaacatttattctctttctgtctggcttatttcacttagcatactgttttcagggtctgtagtatagtacatatcagaacttcattttytatggctgaataatatttcattatatatatatgtacctcattttattcattcatctgttgatggatatgtggatttctgcttttgactattctgaataatgttacaattcagagcattggcatattaataacctgtttttaattctttggggaatatacctaggagtggaattactgggtcatatgatagttctatctttaactttttgatgaactatcaaactgtcttctacagcatctgtgtgattttacacttccgccatcaacgtacaagggttctgatttct

SEQ ID NO: 788402 - DNA, 600 bp, Homo sapiens
catttgaatataaaatgtttaaataaaaaaattctttaaaactaagactttcacaaaaaaaaagaaaagaaaaattaaaagaaaaaaagagaaagcaatcccagctttgtaagttactagccatgcttcataaatagtctaagcataatttcctcatttataaaatataaaaaataatatctactatacaggactgttaaaggactatacttgccaatatatrtaaaaaacagttcctggtataaataagcactgaataaatgttttagctactatttttagtaagcatagaacgtctgtagccataaacccacaaaaataaaacttcctgagaaagaagacaatgtttgcacactttgttaaaacaattgttatgtttgttgcatagaaaaaaatcagattcaccgtgatttttttctacatgtgaataccatttattaggctccctaagtgaatgagctagtagaaaggaaatattatatttaaaaaaccccataaggcatatttttagaaacggtatttccttgactttcattccaggaaaattctaacacacggcacggtgcatgtggagcccagaaaagaaagcctgccagatgc

SEQ ID NO: 788403 - DNA, 524 bp, Homo sapiens
tggtctgtaaatcatagactgatctaatattaatttaatttttctactagactgtgtgggcaaggagaacgggtaacataactatcacttatctcagggtccaacatggctcttggcatatagtatcctcttcaacaagtatcagttaaatgaaagaaagaaattataaaatttacagaatttacagagttcatcctaaagagacaagacaaagtagtatttggttgttgrgtccacaatgtcacaacataaattcatatatgattctaagcaaatgacatgtggtattctttctatttgtcttattaagtgaatagtaagagccatgagggttcttgttagttattcctttattatagttggaaaattatggtgatgatgacttacatttcacagataatgaggctaagaggcacaaggaatgaaggtgtgttcacagaataaatggacagaattggtctttgaatgcttgttaatatggcatctggaaggcagacctcatgcttcccttcctttctagctac

SEQ ID NO: 788404 - DNA, 596 bp, Homo sapiens
ataggccctctgaaagaaatgctttcgactacgatggcagcagcaaaaactctgttaaggacagcttcatgagcacaacttcccagccactattcccacctgaaaagtacatattctggtctgcatttttttttctacaagtattttgctttgattcattgttgatacacatgacagcagaataataaactaggtagtttgagcctgtgtgtgactgggattmggcataagcatcacaattttggtttgtaaattcctttggttcagtagatcaaatggggaaagacttgtgtaatgtgaaattcaatgaccagcaatggcagggatcttttggatatgtaatctgctgttggagccatgcttggggaccaaatagatgagcaggccatgttaggaagggcagcaaggaaaagagaaaacatgaattaatattaaaaatgtgatgcaaaataaaatggaggttatagtcatatccttccaattgtattgagctgaaattgtttctggatttggaagctccttgctaagctaaattgcaaaaataagattatatgaggagaaaaggtaatttccaaaatataataaacataatacaa

SEQ ID NO: 788405 - DNA, 610 bp, Homo sapiens
ttatattggaattggatgaatggatgtgaactcatgttttttaaaacacatagacagatacagaataaatatacgcatatctcttcttgacccttcgttttcttatattctcaatgatgaatagatataagcataggtatatagataatagaggtgtaagttgaaggctaattatttttgcaaaaagtaattccttccaaaggatatagtagtgatttgatgtagagctgataatcttttgaattgaaatatctatgatttgaaaacgaaataacacaaatttttaaggttactgatttacttttttctattctttcctttgtagtgtccataaattctttaacttactaaaagaaattgataccagtaccaaagttgataatgctatgtcaagactgttgaagaagtatgatgtattgtttgcactcttcagcaaattggaaaggtaaagtaaacattttattaggkttacactctgattttttatgtcattgttcacaattagattctgggaattatttaacacatttagtaaagttagtaagtattaattcttagacttgtcccttttaatgttagctcattaattcttagctttcttatttatcca

SEQ ID NO: 788406 - DNA, 629 bp, Homo sapiens
tttgtgattttctgatactatcattctttgtatatttattacttgacattccatttaggaaaagcatttccttccctccagtgtatgtatttatataaatatttatctactattataatgcatgtattcttactatcctttatttattctgatccccaagccgatgccctagatgtggccagtgggatcccgcagctggctccagtgtccttctgacaggccccagcagtgactgatcacttccttactttcctggcacacgatgatccagggctatcctgtacgttccctacactgggcctggaatccaccgttttcytaaataggcctggttccttttagtggggaggagtgtttagaaaccagatctgggcagtaggtgagcccactgctaccaggaggccactgcttctgagccctctcggtcagagtgagggtatgtgtacacacacacacacacacacacacacacacacacacactctctcatgagtttacgatgatagtgataattcctttccaaccccacagggttctcccttgcctttccctgctttatatatttattttccttcttccacaataaaatcaaccgagttcctcatttgctcaaatctataatacacaca

SEQ ID NO: 788407 - DNA, 541 bp, Homo sapiens
caaggacttactcagtgtgctatggaccaaggctttcaaatgttttccacctcatggcacacacagaaaaagacagatttgcatggtccacaggaaaagccaaaactgtttacagctggcccagtggcttcaggccctttccagttgcccccaagcggggaggggaccagtatctcagcccatctatgaccatggcacagtggctgggaagctttaccccaggccataaggaaatacttacacatttaggaaacaggttgatttaacaggagtctctgacaaaggggatgacctaccacggagatcaagggcagaaaaagactagatcgttttacttgaatgagtwaatgtaaaatcacaaaattatcacatctactaatgtacctggtaatactttcagcaacaaaagtagaaagagaattaagacaacctccctgccttttagaagctcatagtctggtattttaataatgaaacactttttcctttttcttccaggttatcaaagcaccctttgttagatccagtggatcctcctgag

SEQ ID NO: 788408 - DNA, 537 bp, Homo sapiens
tgacaaggaacagccaaaggaataaatgtccccttgcaactgagccccagcacatagacttcatgtgccctcaaggcctgtggtaaccagacccaccgagacctcatttattcattccacaaatatttactcaatgctaatacgtgccagcctatgttctaaacactgaaacatagtaaggagcaaaacagaaaaatccctgccctgatgcatcttacattttcctattccttcttctccaatgaaaatgttagagaaagcataagggaactttgtacattccctawtttattaccccaagaatgtgaatgcaaattagggattcccaaagttatttctgccatttgtcatacattttgaaaagattattcttttcatgacagacagaaccatgtgcctttggcagttactctgagacttgctattctttaagtgcaaaagtgattcagattgaactttctatagcttttctatctcatatgagggaatagaaatgatactaaattaaaagattttgaggtacccaattaaaatgct

SEQ ID NO: 788409 - DNA, 567 bp, Homo sapiens
ccccacttatctgtggggatacagtcttaagaccccccagtgatgcttaaaacctcagatagtaataaaccatatatacactatgttttttcctacacatacatatctataaaatttattttataaattaaactcagtaagagattaataataactaataatagaaaatcataacaatatgccatcatcactactcttgcactttggaatcatgagtaagtcaaataaagcttraacctcagccttgtgatactgcgaaagtagatctgatgaccaactgggcacaagtgactgatgggtgggtgggtggtgcatgcagtgtggatccctgggacaaagggattattcacgccctggatggagagcagtgggacagggcaagatttcatcctgctactcagaatggggcacaagttaaaacatatgacttgtttatttacagaattttccatttaatattttcagaccacgggtgactctgggtaactgagacctcaggaagtgaaacctcagataaaggtgggtaggggaactgctgaagcatttacgtcactttgattttctagc

SEQ ID NO: 788410 - DNA, 567 bp, Homo sapiens
ccccacttatctgtggggatacagtcttaagaccccccagtgatgcttaaaacctcagatagtaataaaccatatatacactatgttttttcctacacatacatatctataaaatttattttataaattaaactcagtaagagattaataataactaataatagaaaatcataacaatatgccatcatcactactcttgcactttggaatcatgagtaagtcaaataaagcttaaacctcagccttgtgatactgcgaaagtagatctgatgaccaactgggcacaagtgactgatgggtgggtgggtggtgcatgcagtgtggatccctgggacaaagggattattcacgccctggatggrgagcagtgggacagggcaagatttcatcctgctactcagaatggggcacaagttaaaacatatgacttgtttatttacagaattttccatttaatattttcagaccacgggtgactctgggtaactgagacctcaggaagtgaaacctcagataaaggtgggtaggggaactgctgaagcatttacgtcactttgattttctagc

SEQ ID NO: 788411 - DNA, 601 bp, Homo sapiens
caccttcagagagtgaactaataagagcatggtagcaaagtattgccctgaggcccagctggacttcaaattaaacaagaattggagttggaaagctactaaaataaaagcaagcaaaatctgggagcagtaggtgagttgcacaggaagatacatttagttgcatgtatggatggcttttctaatgaatgggaacattctagaaagaatgtggctgcctcatgaggcctgtgttcctggtctaaatgattcccagcagaagctgattgacatttggctcacactgatgccagggagattttccctttgggtggaaatgtggatgaataatttaaaatggtttctctgactctaagattctgtgagtctatggcaggatgaatttgtggtggtggtatggaaggacaggaagacctttgaatccagcatcaggaagaatkactcccagtgacatttattctgttctgaaacactctgttctcatggatttggaagaaagtagtagtcgagattcatttatcctgtagtttagagtcacacattctgtagagttggcaaggtccacaaaagtcatcagatccaaccttgtactcactttcag

SEQ ID NO: 788412 - DNA, 601 bp, Homo sapiens
caccttcagagagtgaactaataagagcatggtagcaaagtattgccctgaggcccagctggacttcaaattaaacaagaattggagttggaaagctactaaaataaaagcaagcaaaatctgggagcagtaggtgagttgcacaggaagatacatttagttgcatgtatggatggcttttctaatgaatgggaacattctagaaagaatgtggctgcctcatgaggcctgtgttcctggtctaaatgattcccagcagaagctgattgacatttggctcacactgatgccagggagattttccctttgggtggaaatgtggatgaataatttaaaatggtttctctgactctaagattctgtgagtctatggcaggatgaatttgtggtggtggtatggaaggacaggaagacctttgaatccagcatcaggaagaattactcccrgtgacatttattctgttctgaaacactctgttctcatggatttggaagaaagtagtagtcgagattcatttatcctgtagtttagagtcacacattctgtagagttggcaaggtccacaaaagtcatcagatccaaccttgtactcactttcag

SEQ ID NO: 788413 - DNA, 595 bp, Homo sapiens
agtctccccggacagccacttcacgcctttccctggttcccaaacctcagtcctgccagctgcctgggctctacctctatgccactgctccacaggctgcttggctctattctcactgccctttgtttcccagccttgggtcagggacagacctccatccatttcatgggaagactccctaaggcccagaacttctccayctcagagggatgaatggtggtcagcagagatgctttcaggagtgagggatcagaggctctgggaaatgcctcaccatttcacagaagcccttttccttctgccaaccccccaggggcatttataaaattccagagtgagattgagaagctgaactaactcacctgcagggctgggtctcccccaccaggcagccacaatagcctgcaaggcatctgctgagtgtgggagaaatgctgcttttcaacgtaggtatgagggcagaactcatgcgtgtttgtcaaaaaggcctcccacagtttttgaggcatcacacatacacctactcacactcccccatggaggcatgctctcctctctcacacacgcacatgcacgcagggactcacacatatca

SEQ ID NO: 788414 - DNA, 657 bp, Homo sapiens
ccattctactttctgtctgtgaatttgcctactccagatacctcatataagtgaaatcctacagtatctgtccttttgtgatgggcttatgcatttaatgtaatgtcctcagggtccacctgtgttgcagcgtgtgtcrgaattttgttcctctttaaggctgagtgatattccattgtatgtatttactacatcttgtttattcatccatccattgatgaatacttgggttgctgtcaccttgtggctgtgtgaatactgctgctatgaaagtgggtgtacaaatatctgttcgagtccctgctttcagttcttttgggtatatcccagaagagggattgctggatgatacggtaattctagttttttgatttttgaggaattgccatacctgttgtccacagcaactgtgaggacagcgtgagaccgtttattctcctcttttgcctgtagctgccctgcccattcgtattcccccctccaaacccaggtgtgatgggggccctgtctccgagcagacagggaggcaccgtagatggcacactggatctggctcctggcccaccccatctgtactctagtcctttggccttgatgacccattcctggaggcaaaatgctttcctctctgtgcctcaattaattgggtttcccagc

SEQ ID NO: 788415 - DNA, 585 bp, Homo sapiens
attgtatgtatgtacctcattgtatgtattcattcatcagttgatggacatttgggttgtttgtactttttagctgttaggaataatatgctatgaacatttgtgtacaagtttttatgtggacatctgttttcatttctcttgggcatatacctatgcgtggcattgctgagtcaaatggtaactcagtgttgaaattttggaagaattgccagactatttctcaagcaggcatgcaccattttacatttccatcagctatgtatgggggctccagtttttaaactgatgtgtgctatttaaaaatttaaaaattgtggtaaaatgtataaaacataaactttaccattttaaccagtttcagtgtacagttcagccatagtaagtacattcattgttatgcaaccaatctccagaatctttttatcttgcaaaactgaaactctgtacrgattaaatgcaagtccctatttatcccactcccagcccctggcaacctctattttactttctgtttccgtgtcaccaacactttttcccatctgctttattgattctagccagcttaactaatgtgtctgaagt

SEQ ID NO: 788416 - DNA, 618 bp, Homo sapiens
cagtgacattgtcagggcagggactcagagggacattccgtggctggggttgatcagaccagctctgtagagaggtctaatttgcataacatcaactcaccggttgtaggtatgcagtttgatgatttttgggaaatgtagtgtgtgcagccactaccaccgtccagctaaagaacacttggctccccccagaaggcttccccacgccttttaccaatccctgttcccacccaagactaggccacagctgatgggctttgtgtctacaccttttattaagcgaacaattcagtgatttttatgtttatggagctctgcagccatcaccacagactaattttagcacgttttcaccaccccagaaagaagcctcgcgccatttgcagtcactttctgttcctagccccagcctcagagctattttttgtgtctattattttacttttctggacatttcatagaaatrgaatcctgtaatacgtggtcttttgtgactggcttctttcactgagcaaaaccttgttttcaaggtttgtccatagagcatgatcagtgcttccttccttgttaaggctgcgtaatatttcagtgcatggctatctataccgcactttgtta

SEQ ID NO: 788417 - DNA, 489 bp, Homo sapiens
agtgatgtgctgtaggttaagggcatgtttcaaatgctggtatcatggttgataaatttgcattccactttccagcccaaaccagttcttcttgactttttttttttttttttttttttgagacagactcttgctctatctcccagactcttgctctgtctcccagactggagtgcagtggcataatctcggstcactgcagtcttcgcctcccgggttcaagcgattcttgtgcctcagcctctcaagcagctgggattacaagtgtgcaccaccatgcccggctaatttttatatttttagtagggacagggttttgccatgttggccaggctggtctcaaactcctgacctcaagtgattcacccatctcggcctcccagagtgctgggattacaggcgtgagccactgcccccggcctctccttgatgttttaggtgggaatgttttggctggttgggatgggctagttctgctaaggtgcttca

SEQ ID NO: 788418 - DNA, 592 bp, Homo sapiens
tccagtgagcactttgaaaatacaaaacatttaattaaagaccctatcttggagaagtgtatacttatttgtggaggctaataccttggccatggtaaacattcacagaacaatatatgagtaatatatatgcccactttcatttttaaaacctggtagctgatgtcgtaagtaacccataaaattrtcttaaaagggaactcctatggagtactagtactggattgtatacgtctacatttttcctgtaaagccccacacaatgccttgtctataacaagcactcaaaaactcttgcttaaataaattgaattgatttcttaaggttaaaaaattaagttgcagaatatcatgaaaatgttaagaaccttttgtctgaaggtgctccactgttgggaaatgattctgtactgaagcaaattgtcacgcattttaactcagaacaatagtccaggatgctccacagccttagaaagggtttcacttcagagcagccaaaaggaatgtgcgaagtaattttctgtactataacctaatgtagggaattgagtgggaaaattgtaagaaaacctaaggaattacataagcagga

SEQ ID NO: 788419 - DNA, 609 bp, Homo sapiens
ggatgtacgttgcgtgctccttatgagaatctaactaatgcctgatgatttgaggtggaacagtttcatccccaaaccatctctctcccttcatgtccatggaaaaattgtcttctacaaaaccagtccgtggtgccaaaaaggttggagactgctggtttacaaccgcaatgaacattcatcatcccacacagtgtcagagggtcgggaacacgggtgccctgcctgtgtgcttccggttccagatttctcagtgggttgtgatcaaggtatcagcggaggccgtattcatctgcaagcttgaccaggaatagaagagccacttcatgggtggctcactcagatgccagcaggtcagtgctggtggctggcaggcagcctcagctcctcacctcatggatytctcctgagcacagttttcctgtccttacaacctggtagctggcttctccagagcaggtgactcaggagaggacaaggtgagagccacagaaccttatgatctagtctcagaagtcacacgccatcatttctgcaatgtcattttggggttccaggtcagctgtatcactgtgggaggtgagtatatagatgtcctagaccattcag

SEQ ID NO: 788420 - DNA, 630 bp, Homo sapiens
ggggagcctttgcggctgtgacccatgattgagtctgggggaggggtagctggaggtggggtacagcctaaggccaatgaaacagtttttcacagcattaacttaatgggaaatggagggactcacaagcagatcttggacttatgactgccacactctgctctgacctgtggggctgacagattgctcctcagtagatgttggacttgggtaactttctccttcatgtcccttaaaacccacgacaattgtgtctatyctggagtttccctggcaagagaaagtgagcgaaaaataagcatttacgtatatatatttgtgtgtgtgtgagagagagagacagactcccagggcgcaggacagagacaggttctgtcactcaggctggagtgcagtggtatgaatatggctcactgcagcctagagctcctgggctcaagggatcatcccaccttagcctactgagtagctgcaactacaggtgtgtgccaccatgcccagctaattttatatttttttgtagagatgcagtctcactatgttgcccaggctggtctcaaactcctgggctcaagagatccacctgccttggcctgtcagcttggggatttggttacaggcatgagccac

SEQ ID NO: 788421 - DNA, 630 bp, Homo sapiens
ggggagcctttgcggctgtgacccatgattgagtctgggggaggggtagctggaggtggggtacagcctaaggccaatgaaacagtttttcacagcattaacttaatgggaaatggagggactcacaagcagatcttggacttatgactgccacactctgctctgacctgtggggctgacagattgctcctcagtagatgttggacttgggtaactttctccttcatgtcccttaaaacccacgacaattgtgtctattctggagtttccctggcaagagaaagtgagcgaaaaataagcatttacgtatatatatttgtgtgtgtgtgagagagagagacagactcccagggcgcaggacagagacaggttctgtcactsaggctggagtgcagtggtatgaatatggctcactgcagcctagagctcctgggctcaagggatcatcccaccttagcctactgagtagctgcaactacaggtgtgtgccaccatgcccagctaattttatatttttttgtagagatgcagtctcactatgttgcccaggctggtctcaaactcctgggctcaagagatccacctgccttggcctgtcagcttggggatttggttacaggcatgagccac

SEQ ID NO: 788422 - DNA, 676 bp, Homo sapiens
ttttctttttccttttgattagaaatatttacaaacatcccaaagaattaagacattattataataaacccacatgtaactgtcttatacattttacaattattacgaattttgccatatttactacttctatttagttttaatttatcattgaaaacatttttcgatgatatagcaagcaaagaagacagaaatgtgagagtcctgggcaactaggatggatggccaggtttatcatgtcaaaggcttaggtaacctgaatatgaatgaataatgtgaagatcagaagaacacgwaggtttctgatttcacgtttagagctgagtagagaaaggatgtgtgtatggttttggtgggatggaaataaactttggagattggcgataatttctatgaattcataatttcaatatggcagagtcttttagtctggtatatgaaaagaccttgcctagggcttgatgatgcccagtaaatgggagcaattcattaaaacccacgggaaacatcaataaaattaatatagtcctcacttgagatctcatataaattttctgtatagaagactgatttacaagacttttataaacagactttgcatattgtatggtaaaatcctctgatttattgcacctacatttattgtgcttctctagaaagatgattcaattattga

SEQ ID NO: 788423 - DNA, 643 bp, Homo sapiens
ttccctttttgttcttttttatcttcttgtaggctcctcttgggcagtgggcctttttgtatttacagtggctaacagagtgacagcacatatcaatatttattgaatgaaagtggatatgtgtaaagacagaattcaataggatctcacatggcttttattctaaaacctgctgcatgaaagttgcttatgcctacataattcaatctccyctaggaacaactaaccacgtagagcatcagttaggattcttctgttgaaagcaatagaaaaaaagtcctaaatagacttaagtaaagatcaatgtattgactcatgtaactgaagagtcccatggtaagctttctttcagacatagctggatatgcaggattaaacaatgtctttttttttttttttttgccagtgttattttccaactctctgttctgtctcctgatgtgttggctctgcttacatgtgggtgcttcattcacatggcagggttgtgtcagccgccaccatcccacatgcttcaaaatttaagaccattagaaatgacagattctcttccaggagctcccacaaaagtcccgagtttcactgtggttggaaggcttaagccaagtgcttactcttgaaccaatcactgtggcttaggctg

SEQ ID NO: 788424 - DNA, 468 bp, Homo sapiens
ctgtagtcccagctacttgaaccagggaagtggaggttgcagtgagtcaagatcacgccagtgcactctagcttaggtgacagagcaagactctgtctctcaaaaaaaaaaaaaaaaagtgaactgaactgccttaattcaactcactgacatatggcagccctagaacgtgattgttttcggtagacaaaaaaataagcaggggatacatttttttggttaaccctgatatgagtggccataaagttccagattccagggaattcacccgtttkggtttggtaattttttttcataatggccgagtattccaggaaaaacccattcagctgggtgtttctttgatcataaagactttggtgttgaagaaagagcagtgacaattgagtagacatttttcgctttctgtgaccacctggtggatccatgcacctactaagtggggtggatgggtgtgcctgcatgtgg

SEQ ID NO: 788425 - DNA, 531 bp, Homo sapiens
tttctaaaacattaatataaatattaatatgtttgaaatttgatagaatactaaaaatgaatatgctttgcaatatgtaaaatttatattttattaatataagcagaggtaaaattccaagcaccttgatgacatgaatttgttttgatattattttaaattttgaatacttataatatatgtgtgtgtgcacatgtatgttgctagtagtcaatagtaaaacattggctaggcttgggtttcttgtaagtctattttagggtaagcagtcggttacagaatgtaaactgtataaatttctgtgttacattcctcatcatgatttagcatttcagacattattttacagccattattttacagtagtatcttaataggccttcaatttgtacaygttcagtgtcattcagcaggtaatatatatttgtatatatgcagcagaaaagtccattaacattaattaggtctgttttaaggaataactaatttgtttagttcagtaaattgtgcatgtatgcagtgagttgacct

SEQ ID NO: 788426 - DNA, 550 bp, Homo sapiens
cagatcacttgctgagtccataaaaagcatgtataggcttggcgcagtggcttatgcctgtaatcccaacactttgggaggctgaggcgggcggatcatgaggtcaggagatagagaccatcctggctaacatagtgaaaccccgtctctactaaaaatacaaaaaattagctgggtgtggtggcaggcacctgtagtaccagctactcgggaggctgacacaggagaatggcgtgaacccgggagatggagctggtagtgagccgagatagcgccactgcactccaggctggtgacagagcgagactccatctcaaaaagaaaaaaakaaaaagaaaaagaaaagcacgtataattgccaaacttttggcttctccacaaaatacaagtttgaaataagttcttatgcacaatggataaaatgtttaggtatagaattgttttattcagaatctcaatacaggttttacgagaatgcaccaacctaaagaacaagaccactgaaaccctacctccaaatgataagactttctgaagccaagctagatga

SEQ ID NO: 788427 - DNA, 607 bp, Homo sapiens
tatagtagttgcttggtggccaggttcctaggactcgtctttctgtaggacacacaaactgtcttgttgtcagtgttctctttgaatcatgcctcagattttctgctggcccagtgttttgatcatctgtgtccctgaattacaaatgcaagactttctgcttctttcagcattcctcacccctcccaccttttctatagcagtccccaggagctcaccttttctgcacgtgaaaagaatactcactcagtataatcatttatgtgaaccacctaattaccctgcaggatatgactcatttgcatataattaaatgtattcagttttaaaatattttaaattttctttggcaacgttatgatctattcatggtcactgagctatagaatttattgctcatttggtgtggttttaggcttatagctaatctttgctgaagtattttagatacaggtaayagaaaaaaagcaattaagctccatatggtgccaaatttcttttgtcctttttccagtattcttctctgccctcagaaaacaggcgtcagaggttgctatcacatcctcatttcatctttgtgcctcttctcttttcctctgctctcttt

SEQ ID NO: 788428 - DNA, 668 bp, Homo sapiens
ttttaaagtgatgacttttcttcctagcaagaaaataatgggaagataagaaacatttaaatgatttggtaaacaagtgtggttgttgctaaattagaaagcagtctgcaagatgcagcggcaggtgaaggcagctgattcttcaaagcacaacagaaacgaaccaaatgtcatctgtagaatgcaaaacaaagtggtatattcgtacattttagtactacctatcagtaaagaaagcccaaatcactggtataccagtaacaagaataaacttccacatcattatgttgagcagttaagaagccagacacaaaagagcacaatcgtgattccattttaaaaaatggaatgtggtatctatagatatcagaagaatttttgtctctgaggtgggagattgactggaaagcatcaagaggcaactttttggggtgctggaaatattatttgccttgatatgggcaatggttacagggattacacatttgtcaaaattcatcgatatgtttacytaagttatttactttgtatatgttagacctcaataaagtgctattcaaaataaacaaataagaacattaattcaaatgaacatcagaaaaacccattaactgaaatgaagcatcaatcccatgcacaattttagggcatgcagattctctgaaagt

SEQ ID NO: 788429 - DNA, 443 bp, Homo sapiens
aacatactcgtccctggtaactgtttctatgaccacatgataatcattaattgtcaaacaattgatagaactatttcaaatactttaaaaataaaagacttttttttttttttgcaagatgagagaaagcatgtcttgtactgtctgagtttacctgataatcagtgttatcatgatgaagtttccaaattgaagactgaaaaggcatcctgtattcttcscattcatacagcactgagttccacatatccacacggctagcactgatgtttagattaaatcagtaataaccatgatctcccaaatggatgagtttaatccacaggttaattcaattccatacatgctctaattttattccgattatccatgctgggttgagataaaaatatctcttgctttaaaaaagaagggacatgtatttttaaaagtctactgatgtg

SEQ ID NO: 788430 - DNA, 443 bp, Homo sapiens
aacatactcgtccctggtaactgtttctatgaccacatgataatcattaattgtcaaacaattgatagaactatttcaaatactttaaaaataaaagacttttttttttttttgcaagatgagagaaagcatgtcttgtactgtctgagtttacctgataatcagtgttatcatgatgaagtttccaaattgaagactgaaaaggcatcctgtattcttcccattcatacagcactgagttccacatatscacacggctagcactgatgtttagattaaatcagtaataaccatgatctcccaaatggatgagtttaatccacaggttaattcaattccatacatgctctaattttattccgattatccatgctgggttgagataaaaatatctcttgctttaaaaaagaagggacatgtatttttaaaagtctactgatgtg

SEQ ID NO: 788431 - DNA, 639 bp, Homo sapiens
gagtgacagaaacactgtcattaaagatgttgcataatcttacttttttgtttttgcctatggtaaattaagatagttttgctcttgccttgaaaggattcagctgtccagcttctcctcccatcctccttcctcccgccctcccaacccatttccctcccccgttcccccaattcctcctcccttttgttcctatacccattatccatggactggactcccaatatttttctctggactctaaccaaaagcctcacctttgtcctttcaatgttgggttgagacgtgttccctgattgggtcaccatcctctgttcaggagtctggggagccattcctcctgacccccaccccmgcgggctgtccaactgtcttgtcctggaattactgctatgtccaggcttccggaacttcagaaacgcatttgttgcacagaactctcggctgtggcttgttggtgcagtgggaactgagctttatttaggtggtggtgtttgaagtaactccagtggtagagaagcatggggcaaaggctaatctttggctggaagtggataccagttctgaaaagcagggagtctgagcagaaagcccacatgttaataaaaaactaaaagcaattataaaattaccattcgt

SEQ ID NO: 788432 - DNA, 628 bp, Homo sapiens
gaaggaggagcagaggaagaaaagagaggagaaggggaaagagaatgggaagaagaaaaatggagaaatttcagactgctaggaagacattcagtatgctatgaagaaaacacagtgggtatggatcagggaaggtctctcccaggagacactgattgacttgaagttccaatgacaggaagttgttggtccgggaaagggagcagcrgatgccaaaacccccaggtgggaacacactgggtgtgttgaggggaagaaccaagacgcttatggctacagtgcagtgaataaggggtgaagggcatgagatggagtcagctcatactccttccggcccctcttttcacacattggaaaggtcagggaaagaagcagtgagatgcccacctttaactattgttcttcccaacaagaagagaggagctgaagaaacctctgtgagtctgggttcctgggcccagtccccatctattcaatgtcctttaaagaatactctgcctgcagtgtttacacttgtacgcgtggtaattctgatagtgacaataagtattggtaattgacagcatcgctaaacttccatattgagtgtatcctcctcttccaattccaactcctctaagatacatat

SEQ ID NO: 788433 - DNA, 628 bp, Homo sapiens
gaaggaggagcagaggaagaaaagagaggagaaggggaaagagaatgggaagaagaaaaatggagaaatttcagactgctaggaagacattcagtatgctatgaagaaaacacagtgggtatggatcagggaaggtctctcccaggagacactgattgacttgaagttccaatgacaggaagttgttggtccgggaaagggagcagcagatgccaaaacccccaggtgggaacacactgggtgtgttgaggggaagaaccaagacscttatggctacagtgcagtgaataaggggtgaagggcatgagatggagtcagctcatactccttccggcccctcttttcacacattggaaaggtcagggaaagaagcagtgagatgcccacctttaactattgttcttcccaacaagaagagaggagctgaagaaacctctgtgagtctgggttcctgggcccagtccccatctattcaatgtcctttaaagaatactctgcctgcagtgtttacacttgtacgcgtggtaattctgatagtgacaataagtattggtaattgacagcatcgctaaacttccatattgagtgtatcctcctcttccaattccaactcctctaagatacatat

SEQ ID NO: 788434 - DNA, 556 bp, Homo sapiens
aggtggaagttgcggtgagccaagattgcgccattgcactccagcctgggcaacaagagcgaaactccgtctcaaaaaaataaaaaataaaaataaataaataaataaataaataagcttaaacaaactattatttatattattatttattctataaagggttttccaagaaaaataaatagctgtgtagaaaaagaaatcagttcactatgctgttcagctgtcaatagtatctttaaagtacagaatactaacaaaagactgattttaccaaaatatctatattggaagaatggggaaggataggaaataatagagggggaaaagggatttaggtcagaaatattgaaataaagcttaatctgaatcttccacagcaggaagtcaatagataatgctawaacttgaaaaatcaagtacaaatatcaagacttctgtttaaagggaagaattggaggtaaatatgaagataataatttagtggccaggcatggtggctcacgcctgtaatcccagtactttcggaagcagggcagacggatgacctgaggtcagg

SEQ ID NO: 788435 - DNA, 627 bp, Homo sapiens
aggctagcagcctgcagctcctcaggctcctgccgggtcctgtctttcagcttctccaagtccagcgccaggtttttgtgcagctcaaagcaaagggcatcagttcttctatatgtcaccgtgtcatcaaggctggaggtggtgagagacagagtcaagtggttcttaagggtttcagtccttgaagctccttgtttgccctgctttttcctatttcctatccagcctttcttcccgacagcygacatctgacctatggagacagcaggtccaacatcagattcaagaagcaacagccctgcatagattcctccaccagcacccacgactgcatcagggctaacccgtggaataaaccactcttaatggttccgcttctctgatcaaaccctgattatgcccagccacctcatttccctcttaatctcttcataggcatctctctggtactccaagcagtttaattacccaggcatgttatgtgagctccacctggacgccattgctatggccttgtcttccactgactcacctctccagtcacccaaatctcacgcacaacctacaaactccaactcaagtcctctctgcagcttccctcgaccacttcagcccctggtgacctcc

SEQ ID NO: 788436 - DNA, 514 bp, Homo sapiens
cttgctcctctccgaatggagatttcccaggggccgtggcctgccagtgggtaggattgacttctggagagacttcctaggttccaggagccagcgttattggtgttggaagggcaaggacctggcagtcttcttggtagatgctcttcagagcctgatcatcccacatgtcggcgggggggaagccactgccacggctttgtaygttgttaaggagaagaaaatggcggggggtgggggggataaccaaatttaatggatgaatttattatgaagaattatttatttattatgctcattctgctcagacagactgcaggcttaaagaaaaggacaactgggaagctaatttctggggcagagcctcaagcctgttagcagacacccaggcacttgtgtatgaaccagtgtcactctgtgtggctgtgcctcgcagtcacacccattctgctcaggcagtctggatttccactcttctacttggggaggggagaatgatcaacaagaacagaac

SEQ ID NO: 788437 - DNA, 638 bp, Homo sapiens
ctcctctcccaggtctgtggatccctttgcctcaggtttcaaggagcaagacttttaaacccacttcagacagagttataagcacagagacaaacaagaggcatcattagaaaaatgagccattgtaaacctgtcctttcctccaggccctcgggcgctgatgcggggtctgggcgcaggatgcgcttgagctgagtcggaaggacaacttggagaccccactcaaaccaggatggagggaggcttttccaggcttggggtacagggtattttcagacctccagaaagaattcgagaaggaggcagagtagcaggactcctgtggttttaccaagagagggcatcccttaaggagaggcaactgctctgagaattgggggtctactcctcaccccccgcggccccccttcacttgcgtagaccccttagtcaggaatcaagcaaattagaaagagactcaagatttcaaaatcsctaaaattcaggctcatggaaaataaacaagatgccgtgtttttacattaatatgagatttttgtcggtggctaatcaagagatatccttattgagttaatgggatcaaatattctggttctggggtggtccctgtaatcctgtaaccatgctggctgggctct

SEQ ID NO: 788438 - DNA, 599 bp, Homo sapiens
actattaaaatcaacacatttttgccaatgagaaataagtttgtttattcttgtagcataaaaacccatgcttcaggattcaacaaactcttggaaagcattttctgcatcctgctggttgtggaaacattttctctgcaaaacgttgttgagatgtttgaagaagtaatagtcgattggcaagaggtcaggtgaatatggcagacgaggcaaaacttcacatccytttgttcaacttttgaagcgttggttgtgcgacatgtggttggatgttgtggtggagaagaattgggccctttctgttgaccaacgctggctgcaggtgctgcagttttctgtgcatctcatggatttgctgaggatacttctcagatgtaatggtttcccagggattcagaaagctgtagtggatcagaccagcagcagaccactaaacagtgaccatgacctttttttggtgcaagtttggctttgggaagtgccttggagcttcttctcagtccaaccactgagctgttcattgccagttttcagtcgttgtataaaatccacttttcatcacacctcgcaatcggatccagaaatggttcattgttgtt

SEQ ID NO: 788439 - DNA, 540 bp, Homo sapiens
gcgatcatcacagcatgtctccctgcttctggttctccccactccgtcccattttgcacactgaggccagataaacatcactaaagctgctcctatcactgtgccccctgcctaagagcctcccagcccctctgggccacctggactaagcacagcccrcttggcctggctggtcaaggctcccatgttaagccctccattgtcctgaccagcccttctcacagctgctccctgaacacaatgcccagggctctcccgcacacccaacccacttggcattaccctacacaatgtcattgtgcagtctcctctctcaggagggccctctaccctttccagctgctcagtccaatcggttctgtaacattcatgtcaaaacattaacttcatgatacactttctctttccttcaaaacccctaaaccagtgctgttcaataaaaaatagatgcaagtcacaaatggaacttaaaattctccagttgtcctattaaaaaaaggaggaaagtgatgaaatcagtttctgtaatattattctatt

SEQ ID NO: 788440 - DNA, 494 bp, Homo sapiens
gggtctccctatgttggccaggcgggtctcaaactcctggactcaagagaagttcctgcctgagcttcccagtcttgggattgcaggtgtgagccactgcacccggcaggatgctaagtttttataggaagtacttgatgtgtatgtcaatctcataaaatttacaattaaaaaagtagtttcgagtgcccaagtttgttccaaatatactaaaaagtctgccaatcactgagtcaagtattcatttctaaattcaaacctaaatgaattaaaataagataatattaaaattccagctccttagttctctagccatatttccagtgttctgtagccacatgtggccagggggacagtaytggacagcatagccacgagcctgtatgcctcggagaggtgtctatcacatttggtcttgttcaaggtttcgtttttgtgtaacctcagctagatcacctaactcccagaaggcagaactgtctcatcctgtctca

SEQ ID NO: 788441 - DNA, 673 bp, Homo sapiens
atgtgtgggaagcagttaaagccgtactgagagggaaatttatagcaccaaaatgctttcattttctaaaaataaaactttcaagtcaataatataggcttgtaccccagtctaagtcaaacatagaggaaagaaaagcaaaataaacccagagcaagcagaaagaagaaaataataaagataaaagcagaaatcaatgaaactgaaaataggaaaaacaatatagaaaataaatgaaatgaaaagctggttcttttaaaagacgataaaattgacaagcctctgacgtagaaaaaaagagaaaatacacaacttcctaatatcaggaacaaaggcagggatatcatgacagtccctgcagacatcaaaaggataataagggaatactatgaacaacctaaccctaaatttgaaaatttagagaaaatacaatctaatccctcaaaaagcatagcccactacaactcacccaatatgaagtagataatttgaatactcctataactacttggaaaattraatatgtaattaaaaagaaatctccaggcccaggtggttttacttgagaattgtaccaaacttttaaaaaggaattaacaacaggccaggtgcagtggctcatgcctgtaataccaactccttgggaggccaaggcaggaggatcccttgagac

SEQ ID NO: 788442 - DNA, 602 bp, Homo sapiens
ctcactcatttcccactgacccatcccaggcccattttattcatgtatattacctgcccagccccagtagacatttgaattttcaacccctacttgaggatatagaatggagaagaagaaggtgacttgctagccacttagcatgtggttccccatccctgtgcaccccctcactcccctcacctgggaggaggagggaggcacctttacccactgggcaaggtggggtgagtgactggcccaggggaagggctgaggaaatacttctttaaatggagttgtttcctaggaaggccctgatgctatctgagtgcaggcaagaacaagttttgtgccgaccctctccaaggtttattcatcagatcccaactgccatttggaaacatggaaaaagcatggacttttgtttctgaagatctaggtttctatagtycctgtctgccaggggccttggacagatcttttaatgcttctgagcctcagtttatctttctgtaaatagtaatggctgttttacaaagttgctataccagaaaagtcatttttgctctttgccaactataaaatcaaggacaatagtagttattgtctacttcctcttc

SEQ ID NO: 788443 - DNA, 620 bp, Homo sapiens
actcaaagagactgaaacatagccctgaaactctaaaactcccagaagaaaacataggtgaaaagcttcatgacattggtcttggcaatgatggtttggatatgaaaccaaaagcacaaaggaacaagtgagactacatcaaactaaaagtttctgcacagcaaaagaaacaatcaacaacaacaaaaagcaacctacagaatgggagaaaatatttgcaagccatacatctgataaggggttaatatccacaatatatgagcaactcrtacaactcaacagaaaaaaacgaaacttgattaaaaagcagagagaggagttgagtagacattgttcccaagaagacatacaaatgactaacgggtatatgaaaagatgttcaacatcactaaccatcagggaagtgataatcaaaaccactatgagatgtcacttcacgcctgttaggatggctattatcagaatgacaagagataacaaatgttggtgaggatgtggagcaaataaaacccttgtccacgatcgatgggaatgtaaattggtacaggcatcatggaaaacaatagggaagtttctcaaaaaaggaaaaatagaaccaccatgtgatcagcaatcccatt

SEQ ID NO: 788444 - DNA, 620 bp, Homo sapiens
actcaaagagactgaaacatagccctgaaactctaaaactcccagaagaaaacataggtgaaaagcttcatgacattggtcttggcaatgatggtttggatatgaaaccaaaagcacaaaggaacaagtgagactacatcaaactaaaagtttctgcacagcaaaagaaacaatcaacaacaacaaaaagcaacctacagaatgggagaaaatatttgcaagccatacatctgataaggggttaatatccacaatatatgagcaactcatacaactcaacagaaaaaaacgaaacttgattaaaaagcagagagaggagttgagtagacattgttcccaagaagacatacaaatgactaacgggtatatgaaaagatgttcaacatcactaaccatcagggaagtgataatcaaaaccactatgagatgtcacttcacgcctgttaggatggctattatcagaatgacaagagataacaaatkttggtgaggatgtggagcaaataaaacccttgtccacgatcgatgggaatgtaaattggtacaggcatcatggaaaacaatagggaagtttctcaaaaaaggaaaaatagaaccaccatgtgatcagcaatcccatt

SEQ ID NO: 788445 - DNA, 623 bp, Homo sapiens; identical to SEQ ID NO: 788049

SEQ ID NO: 788446 - DNA, 623 bp, Homo sapiens; identical to SEQ ID NO: 788050

SEQ ID NO: 788447 - DNA, 625 bp, Homo sapiens
attctacatgcaaggtgttttttggtgaaagtttataagaggtcatggaaatgtggatttttttctgcctagattgaagtgttaaaagattgttttaagtaagaaaaaaatctaaaggtttaaacaagttgtggaaggtttataaaattaattgtaagagatcctgtgtgtggacatattggctaaagttaaargggtattattcagttttccataaattaaacattggaataaaagcacaataggtttttctaaaagtactgatctgctctttcacaccaatcaatgtaaaagtttataaaaggtttataagaatcttaccttatggttaaacattaaaattgggtaaatatgtctattaggttttattgggtttgacattaatagtacattaatgtaaagatgaaatttggcttatgtggtataaaaatcttacaggacgcatcaaatttgaaatgatgttttcctttttttggactatatttgcataaatttgttattggtatatgttccaaagttatgggaaacttctattattctaatatgacagtgtatgttattaataattatcattgttatgtaaaattttgtgtgccacagaggtaaccaaatttccttatcagtt

SEQ ID NO: 788448 - DNA, 637 bp, Homo sapiens
ttttaaaaggtttcatgtttttctcttcataaatcttttctaaaaaaagtttcttaaggggctgggcacagtggctcatgcctgtaatcccagcactttgggaggtcaaggcaggtggatcacaaggtcaagagatcgagatcatcctggccaagatggtgaaaccccttctytactaaaaaaaaaatacaaaaattagctgggcttggtggcgtgcgcctgtagtcccagctactcaggaggctgaggcaggaaaatcgtttgaacccgggaggcagaggttgcagtgagccaagatcgcaccattgcactccagcctgggcaacaagagcaaaactccgtctccagcaaaaaaaaaaaaaaaaaaaaaaaatttcttctcagtcaactaaatgacttttctccactgtgccttgccattcttggtccattcataaaaggtcctaaaataatttctggtggcccaaaacttcttaaaaacaagaacaccacaaatctcatttaaaaaaaatttttctcataaaatccctaaaaactgtattcctagccctgtaaataaaaactgtatttctagccttgttcctaaagggctttacccagaggccaataatccagttaaaaactggcaagtaaaaaa

SEQ ID NO: 788449 - DNA, 588 bp, Homo sapiens
acccacatccacatccagtgactaattgatgcaggaatataaagccttgaccatctcagcccaactggtaacaactctgaaaagccactgtagcttcagagttccccacgggatcagggaaagctgtcatggtgcctgcaggcagctcaacttctccytctgcccattcctgcttcctttgttatttcttccacagagtttaatctcaagggcacttcttacaaacctcttaaacactaaacttcatttccgaatgtgcctcccaggtaacctaatcttggaatagtctgagaaagctggtaataagatggggctttggcactggttaactcactgctgcagtggtaatgaggaccccaccactggtagaagatggagcacatgcccggtccaaggtagcagtccaactattaaaactcaccagaggtgagttgagatgttgggaagggaacatcttagctagaatgatatttcagatgtttgagaaatatgagagaagtagagtaactataaggacaatgggaaaaaaaacacaaaaagctcagagaaagtaattgccaacaagaaagccagaggccctcctttgta

SEQ ID NO: 788450 - DNA, 588 bp, Homo sapiens
acccacatccacatccagtgactaattgatgcaggaatataaagccttgaccatctcagcccaactggtaacaactctgaaaagccactgtagcttcagagttccccacgggatcagggaaagctgtcatggtgcctgcaggcagctcaacttctccttctgcccattcctgcttcctttgttatttcttccacagagtttaatctcaagggcacttcttacaaacctcttaaacactaaacttcatttccgaatgtgcctcccaggtaacctaatcttggaatagtctgagaaagctggtaataagatggggctttggcactggttaactcactgctgcagtggtaatgaggaccccaccactggtagaagatggagcacaygcccggtccaaggtagcagtccaactattaaaactcaccagaggtgagttgagatgttgggaagggaacatcttagctagaatgatatttcagatgtttgagaaatatgagagaagtagagtaactataaggacaatgggaaaaaaaacacaaaaagctcagagaaagtaattgccaacaagaaagccagaggccctcctttgta

SEQ ID NO: 788451 - DNA, 600 bp, Homo sapiens
cacagcgagactccgtctcaaaaaaaaaaaaaaaaaaaaaagaaatacattttgtaaggctatagttgccaaagaaagtgattcctctgatggatctgggcaaagtaaacagaaaatcttttggaaaggattcacctttgtagatgccattaagaacattcatgattcatgagaggaggtcaaaatgtcaacattaacagggttctgaagaggctgattccaaccctcgggtcactttgagggattcaagacttggtggaggaaggaaatgcagatgtggtggaaatagtaagagaactacagttagaagtgcagcctgaagatgcaactgaattgctgcaatctcatgataaaacttgaaaggctgaggagwtgctttttatggatgagcaaagaaagtggtttcttgaggtagacttgtgaaagttgcagataccagatgaaatcactttttgtcagacccaaacaaactagagccaggagagcatgaaggggaaggctcatgtttgcatggctgagataaagactgtctcaaagactttccaaaataaccctgcaaataattatttctttagaattgcagcaattcagacaagatgc

SEQ ID NO: 788452 - DNA, 672 bp, Homo sapiens
gatcccacttcttttcctaaccagagatattatccctaaggccagtggctaggaaagggctagaagccattattaataacctaaagatgcagggcctcctcaaaccctgtaatagcccctgcaacaccccaatattaggagcacagaaacccaatggggaatgaagcctggttcaggaccttcgcctcattaatgaagctgtagttccaatccatccagtggtccctaatccctataccctgttaactcaaatacctgagggaactaaatggtttacagtcctagatttaaaggatgcctttttctgtacaccgttacatcctgactgtcaataccggttkgccttcaaatattcctccagccagacgcccagttaacactgacggtgctgcctcagggattttgaaatagtcctcatctgtttggacaggcactgtcacaagacctctctgagttctctcaaccttaagttaaggtcttgcagtatgttgatgatattctgctatgtgccccaactgaggatgcttttcaggaaggcactgaagctcttctcaatatgttagctaacagagaatataaagtttcaaaacccaaggcccagctctgcaaaacctcagtgaagtacacctaggcttagtgctgtctgaggggaccagagcattagggaaggag

SEQ ID NO: 788453 - DNA, 499 bp, Homo sapiens
tttgagcccagccttctaactctccctgccaagacaaaaaaaaaaacatgtaagggaggctatcttggatggttcagaccagcctctctgccaaataaaaaatactctgtgacatctattgacatgtggaatggaacagtcagcatgcctgaattcatggttaacaaactgatcagatacattaaaatgatgattgttttatgccactaagatttggggtagtttgttatgcagcaaaagataatggaacagatacatataaaggtcasagatatgcagaatttctgtgagttttttgaggcaacatataaaatatagggcactatttttttccagtttaaactatctttttaaaacattattaaatgtttaaaattattaaactttttaaaacattattcttgaaagactagcagactctaagatgaaagaaaaggatagaaaaaaagtaacatacaataaataaaccaaaagaaaaaagttacataaatgaaataaa

SEQ ID NO: 788454 - DNA, 614 bp, Homo sapiens
ctaatgtgtggaggatctgctcctttttagactcctgaactctgcgccttgtagagctcagatggcaagtaacatctaaaagcattatagggaaaagatacacgtaaatataccatatgtatggtaagagaaataagccaaacacagaaagaaaaatgttgcatatgctcactcatatgtgggaattgaaatatgtatctcatgaagataaagaacagattggtagttatcagaagccagaaaggaagcgatgaagagaagttgatttatgagtgcaaatatacagtttgatagaagaaataaaacctagtgtttaaaagatcagtagagtaacaatagtttacaagaattaatcgcatatttcaaaatagctggagtggaagaattcaaatgcttctggcataaggaaaaaaatgaataattaagttgacagatatcccaagwacactgatttgatctttacaagttatataaatattaaattatcgcaagtatcccaaaactatatacatcattatgcatcaataacttttaaaaaagctccaaaatatagaaactatcaatttccacctctcctgatccagatccattctttctcatggaaaagcaacttg

SEQ ID NO: 788455 - DNA, 626 bp, Homo sapiens
acagataagtagaataatcaaaaccaattctaaaagaactcccattgcaaagaacaaagagtggaggtttaaggcattctgtgacacagagaggagaggaagaaaggacctagcagaagcacagatgaaatcacccccagaataaagagaaagtgcagataaatgccacattactaaacgcagatcagcaagtggtagttcacrgctttgactagaaggaaaggactagaagctatgtataataaggggtatccatctctggaaaacatggtttcttaggtagaagtaggtatgtagtgaagtgctggtagtccttggagacattgtaggggagagaaagaagaaataagaggggaaaaccaaagatcctaagaaattaaagaaaaaaactatgccttctcttctttttcaagtagaaaaaaatgcagttatgttatacctaaatgttgtattaaatgctttactctgaaaagagataacaagccatttttcaagtgcctatgatatttgcacaataactaattctatacttagagttcacatataagagagaaatgaagattccaaatatatctaaatagtgaaaatacgtagataacttcatccaattgtagctcggtagcaat

SEQ ID NO: 788456 - DNA, 571 bp, Homo sapiens
ctgcagagccacaggagcagagctgccaaggccttggaaacccaatccttgcatcagtgcaccctagatgtgagacatggagtcaaagaagattattttggagctgtaaaatttaatgactgccttgttggctttcagacttgcatggggcttgtgactcctttgttttgtctaatttcttccattttgaatgggaacatttacccaatgcctgtacccccattgtatcttggaggtacttaacttgttttttattttacagtctgataggcagaagggacttgccttgtctcagatgagactttgtacttggacttttgagttaatgttggaatgagttaagactttgggggactgttgggaaggcatgatasgttatgaaatgtgaaaaggacatgaaatttgggaggggctagggcagaataatatggtttggctctgtggctccacccaaatctcatctgaaattgtaatccttacgtatcgatggagggacctggtgggaggtaattggatcatggggcagtttcccccatgccattcttgtgatactgagtgagttctcaagaga

SEQ ID NO: 788457 - DNA, 608 bp, Homo sapiens
ttgtaatgtgtggactccaaggtttcatggcagagaaagagaggaatggaagcagcacattgactactaacagtgttggtccataagtcacactgtcacttctgctcagagtcctaatatctgcctaactaattaacatatgccacaagcgttcacagagggctttttcagaggaggtaacacttgagcttggtcataaaaaataagatggaattaacctaatgataaagagaggagagggtattccagccaaagagaatgacatttttaaaggtgaagtagcaaggaaaagtgtggagtctccaaggaagggcatatattttggcatgsgtggaacccagagaggacacaagaggatgaggagaggtgaaacaggagaaggaggcagtggtcaggtaacaaaaggctttatttgctaggctttggatttggggatttatcctaaaggttaagagaagaaattgttgagtttcaaagctagaagaagtaacataagaaaacttgaattttgaaatgatccacctcctagaagataaagcatatcagaagacagtgaactggaaagcaaagggcctgtagcattcatccacaaataggaagggagagaa

SEQ ID NO: 788458 - DNA, 580 bp, Homo sapiens
gtaaatgggtgtcagcaatacctttatgatcttaaatatccattttccataaaccaataccttatcccagctagggctgcagaagctgggtctcagggttgaatggagaggagaattatggctccatctttcctcacagaagaaaccttgaaaaagacgtaggaagcatcaacacctcagtttaccttataagctttccttattttccagaggttgagagatctaagagactgtcagtcacaaaggtcctactaaatcaatgttccacacttgtagctctgctgtgtcaaaagtcctggctgttyccaggagaaaaaaaaaaaaaaaagcatgcccaatgttactcacacatacaattgttttgaatccacttgtctgcctaacttcaaagaaagtctttgttgacaaattagtcctcagtagtttttcacttggcctataaagtgattctagctgtggagacactgaaaaggtggcgtcagggcattctccacacatctttcatctccatcgagagtggatactcgagcttcctgttttagagtctgagacataattgctggggggaagtgacggatgg

SEQ ID NO: 788459 - DNA, 590 bp, Homo sapiens
agggaacatcacacaccagggcctgtcgtggggtgggtggagggatagcattaggagatatacctaaagtaaatgaggagttaatgggtgtagcacaccaacatggcacatgtatacatatgtaacaaacctgcacgttgtacacatgtaccctagaacttagagtataatttaaaaaaaaagaaagaaaaatgacattctcagtaaaaacattaagttttgtgatgtttcaacttaccctatccccatcttcctcttcccatctgtggtagccttgaaaaccaatagccttgtaattatcttgaaaccagtagtctagcagccactggagaatgtatttggggttggaattcctacaaagctccattctcacctgtcattatttggcctgtctggcatttccttggaaaatcctactcccaatacttgtctgtatgtgacctgtgttaragctctttcagtataaacacagttttgcccagggatatttgttgaaataattagtggcaattgcttcaggttgtgaaaggacgtgttgaccaaaacactttttaaaaagcttgtcggatccatctattaaagcataggaa

SEQ ID NO: 788460 - DNA, 445 bp, Homo sapiens
aattcaaaaatctaatcatacttggattataaagaagttgagaactgcctgaatataaaagctaccatgcttatgttattgtgggaaggagttctggaatcagatagacatggacctcaaagtaagctgacagaactcattccaggggaacagtaaggccaccttctaaactaggagaggacaaactgaaagtgtatattttggtgaaataaaaatttaaagttttttaattcaggactttttatgaagactgttctaattattattatttgtgaatattgaaaccaaaactyttaactttggcatttggaaacttcatgttatcttaagagccaaagcaaatcacttagaagatcaacataataaagttttgcctagctccagtaagaaataggatgatataacttttaggtggtattgtggtcagtccattgttacacaatcc

SEQ ID NO: 788461 - DNA, 650 bp, Homo sapiens
agcgttgtattcatgacataaagcaaatgtggagaatattgccatattaagccttccagtccatgaacatgagatgtctttccatttattgggtttttaatgtcttttaacagtggattataatttttgctaagtctcatacttttgttagatttatttctaagtattgctactgtaaaaaaaatggaatttcctgtttttggattgtgtatataaatacaattgcttctgtatattgacattgcatcatgcaacatcaaactttttcttttttgtggattccttaggattttctacattgaaggtcatgttgtttgcaaccagagatagtttgaactcttccttttcaatctggatgccttttctttctttctcctsccaaacggtcctggctagagccactagtacaatgcttattaggtggcaatagtggatatccttgtcttctgatcttagggagaagctttctctcatcactaattatgatgctagctgtgggttttttattgataagctttatctggttgaggatgttgccttctgtatagtttgtcttttacaaaaatccaaatcccttccatgataaaaacactcaacaaacatacattgcatctactgaagtagtcatgtggtttttatcctttattcta

SEQ ID NO: 788462 - DNA, 650 bp, Homo sapiens
agcgttgtattcatgacataaagcaaatgtggagaatattgccatattaagccttccagtccatgaacatgagatgtctttccatttattgggtttttaatgtcttttaacagtggattataatttttgctaagtctcatacttttgttagatttatttctaagtattgctactgtaaaaaaaatggaatttcctgtttttggattgtgtatataaatacaattgcttctgtatattgacattgcatcatgcaacatcaaactttttcttttttgtggattccttaggattttctacattgaaggtcatgttgtttgcaaccagagatagtttgaactcttccttttcaatctggatgccttttctttctttctcctgccaaacggtcctggctagagccactagtacaatgcttattaggtggcaatagtggatatcsttgtcttctgatcttagggagaagctttctctcatcactaattatgatgctagctgtgggttttttattgataagctttatctggttgaggatgttgccttctgtatagtttgtcttttacaaaaatccaaatcccttccatgataaaaacactcaacaaacatacattgcatctactgaagtagtcatgtggtttttatcctttattcta

SEQ ID NO: 788463 - DNA, 629 bp, Homo sapiens
attaatatggtacattacactgattttcaaatgtttttgttttaagacagagttttgctctgtcacccatgctggaaggaagtggcgcagtcatggcttgctgcagcctcaacctcctgagctcaagccatcctcctacctcagtttctatagtagytgggcccacaggcacacaccaccatgccctgctaaatgttgtgtttttagtagagtcagggttttgccatgttgtccaggccagtctcaaactcctgggcttaagcaatccacccaccttggcctcccaaagtgctgaaattaagcatgtgccactgcacctggccaactttctgttaaaccaaccttgcattcctggcataaattccatttggtcatgctgtagagccaaactggaggaaaaaaaaaattattaccaacatgttatgtttttacaagtcaaatatggaagtagaagtgtcaaaaaatacactgatacactccaaaaatccctacgtatttaaactaaaaacagacattaagagccataactgggattgctggcaagatggctgaataggaacagctctggtctgcagctcccagcgagatcgacacagaaggcgggtgatttctgcatttccagctgaggt

SEQ ID NO: 788464 - DNA, 501 bp, Homo sapiens
atatataactaaaatataaaagcaacattttataaaactttctagagagacaaattccacacaagtggtaagggcaacctagtgtctctagatttgttctgtttcataaattggattttaacaaatcctatgtaaatcaatttttgtaaataaaatgtaattgttggatttttcacatgttagatttttgcartaatctgagatttacaacactttctgatgtatgttcactctgattctgaaactaaattatattattggatttcatatacagtattaaaattagtggtggtttaccaagattaaactttaaagcatatctgaaagttatctatctgtaaataagacaaattgtctacagaattagttttatatagtcagtgatgtgtaaacctcttggctttaagaaccacaacaactttgaatgcattaagaaaactgtcacacaattgatccgaaactgcattaagaaaaaaattcctacttttttttttttttttc

SEQ ID NO: 788465 - DNA, 644 bp, Homo sapiens
ctgctatgactaggagtgttcatagcagttgttcatgtacaatttgtatttgaacacctgttttcaattatttttgggtatatacctggaagtagaattgctaggttacatggtaattctatgtttaactttttgagaaactgccagactgttttcccacaagccatatgtgaaggttctggtttctccatatcctcatcaacatttgttattttctgggtttttttttttattatattagggtcatcccaatgaatgtgaaatagtatctcattatggttttgatgtgtatttccctaatgattaatgacattgaacatactttcatttgctctttggccatttgtgtatcttctctagataaatatctattcaagtcttcttcccactgtcttttttttttttmtttttttaaagaaagcttcttgctctgtcttccaggcagtgtcacaatcatagctcactgcatccttgatttcttgggctcaagcaatcctctcacctcagtcaccagagtagctgggactacaggcatgcaccaccacacctggctaattttttgatttttttgtgaagttgggatctcactacattgttcaagctagtctcaaactcctgggctcaagcaatcctcctgtcttggc

SEQ ID NO: 788466 - DNA, 595 bp, Homo sapiens
gcgtagagaaatatatacgatttctgtgttgatcatgtactacagctttgatgaatttattagctctaataactcttctgtggattctttagaattttctatatatactatactattatgacatctttgaataaasagagtcccattttttccgtttctgttggatgacttttctttttcttacttgattgctgtctagaatgtccagtattatgctgaacggaagtagtgagagcagcattcttgtctcatgcatgatcgtagcgggaaaactttcagtcagtaaacagtcatttactgttgagtaagatgttagctgtgcgctttatcatatatgtcctttatcattttgaagaagttcccttcctttcctcatttgttgagtgtttttatcttaaaagattattactattttttcagatgctttttctgcatgaattgaaatcattctgggatttttccccttcattctattaatatgattacattgtattacattgattttcatgtgttgaaccaccattgtattcttaggctaaagcccacttggtagtggtggataatccttttaatatgctactggatccagtttgct

SEQ ID NO: 788467 - DNA, 726 bp, Homo sapiens
ggtgaaggatccgcccccccacacccacctccacctcccaccgtttccaggcagaagcctgctgcagaggcagagccagattcatagacccaccaacagcttgcaccctcagtgtggaaaagctacaggcactcaacactagcccagtccatgagagcagccgtggggctaaaacttgcaaagccacaggtgcactgccctagtagaggttgtccatggggctgtgcctctgcagcaggcgactccccactcccagtgctttatcattcgwgaaggatcttcccgcaccattttatgactaaatttttttctacctaggccccacctctaatgttagggagtatagttccacatgagttttgatagggacatagagacaaaccctattattctatccctgaccccacaaacatcatgtccttctcacattgcaaaatacaatcatgccttgccagcaggagtcttaactcgtttcagcattaactaaaagttacaaagtccaaagtctcatctgagtcaaggctacagtctctttttcctatgagcctctgaaataaaaagcaagttcactgcttctaaggtacaatgatggtacaggcattgtgtaagctttccatatccaaaaggaagacatttcccagaaagcttcttatttctatctgagacctcctcagcctggccttcaatgtccatgtttctgtcaggacttttgtcacaaccatttaa

SEQ ID NO: 788468 - DNA, 690 bp, Homo sapiens
gctacagtctctttttcctatgagcctctgaaataaaaagcaagttcactgcttctaaggtacaatgatggtacaggcattgtgtaagctttccatatccaaaaggaagacatttcccagaaagcttcttatttctatctgagacctcctcagcctggccttcaatgtccatgtttctgtcaggayttttgtcacaaccatttaaccaatctaagatggtccaaacattttctcatctatctgtcttcttttgagccctacaaactcttccaacctctgtccattacctagttccaaagctgcttccacattttcaggtatctttatagcaatgctccagtcctcatttgccattttctgtatgattcattttgaaaaagaggtttaattggctcatggttctgcagggtagacagggtagacagaagcattggcttctgcttctgggagttctcagaaatctttcaatctttgtgcaaggtgaagagagagagagttgtctcacatggcaagaggaaaacacgcagagtagggaggtgacatagagttttcaatgaccaagtctcatgagaagtcactcatgattgtgaggacagtagcaagaggattgtgctaaaccattcatgagaaatttgccttcaggattcaatcaccttagaccaggatccaccttccacattaggaaatata

SEQ ID NO: 788469 - DNA, 690 bp, Homo sapiens
gctacagtctctttttcctatgagcctctgaaataaaaagcaagttcactgcttctaaggtacaatgatggtacaggcattgtgtaagctttccatatccaaaaggaagacatttcccagaaagcttcttatttctatctgagacctcctcagcctggccttcaatgtccatgtttctgtcaggacttttgtcacaaccatttaaccaatctaagatggtccaaacattttctcatctatctgtcttcttttgagccctacaaactcttccaacctctgtccattacctagttccaaagctgcttccacattttcaggtatctttatagcaatgctccagtcctcatttgccattttctgtatgattcattttgaaaaagaggtttaattggctcatgkttctgcagggtagacagggtagacagaagcattggcttctgcttctgggagttctcagaaatctttcaatctttgtgcaaggtgaagagagagagagttgtctcacatggcaagaggaaaacacgcagagtagggaggtgacatagagttttcaatgaccaagtctcatgagaagtcactcatgattgtgaggacagtagcaagaggattgtgctaaaccattcatgagaaatttgccttcaggattcaatcaccttagaccaggatccaccttccacattaggaaatata

SEQ ID NO: 788470 - DNA, 603 bp, Homo sapiens
gttcttggaaatgtttcatttgcatcagggtcgtgccagacatggtaatgaaggccctgaacagagggagaaccatcagggactgctgtgtgaggaaagcgtggactttcatcctgaaaaatgaatgtatccataacaacatcctcaaacatagacagctctgattagtgctccacgagccctctctctaaaaacatctgaaaatgcatcactcttcctggggctcacatgaatggggtaaatccttacgaaggaggggccttggtgctcaggaggtgaagcrcacgccattctccaggtgtgcacgtgggtccgaggaatcaggagctcaggctgcacagccctgccgctgccaatcactgctcacagcccctgagccctgctcagaggcagcagcatttcctactaggggcaaggtgcagcagtcaccaggacaccctggctcttatttgcaactgctgcattacctaatagccacccatggcttcacgaggagggatgctcacagccccctgcagagcagcctccaggttccagccccacagggaagcgtctgccgtgacttccacccacacagcctctgcttccacacaatcaccctga

SEQ ID NO: 788471 - DNA, 552 bp, Homo sapiens
agggctttattggtatgtgtagccacatagtttttggtataaagtgggaacatctaaaaatttttttttttttttgagacggagtctcactctgttgcccagactagagtgcagtggtgcgatctcgtccgcctcctgggttcaagcaattctcttgtctcagcctcccaagtagctgagattacaggcatgtgccaccacacccagctgatttttgtatttttactggagatggggytttgccatgttggtcaggctgggcttgaactcctgacatcaggtgatccacccatctcggactcccaaactgctggtattacagataggagccactgtgcccggcctcctactatttgttataggagcttttgccaaacatacaacatttctgaagatattaatctttgtttgcttgatgtttttgtatcttactattatctgtgtttatattttctttgtgcacaatctgaatattctttttatgatatgtaagtatttgtcatgtaccctttaattttcaagcagtttaaacctatattttttttaatctag

SEQ ID NO: 788472 - DNA, 646 bp, Homo sapiens
gcaataacaagcccatcaatttctgttacctcaaatgcaatagaaaataccacttttggccaggttcagtggctcacgcctgtaatcccagaactttgggagaccaaggcaggcggatcactgtaggtcaggagttcaagaccagcctggccaacatggcgaaaccccatctytacaaaaaatacaaaaattagccaggcatggtgacatatacctgtgatcccagctacttgggaggctgaggtggaagaatcgcttgaacctaggaggcggaggatgcagtgagccgagatcacaccactgtactccagtctggccatcaggacgagactatctcaattaaaaaaaaaaaaaaaaaagaaagaaagaaaataccacttttgctgaacctgattacaggcaaagccaaattcagtcacttgcataataatatgcccaacattcgttcacaatgttcctgcctgctcttaacgggctttgagtagagcaggctctcaaaagccatgaattatatgaattatcaaattaaacaacagtttccacttaaaataataacatttattttggaaatatacaaaccagacaatgaactagatgttttacacatactattactcactttagcctcataatatttatggatagg

SEQ ID NO: 788473 - DNA, 489 bp, Homo sapiens
gtctgtgtataaaccagtggttctccaaatgtgctctgtggacctctcaggatcctgaagaccccttccagaaggcctaagagctcataactgttcttttttttaaaaaaaaaaaacaagttttattcttgttgcccagrctggagtgcaatggtgtgatcttggctcacagcaaccttcacctcccaggttcaagtgattctcctaccccagcctcccaagtagcagggattacaggcacctgccaccactcctggctaatttttgtatttttagtagagatgtggtttcaccatgttggccaggctggtcttgaactcctaacctcaggtgatccgcttgcctcggcctcccaaagtgctgggattacaggcctgagccactgtgcctggccaacactgttctgaatcatactaattaaacctgagaaagctgatgaaaaattttaaaaatttgtgaaagtaatacaaagtcattgcctgctttttt

SEQ ID NO: 788474 - DNA, 489 bp, Homo sapiens
gtctgtgtataaaccagtggttctccaaatgtgctctgtggacctctcaggatcctgaagaccccttccagaaggcctaagagctcataactgttcttttttttaaaaaaaaaaaacaagttttattcttgttgcccagactggagtgcaatggtgtgatcttggctcacagcaaccttcrcctcccaggttcaagtgattctcctaccccagcctcccaagtagcagggattacaggcacctgccaccactcctggctaatttttgtatttttagtagagatgtggtttcaccatgttggccaggctggtcttgaactcctaacctcaggtgatccgcttgcctcggcctcccaaagtgctgggattacaggcctgagccactgtgcctggccaacactgttctgaatcatactaattaaacctgagaaagctgatgaaaaattttaaaaatttgtgaaagtaatacaaagtcattgcctgctttttt

SEQ ID NO: 788475 - DNA, 489 bp, Homo sapiens
gtctgtgtataaaccagtggttctccaaatgtgctctgtggacctctcaggatcctgaagaccccttccagaaggcctaagagctcataactgttcttttttttaaaaaaaaaaaacaagttttattcttgttgcccagactggagtgcaatggtgtgatcttggctcacagcaaccttcacctcccaggttcaagtgattctcctaccccagcctcccaagtagcagggattacaggcacctgccaccactcctggctaakttttgtatttttagtagagatgtggtttcaccatgttggccaggctggtcttgaactcctaacctcaggtgatccgcttgcctcggcctcccaaagtgctgggattacaggcctgagccactgtgcctggccaacactgttctgaatcatactaattaaacctgagaaagctgatgaaaaattttaaaaatttgtgaaagtaatacaaagtcattgcctgctttttt

SEQ ID NO: 788476 - DNA, 608 bp, Homo sapiens
gacctatggattccctgcatgatcgagccactcatcagcaaatcaaaacctgacaaacaatagcagagttgagccttttgtcactttccctggcaggtggggaagagctgccgctcaatttccaacttccctttgctacagcccatctttggctggtgagcgccaggcctgcgcccgaggtcctggcgggagtaaccagcatttggctgttctgctgggaacagagggggccatggtcagctagtgaagaaatcaggcctaagtaacagactctttacctgcaccccactcaatcacaacccccatcctcacctcaaaaaaacaaaacaaaacaaacaacaacaacaaatgccagtacaagagaggaagcctgaaaaaacagaaaaacaargctgacagcctggggctatgggtgggtgggatgccagggagagaggaggtaggacagggcagttgggtgtgtgtgtatgtgtgtgtgtgtgtgtgtgtgtgtgtattttttttttcatttcttaaaattaatgatgggaaggatttgaagacttgtacagtagctttgccagcaaaaaatgtaattagctaaagacaatatgctgctggtgttggag

SEQ ID NO: 788477 - DNA, 594 bp, Homo sapiens
cacagcccatggagggagcctgtctcatgcagctctgcccatgagttgctgagacagagacctggagtgcttctgcttccttgtggacccttttatcttccagcctatctgttgtacataatacacacatttgtgcgtgtgcatgcacactgatatccatacacatgggttatatgtggggccagcctcttaacacatgatgctgattggggtgccatccatgatgtcatctctcagaaaattattacgtctacatccagagggatgaargacctgagctctccccaggtagcctgattccttactggtctcctacactgcagaggtctaggtcagtctttggaattagggatctatgggctgaaaacccagcccttgatgagctgcttctctgtcatcctgcttcacccagccctgcttggccttaacattctcgttaaggcaaacaacaggtaactgtagctactaatgatgagagatctctaagcagctcacagacaaatgcactcctttgcttttctttgggatgacagagtcaagggtctgaggcaagaaaaaaatctcaagaacggaaaaaagcagttctataaacag

SEQ ID NO: 788478 - DNA, 594 bp, Homo sapiens
cacagcccatggagggagcctgtctcatgcagctctgcccatgagttgctgagacagagacctggagtgcttctgcttccttgtggacccttttatcttccagcctatctgttgtacataatacacacatttgtgcgtgtgcatgcacactgatatccatacacatgggttatatgtggggccagcctcttaacacatgatgctgattggggtgccatccatgatgtcatctctcagaaaattattacgtctacatccagagggatgaaggacctgagctctccccaggtagcctgattccttactggtctcctacactgcagaggtctaggtcagtctttggaattagggatctatgggctgaaaacccagcccttgatgagctgcttctctgtcatcctgcttcacccagccctgcttggccttaacattctcgttaargcaaacaacaggtaactgtagctactaatgatgagagatctctaagcagctcacagacaaatgcactcctttgcttttctttgggatgacagagtcaagggtctgaggcaagaaaaaaatctcaagaacggaaaaaagcagttctataaacag

SEQ ID NO: 788479 - DNA, 597 bp, Homo sapiens
tgcctagtccctatatttacccaccaatggcattttattgagacagagttgggggaatatcctatttctttcctaagccttggatacttggtcctaggggcatgggggaaggggatgctgaagcatcttgaggcagcaatcagcagtagtaactgccccagtgagaggttaacaaggcagcgcgggctgggccctgccagtggggcatgcaattcataccaggagccccagaagacatattgaggcctcttaattaacttagtggcccgtggcaactggaaagcctttccacacgattaaagacttcagaaaacccccaagaggaggtaatcttcctaataatttataaatcaaacttgctacttaatatgcttaaagtgttttcacttgcctttcatctgcgaaggagatgggcaggggataatggatttctattcaccaactaccacagaaaagagaacytgccagagaagcaagggcattttctcttccagtttgggcaactccttctggcaggaaagggatcttcatggtcaataatgtgttaacacaattttcatgacatccactcatttcagaggtctttgtgtgcaattg

SEQ ID NO: 788480 - DNA, 615 bp, Homo sapiens
gttctgtttatggctgcatagtattccacggtgcatatgtaccatattttctttatctaatccactgttttgggcacttgggttgattccatgtctctgctgttgtgaatagtgctgtgataaacatgcaaatgcaggtgtcttttgggtagaacgatttatttttctttgggtatatatccagtaatgggattgctaggttgaatggtaattctgtttttagttctttgagaaattgccaaactgctttccacagggactgaactaatttgcattcctaccaacagtgtgtacrtggttttttttttttcagctttgtcaacatttgtgggtttgttttttttttttttactttttaataatagtctgcctagtgtgagatggtatctcattgttattttgatttgtatttctgatgattagtgatgttgagcattttttcatgtttgttgacttgcttgtatgtcttcttttgagacgtgtctgtctttgcctgctttttaatgaagttttttttcttgttgatttaagttccttatagattttggatattagtccttttttggatgcacagtttgctaatattttctcctattctgtaggttgtttattctg

SEQ ID NO: 788481 - DNA, 583 bp, Homo sapiens
agtcaaattttttttttaatgaaaagtttataaattaaataagttacagtgagctaaggttaacttattattcaagaaagaaaaatatatttttataaattgagtgtagcctaagtgtacaggctttctctagttgacactagtgtacagtaatgtcttaggccttcattcacattcactcacaactccttcactggctcacccatagcaattttagtcctgcaagtcccattcatggtaagtgccctatacaggtatactatttttaatcttttatactgtatttttacggtatcttttctatgtttatgtatgtttagatattcaaataccgttttagaaatacttgttagaaatgcaaataccattgtgttacarttgcctacagtattcacactaacatgctgtatagatttgtagcctaggagcaataggctatgccatatagcctaggtgtatagtagcctgtaccatctagttttttgtaagtatgttcacacagtgatgaaaccaccaaatgacacatttcttagaatatagccccattgttaaacaaagtatgactatatacttggttgtaaat

SEQ ID NO: 788482 - DNA, 638 bp, Homo sapiens
ttttcacttctccagtaatgaactgaaaacattttgtggcaccagactatgctacattcagattcattcataactgtcttaatacctagcagtgcactgagaatacaggaatcaaccaataaatatttactgaatcaaattaaacagcttagatttcctcagcctatttattttcattctatgcctcttaaayccttggaattatatcagctgaaaattgactctgactttttttaaaacaaaattactttgtgttcatggtggaatttagcaacaggtgaattaatagtgaatttcaagtatacaaatgagataggcaggacacatatgtcgatcattttttaaattcttatgttgattcatacacatactagaactgagaatgctaacagtactttttctgaggcttttatgtatttgtatattttattttacaaaggatgaaaattttctttttcaaatgtcaaaatgaacatgatgcatatattttcttctaatttcatcattttaaaaatcccaaggattttaaaactgtgagagaaagatacgaaaacactgccaggggcattttccttgcaagcaaatatttcagatgaacaaacttcacttagtagaaatatctcaaagcatcagtttat

SEQ ID NO: 788483 - DNA, 648 bp, Homo sapiens
agctttctatcccatccactctgctccaaccacactaccctgctaatctaatggtgatgatgaacaaatctctcctacactcagagcatttgtatatttatttcctttattttaggagctcccttgtttttcaaatgtccatttccaactcatcgttcatatctcagcagaaatatcatttcatggatgcttccctaatgcaccaaaccaagcacagtttccctctgaaacctatttataacttctgatttataataattgtgaataagtatgtgtataatgtctagaataaagattatgtatttttataattttctctttatacttagcacggtactggataaatggaaagaactcaaaacatatatattgaatatamgaggattaaggtagaagggaaaagagagagactaccctgactcttggtaaggcaaaaattaaactggaattaacttgaacagggatggacactaatttaatgggtagaagtttgggccctaggcagaaaactgcaatttactttagtcagcattttccaagtacattcaaaaacaggttcattcgaggaagtgcttctcaaaaacatgatgcaatggtcaaataagtttgtctgcctcttagatagtgcctattagagtctcctattag

SEQ ID NO: 788484 - DNA, 626 bp, Homo sapiens
ctgttggagtgatatgtatatgtaaacatatacacaaatgctgaaaattttatcatagtatggcactctgaaactgttacattcccttactatacaataattacttaaagaattaggaatatctaaagattgcaattgttactttaacataaagcatctttaaattttaaaatgattttaaaaattaattagtaggtttgattattcccttattgcaagacatgaaygtaaaactgtgagttggtaaattgagaacttatttttagtttggaacaactgctatcaatttaaattgtgcttaattaggaaatggtagtgcttacatatggcactatatcttcagtagatttggaaactaagaaggattttgcttatgatagaaaactgaaatgcccatagtgactctaacatttgttttttaagcatgagggtaaaaagatgaatcactttaggggaaaacttgtgactcacagtgcaagttttaacacctttcctgtgattacctatacctctggcagaaaaatcttttctgaccctatgggtctttgccacggtttaagccaattgggactttttggaatggtggataatcaatttagcctgattaaatgcagttcccatcttaa

SEQ ID NO: 788485 - DNA, 561 bp, Homo sapiens
tgctgcttgcttatattccagccttgtaactgagtaactttcattttttttcttcttactagtatctcatacggacttaatttactgagtacccaggcactgatactaggccttcactaactgagctccactaatttgttgccctcctgactgtctgtttattgactgttgcttcaagctccactgataggtggccttttaccaactggcttgtacttgttttggccccttgattagaattacccactttcctttcttccaamagtcaaacatcctggtttcacatgctgcccaatgtgttcactttccagatgaccttgattccatgtcctagagatgacccggaccagagcccattgattgtagctcctgaagttctgcagtctggctcatcttgtaaacagacaaacccagcctcctcattgtaaactccacagaggtgtttattctactctcatgtattttgcttgtttgtttgttttgtttgctgtcttccatttttagaatgctatacctcttttctccaaagccaaatcgatccttcaaatcccagttcaagtc

SEQ ID NO: 788486 - DNA, 561 bp, Homo sapiens
tgctgcttgcttatattccagccttgtaactgagtaactttcattttttttcttcttactagtatctcatacggacttaatttactgagtacccaggcactgatactaggccttcactaactgagctccactaatttgttgccctcctgactgtctgtttattgactgttgcttcaagctccactgataggtggccttttaccaactggcttgtacttgttttggccccttgattagaattacccactttcctttcttccaacmgtcaaacatcctggtttcacatgctgcccaatgtgttcactttccagatgaccttgattccatgtcctagagatgacccggaccagagcccattgattgtagctcctgaagttctgcagtctggctcatcttgtaaacagacaaacccagcctcctcattgtaaactccacagaggtgtttattctactctcatgtattttgcttgtttgtttgttttgtttgctgtcttccatttttagaatgctatacctcttttctccaaagccaaatcgatccttcaaatcccagttcaagtc

SEQ ID NO: 788487 - DNA, 533 bp, Homo sapiens
gtttcagctttctacttatggctagccagttttcccagcaccatttattaaatagggaatcctttccccatttcttgtttttgtcaggtttgtcaaagatcagatggttgtagatgtgtggtattatttctgagggctctgttctgctccattkgtctatatctctgttttggtaccagtatcatgctgttttggttactatagctttgtagtatagtttgaagtcagggagcgtgatgcatccagctttgttcttttgacttaggattgtcttggcaatgcaggcccttttctggttccatatgaactttaaagtagtttttccaattctgtgaagaaagtcattggtagtttgatggggattgcattgaatctgtaaattaccttgggcagtatggccattttcacgatattgcttgtgtcgattttcaaagggaacgcttctagtttttgcccatgcagtatgatattggctgtgggtttgtcataaatatctcttattatgttgagatacgttccatcaatacctagtt

SEQ ID NO: 788488 - DNA, 533 bp, Homo sapiens
gtttcagctttctacttatggctagccagttttcccagcaccatttattaaatagggaatcctttccccatttcttgtttttgtcaggtttgtcaaagatcagatggttgtagatgtgtggtattatttctgagggctctgttctgctccattggtctatatctctgttttggtaccagtatcatgctgttttggttactatagctttgtagtatagtttgaagtcagggagcgtgatgcatccagctttgttcttttgacttaggattgtcttggcaatgcaggcccttttctggttccatatgaactttaaagtagtttttccaattctgtgaagaaagtcattggtagtttgatggggattgcattgaatctgtaaattaccttgggcagtatggccattttcacgatattgcttgtgtcgrttttcaaagggaacgcttctagtttttgcccatgcagtatgatattggctgtgggtttgtcataaatatctcttattatgttgagatacgttccatcaatacctagtt

SEQ ID NO: 788489 - DNA, 533 bp, Homo sapiens
gtttcagctttctacttatggctagccagttttcccagcaccatttattaaatagggaatcctttccccatttcttgtttttgtcaggtttgtcaaagatcagatggttgtagatgtgtggtattatttctgagggctctgttctgctccattggtctatatctctgttttggtaccagtatcatgctgttttggttactatagctttgtagtatagtttgaagtcagggagcgtgatgcatccagctttgttcttttgacttaggattgtcttggcaatgcaggcccttttctggttccatatgaactttaaagtagtttttccaattctgtgaagaaagtcattggtagtttgatggggattgcattgaatctgtaaattaccttgggcagtatggccattttcacgatattgcttgtgtcgattttcaaagggaacgcttctagtttttgcccatkcagtatgatattggctgtgggtttgtcataaatatctcttattatgttgagatacgttccatcaatacctagtt

SEQ ID NO: 788490 - DNA, 609 bp, Homo sapiens
tctcgcttccgcaccctcacagatccccaaagccctgggagtttttggagtatttccttcccacagataagcaatacaaatataaaatgaagagagaaatgcaaacccttgggaaaggtcatgcccatacttttctccccttgcatcttgactccctaacaatttctggtgtgtggggtctttaagatgtgccctccctcctgctcatcagtgcatccccagggccaagtgttaactctcctaagactcggtatgtattgaactgatgaaygaaggtgtgcttgaagaacaagtcaactcattcagtgtctttgttcccctaggaggactggaatgaaattgaccccattaaaaagaaagaccttcatcacagcaatggagaagagaaagcacaaagcatggagaccctccctccaggtactgccaggggccaggaagccatcttgctttgagcacgtgattgggagtggactgagcatggctcttggagcaggtggtctgtggggagaggctggattccataggtcagcaggagacaccgccctaaagcactgctttgccaacttccatcggacccattagtgggtggtcaagttaaaacttttatag

SEQ ID NO: 788491 - DNA, 572 bp, Homo sapiens
gactctgcctttcatatccttaactattgcatacagttggttttcttatcttcaaagagatcagaatgtactgatttgcctctcttttgagttattagtagtaatttttgataaatgcacaatgtctttttattttgccaaagggctttctttcctttttatgttgaaaccatttttcttactaaaccaacatacacataatttttttgttgttagaaattattttcttgtgattgaaaaatacattttccctaagcrtgaggaacacagctaaagttttatggtttgcaagaaactgctggccatggcacttcccagtgtgtcagtggtgtgttcaggaagctcagtggcttcctgtgttctgtgtgttgggcatgtagcagttgtagacagatgggcgggaagacatgacaccaagctggatgcttttatggccacagaacccactgacagatgaaggagccagatctaacagggcagagcagtgatgttccaggccaacagtctccaattttctgatcgcacactctatgaacagacgtatatttagaccacctcccacacacatatgt

SEQ ID NO: 788492 - DNA, 572 bp, Homo sapiens
gactctgcctttcatatccttaactattgcatacagttggttttcttatcttcaaagagatcagaatgtactgatttgcctctcttttgagttattagtagtaatttttgataaatgcacaatgtctttttattttgccaaagggctttctttcctttttatgttgaaaccatttttcttactaaaccaacatacacataatttttttgttgttagaaattattttcttgtgattgaaaaatacattttccctaagcgtgaggaacacagctaaagttttatggtttgcaagaaacygctggccatggcacttcccagtgtgtcagtggtgtgttcaggaagctcagtggcttcctgtgttctgtgtgttgggcatgtagcagttgtagacagatgggcgggaagacatgacaccaagctggatgcttttatggccacagaacccactgacagatgaaggagccagatctaacagggcagagcagtgatgttccaggccaacagtctccaattttctgatcgcacactctatgaacagacgtatatttagaccacctcccacacacatatgt

SEQ ID NO: 788493 - DNA, 624 bp, Homo sapiens
aaaacttattaccatttaattgtgcccacaccccctgccaagctaaggaggctttggggaaaccagtttgtctgttcagatgagaaattagtcatgcgagctacaattgccacataggtaggagttctgtgtgcttggaaacttcagactcacagacatttccatgggtcgtgcagggtgatgcactccatgctgttgcccctggcaggaaagatgaaaagcatcaatgtgcattttagccagaattgcattttgaaaaacctgctggatttagcttcctcctctctgccctcctgctgcaccacagcttcccttgcacatggcattttctcagcccacatctcattttttgaggcatttwatattcaaaaaaaattgtgtttttagcacaattaaaaaataagcaagtttttagccaccaggatgctgctagaagaggctgggctgtgtatgttgtatctgtatgtcgtatccagctgtaacacactcccagagataccttggtggggagagaggggctatgcatttctctggctgtgctacttctggaaagttcctgagctacatgagccgttgctatctgcttacttaattgctatgactcccattgtaatgatggttaat

SEQ ID NO: 788494 - DNA, 621 bp, Homo sapiens
taacatcccattggccaaagcaaattttgtaattaagcccagcatcaagagagagtgaagtagattcccatgagggtggcaggtaggaaggaaacatttctgaacgcattatctaatccaattacattaatagtgaagttggaacataggtatggcaaaagttgtcaaggtggttcaagaaggtttgctttcggttgataccactttaattcaatacaattgaatccagacaggccctgagctctgtacctatcatgtcacctatgcaactacagattctgccaaataattacttgtaattctatttgttgtgtgaagtttactgtcaatacacatctcaaaagaaaagcttggaggactccycccccggccagcatctctcacgtttatatatttaaaagtctaattaactacattctgtgtgcatctcagtatcttttcttctatgatgacatctgcctcatttattactttttatgtaactccactaacctagaaaaaattgctataatcaagggtttgagcagtacagttgcagttgttgatagaaaatgaaaatagtactgaatgtcccagactttttctatttctgcatcttttatcccctgctaggagctctgg

SEQ ID NO: 788495 - DNA, 579 bp, Homo sapiens
ctcatgcctctgcctcctgagtagctgggattacagtcgcgtaccaccacaactggctaattttttgtatttttaatagagatagggtttcaccatgttggccaggctggtcttgaattcctgatctcaagtgatctacttgcctcggcctcccaaagtgctgggattaaaggccaggtatcaaaacttaaagtccaaaattagtttaaggaaactaaattccaggaaggagaagtgacatgcacagggtcacctggctaataaatggaaatttaaatactccaattcaaaattctgctccctaagcaatagcaagtttctggacacagttgtcacagaggcagaatgaatgatttgtgcaacgtcactgactcccacagcaatatttacacagaagggtttgttaagatgatctggtcgtttgacagaaagaaggaaccyttgctccatgaatcataccttcaaggaaattaaagaaatacagtgaaatagaattagagagctcaaagacataatacaagaatgtttggcgttgtataatttgtaattgtaaaaaatcagggatagcataaggataca

SEQ ID NO: 788496 - DNA, 618 bp, Homo sapiens
ctgttgatgggaatgtaagctagtacaatcactgtggagaacagtttggttcctcaaaaacctaaaaatagagctaccatcatccagcaatcccactgttgggtatataactgaaagaaaggaaattggtatattgaagagatatctgcacacgcatgtttrttgcagcactgttcacaatagctaagatttggaagcagcctaagtgcccatcaggagatgaatggataaagaaaatatggtaggtacatatatacacaatggagtactgttcagccataaaaaagaatgagatccagtcatttgtaacaacatggatggaactggaaatcgttatattaaatgaaataagtcagggacagaaagacaaacttcacatattctcacttgtgggagctcaaaaaatcaaaacaattgaattcatggagatagagagtagaaggatggctactagaggctgggaagggtagtggggggttggagggtaagtggggatggttaatgggcacaaaaaatagttcaaaagaatgaacaagggctagttttgatagcacaacagagtgactatagtcaatagtaatttagtggcacattttaaaataactaagagtataattt

SEQ ID NO: 788497 - DNA, 630 bp, Homo sapiens
gggaaagatgcccaaagtttcagctgttttgtggtccttggggccttctggggctactggttttacagttccaagagcatattaagatttttttcagatacaaccaatgttgcagctattaatgagaacaaaccatattaacattattattttgatcctcaaaggaaacaatacaaatgcctcagcaagtgctttctgattgtgtaaaactgaaaataattaactggaaaatgatcaaggagtgattttcaaaaaagatgtgatatatatgttctgtaattggcaaaagcgaaaataatcrtattaagttgagaaaaaaagtccttgattaaaagacattcaccacgccatttaaaacattttgcaaaattttagttttatgtatgttatttttaaatcaggttcatataacaaaaagaagcaaatgttttaataatatatttatgtagtatcagaaaggaagaagactcctctcccatttatttttcctgctgactcttgttttaaattctaatttcaacaccctttgccagtttggagaaatgatttgtcagctgctctgtgaagaacactaaaatgcgataggaatattttaaatgcacaagtactgaaaggaaagtgcaggcgttt

SEQ ID NO: 788498 - DNA, 614 bp, Homo sapiens
gtttgcaaaaattttctttcattctctaggttgtctgtttacttttttgatagtttcctttgctgtgcaggagttctttagtttaattagatctcatttgtcaatttttacttttgttacaatttggcatcttcgtcatgaaatctttgcttgtgcctgtgtcctgaattgtattgcatatgttttcttccagggttttgtagttttgggytttgcatttaagtctttaatccatcttgagttgaatttgtatgtggtgtaagtaaggggtctagtttcaatcttctgcatatggctagccagttatcccagcaccatttattgaatagggaattctttccccattgcttgtttttgtcagggttgaagatcaggtaactgtaggtgtgtggtcttatttctggtttctctattctgttgcattggtcaatgtgtctgtttttgtgccagtaccatgctgttttggttattgtagccctgtagtatagtttgaagtcaggtagtgtcatgccctcggctttgttctttttgcttaggattgcgtaggctatttggtttttttttttggttccatatgaattttaaaatagttttttttctagttctgtgaagaa

SEQ ID NO: 788499 - DNA, 618 bp, Homo sapiens
gtccagaccatatgtgataatacaactctgacctacaaatgatgtcccggaagccaaaccacaatctctgcagccattcttccataaaggtcaggacttcgtcaacaaatcctccttattttggcgccctactcccatccctcacctttccaactccagaccaaacagagagagccaaataacctaacctgaaaccaatcacataagatgcttcactwctagttagcctatctccagcttccctatgttaacaaccaccaatcagagcttatctagtgtctctcccaaaatttgcccacacttccctacctgccttgaagtctgcaaagcacaagtgatggtggctgacttccttgatatagtaagctctgaattaatggcctctttttgttcttatttgggtagtcattatacagttcaaccaatgtttgagatttaaatattacatagtgctgatgactcccaatatcatatctctagcccataattctctcccagatggctgacttcctccacaaaattcacactcagaaatttaatgggttccttaaacttaacatgtcaaaaatacacccccacactccctaaatgctccatcactctgatttcttaggtcca

SEQ ID NO: 788500 - DNA, 618 bp, Homo sapiens
gtccagaccatatgtgataatacaactctgacctacaaatgatgtcccggaagccaaaccacaatctctgcagccattcttccataaaggtcaggacttcgtcaacaaatcctccttattttggcgccctactcccatccctcacctttccaactccagaccaaacagagagagccaaataacctaacctgaaaccaatcacataagatgcttcacttctagttagcctatctccagcttccctatgttaacaaccaccaatcagagcttatctagtgtctctcccaaaatttgcccacacttccctacctgccttgaagtctgcaaagcacaagtgatggtggctgacttccttgatatagtaagctctgaattaatggcctctttttgttcttatttgggtagtcattatayagttcaaccaatgtttgagatttaaatattacatagtgctgatgactcccaatatcatatctctagcccataattctctcccagatggctgacttcctccacaaaattcacactcagaaatttaatgggttccttaaacttaacatgtcaaaaatacacccccacactccctaaatgctccatcactctgatttcttaggtcca

SEQ ID NO: 788501 - DNA, 681 bp, Homo sapiens
tggtggggacgtggagaacctttgtgtctagctcagggattgtaaatacaccaatcggcactctgtctctagctcaaggtttgtaaacacaccaatcaacaccctgtgtctagctcagggtttgtgaatgcaccaatccacactctgtatctagctactctggtggggacttggagaaccttttgtgtggacactctgtatctagctaatctggtggcctagtggagaacctttgtgtgtagctcagggattgtaaacgcaccaatcagcgccctgtcaaaacagaccactggtctctaccaatcagcaggatgtgggtggggccagataagagaataaaagcaggctgcccgggcaggcagtggcaatccgcgctggtggactttcccactgtggaagcgttgtkctttctctctttggaataaatcttgctgctgctcactctttgtgtccacactgcctttatgagctgtaacactcaccgcaaaggtctgcagcttcactcctgaagccagcgagaccacgaacgcaccgggaggaacgaacaactccagacgggcccccttaagagctgtaacactcacggtgaaggtctgcagcttcactcctgaagcccgcgagaccgcgaacccaccagaaggaagaaactccgaacacatccgaacatcagaaagaacaaac

SEQ ID NO: 788502 - DNA, 636 bp, Homo sapiens
cactttctcttttctccccttcccaatgatgaacaaggcactgtcacaacctaagagccctgctctctccagtttaaagacgttttagtgatcattattcttgtgagtgacgtcactgtgctgggtgaatgttgggctgcccaaggttgtgctgtccattgggtgtctttttccatgtgactagattggtaaaaactctagagatttcttgaagctagtttgaaaggttttcgtttgtttgcttttattttcctggtttaggacctctgctatctttttccatttggcacctggcccattgccactgcctaggtcgaagtcactgggtaaattgttatatgtattggacaatattttggcctggggcagcttagtttaagcatactttaaaagctaggaaaaatatatttttttcttttcccttttctatgatkggaaaactcaaatgtgggctttcttaagtgtgggcttaggagaaagcagacccgtattggtaaaaattattttctagccgaaaaaacaaagataaatacaaaacaaaacttgtctgtccatttggtctagatatttggtctagatgaacttaccaaccatcaacaacctgctacttttatctcattcatgttttattttttt

SEQ ID NO: 788503 - DNA, 480 bp, Homo sapiens
ttcttcactaatttactttatgtacactagttagtaagttgatagaaattttctatgctagaagtaaatgtcacatatattataccataattacatagcaagagaggttttgaaatcagtttagatactgtgctatccctatcttaaaaactgtctgttaaaataaccaatatagcttctcttttcctaactgkatcctgaaaaactcaggtccttattttattttaacattttagctctataaaaatatttttaattgactgattgcactgtaagtacaaaaatacacgtcagttttaatgccctgaacttgaatgtgagattaaatgtagttcacataatattagtttaattataaggggattaggttttgtcctatattagcatggctattttaatattttttaagtggttaaaaatcaatgttatggtttatattctgagaataaacattaaaagcaattagaaaataatttattt

SEQ ID NO: 788504 - DNA, 561 bp, Homo sapiens
atggctactgtgaacaacaaccgtttttgtgtatatatatatacacacacacgcacacacacatatgtgggggtgtctgagtatgtaaatatacacacactggtgtacatgtatgagtatgtaaatataccagtgtatgtgtaaatatatatatacatatatgtgtgtgcatatatatgtatgtgcatatatgcatatgtacattcatatacacatatatgtgtacacatatatacattttatcaatgctcaggccactcaatacttgagattaattcagaagaagttaaagaaacattaaattcttaattaccatgattgtstttttgtttggcctagctttttatttattctcagaataaaaccatattcttttaaatgcaggttcacaaggcttcatcaacaactgaatctgctggtgtttgttgttattgctattgtttggttttgtttgtattttttttcagtaacaagataatttcatagacttctgtaagttgaattttatttctttaatattttgtgtgaagtatagtagtgattaatcatgtggttaaaaat

SEQ ID NO: 788505 - DNA, 613 bp, Homo sapiens
cacaggcatagtcttacattcaggaaaatgtagagatatagaaaattactgatggatatgcagatatcctttaatgaaactaaggtcaatattacagtcttagaatgtaaaaaagagctgtaaatatgcattatcagtgagtcattttycatatcagaaacacgcagaaacgtggaagatacatggcttcctcagtctaagtatgtgactcaaataacagacactgttttcagtgataggagaatcaaatttgcaattaaatcactgcccctgtagctcaaaagtggagtgttggcaaaacaatccctgacttcaaaactaacacccaagagcaaaatccatgacattcagctgcttattttgatagagatcattcattctgcccccaaccaaatcttcagaggtctggtttagggagatgattataccacccataaagtgtcatagtagttatggtgttctctgatatatctttgggaaacataccatttccaagtaagccctcagttcagggacaagatcagaattgagattgaaagctttagccataagatagtcttcaggctttttcatttgtaatatattgtgagatatgctggtagaaaacacgact

SEQ ID NO: 788506 - DNA, 613 bp, Homo sapiens
cacaggcatagtcttacattcaggaaaatgtagagatatagaaaattactgatggatatgcagatatcctttaatgaaactaaggtcaatattacagtcttagaatgtaaaaaagagctgtaaatatgcattatcagtgagtcatttttcatatcagaaacacgcagaaacgtggaagatacatggcttcctcagtctaagtatgtgactcaaataacagacactgttttcagtgataggagaatcaaatttgcaattaaatcactgcccctgtagctcaaaagyggagtgttggcaaaacaatccctgacttcaaaactaacacccaagagcaaaatccatgacattcagctgcttattttgatagagatcattcattctgcccccaaccaaatcttcagaggtctggtttagggagatgattataccacccataaagtgtcatagtagttatggtgttctctgatatatctttgggaaacataccatttccaagtaagccctcagttcagggacaagatcagaattgagattgaaagctttagccataagatagtcttcaggctttttcatttgtaatatattgtgagatatgctggtagaaaacacgact

SEQ ID NO: 788507 - DNA, 631 bp, Homo sapiens
aaaataacttatatgcaaatggaagaattattcctttaaatacaaaaacaattcttataataggcatgagaaaatttaaaaaaaactaaaacatgtaaatacaacacctttttattacaattttaaaataaagtatttttttgaaaggaaattaggcaatgccaagcttcaaagaagtcctttggataacttcctctccaattgaattgtttcatactggaaattatactgtcaggtgattgtccaatttttattttctattgttgctagttctaaatgtagaattgtggaactattgatgttgcacacacattatatattttctagtacattataacaatattctaccctttggattggcttttcctgmacaaactagaaaagcatatattatattaaatgtatgcatagagcaaatggccaaattcagccctcaatgacaatcctaaataattaaattgtttaaaggagaaagtgcttgcaaacatgaaaaaggataattaaaatatatttttagatcatccaacaacttgagcttaaattttgtttgccaataaatcttctaatgtctttgttgtttgccattgcttccagtgaacgtgttagttatccaacattcgtatgttttcaa

SEQ ID NO: 788508 - DNA, 631 bp, Homo sapiens
aaaataacttatatgcaaatggaagaattattcctttaaatacaaaaacaattcttataataggcatgagaaaatttaaaaaaaactaaaacatgtaaatacaacacctttttattacaattttaaaataaagtatttttttgaaaggaaattaggcaatgccaagcttcaaagaagtcctttggataacttcctctccaattgaattgtttcatactggaaattatactgtcaggtgattgtccaatttttattttctattgttgctagttctaaatgtagaattgtggaactattgatgttgcacacacattatatattttctagtacattataacaatattctaccctttggattggcttttcctgcacaaactagaaaagcatatattatattaaatgtatgcatagagcaaatggccaaattcagccctcaatgacaatcctaaataattaaattgtttaaaggagaaagtgcttgcaaacatgaaaraggataattaaaatatatttttagatcatccaacaacttgagcttaaattttgtttgccaataaatcttctaatgtctttgttgtttgccattgcttccagtgaacgtgttagttatccaacattcgtatgttttcaa

SEQ ID NO: 788509 - DNA, 627 bp, Homo sapiens
ctttttcctggactacatctagtaatatatttactactggtttattttagcttacatttctcttttcagcatcacacttagatataattaaaaaacaaagtagaatcttgtattaccaaattataaactattttagcggctatcaaagtataaaatggtttgaattgtaactacayatatattcgtatttctggtaaaaggagggccacttgaagcaattgtgtgattttactattttaaatgtaattagcaataacttattattctgatggcaaaagaaaaacctattctgatgacttgatgtaaggattaaatttgacagcatataaaaggacccacagtaaaagtgcaatgctaatggcctttattaacattataaaatatgattttcagtgaattctctgtcaagttctcagctgaatttcacatattgtaagtaatacctaagccacctgtaaggattcaggaagttagtttactgtagttttatataaattagctaatggaagtaaaccagcattagtttaaaacagttctcatttctcttgagtctagaatataggagctaaaaggtgagttttgcatgaagcttttctgcctagaggtataaagcagctcacaagtttt

SEQ ID NO: 788510 - DNA, 650 bp, Homo sapiens
tttacacaatcatacctattttcagctaccacctagaagtggattcagagtgggatcattgagtagtaggaaaataactgaattattcaggtcctagtcaatggttctgtgacctctagacaagttacttaatctttctgaatatgctcctttcacaaaatgaagatagttaagcctattttgcctactttaggtggtagttgtaagaatcaagtgatatggatataaaagcaaattttacttctaacattagcatacaaatagagttcaaattacttccaaatctatattttcgatcctaattactaatctgttcatgtagaactgtatctcctgaggcacgctaaagaatacccaagtttraatgtttcactagcaactttagaaaaccaaattcttaatctgcttgtctatactattttatcacgttcttcattcctgtaaaatgaagaaggaattgggttagatctctttcgtttctgtttcctttcattgtttccgtcggtaaacacttacccatccaggttttcctgggttacagtatcatcttacatttcttctttacctttcattctccccatgctagattagtactccagctttattatttcactataagtttataggatccactctccccactgtcccct

SEQ ID NO: 788511 - DNA, 552 bp, Homo sapiens
tctttaccctatcacagtccactccactttcgccgacgccacatccgctcgctgtagcatgagtccttacagcaatcatgccccattcctcccctcctgacctgggtgctggttttggcataggtcttacatctacagatgttataaatgccactctatacttccattatttttgtttaaacagtatcctgtaaagaagtttaaagaataaggaaaaaaaccttacatatatagtggaatgyggataaatatttaatgggatgtcataaccttttccagtgttccttgctgctttgtgtaaatccaggcctccctctggtatcgttttcctcctgcctaaagggcccctttgatatctgctgtgctgtgaggcgtctggggaagaagccttcttgcgtttgtctggaggagtctttgttcatcttcatctatgaaaggcattgcgtctggcgcagagccccaggctggcagcagtcctctcctctctgcacttgggcctgccccactgccttcctgtctgccttgtgccacaagacggctcccatcaccctg

SEQ ID NO: 788512 - DNA, 552 bp, Homo sapiens
tctttaccctatcacagtccactccactttcgccgacgccacatccgctcgctgtagcatgagtccttacagcaatcatgccccattcctcccctcctgacctgggtgctggttttggcataggtcttacatctacagatgttataaatgccactctatacttccattatttttgtttaaacagtatcctgtaaagaagtttaaagaataaggaaaaaaaccttacatatatagtggaatgcggataaatatttaatgggatgtcataaccttttccagtgttccttgctgctttgtgtaratccaggcctccctctggtatcgttttcctcctgcctaaagggcccctttgatatctgctgtgctgtgaggcgtctggggaagaagccttcttgcgtttgtctggaggagtctttgttcatcttcatctatgaaaggcattgcgtctggcgcagagccccaggctggcagcagtcctctcctctctgcacttgggcctgccccactgccttcctgtctgccttgtgccacaagacggctcccatcaccctg

SEQ ID NO: 788513 - DNA, 645 bp, Homo sapiens
agaggacggtgactgggctgcctgccctcacgtgatggcctgtactggctcctgcctctgtggtgcccagagtagccaggatcactccccacaccccacaaagaatgagatccaaatccctccccaggccccgtgcaccctgttccaccagcctgtttcccctcctgccacgtggcctccgcctctgtgtcccccacatctgttctcacgcccaggccttccttcatgctgtctctgtgggagaggccagaggccccgagggctctcccyacccttccacgcctggcttctctgcccttccagagcctccgggacctgtcccctttgcacctccagccttggggcatggaccacgcacagcacagaaggtgcagcagacacttcttggtgtaaccctcactggaatgattaacacatggcagctttttcttgcttctgacattaacaatgaatgttttttcaaatgcaaatccatgcttagcagttccattttcttacaaaatgagaattgtatgtatagttaggaaggctcagtgacagcattctatgacataaagggtaggggggtggggactgtctcctctgaggaaggtgcacccacgagtgggctctacaggaggctgggtgggcacctggaaattaacc

SEQ ID NO: 788514 - DNA, 645 bp, Homo sapiens
agaggacggtgactgggctgcctgccctcacgtgatggcctgtactggctcctgcctctgtggtgcccagagtagccaggatcactccccacaccccacaaagaatgagatccaaatccctccccaggccccgtgcaccctgttccaccagcctgtttcccctcctgccacgtggcctccgcctctgtgtcccccacatctgttctcacgcccaggccttccttcatgctgtctctgtgggagaggccagaggccccgagggctctccctacccttccacgcctggcttctctgcccttccagagcctccgggacctgtcccctttgcacctccagccttggggcatggaccacgcacagcacagaaggtgcagcagacacttcttggtgtaaccctcactggaatgattaacacatggcagctttttcttgcttctgayattaacaatgaatgttttttcaaatgcaaatccatgcttagcagttccattttcttacaaaatgagaattgtatgtatagttaggaaggctcagtgacagcattctatgacataaagggtaggggggtggggactgtctcctctgaggaaggtgcacccacgagtgggctctacaggaggctgggtgggcacctggaaattaacc

SEQ ID NO: 788515 - DNA, 617 bp, Homo sapiens
ccaccgatgaaaaaggagcttctgtgagcaaaacacagggagccgaggggccgcgcagtgaaggaggggccgggagggcatgggagtgggggctgcggcactcagaggcgtcctttcggggcccgtctctagggacgttttcttagttctgcgctagcagagtttgcagcaccagaatctgttgtttgtttgtttgtttcaagtctcaggccaacttaaaagcattttataaattggaaaacactcctacttctctggaaagagcccttgtccacgctggccttcagggcttcccagaagagccgcctgcacgccagggccggcttccagggcctcctgggcccatttccccgccatgtatttcccatcatggagctctcgcaggtgagcagggcattagacgtctccgtctcaagggtcccatcagccctgttcactagyggatgccccagaagatggctgagcggcctctgccaccaggcggagcagagacacgcagccagcaaggtcagcaccctgcagggaactcacctgagaaggcgggagaaggcgggggtggggggcagggagaggaaggagggggcctggaaagccaaggacagctccgtttctgagca

SEQ ID NO: 788516 - DNA, 591 bp, Homo sapiens
agctttcagaagattttcaatgaaacatttgcatgtgtgtgaaaaggcaaacatgaggaaagtcctcctaggtgctcatctgcagaaacgaagccaggggattcggaaacatcccatcatctcacctctctttcctgcattaacctttggccttcggcagcatataagcaattagtctcttccaaaaatttcagttcaaatgaatctttatacacctaagaaacragcagagttactgaccaatttcagtaaaggaaactatcttcacaagtgctaacacatcccagtttctgacggggcaggctgccatgacctgaacttggaggcgcctgtggccacccagccggccggctgcactgtccttcccaaaacggccgggcaggccctcctctgttctcttcctatagtgccttggggtcctattgctctaaagaacttcgccctttgtcttttgtgtgtgttgctaatattttcccccagcgtgtcatctggctttgtctctgtttatattttccatgaaaaacgtgcattttatgtagtgatattgatctatccgtgcattttatgtagtgatattgatctatcttctct

SEQ ID NO: 788517 - DNA, 539 bp, Homo sapiens
ctcaccccctcctggactagccggcagcctcccttttgacttctctggaatgttctgttctccacacagcagcccagtgatcccttcagagcacaaatctttccatgtcaattcctgttccctccaatatcttcccaacacagtgaaaatgaaacaccaggttcttacctcaggcttcaagggctgatatggtttggctgtgtccccaccgaaatcttatcttgaattgtaatccccatagtccccacgtgtcctgggagggacccggtgggaggtaattgaatcatgggggtggtttccaccatgctrttcttgggatagtgagtgagtctcaagagatttgatggttttataaggatctggcatttcccctgcttcagtcattctctctgctgccaccctgtgaagaggtgccttctgccataattataagtttcctgaggcctccccagccatgtggaactgggagtcaactaaacctcttttcttaaattacccagtcttggctatttcttcataacagtgtaagaagggactaa

SEQ ID NO: 788518 - DNA, 556 bp, Homo sapiens
ttaggacttaatgtattttgtgaactctgagtacacctacaggtgagtggtagatatcttcatactttaaattactgctggattttgtctgtaccccgagacagaattttggtcttctcttatatatagcagttaatattaatgaggcttccctgaaagggttcctggatattcagattcttcacacttttcttataaaccattagatttgtttcctccattcatttgggcatcttctagtgacacacggagtggctcttaaaaaagyggaacttgattgctgatagttttattcaataaatcattgttaataaatatttatttgcgatcagaaacacaaggagggagtgtacacactcagaaaagcccacaatgcagggagcctgttcttctaacaataataatggctggctggcatattgaggatttaggatgtgtcagtcactgtactaatcacttaatcctcacagtaaacctacataggtcattattatctccaccttacagatgaggtaaccgggttagtagcttgcccaaggtcacagagctagtaagt

SEQ ID NO: 788519 - DNA, 587 bp, Homo sapiens
taatttaaacaaagtaaataactgtgcttttacaaccataatacggtttagcctttcattattttgttacgttcctcattaacatagacataatttcttttaaagaagggacaattgtgacgagcctgggcaacatggtgaaaccccacctccactaaaatacaaaaaattagctgggcgtggtggcacacacctgtaatcccagctacttgggaggctgaggcaggagagttgctagaaccaggaggcggcggagcttgcagtgagccaagatcacaccactgcactccagcctggcgacagagcgagactccgtctcytaaaaaaaaaaaaaaaagaaaaaaaaaaaagaagtgacaaaacttacccagtaaactaaatgttaatttcctcttctcaggagcataatactaacttactcctctgtttttatatttttgagtactgataatcggatagtgatatatttgtgttattttttgttcaaacaattgaattcattcttagcaagaacaaaagtctatttgaaacatgtaggcatcttaggtagattaaatttttcattgtttcaagttttgacttttgta

SEQ ID NO: 788520 - DNA, 623 bp, Homo sapiens
gctgggtgaacttggcctagtggctggtcatgatatcaatagtaattgtaccttataattatgaggcactttattcaaagtacttctgcctgtgtgtcctggtttagtttgaaacctacctctgggcctcaggggaagaatggattaggccacctctaagtcccctatggagctactgctgtgagttcttttttttttttttctttttttttttttttttttggagtatcgctctgtcacccagggtggagtgcagcagcatgatctcggctcactgcaacctccgcctcccgggttcaagcaattctcctgcctcagcctccgagtcgctggagctacaggcacacgctgccaggcccagctaatttttttgtgtgttttagtagagacrgggtttcaccatgttgcccaggctggttgcgaactcctgagctcaggcaatccactcgccttggcctcccaaagtgctgggattgcaggcatgagccactgcgctcagcctgctgtgagttctataaggtattgaagtggagaaaaagggagagggctaggctaacgataatgacatcagatttaagtttaatttatatactggtgtgaacaagtaggaaatcctgtgtgca

SEQ ID NO: 788521 - DNA, 530 bp, Homo sapiens
tcttgccttttgtctccgattgtcctctgtaatatatatttttacaaattctgcattatcttccaattgctttattgaatttgtaagtttgagtcttatattttaatctttcaggagctcttgactgctgagcagtcttattattttaaagtagcattgatatagcagttaagaagaaatcacttaggcagatagcaaggrcatgggagtcctcagtaaggcttttctttttaataaaaagcagccccaaatcattttctaacaaagagccgcctgcaagctgggagcttgcacgggtgaatgccagcaggaactagggactagacatgttcaaaatggcggctccatcttcccttctctgcctgccacgtgtacagtaagaagcaggcaagatggggctgatcaactggaaagtctgtttgcataagaagattagggtggggcaacctgccttccttagcgctatgtaaacgtcatacctgatcgaatcaatctgtgagccctgtgtaaatcagacaccgcctcctcaa

SEQ ID NO: 788522 - DNA, 605 bp, Homo sapiens
cctgaagtacctgggaatacaggcccatgccaccatgcctgggtaacttttgttattttttatagggttgggatttcactatgttgccaggctgatcttgaacccctgggctcaagcaagcctcctgcctcggcctcccaaagtactgggattgcaggcatgagccactgtgcccggcccccacacacrcttttaaaaacaatgtcaagctaagcttatgggagcacgttctaaaaatcctctaatcctacatttgctatagtatttaggatgggaatggtgagctgctttctagaacacaggaagatggagaccttatcagacttgttcattgtatctctggctcctgaaacagaagcaggttgacactcaatatatgtatttcctcattgtttaaggagtgatcaacaaatattttttatgtgaatgtaaaggggccataaaacacagggactgagattgtgggccctggaatcaaacaggctggggtttgatctcagttttgccaactacgggctttgtgttattggcaagttatcttacctttttacacctgtttctttgtctttaacatgggggttatagtactgatgtcactgggttgt

SEQ ID NO: 788523 - DNA, 616 bp, Homo sapiens
agtggactttggggacttgggggaaagagtgggaggggtaagggataaaagactacacatcaggtggagtgtgcactgcttgggtgacaggtgcaccaaaatctcagaaatcaccactaaataacttatccacgtaaccaaacaccatgcttccccaaaacctatcaaaataataaataaataaaaatggcttaaatccaatgataaaaataaaaccttagaagcagccagaaaaaaaagacatgatatttacagaagaacaaagatagggtgggagcagatttctcattggaaacaatgcaartgacaaaacagtggagcagcaactttaaagtactaaaagaaaaaaaaaacctgaagccagcagaaagagctttcaaaaacaaaggtgagatacagatattttcagacatacagcacctgaaagaatttaccaccagccaacccatactacaagaaatttaaacgaagagcttcaaggtagaaggaaaatgatactagatgggaatctggatccatgaagagcacagaaaatggtaaaaacatggatagttgtgtaagaatttttattagtagtatctctttaaaatatatttaacagtttaaacacaaataa

SEQ ID NO: 788524 - DNA, 624 bp, Homo sapiens
ggtgaagacatggagacatagatacagggagaaatggcatgtgcacatgggagcaacaattaaagtaacatgtgaaaaccaaggaacaccaaggtttgctggcacccaccagaagcaaggagagagtcatggaacagagtcttctctagacccttcagagggagcatggtccttctgaaaccttgtttttacacttgtacctaccagaactgtaagaaaacacatttccattgttttaaatcacccagtttctggtacrtggttacaacagccttaggacactaacccagaaaatataggaaaagataaggcagacctacagtgataaatgagaatatttttgtttctttcttgccttttgttcacactatgaaattagagagacccaaggtattgtatgataaatgtgtagagttcagttgattaaatatagatatctctcctaaagatcctttcatataaataacaacatattataagttttaaaacttacatagaaataaaacttatgacaattatagaacaaaaatgggagagaagaaagagaagtatactcttgtaaagtccttatcttatgtgacatggtatactaatgacagtacactgtgtaactgtcatttattt

SEQ ID NO: 788525 - DNA, 628 bp, Homo sapiens
gatatggtttggctgagtctctacccaaatctcatcttgaattcctacatgttgtgggagggacctgatgggaagtaattgaatcatggggacaggtctttcctgtgttgctctcattatactgaataagtttcacaagatctgatcattttaaagaggagagtttccctgcacaacctctcttctcttgtctgcygccatgtgagatgtgcctttcactttcccctgtgattgtgaggcctccccagccacgtggaactgtaagtctgttaaaactctttcttttgtaatttgcccagtcttggttatgtctttatcagcagcatgaaaacagactaatacaaatgttattgatagaaataattaatattgtgaaaatgttcatgtgactcaaagccatctacagattcagtgcaagccctataaaaatttcagctttcttttgattagtcttagcatggtatatctttttatatctcttctatcattcacttttgaaaacattaatctctctcattgaaacaataactgccaaatttgtagcagttttctatttgtggcagtttttctttgtttcttacttttaaaaaacatattgtcccttttttctgtgtcttctggatccagt

SEQ ID NO: 788526 - DNA, 625 bp, Homo sapiens
aaaactataatcactaagcagttacatgtgttaacattcaaaaagtttaaattgtatacaattaaaaaattaacttacttgaagtgaaatatgattttattttaaaaatttttgtgtgcctttaatgtcctaggcactcttgtaggtactgcrataaaataatgaacaaaagagagaaattcctgtgttcaaggagatttaattcaagtagtaagagagaaaataaacagttaagtgacagacttattaggaagtgctaattgctaggaagggaataaaaggtaattgaatagagtgacatagtgttatttttatataatgtaggtaggcttgtaagagaaacttctatacaaagcctgataaaataatacagaaaagcatgctatcagagggaagtgatacacacccagatagaatagcagaggccaacactgtggaattgagggagaaattagattagagaggtagctaggggccatattatacaggatttagcagaccaatgtaaggagtatgtgctttgttcaagtattttgggaagctacggaagattttgaacatgggagtgaagtgatatgctttaattttaaaatgatcactctgggtgctagatagtgaatatatt

SEQ ID NO: 788527 - DNA, 605 bp, Homo sapiens
agatatgtgaaacacagaagagaaaagttcaagaaatggtagtataattgtgccatttagaaatatagaggtaaatatcagaagtattaagagtgttgaaagaagttgcttctggaagcaggtctgctgtgttttatattattctcccacctcctcactcctgctttatacaggcaaatcataccttttccagagctgtcgctggtataacacctctttcttcctagtgtcattatagaattagttacctgattctgtaactgttaagcatagtcattgctaaacacagggccctcattacacacaggcggaaaaagcaaagcattttgaggaatctgtgaatttgtaagtcctttaaaatcagattagtctttgtacattgtatattttttcctaatacctcaagactgcaagactgctaactatagctaaaattctgaggtgcttcccytatttaatttatgatatgatggtgcttttttatataattgtatatacatgctatgaagattctaatgtcccatagacatatcaaagcttcttttttgctttactctcttcttctaattattcaattacataaaaatgtaaatatcagttagtaa

SEQ ID NO: 788528 - DNA, 640 bp, Homo sapiens
ataataattttattaaaaatttactataacaaaaatacccaaaatttcattacatggtctttcagattttgtgtactgtgactctaatacattttacttctatataacagtgttcctttatagtacaaatttacagggaaaataagcttattaaaaagttgccggcagtaagacactgatacaaaatagtttttaacatagagagttgtatttaatttgtttaaaagtttagactaggaggcaagttttccctttttttctcctaatatgtactgtcttagcctgtttgtattgctataaytatatacttgagcctagttgatttttacataaagtaaatttatttatcccaattatggaggctataaagcccaagatcaaggtgctgacaggtttggtgcctggtaaatgctgctctgttttcaagacgatgccttgttgctggatcctagaggggaggaaccctgtgttctcacataatagaagggatggaaggacaaataggaagggtctaccttccagccttttcataaggcactaatccattcatgagggaagagccctcatgatttaatcacttccccccaaatccccacctcttaatatcaccaaaatggagattaagttttaacacatgaat

SEQ ID NO: 788529 - DNA, 581 bp, Homo sapiens
ctttgattttgtttttttttacccacaattcttgaatatacagtgtagttgatatatttagtaataggacaatttttacattggggtaagagctattatggaggaaaatccaattggaagatcttgtcatgcccctttagaccaatggagattttaaastgacagcaattctctattcctgtggtacttgtagtgattggtgtccccttgaaaggactgaaagttgcaggggtggtgattccaaacatccctacttacctcaccagattggacaatgcaaaagctagaaagggcacagaaaataagatgaatgatagaatattgttggaaaattaaacaggatctgatgcaaatttcaccaattctaaaggttggatctctatgaagatagataaacagagctcctggtacctgagtccagctatgacatagaaaattaattattttgtgttctaattagtgaagctccacttgaatttgtcagaatgtctttttaaagatattttgaaagacctaaataaatagatatcaatttttcttaaattggcctacccattcaatgaaattccaatcaaaattgc

SEQ ID NO: 788530 - DNA, 603 bp, Homo sapiens
acattgagggcccatgaaggaaaatcagcagtcctgttgctactgttattcactggggtgacgaaaaataaatccattctccctctctcccacctctgtcacacacatacacatgcatatgcatatatgtgttcacacacaagcaattgaaaaaccaatattttcctctgagccagggaagattctgcttgtttctcattgacaaggacattgtgttgactcacacacattcccacaaatactaaggttttgaagaactaaatttaaagataagaaaaacttagaaaggaattagtgcaaaatagactgttgtgtttgtgtgcaaatgtaaatgtaaaaataaatgagtatgaaaagagccagacatcttatataagtattattttaccaagcatattaaaattacagctagataattttaagacaagtataaataytactatacaacaaaatatttaaggagatataaaagactcaggatatatattagttaataaaatgagaggaatcccaatggcagaattccagaaaaaatagaggataaattaaatgccagtattcactggcccttttgtttcctctccatgatagcagtgcaaatgc

SEQ ID NO: 788531 - DNA, 669 bp, Homo sapiens
agatgaaatagacagaaatttcccaaaacaaacctagggttctatcgtcccacagtaacattttatgcttactagaatacayttcttgtcttatccatggacattacttggcattgggcatcaaatttactggctactaaatcatggttctaatggttctagcacagttcatcaactcactgaaatcctcaagtagctccaaagactaatgctattcatgtaacctactaggaacttcctttccaaagtgatgtaaattgggatgttcacaacatgccaagcatttatacatgatagaatgaagccaagagacaagagaagaaaagcccaaccatcacaaacattctgtaatggaaccactagaccgctaacctccttagaacctccctgccaaggaactatatcccatataagcctggtctggtgggcactcaccactgtgtactaaagatgtgactttcttcctttctgacacaactactactcatgtcaccatctgcccgtttctcaaacaagctaacaggatagaaataagaacttaatcatattgagaaatttattccacagtatgtttaagaattaacccatttatgccgaaggttgcaattttttgaatttttggaatcagaccttgagcagtaggatataaataattcacatgcttagcat

SEQ ID NO: 788532 - DNA, 574 bp, Homo sapiens
caatacactgggaactgggtataactcttagtttatctcatctatgttggagtcctctagagagtgacagctactgatatcattaaggtatgtggtgattaggaattagagtgctttattttcttccaaaatttatggagttggtctgtacctggctctgtacattacacaggtaaacatgcaccaaatatgttgagcaaggaacacaattctagcgatctcttctaatttggaatgctgtaaatacaacctaygcttgctctcaaagcatttcttatgggttctccaaccttttgccccttcatccattcaaggattgctgatattcttaggcagaagggaagtgaagccaaaagtgacattccttccctcatctactcatctagttcactgctctatggtcatatcaaagaagctgggaaacctctggtatattgataaaaataaatgagaaaaggaaggctgttttcctctacctgctaaaacagtataactatcagtttctcaattttttttttttttttgccattctattcatctacgtatatcaaggaaagagaccctaataggagct

SEQ ID NO: 788533 - DNA, 622 bp, Homo sapiens
aaatatcacctgttgccttcaagtttcatgtttattttgcatttcttttttaaaaatactcacttgcattttaatactttcatattttaattttttaaatgttggtccacctaaactttttaacattataatttaatgcaaggcaaaaattatatagatctcaaatattagttaagtaaacattaatacatattttaaaaacataaaagccttaaagagctttgaaattacttctaagtttttaacttctagaaatttagctgaactgtgaaatattcataatgtagtaagattgactgaagaggcaaacaccaaaatcatatgatttttttagcacactgggaaatgatgtcaacttagaaaatataaattgttgggtgacctattgtattcattttrcctacttttcatttggtacattattatctctgagatttatcgatttagcacaatccacaaatattatatgaggagaggaaccctttcctaatctttatgtccatgtattcctatgaatatcgacatcaaaatgttactgtcttgagttcaatcaagtattacatttcctttttgaaaaaaacattttctccattttctctcctttgactctactccaattttc

SEQ ID NO: 788534 - DNA, 583 bp, Homo sapiens
gtgcagactcaataaatacatgttgtcttttgttaatggtgtagtcataggagttctcaaccagggacagtcttcttcccttctccaaaatttgtggacatgtttattattttataatgcccagagagttctcctggcacttagtggatgggctcagcrtggctaaatgctctataattcctgggacattatggttcaaccaataatattccctcccaaaggccaatattgtttgcattaagaaacatgggtaagaataatagaagaaaaagctggagacataaaatgagactaggttacagtaaactttgaatacaaggctacagagttcactttgatagataaggagaagccactgaacttaagcaggaagtaataacaccaatgctttcagaaggctaatataacaggggctggcagcatagactgaaagtgagggaggctggtgggaatgttataagttagcaggtgctcaccattgcccctgcatgaagcactagaggattgcagtgaaccgagatcatgccactgcacaccagtttgggaaacagagcaagactctgtctcaaaaaatatacatata

SEQ ID NO: 788535 - DNA, 613 bp, Homo sapiens
tttgtcaagtataaaacaggactttctccattgtttcagataaacaatacattcacgttttttgataattaggtatctcctatctgattttcacaacctaataattagtgactgcccaacactaaacaatatcttaagaatataaatagttcaatagatgatggtgagaagrgtgatattaaagataataatttataaaggtagcatgaagccaaatattaaacaaataaataacaaatttttaactgtctaatatatttagggactttaatgagtgattaggtcatctttgatatgaacacatcttaattattgaaataatactcaacaaactccttccttactcaatttggctttgtaaattttcattagatttgaaatccatatggatggaactcgcaagaaatatgagtttaattgaggagtttcagtgaaagaaaattcttaagaaaaaagaaatgaattaaatagagcaacttcagtgtaaaaaacttccaggatcttgtcctacaccctactcacttccattgacataccctagcctttgccattaccaattgcagcctttctagaatctcaattttaagcagcccattctctgaccaacagcttc

SEQ ID NO: 788536 - DNA, 629 bp, Homo sapiens
tacctatagtttaaaaagacacatgcacatgtatgttcatcacagcattattcataatagcaaagacatggaatcaatctagatgcccatcaatggtggactagctaaagaaaaagtggcacatatataccatggaatactacgcagccataacaaagaattaaatgacctttgcagcaacatagacacagctggaggccattatcytaagtgaactaatgatgcaggaacaaataaccaaataccacatgttctcacttataaatggggggtaaacattgagtgcaaagagggaaacaacaaacattggggcctacttgaaggtggagtgggggaggagggagaagttcaaaaaactaccttttgggtactgtgctcactatctcggtgacaaaatcatttatacaacaaatcctagcaacatgaaatttgcccatgtaataaacctgcacatgtatcccctgaacctaaaataaaagttgaaaaagaaaaaaaaaggaaacataacccaattaatttggcttaaaagagttacaataccaaagtaactttgacctccctagaaaattcagatggaatagtttctatcatattaaatatccaccaactaatttatagtgtttgtaaga

SEQ ID NO: 788537 - DNA, 629 bp, Homo sapiens
tacctatagtttaaaaagacacatgcacatgtatgttcatcacagcattattcataatagcaaagacatggaatcaatctagatgcccatcaatggtggactagctaaagaaaaagtggcacatatataccatggaatactacgcagccataacaaagaattaaatgacctttgcagcaacatagacacagctggaggccattatcctaagtgaactaatgatgcaggaacaaataaccaaataccacatgttctcacttataaatggggggtaaacattgagtgcaaagagggaaacaacaaacattggggcctacttgaaggtggagtgggggaggagggagaagttcaaaaaactaccttttgggtactgtgctcactatctcggtgacaaaatcatttatacaacaaatcctagcaacatgaaatttgcccatgtaataaacctgcacatgtatcccctgaacytaaaataaaagttgaaaaagaaaaaaaaaggaaacataacccaattaatttggcttaaaagagttacaataccaaagtaactttgacctccctagaaaattcagatggaatagtttctatcatattaaatatccaccaactaatttatagtgtttgtaaga

SEQ ID NO: 788538 - DNA, 710 bp, Homo sapiens
agttgctgagttggtgttggctcaatagctctggaaggaggtggctggaggcccaggactaaaggccctgtctggtaaagagttatgggaatagccactcatgtaacagtctggccacttttctgtagggctgctgtggtatgcttggggctccctccagtctttagccaccttggattttccagaacctagaggtgtcaccagtgaagcctgcaaaaatgtaaagatggcagcctgcccctccctctggaagctttgtcccagggaggtatagacctattgctggtccaaagacacctgtaggaagtggctggagaccctggatgggaggtcccgcccagtgagggggaatgggatcgggacctactttaaaaagtagtctggccatgttttgctagagcatctatgctatgctgggggtccacttcagctcctggtcacctcagacactctgcctaaacagcaaagatggtggcctayccctccctctggatgcactgccccaggggaattcaggtctgtgttggctggagagcctgggcaggggcggctggaggtcctggttgggaggaccagtccagtgaggaggaatgggattgggcacccacttaaagcagcagtctgggcatgttttggtagagcggctgtgctgtgctggggggatcccttctgccctgagttggctcagactctccaaagcctgaaggctg

SEQ ID NO: 788539 - DNA, 600 bp, Homo sapiens
caaggagttgaccctagcttaccacaggtagccacaaagcgagaccccacatgtggataattgccctgaaaatctgcagtctagagatggctcactctggctctttcccctagttcctaataacctttctgccatgcacaccaaataaataacagtgcatttgcgcatygtctttcaccaattcacaccagcttatctccactgtatttagtgtttcagagactggtcatctttcttgaaaacttagaatcaaagcagtgagataattggatataaattggtatcatcatcattaagtgatatgtatgaagcttgctgtgtgtgcatattgccatactgggcattttgggaagcaaactatagagttcttacaaacaagaagttaacactgatgcagacacacaaataagatatggaaatcgagagcaatatagcaactaaataatgctattgtaagagcccattccaccatggctttagacaatgagactaaatatggctaagaacccccctcttgtttttaagaggattataaccttcacaaaagtctatgtcagctgcaataggtcactgcctttcttttcccatcagccctggtga

SEQ ID NO: 788540 - DNA, 537 bp, Homo sapiens
actgaccacacaactgcactccagcctgggcaacagcgtgagaccctgtctcaaaaaaaaatctagcaataaaagaactgaacttttctgaactaaacagcggcttttcccttgagctaatgtgataaattgcctctttattttgataatttttatagaatatatcctagaaggcatatttttatcaagtaaaggtataatacaaaaataaaaattttcttgagtgtgctaatacaaccttccagtgttaatgataatcaggactggggggaattaatctccttcctgtgaaatgctgaacacttgtcctgaaaaaatactgacatcagactctagtatattcaatgttttatatattgtrgcctatttcctcttttgttatttggataaaactttctttatatgacacccattaatactgcccacagtagaagaaatttctgatttattttcaatctggtactttatgctgccatgacaaataacctgttagaaagaataacagaaaaaataaactaatatttattgagagaatat

SEQ ID NO: 788541 - DNA, 668 bp, Homo sapiens
caaggacatgctgaaacagatgttcttatacaatgctgatgtgagtttaaattcatagatcattttttgagtgcaacttggaaacacgtataaaaacattaaaatctcatacttttttaattcaaagaaactagcactttaattttattctgcatttttgtgcctttatactacaaaaaaactatatacttttataatatacaatctggtgagttttgaaatacgtttacatctgtgaaaccatcgctgcaatcaaaataatgaatatatccatctctcccaaaggttttcttctgcacttttataaataacccctgcgccatcaccaggcaamcactgatttatttcgttactatcagttttcattttctagaattttaaacaagtagatctgtacaaatgtatttttttgttttgtctggcttcttccactcaacataattgagattcacctttgttgctgtgtgtaaggataattgatttctttttattgatgagtagtattccactggatatatacatatattatatatatatacacacacacacacacacacacacacacactaaaatttacttttccatctattaatggatatcagaagtgtttctagttttttgctcatacacataaagctgctataaacatttgtgaccaagactttgtg

SEQ ID NO: 788542 - DNA, 605 bp, Homo sapiens
attttcaggtttaatttcactgcctttcataagggtaaagtttcacagctgacattagcctgaggattagcactaaagagctgtgttttcatagcaggggctattgtacagacagtgataaccaaatagtaatatgccagttctttcttctttttttagcttcagtagtagctaagccrttaatacagtttgcatcaatttccccatttatttataatcagcctttcttttagtcctagtgcctgaatcaatgagtgagaatactagtactgattctttacaataataatatcttaagagtattgatatctttcattttttcatccagcagtctagtgcccagctgctgacaataaaagctccaactcttttagagatcagtggaatttagaagcatcttacaggtatcaaggaattgagcttctagagggatggtttggcttactaatttatcttccctgaaatatgtttgagtaaaaaagagttgcctgccacaatttagtgttggggttccagtggagctgagaaagtgaacaatccagctacttaaagcaacaacaaaacctgttcatctggatccctaggtaattttgaccaaggtgaga

SEQ ID NO: 788543 - DNA, 593 bp, Homo sapiens
aaaataaaaaaaattaaatacatggctagtttctatgtgctaaaaaaagaaacaaaacacttccaaattggaaaaaaggaaataaaactgtccctctttgcaaacaacatgatagtatgtctacacaaatgtaaagactctaccaagaaacttttagaagtgataaatacagtgaagttttaggatacaaaattaacattaaaacacaggagcatttccatatagcaataatgaaatatccaaaaaagaaatcaagaaggaaattttatttacaatgctaaagaaaataaagtacccaggaataaatttaacartgaaggtggtgtgttctctataaggaaaactacaaaatactgatgaaagaaattgaagaggacacaaacaaattgataaacatcccatgtttgtgtatcaaaattgatatcattaaaattaccatactacccaaagcaatctacagattcaatacaatccatatcaaaatactaaaatcatttttcacagaaatggaaaaaaatcctaaaacttatatgggaaaacaagccagaatagtcaagcaatcctaagcataaagaacaaaattggaggcatca

SEQ ID NO: 788544 - DNA, 634 bp, Homo sapiens
agagaacattttctcctcttcaattttttggaataatttgaggagaattggtattagcttttctttatacatttggaaaaattcagcagtgaatccatctggtcctgggcttttctttgttgagagatttttttttttacttattcaattttgtttgtcattattggtctgtttaggttttctatttcttttttattcaatcttggtacattgtatgtttccaggwatttatccattcctctagatttttcactttgttagtgtgctattattcatgatagtctccgatgatcttttgtatttctgtagtatcacttgtactgtctcctttatcatttctgattttgtttatttgggtcttctctcttcttttcttggttagtccagctagtggtttatcaattttgtttatcttttcaaagaaccaaggccttttgttgcattgatccttcctaatttttttttttttagactctattttgttcagttctgctgtgatctgtgttatttcatctgctacttttgggtttggtttgttctttactagttcctggaggtacattggtagattgtttatttgaaatatttgtttttttttttatgtaggcagataatgttttatatatacttttca

SEQ ID NO: 788545 - DNA, 601 bp, Homo sapiens
tcatcagcaatcaacacatgagacattttatattgtaagttatttgcttggctccccttcctcatcgcttcttctccttattccaaacaagatgtgtaatgccgttgttcaatggtagtattcttgtaaacaactgtatataagcccctgagcttagactttaaaggtagaacatcaaggcccagaaaacttaataatccaatgttctraaacttctcagaataaaaattaattcaataaaatatgttaaatagcgtttggagtgtgtgtgtagtggtgaagagtagttaatgagtaactgaccacacaaagatggagttgtagggctccaagacgtgaatggtactgaaagacaagagaagaggagagttaagagctggggctggagggagacagggcctgctcaggactgagtattgtcagttagacctgctcttggtttgccttgcttggtttcagagccagcctctgcaaggaaccagttttttgtttgtttgtttgtttgtttatttgtttttttgtttttttgttttttttttttgcagtcttctgctttccagttcaccttattttttattgttctttctgattcagagtttag

SEQ ID NO: 788546 - DNA, 541 bp, Homo sapiens
tatccaggtatcagaagtgtgtctgggacaggcaggcaggcacaacaatgcccacttcgattccacacacttcaggtagaacaccagtggtcctgtgtctacgttcctttaactgcctttgtctcgatcaagactattttttgatgcccacttcttttccaragcagccaggtatgaacacattgggattgggggaccgaactgtgcaaactgaacctagtagggccccaaaaccctgtaagactcagttttatcatacggcaaaaagatataagcctgttatcaacttgaaaagttactgtgaagatgacatgggatactgatgatcattgtgggtttcacaaacttctctggtgatgagaagtgcccacacacttgttgatgtatagagctcttccctggaaatgtggattcggaacccatctctggattactgtattattctcactggtatgacttaggtatcaaatcagtgagtttgcctttgcccatcctctggttctaaaatcttctcccttccaaatttggaaataacgtaatc

SEQ ID NO: 788547 - DNA, 531 bp, Homo sapiens
ttgaatgaatgaatgaaatacacttaggctctgcacctcagtagatgctctagggggaacctcacctatggattccttttgactaaaggaagaaaaacgagtcttccttggagagtttgatgacagctacctttcttcataggtctatgtcctttcttcttttccttacctcttccatctctattcaattactttctttttactctgccttttttggaaatgcgttggagatggaggtagctggcagaatggaagagtggtcctgccattgagttttcccaaatcctcctaaactgtcactcaagaagattcttaaatttctatggcaattcttgscttaaagaaaaaaaatcagagcgctctgttcatagcatgataatcttactaatcactccatgattttccctgtctttatcctgcactctgtgcccttccaccactgtgagctctacaggccagatgcaggtggcatggctttgtagtttttatactctcctctgtgatcccatgaggcttttctcatacttttat

SEQ ID NO: 788548 - DNA, 608 bp, Homo sapiens
tttaatcacaacaactctgggtggtaggtgttagtactctcaagtaactggtgaagaaactgaggcacagcagggctaggaatggaactttagattggcgattctccacatgtgttcctccaatgagtagcatcagtaccacctcctgctcctgtgtacttgttagagatacaaattccctgacccacctcgagtctactgagatgtggtccaggaaccctaggaatgaacatgatagcaatctgtgtctgaaaacgctctccagcctgattctaatgcttgctaacatctgagaacaacagcttatattacataattaataatgtggatccatgtctgtttgagcatttaagcccattctctaaatcacgtrcacaatatatagacttgtttacaaaggtgagtgatatttagagcatttcaagaaagacgtactttttaatgtttaagtactaaatattgacatttcttctatttgaagaagtcttgaagaattgtgcttccaacccccatactttcagtagggctaggtgatctttgccagcaaagacagactacgtattacagaagccttttcctctttaatctaaggagcagacagacaccgg

SEQ ID NO: 788549 - DNA, 614 bp, Homo sapiens
tttaaggtcaaattcacaaaggagaaaacagtgaatgcaagactttggaaaactggtttctggttgtatttttttagtttgagaaaaacgaagcaaactgtggcagagaaatgtactttgacttagaagaagcttaggacagccatgcaaatactaatggatgactcccacaccaccgctcacaccccagtattttcaaatacaaacatcaaggcagagatagatggggagagagataggaagagtgaaaggagaaagaaaacwtctgtatgctcaaaatgtctgttttctcctttcagcacaaattgaagtgataccatgcaaaatttgtggcgataagtcctctgggatccactacggagtcatcacatgtgaaggctgcaaggtatgggactttcatacagcacggttctgtatttgcctcaggcatctgtgtacctcacaagatgcggtgacacgtttttaaggaaggctggctaaaggatccttctgcctgctgctgacattcaggaattcttgcgtggtgggtgggagggttgattttctggtcttttgccttttacctttttgttattgtctaactggtcagcagctctttaaaaatggatgcgtat

SEQ ID NO: 788550 - DNA, 643 bp, Homo sapiens
gatcccctctttatcttttggaatagtttcagtaggataccaattcttccttgaatgtctgatagaattcagctgtgaatccatctggtcctaaacttagttttgttggcatttttttattagtgtttcagtcttgctgcgtgttattagtctgctcagagtttctatttccttttggtttaatctaggagtgttgtatatttccaggaatttagccatctcctttaggttttctagtttgtgctcataaaggtgttcatagtagccttgaatgatcttttgtgtttctgtagtgtcggttgtagtatctgtcatttcatttctaactgaacttattcagatcttctctcttcttggttaatcttgctaatgatctatcgattttgcttatmttttcaaagaatcagctttttgttttatcttttgtattttttgtttgtttgtttcaatttcatttagttctgctttggtctttgttatttcttttcttctgctgggtttgggtttggtttgttcttgtttctctacttccttgaggtgtgagcttagattgtctacaggtgctctttcaggctttttgatgtaggcatttcatgctatgaactctcctcttagttccacttttgctgtatcccagaggttt

SEQ ID NO: 788551 - DNA, 591 bp, Homo sapiens
atgatttagaggagagttatgtttctatatccccctatagattattcactctattcttaatagagtatgtagctaacagtagccaggatctttactagtttacacatttagctttgaaataatgcccattcttttcaatgcttcttatttagcaatatctttaacacatattatttttagtcttttttgtagtatttaagagccatttttaatccctttgtttatatatatatatatatatgcacacatgtgtgcacagatacctaataattcactttttctgctaaattatatgtgatctatacatatttaagctctttctaatcattttattttattragccatatcattacctgcttaataatgaaaaattaatatccaaaactttaaagaaggaaagttttatgtgaaaaaattattttctttatttccaaaggaagtatttttcattgttttgcaagaagagcatatttccctaaagccctacatatttgttaaaccttacctacacgcagcatatcagaaattcatccactctctaaagtgtggttatacctgcttaatcgcacatattcaaacaattttaattt

SEQ ID NO: 788552 - DNA, 578 bp, Homo sapiens
cttcctcttcttgtcccagaggttgaatcaaggttgaaactacaaggggaactcaagaagctccccaactatagtccaggaatgattgcagggataggaaaccaggcatatcattggactgcaacagaatcatgaagcaccaaaaggcgccgtctccctaagttggcctgacaaggacatcggctgtgtgctcagctgcagagagctgaagagagtttgctggggtagtagacataccccaagagcatggatacagtcccgttgwtacaacagatgtctctcactgcacacacgctagaggctaggaatggttccaagcccttcccctgtactaattcactccatcttcgccctatgaatatgaagtactactattattcccatttttcagatgagaaaactgaggcacagagagaatgagtaacttgccttatagctactcactagatcacaaagctaaaaagtgacaaagccagggtgggaatccattttggtagacagaataatgggctcccaaagatacctatgactgagtccccagaatctatgaatatgttatcttttatggcaagagtaac

SEQ ID NO: 788553 - DNA, 587 bp, Homo sapiens
aaaatgttttttgaacccaaactaagtgcaagcatgttttgcttgtaagaagaggagaactatgcaatggagaactccaggcagagatcaagtcaagtataattaaaatctcccaaaagctgcatacagtggtcatcctgaaggtggagaccaccatccttctttgcctactaatcaaccttctgcttttccatcaacgattttttctattttccataarttctagaaaaggaattcagaggcccaaagttgccacttttgccacttccaagtaagacttttagaagggtgatcatagctctgggattctgtttctttctttctccaggcacactacagggataagatgaaagaacagccgctttgcaaaaagatggggaactggaacaagccatgacccccaaaatagacatgaagatacagagactgtatttttctacccaatagcccaaaggagaaactcttcaattaataacacttttgatacaaagccagactgcccaagatgactgcctaaaaatacacaaaaatctaggaaaaacaagctctccatcctggagggaatgtcaatggaaaatagttgctag

SEQ ID NO: 788554 - DNA, 608 bp, Homo sapiens
actcatagaagcagagaatagaatgacagttgacaggggctggagaagggggaaatggagcgttgctgttcaatgggtgtaaaatttcagttaggcaagatgaaaagtactggagatctgatgtacaacacggtatctgtattagtccattttcacactgctataaagaatgatccgagactgggtaatttataaagaaaataagtttaatggactcacagttctgcttgactggggaagcctcaggaaacttacaattatggcagaaggcaaaggggcagcaaagaccttcttcacatgactacaggaaggagagagctagcaagagccagggaaactgccttataaaaccatcagatctcatgagaactcattcactatgagaacagcatgggggaaccacccccgtgatctctctctaaacactgggaattacaattcaasatgagatttgagtgggggcacaaagcctaatcatatcagtatctgttggtaatactgtattgcaacttaaaattttattaagcgggtaaatctcagattaagtgttcttgccacaacaataacaacctcagcaaaaccaagagaagctcaggttaatagcgaag

SEQ ID NO: 788555 - DNA, 632 bp, Homo sapiens
tgaatgaagtaagttagaggaaacagagctacatgattctttgtctttgatttcaagaacaaagaattacttttttttcttcttttcgaagcagcagtcttttattagtcatgatgaaaatgtcaaattcttcaggtagagttacagctccaacaggtgttggacaaaaacaaaaataatctccctctaaaaaaccataataataattcttaaaattttctctcttaattttcttgatawacctatcagaataacaattaatacattaaatttcaagtgtgtatataaattattattctgataggtatatcaagcaaattgagagagaaaattttaagaattctttattcattataatatatcctcaattttctatgttaaaaaattataatcacatttttctaattataaaatacatgctcattatttgaaactggaaaaataagaagccctcccacaatcccatcaaccatgtttttgtttgtttttacaaataaaagtatgtttacatgttacttatgtcatacgtacatgctcaattttagaatgctcataatattttctctactctgtgctttgggtggtaagtagggtgttccaggaagatactgattttatgtaattatttcttg

SEQ ID NO: 788556 - DNA, 632 bp, Homo sapiens
tgaatgaagtaagttagaggaaacagagctacatgattctttgtctttgatttcaagaacaaagaattacttttttttcttcttttcgaagcagcagtcttttattagtcatgatgaaaatgtcaaattcttcaggtagagttacagctccaacaggtgttggacaaaaacaaaaataatctccctctaaaaaaccataataataattcttaaaattttctctcttaattttcttgataaacctatcagaataacaattaatacattaaatttcaagtgtgtatataaattattattctgataggtatatcaagmaaattgagagagaaaattttaagaattctttattcattataatatatcctcaattttctatgttaaaaaattataatcacatttttctaattataaaatacatgctcattatttgaaactggaaaaataagaagccctcccacaatcccatcaaccatgtttttgtttgtttttacaaataaaagtatgtttacatgttacttatgtcatacgtacatgctcaattttagaatgctcataatattttctctactctgtgctttgggtggtaagtagggtgttccaggaagatactgattttatgtaattatttcttg

SEQ ID NO: 788557 - DNA, 644 bp, Homo sapiens
tttacctcttagaactgtataatttgattatatttatcacgcataacaagaagtaggtgttttaccaagcaaacaagacagtaagtaaatgcaactgactctggttagtggtgaattcacactcacatcatctctyggtgggactgttccctgaccagttttctgcctctctctcacctccaaagcatcatctcagaatgatctttcctgaatataaatctcttcatgttgctcctctgctgaaaacccttgattctactttaaacctagagaataaagtaccaactcaccaatgtggcagagagataggggctggaaaatctggtcccaacctaccaacctgatgtctcccacattaaaccacatgtcctctcctccaacattacttgacaactcacttctcaataaggcaggctattactttgcaaggattactctcctgccttttttctaactcatgatctcttaagcacacttcacgacccagtatacagaacccatgccctgggaagccattgaagcctttccagataaagctagtaatgtttttctttcattagagcactgattgctatcttgacacggcagttcacacctctaatcctagcacgttgggaggccaaggagggcagattgcttgagtc

SEQ ID NO: 788558 - DNA, 644 bp, Homo sapiens
tttacctcttagaactgtataatttgattatatttatcacgcataacaagaagtaggtgttttaccaagcaaacaagacagtaagtaaatgcaactgactctggttagtggtgaattcacactcacatcatctctcggtgggactgttccctgaccagttttctgcctctctctcacctccaaagcatcatctcagaatgatctttcctgaatataaatctcttcatgttgctcctctgctgaaaacccttgattctactttaaacctagagaataaagtaccaactcaccaatgtggcagagagataggggctggaaaatctggtcccaacctaccaacctgatgtctcccacattaaaccacatgtcctctcctccaacattacttgacaactcacttctcaataaggcaggctattactttgcaaggattactctcctgccttttttctaactcatgatctcttaagcacacttcacgacccagtatacrgaacccatgccctgggaagccattgaagcctttccagataaagctagtaatgtttttctttcattagagcactgattgctatcttgacacggcagttcacacctctaatcctagcacgttgggaggccaaggagggcagattgcttgagtc

SEQ ID NO: 788559 - DNA, 640 bp, Homo sapiens
gtcacttttttctttcattcatttatcagttttttatttaataaatacatacagagctgatcatggtggcttgcattcaatgacaggggcataagatggacaggtcatccctctcatgggatttacattccagaaggatgtatggtatccccctctccaccccgcaaaggatttagatgaagattttacagaactttcaaggatgtcatttgttcttttggtagttttggaaggcacaagagaagggctagaataaagccctttttctcaggtatttctttacagagatataataagcatttctgtttcctaatgtcaggatatttacatagtatagatcatttaaacaaatatactcttccaaatagcaatagtgtatgtttttcagatatgatggaattattttaagatcattttagaaatgacaataaacatgttaaatcaaaattttaatttttatagyggtatttgttaacataaaattttaaattattcagagctcagaggaaaatgaaatatctgtgagtcatgaaacactatgcattgtagtactgctccaaatactatgatgtcttggagttgttttttgtaaataatgcagggattatattgttgttacttgttttaatgtacacagtaa

SEQ ID NO: 788560 - DNA, 506 bp, Homo sapiens
ttgctttagtataatagaaaaatagtaattaagtggagaaattgaactatactttgatcaggatcaaaattaacattatcattgaggggtaagcaaacatcatgtgccttcagaatatcctgagaacaagagaacatcacctatttgggattctggccaaaaatgtataacctgaatctaatcatgaggaaacttaagacacatgctttattaaaaagcaggaagaggaagaattgtatccttccaaagtagcactaccataaacaaagacagaggaaatggtcctgattaaagaagcctaaagaggtgtggcarctaaatgcaatacttgactctagactggattctgtgcttgggagtttgagggtagggaaggtgaataccataatggccattattggatcatttgaccaactggagtatagatggagattaaagtatcctatcagtgttcagtgtcctgaagttgatatatttgcatatacacatacacgtgtgtatatata

SEQ ID NO: 788561 - DNA, 615 bp, Homo sapiens
tctttgttcctttgatctggacattgaacacttaccagtgcagccaggaggaaggttaaatgaattatttatgcagccattaaaatcatgttttcaaaggatatttaatgatgcaatataataaatggaaaaatcaggcacaaaattgtatgtacagtaagatcccaattatgtataaaaatataaatatgcaagggaaaaaycctcaaaggaaatacatcaaaatgttactgattatctttggagagtgtaatcataggtgattatgattttcaactttatcaccttcttatagtttccatatgaacgtgttttatttttataatcagaaaaagtttttttaaaaaagatcttaacccttctgagaactacttatatccttactcttttcccctaattttccttatctagatctttacagattgctttgtcaaaatttcatttttgatctctagctcttgtggcatcttgaagctctctggaatataggaaccatatagttgccaataatctgtcaaatgcttctgctttacactgttattccttatgtaggagttcttatacttaattttttttaagtcaatgcctgcattttccaatgaagcagtttctatg

SEQ ID NO: 788562 - DNA, 636 bp, Homo sapiens
ggtcttaatcatattcattcaataactgggaggtaagcctcctgtgagctgtggctcacatagtgataatttagcacatggagcttatggccacgtgtcgatgcttgattttcttttttttgttaaaaaattaaactctttaytttgaggtaattgtagactcgtatgcagttgtgggaaatagtgcacagtgattctttgtaccctttactcagtttctcccaatgctaccatcttagaaaactatagtacaaagtcacaatcatatcgacattgatacagtaaagattacagaattgttctgtcacctgcagaagaattcacctgctgggcactgatcactttctgccaatagttaatacctcctggtcccagccttcccacagcttctatttcagtgtcaggactcacctggtcatgctttcttcttactctttcctcatggaccctgaatctcaggaccagggtgacctttcttgtcctgccccctcctcgaaagaggccctttgcctctgagaaaagactcctctatattatttagcttcccattgtgactttttggaaaattgtacaatattgtccttgtacagtattaatattccatattcagtagaaactgtccatgtagccataaga

SEQ ID NO: 788563 - DNA, 636 bp, Homo sapiens
ggtcttaatcatattcattcaataactgggaggtaagcctcctgtgagctgtggctcacatagtgataatttagcacatggagcttatggccacgtgtcgatgcttgattttcttttttttgttaaaaaattaaactctttactttgaggtaattgtagactcgtatgcagttgtgggaaatagtgcacagtgattctttgtaccctttactcagtttctcmcaatgctaccatcttagaaaactatagtacaaagtcacaatcatatcgacattgatacagtaaagattacagaattgttctgtcacctgcagaagaattcacctgctgggcactgatcactttctgccaatagttaatacctcctggtcccagccttcccacagcttctatttcagtgtcaggactcacctggtcatgctttcttcttactctttcctcatggaccctgaatctcaggaccagggtgacctttcttgtcctgccccctcctcgaaagaggccctttgcctctgagaaaagactcctctatattatttagcttcccattgtgactttttggaaaattgtacaatattgtccttgtacagtattaatattccatattcagtagaaactgtccatgtagccataaga

SEQ ID NO: 788564 - DNA, 636 bp, Homo sapiens
ggtcttaatcatattcattcaataactgggaggtaagcctcctgtgagctgtggctcacatagtgataatttagcacatggagcttatggccacgtgtcgatgcttgattttcttttttttgttaaaaaattaaactctttactttgaggtaattgtagactcgtatgcagttgtgggaaatagtgcacagtgattctttgtaccctttactcagtttctcccaatgctaccatcttagaaaactatagtasaaagtcacaatcatatcgacattgatacagtaaagattacagaattgttctgtcacctgcagaagaattcacctgctgggcactgatcactttctgccaatagttaatacctcctggtcccagccttcccacagcttctatttcagtgtcaggactcacctggtcatgctttcttcttactctttcctcatggaccctgaatctcaggaccagggtgacctttcttgtcctgccccctcctcgaaagaggccctttgcctctgagaaaagactcctctatattatttagcttcccattgtgactttttggaaaattgtacaatattgtccttgtacagtattaatattccatattcagtagaaactgtccatgtagccataaga

SEQ ID NO: 788565 - DNA, 636 bp, Homo sapiens
ggtcttaatcatattcattcaataactgggaggtaagcctcctgtgagctgtggctcacatagtgataatttagcacatggagcttatggccacgtgtcgatgcttgattttcttttttttgttaaaaaattaaactctttactttgaggtaattgtagactcgtatgcagttgtgggaaatagtgcacagtgattctttgtaccctttactcagtttctcccaatgctaccatcttagaaaactatagtacaaagtcacaatcatatcgacattgatacagtaaagattacagaattgttctgtcacctgcagaagaattcacctgctgggcactgatcactttctgccaatagttaatacctcctggtcccagccttcccacagcttctrtttcagtgtcaggactcacctggtcatgctttcttcttactctttcctcatggaccctgaatctcaggaccagggtgacctttcttgtcctgccccctcctcgaaagaggccctttgcctctgagaaaagactcctctatattatttagcttcccattgtgactttttggaaaattgtacaatattgtccttgtacagtattaatattccatattcagtagaaactgtccatgtagccataaga

SEQ ID NO: 788566 - DNA, 626 bp, Homo sapiens
ctgcctttaaaaattttgcgttgtgcgagcaagagagcttaaaaggtgggtcctagctggaaggtgtaaggatacacatgactttctacccgggaaaggaatatatagtctgtaaatcccaggacaaaaaaatcattggtaaaatttaagtggtttcaacatggcattaatgtatcattaaaaaaagrgaatacttttggtttcttgtttaattgttatttatgtgatctacaagtggtgattcatttctgaatggaaagaagtgttgcagtattgtcttctctgtgaggatagaaataaaattccttgctaaatgttaacatgggaacatcttagaggtgaccaagagccacagtcctgtatttttatgagaatgcaatcttagatttacttatttatttttggcgacagggtcttgccctgtcacccaggctgttgtgcagtggcttgatcttggctcattgcagcctccacctcctgggctcaagggatcctcccaccttagcctcctgaggacctgggaccacaggcatatgcctctatacctggctatttttttttttaaaattattgacacggagtctccctatgttgcccaggctagtctcaagctcctgggctcaagg

SEQ ID NO: 788567 - DNA, 520 bp, Homo sapiens
agtcaatgttggagcaaagaaaactatcagggatgaagaaggacattgcatagtgataaaaagggtgatccacccagaatatttagcaattttaaattcaccatacaacaaagctttaaaatatgtgaagcaaatgcctayataactgaaaggagaagtagacaaattcccagtgataattgcgggacttcaacatatctcccctaaaagttaatagaatagctagacagaaagtcagcaaggatatagaactgaacatatcaaccaacaggatctaatcaacacttatggagcataccacccaacaataacacagatttttttccaaacacccagggaacatattagtaaaccacagccagggccattaaaaattattaaatcattgaaataattaccgagtgtgttattcaactacagtggaatccaagtaaaaatcagtcatgcacaaacacaagaaaatctccaaacaattggaaactaacacacttctaatagtccctgggtcaaatgactagac

SEQ ID NO: 788568 - DNA, 628 bp, Homo sapiens
atttatctttatcatctgtatatgatgaatactgagccatgctaatacaacattataccaatacaaagattgataccataaattctgtaaccttaccattccctagtgattattcagtctttattttattcagtcaacacctctctagtcatccaaacatgtttattcagaaggacacctctttactatcactctaataaatgaatacaacatacgttcttcttcctttaagtgataatagttaaggcatctgttctttttatgaagatagtccttttagatgtggttatgatcccataactttctaccctcttggrtatcttgctcttttaaaaaattatcttagtctccactatgattctaagtgaagtaactcaggaatggaataccaaacattacatgttctcacttataagtgggagctaagctatgaggatgcaaaagcataggaatgacacaatggactttggggattgaggggaaaagggtgggaagggtgtgagggataaaagactacaaattgggtgcagtgtgtactgcttgggtgatgggtgcaccaaaatctcacaaatcatcactaaaaaaacttactcatgtaaccaaacaccacctgttccccaataaccta

SEQ ID NO: 788569 - DNA, 597 bp, Homo sapiens
gaacaatttggagagcccagaagacaggaaaatgtgagaaaatttggagtttcccatagagacttggagggcgaggaagacaggaagatgtgggaaagtttggaacttcctagaaacttatcgaatggctttgactaaaatgctgctagtaatatgtacaatgaaatccaggctagggtgatctcagatggagatgaggaacctgttgggaactggagtgaaggttacgcttgctatgcattagcaaagagactggcaacattttggccctgccctagaaatttgyggaacttcgaaattgagagagatgatttagggatctggtggaagaaactgctaagtggcaaagcattccagaggaagcagagcataaaagtttggaaaaaacagcctgacaataagatagaagagaaaatcccatttctctgtggagaaatccaagcctgctgcagaaatttgcataagtagcaaggagcagaatgttaatcactaagacaatggagaaaacatctccagggcatgccagcgaccttgatggcagcccctccaatcacaggcctggaagcctataatggaaaaatagtttcacggtccaag

SEQ ID NO: 788570 - DNA, 538 bp, Homo sapiens
aaccagaaatatctaaagatacaaaaatacagggaaaagacataaattttttttctggaaggaggtcatggaaagcttcacagaggaagtgatgactgagcaggattctgaaggctaaacaggagttcaaaaaccagatatggcaggatgaagcttttctaggaaagaaacacccccatgcaaatgttctcgagcatgaaacagccaggaactaaacagatttagctctgctttctttctcctaaaatagaaacttgcaaggatcttgactttgactggaaggaataagcatttatgaaaaacattctaagtgacaaaaattgagctagtrttttgttttgtctttaatggaggaaatgagaaaactgaggctccggtaagtaagaaccctcttagatattcctggaatttacaccctgatgggtggttagttactttatctacatagtattctcatgtatatatgctattatcgtattctatcagttgttctcattacatagaaaggattaagataaattggtggtgttcaaggttt

SEQ ID NO: 788571 - DNA, 563 bp, Homo sapiens
atgggtggttagttactttatctacatagtattctcatgtatatatgctattatcgtattctatcagttgttctcattacatagaaaggattaagataaattggtggtgttcaaggttttggatttacctactagcgcacttcctcattgccacaggagttaaatattaactcatgctgatacctgtccaacatgtatgtacatgtgtgggtgggtgggtttaggcscaggtggaaatgaagtattgcaaaaatatctgcagtttggtgagcaattaatcaggaaataatgagtgctatactggaataatcaccttaaaagtaaaaccttcaatgaaagcaaatctttcagaagttcaatatgggaattaaattactttaaaattgtagaatgttctaaacttttgcatttattgttttgaaaatatttttcaatggtaggcattttcaatcatttattttattacaaggggttaattctgggattattttttgctacttctcaagttaactatgaaaaccataattctttttttatcttttggttgggtttaattatgacaa

SEQ ID NO: 788572 - DNA, 552 bp, Homo sapiens
atagatgtcttttaatcaatgtgtatatttgtatattttctgaatcttttggaatgtcccctatcactgccccagtaaattaattttctctcaagacagggttgtaggaagtttaaaaacgaaacctagagagtgacagaaatcttgtcctggcttcttctgagcataggcaacgtaaggtattttattgctggatcattgttgttttacaagtaaaagccaaagtaaacacttgcacaaagaatctcatgaacgggccgggtgcggtggctcrtgcctgtaatcccagcactttgggaggccaaggcgggtggatcatctgagatcaggagttcgagaccagcctggccaacatggtgacaccccgtctctactaaaaatacaaaaattagtcgggcatggtagcaggcgcctgtaatcccagctactcgggaggctgaggcaggagaatcacttgaacccgggaggcggaggttgcagtgagccgagttcgcgctatttgcactccagcctgggggacaagagcgagacatcgtctcaaaaaaaaaaaaa

SEQ ID NO: 788573 - DNA, 552 bp, Homo sapiens
atagatgtcttttaatcaatgtgtatatttgtatattttctgaatcttttggaatgtcccctatcactgccccagtaaattaattttctctcaagacagggttgtaggaagtttaaaaacgaaacctagagagtgacagaaatcttgtcctggcttcttctgagcataggcaacgtaaggtattttattgctggatcattgttgttttacaagtaaaagccaaagtaaacacttgcacaaagaatctcatgaacgggccgggtgcggtggctcgtgcctgtaatcccagcactttgggaggccaaggcgggtggatcatctgagatcaggagttcgagaccagcctggccaacatggtgacaccccgtctctactaaaaatacaaaaattagycgggcatggtagcaggcgcctgtaatcccagctactcgggaggctgaggcaggagaatcacttgaacccgggaggcggaggttgcagtgagccgagttcgcgctatttgcactccagcctgggggacaagagcgagacatcgtctcaaaaaaaaaaaaa

SEQ ID NO: 788574 - DNA, 499 bp, Homo sapiens
aaaggactcaaacagtgaactgatatataggataatgaaaggatattaacctgagagagcatggtcagaagatcctcactgagatggtaatatcaaagcccaggcctgaggttgagaatgagatagccacagggaggatggaagagagtgagttttgttacaggatgcagaaatgacatggtccaagaacccagtaagtctttggattccaggaaccaaaagaagctgacaagtatggccagaactgcagtgtaatatcctgagaracaattgttggtcctagtcagtttattggctcaagctcatcacgttcttatttcaagctcatctccctgttccaggaattaccatcccaatttttccagatgctgcccttcattcttccatttgagggtctcttctttcaaatattttgggaaacggggtatagaatttggactttggtcatgctttccattttcagatgtgtcaatcaggatcccaggagaaaatagaattc

SEQ ID NO: 788575 - DNA, 610 bp, Homo sapiens
aaatataaatatctcttaattacaacccctgaggctcattcctctccccacttcccagaaactattaccaaaattagttttgagtgtgcacttccaaatatgtttttatacttttatatacatgtagtagtatccattactgtcaaacttttgtgcttttaaatttacataaataaatatataattttttagtcaacattatttttagatacatttatgaatgattttaactggtatagacagccataaaagtatgctatgatttgtttatctatttcttatctacaaatggacattaagtcagtcatcaagttttttgctaataaaaaatatgttgtaatgaacatatctctgtatagcctatagatcaagaatgttttcatttttgtttttaagacatgtacccaagtggaactgctgggtcatagcatggacacatttttaattytactgtatatttattaaattgcttttcagtgtggctttagcaatttaaatctgtgccagcaatgtgtgagagtagcatttgcccaatatctgtaccagcatctgctatctcatattctttattccaactaataggtgaaaatggtatctcattgtggtttta

SEQ ID NO: 788576 - DNA, 579 bp, Homo sapiens
acactctaaagattcttccaccactgacttactatctgctttatttctcttcatatccttttatctactggatattaggatggttccccttacaccatgttgccattttcatcccgttttcactacataaaactcacctcagtgaattcatctcaagaaagttttgctgtrcttccccgttaatgctcttgaacacctgcctgctgtgcttccccattaatgctcttgaacacctgcctcctttctcctttaactcttctttggttatcttgagataatctctccaagtctttctgttataattgtgcgccctaaaactttgaaaataatagaagaattttactgagaaatgtgctccaaggaattgatgtttttacctcttagaggcgatccagacaccccaaatctaaaaatgaaactccccaaagttctatctactattttcttaaaactacatttctgttgcatgtaatattttaaattataataacagtgttttcttacttgtgtgtaaatagtttatatttctagctcaaaatttaagctgtttttttttggtattagtcttggaatctaaac

SEQ ID NO: 788577 - DNA, 579 bp, Homo sapiens
acactctaaagattcttccaccactgacttactatctgctttatttctcttcatatccttttatctactggatattaggatggttccccttacaccatgttgccattttcatcccgttttcactacataaaactcacctcagtgaattcatctcaagaaagttttgctgtgcttccccrttaatgctcttgaacacctgcctgctgtgcttccccattaatgctcttgaacacctgcctcctttctcctttaactcttctttggttatcttgagataatctctccaagtctttctgttataattgtgcgccctaaaactttgaaaataatagaagaattttactgagaaatgtgctccaaggaattgatgtttttacctcttagaggcgatccagacaccccaaatctaaaaatgaaactccccaaagttctatctactattttcttaaaactacatttctgttgcatgtaatattttaaattataataacagtgttttcttacttgtgtgtaaatagtttatatttctagctcaaaatttaagctgtttttttttggtattagtcttggaatctaaac

SEQ ID NO: 788578 - DNA, 579 bp, Homo sapiens
acactctaaagattcttccaccactgacttactatctgctttatttctcttcatatccttttatctactggatattaggatggttccccttacaccatgttgccattttcatcccgttttcactacataaaactcacctcagtgaattcatctcaagaaagttttgctgtgcttccccgttaatgctcttgaacacctgcctgctgtgcttccccattaatgctcttgaacacctgcctcctttctcctttaactcttctttggttatcttgagataatctctccaagtctttctgttataattgtgygccctaaaactttgaaaataatagaagaattttactgagaaatgtgctccaaggaattgatgtttttacctcttagaggcgatccagacaccccaaatctaaaaatgaaactccccaaagttctatctactattttcttaaaactacatttctgttgcatgtaatattttaaattataataacagtgttttcttacttgtgtgtaaatagtttatatttctagctcaaaatttaagctgtttttttttggtattagtcttggaatctaaac

SEQ ID NO: 788579 - DNA, 577 bp, Homo sapiens
tggggaccagggaggtggcttactcaggggagctagagccaggtctgccttttttaaagagtgaggacaaggtgtcctaacagtctatggaaacgtgagagctaattggtagtcacaaattgtcagaggagccccatttagtttaatgctytcttaaaaagctgagagaaggccgggcgcggtggcttatgcctgtaatcccagcactttgggaggccaaggcgggcggatcacctgatgtcaggagttcaagaccagcctggccaacatggtgaaaccctgtccctactaaaaatacaaaattagctgggcatggtggtggtcgcctgtaattccagctactcgggaggctgaggcaggagaatcacttgaacccaggaggcaaaggttgcagtgagccgagatcacaccattgcactccagcctgggcaaaaagagtgaaactccatttcaagaaaaaaaaaaaaaaaagccgagagacaccatgcagctataaaaaaagaatgacatcatgtcatttgcagggacatggatgcagctgaaggccattatccttagcaaactaacacaggaacag

SEQ ID NO: 788580 - DNA, 634 bp, Homo sapiens
aaagggcttttcagtcctgacattctgccagcttttgatttccagcttctcaggtgaatgctgcagaaaagaatgttgactctaaaattaagtgtaaaacaaacaaagaaacaaacaaagccacactgtgcagcaggtgaacatcctgttgacttctgagacttatgggtccctttctctgaagctgaaggctaatttccaagacacctttttgggcaaagacaatcagaacagtaacataaaagtttactgcagcctttctagcaatgtgttttttttctctctctctctctctttctttctttttgtgtctgcaattgsaagctgcaaaatagctggggaaatcctttgtccagagctttgggatcactggatatctgagctgggagggtcctcagaaattcttactccaattctcacatttgatggatggagaaacatagcccggtggagggagaagagaccggcttgaacatatacagtaagctcctctgtgacgggccaggatgtctggtggtgactaggcgccccaggtctgcagaaacagaggactctgtggctccaggacccagagactcttgtccactcagtgcactgccagccgctacatccagcacccgcctccaaatccccc

SEQ ID NO: 788581 - DNA, 628 bp, Homo sapiens
tatataaattactttaatacatggaaatatctatgacaaataatccttaaacacaaaactaaagaagataaaactcaaaatgtagaagtgaattttttgcattgactcatgctccaactgaacttcaggtgatataaacctcatttaatgttcagattctctcatctatattattatgtccatctagcgtaaatataataattaagaatgtgctggaatcactgattccatattatgaatcctaaaagtggctcrattatgttgtggagagccatgagtgtagttacagaatttggactttgctctgtaagcaaaactgcttagaagggttttcagcaaggaagtgacacaatctcattggtaagttagaaagattgggtgggatgccaggtacagtgtgaatcaggtactagtaggtgataggtgattgataggtccagggtggaagaacagagggaacagagtcctaatcaaagaccacagggaaaacagcaactattctgaatcctttgaatttttatgcaatacaaagtaggaccaaaaaaattgccctttagaacaaaataacctaatgctcatggggcttgagcatatgtaattcagctactgtaatgctgtaccccgagca

SEQ ID NO: 788582 - DNA, 585 bp, Homo sapiens
tactcactcaatgcttaagtgattcaaaataaagattcctttgttttacaccagaacaacaagaacaaaaaaattctccctggaatccattagagattgccaaccccaaacctcttttctacatttttttgacttttaaaaattatggctctgtcccctccctccttcccccagactctgggactcctctccttctgttcattcctatttggagctgaaagccagaaatagctgtttacctcattgtcctcgtttcccttcattgttaccattcagttctctggtggcttccctgtggtggatgttttttaaatgaattcccaataagttgagaaaraaaagtatcagtaaagaccctggacacagcctaaagtaaaaatatattatgtgatattttctttaggaaaaactatttaaaaattgaccctaacacaggtaaagtttcttcatttatacatatatcatctaatattattctcaaaagtaataatgttaaagagctggagaaagaacacaccatacagaagaaaggactaattgtgtttatttaaaatatgaataataataattatgcatgttcagctc

SEQ ID NO: 788583 - DNA, 588 bp, Homo sapiens
ccaggtgtggtggctcatgcctgtaataccagcactttgggaggccaacgtgcgtgggtgggtggatcacttgaggtcaggagttcgagaccagcctggccaatatgatgaaactctctctctctctctactaaaaatacaaaaaaaaaaaaaaaaattagctgrgcatggtggctcatgcctgtaatcccagctacttgggaagctgaggcacgggaatcacttgaacctgggagacggaggttgcggtaagccaagattgcttcactgcactccagcctgggcgacggagcaagactccgtctcaaagaaaaaacaaacaaacaaaaaaacagtggagctgcaggagaaaaaacactgggatagctcctcatactcctgccctaaatgttaccaagtaacatcaacgaaaagatggaggttctcagctgctgggatggaagaaaagaacggtaaatggggatctacaaacagaaatagcgagtggactacttctcttcctgccctaaaatgcaatacagtcataatgttaacaagtgggtctgccctatagatgttgacagaaaatagagtggaaaaaagaaagac

SEQ ID NO: 788584 - DNA, 562 bp, Homo sapiens
ttttaaaagtaggtttcaggctgggggcagtggctcacacccctaatcccagcactctgggaggctgaggtaggtgaatcacttgaggtcaggagttcaagaccagccgggcaacgtggtgaaaccccatctctactaaaaatacaaaaattagccaggcgtggtgccgtgcgcctgtagtcccagcttctggggaggctgagacaggagaatcgcttgaacctgggaggtggaggtttcagygagccaagattgcgccactgcactccagcctggatgacagaacgagattctatctcaaaaaaaaaaaaaaaaaaaagtaggtttcagaggtatattaaatgaaaacgaaacaatattctattactgacatatcagtaaatgaaattactaatagccaggaatctttgtacctaggactttgaaatgcaaaacagtaaaaagctgctatgtaattagttccacatcatcactactaaaacatataccaaagtcaacttcgtaatcagattaaaactgtaccctacattcagtgacatacaaatgtaaatcttttcttttt

SEQ ID NO: 788585 - DNA, 623 bp, Homo sapiens
ctcgcggggccacaggcttcttgaggctgtgaggaatattgcttttctccttgcacttgagaagggatgtagacctgtgggtccctctcctccatcttctcctgctattgtattattgtcttatattgtattatacaatcttctgtcccagagcacattgcccattctaggcatccattttcytgcccaaagtcctgtttcagttcatggagaaattgatcccattcactttttttgcacccagaatgtgaaagtcagagatctggagtacaactgcgcccatttggctgcagaaagcaaaatggatctctgtattttctacccgatgcatcttcatcaacatgatccattctctgatatgcatagcactctacgagttgccaattttcacatccatttttcttatttgatattcacctatttagttagaaagtaaaagtagatgtaatttccccccatgttatagagggggaaattaaagagaaggcaggcaaaatgcttttgtcaaacaaagaaagtggtaggttttctgatatctagcctaaactatttcagatataccaggatgtaacaaagagaacatacttgtctgttagtctattacatgctaagatatcactatt

SEQ ID NO: 788586 - DNA, 623 bp, Homo sapiens
ctcgcggggccacaggcttcttgaggctgtgaggaatattgcttttctccttgcacttgagaagggatgtagacctgtgggtccctctcctccatcttctcctgctattgtattattgtcttatattgtattatacaatcttctgtcccagagcacattgcccattctaggcatccattttcttgcccaaagtcctgtttcagttcatggagaaattgatcmcattcactttttttgcacccagaatgtgaaagtcagagatctggagtacaactgcgcccatttggctgcagaaagcaaaatggatctctgtattttctacccgatgcatcttcatcaacatgatccattctctgatatgcatagcactctacgagttgccaattttcacatccatttttcttatttgatattcacctatttagttagaaagtaaaagtagatgtaatttccccccatgttatagagggggaaattaaagagaaggcaggcaaaatgcttttgtcaaacaaagaaagtggtaggttttctgatatctagcctaaactatttcagatataccaggatgtaacaaagagaacatacttgtctgttagtctattacatgctaagatatcactatt

SEQ ID NO: 788587 - DNA, 623 bp, Homo sapiens
ctcgcggggccacaggcttcttgaggctgtgaggaatattgcttttctccttgcacttgagaagggatgtagacctgtgggtccctctcctccatcttctcctgctattgtattattgtcttatattgtattatacaatcttctgtcccagagcacattgcccattctaggcatccattttcttgcccaaagtcctgtttcagttcatggagaaattgatcccattcactttttttgcacccagaatgtgaaagtcagagatctggagtacaactgcgcccatttggctgcagaaagcaaaatggatctctgtattttctacccgatgcatcttcatcaacatgatccattctctgatatgcayagcactctacgagttgccaattttcacatccatttttcttatttgatattcacctatttagttagaaagtaaaagtagatgtaatttccccccatgttatagagggggaaattaaagagaaggcaggcaaaatgcttttgtcaaacaaagaaagtggtaggttttctgatatctagcctaaactatttcagatataccaggatgtaacaaagagaacatacttgtctgttagtctattacatgctaagatatcactatt

SEQ ID NO: 788588 - DNA, 585 bp, Homo sapiens
ctatttgaaaacacattcttctttcttttctattttgttttttaaaattgctgcttctactagtttatgttaatttcacagcctgactttgtccagcatttcccatacatggattctcacttaaaccccagaaatatccctgtgccatccaaggcaaaccatggacctgagcctggcagcccctgtgctggcacatctggaagkccccagatgtggccgcatctggggccttccagactgaccaaggccggagaacaaggccggagactgcaaaccacaagagaaggttatttagtgcattggccccaaacagcccaaggaggggctcctgcctgccatatctcagctctgagacgtggggctcacggctactctgaagctccttgtctgtgtccatcacatggagagggctggtagctcatgggattatcaggacaactggaagagatggtacctgaaagtcctgtgtgggcctggcaggcacaggctgccctggaaggcacatgacctaggtgttggtctgtccccagcaggagctctgtcctgaacaaaggaaacacgcagtgaatgcattaggctccagtt

SEQ ID NO: 788589 - DNA, 585 bp, Homo sapiens
ctatttgaaaacacattcttctttcttttctattttgttttttaaaattgctgcttctactagtttatgttaatttcacagcctgactttgtccagcatttcccatacatggattctcacttaaaccccagaaatatccctgtgccatccaaggcaaaccatggacctgagcctggcagcccctgtgctggcacatctggaaggccccagatgtggcygcatctggggccttccagactgaccaaggccggagaacaaggccggagactgcaaaccacaagagaaggttatttagtgcattggccccaaacagcccaaggaggggctcctgcctgccatatctcagctctgagacgtggggctcacggctactctgaagctccttgtctgtgtccatcacatggagagggctggtagctcatgggattatcaggacaactggaagagatggtacctgaaagtcctgtgtgggcctggcaggcacaggctgccctggaaggcacatgacctaggtgttggtctgtccccagcaggagctctgtcctgaacaaaggaaacacgcagtgaatgcattaggctccagtt

SEQ ID NO: 788590 - DNA, 626 bp, Homo sapiens
gaggaggaactggaacgagctggtccctggcaggcctccttccccagcgaaggcaccgacagggccctggagggttcccatagtgggcggaaggaaagccgcctcccccaaggctcaggaatgcccagaatggttgtttcctcacggcctacaagcccatgtgacccaggctgagggtcccacgtttggggaagtgcctgggaaggggaaaggacaagggtagcccgtggctgcatctgggaccttccagactgaccaagsctggtcgctcctcctccccatcagcttctctggctgcagcattgagtttggccactgcctgggaaagctgagcacagccaccgctgccagccacagtcctgagctcttggcccttgcctcagctcctccccggaggttggccatcttgctcaggtctggctgggagcatcagcctttaggccaagccagcagcagccagggtagcctaaggcctccacctggtagggcagtggggaaggtatagagaacctagaggggaggcaggggggtcctatggttacaggcttaggtttggagccatacagactcatgtccgaatcctcactttgtcacttcccagctgtgtccatttttggaaagactca

SEQ ID NO: 788591 - DNA, 660 bp, Homo sapiens
agtggatcttagcttgctgggcccagtggtggtgggatcctctagaccacttggctccgtggcttcagccccctttccagggaagtgaattgttctgtctcgattgcgatccaggtgccactggggtatggaaaaaaactcctacagctagcttattgtctgcccaaacggctgcccagttttgtgcttaaaacctagggccctggtggtgtaggaatctcctgggctgcaggtttcaaagacagtgggaaaagcatagtttctgggccagaaggcacctttcctcttggcacggaagtccctcagggcttcccttggctaggggagggagttccctgacccccttgtgcttcctgcgtgaggcgacgccccaccctgcttcggcttgccctccatgggctgcacccattgtctaaccagtcccagygagatgagctgggtacctcaattggaaatgcagaaatcacctgccttctgcattgatctcactgggagctgcagactggagttgttcctattcagtcatcttgctagccacccccagaaaaaaattttaaaaagtgtatcattttagatagcaaattgtagagcagtacatacaatatagaggtagatagatagatagatagatagagagagagatagatagatagatattat

SEQ ID NO: 788592 - DNA, 566 bp, Homo sapiens
cttgattcattgggagaggacatctgtaaccactgcatcagggatttccgtgagagtttgacggtattcatgtggtattatgacaaaaatccaggactcagctgggcatggtggctgatgcctgtaatcccagcactctgggaggccgaggcaggtggttcacttgaggtcaggagtttgagaccagcctggccaacatggcaaaaccccatctctactaaaaatacaaaaattagccgggcttggtggcacctacctgtaatcccagctactcgcgaggctgaggcaggagaattgcttgaacctgggaggcagaagtttcagtgagctgagatcatgtcatttcactccagcctgggtgacaagagtgagacwctgtctcaaaaataataataataataataaaaataaaaacccaggactcttgtcccaccatctactttgtttcatgtttttcctcgagagagtgaataacaagtacgtgtgacaaatgagaagtcaagacaccactctgtaatgagtgaagcaaacaccggtatcccaaagcagggctatgccacactgga

SEQ ID NO: 788593 - DNA, 494 bp, Homo sapiens
caatgaagatgctgagtcactgcatatacatactcacaactttattctataatgtaatattctataaagtagctgtatcagtttatactttaaccagtaatggacaagattttctgttacttcccatctttgttaattattacttttagactctaacttttatcaggctcatggatgtaaaaagcatctcagggtgtttttaatttgcatttatctgctcatctatgaagatgagyttcttttcatataattatgagtcattatttttgttttgccttcttttgtttatgcattttgcttgttctgtgtcttatttttcctgttgatttttgggagttcatatatattctaaatgtatattcactcatatatatgttgcaaatattacagtttatgatttgtcaccttatgatatcatccaaatagagaagctttatattttgatgtagtcatatgttcatttttcctccttaatgtttgtttttcttggttct

SEQ ID NO: 788594 - DNA, 551 bp, Homo sapiens
agtttgtatcaaattgtgataacatatttgaaattaatatttcaaattaaagcaaaatcacaaatttatactttatattatgaatgagattcacaaaaggagcatgataatatattctgttgtcatcgcatacaaaataataacatatagagtatgaatcaataatttttcaaatacaaagctattacaattaggaatacaaagaaatcataattaggaatacttctacaatattaacacacaatagtggtaacacttgcaaaatgatggtggtgtttttttktttttcttttttgttttgttttttttcccgacagagtcttgctcttgttgcccaggctggagtgcaatggcgtgattttggctcactgtaaactccacctcctgggttcaagcgattctcctgcctcagcctccctagtagctggtattacaggtgcctgccaccacacccagctaatttttgtatttttagtagagatgggggtttcaccatgttggccagcctggtcccgaactcctgaccttaggtgatccaccagcatcggcct

SEQ ID NO: 788595 - DNA, 634 bp, Homo sapiens
tgtctttactaaaaaatacaaaaattagccaggcatggtagtaatcccagctacttgggaggctgaggcaggagactggcgttaacctgggaggtggagcttgcagtgagccgagatcaccccattgcactccagcctgggcaacattgcaagactccgtctcaaaaaaaagaataatctgtcagcaggtcagcctggacaatgaagattgaatggcaagggcaggggcatctgttaactaggttaytgctcataatcttactgtctttccttgttttttgttaaggtgactttcttgaaagcataatttccaaatgcatattttacatctggcattaaagtaaaatccattaaatgtgctttggtatctactgttgtattaatcctttctcatactgccataaagacatacctgaggctgggtaatttataaagaaaagaagtttaattggctcatagttccacaggctgtacaggaaacatggctagggaggcctcaggagaatcacaatcatggtggaaggcaaagaggaaggaggcacgtcttccatggctggagcaggaggaagagagtgaagggggaggggctacagactttaaaacaaccagatgtcccgagagctccatcaggaga

SEQ ID NO: 788596 - DNA, 634 bp, Homo sapiens
tgtctttactaaaaaatacaaaaattagccaggcatggtagtaatcccagctacttgggaggctgaggcaggagactggcgttaacctgggaggtggagcttgcagtgagccgagatcaccccattgcactccagcctgggcaacattgcaagactccgtctcaaaaaaaagaataatctgtcagcaggtcagcctggacaatgaagattgaatggcaagggcaggggcatctgttaactaggttattgctcataatcttactgtctttccttgttttttgttaaggtgactttcttgaaagcataatttccaaatgcatattttacatctggcattaaagtaaaatccattaaatgtgctttggtatctactgttgtattaatcctttctcatactgccataaagacatacctgaggctgggtaatttataaagaaaagaagtttaattggctcatagttccacaggctgtacaggaaacatggctagggaggyctcaggagaatcacaatcatggtggaaggcaaagaggaaggaggcacgtcttccatggctggagcaggaggaagagagtgaagggggaggggctacagactttaaaacaaccagatgtcccgagagctccatcaggaga

SEQ ID NO: 788597 - DNA, 607 bp, Homo sapiens
ataaatatattatttcaagaatattatatagatgggattgtacagtatataaccttttgaagctggcttttcactaagcgtaatttcctggagtctgtccaactcactgcacgtattggttgttcattcctttttattgctgagtagtattccctgtattccctggtacggatattccacagttgtttaaccattcacctgtggaaagacatttgggttgtttctagtttggggccattatgaataaagctgctatgaacatttatatactggttttttttctaaacgtaagttttcatttcttcaggataaagccccagagttcaattgctggatcatatcataagtgcatttttagttttaraagaaactgccaaactattttccagagcagctataccattttacattccatcagcaacgtacatgtgatccaatttcccagcatccttaccaatatttggtggtggtactgttttttattttagccattctgatagatatgtaatgagatctcactgtagttttattttccatttccctaatggctaattatattgaacatctttgcttgtgcttattttctatttgtatatcctctttgatg

SEQ ID NO: 788598 - DNA, 549 bp, Homo sapiens
cttaccaactaaaaagagtccaggaccagatggattcacatccgaattctgccagaggtacaaggaggaactggtaccattccttctgaaactattccaatcaatagaaaaagagggaatcctccctacctcattttatgaggccagcatcatcctgataccaaagccgggcagagacacaagcaaaaaagagaattttagaccaatatccttgatgaacatccttgatgattgccccctgtctattgagtatacaggtagagaaaaaaatcaagacagagtgrtaagctgggttgcaacctattttctaaagagtttgcttttttcccacctagggccctgctctcatcacaacccactgctaatgggtcagaggactcatttgttaaattgtctatgtcctcataacacaatctggcaggaaaaacagacagatgttcctaaacctaatatcactagaacagatcttccctaaaatggtttgccttcactctagcctcattggtcctgccagagctgcctccttcatagggtactttgtgctcctgg

SEQ ID NO: 788599 - DNA, 442 bp, Homo sapiens
attctcttgtatctcacagagtttcctcaagatccttatttcaaattccttcttagccatttgatatactcttaaaatttagggtctgttaatgggggattattgtgtttctttggggatgtaatgtttccttgctttttatgtttcttgtggccctgaattgatttttgcacatctggtggaacaggtgcctcttccaatgttatggagctttcayagagaaatattttttccaatagttgtctcctagtgttcattatggagtagggcgatttgactttggttctaggtgggtgcggtaatacagtcttcatgtgacttctttggctgtaatcagcatttagaggtgtctctgagtgcctcagtggcctagatggtgagtgtttgtggagacagtggtatggcttttcttggggtgggagccatcagtcggattcgttcc

SEQ ID NO: 788600 - DNA, 526 bp, Homo sapiens
ttgtgcagatggaagaaaaataatattaatatgttactattaatcttatacaaaagccgtttctttgcaagtcttaaagtccagcttaaaccaaatttccatgataaattagattacattagatggggcacatggctacttagaaaccgatggacaggaaatgctttttggttttgttttttatttcagtctttctcattgaaagagtgatatatatatatatatcgctctgtcacctgggctgcagtgcaatagtgtgatctcagctcactccaatctccgcctcccaggttcaagcgattcttccacctaggcctcccgagcagctggcattgcaggcactcgccatcatgtctggctaattyttttatttttaatagagacggggtttcaccgtgttagccaggctggtcttgaactcctgacctcaggtgatccacctgccttggcctcccagagtgctgggattacaggcgtgagctaccacacctggccaagtctcagatatatttaatacgtggtgttt

SEQ ID NO: 788601 - DNA, 576 bp, Homo sapiens
ccactctagcccctgtccatggatgggagaattctacactcatccctcccacaactccggaattctaaaatggtttctcttgcgccagttctggttttctcctccccatgcctcatgcccagggccagggtgcacggtaaatctctgagatcctcctttcttttggcctttcttggccactgaccccatgcagcatagccatactcatggcttccccctgccttcctgacttgtcctgtctccttggacaatcgttcttccacctttttaggttggtgcttagccctgtgcrctgatgtattatagcaggcgagcgctggctttcagcctcaatcccctgacgttgaattccaactctaaatttactaactaggattttggataagggctctttgagtttcttatctttaaactgagactgttaatacccaccagtaagggtcatttttaaaattaaatgaaattctattaaccaatagttgtatttattatgtgccatcccctatgctagacacatttaccaccaatctacagctcttccaacaactctccacgtaaagcagctaataggatcca

SEQ ID NO: 788602 - DNA, 634 bp, Homo sapiens
caggggagcagagcctgatgttgagggaggaattgtgacacagacccggcccagaaaacacaggcacagccttgtgcacatctgttaaccttagtgggtctttggtgcttaaaggaagcctcttacatcaccctcttttacattaaagaataatttaacatgaattctgagttgcaattatcaatagtttaaaatacatgtgggccgggcacagtgcctcacgcctgtaatcccagcactttgggaggctgagacgggcggatcaccagaggtcaggagttcgagaccagcctggccaacatggtgaaaccccatctctactaaaaatacgaaaaagaattagctgggtgtggtggtgcacgcctgtaatcccagctactcaggaggctgaggcaggagaatcacttgaacccaggaggtggaggttacagtaggccgagattgtaccactgcactccaacctgggcgacagactgagattccrttaaaaaaaaaagtgatattaagtgaaaaaagcagaacagaaaattgtattaatcctatcactgcaattatataaaattacctctgcatttagccaaggacaggaagggaaacaggaaaagtagaaatggtcaattcattcaagttgcag

SEQ ID NO: 788603 - DNA, 471 bp, Homo sapiens
tgatgatattcagaaccaggtaccaactctgcaccattgctgtcccccaaataaatagatgcctctgtcagcatgtggcacagactgtgtggcttaaaaaacagaaatttaggccaggcgtggtggcttattcctgtaatcccaccactttgggaggccaaggcgggtggatcacctgaggtcaggagtttgagaccagcctgaccagcatggcraaaccccatctctactaaaaatacaaaattagccaggcatggtagcacatgcctatcatcccagctactcgggagtctgaggcaggagaatcacttgaacccggaggcggaggttgcagtgagctgagattgtgccactgcactccagcctggcaacaagtgcaaaactccgtctcaaaaaacaaacaacagcaacaaaaaacagaaataaatttatcacagttctgcaggctggatggcctagatcaaggcacca

SEQ ID NO: 788604 - DNA, 521 bp, Homo sapiens
ctggtgttttattctctaaattcttcaagcaatggccaggcacagtgactcacacttgtaatcccagcactttgggaggctgaggtgggcaaatcacctgaggtcaggagttcgagaccagcctggccaaaatgacgaaaccccatctctactaaaaatacaaaaagttagccgggcatggtggtgcatgcctgtagtcccagctacttgggaggctgaggcgggagaattgcttgaacccaggagatggaggttgcagtgagccaatattgcaccactgcactccagcctgggtgggaaagcaagattctgtcaatcaatcaatcaatcaatcaatcaatmaataataaatttagcctgcctccagccccatgctccttccaacatttattctttcaccacattcacatctgtggagcgccgcctatctgtcaggcattcaggactgccggggtgagctaaacattgggtttggagtccaccggcagaaacaggggtccaccggcagaaacaggggtccc

SEQ ID NO: 788605 - DNA, 662 bp, Homo sapiens
cctgcttatgaaaacttggggcatcaatatcgtctcatcactcaggcgcccttagcgaatctggacagatcgaggggcgcagtcttggcttccggaccaggactttctttttttgagatctatttagctagtttagaaaaatacaccttatgcgaacatatacagctattttctcgccctccactccagtggtctgcaagcccctggtgctagtgtgaatattcctgagtcctgagcgggttcccgcccgtgcagagccaagaacactgagcggaggtcactgtaagttcagagccgtgcatcctggttagaattgggagaaaaaattctaagcccgcccggagctgctcagaaaagatgggtctcggtccagcgcccccttaaagtcctcagtgcgcgaaagtcttggattactgtgctttgcgcaaattggacgccacgcctgaagggcccgcggaatcaatcgcttgccttctgtggggtcctggcatcagcgtgaccaggacatgctattattattgsaaaccgagtcttgaagtggacccccagcctccacccaagccctgcggccagggaataattctaagggctctcccctttggatgtctagggtcggggcggtctcggctccctggatcctctggtgtcccggcaccgagggg

SEQ ID NO: 788606 - DNA, 614 bp, Homo sapiens
tatactgataagtgaacttgtgtggacccgtagttctcatttgtcagaggtagcaacgtagggaatttgaatatttttacctctaggtcggtgtctttttttttttgtttggagatgaagtctcactctgtcacccaggcaggagtgcagtggtacgatctcagctcactgcaacctccacctcccaggtccaagcgattctcctgcctcagcctcccgagtagctgggataacaggcatgcgccaccacacctggctaattttttttttttttttttttgtatttttagtagagacagaatttcaccatgttggcaaggctggtctcgaaatcctgacctcaggtaatctgcctgcctcaacctccctaaktgctgggattacaggcatgagccaccgtgcccagacccagtgtctttttgtgtgaggaccactactaaagttttaagagatttcttaaaaaggcaatcgtcattctgaggcaaagattaccaacatctggattccaaaaagtggggaaaaatcagttattcatatatattaaaatgacacacttcatttccaactaccaagtacaatgttcacctttattctgtttgttttcgctttgtcgt

SEQ ID NO: 788607 - DNA, 471 bp, Homo sapiens
tttctttctgggtacaccacagattgatctaacttatgttcctcgtcaaattagtagactatgttttatttcattttgtaaagacagcagcttttgtggaaataaatgatacctggtagttgttaaattttaatatttccaaactaacaaggcttttaaatccctgtgaattctatctttgattgttcttcaaagaatgtagagtggttcatagagttaacctgagaattcaagatggaaaacattcctggcagaggaaggttgggttttaaacacatagcaaaaattacagattayggcttctatctagattttaaggtcataggtctttcaccttttaaaatatgaattcccttctagagagcaacatttcctgccagctcttcagcttccaggaacccctctctcagatccagccactcctcactctatccagtgagaactcttcagtgtgctaaaagaatcactgtt

SEQ ID NO: 788608 - DNA, 655 bp, Homo sapiens
aatttcatatataaattccatgttcccttgtctgaaatttttctcattctattctctctacctaaaattttctgtttctcattttgtttactaagttattgtgcatttcttctttctgtaattctcatggccctccaatagcacattgaagtctgtgtagttgttgcttgtttgtgtatttgttgatttttttaaaagatgttagaatctaacatttatcctcttgtatttctttattatttacctgaatatcacaagtactttaagcataacaagaaatcagtatgtatttttaaatgaatgaatagtttggcatcacagaaagaacagaaaataagaggtcattcacctctataactcagctgagaagcttgtattcaagcaaatgaatacaggctctggggatgttatcgatgttgggattttttatttgtgattgtctccttcaaacagttcacttattaaccctcaggygtcagttctgtgtatttcttaatttgttctttatagcccctccacacttttcaacattcatttaatcatgtgtatctagtaaactcctcatatattggcaaagttaaggaaatgaaaattcaatgacagacctttgcatcatttctatggttctaattacaaattattattatttactttt

SEQ ID NO: 788609 - DNA, 580 bp, Homo sapiens
attttataaattcctacaggaaatacagatagtctgtttaagaaacagtctcctacttttgtattttacattataatgtaatttcttacaaattgctgttttaaggtaacatactggacattgcactactactattaaatgtcattataagaaattgaaagaaagtactccttactacaaaatttcaatatttttaacaatatcattgctggtctcacaagaagagaggccctactaatccatgtacaaccttaatttacagtcagtgaagagttcacaatgacaarttcaagattaaaaaatttgagcagtaaatattgtgtccagggccaaaggaggtgggtaatggctataaacaagagttaatagaaacagaaagagtaggaaaaaaatgccacacactcagatgtgagtggttacagaacagaattcagaaccagtccagaattttgtagccaaataacaggtttttttcttattctagcctttaaaaattttttctagagtaagtaactgtgaatgggtcacttgacaatgatctgatgaggaagagattgtgggttgatttatctctcttcta

SEQ ID NO: 788610 - DNA, 643 bp, Homo sapiens
aggtcttgcaggtttttccagtgagctatgttgttattgtcccaccagggatcttgggcacggaattcctcgtctgctgtagaaacgttttaactggggggtgttcatgttctcaaactaccatagtggccctaaggatcatgcccctttctctccctgaaaacaggatgcccaggatgggcattaactcagcccaagtatataactgggrtcctagaaattgatcaccgacctgatctgccactcgatgagggtcatctcacagcggcttgagttcttttttaaagcctggaacttctgaactggttagaggagcatttatgaagctgatggcaccccctccctgcagcacctcttttaaggggcagagagtcagagctgattccccagggataggggataaagggaagttttgaatatcctttttacattgctctacctcacgttggagtccttttagagaagagtatttaggctggtaaggagctggctcatgggatgataattcccaagaattggggttgtaaggggtggggaacaatgtgagcaggggagggatctggagtggggtctgaggtggcaacagctgcttgagggggagaattgggggtattgagtggaggaagatggtctaggggatccc

SEQ ID NO: 788611 - DNA, 495 bp, Homo sapiens
gcattagagttatacagccaaggtgtttgatcctaggtctggaatgtattatttgtgagaggcaacttactcattctgtcctgtatattttttatctgtaaatggattttcttatacctgtatcctagtctaatgaggattaaatmcaaatagcagagcatagtgtatttaacattagctcactaattcacaaactctaaaaaagaaaattatctgtaacaagcccatagaactgatgtttatgtgggattttttttataaatatagaaattgatcctcctagttttaaaacttgaaacttacatttgtcttatttgagttcattctttaggaatctgacctttagtcctctcagatagtaacaggaaaccgaaagtcaccagatcaccacttccagacaagggactcctcactgccatgattgtctaaccgaccacctgctccctgttgaccaactcttcttccctacccctccctaattcgggaatagtcatt

SEQ ID NO: 788612 - DNA, 492 bp, Homo sapiens
gcctaattctaaagtaaatctccttttcagaaaactcacactctacttacagagactaattttttatgacatttgcttttagtggtaattgcagtgactagaccagtccaacatgcagctattaggaatgaaatattcttttttgaacaaacacttagtctggagtctaaaagtcaaagttgttatagcaatatctctttagataataactacagaggctaatcattcatccatagttaatggagattttaattasgcagcataatttctgaaaacaaggagaaaaagaaacacaaaaaccagtagttcctgaatatgagagtcagttctctcatcaccaatgtgatgggtaccaaatttatcacaaaaataattcctcctgacatttgcatcatgcttttatgctgtcatgtactaactcagttgatctttagaccattcccagaaagcaggcatcattataatcatctatattttatagataagaacact

SEQ ID NO: 788613 - DNA, 562 bp, Homo sapiens
gctggcatacttctggagtcttgaatcccttttcccatgattctttccttggagtgggccgcccccatgcgtggtggcctgctaacacgtgggaggtgaacatgagcagtgtgtgtactgcagttgtatgcatgctcacatgtggtgttcttcccttttctggtagaatgcccccagaaggccatacgctgccatttcgtctctttatgcgcatgcttgagcccagttgcccaattcctgagattttattagaagctgccaatgaccaatttcaagtttgtgtctattgggaaattgcctctccctgcacytgctctgatcaattatcattttagagaggcagtgtgaaattcctggttggtcaggagagccctctcccaccccgcttgtgcttgactagctatgtactgtaacagttacagtcttggttttacagggagaggaagaaaaaacaaaaacaattgttccttttggtgggttgctttaggcagataaaggcatcctgtgttttgggagagagagtgagggagggaaggtcagaaagaccttgaggcttcttcag

SEQ ID NO: 788614 - DNA, 609 bp, Homo sapiens
tccagcagggactgggaactgaaagccaccagctgacagcacacccaggtcttagggagcactccacagcatagtgcttgtcctcctcaaggaataaactcgcctcatccatcagagaaaacagaagtcctcgggtctaatcaccatccattttcttccctggtccccacttctaagctaacctcagtgagtgcctatcctttccttccttccttcctcctgactccaaagatgaatctgttcctatttctgttcaatgcggtcctggaagatgtctaattgtctgtggagacatggggtaaatacccctcttgtgtggctccgtggctgattcggcatctgtcacctctgtcgccccaggtcagtgctcctcccatcttgacacagctgtctctgctctgaatctgttagacacatctgtctccccgtggggtggcgagctgctcaagggtggtgacsgtacctgattcctgttttctcttcagaatgtagcacatcacttgcatactatacatgccccttataggattgtggaacagtgacaaaatgagtcatacgcttcaaggaaattaacatggaagtgctgtgtgaaatggacaggagaataga

SEQ ID NO: 788615 - DNA, 587 bp, Homo sapiens
agcttctaaagaggaaggtgctattatcatctccaaggtgatatgctcaaaactacttatttgaatccattaagtgtaactgataaagttaggtgatttgggatgattttaaaatgtaaactgcaatatttactcctctgcatattccatcatttaatcatttattgraagaccatgaaattctattacagcatcaaagaaacaattaaagtaagaaattcattgttttcagtaaatctatgttgctttccctgtaatggttcgcattatttctgaaaagttactattcagtgacactgccctatatatttacgtgttactttctttgactgatctgagaaaagtgacacagtcctgcttgcagtcctgccaacttttggtatatgcagaagcagctcttgttcttaggtaaacacagtaaattggtacaatgctttatttatttttagagacaaggtcttcctctgtcacccaggctggagtgcagcagtgcaatcagatcataactcactgcagcctccaactcctgagctcaagggatcctcctgtgtcagcctcctgagttgctggaactagaggcacactac

SEQ ID NO: 788616 - DNA, 651 bp, Homo sapiens
ttagcggcctcttcttactctcttctccagcctctctctgtccctcaaccacactttctcctttccactcttcaatctctcccttctcttaatttcaattcctttcattttctgagacagacaaaggagacacgttttatccgtggacacaaaactctggcgccggtcacggactgggaaggcagctttcccttggtgtttaatcattgcagggacacctctctgattatacacccacgtttcaagggtgtcagaccacgcagggacgcctgccttggtccttcacccttagcggcaagtcccacttttctggggaaggtgcaagtacctcaaccccttctctccttgtccctacccattctctgcttttccggggacagggcaagtaccccaamcccttctctccttgtctctacccttctctgcttttctgggagaggggcaagtacctcaaccccttctctccgtgtctctaccccttctctgctttcctggggcaggggtaagtacccctcaaccccttctccttcacccttagcggcaaatcccactttcctagggggaaagaaccccccaatcgcttatttccgcaccccaacctcttatctctgcaccccaataccttatttccgcaccctgacctcttatctc

SEQ ID NO: 788617 - DNA, 630 bp, Homo sapiens
cctgccccaccttaactgatgacattccaccacaaaagaagtgtaaatggccggtccttgccttaagtgatgacattaccttgtgaaagtccttttcctagctcatcctggctcagaaagctcccccactgagcaccttgcgacccctactcctgcccacccgagaacaagccccctttgactgtaattttcctttacctagccaaatcctataaaacagccccactcttatctcccttcactgactctgttttcggactcagcccgcctgcrcccaggtgaaataaacagccatgttgctcacacaaagcctgtttgctgttctctttacagggacgcgcatgaaagtaaagactacaaaaccctgataatttttatatttccttgggatagagattgtagtgggggtaaccttcttaaccaagagagaagaaaagccataaataatacaaattgacagaattttttacacagaaattaaaagctttagcacagcaaaagaaaacacaaaaacagaagacaatcaaatagattgagaggaaacatttgcaatacacataacaaaggattgtattgcaaagagcttctagcaaatgtgcaagcaaattataaacaattcagtagaaaaat

SEQ ID NO: 788618 - DNA, 625 bp, Homo sapiens
aaaaaaaaaaaaaaaaaaaagaggctgtggaaatagttgtgaaaaagtctgcaaaatgcatagtagaaagagaagggaaagccttctgggtgcaatggtaattgaaggcctcctttctctttacggaagggtacctgttgtagccacgtgagttaacaccttacagaaggcctcagcactagtgtgttcttctttctgagtatgtacttaactataggaaacaatttttttgtgtgtgattgcagaaataagaaatctgagttmttccaaagagactgaaaaaggacctgagacaggatactttgtggaaatcacacttctcctggagtttgcctacaataggatctcagagattcatccctgaactctaggtttacggtgacttcttttaaattggcttgcctccaaaagagagtaactcaaagctgagtttaaaattcttccacctctttcttgatatcattattgataaggccaaatctttgatggctattataactctggcctggcttagtgaaatctcgcagacaacctaaacctcaactggaatgacttgttagtagtcaatacttatttcaaactttagatcctctattcattctttggcgaggacactaataagata

SEQ ID NO: 788619 - DNA, 677 bp, Homo sapiens
ttatccaggatccatttaatgaaagaaatgagtttggaatgcaacttacaaaaaaatgaaactaaatctcaactctttctgtttctaattctatactctgttttactagcgtatttaataaaaaaaatccgtaacaaatgcattttaaaaaataaatgtatagtacgttttgggaccttaaagagctagtcattctttattctaccttttttcaaaaatttcctggaaaatatatttatctcataaaataacatgtcagcatgcttaattgagttctaaaaacaatcgtttttgcttgcttttttgttttattgtaattgagttaatggctgacattttatatatatacacayatatatacacattttatatatatacacatatatacacatatatatacacatatatatgtgtatatatatgtgtatatactcattccaatatgtgagaaagtgggtactgggaaaactctggaaacagtttagttgctgcttataaacgcacacaggaaaatgtagtatctttttcctgcatttgaagttgttgtgaaagaataagaaacctaaagctgctgcgggggtcctcctaccatctcaggaaagctgacatgctgtgtgtgatagagagatgagctatgaagtcccaggatcactggtgatgccactggcctgctgagt

SEQ ID NO: 788620 - DNA, 629 bp, Homo sapiens
ccacaagagatgagtaagtggagaagaacatggtgttcacagagagagaaatatagtagatagaattaatacagtttcaaattatgtactttcctgctgttgggtggagtgttctgtaaatgtaacttagtcaagttacttgatagcattgttcagttattctatatcyttactgactttctgcttattttttctatgaaatattaagaaatgagtataaaatctccaatgataattttggatttttctatttctcctttcttttatgtcaactttgtctcctgtattttgaagctctgtttttaggtgcatatgcacttaagattgttatgtctctttagagaaataaccctttatcattaagtgatgtctgtctttatccctattaacatttctcgctccaatttctgctttgtctagtattgacataatcattctgaatttcttttgatttcttttgcatggtatatatttcccttctttttacttttaatgaaggtatgtctttatatttaaaatgggttgctgataggttatagttcaatattccatttttattcaatctgttcttctctatcatttaattggtctgtctggaccaattatatttaatgtacttattaatatgg

SEQ ID NO: 788621 - DNA, 629 bp, Homo sapiens
ccacaagagatgagtaagtggagaagaacatggtgttcacagagagagaaatatagtagatagaattaatacagtttcaaattatgtactttcctgctgttgggtggagtgttctgtaaatgtaacttagtcaagttacttgatagcattgttcagttattctatatctttactgactttctgcttattttttctatgaaatattaagaaatgagtataaaatctccaatgataattttggatttttctatttctcctttcttttatgtcaactttgtctcctgtattttgaagctctgtttttaggtgcatatgcacttaagattgttatgtctctttagagaaataaccctttatcattaagtgatgtctgtctttatccctattaacatttctcgctccaatttctgctttgtctagtattgacataatcattctgamtttcttttgatttcttttgcatggtatatatttcccttctttttacttttaatgaaggtatgtctttatatttaaaatgggttgctgataggttatagttcaatattccatttttattcaatctgttcttctctatcatttaattggtctgtctggaccaattatatttaatgtacttattaatatgg

SEQ ID NO: 788622 - DNA, 619 bp, Homo sapiens
acaggccaagacggctttccctgaccagagattaggggtggataacgtggagttttgcaattgagtttgtatactttaattgaagttgttactgacaaagctctaaataaccaaaatgcacctccaatgtgtcagggcaggggaaaacagccccctagaaagtatatctcgggagcaggaatttcatggaaagagaggcaacatggctacccattagacaactgcacttgagtagtgagggtaggagtgggcgactccagaacgggaggttgtcattggcagtaagaagggagtcgaatgaaaataaaacaggtattggagcccaagtccctctgactctaaagcctgtgccattcttcaccttgctcttagagcctggcacatagtagataacagtcaacacagtttaaataaattaattcacaccatagcttctttctggaaagttctttctttccatatctggggaaattgtgccctatccctcaaggcccagaccaaatgcagcctcctccatgcagccttccctgattccatgccttcttttaaccccaacarttgcaacctctcctataactagggggtgggtaggggaagactatggaaaggcattagcact

SEQ ID NO: 788623 - DNA, 581 bp, Homo sapiens
tcttcagctttactcattgctttctgagattttgtaaatctcaaagacttgcttttgaaaggcatctcaatcatggctatgtactggaatcacctgagaatatttacaaacagattttgatttaattgctctaaactggkgcctataaaaaacatggagattacaataaataggtttaattgtagattaatttaaaaaaatttaagctccccaagtgatgctaatgtgcagctaatattcagaaccttctagagcagtggttgtcattgtataagcctagtaaatcaggaactctggagacatacccagcaatgtgtctttgaaagccttctagggctttttgatatttgcttaagaataaaaccactgttctggagtgtagcagtaaatactatgacattagttctcaaagtgtagtgcccaaatcagcagcatcagcattatctggaaacttattaagaatgcaaattcttggtttccacctcagacttattgaattagaaagtctggaggtggacccactgatgtgtgatttaacaagccctccaggtaattcagaattactgtactttacgaaacag

SEQ ID NO: 788624 - DNA, 576 bp, Homo sapiens
tctcctgtctcagaattgaacaaatgtataatcgggttttataccgagacgttcagtttcaggggcaggcaggagacagaggccttcctcttatctcaacttcaagaggccttcctcttttactaatcctcctcagcacagacccctckcgggtgtcgggctgggggacggtcaggtctttcccatcccacgaggccatatctcaggctgtcacatggggagaaaccttggacaataccaggctttccagggcagaggtccctgcggctttccgcagtgtattgtgcccctggtttatcgagaatggagaatggcgatgacttttaccaagcatactgcctgtaaacattttgttaacaaggcacatcctgcacagccctagatcccttaaaccttgattccatacaacacatgtttctgtgagctcaaggttggggcaaagttacagattaacagcatctcagggcaaagcaattgttcagggtacaggtcaaaatggagtttcttatgtctcccttttctacatggacacaataacagtctgatctctcttttccctacatacacggccatgta

SEQ ID NO: 788625 - DNA, 554 bp, Homo sapiens
tcagcacagacccctcgcgggtgtcgggctgggggacggtcaggkctttcccatcccacgaggccatatctcaggctgtcacatggggagaaaccttggacaataccaggctttccagggcagaggtccctgcggctttccgcagtgtattgtgcccctggtttatcgagaatggagaatggcgatgacttttaccaagcatactgcctgtaaacattttgttaacaaggcacatcctgcacagccctagatcccttaaaccttgattccatacaacacatgtttctgtgagctcaaggttggggcaaagttacagattaacagcatctcagggcaaagcaattgttcagggtacaggtcaaaatggagtttcttatgtctcccttttctacatggacacaataacagtctgatctctcttttccctacatacacggccatgtacacttcgttgaacctaagcataaaaatggacagtttcctctgtatctgtggctcttcattctgaaggctcccatgtcacaaaaaaactatgatcaaataaatgtatatgc

SEQ ID NO: 788626 - DNA, 610 bp, Homo sapiens
ataaagcagaaatatgaattttcagtgaatctgagaaaaaaaaataaagagaagagacgttaatgacctgtcgcttggaataaatcttagtggtcacataaagtaggatgacaggaatttatattgtccctcagcacttgaatgactaatgtggctagagtggagagccacagaaattacttctcttaaaaagccagcacctgtttgcaggcttttggaactgtttgatgaagtcagggaaggttgccttgatgtcccccagtcaggctcttggtagacagcaccaagcttgagacagaggtggtgtttcagccctgtcctaagaccyttaacttggctggtctcagaggctgtcgaggttcctgagctgttcagggaggacccccaagaggctagagaagatcttctgagagacattgatgagcagggcaggggcagccagaaagggtctcagatggcctcagggtggatgtccatctgaacaggtccccgatcccaccacacactgggatcctggattctgtagtatcagaattactaggttagagccagaacagctccccagagatttgttagttcgacacctccatttttttcagatgagaagact

SEQ ID NO: 788627 - DNA, 593 bp, Homo sapiens
gttcctggtgcctggaatgcatattcctcttttccgctcaccaaactttcatttatgcttagaagcataaatcgagtcacaccccttgtgtgtaaagccttccttggacactcccagcggagttggttacattctgcttgggattcccactttgcatgttcttctacttgtcacaggctattgtcttcgttttgtttgtttgttttaagagactgtttyccacaggcaggaaggaggacaggcttcctattccctttcagaagtccaagggccaggtagattctggtgcttgttagcggctcctttttgaaagaacaggaaggtatgaagtctaacctgttgacaacgccaggatggttttactttgtattattcattttgagcaaatttccaaggggactttgagagaccaatggggaacaacgtggaggactcctgagatgcagactcctggaactttccctgtccctgagttgtggttcaatagaaaatgtgcacttagaaagatatctgcccaagtcaaacctgtgtcccagggaaagggagggccaggtggagacggcagatctcatccccacagacctccaaagggc

SEQ ID NO: 788628 - DNA, 628 bp, Homo sapiens
ctttagtaaccatgagaggtgctggtaagcgggctggaggatggaatcaggaaacctagcctgagtcttggctgggtcaactagttgtgtgacctgagtttagctgctgtgtctctcagtggttcattttcctcctctgtagaatgggaataatacaacctgtagagatctctatgtaaaggggacctgtcagtggtgcagatgtgctgggctacagtgattacatgtcaagagcctcaggtcttcccccaggctcactctgacttggagatttgcttctggctcctgtaaaccacttctgggagtcacctctggcagtgtgccataggtctgcaacatctaaatgcaaggtgaatgtggaagtttgcatacctgccctctacccccacygtcagaggcatttgaaccagagggactccatcttgaacaggggctgggtaaaataaggccgagacctactgggctgcattcccaggaggttaggcattcttagtcacaagatgagatagaaggtcagcagaagatacaggtcacaagaccttgctgataaaatgggttgcggtgaagaagctggccaaaactcaccaaaaccaagatggcgttgaaagtgacctctggttgtcctcac

SEQ ID NO: 788629 - DNA, 647 bp, Homo sapiens
aaaactcaccaaaaccaagatggcgttgaaagtgacctctggttgtcctcactcctcattatacactaattacaatgcattagcatgctaaaagacactcccaccagtgccatgatggtttacaaatgccatggcaatgtcaggaagttaccctatatggtctaaaaaggggaggaaccctcagttccgggaatygcccacacctttcctggaaaactcatgaataatccaccccttatttagcatacaatcaagaaataactgtaagtataatcagtcgaacagcccacaccactgctctgcctatggagtagccattcctttattcttttacttttttaaacttgctttcactttagtttttggacttgccccaaattctttcttgtccaagaaccctctgttggggtctggataaggacccctttccagtaacaccactccatcctacatccccgatccaggtgataggctccactagccttcttttctttctttgctggaaagaatgttagatgggacaaatgatgagataacaattgctggacacttttacaaagctcttgcctatttgttttcttattgtctgtacaaccattctactaggtcaaggagttttattaacctcattttacaaacaaagacac

SEQ ID NO: 788630 - DNA, 601 bp, Homo sapiens
tgacagctgtgcccctggtgggcctggtctttgagcccattggaataactggagaggaacagaaaggttggcctccagagggtgcactaggcactgccgctggtggagatcaagtcaaggtcctgcttggattactgttctccctgatggaagcaggttgagaagttctggtgcctgagtaccaggcgctacttagatcttcctcctcgtgcataatctcttttgggaatcccagtccgggatttcgtctcatctccsatgcagccactatttggcctccaaaggccagtgggactgaagagtggcacaggcgggtgcatgggcaagagtggcacaggcggatgcatgggcggttgccttcgttgcagcctaagcttgagggagtggcttgccttctctggcccagagttagggtgtagcttgaagaaagggtactctagaggccagttaaccactttctggccaaagattcaagccagggaccaaatggaattccagactgacatcagtcagcccaaatgactaggccacttgattaggatttggaaccatgaaaagtaatgaagacagtgggcatcttcctgcctttggtcaccctgct

SEQ ID NO: 788631 - DNA, 406 bp, Homo sapiens
gtcccagcattgtaattcttgccttaggctcttattactagaggacctgggctaaggcatggccttggtttagatatctctaaagactctttctgctgtgacataatagactggtacaaaattccatacttccaatacctaaggataaaaaaatttatgtatatatactgtactggaaataaaacaccatttaattcctgcagagattagtttctgaggtaygccaggggtcttgcttgttataattccaattggaccaagagagaaagttataataattattaataatgtttattatgttttatatgctaggccttgggttaagtactttaaaggcatttagtgtttgatcttcactctaaccttactgggttcttttatcctcattttacacaagaggaagatg

SEQ ID NO: 788632 - DNA, 709 bp, Homo sapiens
ttaaaaatacagatttttacacatgggcataaagatggcaacagtagaactacaggaggaagcgggacaagggttgaaaaaccaactattgggtactgtgctcagtacctgggtgacaggatcaatcataccccaatcctcagcattatgcattatacctaggtagcaaacatgcatatgcaccccttgaatctaaaacagaagttgaaattattttaaggaagagccgaatggaaatccctgaactgaaaaatacaaaatatactttttaaaaagaaaaatgcctcatatagtagttaaaaaaaacccagattttgaatttatttatgctttatactcttttattctattcattatttttcatttttatctttatcaattcattcctcaaacttttatactattttgttttccctttttttagtttcttaagaaaaatactcattttaagtcttcattttttttttttttaaataaggcattttccagatgtgagggtsacctggctgtgacatctgttgccccattgatggccacggttgtttggctgatctggctgcctaggcaggtgtccccttcctccctcactgttccatgtgcctccctccagaagctacatccttggttgaagaggatgaccatccccaatagaggaggactggtcttcaatcaagggcatatgagtagctgcactcccctgatagaacct

SEQ ID NO: 788633 - DNA, 569 bp, Homo sapiens
ctttcattttgtttgaatttgtttggtatccctttattttaacttacttcctatcttttaaagtgtatttcttgttttttaattcaatatattgtacttcaataaaggaattcagaccatcggcatttaggatagtaaatatcctgacatgtaattttatgcttctctgtgttttgctytgttattgcttcctctttttcctttaattaattaatctgctagcttgagtaaattgtcatttaacccctcttttttcctcttgctaatttggaagtatttctctgcttttcaattctgcaagtggttacttttttagccccaagaatcatcattgaacatgttttatctcttatgtctgattatgacagcaattatcaacttgctcccaacaaattgtttatttacctatctctctctaagagcaaaatgaaaggaaatcattagaaatgctttatttctttattctcaaactttcccttaattttcttttccagctcttgctcaaatagtttaaaacatttagtttaggctattgtattagtcagggttgcccggagatacagaaccaa

SEQ ID NO: 788634 - DNA, 591 bp, Homo sapiens
agcttgagtaaattgtcatttaacccctcttttttcctcttgctaatttggaagtatttctctgcttttcaattctgcaagtggttacttttttagccccaagaatcatcattgaacatgttttatctcttatgtctgattatgacagcaattatcaacttgctcccaacaaattgtttatttacctatctctctctaagagcaaaatgaaaggaaatcattagaaatgctttatttctttattctcaaactttcccttaattttcttttccagctcttgctcaaatagtttaaaacatttagtttaggctattgtattagtcagggttgcccrgagatacagaaccaagagaatctatgaaatggaatttattaggggaattggcttacatgatcacagaagtagagaagtctcccaataggccatctacaagttggagaaccagagaagcgcatagcctggctcagtccagttccagaagccttagaaccagggatgctcccagtatgagggaccgaggaggctactcgttcaagtcccagagtcccaaagccaaagaacctggagtctaatgcctgacggcaagagga

SEQ ID NO: 788635 - DNA, 645 bp, Homo sapiens
aagatatgtcacaggttgggaaaaaaatatttgcaacccatgtatctgataaaggacttgtattcagaatacatgtataaagaactctcaaaactcaataagaagacaacccagttatttaaatgggcaaaagatttgaatagacatttcattacagaagataaatggatggcaaataaacacatgaaaagatacgcaggataattaatcattagagaaatgcaaattaaaaccacagtgagatatcactacacacctattagaacaacagccataccaaatgttaatattaaccaggaactttttttttttttttttgagatggagcctcgctctgttgcccaggctggagtgcagtggcgctatmttggctcactgcaagctccaccttccgggttcacggcattctcctgcctcagcctcttgagtagctgggactacaggcacccgtcaccacgcctggctaattttttgtatttttagtagagacggggtttcaccatgttagccaggatggtctccatcccctgacctcgtgatccacctgcctcggcctcccaaagtgctgggattgcaggcatgagccaccgcatctggccggaactttcatatatgattgaggggcatgtaaaatggtattaagta

SEQ ID NO: 788636 - DNA, 645 bp, Homo sapiens
aagatatgtcacaggttgggaaaaaaatatttgcaacccatgtatctgataaaggacttgtattcagaatacatgtataaagaactctcaaaactcaataagaagacaacccagttatttaaatgggcaaaagatttgaatagacatttcattacagaagataaatggatggcaaataaacacatgaaaagatacgcaggataattaatcattagagaaatgcaaattaaaaccacagtgagatatcactacacacctattagaacaacagccataccaaatgttaatattaaccaggaactttttttttttttttttgagatggagcctcgctctgttgcccaggctggagtgcagtggcgctatcttggctcactgcaagctccaccttccgggttcayggcattctcctgcctcagcctcttgagtagctgggactacaggcacccgtcaccacgcctggctaattttttgtatttttagtagagacggggtttcaccatgttagccaggatggtctccatcccctgacctcgtgatccacctgcctcggcctcccaaagtgctgggattgcaggcatgagccaccgcatctggccggaactttcatatatgattgaggggcatgtaaaatggtattaagta

SEQ ID NO: 788637 - DNA, 600 bp, Homo sapiens
agtgaatgggcaaataggtttgaagactgtcagaaagaagaggagacaaaacaacaacaacttcaagtgcttcagaatgagattgaagaaaacaagctcaaactagtccaacaagaaatggtactacacatttatgattttacataaaaaaagcattttgtggctcatgtgagcctatttttcccctggcagaaagctgctgagaaatatccccaatgggactatgtgtcccttaactgccctgtgtagccatgggtggcatttataccaactgtgtgactctcttacagacctttaacgatcatagaacatcagtcctgtaaagatacttaacagccacgtgccatttgctgcttgaatcccctcctcacatgctggccagatagcttcccaagccctcttgatcacctctgtaatggaattgtccctgtgggctgtcttctactttcttttgacctggmatctgtctcatgtccatgcaggttctctgggacactatttgttgtttaatgactaatcaagattattctttattaagatgtttcagagactccagaaagagagagaaagtgaagaaagcaaattagaaaccagtaaagt

SEQ ID NO: 788638 - DNA, 651 bp, Homo sapiens
aatataaacataaagccttttcctctaccttggccaacatggcaaaaacccatccctacaaaaaatacaaaaattagccgggcgtggtggcatgtgcctgaaaccccgctacttggggcgctgaggcacgagaattgcttgaagccaggaggtcgaggctgcagtgagccaagatcataccactgcactccagcctgggctacrgagcaagactgtctcaaaaaaaagccttttcctttcatctgtagtctttccctcaatttgtcatggtgctttttaagatttgctatttaacatcattgtaaataaagggaaattaataactttaattattggcatgacttttatcattcatcttcatattgtgcaccagtttaagctgcaaatataacagcatttcacttgcatgtgcaattgccaaaattacaccatttgtatgtcatagttcatacatgtatatatattccattcttcccagaacagtggaaattatgcacaaaactagctcagctgtttttattttactttttgatatgtgtatgttctacccacactctccacctttgctttctgaggacaaggaaagcctgaaagaaaaagaaactgtgaattatcctatctttccctttctttctatgttatcatattcaa

SEQ ID NO: 788639 - DNA, 604 bp, Homo sapiens
gtttaggggaatgaactgaaccactcatttttttaaaatcacacttaaaagacacatgggcaaaaaagttccccaaaactactgtcttaccgaatttgagaagggaggtaatgtatgaagcttaacagctggcttcaaaagacacctttccaaagaaattgtactacctctattaacgtgtaaaccaccaaccaaaaaaaaataataagttactccatcaaacacgttattatccataaaaaagacttcaacattgtastggaagatctatttaagcataaatagtactaagcaccaattactaatctgaaggcctcctcacaggtccaagggcaatgagcaacctcaagaggcaggtgactgcacaagcagtaagctatggattaaaaattaaaaggatttcacattctttccaaagtgtactgcccggtgtctggcacacgcatgttacaatatgacaatctgctctatttgtgagcacctgagtgtattacaggggattacacatgcatatgatagaatctggctcccggtacagtcaaaggagaacagcatcagccaccaaatgtgctgatcttacactgaaaagggttgactgaaaaca

SEQ ID NO: 788640 - DNA, 679 bp, Homo sapiens
ttattgcagcactattcataatagccaagacatggaatcaacctaggtgtccaacagatgaatggataaagaaaatgtgggccagacgtagtggctcatgcctgtaatcccagcactttgagaggccgaggcaggtggatcacctgaggtcaggagttcgagactagcctgaccaacatggagaaaccccatctctactaaaaatacaaaattagctgggtatgttggcaggcgcctctaatcccagctactcgggaggctgaggcaggagaatcgcttgaacctaggaggcagaggttgcggtgagctgagrtcatgccattgcactgcagcctgggcaacaagaacaaaattctgaaagaaagaaagaaggaaggaaggaagggtgatatatatatatatatatatatatatatatatatatatatatatgtatgtatattctgtatgtgtatatatatatgtatattctgtatgtgtatatatatgtgtgtgtgtgcgtattcatatatatatacatacatacttacaatggaatactattcagccataaaaaagaatgaaatactgtaattcacagcaacacggatggaaatggaagacagtatattacgtgaataagccaggaacagtaagttaaatgccacatgttctcagtcatatgtcgaagctgaaaaat

SEQ ID NO: 788641 - DNA, 679 bp, Homo sapiens
ttattgcagcactattcataatagccaagacatggaatcaacctaggtgtccaacagatgaatggataaagaaaatgtgggccagacgtagtggctcatgcctgtaatcccagcactttgagaggccgaggcaggtggatcacctgaggtcaggagttcgagactagcctgaccaacatggagaaaccccatctctactaaaaatacaaaattagctgggtatgttggcaggcgcctctaatcccagctactcgggaggctgaggcaggagaatcgcttgaacctaggaggcagaggttgcggtgagctgagatcatgccattgcactgcagcctgggcaacaagarcaaaattctgaaagaaagaaagaaggaaggaaggaagggtgatatatatatatatatatatatatatatatatatatatatatatgtatgtatattctgtatgtgtatatatatatgtatattctgtatgtgtatatatatgtgtgtgtgtgcgtattcatatatatatacatacatacttacaatggaatactattcagccataaaaaagaatgaaatactgtaattcacagcaacacggatggaaatggaagacagtatattacgtgaataagccaggaacagtaagttaaatgccacatgttctcagtcatatgtcgaagctgaaaaat

SEQ ID NO: 788642 - DNA, 668 bp, Homo sapiens
gtacagatcaagaagatggagccagatgaacaacttagaaatgatcacatgaacttgagaggccacacaccactggacacgcaactggaagacaaagaaaaaaaaataagtgcaggttaaaaaaagttattttaaattctttaaaaaaaaatatgaaaacattgaatatgtaggccaattttgttttataagtcttttaattgaacatgttgatggtattgtttccatgaaaagtctaaaacaaaagtagtgattatcaagcagatttatcgagcatttattttgtaatgattcctgttatggttaagaatggagtttttggcagtaatttgatggcagcatgtccaggggattcaagaatgagtaaatcccctccttcaaataagcactggaactatatattcgaagtcacaattartaataactgaagcaagtaaagaaccacttgattgattactatgcatgtagcaaaaacctaaagcaatgctttgtataagctgcaacagagcattctcctcaggcctgggccgaaggctagcctctgacttttcctgacatgccccatgccccacaatctaattcaagggatcttaataccttctggcaagtcacataaaggaataagtcaaggcagggggacactttagagaccctgccaatgacagact

SEQ ID NO: 788643 - DNA, 562 bp, Homo sapiens
actttatattttctggaattctaatatcacttgcagtttagaataaaacataatcttatgaaactatagcacatgaatagttttttgatattaaattattaaattactgtatcatatattcttatataatttttcagtctttattttgtcctcctcatactttatgtgtcaattttcaattcctaaacattctgaacctcctagttgattgattcatttattaaggcatttaaaacatgaattgaagcctcaaaatgaaccaggtgtcatgttcattcctggacataacaaggtcaataagacatatattttgctttcaaggaacacaggttcttgttttggatgacattaagagctagggaatatgttttgcttctaattcttttcatagacttctaccaatttttacatrgaaacatttacttaagcattttgagcttagaatcctattaatttcaaatactatcactgcttgtactgttttaaattgtgtttcaatataattgcttaaattccatatattttctgtgttgtcatatatgaaagaggttaaatgattgat

SEQ ID NO: 788644 - DNA, 619 bp, Homo sapiens
gcaggagaatcgattgaacccgggaaggggaggttgaagtgagtcgagattgtgccattacacttcagcctaggcaacagagtgagactctgtcttcaaaaaacacaacacaacaaaacaaaaaaacaaaaggaagaaagaaatcagttgggtttcaaaggaatagtatttatgaaattaataagccattttttaagtgaagaagaaaataagaaaaggagaaagaaartaagtggaaaaattaaaaggacatattttttcatccttagttctcttcaattgtttagaagtttgaaggatcaatatggagatgaaatccgtcatctctgagtacatttgaaaaggatgctgagttgcttaggatttgttaaaactagtacccatatatactcttgataggagagtgaggtgataaaatacactgagaaaaatttggctttatatatcaaaataaagtatatatcttagacccaacaattccacttttaggattttgccccataatatattcacacaagtatgtaataattttaatcataaggatatttattgcaacatttttataatagtaaacagttggaagcagtctaaccgcccagtgacagacaaaaccggttaa

SEQ ID NO: 788645 - DNA, 621 bp, Homo sapiens
tgcagaaaataaagaagattgttgtttgatttagtagtgatgaaaaagaaaattcatgatatatgtttttattattttatgtttttctctttaatgcaagcgcctccaaattaaaggataaccttggactgccaatttctatgttttgcatatattttgttactcttgggaaccatctttttctgtctgatattttggatcattacaggtagaaatgcccatattccttagaygtgttgctttagaaatgccataggaaatagccaccatagtagcagagctttttaatatgaagggtgccttggaaatgccttatttctatgtctgaaatgtttgcaagtggttggactagagctgacataatccgaagtaaacattcaagcagatacttactgtaccaaaattcctgtcattttccagtagctgtaattaaagagctagagttgaaactcatagttttacttttagtacagagccaagaattagtcacattactccatatgaatatgatttgtaaattgagtgattattgattcatttctgtattcacacattattttatcctagagtgtacaccagcaacttgcatatttttagggaaaaaaaaaaaaacacaactca

SEQ ID NO: 788646 - DNA, 581 bp, Homo sapiens
cttaaagctgaaagtcatatctattatttacttttaagactttgatactcaaagagttgtccttggaccaatagccttgacctcacctgggaacttcttaaaaatgtggaacttcaggcctcattcaagaacctccaaatcataatctgcattttaacaagattcacaatttgttgtataaatattaaaatttgagaaaaaataaatcagaaaatctagagattagcaacagatagataatagagttgctggagaatcaaaactaaacaaagaacctcactttccagctstacttcactgaatttctgatataaacttacattataaatagcagacttctattccaaaaatatttattaaaagcctgttctatactagtcattgttctgggttctaaagatacagtggtgaagagactaggcaaagttatttatttatttttttatttattttgagatgaagtctcactctgtcgcccaagctggagtgcagtggcacgatgtcggctcactgccacctccacctcccgggttcaagcgattcttctgcctcagcctcctaagtagctgggattacaggca

SEQ ID NO: 788647 - DNA, 618 bp, Homo sapiens
aggtgtggtggctcatgcctataatcacagcgctttgggaggccgaggtgggcagatcacaaggttaggagtttgagaccagcctgtccaatatggtgaaactccatctctactaaaaatacaaaacttagccaggcatggtgacatgtgcctgtagttccaggtactcgggaggctgaggcagaagaatcgcttgaacaygggaggcagaggttgcaatgagccgagatcaggccactgcactccagcctgggcaacagagcgagactccatctcaaaaaaaaaaaaaaaagaagaagaagaagtaatagtgtgctgtgcagcatgaaaaaaaaatgaggtaaagatacacacgataacaagaataggtcttaataatatagtgttggatttacaaaagtaaaaactatatatacagcatataactcaaaaacaaccacaaaattttacagttttcaaaaatgcatattcaagggcctaccacaaacacatgaatgcaattgaagtaagagggagaagcagaaggaaataaaaatagagattagagattagggcaagataaaataattagataaaataaatcaagaaattcctattttatttatcatgataagaatg

SEQ ID NO: 788648 - DNA, 490 bp, Homo sapiens
tcaagggcctaccacaaacacatgaatgcaattgaagtaagagggagaagcagaaggaaataaaaatagagattagagattagggcaagataaaataattagataaaataaatcaagaaattcctattttatttatcatgataagaatgtactttaaaaagaggatgactacataaaatgagttagggaggagtacctctttttctattgtttggaataatttcagaaggaatgataccagttcctctttgtacctctggtagaatttggctgtgaatccgtctggtcctgggcctttttttttggttggyaggctattaattactgcctcaattttcagaacttgttattgatctattcagggatttgacttcttcttggtttagtcttgggagagtggatgtgtccaggaatttataaattttttctagattttctagtttatttgtgtagaggtttttatagtattctctgatagtagtttgtattt

SEQ ID NO: 788649 - DNA, 598 bp, Homo sapiens
acctgaaagtgaggaccttaccctggctgggggagcattaacaagccagtctttaaaagctgtcaatatttaagctaaggtacagagcatagaggttaagggtcaagactgtgatattgggctgggcacggtgactcatgcctgtaatcccagcactttgggaggccgaggtgggaggatcacttgaagtcaggagttcaagaccagccttgacaacatggtgaaaccttgtmtttcctaaaaatacaaaaattggctgggcatggtggcatgcacctgtaattccagctactccagaggctgagatgcaagaatcgcttgaacccgggaggtggaggttgcagtgagccgagattgcaccactgcgacaaaggaagactgtatctcaaaaaaaaaacaaaaaaaaaaaaacaaaaaagactgtgatattagactgcactggatttaatcttgacttaaagtgtgaccttgggcaaaaggcttagtctcaaggagcctcagttttcccatctgtgaaacttggataataatagtacctacttcacagggctattgcatggatttgggaagatgctgcacataaggggcttagcatcac

SEQ ID NO: 788650 - DNA, 598 bp, Homo sapiens
acctgaaagtgaggaccttaccctggctgggggagcattaacaagccagtctttaaaagctgtcaatatttaagctaaggtacagagcatagaggttaagggtcaagactgtgatattgggctgggcacggtgactcatgcctgtaatcccagcactttgggaggccgaggtgggaggatcacttgaagtcaggagttcaagaccagccttgacaacatggtgaaaccttgtatttcctaaaaatacaaaaattggctgggcatggtggcatgcacctgtaattccagctactccagaggctgagatgcaagaatcgcttgaacccgggaggtggaggttgcagtgagccgagattgcaccactgygacaaaggaagactgtatctcaaaaaaaaaacaaaaaaaaaaaaacaaaaaagactgtgatattagactgcactggatttaatcttgacttaaagtgtgaccttgggcaaaaggcttagtctcaaggagcctcagttttcccatctgtgaaacttggataataatagtacctacttcacagggctattgcatggatttgggaagatgctgcacataaggggcttagcatcac

SEQ ID NO: 788651 - DNA, 618 bp, Homo sapiens
catgtccccggaggaaggcgcgcgcggtggtggcgggaagcctcaggccgcagtggcttcctggctggcgggaggcggatgcagtgcggtgagaggcgcgggcagcgctggtcccgctgcgcatcccggcaggtgggacaggtgtagtctgaaaatacagcctgttgagaaaatgcatctaggtgaaagattggaagaaactatgacsatgttgaagtcagctattattttcaggatcaaacctcttcaattccagatttttgctgaagatcaactacatcatagctttaaaggaaggcttgacaggggtcatttctacaaatatttaattatacaatatactccataacctttccaagtgagaatgcagtagagtggaaaaactctttaaaccatgtggtttgcagagattgtccttgccgttattcctgaaagaagttgactctcacactgatagcctttttaaaagaccagctgataatatttggtctttactaaagaaatttaattccacacaaattctgcaatggccccagaacacaaggaacgtcaaataggatggtatagtcgctttgctaggcatccatactgtggaaaagctggagtaaactctggagt

SEQ ID NO: 788652 - DNA, 596 bp, Homo sapiens
attgccttctgcatggctctcctagacatgttggtggaagctgcaacaggagtggttattattaatcccttttagagaactatactagtctcacctctgaaccacccatcaatattgtgctcaattagcactttatttcaattgacaatgaaattatatactgaaaacagcatgaatccatgacctgaccagaagcattctctagccagtgaatgatttttctatccttgcctcyttttcaatttaacaaaagaggataacactgaattcagactacagttgtgcagaccctcattgttttaagtcatcagaaagaacataattaaaaattaatttaaaaactaggaatatttatattgtctttccttacagatttcctcttctggtcttttgccttaatagttatttactatttctcattcatatttggtagaaagtgtcattatacaatgtataacaaaggtcttgagaacacaaatgtataactctttcatataattataatccaaagaaatctttaatatattcatgttaaacatcggtttatatgatatttgcaatccatgtgaaaaaaccattttacaaaaatattaaaa

SEQ ID NO: 788653 - DNA, 596 bp, Homo sapiens
attgccttctgcatggctctcctagacatgttggtggaagctgcaacaggagtggttattattaatcccttttagagaactatactagtctcacctctgaaccacccatcaatattgtgctcaattagcactttatttcaattgacaatgaaattatatactgaaaacagcatgaatccatgacctgaccagaagcattctctagccagtgaatgatttttctatccttgcctctttttcaatttaacaaaagaggataacactgaattcagactacagttgtgcagaccctcattgttttaagtcatcagaaagaacataattaaaaattaatttaaaaactaggaatatttatatygtctttccttacagatttcctcttctggtcttttgccttaatagttatttactatttctcattcatatttggtagaaagtgtcattatacaatgtataacaaaggtcttgagaacacaaatgtataactctttcatataattataatccaaagaaatctttaatatattcatgttaaacatcggtttatatgatatttgcaatccatgtgaaaaaaccattttacaaaaatattaaaa

SEQ ID NO: 788654 - DNA, 438 bp, Homo sapiens
catatttggtagaaagtgtcattatacaatgtataacaaaggtcttgagaacacaaatgtataactctttcatataattataatccaaagaaatctttaatatattcatgttaaacatcggtttatatgatatttgcaatccatgtgaaaaaaccattttacaaaaatattaaaataaagcccaagtttttgtatttgagtgattcagcttaagaagacttatataawttatgaaataaatacatattatgtgatcataatgcaatacacctttaaaaaccacttgtttgaaaagaagcaaggcatattcactgattatatacaactactgctttcaaaattttcacttttaaccagtagacttttcataagtgttttatattgtcagggtgttttttgtttttgtttttatgatttaatgtatttaacttgtttctc

SEQ ID NO: 788655 - DNA, 438 bp, Homo sapiens
catatttggtagaaagtgtcattatacaatgtataacaaaggtcttgagaacacaaatgtataactctttcatataattataatccaaagaaatctttaatatattcatgttaaacatcggtttatatgatatttgcaatccatgtgaaaaaaccattttacaaaaatattaaaataaagcccaagtttttgtatttgagtgattcagcttaagaagacttatataaattatgaaataaatacatatyatgtgatcataatgcaatacacctttaaaaaccacttgtttgaaaagaagcaaggcatattcactgattatatacaactactgctttcaaaattttcacttttaaccagtagacttttcataagtgttttatattgtcagggtgttttttgtttttgtttttatgatttaatgtatttaacttgtttctc

SEQ ID NO: 788656 - DNA, 438 bp, Homo sapiens
catatttggtagaaagtgtcattatacaatgtataacaaaggtcttgagaacacaaatgtataactctttcatataattataatccaaagaaatctttaatatattcatgttaaacatcggtttatatgatatttgcaatccatgtgaaaaaaccattttacaaaaatattaaaataaagcccaagtttttgtatttgagtgattcagcttaagaagacttatataaattatgaaataaatacatattatgtgakcataatgcaatacacctttaaaaaccacttgtttgaaaagaagcaaggcatattcactgattatatacaactactgctttcaaaattttcacttttaaccagtagacttttcataagtgttttatattgtcagggtgttttttgtttttgtttttatgatttaatgtatttaacttgtttctc

SEQ ID NO: 788657 - DNA, 611 bp, Homo sapiens
ccattttggaaaagaaattttatctcttgagcccctaaaaatggaattgtacacattaagacccttatacatatcacataataatcttcagggtcaaacattatagttttcacctgctgctattcctttgcagtagactagaatagagaattatataaaatttctacgactgtcaaaaaaagatatatttttkgaaatcatgtaaaatcaaccttctttattttacagatatagaaatttagatctgtaaggaccatcagtgtggtgaaggtcacatggtaagttaattacagaatcaaatttttccctttcatttcaatctgtttttaagttctacatgattccactttcaggaaaaagctattaaaatacagactggctttggtaagagtgatatatatttttatgtttcagaccagcatgttgtttcatgctgatgttaaaagataatggttgatatcagataaatgcccacacatacacacaaacacaaactaacttggggtccaataaaataagactgggtggttcacatattttccactagtgcaaatattttaaagagataattttctttgataaagtctgtgttcttaaaactgattaacaca

SEQ ID NO: 788658 - DNA, 493 bp, Homo sapiens
gtgtgatctgatttgaagggtttatttctggtaaatcagcattctgtcaggttaactcttgtcctcagaagcctgtacctaccacagtcctccaaagaggtggtgaggcctgaaaatgcttaccagttcagaaaggcaaggctgagcttctgttgtgtgcgtcagcttccatacaagttgcatatttgcaaactcactagagtcaccttatgaatcactaacctcatttatgctcagctagctcagggaaccacaattctgcttgtattccaaataataattttacycaggggagaaggctgtttggattgactgtggcaatagtttcaaaactggtgtttgtcagcatggagcttggtgttttatatactattccaaaatctaatggaataataaaggtcatagagatactatgaaaacacagctaacttttttttttcctgcttcagtgtagaaatgtgagttctcctatttattttgttgtagttgctga

SEQ ID NO: 788659 - DNA, 601 bp, Homo sapiens
agaaaagggggaaccggtattacccacacactgtgaattcacgtataagtagtgctagagtaatgttgagatcctgacaaatgacattattgcttggtggctggaacatgggaagaggtgttggctcaccattcatctcttgggcagtatttccagggtcaaggcacggaggataagctaatcaatgaaatcagggtaaatgagctttcacagggacactgaaaagaatgagaagccccatgtgaatggtgagttcaatcttgtctctttgtctctctccctggagaattttagagctgggaaaagttcgggaacagctggacaacagaaattctgattccctcagcctcatcagaaatcgggcactttatagagacattgtcagtgtggttattaacagaacaaagcaaagcatacacaatgtgagacrgatagacctgaattagaatcttagccttagctattaatagcaatgtgtctaggcaaatcacttaacctaagtttcttcatcttaaataaggataatacctcactggactgtgacgaggattatagaatgagcagaaaacactgagcatatgcctgaacgccagtcaagtgc

SEQ ID NO: 788660 - DNA, 529 bp, Homo sapiens
cccaaagtcttcttcccctgatgtgatgccaccaaagtaaagagcttgcccgtggtgttattttcgtcaatgcacagaattactgtcagtaatttccctcttcttgtctgagcactgtatgtcttagagcaatgcatgtcttagagcaatgcatgaatcacatgaccttttgatgctttggtgaaataaagctcctctccttggtcatcagaaaggaggcctggcttggagaagtgcctcwgggtgaagcccaagacagggactagactctcctagagccttcctatagcctgtatagactctgccaaagtcatcttcatgtttatcatctaccattcctcctttaggtactgacaccattctgtctttcttcttatcatccaccccctccaattatcccaatcccctctcaaaaaaacaaaattccatcccagaagttcagactagaaagtcaaaaatctaaggaaagtgttgcaagaatgatgaggactgtcagtggctgctcacggtatacagattccatctcaca

SEQ ID NO: 788661 - DNA, 611 bp, Homo sapiens
gtttctattcaaagtctacgatgggtaaacattatctaaattcctatagcctagctggtgcttgtgtgctagactagcccaaagcagtattgtgaaacagagcttcttgtcttcgtgccttgccagctctctacctatatttttccttttgagtctcctttttcaaagctcagtgatgtccttagagatttgaaatgaggaaaacttctcattacagtaatttatcctttttaccaccaaacttaaagatcttgcatcacaaccctacrggacttcgcagtatggttgtcactgaatctgaaagcaaattggagctcaagttttgattatgcacagtggtgtcatgcattattccttcaagataaggtgtgtagtacaacagctgcctgcgatgtgtatctcgaaatgaggacagttgaaattgtattcagatcacccacaagaaagtgcccttctcatttaactaagttgtgtccaggagaaaagaaaaaattatgttctgagcacctcctacattctgcagtttggatttttcactaagtccattcacaggcatggtctcacttgaatcacacaatcgccctgtggaggtaggttgttttagcatggga

SEQ ID NO: 788662 - DNA, 616 bp, Homo sapiens
aaagggtgtctgcaaattgtcaataaaataatattttgcagtctcaagatatggttttcttttttcagttagtgcttcaataatctttcacacaatcaaaactactctttctttatacagaggttgaaacacaacaaatttgaacaggagaaaccattaataattcctgaaaatatcccctgttatgtttccaaatctgtcawcctaggttaccttcttaacttgaacatcacagtgttgcttatttgtctagataggggaccgatactctttcatgtccatgacaactgttaatctctacaagggtactttccgatgttaatgatagatttactattacaataaaaccttacacatttgcacaacttggaggcaaaaaatgattagatttagggggaagaaaaccccctcatctagaagtttgttttttacaactatcatttattacttcaaatttataaggtatatatagatgataacaaaaataatagacggtggttctgctgaaagtagttaatagcacgcaaaaagggtgtgttattttaagaagactaagcacttgctttctaactttatttacattattaattaacttagcagttcctttgcttttctg

SEQ ID NO: 788663 - DNA, 597 bp, Homo sapiens
ggtgtgttattttaagaagactaagcacttgctttctaactttatttacattattaattaacttagcagttcctttgcttttctgaaacacaaaagcatatctagtgtctgtctaatgatcacagatatcaatttactgggattccaattaaagaaatttaactacatttctaggaaaaaaatgattttaacaattaacttacaagagtgggtttgtatgcaattaagactatctatcaaatccccctgactgagcatttttctaactcacagggaaagggtcaaattccttccatatacacaccctcggctggcattgtgctaacacttctcaaggaagaaaaaaaaaatctcaagtaacaagaagactatagagcatttcccaacataaaagtgttaaatcccyataaaccatgaaagaatgcaagatttctaagtagaagccacggtgacctgaaacccttgccatggggttcaatcacttgaaatacgttgagtctcaaactgcccttaaatttgttataaagggccctcaaatgaatcaggaacccatctcaataccaatgaaacactcaaaaagccaagatcagctcaaca

SEQ ID NO: 788664 - DNA, 579 bp, Homo sapiens
aaattgaagggaacggtgactattcaacaggctggttgcagaaatttaagaaaagacgtagcattaaatctgtaaagacttgtgataaagcaactgctgatcacaaagtggacaaattcattgatgggtttgccaagattatcactgatgtaaatgatgccagaacaagtatatgatgtgaatgaaacatcactctgttgttgtaactgccccaaaaagacatagactatatctgatgagacagccccgacgtgaactaatgataccaaagatagaatgactgtgctggagtgtgctaatgcaacaggcacaccgaagtgtaaacttgctgtgtcgggcgaaaacttagatcctccctgttttcmaagagtgaatttcataccagttcattattgtattatgctaacaaaaaggcatatacttccaagaacatcttttctgtttggtttcacagacattttgtaccagtggctcatgttcactgcagggaagccagactagatgacaactgcaagcttttattattactggacaaccattctgttcatccttcagctgaaattctcatcaaaataatgt

SEQ ID NO: 788665 - DNA, 588 bp, Homo sapiens
gggatcagctgggtctaaagtaattcttcttccatcaccccctatttcattacctccttctcctgccacaccaacatccagtcccctttcatctttcctttctttcccttcctcaattcctgagaacttatatcaggcacagtgctctgtgctcagaacaccttctgcagttcttccaaaccaccatctcatctccttttcggcttttcttctttctttttctcaggaagctaggggccatttacagccaccatatccaccaatcgggagcaaatactgactcatcctctactcccatcctttccagagtaggagatgggctctactctcatactcctgagagtagggaatgttcccaaattgcatcctaagtaattccaaagagcactgctggcctaacaaggagcttttgaaacctttaaaattgtcttcyaggtatcaggcatcctattaggtactctgcccacattatctttttaaaaaattgtggtaaaataaacataaaataaaatttacctttttaaccattttgagtagtacaattcagtgcttctaagtatattcataattttatgcaaacatcactac

SEQ ID NO: 788666 - DNA, 663 bp, Homo sapiens
agaggtctttatctctatctgatatgtgagaaaatggaaactcagaaaggttaaataactttttgaagttacatggtcaagctaggagttatttccaagtggtagaatacatctaagcatgtggtatcttttctttctatatttctatgaaccagaagtctaccactctacatcaggattaaacaaaaagagcccaatcttatattgttcaaaatatacacattactattaaaaatccatacgcatatgcacagaataaaaccgaaaggaaatacactaaaatgttatcagtggttagtgtacgcatttttttcttcattatgcttttctgtaccatgaaagtgttatcactttcgggaatcaaaaaacacgtcaggaaatcttttggtttaacattttaagttactacaacagtatttttcacactgcaagttgggayccctcctgtaacagagaatcaaaacaacaaaggctactcccaacagaggcaaatggggcaaggctgaagagatcaataatatcagccacccagttaggaagttcttccctactgagtcagatcagcaatttttaaaaaataaaataaagcacagaatagaaaaagaaaaacaattatcagtaaacaacatacatagtaagggcaagtacacttttgcaaaatat

SEQ ID NO: 788667 - DNA, 575 bp, Homo sapiens
tggatccccaaaaagaagggaaatgctaccagagaagatagtgcaatgcttctactgtggatttcattgcaaggcaacccaaagccaatcagctcattttgtaatcagcccatctcttatgggaatctcatatttagcaggggtgagggggtggggtggagatgtttccatgcctctaggtggkcaagagcgtgcttctttgatccaagcgtgcaaagagccaagtatccctcctaactgccattagccatcccttaaaatatattcgctacctggttattacacaccaaggctaaaagctctctcacaatgcaaagtaattttggacaacctgcccccaaagtcacaagtgtcaggtaatgtaatgtaaaacagaacagagccttagactttgagaggactctatcctccttcaatttctggggttacatgagggaaacagaggtttttcctagaatggggtctgtgacacctcctctgtttttccccaggagtcccaggctgttagtaattatcttaggttctctcatgtggacctcaagaatggcaagaagacaaaatggagaaaaacaatt

SEQ ID NO: 788668 - DNA, 332 bp, Homo sapiens
ggtggattttctatagatgtgttcggtctagttggttcatagtgttgttcaagccttcattcttgttgactttctgcctcgttgctctgagtgttaatttaagataataacctgaacagtctagttcaggttaataccaactccatttcaatcatagacaaagttttgctcctstaaagctttgctccctcccccaacctttgtgctgttattgggatacaaattagatgtttctacatgatgttctgggtgatacagatttgtaattattaccttatgcagttgtctcttaaattatatagaggaacaagaattacaaaatgtgtttatac

SEQ ID NO: 788669 - DNA, 601 bp, Homo sapiens
tcttggaaatgtttcatttgcatcagggtcgtgccagacatggtaatgaaggccctgaacagagggagaaccatcagggactgctgtgtgaggaaagcgtggactttcatcctgaaaaatgaatgtatccataacaacatcctcaaacatagacagctctgattagtgctccacgagccctctctctaaaaacatctgaaaatgcatcactcttcctggggctcacatgaatggggtaaatccttacgaaggaggggccttggtgctcaggaggtgaagcrcacgccattctccaggtgtgcacgtgggtccgaggaatcaggagctcaggctgcacagccctgccgctgccaatcactgctcacagcccctgagccctgctcagaggcagcagcatttcctactaggggcaaggtgcagcagtcaccaggacaccctggctcttatttgcaactgctgcattacctaatagccacccatggcttcacgaggagggatgctcacagccccctgcagagcagcctccaggttccagccccacagggaagcgtctgccgtgacttccacccacacagcctctgcttccacacaatcaccctga

SEQ ID NO: 788670 - DNA, 590 bp, Homo sapiens
agagggcccccactaggcccatgagtccagaccagtagagtcaccagtggtggtttccaggagagcctcagatgcatgacccaggcacagagctactgtggaggcaggagcaaggcacaagcacatggctgcctcaggggcaaggccacccaaagccacrgggcagggctgctaccacattgtgtcctgaaggtggcactatcaccttagtgggcctggagggcagaacattgagccaatgattattctcaagccgtaacatttcatgttgtttcctctgttgggtttcagacttacttgggaccagtcactgttttcttctttcctatttctcccttttaaaatggaaatatctatcctatgcccatcccaccattgtattttggaagcacagaacatgtttgtttcactgctagagagcagtttacctcagaatgagtcatactttcagtctcacctatatctgatttagatgaaactctgaactggagattttggagttggtgctggaatgttttaagagtttgggggctattgggatggaattaatgtattttgcttgtgacatagacatgaatttgaggggagca

SEQ ID NO: 788671 - DNA, 601 bp, Homo sapiens
aacactcaccttgagaattcaccagggaatggggcgacggttctaggccctctgacctgcgttgtgaccctgtgcaagtgctgtccctgctcaggctgtccgtgtctctgtctgtacaatgaggtggttggggcagctcaggggttctcaaccttgggtgtgctttaaggcatccgagaatagggtgggacttttaaggacacagatatctgggccctaagcccagaggttctgactgtcagtctgcagctgtgtgttgtgacatccctgtcaagagctggggctctggagtccggcagccctgggctccaatccctagtcagcctctcaccacctatgtgaccttggacaagtgcctgcccctctctgrgctcttctggtgactgaggacagtcatagtacctgctgcttggggatgtgggaggacgtttgggaccagtgactccgaagtgctcacccagggctcacactggagcccagtatctgtcagtgactgtcactggaaccctggtcatgtggactcagctgtgcccaatggtctcatcctggaaggacgtgctccatgtcttctggggaccgccccccccaccccaccggccca

SEQ ID NO: 788672 - DNA, 626 bp, Homo sapiens
gtatctgtcagtgactgtcactggaaccctggtcatgtggactcagctgtgcccaatggtctcatcctggaaggacgtgctccatgtcttctggggaccgccccccccaccccaccggcccaccacgggctctctttgcacactctcatcgcacttgctggtccggttgtgtctccttccccaggrtttgcagcagctcttcctgttcgcttctcctgattaatctccctgttcttctcccacttaacaaacagcctcacttaaaaagccatctgggaggatggatgacacaaggcacaatttgcagaataagttttcagagaaaagagctaaggaaataaaagcacttacgattccaatctcattaggcgccataactctgtggaggagaatcgcattcctgcgttctctgctccccctgtctggctgccttccccatgttctgggctccatcaccatttgtcttctgggggacctgctttggtgtctctggttgcttccctccctcgggttaaaccccatctctcgccaggatgggcggcatcggggcttttctaattcaaatcctctctcctgtatagtcgctgccccacagcaggtagctgcgccctccccctccaggagtc

SEQ ID NO: 788673 - DNA, 547 bp, Homo sapiens
ggtggcccacaacctctttccactggacacattcaaaaccaaaccttcattttcccatcaaattgctcctcagccttgtgccctacagcccctgctcaccccagtcggaaataagcaggcatccccaactctccctctccccacaccgtgggcaccatccggtcctgccagttttaacaccttacacccctgggattcccctctcccttaccccctccctctcccccatctcagaactggtgatctctggcccrgacatccccacgccctcctacttgttcctcagccccacctgccctgcaatccatccaccctgcacaccctgagatctgagtgaggggggcccaggtttagggggccctgctctagctccagataccccagccccagaatccctgcctgctcccaggacccacatggcctcttctctgtgccattgtgcccagctgttgaccccagacgtgcagctgtgtgtgaggaggtatacaaatacagcatcgacctgcagggtggggtgtcacataatgtgtgagactgtgatgtggga

SEQ ID NO: 788674 - DNA, 650 bp, Homo sapiens
tattttccacacaggatggacttcaaaatgctcttcctccaaaaacttgtttccccctttcctcaggcacttgtccgctctctctcactgctggcctctgccattgttctgtggtcctgacttcttagcacatcctgaacaccagcctgtggcttgaaggatgctccatggttcatcttgcaatagcctttgccttggaacacacctttgcttaataaatgtgcttgctgttcttcttataagcccctttctacctgtgtaggaaaccattgctrgacaaagcctttcaagcctgtgtgcatcccacaggttctcagcgattcccccaccccgtaagaaccagacccctcataattaaccctgctgaaaaatacctgggatttatcaccagtgggactttcacttacagagctgataggcatcttcaagcttatgtgagactggaaagcagcatgttcaaggaaaaaagggatgaacttggaagcagatacacctggcttcagattctggctccatccttagctggtcatgcgcacatcactcccaaccctctagtcacacacaacaatgtacagtgtctgacgcatcgttggcattcaatacgtcatcgtctttcctccataggacctagtcctgcctctggtttttaa

SEQ ID NO: 788675 - DNA, 636 bp, Homo sapiens
gatctctggctgtggttatagaatttcataccctgcttctctcaccaaacagcatctattactttaagcaaataaaaatagacacagctaaagcaagttggaaaaatcaataagtaataaaagttaacatgaaagcaaatacatgagctcaatcacagaagatcctgagagggtgtctagtaaattgagtccagctacgcacccaaggggccaagattcctagcagaggtatggccttgattgggagttgggggctccccacttcatccctgctccagcatttccctgcaatctgaggcagtggtggaaggagctggactgaaagtccgtgtgttgcygagcaactcttgcttcgggtccattcattactcagcaactatgcactgagtgtccaccatgtgccagggcactatcaatagcacagtggtcaggagtgtgcatgataaacgtggactttctgggttcacaacccatctctgtcacttaccagctgtgtgtcccagaacgagttacttagccactctatgcctcagttgtctcatctacagaatttgataatattatttatttcccagtgttctgggaagaactaaggtagatactttatgcaaagtgctcccatcaattgctggcaca

SEQ ID NO: 788676 - DNA, 617 bp, Homo sapiens
cagacaagggcatcccctccagaagcaggatgccattgagaccgggccatgatgaatggcccctccccaggccctcccccgtaggacccggtcccagcagcgcctctccctgcaggacagtctgcatcccaatcccagctgccacgtcttgtccggctcctcaagctggaaggttcctcagcctctcctgactcctgggctgcccctgacacctggaaggcacaggccagctgtgtgcaggacgtcctcttccaggctgacttcggccccctcgtgaggagatgtgagctaagagtcctgccgggaattccacatgcacgcagcctccacttgccrcctccagcagtgggctttgaacgtgaggccgggggcctgcctggcgtctcctggggtcgttgtgtctcggggaagagctctacagcagttctcatgcccagtcctcctatgggctccaggtgctcactcagggtcttggcatccctggtggtcacgggctgtggctgggctgcacagcttagggctccagctgaaggacccggccatgggagggaggctgctctgctgacatccacgtccacgtcatgcccatgtccactgctctctgacacaggacggtc

SEQ ID NO: 788677 - DNA, 457 bp, Homo sapiens
ccaccgccccttgatcacaacagagatcactccaagactctcccactgctcaggtcccataagcacctccctgactgaggtgatgctcagaccacctgctttccaggaggcccaggcaaagcacagcagttatttttctagaaacagggcctcactctgtcaccgacgctggcgtacactgctaaaaccatagctcactgtaacactgaactcctgggcagaagtgatcctcctgcctcagcctcccaagtagctaggcccacaggcrcacaccaccaagcctggctaattttttattttttgttgttgttgagtaaggttttactatgttgtgcaggctggtctcaaactcccgggctcaagcgattctcccacttcagcctcctgtagtgctgggactgtaagcgtgagccactacgcctggagcagtacagcatttctgagggttctgaagttg

SEQ ID NO: 788678 - DNA, 516 bp, Homo sapiens
ccagagaacaccttcccgtccagggctgtgggccgacagcagagggcacaagcagaccctctggggggctgaacgaaatgggggtagacatcctcaatctgtgcacttacaagggggacattttattgtatataaattatgtcccctccaagaatttttatgcatgttaacctctatttaaaggagagcccctrccctcaaactgtcagcctccacgtacagccacgcctcacatcatgatgctcctggcaataacagacggcatacatgacgctggtcccatcaagaccatcctggctaacagggtgaaaccccatctctactaaaaatacaaaaaatcagccaggcgtggtagcatacgcctgcagtcccagctacttgggaggctgagacaggagaattgcttgaacccgggaggcagaggttgcagtgagccgaaattgcgccactgcactccagcctgggcaacagagcgagaatccatctcaaaaaaaaaagaaaaaagaaaagtatggc

SEQ ID NO: 788679 - DNA, 516 bp, Homo sapiens
ccagagaacaccttcccgtccagggctgtgggccgacagcagagggcacaagcagaccctctggggggctgaacgaaatgggggtagacatcctcaatctgtgcacttacaagggggacattttattgtatataaattatgtcccctccaagaatttttatgcatgttaacctctatttaaaggagagcccctaccctcaaactgtcagcctccacgtacagccacgcctcacatcatgatgctcctggcaataacagacggcatacatgacgctggtcccatcaagaccatcckggctaacagggtgaaaccccatctctactaaaaatacaaaaaatcagccaggcgtggtagcatacgcctgcagtcccagctacttgggaggctgagacaggagaattgcttgaacccgggaggcagaggttgcagtgagccgaaattgcgccactgcactccagcctgggcaacagagcgagaatccatctcaaaaaaaaaagaaaaaagaaaagtatggc

SEQ ID NO: 788680 - DNA, 570 bp, Homo sapiens
aacacttagccatctgagaatggcaactgctaaaagagcattcattgtaatctacccctaggtgctactgtggggcgggagcccaaaagggctcacccgggctcctgcacctgcccgtctgcacgctcccctgcacgctccccttccagcaaatgagccacagcccctgttgcaagtacccagagcgggtcagggaactctcctgtttcaatgataattagcaacaatgttactggtttacatattcactacattctacttcccatcactgtttcagaaatatactgcatctacttattaaaacttacagttaactgtaaagcagcctcaggcaggtccttcaggaagagtccagaagaaggtactgwtatcatagggatgacggctccatgtgtgttactgcccctgaagactgcagggagacgggacttggaggtggagggcagtgatgtggatgatcctgactctgtaggcctaggctaacgtgtgcttgtgtcttgtttctaacaagtaagtttaaaaagtaataaataattttaaaaatggaaaaaagctcgctgggcgtggtgg

SEQ ID NO: 788681 - DNA, 635 bp, Homo sapiens
acacttggaagaggaaaacggtaccgggttttcacagctcctagactaaagtcaggtaacaggccatgccatgcagggcaaataaaactccaataaaaagccataggtttttctggctagaaaagctagaagacaagtgtgatggttaatattgagtgtcaacctgattggcttgaaggatggaaaatattgatcctgggtgtgtctgtgaggatgtttccaaagaagattaacatttgagtcagtggactgggagaggcagccccaccctcaatgtgagtgagcaccatctaatcagctgccagcatggctagaataaagcaggcagaagaaggaggaatgagcagacttgctgagttctggcctccatttttctcctgtgctrgatgcttcctgccctcaaacatcagactccacgttctttggcttttggactcttggcctttgtgatttgccaggggctctcaggccttcacccacagactgaaggctgcaccgtcggcttccctacttttgaggttttgggactcagactgatccactactgacttccttgctcctcaacttgcagacagcatattgtggaactttaccttgtgatgatgtgagtcagttctccttaataaactcccctt

SEQ ID NO: 788682 - DNA, 609 bp, Homo sapiens
ctccgtcaccagggagatgcaaattaaaacaagatgcacacacctactagagcggccaaaacccagaacacggacagcaccgaacgctggcgaggatgtgaagaaacaggaccctcagccgtggctgctgggaaggcaacatggcgcggctgctggaagacagtctggcggtttcttacaaaactaaacgtgctcttaccacacggtccagcaatcrtgctccttggtatttacccaaaggggctgaaaatttatgtccacacgaaatcctgcgcacagatgtttataccagctttcttcataattgccaaaacttgcaagcagccacgatgtgcttcagtaggtgagtggataaaataaactgtggcacagccacacactggaatagtgctcagtgctgaaaagaaatgagccatcaagccatgaaaaaacacggaggaacctcaggtggatattcctaaatgagagaagccagtttgagaaggctgcataatttcaaccacatgatattctggaaaaggcgaaactaggagacaataagatccgtggaccagggactgacaggaggggagggatgaacgggcagagcacagaggaattcagggctgt

SEQ ID NO: 788683 - DNA, 579 bp, Homo sapiens
ctctcaaaagtaagcacacaaagtgctaaacctgtccaggcaccgtggctcacgccagtaatcctagctctttggaaggctgagatgggaggatcacttgaggccaggagtttgagaccatcctgagcagcatggtgagacttcatctctaccaaaactttaaaaattggccagacatggccaggtgcagtggctcacgcctgtaatcccagcactttgggaggccgaggcgggcagatcacaaggtcaggagatcgagaccatcctggctaacacactgaaacccctctctactaaaaatacaaaacaaaaaaaaaatttgccgsgcatggtggtgggcacctgtagtcccagctactcggtaggctgaggcaggagaatggcatgaacccaggaggcggagcttgcagtgagccgagatcacgccactgcactccagcctgggtgacagagcaagactccatctcaaaataaataaataaaattagccacacaaggtggcaaacacttgtagtcccagctacacaggaggctgagctgggaggatcacttgagcccaggggttcaaggctgcagtga

SEQ ID NO: 788684 - DNA, 579 bp, Homo sapiens
ctctcaaaagtaagcacacaaagtgctaaacctgtccaggcaccgtggctcacgccagtaatcctagctctttggaaggctgagatgggaggatcacttgaggccaggagtttgagaccatcctgagcagcatggtgagacttcatctctaccaaaactttaaaaattggccagacatggccaggtgcagtggctcacgcctgtaatcccagcactttgggaggccgaggcgggcagatcacaaggtcaggagatcgagaccatcctggctaacacactgaaacccctctctactaaaaatacaaaacaaaaaaaaaatttgccgggcatggtggtgggcacctgtagtcccagctactcggtaggctgaggcaggagaatggcatgaacccaggaggcggagcttgcagtgagccgagatcacgccacygcactccagcctgggtgacagagcaagactccatctcaaaataaataaataaaattagccacacaaggtggcaaacacttgtagtcccagctacacaggaggctgagctgggaggatcacttgagcccaggggttcaaggctgcagtga

SEQ ID NO: 788685 - DNA, 524 bp, Homo sapiens
caacacagtggcttagagtatggatttcggaggtaccctaacctccctgtgcctcagtttccttatctgtgcaatggagatgataataatctcaggtatagtggtgagaatttaacaagggaattcctatgaaactttcagaacagagcccagcatgcagtaggcatgaaataatgttcgtagggagagggtagccagtattttcttcccctctccccggtggtcaatattaaccagtattttcagcacacacattgcagacttccaccggactgcccatcrccgtgctctcccttagcccactccctgaattctactcgggtgtgtgccagcaacttaacatggccgcttctctttctgtagctgagttggccaagcgctttgacatatgtcacctcagtctgagctcccagcagtcatgagtgatgagtattaggaatttgctctattttaccaaggaaaaaaccttgatccctagaggaaaggtccttcccacagtcaggtgcctgtgaacagccacagca

SEQ ID NO: 788686 - DNA, 629 bp, Homo sapiens
aaatttaaaacagcctggttactgatattctctcttctgaattcagaaattctattttaactatttttaaatataaatgtaaaactagagtatattcacatattcctttaaatgttaaattccctcaaaatagaagaactagtcaaaacagcacaagaaacagataaataaaaactttaatacatatatggaggagtcttcagtacatatggygacatgtcttattcagtgtcaaagccagttgcagtggaaaattgtatttaattttctattcactacattaaaattgcacagtctgagagattatggccaaataatttttactaacataatttttccagaaatgggaaaaagagtgtttttactgtaaagctctaagatttcttttttaattcaataagctatttaggcttccatgtagaaagcttatgtatttaatttggggtacttaggcaaaagccatctctcttcttcttcagagagagaaaacacatcatctagactaggcttcttaatgattcctttttattgccctccattgaaagtcacagccagacacacaaatatgtaagaggcaagtgaataattgcctatgtttttcagatcataaactaaaccagttctgaaat

SEQ ID NO: 788687 - DNA, 629 bp, Homo sapiens
aaatttaaaacagcctggttactgatattctctcttctgaattcagaaattctattttaactatttttaaatataaatgtaaaactagagtatattcacatattcctttaaatgttaaattccctcaaaatagaagaactagtcaaaacagcacaagaaacagataaataaaaactttaatacatatatggaggagtcttcagtacatatggtgacatgtcttattcagtgtcaaagccagttgcagtggaaaattgtatttaattttctattcactacattaaaattgcacagtctgagagattatggccaaataatttttactaacataatttttccagaaatgggaaaaagagtgtttttactgtaaagctctaagatttcttttttaattcaataagctatttaggcttccatgtagaaagcttatgtatttaatttkgggtacttaggcaaaagccatctctcttcttcttcagagagagaaaacacatcatctagactaggcttcttaatgattcctttttattgccctccattgaaagtcacagccagacacacaaatatgtaagaggcaagtgaataattgcctatgtttttcagatcataaactaaaccagttctgaaat

SEQ ID NO: 788688 - DNA, 567 bp, Homo sapiens
aaattggctctctaaaataaggatcgtcttcaggcaaaactgtggtgtgtagacctcaccaaggatctctgctcataacttcctggtccctgaggccatcatgagtgattctgacccaggtgagacacccctggggggaaacagttctcctcttgcccctgactcctgggcagttgttcctctggcctactcttttctgtgtcctgttccctccagttctacagatgtgagcgaatgcaaaccaaccaattcattcacagtgaaggggacagtggatggatgcgagccccctctcccatcccaatgaaggattgttgagtctctccgtaaggaaatgaatgttcttgggttttcagacaccagagggaggtgtgaagggaatgtgtccggaattggtgggttcttggtctcactgayttcaggaatgaagccgcggaccctcgcggtgagtgttaacagctcttaaggtggcgcgcctggagtctgtcccttctgatgttcagatgtgttcggagtttcttccttctggtgggttcgtggtctcgctggctcaggagtgaagctgca

SEQ ID NO: 788689 - DNA, 553 bp, Homo sapiens
gcgccaccgtgaggcccccatttcaacgcttgtcatttcaattgtggtgggttagagatcacagggaagcaatgctatctgctgaagagacatcagacagtgtagtaaaaagggtaatccatttattttcagagaagttttccactcagagatcatacacgctgcagatcacagaaacacatgcaagcatgaaatttaatttttagtaactctttcctggggcttctatagaaagcaacagtgaaaggaaaatgataatcatgacaaggcaattacagagaggtttggggaaaacgaaaaactttgaaaacatgtagtttaaaattgctttaattaaaamataatgcaagctgcattattttagctcaaaaaaccaaagtcaacatcacagagacaacacttttaaactttgaaatagttgagaatgatagatgcacgttttttcccagaagtgatttttttcccctagtgattcagaatctataaatgtgataaatattgacttactgggctcccaacagatggaatgaaacatgtagtaaaacaaaagcaa

SEQ ID NO: 788690 - DNA, 530 bp, Homo sapiens
atattggtgaaggaaaaaataactttttttctcgtactaaatgaatccgcctattgagacccatttgaagagaaagagtgaaaaacatgagagagaagagagagaagaaaaaaagagtaaaaggtatttgatggagggaaagaagaatgagagggggtagaggaagaagaaatggaaagagcaaaagggcagagaaagaaagaaaaagtgtgtgtgtgtttgtgtgtgtgctgcacgcacgcatgtgcagagtgggtctgaaagagggacagaggaagaggaaaaagagaaagataataggaatcatcaactagattctctagcagytctcacttgcttaaaattagtggaaacaaatgatggtcttctccctagagttctctcaagttattttcccttgaacacaagataaaatgtcaacattctacttggaaatttagtacttaagactgtatatactgttacttgggctccacttattcataaagatttcagcattttagaataaaaataattttatttaaaagtgc

SEQ ID NO: 788691 - DNA, 611 bp, Homo sapiens
ttctgaggatgttttaggataaagctttggagaaaacaagtgagattgtgtcagagactactggttgggcctcaatgtccagtcttcctcatcccattgcgatagatttttgctgtgcacttggctgctcagaataaaggcctcatttcccaggtgccctgtagctaacagtggacccatgactaacttttggccaatggaatttaagcagagcagaggtccagaattccataccccaaattcttggggccagatatggtttggaattcaggtttcttttgattttgaaggtgatatgatgcatatacggcttcttatggaataactccattgaagtctggrgcagcacctcataattaactgcaacaaattataacagtattcaccctaagtgggataaatgaagaccataaggccacttgtagtggctcacacatgtaatcccagtgctttgggaggctgaggctgaagaatcacttgagaccaggcaacaagaccagcctcagcaacatagcgagattccatctctacaaaaaaaatttataattaaccagatatggtgtatgtgtctgtagtcctagctgctcaagaggctgaagaaggaggatcat

SEQ ID NO: 788692 - DNA, 619 bp, Homo sapiens
tgctccacggcgcccagtcctatcgaccacccaagggctggggagtgtaggcgcacgacgcgggactggcacgcagctccacccgcagccctggtgcaggatccactaagtgaagccagctgggctcctgagtctggtggggacgtggagaacctttatgtctagctcagggattgtaaatacaccaatcggcactctgtatctagctcaaggtttgtaaacacaccaatcagcaccctgtgtctagctcagggtttgtgaatgcaccaatcgacactctgtatctagctactctggtggggccttggagaacctttgtgtggacactctgtatctagctaatctggtggggacctggagaacctttgtgtctagctcagggattgtaaacacaccaatcagcgccctgtcaaaacagacaactcggctctaccaatcagcaggatgtgggtggggccagataagagaataaaagcaggctgcsggcgccagcagcggcaacctgctcgggtccccttccacactgtggtagctttgttcttttgctctttgcaataaatcttgctctgctcactttttgggtcgacactgcttttatgagccataacactcaccgcaa

SEQ ID NO: 788693 - DNA, 621 bp, Homo sapiens
attcattctaccaaaccttacctggctcttgttgctgcttggtagtccttttattaatctcttggagactcactgattagtttcctccattgatcatctaaaagcttttttcatatttttgaaactcactgtttgatctccccttccccttgtactcggaagatgatcttgctttctgctttactgagaagttcaaggttatctgcaatctccttcaacttttcactcctatcctattttctattttccttcatctcttgcttcctctgctcttttgttttagggaaagaaacagtccctttatttctaggttgaactcaacttctrcaggacttttgtctgtaaattgtacttctttttttttgagacagagtctcgctctgtcacccaggctggagtgcagtggcatgatctcaggtcactgcaacctctacctcccaggttaaagcaattctcctgcctcagcttcctgagtagctgggattacaggcgccactcccggctaaatttttgtatttttagtagagacggggtttggctatgttggccaggctggtctcaaattcctgacttcaggtgatgcacccacctccgcccgcctcggcctcccaaagtgctggc

SEQ ID NO: 788694 - DNA, 620 bp, Homo sapiens
tcctgacaatggaaatttatgtctgttctacttttttttcgtacctcttgctagagatttgtcaattgtatcaggagatgtaacattttatttaatatatgcaaattttaattcattattgactttgtctattctgctactataagaaagttacctggccaggcatggtggcccacgcctataatctcacggtttgaaggccaaggtgggaggatcacttgagctcagragttcaagaccagcctgtgcaacatggagatacagcatctctacaaaaaagaaaaaatagctgggcatggtggcatgcacctgcaatcgattgtattgacttttttcaaataaccagtttttcatttcatttttttctctatttttttctgttttcaatttcttgatttctgctctttactatctccttccttttgcttgctttttttttttcttgaggatggagcttatattcttatttcgtgacttttcctttttgtaatgtatgaatttagtgttatacagttttgtcctaatactgcatttgctacatctcacaaatttatattttcacttttattcagtttaatatattttttgtttcccttgagatttcctttttgacccatgga

SEQ ID NO: 788695 - DNA, 624 bp, Homo sapiens
agatatccagtgtcccagaaccatttgttgaaaagactgcccttgctcctgtgtaattgtcttggtactcttgttgaaaatcaactaacctacccattttgttttgttttttactgaaacaactttgctgggggagatattgatatgaggggaaaaaaacagagaaacaaaaaaaaaaggaagcagtgtaaaaaatccaactatttctgaatggcaacagaatatagctccactttgttcaatgcttacattctctattttagtgtacactggccaattagtctcttarattattacttggcatcatgtactttaaatatctaattctgtcttaaagcaaacaaaatagagacccctgagaagtatgctagctctggacaattggaaagatcctaatatttgccataattcaacaattcatcagctttatttcttcaaagactaagacttttaccaaacttgagaagtctattaaaattgtagttataaaataaataacctgttgaggacattgctttttttcttgcagagccatggcatctgtttcagggctgcaacttaggaagttgctcagcccccagtatagcctttcactaaacctctcaattgagcaagattgtccac

SEQ ID NO: 788696 - DNA, 649 bp, Homo sapiens
cttctttggcttattaagctttcgctccgacctcaccctttgtgtccacgctccttaattctcttggtggtgagacaaagaactccgggtaatacctcacaaagagagactgctacattgtggtgcatttgtgaaaccttaacacccggccttccaaagtgctgggattacaggtgtgaactgctgttcctggcctgcagttctttttttttttttttttttttttttttgagacggagtcttgctctgtcacccaggctagagtgcagtgrcatgatctcggctcactgcaaactccacctcctgggttcaagtgattctcctgtctcagcctcctgagtagctgggatttcaggcatgcgccaccatgcctggctaatttttgtatttttagtagagacagggtttcatcatgttggctatgctggtctcgaactcctgacctcaggtgatttgcccacctcagccttaaaaagtgctgggattacaggtatgagccaccacacccagccccggcctgtggttcttaatattagttaaacagttgatgacatagtatctgtgctggggacacatcacactgtctcagatttggctaacgcctttttcagcactcctccattgaacaatcacaagaccaatttgcttt

SEQ ID NO: 788697 - DNA, 490 bp, Homo sapiens
atgagtttcctttttgcacaattgtaaccagggtcatttattgccaggagatgaggtattgctggcttatgttggcctccaggctgtggggctggggtaggaagaaaagggagtctaggaggttggaatacctccaaacagaggcacagatgcagggaaggatgaggcatgttctaggagcagtaagtaggccagttttgttgggttataagggagctctatcatgctgaccttgcataccaagagagtctgtatgttcttcagcaggaagaattggaacccacaagaatttttttagtaraaaaaaaaagccccacagtgcaacctctagcttgattgttcttgctggtatgtagcttagtaatgttccttagccatttcatgtccagtgcctctattagagaataaagtttcttatccagaacaggggttaggctgggtgtggtggctcatgcctgtaatcccagtgctttgagagcctgatgcagga

SEQ ID NO: 788698 - DNA, 544 bp, Homo sapiens
tgaataaaacaaaatctctactctgttgaagtttgcataacaatgaaggaagacagattctactcatataaacaaataaatacaataacataatttaagataaagtcatgagagactacctgtgtgttgctactttagctagagtggtcagggaaagcttctctgaggaggagaaacctgagtgatgagaaagagatgagacagccaygtgaaatccagggaaatgattccaggtgaggaagccctgtgatgagaatgagcttgaagtatccaggggccagaaatcatccagtgggactggaggctggggaaacaaggggagggttaaaggagacagacctgggacggcaaacacaggttggattatgtagagtcttaaaggactttggacttcatgctaatcataatgtaattccaatcataatgtgtgggggggtgggttatgtaaggaagtgcaccagacttacccaataaaaagatcactcttgctgccaagtggagaatggattatagggagcaagagctgcagccagggacaggtcca

SEQ ID NO: 788699 - DNA, 624 bp, Homo sapiens
ttaggtttgtttttgttggtattagtaccgtgatgaattcacggatttaagcatatttgaggccgggcatggtggctcatgcctgtaatcccagtgctttgagaggctgaggtgggaagatcacttagggccaggagttcaagactagcctgagcaacatagggagacctcatctctacaagaaataaaacaattagctaggcatggcggcacattcctgtagctctagcttctcaggaggctgaggtgggagaatcacttgagtccagatgttcaaggctgcagtgagctatgatgatgccattgcattccagcctaggttgccagtgagaccctgcctctaaaaaacagaaaaaacaaaaaacaaacaaacaaamaaaaaaacaaaaaacaaaccccaaaccacatatttgatgtgttttaattaattgcagtgatttttattcatgttcaaattgtcctatctttggccagttggagcctattcatgttggctctggagtccttttaactccattagtcttcagtagctttcttgctatctactataagcaagtgttttgggctaatcttacacatttcctgcctctgacctgcaatataccatttctccaaggagccctg

SEQ ID NO: 788700 - DNA, 468 bp, Homo sapiens
aggagttggaggttgcagtgttgcagtgagcctagatcgcaccactgctctccagcctaggcaatagagccagactctctcaaaaaaacaaacaaacaaacaaaacaaacaaacaaaaagaagggataattctgtttaaaagcttaacctagcacacacctatagtcctagctacacaggcaggaggagcacttgagcccaggagtccagcatgggcaacatagaaagatcgccatctcagaaaaaacaaacaaaaacaaaaaaaaaaagargggtgattatttactttacccaaagacctataaattactacttcatatcctaagacatttcagaaattaaaatataaacatcattactctaaggcagttccttaataaggaaagcttgtttatagcaaaaataagatatactaaggagaaagtttcagataagtcctttagttacttttaaataaatttgaaaaaa

SEQ ID NO: 788701 - DNA, 489 bp, Homo sapiens
aaggatacacaattaatttcatgtatgatgaatggagttaactggcattgtttccactagaaattttactacttcatcagtgatctgaatagctaagaatctcctttgatccaataaaaagagtagggatacatacacacacacacgctctcacttttacacacacacacatcccccaaattcattaggttgtargtcccaacctccactgatctggtttggctccatgtccccactcaaatctcatcttgaattgtaattctagcgtgttgagggagggacctgtaatccccatgtgttgagggagggagatgattggatcatgatggtggttcccccatgctgttcttgtgatagtgagtgagttctcacgagatctgatggttttataagtattggacagttcctccttcacacactctctctcctgccaccttgtgaagaaagtgtctgcttctctttccaccataattgtaaatttcctgaggc

SEQ ID NO: 788702 - DNA, 489 bp, Homo sapiens
aaggatacacaattaatttcatgtatgatgaatggagttaactggcattgtttccactagaaattttactacttcatcagtgatctgaatagctaagaatctcctttgatccaataaaaagagtagggatacatacacacacacacgctctcacttttacacacacacacatcccccaaattcattaggttgtaagtcccaacctccactgatctggtttggctccatgtccccactcaaatctcatcttgaattgtaattcyagcgtgttgagggagggacctgtaatccccatgtgttgagggagggagatgattggatcatgatggtggttcccccatgctgttcttgtgatagtgagtgagttctcacgagatctgatggttttataagtattggacagttcctccttcacacactctctctcctgccaccttgtgaagaaagtgtctgcttctctttccaccataattgtaaatttcctgaggc

SEQ ID NO: 788703 - DNA, 522 bp, Homo sapiens
tggtaactgatctctgttctgtatcagtgcagtattctgaagccaagagatcctcctctccccgcaaggcaaaaggtttgttctccttttacttctccctcagccaaacttctctgagacgcctatggcttgttactcactgccaagcttatggtgggaacaggaaggacctgcccctcctcagtgayaggtgacatttgcttcaacccctttcagagaaagagtggatttagcccgagaactggggtgaggatggggtggggatgtttcctttccctcccactgccatataaagcttttgcttctgagagaaccatctggtgaagtagatgaggcttcatggctaatatggtttggctgtgtccccagccaaatctcatcttgaattgtaattcctataatccccacctgtcagtagggaccgggtgggaggtaattgaattatgggagtggtttcccccatgctgttttcgtgatagtgagtgagttctcacgagatctaatggttttataagcctctgg

SEQ ID NO: 788704 - DNA, 538 bp, Homo sapiens
gaagttataattttgaagatttgacttttttcaagttgttagggtgagagcaatgttctctgttctcttgcagctgaatgaattttaagcagaagccaggattaaatcttaagtcctcattgtgctgtaatctttcatgtttctatgatccaggcagaaaatgggaaaaaggcaagagttccagaaatttacgggaataagcagtatyttacccaaacaaagggatatgctcatttattttattaatgatgcattaataactatgtcctatgctttgccacatgttcaaaaatttctccttagctagccttttcatgtggaattaatcacaaacctgaagccaaagccgcttcagtttggtcccaaaacactttactcaacatctcccatatgctctgctccaccttgggcttcagccacatgagttggcaggcctgggaggggagtcagatttcctgcgatggaatccagactgtgccacttattagctctgtgacctggggctacttaacctctctgccgctcagcctcctcattt

SEQ ID NO: 788705 - DNA, 381 bp, Homo sapiens
tggctcacgcctgtaatcccagcactttgggaggccagggcaggtggatcacttgaggtcaggagtttgagaccagcttggctaaaatggtgaaaccttatctctactaaatatacaaaaattagccaggcatgatagggggcccctgtaatcccagctactcggaaggctgagggagatgaattgcttgaacccmggaggcggaggttgcagtgagcagagatggcgccactgcactcagcctgggcgacagagtgagactctgtctcagaacaaacaaacaaacaaacaaacaaaaaacagggtaccagggagtggcttttgtgtgtgcctgggaggggtacctagtccatgctccagccccatccgtggcctccatgg

SEQ ID NO: 788706 - DNA, 645 bp, Homo sapiens
ccattaatgctgataagggagggaagaattctttgtgatctggctgagagactccttcctctactacaaaagttctggattttatcactgtggtccggggtgacctctctgatttgaagcagcttggagagttagcttttgggagatcccaaacaatcatgtttgctttaatgagaattagtatatggcccagacggttttaaaaatgctacccacayagccaaatccagttctcataacaatcccttcctcacttagcaggtgagaaatgggggctcggaagtgatctgatgtgtgttagggtggggtgaaaactggcaccatggctgggcctgcagccctcccttcctggcttgttgcagtgcctggctccagctgctgtacagtgtgtgcaggcttgatgtgggtaactttttgtaccctagggagtgaactgtgctcatgttcctgccttacacagggacttgtctactccagagtgtatttggttcactttgttcacattaaggaccacctgtgtgccaggctgtgctccgtgttgggggcacccaggaggaggatgcagcctctgtcttgagaagcacatttcatgggaagacaccttagcattgcatggtgtaggaggattagggccaaaggagagca

SEQ ID NO: 788707 - DNA, 571 bp, Homo sapiens
ttaacacaaaatacacaaacccaataagtactgtgttataaggcacgtttgtaaacgtgttaatagtcttaaaagtaagaaacagtaacattttagatggcaacagcacaatatcctctgaccattgcatctcaaatgttgactattacttttaagttcttagtagcaaaacagagcttgaacggcattcatgtgacagagcattaggcaaacgtgacacgggagcaaatgtcacatgcacagcacattgtgaggcagccctgcccaactacaccaacacggagaatctcaaaaygcacctgttctcagatgcaaccaaaatgtatttactttgaatttacttcaaagtcaacagagcagtcaaatcaacactccaaagccaccatcccatagcaaaaataactcttctttattaacagtgttttccacaaccaaaaacaagtcaggtttttaaaaacttggccaattgcatgttggtgtaatctaatattatgcaatttgtaggaagcagtaaggcttaaatgaaattcctcatttcttactgttacccagtggaaacaagtgtgtgttt

SEQ ID NO: 788708 - DNA, 553 bp, Homo sapiens
aagttatatttgatgaaaaccttttcctcactttaattgccaaaaaacttttgtccacaaaaattcagttcacctgggggatccttttttttttttttttttttttcctttttggagacagggtcttgctttattgcccaggcwggaatgcagtggtgcagtcatggctcactgcagcctcaaactcctgagctcaagctgtactcccacttcagcctcccaagtagctaggactacaggtgcatgccaccgcacctggataataattttattttttttggtagagagacagggtctgactatgttgcccaggctggtctctaactcctggtctcaaggagttgagccctgccttggcctcccaaagtgctgggattagaggcatgaaccaccactggccggggattttcttaaaatgcagagtgtggttcagtaggtctggggtgtagctagagattctgaatttttggcaggctcccaggtgaccctgatgctgatggtctgtggccacgctttgtgtagcaagtgactgggtcagtggtcctccattttg

SEQ ID NO: 788709 - DNA, 589 bp, Homo sapiens
agtctttctctgaataaacaatattcttctgggaacttaggccattgccatcatttcagttatcatctacctgtagatttgtcttcagtgtcttgaattgtacttactttcgctgttaatatttttactgacatttttccctcttaagtttattggggaataatagactgcatctatttaaagtgtataattcaacaagtttatatgtatatgctcaagaaagcaacaccaaaattctaatacaggatatttccatcatcctcaaaatattctatttgccctttaaattcttccccgcattaatccttgctcaatacagctgawctgcttcttgttgatataaatttattttcattttacataaatagaattttacagattgtgttcttttgtagacactggcttccttcaccagcatacttgttttaagattcatccgtgttattgggtgtatcagtacttcattcctttttatcgctgaatagaattccattatatggatacacgaaattgtgtttatacattcatttatttatagagatttgggttgtttccaattttggggtatagtaaataaagatactatgta

SEQ ID NO: 788710 - DNA, 604 bp, Homo sapiens
aaaaggataaaccaattggcagaccattagctagactaaccaagaaaataaaagagaagattcaaataagcataatcaaaaatgataaaggtgatattacaaccaataccacagaaatacaaatgatcataagagactcctatgaactcatttatgcacacaaactagaaaacctagaggaaatggataaattcctgaaaacatacaaactcccaagattgaaacagaaagaaaaagaaatcccaagcagamcaataataagtaagtaatgaaattaaactagtaataaaaaatcttctggaaaaaaaaaaaaagcagctcaggaccagatgcattcacagccaaattttaccagacatataaagacaagctactaccaatcttagtgaaactattacaaaaaatttgaggaggtgcaataacaccttctgtgaatccaggatcaccctgatactaaaatcagacaaggacacaacaaaaagagaaaactaccaaccaatatccctgaggaacacagatgcaaaaatcctccacaaaatactagcaaactgaatccaacacacatcaaaaatataattcatcacaatcaagtgagctttattcc

SEQ ID NO: 788711 - DNA, 383 bp, Homo sapiens
gtcatcgcccctgcaaggaaaccaatttaacaactgtctacagaaaaaaagcactttcgtaagaaccaaaaatcaggtgagcactcatagtacctggctttaacttcatgtcaaagacgctactcactaagaaaatggaaagcaggctggrtacagtgcctcacacctgtaatcccagtgttttgggaggctgaggcaggaggatcacttgagcccagaacttctagactagcctgggcaacatagcaatagcccatctctacaaaaaaataaaaaattggacgtatgtagtggcatacacctgcagtcttagctactcaggaggctgagaggacagcctaagcccaggagttcaaagctgcagtgggcagcactgtgaagtg

SEQ ID NO: 788712 - DNA, 588 bp, Homo sapiens
cagaaatgaaaacgtcctatggccttgtcgtcctgctggccccagccttggcctcaactttcccttgtattcttgtctccgtttgcaaacctttgcagccatcaggcctgggagtactggaaggaggctctgtctcccaaactgggttttcaccaggaactcacttccatttcattgtttgttctgcttccctctagacacaacacttacctccaggaatgtacaggccagcgggagcccacgtatcagctcaacatccaygacatcaaactgctcttcctgcgcttcgccatggagcagtcgttcagcgcagacactggcgggggcggccgggagagcaacatccacctgatcccgtacatcattcacactgtgctttacgtcctgaacacgtcagtaccctgtgtcccaggggcggcatctcgcagacccaccctgcatccctctgcccgagatcccctcagctttttcatagcctctcatgctagttccggagcaagcgtctggcctaaggcagcctttttgccgaggtggggatgctcatctgcattcttttagggccatgcagaaaaagcaataaagggaact

SEQ ID NO: 788713 - DNA, 652 bp, Homo sapiens
aattctgctgagaaggcagtggacattgttagaggcagtctccccstgcctgtcgctccccatattccaaggaactggctggtctttaatcctgaactgaatcattggattaagtagcaacgatactggttagaaacaatggggtgtggtgagcaacttggattatcccaggatttaggtgatgtcagggtggctgcatgctccatcttagacattaccattgcttgataccaacttcctagcagcttgctgccatttaacacagcacatgtttgacaagttaccgtgtttgactggtttaggtctgctggcttttaagaaatttctcctagtgggaatgtaaagactgaattaaaaccttgtttcctacctcatttattaggttccatcaaattccaagagcttgtcggggcccaaacacaagggatacataggaatcctttgcctttctttaagtcactagccttgcatttgccacgtctgccctggcgatgtctcccccggttccattttaccctgatctggaagatgagcactgagagaatcagatgaatttcatggagcatttttgtaaccaataaacttctgggtcccagggctccagaggttcttgcccacagctgcttttttccaagcagaaggctagtcgctg

SEQ ID NO: 788714 - DNA, 652 bp, Homo sapiens
aattctgctgagaaggcagtggacattgttagaggcagtctccccctgcctgtcgctccccatattccaaggaactggctggtctttaatccygaactgaatcattggattaagtagcaacgatactggttagaaacaatggggtgtggtgagcaacttggattatcccaggatttaggtgatgtcagggtggctgcatgctccatcttagacattaccattgcttgataccaacttcctagcagcttgctgccatttaacacagcacatgtttgacaagttaccgtgtttgactggtttaggtctgctggcttttaagaaatttctcctagtgggaatgtaaagactgaattaaaaccttgtttcctacctcatttattaggttccatcaaattccaagagcttgtcggggcccaaacacaagggatacataggaatcctttgcctttctttaagtcactagccttgcatttgccacgtctgccctggcgatgtctcccccggttccattttaccctgatctggaagatgagcactgagagaatcagatgaatttcatggagcatttttgtaaccaataaacttctgggtcccagggctccagaggttcttgcccacagctgcttttttccaagcagaaggctagtcgctg

SEQ ID NO: 788715 - DNA, 533 bp, Homo sapiens
gtttggttttgtttggtttggtttggtttggtttttttgagacggagttttgttcttgttgcccaggctggagtgcaatggcgtgatctcggctcactgcaacctctgcatcccgggttcaagtgattctcctgcctcagcctcccaagtagctgggattacaggcaggcaccaccacgcccggctaattttgtwtttttagtagagatgaggtttaaccatgttggtcaggctggtctgaaactcctgacctcaggtgatccgcctgccttggcctcccaaagtgctgctattacaggcatgggccactgtgcctggcccacatttgtagctgagatcactcctgtcacctgctcccgagcctgctccagactcggctgtgcaggaagaccttccccgccgggtctctctttgctgctcttgccgtgctattgggataagctctgttgccctgagtgagtctgacttaccgcagccagcttataacaggacactcctctccggagagaatctgagtttttgagttggttcct

SEQ ID NO: 788716 - DNA, 588 bp, Homo sapiens
aaatgtatttcgtatggttcctattgggtctacgtaatatcttattgcctgttatgtctctacccatcataagtagaggatgttgacttcctgatcatttggactttgtttcatccagttgacatttcacaaatgtgaaaactgsctacagaaggtcaggaattggaatcttataaaaatgctagccttaatatagtttttaatcttcccttttattattttaaatataaatcatagttttcatttcctctctttcattatgtgttgtgattgaggttctgactgaaaacatttttcatagatcctgggtcacgttttagtatatggttgccatagttaccacgtcaccaagaatcataaaatctgcaccaaaaccttttttaatgaagtttctgttgaactatctgcattagaagtttccttttactgtagagaaaaaatgagtttataattatcatgcttcatttcctaccagaatactcattgtgatctttggtaattattctttaatgtttgtgccttctggcagattggctaatatagtgcctagttcagtacctggcctgtagtggctcagaactgaatgaa

SEQ ID NO: 788717 - DNA, 620 bp, Homo sapiens
gcgatgcccctaaagctcttgcccctcagaaggctagatgaaagaggggcattggggagtgagtaacagagccgagaggactgctaacagcaccagggtttctgatgaaaatgcactcgccagagctgtgtttctttattcgaaatcacacggttttactcaacagggctcctagcccttctgtctctgctcctggtgcgtaagggcggtgtgtggggctctgcgcctgaaaccgctctctcggaaggtgggaagatgcccacgtatccattcctctccgcgtacagattcgctcccacacgcccgggcgggtgattccggagggccgcgcggggctgtgtgcgcgggcgggggcgggatgtgtctggagggggcagagcgccctctcccggccccggagggcccacgcggaccggctgagcgtcccaccagccggttctgcatccactacccagatctscgcgccctggtgggagcaccgcagccccgggtcggcccttcgaacgccgagcgtctacccgcggagaccagcgcaggaggcgggcccgcgcgcaaggaggcgggcgacagggtggagtcgccgcagctggcagccgcacggctctacctgttgcagcgtc

SEQ ID NO: 788718 - DNA, 622 bp, Homo sapiens
tgcataaaataaaagtatgaaattttggatttcaccatggttaaacacagtgcacatctttgtgtacgtttagttctaacaacaaccccataagattggtactattaatactctcatgttgcaaacaaggatcctgaggctccaagagcttctgtgcyccgtctgaagccacccagctggaagcagtgtggcatctcccttcaaaccttacactctgaaccaccacttctttgccttttcttcctttagggtcctcgttgtgggaaggatcgccagttaaagtgaccacgtgtggtctcttttacagtgtggtggcccttaggtgacctaggatagtctaagaagacagaagtggtctggttagcagaatctcaggggaggctgatgatgtctgtgctactacgggtgtaaggtttgggtagcgtgctgcctaccgcccaggagtccatgcaaacagagacttctgcctcccaccggcagtcctctcaaagctgcaacctctctgccatcaccatgatgaggggtacccgcccccaggactttcatctccaattcagacatatttgatcccagatgtcacttcctgactttgcctattaactcttggcatgttggcaccaag

SEQ ID NO: 788719 - DNA, 622 bp, Homo sapiens
tgcataaaataaaagtatgaaattttggatttcaccatggttaaacacagtgcacatctttgtgtacgtttagttctaacaacaaccccataagattggtactattaatactctcatgttgcaaacaaggatcctgaggctccaagagcttctgtgctccgtctgaagccacccagctggaagcagtgtggcatctcccttcaaaccttacactctgaaccaccacttctttgccttttcttcctytagggtcctcgttgtgggaaggatcgccagttaaagtgaccacgtgtggtctcttttacagtgtggtggcccttaggtgacctaggatagtctaagaagacagaagtggtctggttagcagaatctcaggggaggctgatgatgtctgtgctactacgggtgtaaggtttgggtagcgtgctgcctaccgcccaggagtccatgcaaacagagacttctgcctcccaccggcagtcctctcaaagctgcaacctctctgccatcaccatgatgaggggtacccgcccccaggactttcatctccaattcagacatatttgatcccagatgtcacttcctgactttgcctattaactcttggcatgttggcaccaag

SEQ ID NO: 788720 - DNA, 622 bp, Homo sapiens
tgcataaaataaaagtatgaaattttggatttcaccatggttaaacacagtgcacatctttgtgtacgtttagttctaacaacaaccccataagattggtactattaatactctcatgttgcaaacaaggatcctgaggctccaagagcttctgtgctccgtctgaagccacccagctggaagcagtgtggcatctcccttcaaaccttacactctgaaccaccacttctttgccttttcttcctttagggtcctcgttgtgggaaggatcgccagttaaagtgaccacgtgtggtctcttttacagtgtggtggcccttaggtgacctaggatagtctaagaagacagaagtggtctggttagcagaatctcaggggaggctgatgatgtctgtgctactacgggtgtaaggtttgggtagcgtgctgcctaccgcccaggagtccatgsaaacagagacttctgcctcccaccggcagtcctctcaaagctgcaacctctctgccatcaccatgatgaggggtacccgcccccaggactttcatctccaattcagacatatttgatcccagatgtcacttcctgactttgcctattaactcttggcatgttggcaccaag

SEQ ID NO: 788721 - DNA, 563 bp, Homo sapiens
tcggtggtgtaaccctagtgctcaggttcaacatggctgctggtgtgctggccatcacgtcgacatgctaggtagtaggatggaggaaagggagagcgagggggtgtcccttcccttttgaggcactgtctttgggcagtttctctaagaaacagactctgggctaaggatttgggaggaaatgatttatcaaggaagtgctcccagaaaaaactagtaggagtgtgagggaattgaggatgagaaaagggaattgaggatgagaaaagggaaaagtcaaatgaggttattttatggagcataaattacaccttagaatttggcccaccttgaggcaaaggaastgggtttttatactcccacaccagccaatcattggctgtggctggtggggtagaggggcctacaccacccaggtctcacctgtgtgcagtcacaggtgtgagccattagcagcagagcctgcaactgctgggagatggactcacaaggctcaaggggtttagaggaatctggatggggcacaaatagtgtctcctataaggggcttcccagaaattcca

SEQ ID NO: 788722 - DNA, 563 bp, Homo sapiens
tcggtggtgtaaccctagtgctcaggttcaacatggctgctggtgtgctggccatcacgtcgacatgctaggtagtaggatggaggaaagggagagcgagggggtgtcccttcccttttgaggcactgtctttgggcagtttctctaagaaacagactctgggctaaggatttgggaggaaatgatttatcaaggaagtgctcccagaaaaaactagtaggagtgtgagggaattgaggatgagaaaagggaattgaggatgagaaaagggaaaagtcaaatgaggttattttatggagcataaattacaccttagaatttggcccaccttgaggcaaaggaactgggtttttatactcccacaccagccaatcattggctgtggctggtggggtagaggggcctacaccacccaggtctcasctgtgtgcagtcacaggtgtgagccattagcagcagagcctgcaactgctgggagatggactcacaaggctcaaggggtttagaggaatctggatggggcacaaatagtgtctcctataaggggcttcccagaaattcca

SEQ ID NO: 788723 - DNA, 676 bp, Homo sapiens
actgaggtgcatcttgggggctcggatccagcagcacaaacatggctgccacacgaagtactcagggaaggggagtgggagatgaaactcaaaccttgttttctatattttgttctacctcttaccgtaaaccctccttcctatacacccagaaatgcctctgcccaatagaaccagctatcttagttcatcctgtgttgctataacagaactgagactgggtaatttataaagaaaagaggtttctttagtttatagttttggaggctggaagttcaagggcatgaccctggcttctggcaagggcttctgtggtgcatcttaacatggtgaaggtcaaaggggaagcagacaggcatgaaccccaggggyattctggctttataacaacccactgtcaagggaactgatccattcccatggaaactaatccagtctcaccaaagcgagaactcactcaatgccacaagaatgacatcaagccattcatgagggatctgccccctgtgacccaaacacctccctctaggccccaccttccaccaccaccacattggggatcaaatttcagcatgaattttggtggggacatattcaaaccatagccaaacaatagcaccagccatctcattgactgccacaaactgtattccccatccctgatgggagaatattc

SEQ ID NO: 788724 - DNA, 551 bp, Homo sapiens
acctgcctgttttttcagtcccacctcagccttccaaagtgctaggattacagatgtgagccactgtgcccagccctttgcccgttttttaacggggtggttttttgtttgttgaattaattttcttatagattatgaatattagacctttatcgaatgcaaagtttgtgactattttctctcattctgtagggttgtctgtttactctgttgtttcttttgttgtacagaagctctgtagtttaattaggtctcacttttcaatttttgttgtcaactttgtcaaccatcaggtggtcrtaggtgtgtggctttatttctgagttctctgtcctgttccattggtctatgtgtctgtttttgtaccagtaccattctgttttggttactgtagtgtgtctgtggtttctgcatccatggattgaaccaattgtggattgaaaatatttgaaaaaaaaaatgcatctgtaccaaatatgtgtggacttttttccttgccattattccttgaataatatgacaatcatttacatagtattaggtattataag

SEQ ID NO: 788725 - DNA, 551 bp, Homo sapiens
cgggggctcatgcctgtaatcccaacactttgggaggctgaggcaggcggatcaccaggtcaggagttcaagaccagcctggccaacacagtgaaaccccatctctactaaaaagacaaaaaaaaaaattagccgggygtggtgttgcgcttctgtaatctcaactactcaggaggctgaggcaagagaattgcttgaacccagaaggtggaagttgcagtgagcagagatcacaccgctgcactcctgcctgggtgacattgtgagactccatctcaaataaaacaataacaacaacaacaaaaatttattttacctgaagttaacaataataatgtcatatgcaaagtttgccatttttaaatttttattttactttaagttctgggatatatgtgcagaacttgtaggtttgttacataggtatacacgtgccatggtggtttgctgcacttatcaacccgtcatctaggttttaagccccacatatattaggtatttgtcctaatgctctcccgttcctttccccccgtcttccgacgggccccagt

SEQ ID NO: 788726 - DNA, 600 bp, Homo sapiens
ctctagcagccactgatctttttactagctccatagttttgccttttccagaacgctgtagagttggagtcatacaatatataggctttttggattggcttctttcacttagcaataagcatctaaatttcctccaagtcttttggtggcttgatagctcatttctgtttattgctgaataatatttcatcatatagatrcagcacaatttgttatccattcacctattagcaattcttgattgtctacaatttttggcaattatgaataaagttgctataacatttgttaggtaacatatgagttttcaactcatgcaggcaaataacaaggagtgcaattgctggattgtatggtaagactatgtttagtgttgtaatacactaacaaactgtctttcaaagtggctataccattttgcatttcaccagcaataaaagagagttccagttgctccacatgctcaccagcatatggtattatcagtgttttggattttagtagtttaagagtgtagtggtatctcattgttatttaaaatttgcaattccctaatgacatatgatgtagagcatctttacatatgcttgtctgtcatct

SEQ ID NO: 788727 - DNA, 611 bp, Homo sapiens
tgctctgctcacatccttttgccaggatcctcttagctgcagagatgtctgtgaggttgtctctgccaggcacagacatgctgcttgactatccaagccctcagaggacctccatgctccttaaggaagagaaggcagtgtccctctccccactctactgctgtttatcccctggactctacttagtcttctagagtcttggttgaatttcatttcccattgagctatgtagtcccttgagctcaaattttttggtgggggaagaggagttagttattcctaattatcttgttttttctttgacctcttcatagaaaacccctacttttctgagattccaaaacaaaagctgtcatatacaccaaacctataggagccactggtcacaaaaatagggatatttagagtcagtcttagtttggattataagaaccacttttagtgagtgaaaastacttgggacacttagaagcagtgattatcggcaaaagaaaaactggatgtggtcagatacgtgctaagactttggaaaaacagatttcaaacaattcgggaaaaaagtctaaagtggacttgagaagggaatatccagagatttagtttcaacccta

SEQ ID NO: 788728 - DNA, 540 bp, Homo sapiens
cgctggtccttttccacactactatagctgatgctttctggaaagcaccacctcctggcaggaggccaaccagcacaaaaatagatcattaaaccaccaaagctaaggaccctcatggagaccattgcacacccccaccacctccaccggaacagatgctggcatccacaactgagagacccatagactgttcacawcacaggactctgtgcagacaacccccataccagcccatagctgggtagacttgatgagttgctagacccagaagagaggcaacaaccactgcagttcaactcacaggaatccacatccacaggaaaagggggagagtacaacatcaagggaacacaccgtgggacaaaagaatctgaacaacagcctttggccctagaccctccctctgacagaggctacccaaataagaaggaaccagtaaaccaactctggtaatatgaaaaagcaaggctctttaacaccccccaaaaaatcacactagctcaccagcaatggatccaaaccaagaagaaatccctgatt

SEQ ID NO: 788729 - DNA, 540 bp, Homo sapiens
cgctggtccttttccacactactatagctgatgctttctggaaagcaccacctcctggcaggaggccaaccagcacaaaaatagatcattaaaccaccaaagctaaggaccctcatggagaccattgcacacccccaccacctccaccggaacagatgctggcatccacaactgagagacccatagactgttcacaacacaggactctgtgcagacaacccccataccagcccatagctgggtagacttgatgagttgctagacccagaagagaggcaacaaccactgcagttcaactcacaggaatccacatccacaggaaaagggggagagtacwacatcaagggaacacaccgtgggacaaaagaatctgaacaacagcctttggccctagaccctccctctgacagaggctacccaaataagaaggaaccagtaaaccaactctggtaatatgaaaaagcaaggctctttaacaccccccaaaaaatcacactagctcaccagcaatggatccaaaccaagaagaaatccctgatt

SEQ ID NO: 788730 - DNA, 628 bp, Homo sapiens
gggagttgatttttcagcaaagcttcagagggcaaagtggaactttccccttggctcctaccttcttaatgaaacgaattagaaaacatgtatttgcttgggcatccaattacgatgtaaagtgaatacattcataaaatgaatcacctttcagtttagcagattttcccgggactcttatttagatttttaatttgattcattaaagtacctgaagaggtagagtaagctgaagttacaaagaagccaaaactgagaggcaaaaaaaaatttggttatcaaacagaagagcagagaataaggaagccaacaggtacagggaagggcaggaaaaagatggacaaaagccaatactcagtgactagctgagttccaytagtaacaaagaactctagttaatgtccaagggttccaaacttcttcaggtcaagaatggacaatctcccaagtgaaatctctctgaggcccggcaatgccaccattcctgctcttgaacttccatgaaattccatttcctcattaatcccatttcatgaacaagtccaatggaactggaatgcttctcaaatcaaatgggaaattccttaattttacgtaataatttacttgtaattttttttaccccaat

SEQ ID NO: 788731 - DNA, 615 bp, Homo sapiens
aatgcctaacaagtcataaattcctgattaatttgggccattataataaataatgccctgtcattactaaattttttgtttaataaatgcttgctatacttttttttttttaagacagagtttcactcttgttgcccaaactggagttcaatggcatgatcttggctcactgcaacctccgcctcccaggttcaagcaattctcctgcctcagcctcccaagtagctgggactaaaggtgtgcaccaccatgcccagctaatttttgtagttttagtagagatggggtttcaccatgtttgccaagctggtcttgaactccttacctcaggtgatctgcccacctcagcctcccaaagtgctgggattacaggtgtgagccaccacgcccaacctagtaaatgcttgctatacttattttttaattgcacttagaaacaccaagacttcgacttagcctttagaragagatgcaattgctaagtcacttatgtgcttgaagatgcctggcacgatgacactatagcaagaatagctgctgagggtagtcctcttagagaccctaaattaacagccagtacataggtgaatcctgtcaagtagttttaggtatcaa

SEQ ID NO: 788732 - DNA, 642 bp, Homo sapiens
gtataaaattccataaaaaagctgagtagacacgtatatatgttttactttgaaagaacattttccattttagattttcaaattcctcagcccagaataagggaacatcagggaacatacaggaagtggtctcccagtcacaatgaccacatactgcaattgccttgctcttcagtctgggtttctgcttcttgttacagtcatttcagtgggcgtcactcagctgcattgtagttttcaggagcagttgttcaggggggatttggttcattgctggtgtgacatatgaatgacgatcacccaggaagttctgatgacgtggcttctctcaacaatgtttgctaagcttctttaaagcctctttggctcttagggaaggtgtgtttcaaaacctgtaacaggagtcccygcctagaatggctcttcagtgttactccttcctcccagcggaagcagcctttgttttttgttgggttttttttgttttttttgtctgtttgttttgttttttgagatagggtctcactctgtcacccatactggaatgcggtggtgtgatcacagctcactgtggcttggtcctcccatgctcaagagactctctttgcctcagcctcctgagtaactgggaccaaagacatg

SEQ ID NO: 788733 - DNA, 642 bp, Homo sapiens
gtataaaattccataaaaaagctgagtagacacgtatatatgttttactttgaaagaacattttccattttagattttcaaattcctcagcccagaataagggaacatcagggaacatacaggaagtggtctcccagtcacaatgaccacatactgcaattgccttgctcttcagtctgggtttctgcttcttgttacagtcatttcagtgggcgtcactcagctgcattgtagttttcaggagcagttgttcaggggggatttggttcattgctggtgtgacatatgaatgacgatcacccaggaagttctgatgacgtggcttctctcaacaatgtttgctaagcttctttaaagcctctttggctcttagggaaggtgtgtttcaaaacctgtaacaggagtccccgcctagaatggctcttcagtgttactccttcctcccagcggaagcagcctttgttttttgttggkttttttttgttttttttgtctgtttgttttgttttttgagatagggtctcactctgtcacccatactggaatgcggtggtgtgatcacagctcactgtggcttggtcctcccatgctcaagagactctctttgcctcagcctcctgagtaactgggaccaaagacatg

SEQ ID NO: 788734 - DNA, 573 bp, Homo sapiens
agacaaagaggtccataggggaaaggctgaggcaggaatacactgtggttttcaagtatatgaaaagttccctgtcaaggtgaaagaaaacagctattggcaatgatgacagatggatgaagatagaaagtggttaaggagcagaaaggaatggaaagcggtccctagaaggaaagagtaggagatgctgggatgcaacaccaggaaaatacttcagtctccactttctcaaacattaaataacttttccccaaagagaaagagtcagaggaaagttcacatgactcaacaggagtacacctaggcttgtaattctttgagtaacagtttcccactgctatatgacgtgcattcagtggcatttagaactcagcgtgtgtcaggcactgtgccagtcagagtcaagcttctagatggaaagcccccaytttttaggatctaagctaaatccatctttctaactatgcatctttcatgggctattaacattcttctagcaccaccaaccgacctgggttttaacaggagctggctgtcatgctctccctttgtgctcaacagttaagctctgca

SEQ ID NO: 788735 - DNA, 413 bp, Homo sapiens
gaattcaccttttttagaaatattacatgtaggtaattaaggatggctctccatttctgcagtgtgatatagctgtgaacatattcatagtaatgaattcatttcagttttccacattatgaatattttttatgaaagtgaggggttctaaggacagatggaaaattctttaattttgaatcctagaattgcagaaccagttgagrcttgagaggtcattcggtcttaccatatttatttcattttttatctttatttttattatttatctggtatttatcataatcaagatgatgacgttaaatcgttttcctttctgctcattcagcttgagaattgtaactacgcggtagaattggggaagaatcaagcgaagttctccctggttggcatcggtggacaagatctcaatg

SEQ ID NO: 788736 - DNA, 632 bp, Homo sapiens
ttcttccagaaagagatttggaaaggcggcaagcagattcttccagaaagagatttggaaaggcagtaaagaaaagcaaagttgaaaggagctctagatattgaatgggctctggctaccaggggctccttgttcatgtcttagggcatcttcgctgacattgtgaagctggctttactgttttcctcattttataggtgaggacatcaaagctcaaktaacttcctaagagtatggctagtaattgtatgtgatggtccacaaatgggaggaaaatgccttttacctgtggggtgaggctgtagagtgtagtgtatctataggtcacttagctgttaatatgaagtggccagttacatagcccaggggtgcttctctccgtaaaatagctgctgctccagcccattacattaggctgtggcttctggggtgttcttatggggacaaggtttgacaagcgatgctggggttcactattagaaaggtttggcaattcttttgctccttgtaacactcggggctcattttctcctgtcttcttagtaagttgttgcagaattgattaagtaaaagaggccacataatgtactgaaagaaatgtcatactagccccacattccttttatgtgaag

SEQ ID NO: 788737 - DNA, 540 bp, Homo sapiens
cagagggtaggatatggcctcatactagacaaaatgttatttgatgctactttcaagatgataggggatgggcctggatttaattgatggctattatggtgacctttaaataaatgagattcaaagtaacctgatgtctttactgcttgaaccagcttccatgaaatagtattcctattgggggtgggcctatcattccatatggtcaaggaaacatctttttgaacagagatcctgtaatcatccttacaaactgcacttcaacattggattggattagccagatttgaggaactcactttttacrtcttcataaatttaaaatgttgaaaaagtcagaggcaagggaagacatttatagtacttcacggtagatctccctcaacatgggctatatatccattagtcaatattctatagctattgttctgcaataaaccagacaagatcctactgtattactacccttttattcttggccctaccttccccaaggagttacacattttctagatagtctaaattaagagcaactctcat

SEQ ID NO: 788738 - DNA, 527 bp, Homo sapiens
aaataataaggaatgtgctggtgagatgagagggttaccagcatcactgagaagcttgttagtggctttttcacagtcaaaggagatttttctttaaatttaattttcttgaataaatacaagaataggagttcttttgggtttaaaaagtaaayaatacagaaaagcataaaattagggagaaaatactaaaatttcaccatcctggtgaaaatatgaacatgtttgtgatcatcctttcatacatttctccacatagttatacctccctgggtataattgtatactagttcaatgttgtatctcctattggtactatagaaacctttcttttaaaaagaatctcatttgttcttcccctgccacttacccaaggcttcaattgccatttcccaccctccaaatcaaagctaacaatgtgttgtttatttatgtataattttctcctgattttaacacatataatttttctttatctttctaactttttttccaaaaataggatcatatttcataaagttctccat

SEQ ID NO: 788739 - DNA, 724 bp, Homo sapiens
aaatagccgtaggaggcagacaggatcctaggcagaaaagggcgggtccctggtgaagccccaccttcaagcccaggaaggctgccagtcccgtggaccgcagtgggaactgacggtgatttttccgcacccgcctatggccacccatgaaccaatcagcactcacttcctcccatctgaagcccatagaaatcccccggattcagccagactcttctggagagacatggggaggaccagctgtagagaggagccacccactccagggtctcctctctgctgagaackaacactcatcaggacaccctggctgcagagaggagctacccaccgcgagtctcctctgagctgttctattactcagtaaagctcctcttcaccttgctcaccctccgcttgtccacgtacgtcattgttcccgggcgctgaacctgccaaatggtggaggtgaaagagctctaacacaaacagagctgaaacacgccccttgcttgccacgttgtgggtgacaagaaggagagaagagctgcagccttttggggagctcagacctaagaactccccgaggcaggactatgacaccctctttagggctctgtggttcctgacgtctccaaacttctgggtgccaccaccttccccggtgccagccattgaagctgcttgagggacacctggtccagccacagccttgcagggagccgaaagatgcccaccctgccgc

SEQ ID NO: 788740 - DNA, 724 bp, Homo sapiens
aaatagccgtaggaggcagacaggatcctaggcagaaaagggcgggtccctggtgaagccccaccttcaagcccaggaaggctgccagtcccgtggaccgcagtgggaactgacggtgatttttccgcacccgcctatggccacccatgaaccaatcagcactcacttcctcccatctgaagcccatagaaatcccccggattcagccagactcttctggagagacatggggaggaccagctgtagagaggagccacccactccagggtctcctctctgctgagaacgaacactcatcaggacaccctggctgcagagaggagctacccaccgcgagtctcctctgagctgttctattactcagtaaagctcctcttcaccttgctcaccctccgcttgtccacgtacgtcattgttcccgggcgctgaacctgccaaatggtggaggtgaaagagctctaacacaaacagrgctgaaacacgccccttgcttgccacgttgtgggtgacaagaaggagagaagagctgcagccttttggggagctcagacctaagaactccccgaggcaggactatgacaccctctttagggctctgtggttcctgacgtctccaaacttctgggtgccaccaccttccccggtgccagccattgaagctgcttgagggacacctggtccagccacagccttgcagggagccgaaagatgcccaccctgccgc

SEQ ID NO: 788741 - DNA, 632 bp, Homo sapiens
ccacacctgctcactcacacacccctcaccgctcagctcgcccttggcacgaatgagacccaagccagtagcacgagatgagtgcagcctgccaggccgagtgggctcagcgggcctgagcaaagcttaggcaaaggcgccactgaccacagaggtttctgctggtgaagcgaccccagggatcctgtaacaatatcatggtacaaaattgatggctccttgtttgttagtgttttccaagaagcagaggtyaagactagactggaggagcaagcgatgaggggaatgctgttggaggatagaggcgggagctggagaaggcagagagcatcatcagaccatgtcatagctctgacacctctgcagaaaggggaattttgtttggagaatctcagactatagggcaggtccaaagaaggctgggctaggtcagtctcagtctggcaagaatgggcctgcattaacacttccacaggactcggttactggctggatgcagccctgagaccacatggcctcagcttctagtgggtcaccagggcagccactgaaaacaccagccaactgtatttctctcaaccgaagagctaaatggtgcatattcacgaccaccacatcatggtaaagaggaa

SEQ ID NO: 788742 - DNA, 606 bp, Homo sapiens
acctccattcatattgactctaatttatatcggtgaggttgtccctaatgactgcccttctcaccctgacacctctgccctcctattagacatcctaccctctacccaaactgcttgctgaatctttgtaagattaaattatttaatccacaaatatttatarattgcctatgatgtttcagatcctggaaatacaaggatgaacaaaatatagcccaaggatcttatagctgagtattttgctccaacaatgtgaacctgatttgtgtagcccaaagaaacataatcaataagggctttttaaatcgacatttaaactccattcttgcctgcctaaaactaattcagatcatctgactctcttagtacttcaaagcactggaggagggaaagtaaaataaaatatttacctttcaacaattgtgaaggtaggttttatattcaaaaactaaaccacccaaaggcaaattaaaatcttagcttttaagtctctcactcttttctacaactcaataaggatttcaaaaatcttataatctagtctcagtggaaatccactacactacactttgagaagcttgaagccagtcatttctttctaagctt

SEQ ID NO: 788743 - DNA, 640 bp, Homo sapiens
caagtctagcaagaattttagacattcacattcagatataggagcttcaataatccctaggcaaacacaatgcaaaaatgtcttccccatggcacattatagtgagactgcctaaagtcaaagataaaaagcataccctttaaaaagcaagagaaaagcatctggtcaccaataaagaaaycccatcagactaacagtggatttggatttctgtgggttttttttgttttttgttgttgttgttttgtttttgtttttgagacaaggtcttgctctgttgcccaggctggagtgcagtggcacaatctcagctcactgcaacctccacctcccatgttcaagcgattctcctgcctcagcctcccaagtagctgggattacaggcccacaccaccatgcccagctaatttttgtatttttttagtagagacggggtttcaccatgttggcccaggtggtctcgaactcctgaccttgtgatccacccacctcggcctcccaaagtactgggattacaggcgtgagccactgtgcctggccttaacagtggatttcttagcagaaatttcacaggctaaaagagaatgaggtgatatattcaaagtgctgaaattaaaaaaaaaaaaaaacaaaaaaaact

SEQ ID NO: 788744 - DNA, 640 bp, Homo sapiens
caagtctagcaagaattttagacattcacattcagatataggagcttcaataatccctaggcaaacacaatgcaaaaatgtcttccccatggcacattatagtgagactgcctaaagtcaaagataaaaagcataccctttaaaaagcaagagaaaagcatctggtcaccaataaagaaaccccatcagactaacagtggatttggatttctgtgggttttttttgttttttgttgttgttgttttgtttttgtttttgagacaaggtcttgctctgttgcccaggctggagtgcagtggcacaatctcagctcactgcaacctccacctcccatgttcaagcgattctcctgcctcagcctcccaagtagctgggattacaggcccacaccaccatgcccagctaatttttgtatttttttagtagagacggggtttcaccatgttggcccaggtggtctcgaactcctgaccttgtgatccacccacctcrgcctcccaaagtactgggattacaggcgtgagccactgtgcctggccttaacagtggatttcttagcagaaatttcacaggctaaaagagaatgaggtgatatattcaaagtgctgaaattaaaaaaaaaaaaaaacaaaaaaaact

SEQ ID NO: 788745 - DNA, 531 bp, Homo sapiens
aaactaaagagcttttgcacagcaaaagaaactgtcatcagagtgaacaggcagcctacagaatgggagaaaacttctgcaatctacccatctgaaaaaggtttaatatccacaatttacaaggaacttaaacatatttacaataaaaaaaaacaaaccaccccatcaaaaagtgggtgaaggatatgaacagacacttcttaaaagaagacatttacatagccaacaaacatatgaaaaaaagcttaacrtcactaatcatctgagaaatgcaaatcaaaaccacaatgacataccatctcacgccagtcagaatggcaattattaaaaagtcaggaaacaatagatgctggcaaggctgtggagaaataggaacacttttacactgttggtgggaatgtaaattagttcaaccattgtggaagacagtataaggattcctgaaggatctagaaccagaaataccatttgatccagcaatcccattactgggtatattcccaaaggaacataaatcattctactataaag

SEQ ID NO: 788746 - DNA, 634 bp, Homo sapiens
cactgccaagcattaccggcagccagcaggttttacagcaacagtgccaagaagcccagcctcaggatctgcaatctcagacagaatcgcttttgcggctggcaaggtagggctaggcagcaggcacaggtgccatttcacagaytacctcgggccagcagctgccctttagacaccaaattaactcaccaaagttgtctttccagcaaagtggtttaatgtgaatttgaagcatttagtagccttgttttgggtgtctgtacctttcagtggatgggattgtctaagtatgtacacaagaatattattgttaaattcctcaaagaaggtgataggggacttttcaagtcctgtataccattaggttatggattgttttgttcatgtacacagctcatttactgagtacctcacatgggccagacactaatctgctaggagagatgaatggtaacagggaccacactacagagatctggaccaaagctcagaggaagggctcactgattctccccagcctccagaacaggatgcctgaaaccatgatgattgttgcgataagtctgagggtgtcattttattattgatctatgaatttggctgtcttgtcttttgaacatttcatctcgtggtg

SEQ ID NO: 788747 - DNA, 634 bp, Homo sapiens
cactgccaagcattaccggcagccagcaggttttacagcaacagtgccaagaagcccagcctcaggatctgcaatctcagacagaatcgcttttgcggctggcaaggtagggctaggcagcaggcacaggtgccatttcacagactacctcgggccagcagctgccctttagacaccaaattaactcaccaaagttgtctttccagcaaagtggtttaatgtgaatttgaagcatttagtagccttgttttgggtgtctgtacctttcagtggatgggattgtctaagtatgtacacaagaatattattgttaaattcctcaaagaaggtgataggggacttttcaagtcctgtataccattaggttatggattgttttgttcatgtacacagctcatttactgagtacctcacatgggccagacactaatctgctaggagagatgaatggwaacagggaccacactacagagatctggaccaaagctcagaggaagggctcactgattctccccagcctccagaacaggatgcctgaaaccatgatgattgttgcgataagtctgagggtgtcattttattattgatctatgaatttggctgtcttgtcttttgaacatttcatctcgtggtg

SEQ ID NO: 788748 - DNA, 603 bp, Homo sapiens
aagcttgagaaaaatgaattcagcttttctttgtctgaaaacatcttattgcatattcatcttttagtgatataagatttattctttatcaatgaagagtttataagtttaaatagttgctagaaacacagtcttaaggcagaaatgtgcaaaatagcaaacaaattctttaaagcktataaccaagggccgggtgcagtggctcatgcctgttatcccagcactttgggaggccgaggtaggcggatcacctgaggtcaggagtttgagaccagcccgtcctcttggtttttatacgatggccctccttgtcttaccattcttgacttaaagtttactttatctgatataagtatagttgctcctgctcttttttggtttcaatttacgtggaatatctttgtccatcccttcattttcagcctgtgtctttatagagaaagtgagtttcttatagacagcatatagctggggcttacattatttatttatttacttatattcaaggtttttattgataggtaagggtttcctattgtcattttgttattcattttctgcttattgtgtgaatactttcttcctttttacctctcttactac

SEQ ID NO: 788749 - DNA, 609 bp, Homo sapiens
ttcaattttcttacttgaagcagtgagttttatattttgaaatgttttcttgttacaccttagggtccatttcttccagatggaaggactccctgtagcatttttttggacaggtttggtgtttatgaattccttcatcttttgttatttggrgaaagtctttatctctcctttgtgtttgaagagacactttaatgggtatagtagtctcagttgagaggttttttgttttttttttttcttcaacactctctcctagcctgcagggtttctgctgaataatctgctgaaagctgtactggggctctgttgaacgtcacatgtttctttattctttgtgcttcaaatattctttctctttgatttttgctaatttgattatgatgtaccttgggaaattcctcctgcatttaatctaattggtgacctttgaatttcctgtacttgagtgctgctggttatctccagatttgggaaaatttcagccattatttccttaaatatgttttctaggtcttttttttctaaatttagcttttaagttcagggatacacatgcaggtttattatataggaaaacttatgccatgggggtttcttgtacagatt

SEQ ID NO: 788750 - DNA, 609 bp, Homo sapiens
ttcaattttcttacttgaagcagtgagttttatattttgaaatgttttcttgttacaccttagggtccatttcttccagatggaaggactccctgtagcatttttttggacaggtttggtgtttatgaattccttcatcttttgttatttggggaaagtctttatctctcctttgtgtttgaagagacactttaatgggtatagtagtctcagttgagaggttttttkttttttttttttcttcaacactctctcctagcctgcagggtttctgctgaataatctgctgaaagctgtactggggctctgttgaacgtcacatgtttctttattctttgtgcttcaaatattctttctctttgatttttgctaatttgattatgatgtaccttgggaaattcctcctgcatttaatctaattggtgacctttgaatttcctgtacttgagtgctgctggttatctccagatttgggaaaatttcagccattatttccttaaatatgttttctaggtcttttttttctaaatttagcttttaagttcagggatacacatgcaggtttattatataggaaaacttatgccatgggggtttcttgtacagatt

SEQ ID NO: 788751 - DNA, 609 bp, Homo sapiens
ttcaattttcttacttgaagcagtgagttttatattttgaaatgttttcttgttacaccttagggtccatttcttccagatggaaggactccctgtagcatttttttggacaggtttggtgtttatgaattccttcatcttttgttatttggggaaagtctttatctctcctttgtgtttgaagagacactttaatgggtatagtagtctcagttgagaggttttttgttttttttttttcttcaacactctctcctagcctgcagggtttctgctgaataatctgctgaaagctgtactggggctctgttgaacgtcacatgtttctttattctttgtgcttcaaataktctttctctttgatttttgctaatttgattatgatgtaccttgggaaattcctcctgcatttaatctaattggtgacctttgaatttcctgtacttgagtgctgctggttatctccagatttgggaaaatttcagccattatttccttaaatatgttttctaggtcttttttttctaaatttagcttttaagttcagggatacacatgcaggtttattatataggaaaacttatgccatgggggtttcttgtacagatt

SEQ ID NO: 788752 - DNA, 644 bp, Homo sapiens
caaatcagtcaggaataaatctctaagatatttttgacttttaaatgactacatagaaaataactgtaaaaagccttttctttcctaaacaagaacacttaagagtatgctaagacaattacatcatctttatggagctcaaccttagcaaccgtttcytgttaacatctttacctaaaataaaactcttcattaccaagaagaaaaagcctagtaaagaggctcagtagcttaaagtcacaacacttaacgtgttttggacactgagttccaatgtatgactttaccttcaattttcccttgttaaaagcacaagcagacacttgaaaagctgaatgtcccatatcaacaaaaaccactatccgaggtttctcatccaggcttgggagatcctgcttataaattccgtaattcaaagcaactacaaaaaataagtatgtttcaattctttggttcacattttcttaggaatctcactgttacataaaattacacatgcaggaagcttgactattaacttgaaacaattaaaggtgaacacattacattccttttatacctgacttcacactgattttcttggaattaattattactctctttctgatttcagaacaatgctctatcacttttcaatatatgga

SEQ ID NO: 788753 - DNA, 616 bp, Homo sapiens
actgacttgagctattctagttgtaattcttttttgactgccttctagtgcagcacttcaggatactattcaggaaaaaaagtatctaacaacacattcgtagaatcatttaagtgcaaagtacctaagagagagtttagtacggtgatttttcaaagttgtccaaaatatttgtagatgcttgagagagagacatgagcaagagcaaaggtggatctctgctcacctttcaaatcagaacacttcgtccatcagtttctcagctcaccaggggaaaaaaaatgtggcaaaaaaaaaaaaaaggaagggagagagtggggagggagaagccactgacttataacttaattctttaattttgccagagattaaaacacttcccatcttgcaaggacagcaggagaaatgttagttcttctgcctcattcattcataaaggcttgttgctgactgatctcagccggccacgttgctcatwctatagagcaaagaccatgctgtatttaagtccaaaagcataccccacaacctatcaagaagtgacccaagacacctgggtgagcagaatttacctttttggtgtccaaataaaagatgacttttgtccatttcaagt

SEQ ID NO: 788754 - DNA, 501 bp, Homo sapiens
catagtgcaccctaacaatattcacaggaaaacgatatacagtttcttaatatgatcagtcaatttcctgacaggttgctgatttttaaaggtctcaggttcattttcagtgatgactagtgttttcttcttctttcgcccccaggtgttaaaccacagatmgtctgaagaataaaagtgatgcgggtaggaaaaacaagatgtttctccctcctctaataagagacaagaagagtcacctgggaaagaaaagtgacataaagaaagtcactgtatttggagaaaacttttattaaatttctacctagtgccaagccctctccaaaaacaatcttgtttgagcctcactcagtgaggcaaccatcttcatctccgacttacaggtaagaaaacttaacctaaaaaggttaagaagcttgtcatcaagaaatggtacaaccaagcctaaaatccagactgactcttaaattgaggctcattgagttgacctacgcgttccat

SEQ ID NO: 788755 - DNA, 462 bp, Homo sapiens
cttcaatttaatagtatccaattcaattcattcatggataaggccataatttttatttttatttctggtgactttatgaagagattatcgaagtttcctttttttgagaatacaaaaccagacaaaggtaattcctcatttcggtctagtttttctgatgatatgttctttgtactatttacaaagacatcctttttaatacaaacaaaagatcatctggaagtatatgttttagagtgacagaaaataccaataaaaatacgttcaataataatggcataataccargtaacaatggctcattccttaaggtcactgtgatgtaatattgctgtgtttccacacaacattttgcattttgacattcctgaaaatcatcagtacagttttcagcaatagcaagttttactatagcattgtagcaattttaaccggcacaaattttgatttctacggtcatgc

SEQ ID NO: 788756 - DNA, 572 bp, Homo sapiens
gggtgtccatcctctgaagcattatcctttgtgttacagacagttcagttacgctcttttagttactttaaagtgcacaattaaattattattcgctatcatcaccctgttgtgttatcaaatactaggtcttattcattctttctaacttttttttttacccattaactatccccacctccccactaaccccccactatccttcccagcctctaataaacatccttctactctgtgtctatgagttcaattgttttaatctttagatcccacaaataagtgagaacatgcaatgtttatctttctgtgcttggcttacttcacttaatgacctccagttccatccatgttgttgcaaatgacaggatctcatttcttttttatggctgaatagtacttcatygtgtatatgtgtcacattttctttatccattcatctcttgatggacacttaggttgcttctaaatcttggctattgtgcacagagctgcaacaaatgtgggagtgcagatatcttttccaaatactgatttcctctcagtatttggaaaagattgctggatcatatggt

SEQ ID NO: 788757 - DNA, 535 bp, Homo sapiens
agagtagttgatttgtaaggctcttggtgaaacctcagacttgcaggataagaccaccatgtgcgtttcttcaagaacaaagacagttggggcaggggtggggcttgtatatgccttaggtaagatcatctttgtgagtggaggagaggattggagaaatgattagacccacagtgagagggtctatgtgagcaggtacatataaatggagtcttgctagggaacctgcattggccaaagtaaaacttaatattttttgatatataacttttgcattgtttctaatcctmaaccaaattttggatcagaatgaacttccataacaaagacatatatatatgtgtatatatgtatatatatacaggttcaaaatgtgtattcatctaaaatacagagatatatatatatacacacacacatacatacacacacactaacacatacacacacacaaataagggtaagtaacataaaatgctctgctggaggcttaaaaagcaataccgcgtgagttgagtcattttggaaagggtga

SEQ ID NO: 788758 - DNA, 535 bp, Homo sapiens
agagtagttgatttgtaaggctcttggtgaaacctcagacttgcaggataagaccaccatgtgcgtttcttcaagaacaaagacagttggggcaggggtggggcttgtatatgccttaggtaagatcatctttgtgagtggaggagaggattggagaaatgattagacccacagtgagagggtctatgtgagcaggtacatataaatggagtcttgctagggaacctgcattggccaaagtaaaacttaatattttttgatatataacttttgcattgtttctaatcctcaaccaaattttggatcagaatgaacttccataacaaagacatatatatatgtgtatataygtatatatatacaggttcaaaatgtgtattcatctaaaatacagagatatatatatatacacacacacatacatacacacacactaacacatacacacacacaaataagggtaagtaacataaaatgctctgctggaggcttaaaaagcaataccgcgtgagttgagtcattttggaaagggtga

SEQ ID NO: 788759 - DNA, 498 bp, Homo sapiens
agttttttgggatgttcaggccattttgcttgttgactttctggagggccaaagaacaataatacctgtcaattatgaaagtgtttggagaacattagccaaaactttagcagaaaagtgcctgggaaagcttcactagagagccctttcctaccatggcgatgstcctgctcattccactcatcaaacaagggcaattttttgagtttttatagaaaatcattaggcatttaccttacagtccagatttggctccttctgattttttgcttgtttctttctttcctaatcttaaaaaaatctgtaaagaccacccatttttcttcagttactaatgtaaagaagactgcattaacatggtcaaattccccggaccctcagttctttagggattgactaaatggctgaaatcatcacttgcaaaagtatcttgaccttgatagagcttatattgagaaataaagtttgcatttttaaaattttcatcttttaatccca

SEQ ID NO: 788760 - DNA, 641 bp, Homo sapiens
tgttagagtacattaattatattctgggtttttacccaagtacacgagattctttaacatgcggattctttctccaccttcaacctcattcagaatgttctaacactgaaaaaaatgttgtcaaaggataaacatacaagaatgctatggaggaagaataggattcagaggttcctgagagaagrcaaagggctggtttgttgctcttttacctactagaaaagataattaaggccaggtgggatgcatacagtaaaagagggcacctgaacaaacaagcattgaatttggagaatgcctacgagtctgtgctgggctacgttcccaagacagactcagaagttacctgccctgccaggtacctcctaatctaccctctccaaagggaagattttcttcatggctgtaggaagcgcctcttgaaagctccaaatcttattttttttctacatgatgaattggcacagtactaagtttgactcattatattaaacaagaaatttttgatggtggaatggatccagagttccttgaaactgtccaaatggtcccgcataaaggaaacacttcacagtcgtttcagtgtacctacaactaaaaaattggtgtcagtctctagattcaagctgatggttcctgtg

SEQ ID NO: 788761 - DNA, 562 bp, Homo sapiens
tcctctggtctttaccatgacactgttttacacatgtggaaagatgaaggaaccatttgtaagtgatggagctaggattccaacctagactctaggataaacactatattatgtggcctctcatcgtcattggcaagataaagatattggctaccagcaggtgaaattgatgaacctctagtgggagtagagttatattgatrtgtacttcctagcaagttaccacagagatatttgtcaaaaagcagcggcaaagtcttgaaagtagcccccaccaaaaaattctgtattgctttgccttcagtttcaaaaaaggaacacttcctcatgttttcttcattatactcactcaaaaagaaatggagtctttctattgctttaaaaaagaaagcaaattataagaaataatatttttagatcaatcacttgagccccttaagattatacccaggccaggcacagtggctcacacctgtaatcctagttcttcaggagcctgaaatgggagaagtgcttgaggccaggagtttgagaccagcctggtcaacacagtgaaacccca

SEQ ID NO: 788762 - DNA, 562 bp, Homo sapiens
tcctctggtctttaccatgacactgttttacacatgtggaaagatgaaggaaccatttgtaagtgatggagctaggattccaacctagactctaggataaacactatattatgtggcctctcatcgtcattggcaagataaagatattggctaccagcaggtgaaattgatgaacctctagtgggagtagagttatattgatatgtacttcctagcaagttaccacagagatatttgtcaaaaagcagcggcaaagtcttgaaagtagcccccaccaaaaaattctgtattgctttgccttcagtttcaaaaaaggaacacttcctcatgttttcttcattatactcactcaaaaagaaatggagtctttctattgctttaaaaaagaaagcaaattataagaaakaatatttttagatcaatcacttgagccccttaagattatacccaggccaggcacagtggctcacacctgtaatcctagttcttcaggagcctgaaatgggagaagtgcttgaggccaggagtttgagaccagcctggtcaacacagtgaaacccca

SEQ ID NO: 788763 - DNA, 626 bp, Homo sapiens
actcatgattcttacgactgatacatcatccactccaaccaatgttctttgagaggcaggcactgtgctagatgcctcagtgattttcaaacaaattctaagagaaacaaattcatcatcccagttgtcagctgaggaagccgagcttcagaggatctagcactttgatgacaagcggcctccttccccctcatcctgatggataatctctcatctgtgtaccacacaacatcttcgctccactggagaattagcacattgtatctttyttccaaggttgtcttctttcctaccacactgtaagctctggaggccgggcaccattgacatatctattccttacagaagctagcatagtgccgtgcacaacatagatgctcagtagatgcctgcagagtaagtgaataagctgtctttccattttgtttatctgcagatcacgcatcttctatcctcattttatctcggttgcctgttttcagcatagaaaagaagcaccaagttcacggtaagatatatttttctgtagactcagaaaatggagtgggtactaaaagcccttcatcaccactgtgcaatccacataggtaacgaaatgacacctgcaccccatacatttatacaaa

SEQ ID NO: 788764 - DNA, 620 bp, Homo sapiens
ttccccactgagacagtgtttcataacataagagtgacaataggttgtcttttatctaagagcaggccaaaaagtcatacatcctgtccaagatttcaaccagaggcaggggaagatgaactggactgaatatttctaataaaaaactatgggaaacaaaagactgagtaaaataaaaaaaaaccctctatataacataaatgcccattttctcctgcctcagccttctgagtagctgggatcacaggcgtgtgccactatgcctggctaattttgtattttcagtagagaccgtgtttctccatgttggtcaggctggtctcaaactcctgacctcaggtgatccgctcaccttggcctcccaaagtgctgggattacaggtgtgagctactgcrcccagcctaaatgcccattttgtttcttttttttttcccctttattgttttggagacaggggtctcgatacattgcccaggctgacctcacacttccaacttcaatcctcctgcctcaacctcccaagtagctagaagattgatttttaagccacacactgtgcttgtttaatgaaccaactacatctccaggtgagcgtattcaaggtcatggaactggttcc

SEQ ID NO: 788765 - DNA, 483 bp, Homo sapiens
ggtcgatgcatattcttagatcatttgagatacatccttaaaaactgttgagcattgatcaaaatttgttttggaaataaacttgtttttagtgccccagagaagcacattgtttcctaaagtgaagaatcctcattgaagatgaattgtgctaatctggattttcaggttttttacttactgcaataacagatagattgaggaaagtacccttttattttctctggaaagcactgatggatgtaaytgatgacaacttgacccagtagggcagttcgtctgccctcaagagcagctcagctcaaagggcggtgtggggatcgccaagtgtgatggaggcaagtcccaggtgaaagggagctctaattcatcaggattcctctatctttataagagaagctaatttcaaatcacttccttcgttatgactaaatttcaggaaatgaggatcacattattccagtgcagagaactgggctgaga

SEQ ID NO: 788766 - DNA, 246 bp, Homo sapiens
ctcctctgacaatattttcaaataacttgtctttggggtcacagatccttttcttctgcttgataaattctattgttgatactgtattgcattttacatttcacttattgtattttttcagctccaggatttctgtttctttaaaaaattacttcactstctctgtagacttcttgttctgataacttattattttccttattttattgaattgtttatctgtattttctggaagttcactgagct

SEQ ID NO: 788767 - DNA, 642 bp, Homo sapiens
agctttctgctttacccagaatacctgcaattatgcagtaggtcattttagaagctctaagtctttaagtaatgataggcatacttgcgtaatacatagcacattgcctttattttaggattttaatcttctagtatatacaaaaggggaaacccaaattacatgaatttctaaaagggtttgatccaacataagtctgtttagctgtgtccattatagatactttaactagccttctcaattctgttcagtttccagagaatttactctagtttctaaggacatatgagaccatattagaatacttctattcatgccatcatggaaattggctttacttttacataccaaaaaaagtacttggcatataaattggttcatgttgaaaggttatttacaggttgcaaatgagtattaatcacatatctttataaacacttattttagtattaatcaactaaaaatgatttccatttgccacacagaatcagattcagtgccayttcactgccactcaggaggagactacaaaagctatagagacaataacatatactgttttctgaatttagaggtttgttttgtttagttagttagtattttgttttgagcactgattttatgtcagggtccatgctagtg

SEQ ID NO: 788768 - DNA, 569 bp, Homo sapiens
gtagttttttccaattctgtgaagaaagtcattggtagcttgatagggatggcattgaatctataaattaccttgggcagtatggccattttcacaatattggttcttgctatccatgagcatggagtgttcttccatttgtttgtgtcctcttttatttcgttgagcagtggtttgtagttctccttgaagaggtccttcacatcccttgtaagttggattcctaggtattttattctctttgaagcaattgtgaatgggagttcactcatgatttggctttctgtttgtctgttattggtgtataggaatgcttgtggtttttgcacgttgattttgtatcctgagactttgctgaagttgcttatcagcttaaggagatttggggctgagatgacgggkttttctaaatataccatcatgtcatctgcacttttcctaagtgaatactccttatttctttctcctgcctgattgctctggccagaacttccaacactatcttgaatacgagtggtgagagagggcatccctgtcttgtgccagttttcaaaaggaatgcttccagt

SEQ ID NO: 788769 - DNA, 625 bp, Homo sapiens
ctacaccaaaactcaacaagtgatagttccttaaacattagttgcaatgagtctgataccctaccaattaacttttcacagtacatgacattaaaatctattgataagtctcctttgcaccttgaatggatcttttacccatgcatgaatttgcagtatcatgygttggtcatttgaagcatattggttccctgaataatatgtaaatcttccaaattttcactcatttcattatacatcaaaaaattacattagtttatatcaccactgattgcatcaaataagtctttaaatattgggatgctttcaagcttactatgacagatacaagttttgcaaaattcgaatttttacttacaggctgtaattttaggattggaatccaatactatcagctgttttccttgacatgttatacaactgaattaaggtttcatgggacagtaaccacagcttgtgatacatttgaattactgtagtttgtcagtgattctttcaagtaaatatagtgttttttgaaaaaagcacaactcaaacaatcacacaagtgtttttccttgaaacaagcattgaactgcaggaagcagaagaaatgttttatgtctacttcctcttttctttgcac

SEQ ID NO: 788770 - DNA, 601 bp, Homo sapiens
gtatttgtgtttttgttttccattcgtttatgtttctttggttcgtagtgtcagaagacgatgttttttatgacaaactgccctcgtttgaaaggcgctgtgaaacgcctgcaggtatggtgctagccaagtgatctctagagacctagattccaaaaatccaagccattatccatctgaatgctataaacttcatggacatgccctcacctcatgagtgtccagtgcctctcagatgcaccctgtatatttactgttcatcrtggaactcgtgccactgaaaatttttaagtgactatattcaaaaacagcaggttgcatgacagtttctcagtgaagaggttcaaaaaaggtgagatgctattgctttgtgaatttacaaaggaaagaataatttaactgctcagaattacatgtccggtcactgctttttaatttaaaaaataatagagcatcattagtaatcttgttttctctttgatacataggtaaagggtgttttgtgtctggatgcctaaggtgattccaagggaggggatggaagatatgtgacatcttccctgaaatttatattgatatgcaatgctttgtcatttaaaac

SEQ ID NO: 788771 - DNA, 479 bp, Homo sapiens
cgcttgggcattttaaatgtctgaccttcttaagcaggttattaaatacccctacttagtcattggcaagtcacaattatagtcatagagcattcgactttccttaccctgacatagcaataaagtaagaaatgaactggtcaaatttctcacatgcagccacaaagatactaattcattcatttgagagacmctaaaggaaggaaaattggaagatatgaccaattttctggggagcaatggctatgctaaattcacattattcttaagtgggaggtgtttgctaatagcacttaccccactgaaggcccctttcaatcaataacaggaaaattattaagtacccactctgcaaatcacagcattaagtaccaggttggggaaacaatacagaaacattaaaagcagttttacaagactgtcttcattagaaatattaaaaccacgctccttagctattctgagtttttatatatgga

SEQ ID NO: 788772 - DNA, 591 bp, Homo sapiens
tccacatcctctccagcacctgttgtttcctgactttttaatgatcaccattctatttggtgtgagatggtatctcactgtggttttgatttgcatttctctgatggccagggatgatgagcattttttcatgtgtcttttggctgcataaatgtcttcttttgacaagtgtctgttcatatcctttgcccactttttgatggggttgtttgwtttttttcttgtaaatttgtttaagttctttgtagattctggatattagccctttgtcagatgagtagattgcaaacattttctcctattctgtaggttgcccattcactctgatggcagcttcttttgcagtgcagaagctctttagtttaattagatcccatttgtctattttggtgtttgttgctattgcttttggtgttttagacatgaagtccttgcccatgcctatgtcctgaatggtattgcctaggctttcttccaggtttttatggttttaggtctaacatttaagtctttaatccatcttgaattaatttttgtataaggtgtaaggaagggatccagtttcaactttctacatatggctagccagtt

SEQ ID NO: 788773 - DNA, 591 bp, Homo sapiens
tccacatcctctccagcacctgttgtttcctgactttttaatgatcaccattctatttggtgtgagatggtatctcactgtggttttgatttgcatttctctgatggccagggatgatgagcattttttcatgtgtcttttggctgcataaatgtcttcttttgacaagtgtctgttcatatcctttgcccactttttgatggggttgtttgttttttttcttgtaaatttgtttaagttctttgtagattctggatattagccctttgtcagatgagtagattgcaaacattttctcctattcygtaggttgcccattcactctgatggcagcttcttttgcagtgcagaagctctttagtttaattagatcccatttgtctattttggtgtttgttgctattgcttttggtgttttagacatgaagtccttgcccatgcctatgtcctgaatggtattgcctaggctttcttccaggtttttatggttttaggtctaacatttaagtctttaatccatcttgaattaatttttgtataaggtgtaaggaagggatccagtttcaactttctacatatggctagccagtt

SEQ ID NO: 788774 - DNA, 559 bp, Homo sapiens
ggtcactttgtgttatttatatatgtctgccacctttgccaaactttcaactccaggaagcaaagcccattactgcatttttgtcattgttgtacttttggtctttgcttctgcagtgtctagcagaatgttcagccacatcayggccctaccttttgggcacttcctcttccatttcactggatatattatatattgaagtttcccatattccatgtacatcttctttctagtattaggggaatgtacctcagaaatgaacttacataaaatgtctttatttctattagaggatgaagctactataacatgaagctaccataacaatataagggatttacagttgccagaatttgagccatgctgctgttacttatggtcttggaatgtgtctactgtttgttttctactgtttgtcttgctttttagaagtcgattcttttaatgttctgatactgtggaacatatttggtattgttttctctcatattgaaaacacagtggtcttttgttgctgaatttgggctttgatgtttttagcagaaccaatatgaaataa

SEQ ID NO: 788775 - DNA, 559 bp, Homo sapiens
ggtcactttgtgttatttatatatgtctgccacctttgccaaactttcaactccaggaagcaaagcccattactgcatttttgtcattgttgtacttttggtctttgcttctgcagtgtctagcagaatgttcagccacatcatggccctaccttttgggcacttcctcttccatttcactggatatattatatattgaagtttcccatattccatgtacatcttctttctagtattaggggaatgtacctcagaaatgaacttacataaaatgtctttatttctattagaggatgaagctactataacatgaagctaccataacaatataagggatttacarttgccagaatttgagccatgctgctgttacttatggtcttggaatgtgtctactgtttgttttctactgtttgtcttgctttttagaagtcgattcttttaatgttctgatactgtggaacatatttggtattgttttctctcatattgaaaacacagtggtcttttgttgctgaatttgggctttgatgtttttagcagaaccaatatgaaataa

SEQ ID NO: 788776 - DNA, 612 bp, Homo sapiens
ctcttttaaccgctgttgctttaaagtttattttgtctgatacaagaatagctaccccttctcacttttggtgttcatttgtatgaaatgcctttttccacccctttactttatgtttatgtgagttcttatgtggttgatgagtctcttgaaggcagcagatagtagggtggtgagttcttatccattttgtggttctgtatgttttaagtggagcatttcagccatttacattcaatgttagtattgaaatgtgatgtaccattgctttcatcwtgctcattgttgcctgtgtaatttgtttttttgtttgttttttgtttttgctttttaacttgtatttttgcttcataggtcctgtgtgatttatgctttaaagatgttctgtttttatgtgtttctaggatttgtttcaagatttagagctccttttagcagttcttttagtggtggttggtaatggcgaattctctcaccatttgtttgtctgaaaacgactatatcttttctccatatatgatgcttagttttgctggatacagaattcttggctaataactgttttgtttgaggaggctgaagataggtccccaatcccttctagtttgtagg

SEQ ID NO: 788777 - DNA, 613 bp, Homo sapiens
gcgactggcgatgggtgggaccctagaacttccaagattaaatgccctttgtcttccactatcagggttgatagggaaggaccatcaggtgggggcaggggtaggcgtgtctgagctcagactgtccttgggcaggtcttgctgcagctgctgtaggggatgaaggtgagattcccaggtaactggagttgtgtgcctaggaggattatggctgactctgctgagtcatgcaggttgtcagggaagtggaggaaagcgggcagtcataggcctcaccccgctcccatgcaaactgaagggcccatcccactcccactgtgcccacccccaacagccctgagtccgtttgcagrtgagggcgagatggacttgaaaatttgcctgaggctatctgcctcccagctgtgacagaaaagggctttagttcttcccctacctgtgaagtctgcaagccagattctcaccctccctggagttctggccaggaggcttcttgccctgttcaaatttttacgaagttcagctagagatttccttctccctgtggagttttactccttgctcctctggccaccctcgcaatggatccctgtggtgccaggcaggaatggct

SEQ ID NO: 788778 - DNA, 526 bp, Homo sapiens
tgccagtcaagatcttccttctaaggtgaaggataagttgctacatttggcccctcctacaaccaagaaagaggcacaatgccaagtaggcctatttggattttggaggcaacacattcctcatttgggtgttttactccagcccatttattgagtgacccaaatggctgctggttttgagtggggcccagaacaggagaaggctctgcaacaggtccaggcyagctctcttgtgcagctagcttgtgcaagctgctctgcacttgggccatatgacccagcagatccaacggacatatgtccacatggtttagaaccccactcctggtaccagtttactgcattcatctgttctcacactgctaataaagacacaccttggactgggtaatttataaaagaaagagatttaattgactcacagttctacatagctggggaggcctcacaatatggtggaaggcaaaggaggagcaaagtcacatcttacatggcagtaggcaagaaagcttgtgcaggggaactc

SEQ ID NO: 788779 - DNA, 524 bp, Homo sapiens
tttttggagccatatcttaaagttactcaactctactgtcatagcataaactcaaattctgttaccacaccctgtggtttaaaaagagaaattgaggcctggcgtggtgtctcatgcctgtaatcccagcactttgggagaccraggcaggagtatcccttgagtctaggagttcaagacactcctgggcaacatggtgataccctaactctataaaaaatacgcagaatagtctggataatggagcctttggagaaaaagtcttaaaaaagaaaagaaaagaaaaaacaaaacaaaaacaagcaaacaaaaaaaaactggtcgagcatgggggtgcatgcctgcagtctcagctactagggaggctgaggtgggaggatcacttgagcccgggaagtcgaggctgcagtgagccgtgataccaccactgcagtccaggctgggtgacagagtgagaccctgtctcaaaaaaaaaataagaccaggtgtggtggctcatgcctgtaatcccaacactttgggaa

SEQ ID NO: 788780 - DNA, 537 bp, Homo sapiens
catcatggctcactgcagcctcgacctccaggactcaagcaatcctcccaccgcagcctccccagtagctgggattacaggagtgcacaacccctcacccagctaatttttgtattttttgtagagacagggttttgccatgttgcccaggctggtcttgaactcctaggctcaggtgatccttctgcytgggcctcccaaagtgctgggattacaggcatgagccaccgcacctggctaaatccaaggatttttgtatccacgggtggatcctggaaccactgcgccagggataccgaggaatgattatacagaaaaaggaaattttctgtatacaaggagaacccagttggaaacacctcagcatttgccttatttgaacacagtttaaacatttggctgcctgcaactaactgaagctcagctagctattggttaaaagaatatactcctaatttagcctctcagttaatttatgtgttatgttaggttacagttcattacataaaggccaaagtatggaagcctcctcaggcc

SEQ ID NO: 788781 - DNA, 537 bp, Homo sapiens
catcatggctcactgcagcctcgacctccaggactcaagcaatcctcccaccgcagcctccccagtagctgggattacaggagtgcacaacccctcacccagctaatttttgtattttttgtagagacagggttttgccatgttgcccaggctggtcttgaactcctaggctcaggtgatccttctgcctgggcctcccaaagtgctgggattacaggcatgagccaccgcacctggctaaatccaaggatttttgtatccacgggtggatcctggaaccactgcgccagggataccgaggaatgattatacagaaaarggaaattttctgtatacaaggagaacccagttggaaacacctcagcatttgccttatttgaacacagtttaaacatttggctgcctgcaactaactgaagctcagctagctattggttaaaagaatatactcctaatttagcctctcagttaatttatgtgttatgttaggttacagttcattacataaaggccaaagtatggaagcctcctcaggcc

SEQ ID NO: 788782 - DNA, 537 bp, Homo sapiens
catcatggctcactgcagcctcgacctccaggactcaagcaatcctcccaccgcagcctccccagtagctgggattacaggagtgcacaacccctcacccagctaatttttgtattttttgtagagacagggttttgccatgttgcccaggctggtcttgaactcctaggctcaggtgatccttctgcctgggcctcccaaagtgctgggattacaggcatgagccaccgcacctggctaaatccaaggatttttgtatccacgggtggatcctggaaccactgcgccagggataccgaggaatgattatacagaaaaaggaaattttctgtatacaaggagaayccagttggaaacacctcagcatttgccttatttgaacacagtttaaacatttggctgcctgcaactaactgaagctcagctagctattggttaaaagaatatactcctaatttagcctctcagttaatttatgtgttatgttaggttacagttcattacataaaggccaaagtatggaagcctcctcaggcc

SEQ ID NO: 788783 - DNA, 560 bp, Homo sapiens
ataaattgactggtgtgtttgctcctcatccatccaccagtccccacaatttgagagagtgtctccccctcatcattttcctaaggaacagacttaagtatgtcctcactggaaatgaagtaaagaagatttgcatgcagcggttcattaagatcaatggcaaggtccgtactgatataacctactctgctggattcatggatgtcaacagcattgacaagtcgggagagaatttccgtctgatctatgacaccaagggtcgctttgctgtacatcgtattacacctgaggaggccaagtacaagtttgtgcaaactgagaaaaatctttgtgggcacaaaaggaatccttcaaatatatatatatgtgtgtgtgtgtgtatatatgtatatatatttatatatatgtgtgtatayatatgcatatatatttatgtgtgtatatatgtatatatatttatatatatgtatgtgtgtatatatatttttttcccaaaggaaaaagaagacgtgagccaccgtgcccagcctccacaattgtattatacatatatcaaaaca

SEQ ID NO: 788784 - DNA, 619 bp, Homo sapiens
tttgagaatttgttaggatgggatttcatttgtggtaaagactttttagggtgagttggcagcatcccatatatactctttcgttgcattttttatatgtatatattttaaaggaaattcctatgagtaaatagataatggatgggaacctttaaaggtgaacccgaagtattttgccatatattctagcatattaccattttaaagcattaacattaatttaaccagcataagcagttgatttagcacccaaagtttctgagagctttacttttcaaaaagggtgggggttgagggaggctcaatattgcatttaccttattaggaacctcatatttagcttcaggaaatgggctttgaatcagggccccagtgttaggctcacagccctagcacttacgagtctgttgggcaagtgacrgaagctcctgagtgtccattttcttgactgcggatgtggtgtatggtagtgtctgcctcacagggacactgggaggaggtgtgggagtgaaggatgtgagtttcacactgagcctggccctaggaggtgccctgtgctcactggcactcaccctcggggtaatgcggccccaaaactgtaactgcaggtgctgtcttc

SEQ ID NO: 788785 - DNA, 506 bp, Homo sapiens
gggttaacagtcataaattttttattgaagggaggcatagtcatggttagagaccccaggctagagtcctaagaggtagaaacctttgctgcagtacatgtaacttctggccagtgacctgtgatcaactgttgtcaaacgtctggcttcasaggtaattgctcacagtagtgagcatataactgccctttggactcagtctcagcccccactccttgctctcaatctgcccccagattccatggctttctatgggatacagattcagctgctctctggactaagtgtcctaacatatgcaagaagcctgtcacagtgcttagcacttagcagctgcaaatgatggttctcctttcaggggttgtctgctccccttttggaacctgaaatctggctgagacaattatttgtttcagttctaatattaggcttgatttggactagatgtaaacatctgtgactttgcttttagtacactgttatgaggtcaggcctggtttgtttag

SEQ ID NO: 788786 - DNA, 632 bp, Homo sapiens
accgagataccctgtgccctgaggagcaccctcacttccttaccacggtacccactcatctcatcatgggccatatgttcaggttgcttccactgagggctatgacttcagccttgctagtgattaatgggttcaccctgcaatcatgcctagagcccttrtgttggctagggcatttatattccaagctgtctgtccttatccaaaggaaggcaggcaggaccatagtagccagatcaaaacaacggtgatacactttaatcctcgcccttccaccagtgtaggaaagatgaaggcgctgcagcaggttagttggctgttacagcaggtggagcagaagaatgtggatgagtggcctgtggatacttgggcatcagatgtgggactcctggtgaagcagggtagccatccccaggaggttgatcactctaacatcaatctaacaggccctttgaccatttagaagaggatgacccagttaagtatcctccataaggatgttactctctcctcctgccatgttcaacataatttctatagaccaatacctgagcaacaaagaacttttggatgggaacaacaataaagatagttaacaataactgaacacttattatatgccagttactaga

SEQ ID NO: 788787 - DNA, 632 bp, Homo sapiens
accgagataccctgtgccctgaggagcaccctcacttccttaccacggtacccactcatctcatcatgggccatatgttcaggttgcttccactgagggctatgacttcagccttgctagtgattaatgggttcaccctgcaatcatgcctagagcccttatgttggctagggcatttatattccaagctgtctgtccttatcmaaaggaaggcaggcaggaccatagtagccagatcaaaacaacggtgatacactttaatcctcgcccttccaccagtgtaggaaagatgaaggcgctgcagcaggttagttggctgttacagcaggtggagcagaagaatgtggatgagtggcctgtggatacttgggcatcagatgtgggactcctggtgaagcagggtagccatccccaggaggttgatcactctaacatcaatctaacaggccctttgaccatttagaagaggatgacccagttaagtatcctccataaggatgttactctctcctcctgccatgttcaacataatttctatagaccaatacctgagcaacaaagaacttttggatgggaacaacaataaagatagttaacaataactgaacacttattatatgccagttactaga

SEQ ID NO: 788788 - DNA, 632 bp, Homo sapiens
accgagataccctgtgccctgaggagcaccctcacttccttaccacggtacccactcatctcatcatgggccatatgttcaggttgcttccactgagggctatgacttcagccttgctagtgattaatgggttcaccctgcaatcatgcctagagcccttatgttggctagggcatttatattccaagctgtctgtccttatccaaaggaaggcaggcaggaccatagtagccagatcaaaacaacggtgatacactttaatcctcgcccttccaccagtgtaggaaagatgaaggcgctgcagcaggttagttggctgttacagcaggtggagcagaagaatgtggatgagtggcctgtggatacttgggcatcagatgtgggactcctggtgaagcagggtagccatccccaggaggytgatcactctaacatcaatctaacaggccctttgaccatttagaagaggatgacccagttaagtatcctccataaggatgttactctctcctcctgccatgttcaacataatttctatagaccaatacctgagcaacaaagaacttttggatgggaacaacaataaagatagttaacaataactgaacacttattatatgccagttactaga

SEQ ID NO: 788789 - DNA, 641 bp, Homo sapiens
ggtctcaaattcctgacctcgtgatctgcccgccttggcctcccaaagtgctgggattacaggcatgagccaccgtgcccagcccaaatctaaatcttattaatcgaaatcttgaataaatccaaatgtgggtgctgtggcttccaagatcctaaacgatctagtactgctttttttttgaaggcctcttctgtcttctctcttaccctttatcgccttatgggctgctccagccacattggacctctacgtatcctcagaaataccaagctttccttttaggacttttgcatttgtttgtccttgtktattttgttagcctcctgccttcccccttcctgattctttgtatagctgaccactaactggcaggcctctacccagtaccacctcctggatcacacttgcctagaccactgaatctaagtagccgctccttctcccttgcccacagtcacattatccagccttgggtaatgtgcattggatcttggatttcattgcccttatcaccatttggacttacccttctcattcttaccctctcctcactataatataaactccagaagagagtacacttcacttgttcaacactgctccactacctgaaacatagtaggtgctccataaatatgagg

SEQ ID NO: 788790 - DNA, 554 bp, Homo sapiens
aaaacagacttaaacgcttcaaattttttcagagcaagtttcttttaaaaagccaaaaaaaaaaaaattggttgattggacatagttggtttatatatcaatgaacgaaatgtgtcagattttaatgagggaaagagaaaaatgatcagaaagaatgacagtgcagaaatacttcttacatgaattgcattgtctctgttccttaccagaaggttcctaacattaggatatacccagggaaatactacaytgtgaaaggtagatttttacaaggctccttttttttttctttgaaatgtgcttatctttagacacaatttttgtgatgccctgggtgtttttcctgtccccatgtcttctttctcagcatatgcttattccgtatgttcaatgccttatacaactttaaatacatactctgaaatttggaatgtttatacttttcagttgcaaaatactttatccttcaaattgctctcacatacaagtctacctgagaattcaaatgatggagtaaaatacatatacttttaattgaaaatgaatctgacttt

SEQ ID NO: 788791 - DNA, 594 bp, Homo sapiens
gctctacaggttcttatttggggacacagcagcttctgggatgtcattccaatcaagcaagacctagccagataaaacaggcaattgattttctacatttttcttaacttattttaaataatacactgaaaagtttactgcacaggatgaagaagagaaaaaaagagaaatggcaagctgaatttgttatacagagttttccatagccagatcaggaaaatggttttttgcttaatctaaacattttatgtttcaaagatgcaggaaactgttacaagcttttcttttcctataaataaagctgttcttttttctttattaatcaaggcccttgaattgcctttcttaaatgtttggtttgttagaaacaacacagaaaccacgttcttctaaatacagataaaggagagactatttatttagttattttcatttgtatttcttggaatatttttcaaagasagtatattaaatagctccacagaaggctagaagattttttcccacaatggaaaacaatagcaatacctcactaatcaatataaaaagtcaaaataaaaaatcgatgagtattacaacacattcagtgaggag

SEQ ID NO: 788792 - DNA, 661 bp, Homo sapiens
aagtactcagtaactgttagacattattataatgattacattacaatgttaatggtatctacaattaagtctcaatggaaagttaagatttcttagttcttttattaatagatgactacatctcttaattctctgattttgaaagtctgagattgaggaaaaatcaaaataaacagccaggcatgtgggcctacacaggaagcaataataaacatttcttgaatgactttggctttcaatattaactcattaacctaggaaagagagtatgcaagtaaaagtatatccataagaccgagaacaactaataaggtttttagcctaaacactcgttggattgagataatgagttttgccagcattgatagaatgagaacagaacttctgttcacgcaatgcagtagacaacaaaaactgccacattaaaaaccagtatatgctgggtaaaatattactattcctattttgttaaatacaaagctgagcctcaaagaaatsaaagaaaatccccaggtgaagggggatctccagagcacagatcatgggtgggcactgaggagtctgggctggaagtgaaaatggaaggccatctcatgccctggaaacaggttcagctttaatatctatctgtgacaaaggacaaaattttcagggtagatta

SEQ ID NO: 788793 - DNA, 592 bp, Homo sapiens
acagggaatcagaacactgattacacatgacaaggtaacaatccccaaacgcaccctgctcccagtgactctgatgagaggcaaggctgcacacactgcttctgtctgtccgtccactctccacactgtgggggccatggctttccatctctcacccctactgcttagcacacaggagggctggaaaatatttgttgaaataatggtattgatttttgtcatrtgtttacattttagccacagaggcgaattggagctctcacaagtcagagtagaaagcatatgcagggctctgttctcacagcaccctccagctcttgctttttttctaaggactcagccactgctctggaagactgaccgtgctttaacaacctcaccaagtctgccagctcttctgacttactccaaaacgaagaacagctgccccagcaacattccttgagtttgagaatcttcatttctaaaatgttgagttctgcaccccgcaccctgacttcagttataactccgtggtcacaattctttgccacttccacaacctctgagaacctctggtgccattcctgaaagcctttcattctttttcaat

SEQ ID NO: 788794 - DNA, 498 bp, Homo sapiens
ctttatgaatcccaaggaggattaacacaaaggaaaacttactgaggcatatcgtgataagactactgaaaaccagagacagagaagaccttaaaggcaaccagataaaaaaaaatgcatgacttttaaagaaacaaaataataaaaataaaggattccagaaaaacaatgtaatgacatatatgacgtgctgaaagaaaagaattgcaatctaaatttacccmattaaaataatcttatagggaacacatctccatctccttttcctgacaaaaaaagacaaagatattatgaatcatctgtaatgaatactggaagtgtccctctggctgggctgaattccctttcttgcatgtttccgattggcatggacagtcagggagagatgtgggaggtttggaagagaagccacagccttggcggctgacacacgttgttgctgtcacactgattcaccttgttggtgtgaagcagcagctgggcctgcaattgctctac

SEQ ID NO: 788795 - DNA, 618 bp, Homo sapiens
gcccctccccatctctcaccccagctcttcatcgctaagtagctgggaactgactacgtagcatcaattacacacgtacaactctgaggagttgtcagactttagccctaatagtgccttcagtttttttatgagactatgtaaatgaatgccaacagggtcaatgaagtggcaagtgccatttctaacatttaacaaaagtggcgtcatttccagagctctgcscagctctgactctttctcctggagggtgcaaaaagaaaaacagaaacttttctcgaaggcatcatatttcagacaagtattgtttcaattatgacattttgtcaaattgtgaagtttaaaggacaaattgcctcggcctattcctgcttaagccttttcatgccacttatggaaaatagcctgtgcttttaatgggtattttgtcagttaatattgccatggagagagaacaagctgtagcttccttctgctgagacttgaagccccatgaaggacagacttgtctgttttgtccactgcttgtctctaggtctgccgcacaagtgtgtccttcacattcactattgttaaataagaatcttcaggtcgccttataactgcacaccctcaatt

SEQ ID NO: 788796 - DNA, 612 bp, Homo sapiens
cttcttccaagcattctctataagcagagctcccaaagcctggaaaatctttgaggatggggagggaggactcatttctacagaaacagatggttgtgcagcgatctaagtgagagggcagcccaggacagcagatggtcctgggaagggctcaggcctccctccctcacctgatgcccccacgcgtggtcagcccataaagacctctttaccatggtgaaacctacacatgcttatgaggttaaatgcctttcctcttcactgagactgctacatttgagtctattttcaacccaaatccacttataaaaagcatcaggggagtggggtcagtcacaaactgtaaattacrtctctatgtgctcttctctgtagacctccctggttgcgcctgcccggagggaaggattattctgagttgtctgtaacctggtagggcgatgtctaaagaaatcagaatccagctctgaaggctgtgtcttagcttcctggagccacgtaacaaattaccatacacagaatggcttaaacaacagaaatgtatcgtctcccagttctggaggctacgagttaaagatcaaggtgtggacagggccagctctcactgcaggc

SEQ ID NO: 788797 - DNA, 612 bp, Homo sapiens
cttcttccaagcattctctataagcagagctcccaaagcctggaaaatctttgaggatggggagggaggactcatttctacagaaacagatggttgtgcagcgatctaagtgagagggcagcccaggacagcagatggtcctgggaagggctcaggcctccctccctcacctgatgcccccacgcgtggtcagcccataaagacctctttaccatggtgaaacctacacatgcttatgaggttaaatgcctttcctcttcactgagactgctacatttgagtctattttcaacccaaatccacttataaaaagcatcaggggagtggggtcagtcacaaactgtaaattacgtctctatgtgctcttctctgtagacctccctggttgcgcctgcccggagggaaggattattctgagttgtctgtaacctggtagggcgatgtctaaagaaatcagaakccagctctgaaggctgtgtcttagcttcctggagccacgtaacaaattaccatacacagaatggcttaaacaacagaaatgtatcgtctcccagttctggaggctacgagttaaagatcaaggtgtggacagggccagctctcactgcaggc

SEQ ID NO: 788798 - DNA, 655 bp, Homo sapiens
catatacagaacactgcatccaacagctgcagaatacacattcttcttaattggcatggcacattctccaggatagatcagatagatcatatggtaggccacaaaataagtcttaataaatttaaagattgaaattgtatcaagcatcttttctgaccacactggtataaaactagaaataagtaacagaagttttggaaaattcaaaaattaatcaatatgctcctgaataaccaatgggtcaaagaagaaattgaaagggaaattaaaaaaacatcgagataagtgaaaataaatgaacaatatataaaagcttctgaaatacagcaaaagcagttctgaaagggaagtctatcgcaatgaatgcctacatcaaaaaagaagaaaaatctccaaaaaactacactacacctcaaggaactagaaaaaggagaacaaactaagctcsaaaattagtcaaaggaaggaaataatgatcagagcagaaataaataaaatagagactagaaaaacaatagaaaagatcaatgaacataaaagctaatttcttaatcctttccccatctgcctcaagaaaatttgccagcggtgcttgcagctgcagagtttatccagaaataactgccatgacatatcttgctttgttatttttgca

SEQ ID NO: 788799 - DNA, 427 bp, Homo sapiens
agactcataattgtcagattcaccaaggttgaaatgaaggaaaaaatggtaagggcagccagagagaaaggtcaggttacccacaaagggaagcccgttagactaacagtggatctcttggcagcaaccctacaatcaagaagagagtgggggcaatattcaacattcttaaagaaaagaattttcaacccagattttcaaccyagccaaactaatcttcataagccaagaagaaataaaatctttaacagacaagcaaatgctgagagattttgtcaccaccaggactgccttacaggagctcctgaaggatgcactaaacatggaaaggaacagctggtaccagccactgcaaaaacataccaaattgtaaagaccatcaacaccatgaagaaactgcatcaactaatgggcaaaataaccagct

SEQ ID NO: 788800 - DNA, 620 bp, Homo sapiens
agtttattaaaatatctaaaattttctagatttttgtcctaaaacagcttttgtatttcaaattcttctgtattcttatttatgtgaatatttctagtggtctttcatttttttcatgaaataatatagagatgacacacatccaccataagttgtttttctatgaaatagtttattttttcatctcatttccatccatgattcttttactttttcatagattctacgctttaggaaataggcatataatttacatttgaaaatgatgttgaatttttttctttctcagagtttgcatgtttttcattttgtttatctatcttccttctctcatatgccttttatataatttttagactagaatataagaagattgtataaagttttaaaataaactattatgcagctattttgtgattatttgtgcttgttagcaaggagagtaattaaagctgttttccctcttcttgtkgaatggacatcttagcctgagaatgctgcaatgttttatgtaactcttgagcctggagtgccctgataaccatacagctaagtaatcatttagataaaaagaggaatgcagttgcacccatgggcaattacctttttttattaataag

SEQ ID NO: 788801 - DNA, 569 bp, Homo sapiens
ctgccttcaggagactaacctaactcataaggactcacataaacttaaagtaaaggtgtggaaaaaggcatttcatgcaaatggacactgaaagcaggcaggggtagctgttcttatatcagatgaaacaaactttaaagcaacagcattacaggcaggagctgccatgccaggcattttgctcattgctttcaatgatgtcatgtcttttttgtccctcggtttctccattagtaccttcttttgcattaattttttttttggtagtgtacttagtcagttttgtgctgctataacaggatatacagatcagctaatttataaatgaaagaaatttatttctcacagttatagaggctgagaartccgaggttgaggagcctatctctgatctgatgaagactttcttgttcagtcttcacattgcagaaggacaagagaacaagctagccaaatgccacctgaagctgctgctgctttttttctttataagggccttagttctattaatgaggaatgagccctgatggcctcatcatgtcttaaaggttccacctcttaatactagc

SEQ ID NO: 788802 - DNA, 640 bp, Homo sapiens
ccatgtctctgcatgcttgcatggagaacatgcattgtccaaggaccctcaaatccctgcatgccctgcgcatgccctaaccctgaggaggtgctgaacccttgctgatgtgcagaaggggttaatcagaccatgtggacacaggtagcccaaggaacaacccccatgccaacagcactccatcccgacctcataccatgtgcacagcacctgatgctggtggggtcaggagtgtggcctgtgccacactcagaacgcgggatgaacatagaggaaacactagaatggcaaaggctggttgtcacctgggkgcctcagaagccacggcaccagaggagagctcaggagtcagcctgctccaaagctcttcctgcctgtagcatgcaccctgtgcctccgggccaccaaaaacagcaatcacgtcagctgagacgcaacacactgcatgccgaacacacaggagagctcacacgcacaaatgttctcggcttcccagacaccaatgaaggagcttattatgaatatgaaggataattaacgtatctattattttattagacatcacaattcaaatacaataaagtatataaatataaatatataataaatgaaatatataaaataccatcttagcttatga

SEQ ID NO: 788803 - DNA, 475 bp, Homo sapiens
cttagcctctcaagtaactgggattacaggcgcctgccaccatgccaggctaatttttttgttttgttttgttttgagatggagtcttgctctgtcacccaggctggagtgcagtggcacgatctcggctcactgcgacctccgcctcccgggttaaagcgattctcctgcctcagcctcccaagtagctgggattacaggcgcatgccaccatgccgggctaattgttgtatttttagaagaaaytgggtttcaccatgttggccaggcaggtcttgaactcctgacctcaggtgatccacccacctcagcctcccaaagtgttgggattacaggcatgagccactgcgcccagcccacgattaatgttcttataatcactgccatctctgggtgtttagtagtttcagcagtggcatccagtaaccacggtttctattacaaaggtgcgtggaatctaggaaaaccggggaca

SEQ ID NO: 788804 - DNA, 608 bp, Homo sapiens
ttttcttttttttttttttttgagatggagttgtactctcgtccaggctggagtgcaatggcacaatcttgggtcactacaacctccgcctcccgggttcaagtgattcttgggcctcagcctcctgagtagctggggttacaggtgcccaccaccacacctggctgatttttatatttttagtaragatggggtttcaccatgttgccaggctggtcttgagctctagacctcaagtgatccacccatcttggcctctcaaagtgctgggattacaggcgtgagccactgcacctgacctaattcttattttttaagaagtgtatctttacattttagtgtttcatgccataaggaggtagctagatcttacatgcagtaacagatgcagaagcatggagagtcttggttacacatggataagaattacctgaaagaagatgagtaatacaaaaccaagtatttcagtaccgttgaaacaaaattctaggcgcaattgttgctgtagtgttttgctaagggaagatatgaagttttctcctctaaaggtcctgaaaaggaattggcttctcttccatttgggggctgggggagtcgctcctgtcctt

SEQ ID NO: 788805 - DNA, 526 bp, Homo sapiens
gtcgcaaattctctgcctctggtttttgtcagatgtggttggaatggccacaggttggcttctgtgaatatcaaattatctttctgacctctctatggaaagcgatcttataaaatcattgttggctgtgtgtggtggctcacacctgtaatcccagcactttgggaggccaaggtgggcagatcatttgttgtcaggagtttgagaccagcctggccaacatagcaaaatcccatttctactaaaaatacaaaaaaaagaaaaaagaaaaattagtcatgcatagtggctcatgcctgtaatcccaacwactcaggaggctgaggcgcaagaatcacttgaacccaagaggcagaggttacagtgagctaagatcatgccattgcactgcagcctcggcaacagagcaagacgctgtctcaaaataataataataataataaatgcagctgaaaacattatagaagtatgttaaacaattaatttttaacatattatttttctaaattatgtaatatttgtgtta

SEQ ID NO: 788806 - DNA, 573 bp, Homo sapiens
aggacacaaaaaccatctcatcgtttttaacagctacagaatattccactgtatggaattcctaccattaatttagccaaccccctatctggacatgtgattgctacattctgttgttatcttacaaacagccattaattgaaaatccataggtgcaagaayatctgtaggataaaatcctacatataaagttcaggggtcattttttctatatacattttccaacaactatttgatgatgggctataatctataatctgcttttgctagttcatgacttttattagattaaaaaatcagccgggcgctgtggctcatgcctgtaattccaacactttgggaggccaaggtgggcagatcacttgaggccaggagttcgagaccagcctggccaacatagcaaaacaccatctctaccaaaaatacaaaaattagccaggtgtggtggcaggcgcctgaaatcccagctactcaggaggctgaggtaggagaatcgtttgaacctgggagggggaggttgcagtgagcaaactcgagccgctgcactccagcctgggcaacacagtgagattc

SEQ ID NO: 788807 - DNA, 615 bp, Homo sapiens
tgagcctgtgttatcatcatgaataccctcttggacctgccgactggggcagcacatctgttcattccacactctggagaacttggtttgctgagctgtactctgcaaagttgctggagtgcaggcttcctctgtctaattattcccccatccctcagtgttgccctcaaccacttgatccaagaggctgagttgagkgttgccctcaaccacagatccaccacgtctgcgcatgagccagtgggcagcagaagtggacacctttcagtctcagagactccctatgcctgatatccatgagcctcctactgccatttcagtaagtccatttgtatttgagctcacttgagtagttttctatgccttgcagttacatatctctagcatatcctaattcttaggaaaaaaaaagtcagtgaattaaattttatcaagtttaaatttttcttccatgattgaagacagaataagaaatggacctgctattgtgatgactgtcatcagaactgaatatcttagcccaggcatcaggcttccctgtccattatgtgtgtgtggagctcatgctattattattaattttagccattgcacttttattcacattttgtattt

SEQ ID NO: 788808 - DNA, 657 bp, Homo sapiens
atttttttttctagtgtggctgtaccgatttatatttccaccagcaatgtatgagggttccaatttctgcacatctgagttattcaatacttgttattgtctgttttgttgattatagtgtctaagtaaaatgaacaatagagatgaatctttacatttaaaatgttttatttggaaagcaagaattgcgattcagggcacacacacagaccaagtggtcctcagcatgtcccaaagagaatgttggaaattttattagaaagagacatattctgtattgttttgaaagaagttcatttgcactagagaagcttttgggagatagcaagcttcttgctagctctgattagtgagtgatggtggtaagtaaaaccagtgttagggtcccagcargttgtttcagcagctgctaggtaaagctgttcttggagttacagcaggccatttaggcacctgggcctgtggaagatttaattcttggagcaggtgctacgagctcccagggctttttccccgtagcccccttgactgatttatttgggtatgacaagaatgacccaatttgaataattaactttcacactagcaatcctagtggatgtgaaatgttgtctcactatttgaatttcagtaatggttaaattatgttaagcattt

SEQ ID NO: 788809 - DNA, 633 bp, Homo sapiens
tctgcaattgcagagctcctctctccctagctcctgatgggacccacgggggagagacctctttccgctgtggatactacacagacctgtggctgaagagcctggcaaaaaggaatttgaactgcactcaggggcatccccaaacagaacaatctgtcttcaggactagtgagtttcctgttgctggaagggctcagacagggactccaaaaacatttcaattagctttccatagacccaaagtctgaccattaatgccactccagggtggctttatatatgctattgcacttaaaggccctttattaaatgcaaagtacttaatgatattctttgttggaattttctcagtgatgactgaatgactcttttgtgctctgattagaggcttgggagaaagacctgatctgccagtaactctctcctstcacagcacctgagttgtcttcactacagactcatcccactggctccccagagcactctattcagttaacatgccctacaggcagaacagcagggactctagcagctgacccatcctgggccctgacaggctggtggagagccagggatgacttttctgcgacagtcatggctgtggctgtggcactgtggagcggggtgatggcg

SEQ ID NO: 788810 - DNA, 620 bp, Homo sapiens
aaatgtctccagacattgctgatggcccccagcccttccttgagaacgactggcctcatgaaagccaccactaagtctcctagtgaaaactcgatagttaggtgtcctgggctcaagacccctgtctcctgaaaagctccacctggcaacactctcaagcctctcagagattcattttcctcaagttaaaaggttggaagctcccttctgccagcatatagagcccttgtcagaaccatctgcattgttgggacaacgcttcgaacggcaaacgcagtaatggtgtggttctttaagaaactggsagaaagacagccagtgagacagatacaggggacacaggggtgttgctcagccacgtggatggggctcggtgtggaatgggctctgattcccccaataatcgaggcctgcaaattccctgcaaatatgctgtgcacatctgtcaggatttatttccaaggcagaatggggctcaaacctcctcttggggaggcaggaaatcagcttgaaaaaggacccaagagcagatgacagccttgccaaatgtctggatggagccatccgggcaggcgcgaggctgccgccacggtcaaaagaccagcatccagaatcccccg

SEQ ID NO: 788811 - DNA, 549 bp, Homo sapiens
cctgtctcctgaaaagctccacctggcaacactctcaagcctctcagagattcattttcctcaagttaaaaggttggaagctcccttctgccagcatatagagcccttgtcagaaccatctgcattgttgggacaacgcttcgaacggcaaacgcagtaatggtgtggttctttaagaaactgggagaaagacagccagtgagacagatacaggggacacaggggtgttgctcagccacgtggatggggctcggtgtggaatgggctctgattcccccaataatcgaggcctgcaaattccctgcaaatatgctgtgcacatctgtcaggatttatttccaaggcagaatggggctcaaacctcctcttggrgaggcaggaaatcagcttgaaaaaggacccaagagcagatgacagccttgccaaatgtctggatggagccatccgggcaggcgcgaggctgccgccacggtcaaaagaccagcatccagaatcccccggggaccgcaccacctacgcagcctctccgaggaccaatgtccacgtcat

SEQ ID NO: 788812 - DNA, 632 bp, Homo sapiens
tcttgaaatcaaaaacatgcatgcataatatgaccatgtactatgcatggatttatacaaatgttagtaaaagtaccaacttggattgtgaagccagattcatgatcgtggctgcctctgggaaagggggagatgggacaaagcagactgatttcatctgcagtcgtttcttataaggaaagacaaggcaaacatgatgaaatattataaatggcctattctggtcagtgggtatacgagtgtctgttattttttggtatttttgaacttcctaaaattaagagcagtgctttgagcattggagtgcaccaaacgcgtgatggttataatcagttgtggccgtgggattaagtgctctctgaattcagaagggtgccccaggcttggggtccctgcccygcagtgtcggggcaccatgtagcatggggtggctgagtgcgatgtggggtgttccaggtggtccgggccattgtggaaaatgggacagcatcctccaggggcctcagagggccctgccttcccaacagtctccatgctgctccaaggagtggggtggcctttaggcctccacctgttcctactaaggaggtgaccgttatataaatctcccctaagctccacctctacagaga

SEQ ID NO: 788813 - DNA, 505 bp, Homo sapiens
attaatttttgaaaaaattgcaaaggcaattcaatggaaaaaggatagtcttttcaacaaatgatgctggaacaagtggacgtcaatatgcaacaatatatagagagacagaatatgtgaacttggaacccaatctcttacacaaaaattacaaaacagctgcagcaaaaaaaaaaaaaactcatgccttatacaaaaaactcaaaatggatcttagacctaaatgaaatcataaaactataacacgtttagaaaaatatgttaagagaaaaatgtctgtaatcttatggtaggcagagttattagatccaacatcaaaagcataatccatacaagaaaacactgcaaactggattttattaaaaytaaaaacattttctccatgaaaaacaccattaagagaatgaaaagacaagccacaggctgaaagaaactatttacaaatcatctatctgacaaagaacttataagtagaatatataaagaacactgaaaactcaacaat

SEQ ID NO: 788814 - DNA, 568 bp, Homo sapiens
tatacatatatatatatatacatatatatatgaagagatttattatgaggaagtggcttacacaattatggaggctgagaaaccccaccatctgtcaccggcaagctggagactcagggaagctggtggcataattcagtcctaagtccaaaggcctgagaaccagaggagctgagggggtaaaacccaatccgagagcagaagaccaatgtctcagctgaagcaggcaggcaggagataaaagtggagaattcctttttccttctccctcagtggactggttgatgccactcacattggagaggatcatctgctttactgggtccatagattsaaatgctaacctcatccagaaacactgtcatggacacacccaatctgggcatcccagggtgcagccaagtcgacactttaaatgaaccatcacggtcctctggtgctcagcacagcccctggagcacagcacatgctaaaggtgacaagagctaatgggcggaactttgcacagaagccaggtgcatcggcttttgctgatgaatgtggccaagctttcctcccaggggtagta

SEQ ID NO: 788815 - DNA, 556 bp, Homo sapiens
ggtctgctcatgggaacaacagttggcccaaggacctggcactgtatcccatggatggaggaagccacagaagaccctcagcaggagaaagctccctctggcaagagtgaagaaaggaaacagatcaggaagcaactggagacaccccccaggtgagaagcacctgcagtcgtccagggaggaggaaaggcgggaccaagggctgaagcagtggcatgggagtttggatggatgttactgggtcaagaaatacccaacccagctagggcccccycagcagacactactgccaggttaaagaatatcctatgagctatgctgccatgtgacaagtgagcacagcacagtggctgacagcaaggatgcccaaacatgacctgcaaatccccctctgccacttgctccctgtgtggcttggtgacataaccctggggcttcagtttcctcatctgtagaatgggaatgatgagaagtgctgagagcagtgcctggcccttcatgagtgctcaatacatgtcaagctgtgtcattactatctgttatatttgcaaagctg

SEQ ID NO: 788816 - DNA, 480 bp, Homo sapiens
tgtgttttggctgcaagtgactcacagctgccctttttcaccagatagatacctgctctcagataatggaacctacttgccaaaaaaggctacaactccagctgctacaggcacctgcagccaaagactgactaacgtgggtgtacataagaccagctgtcttgattcaaagtggagacgattctgcaggggcaatttaggctccagagctctgataaatcaagccaaagctagattttgtctttgcttgaccctttcctctttcttaactatagtcctcactcccttaaatgatttcctgaagagcactccctcaatacattataatctacttgaatccaagaytatttttagggaacatgacttaagataaaaacgactacttagaaggtctatctatccatcttctcatatatatataagagtatatatatatactcttatatctatatgagtgcatacataaagagccattgattt

SEQ ID NO: 788817 - DNA, 452 bp, Homo sapiens
aactttagaacactcgcaaaacaaaaggtcccctgtaagttgtgactacaatgtcttaactgccatgctttaaaatattttatgtgcattttgtcctctcaggacatactttaaagtgattcagattttatttgtatttttccttttaaaaacatgttaattaaatatttttcttttaagatacagattgcctaatagatatttaaaaccttttaaaaactctcycccaatctacaacctcaggaaaacaaaactatagtattatagcaccaattgttatagaaaaaatgagtgttttattaatcttagcattttcatttataaatggcatgaggtgaatacgcaaagagcggcaagaacaatcctttcaccatttgtgtgtctagtggtgattctttttttttggcagaaaagaattgtgatgcaattccactgcatttaaaaatgttcac

SEQ ID NO: 788818 - DNA, 414 bp, Homo sapiens
tgttgggttaatctgtcagcagcagcagcagatgtactatgacatacattttctgatagttgtattttttcacttttgtttgtattatttccttctttgacctttaacaaaagtaatatgaataataattattattttattcaataaaaagaagtttttccctgattttttcacttgattcaggttaactatcaccgttttartgataaaaatattttgtgcttactttaattttatcattatacataattattataattataagatactcatcattttatcattgaaatttttgtcaagtctgctcatttctgtttgagtgaatagaagaattttccaaaatttcaaaaaggactcttctccattttgtgcttttattcccatccactctttgctatctgatataaatattta

SEQ ID NO: 788819 - DNA, 577 bp, Homo sapiens
acttttttttgatgtaggtgcttttttctacaaacttacctcttagtactgtagtactgtttttactttatcccataggttttttttttttttttttttttgagatggagtctcgctctgttgcccaggctggagtgcagtgacgcgatctcggctcattgcaagctccgccacccgggttcatgccattctcccccctcagcctcccgagtgtctgggactacaggcrcccaccttcacgcccggctaatttttgttttttgtatttttagtagagacggggtttcaccgtgttagccaagatggtctcaatctcctgaccttgtgatccgcctgcctcagccttccagagtgctgggattacaggcatgagccactgtgcccggcctgtaccccataggttttggtttgactttaaactttttcttttctcgaaaactcagtgtcatgataccggcttcttgtgctttgggcagtgagacccttttacttgataacagtggtagctgggacaacttggcaacgtaaataaataaacggcatctagattgcaaaggaagaagtacagttgtcttta

SEQ ID NO: 788820 - DNA, 577 bp, Homo sapiens
acttttttttgatgtaggtgcttttttctacaaacttacctcttagtactgtagtactgtttttactttatcccataggttttttttttttttttttttttgagatggagtctcgctctgttgcccaggctggagtgcagtgacgcgatctcggctcattgcaagctccgccacccgggttcatgccattctcccccctcagcctcccgagtgtctgggactacaggcacccaccttcacgcccggctaatttttgtttttygtatttttagtagagacggggtttcaccgtgttagccaagatggtctcaatctcctgaccttgtgatccgcctgcctcagccttccagagtgctgggattacaggcatgagccactgtgcccggcctgtaccccataggttttggtttgactttaaactttttcttttctcgaaaactcagtgtcatgataccggcttcttgtgctttgggcagtgagacccttttacttgataacagtggtagctgggacaacttggcaacgtaaataaataaacggcatctagattgcaaaggaagaagtacagttgtcttta

SEQ ID NO: 788821 - DNA, 577 bp, Homo sapiens
acttttttttgatgtaggtgcttttttctacaaacttacctcttagtactgtagtactgtttttactttatcccataggttttttttttttttttttttttgagatggagtctcgctctgttgcccaggctggagtgcagtgacgcgatctcggctcattgcaagctccgccacccgggttcatgccattctcccccctcagcctcccgagtgtctgggactacaggcacccaccttcacgcccggctaatttttgttttttgtatttttagtagagacggggtttcaccgtgttagccaagatggtctcaatctcctgaccytgtgatccgcctgcctcagccttccagagtgctgggattacaggcatgagccactgtgcccggcctgtaccccataggttttggtttgactttaaactttttcttttctcgaaaactcagtgtcatgataccggcttcttgtgctttgggcagtgagacccttttacttgataacagtggtagctgggacaacttggcaacgtaaataaataaacggcatctagattgcaaaggaagaagtacagttgtcttta

SEQ ID NO: 788822 - DNA, 577 bp, Homo sapiens
acttttttttgatgtaggtgcttttttctacaaacttacctcttagtactgtagtactgtttttactttatcccataggttttttttttttttttttttttgagatggagtctcgctctgttgcccaggctggagtgcagtgacgcgatctcggctcattgcaagctccgccacccgggttcatgccattctcccccctcagcctcccgagtgtctgggactacaggcacccaccttcacgcccggctaatttttgttttttgtatttttagtagagacggggtttcaccgtgttagccaagatggtctcaatctcctgaccttgtgatccgcctgcctcrgccttccagagtgctgggattacaggcatgagccactgtgcccggcctgtaccccataggttttggtttgactttaaactttttcttttctcgaaaactcagtgtcatgataccggcttcttgtgctttgggcagtgagacccttttacttgataacagtggtagctgggacaacttggcaacgtaaataaataaacggcatctagattgcaaaggaagaagtacagttgtcttta

SEQ ID NO: 788823 - DNA, 610 bp, Homo sapiens
aaatttcttcgaactggatgacacaacctatcaagacctctgggatacagcaaaggcactgctaagagcaaagtttgtagtcctaaaaacctacatcaaaaagtctgaaagagcacaaacagacaatctaagttcacatctcagggaactagagaagcaggaacaagccaaacccaatcccagcaaacacaggaaataacaaagatcagagmagaactaaatgaaattgacacaacgacaacaacaacaacaacaaatacaaaacataaataaaacaaaaagttgcttatttgaaaagataagtaaaattgatagatcattagcaagattacccaagaaaagaagagagaaaatccaaataacctcactaagaaatgaaacgggatattacaactaacaccactgaaatattaaagattattcaagggtactatgaacaccttttggcacataaactacaaaacctagaagagttggataaattcctggaaaaatacaactctcctagcttaaatcaggaagaattagataccccaagcagaccaataaagcaagcagcaagattgaaatggtaattttaaaattaccagcaaaaaaagctgagggccag

SEQ ID NO: 788824 - DNA, 610 bp, Homo sapiens
aaatttcttcgaactggatgacacaacctatcaagacctctgggatacagcaaaggcactgctaagagcaaagtttgtagtcctaaaaacctacatcaaaaagtctgaaagagcacaaacagacaatctaagttcacatctcagggaactagagaagcaggaacaagccaaacccaatcccagcaaacacaggaaataacaaagatcagagcagaactaaatgaaattgacacaacgacaacaacaacaacaacaaatacaaaacataaataaaacaaaaagttgsttatttgaaaagataagtaaaattgatagatcattagcaagattacccaagaaaagaagagagaaaatccaaataacctcactaagaaatgaaacgggatattacaactaacaccactgaaatattaaagattattcaagggtactatgaacaccttttggcacataaactacaaaacctagaagagttggataaattcctggaaaaatacaactctcctagcttaaatcaggaagaattagataccccaagcagaccaataaagcaagcagcaagattgaaatggtaattttaaaattaccagcaaaaaaagctgagggccag

SEQ ID NO: 788825 - DNA, 610 bp, Homo sapiens
aaatttcttcgaactggatgacacaacctatcaagacctctgggatacagcaaaggcactgctaagagcaaagtttgtagtcctaaaaacctacatcaaaaagtctgaaagagcacaaacagacaatctaagttcacatctcagggaactagagaagcaggaacaagccaaacccaatcccagcaaacacaggaaataacaaagatcagagcagaactaaatgaaattgacacaacgacaacaacaacaacaacaaatacaaaacataaataaaacaaaaagttgcttatttgaaaagataartaaaattgatagatcattagcaagattacccaagaaaagaagagagaaaatccaaataacctcactaagaaatgaaacgggatattacaactaacaccactgaaatattaaagattattcaagggtactatgaacaccttttggcacataaactacaaaacctagaagagttggataaattcctggaaaaatacaactctcctagcttaaatcaggaagaattagataccccaagcagaccaataaagcaagcagcaagattgaaatggtaattttaaaattaccagcaaaaaaagctgagggccag

SEQ ID NO: 788826 - DNA, 623 bp, Homo sapiens
tgcccagagcccagactacactagcaagaccctgtctcttaacaaaaaaaagctcacagaagtaggggaggtgaggctggttaatggatacagaattacagttagataagaggagtgggttctggtgttctgtggcattgtagggtgaatatggttaactacgacttattgtatatttttaaaaagccagaagattttgaatgttcacaattcaaagaaatgaaaaatggttgaagtagtaaatgtgctagttagcttgatcattacacactatatacatgtataaaaatatcactctatagcccataattatgtatatatgtgtcaattaaaacaaaagagaagctacattcatcccatttaaaaarcagaatatgggccagccttactgacttccttctaatgagtagaatgtagtgaaagggataccatgtggcttccctatctcagactgttttcccttggaacccagccccaattgtgagagcctgaaagtgcctgtgtcagtgttcatgctgcctgtcccaaccaagtttacagccgatggccagcatcaaccatcaaacaagtgggtgaccaaagcttcagaggattccatttccccaactgatcagctcttccta

SEQ ID NO: 788827 - DNA, 348 bp, Homo sapiens
atctcttatgaaagagggacatggaaagatggggtattggacacagatgtgggactgatagtcattccttttgcttatcttcagagatgtgcctctcctctctctctctctcaacatatatatatatatatatatatatacacacacacacacacacacacatatatatatatacacacacatatatatatakagagagagagagagagagagtcttagaaaataatatttggatcagaacttttttcctagtttcctttaacattaaaactcgagaacttgaggccttgcagagccacactgaattcattatctgtttattttatttttatttatttacttatttat

SEQ ID NO: 788828 - DNA, 514 bp, Homo sapiens
attgcccaaattaaaaaacaatggcaagtagtcatcctgttttggtgtccactaaaaccttcagggctccagggcagtgatttcatagataatttcacatcactgacttgttgttgctggcactgcagtattcacactgaactcatagattgctggatatactatataccatcttcaccagtaccacatgttttcatgaaraatgatagtagtaaattgcttgctatatttgtgcccctgcagcaagtcacaattgctgagttcatattgcatttcatatgtttttcatgtcactgtcatattatgttatggctgtaacacagcataagacaattgttcagtcagttgttgcctcaagaatatttacaatagtatcgtatcaaaaaaatgcatatctacccattcacacattaaccaatgttgtgagggcaccggtttcagccctattacaagagagacacttggcgtaataaagttgtcttaaaagggaagtaatgaattttagactgcatga

SEQ ID NO: 788829 - DNA, 582 bp, Homo sapiens
tttctcatctattacagaaagtccaaggtcagaagccctgcctcgtgtaacttcatatgcttacagctcctctggtagacggaggcatttaattaataactaaatatgtttttgctgcatctgataattaaatacaaaacaacgaaatcacaaattagcaaatctgccatatgcatgcagataaagtcaataattgtaagctttattgtttccagatgatcagaatttttgtccttgttagaatatgaaacatamcaatattgtttgagtgccttataagttctggttttcatgccaaaaaatcagatgaagctaataacgtgatattttattagtttgatgttagactagatgaaatattgattatctaatttaagagctatcacagaaagcaaatcatgtacacataatctatgtgtaaacaagaaaaaagaatgcctaaagctacatctggtgatgaatgtatctcatatcaaaatgagggaaccaggaaaatattaatcacatggcaaaaaaattcaggcagatatcatgtcaaaccgtagaaagttcaaacatagagtcttctcattgataggtcca

SEQ ID NO: 788830 - DNA, 603 bp, Homo sapiens
tcatatttccaacccaggcaaatgcattcagaatatagcaatgcctaactttactttgctgcaactctcatttctttccactttgtttaatttttttttatttccattatgtcacatcatgaagatgtctgctaagaactaagctgctggagcagcaaatattttgaacaatgactcaataaacagaagtttttaaagagaagatctgctttcacagtgtcaaacatgtcaggtaaacggtatttcatgcatttaccaagtcaatgtcctcacacaattktaagcataggggtgtgcattatttaaggtgtcactgatgggatcagaattttactttctgttgaatgtgtatggtttaagaaggctaaataaaatggtgatttattagaaaataagagagaagaaatgctggggtttttgcattcttctactctgcaaaatatatgatttcaggcacttattttaatgtgaatatgtctttttagtgtattatagcaacaactaacaatttatttatccaactgaaaggatggaactcctgaagttcatttcattgtttttcaggtaaacaaatgaaaaacgatttttgtctggggctctgtt

SEQ ID NO: 788831 - DNA, 607 bp, Homo sapiens
caacaactaacaatttatttatccaactgaaaggatggaactcctgaagttcatttcattgtttttcaggtaaacaaatgaaaaacgatttttgtctggggctctgttttagtgaaggcagaaaaaatatcctctcatttaaaaggactgaataaaccttttgtcatttgcagataatatttgactgagaacaacatgcagattggttttagaccccaactttcagcagaacaatctatatttattgctaagcacctgtttcattaaggtcaagaatacaaagaatgcattatcccraatgaaaaaagagattataccctttgtcttaattaatcctttggaaattttcatgaaaatacaaatatgagaaaaaacactttgataagtcttcctattagtagtgtaagatttagaaaaatacagttcatattatgttttattccaaaagggacttttaagagatgtttgagatttctgggcccccctccatccctcaagcaccccaccctgtagcaaatgcaaacagtctttctcctataatgctctgagttaaattccttggtagatttttattatgtaaagacatcatattgtttggcttaattgt

SEQ ID NO: 788832 - DNA, 632 bp, Homo sapiens
acctcatttctcctgggcttgccctatgcaccttttccctttgctgattttaatctgtatattttaactgttgtaaaccacaatcatcagcagcatacagcttttccaagtcctatgagtccttctaggaaatcatggagcctgagggtggtcttggggaacccggacacacatggatgtgcataggatgggcagacacataaaagcagagatagttccgacggattgagggaagaggtcaraagatgtatggtctgaatcttgaagaggaaaagaacagtactttcatctctgcgtatctactaataccagatacagtgctttgtgattttatataaattattttatttaatattcctaaatgttttttgacataggaattattatccaactctattttactaacaattaggtttacagttagagttaatctaataagaatcacacatagattaaagaaatggatttaaggttccaagctatgtctgttagactccaaggtttgtgtttctacacaattctatgggcccagagggcattattctatgtaacctgttaagtaaattgccaatatctgggagagggtacagaatagagaggaaggaaaggatgttgctggaccaaataaaaag

SEQ ID NO: 788833 - DNA, 607 bp, Homo sapiens
catggtattctctataaagcacacttaggaaagggaaaattcatagcaggaatagtgatgtgtttaacaaacaggcatcagtgtattgaatgctgccaaacccaatccattgctcaacagaatgactataaataagacagcacagrggaggagagttagagatgaaatgggcaatgaggtggaaggagtcgcagctgtttcttttcattcattcattgaattctctgtaaatattggtatggcttgcaaagtggtaaacagcatttctgtaaattagaatgactgctcatatcctggcaagaatatcaggggtctgagtatcaggcaaagcagacgatgacatcatacacggcatgagcttcccctcggcttctccaaatgctcctaattcatttgctccgtaacatttgaatatatattttagctgagccaacttttttaccaggaaagtattcagtgcttgttttagattcattttcctgcagcttgcattttgccatatgcattgggacttgtttacacttttattttaaggtttgttctgtttctgattttgtttcgcactgaagttccgaatagacagatgtctattagaagaattgaaatg

SEQ ID NO: 788834 - DNA, 607 bp, Homo sapiens
catggtattctctataaagcacacttaggaaagggaaaattcatagcaggaatagtgatgtgtttaacaaacaggcatcagtgtattgaatgctgccaaacccaatccattgctcaacagaatgactataaataagacagcacagaggaggagagttagagatgaaatgggcaatgaggtggaaggagtcgcagctgtttcttttcattcattcattgaattctctgtaaatattggtatggcttgcaaagtggtaaacagcatttctgtaaattagaatgactgctcatatcctggcaagaatatcaggggtctgagtatcaggcaaagcagacgatgacatcatacacggcatgagcttcccctcggcttctccaaatgctcctaattcatttgctccgtaayatttgaatatatattttagctgagccaacttttttaccaggaaagtattcagtgcttgttttagattcattttcctgcagcttgcattttgccatatgcattgggacttgtttacacttttattttaaggtttgttctgtttctgattttgtttcgcactgaagttccgaatagacagatgtctattagaagaattgaaatg

SEQ ID NO: 788835 - DNA, 684 bp, Homo sapiens
tgatcagacttgagcaggtcctgaaggcacaagtaagttacatgaggaagtggcacaaatgtccatggtctccaccctgccaccctgacttctcttccccagcctgcaccaatggcctcatggggagttccctatcatcagttgacagaggaagagaagactagggcctggttcacagatgattctgcatgatatgcaggcaccccctaaatgtggacagctatagcactacagcccctttctaggacatccctgacagacagcagtgaagggaaatctcagtgggcagaactttgagcagtgcacctggttgtgcactttgcatggaaggaaaaatggccagacgtgcaattatawactgattcatgggctgtagccaacggtttggctggatggtcagggacttggaagaagcatgattggaaaattgatgacaaagaaatttggggaagaggtatgtggagggacctctctgaatggtcaaaacctgtgaagatatttgtatcctatgtgagtgctcaatgacaggtgacctcagtggaggaggagtttaataatcaagtggataggatgacccttctgtggacagacaccactcagcttctttccccagccacccctgtcatcacccaatggatacccatgaacaaagtggccttagtggcagggatggaggttacgcat

SEQ ID NO: 788836 - DNA, 684 bp, Homo sapiens
tgatcagacttgagcaggtcctgaaggcacaagtaagttacatgaggaagtggcacaaatgtccatggtctccaccctgccaccctgacttctcttccccagcctgcaccaatggcctcatggggagttccctatcatcagttgacagaggaagagaagactagggcctggttcacagatgattctgcatgatatgcaggcaccccctaaatgtggacagctatagcactacagcccctttctaggacatccctgacagacagcagtgaagggaaatctcagtgggcagaactttgagcagtgcacctggttgtgcactttgcatggaaggaaaaatggccagacgtgcaattatatactgattcatgggctgtagccaacggtttggctggatggtcagggacttggaagaagcatgattggaaaattgatgacaaagaaatttggggaagaggtatgtggagggacctctctgaatggtcaaaacctgtgaagatatttgtatcctatgtgagtgctcaatgacrggtgacctcagtggaggaggagtttaataatcaagtggataggatgacccttctgtggacagacaccactcagcttctttccccagccacccctgtcatcacccaatggatacccatgaacaaagtggccttagtggcagggatggaggttacgcat

SEQ ID NO: 788837 - DNA, 613 bp, Homo sapiens
gaagtccattaaattttaaatcgtttttaatctgtgttttcacgttgggttatttttattcatgtgtgtccactcactgacaacttttcctttttgctctaatctgctgttaattccatgcaatacatattttcaaattaaaggcattttttattaaaggcattttttattaaggcattataatttccattatagatttttcacctttatcatttttaatagtttcaatttatttggtgacactccatctgttcattcattatgacaatgtttttcttaaagttcctgaatatacttataatatctattttaacatycttgtcttctaattttactatgtagatcatcttggggccttttctgttaatcctttttcatcttgactatgaataatatttaatattccttcattctctggtaacttttattttaggctggagattgtaataatccaagaagtttggattataatgtttccatttaaagagtgtagaattttgttttggtaggcaactaaattattgcacaattacttaatacctgttgtctattttgtatttttattttttagagtggatctattttaagctttagcttagttctacagcatgcc

SEQ ID NO: 788838 - DNA, 613 bp, Homo sapiens
gaagtccattaaattttaaatcgtttttaatctgtgttttcacgttgggttatttttattcatgtgtgtccactcactgacaacttttcctttttgctctaatctgctgttaattccatgcaatacatattttcaaattaaaggcattttttattaaaggcattttttattaaggcattataatttccattatagatttttcacctttatcatttttaatagtttcaatttatttggtgacactccatctgttcattcattatgacaatgtttttcttaaagttcctgaatatacttataatatctattttaacattcttgtcttctaattttactrtgtagatcatcttggggccttttctgttaatcctttttcatcttgactatgaataatatttaatattccttcattctctggtaacttttattttaggctggagattgtaataatccaagaagtttggattataatgtttccatttaaagagtgtagaattttgttttggtaggcaactaaattattgcacaattacttaatacctgttgtctattttgtatttttattttttagagtggatctattttaagctttagcttagttctacagcatgcc

SEQ ID NO: 788839 - DNA, 486 bp, Homo sapiens
ataaaaagaattttcatgtatatgtatatgtaagaatattggcatcaattgcttatattcgagcaggctttaatactctgaatggcttccatttactgtgtaagttggtgggatttttttttgcacacttatcttggatgtggaatagctttactgggatatgtaaagcctgttttgtgtgtgtgtgtrtgtgtgtttttcattttcactcctctctcatactgttcagtggggaaagaactccccagacctccttgtgtgtgtttgtgtgggtgtctgtgtatgcgtgttcatgcaagcgtgggaggtacattgaaggtcccaaaatgcttcgtactttaaccaacgaacacaatttctattccaaggagatgatacaattgtttttgtttctccactatacttacttttaaaaaataataagagtgataagtagagaggttcctctttttcctcttttttgttgttctgaaattgtgtagaaaa

SEQ ID NO: 788840 - DNA, 629 bp, Homo sapiens
tcattattttacaaaggaagaaattgagactcagaaaggttgtccctcacccaaggtcatatattaatagctgggttagaatttggacctgtgttaatctggttcaaggcacatatatttcctactattttctctacatccacttactaaatttaagtcaatatttatttgttccaaatatccaccatacatgtgtatccaaattaaaaattatcatgttttcttttttcaaagtcagagacactttgaatacaaagatgagacaatgaaacccttgtcttagaagaactcaagactcctctccaataacctaatggggctacatgagaggttccttagtactttatatattttttattattccaaatgattgttaatttattacttagaaagttgccgatactctcttctacaaaactattttgtttttaggtatggttaataaactgacaaatacatgattagaggccacacttctttttttgtccccscctctgaaaggtgtattcccaagtaactctttccatgaagcttcctatagaccaatcttggccctaaatcgcgaatagaaagtcacaaacacaaagaccacagatctaccaagagtgtagttgggaatttattttttg

SEQ ID NO: 788841 - DNA, 486 bp, Homo sapiens
agttgccttggagtccccttgagatcttggggagagagataactcacacgaggggagatgccccttcagccaggcaagatgccagcatggacaagagagaagcacatcatctcccgtgggtctaaacacagagctgctggagtgggaggctccagacagccatcaatgtctcaggtccaaatctggcaaggtccctgagcttttggtaaatattattgtactcgctgtctttgtggctttgaggcacacatttctgtaaaagccatgtagcttgaaaacaaggacttaaaagcacacrctgtctatgttgcatcttccactctgtctaagaatgtctgtggaacaatagagagtaggaggtcgagcaccggagcggcatttgatgtggccttctgctgctaattactggcatggggagccctgctctcccagttgtgactcaccagtgccccttgattaaatgcagacgaggatttagttaccaca

SEQ ID NO: 788842 - DNA, 641 bp, Homo sapiens
aatagcaatatacgtcaatctgattcaaatcaaattcagttgaattcagtttagtaagtatttatcgagcccttgctatgtgctgggttctgggctcgctactgagggtgtaaagaaatgggagagaaggttcttaccttcatggagctttagcttaaatttctaggatacaggtgaggcgtggatgggtcatatctgaataaaaataatccttaactgaaagagaatatgacatcttctgtaatggtgatttctcttcagtgcttttgcagaggagatagtgattttaaccacagaaagctatgtgaaggaacaaatacaggagtggtttcaaaccaaaggtataaagtaaaaaagagttataggattaggagaatacaaggtgagccttgggactactcaaacctctgttctggatagaacatggcttattttttagtgtgkatgacagtggaattaagttcacagcataatgcaaattccattgatccacattattcaaggattctatatttgcaaattcacctagtcccaaatatttatttgtaaccccacgatcaatgcccttgcatcgctttcaccatgtttcatggacatgttcaaccccgtccccctctgcacatcattccaattggcatgga

SEQ ID NO: 788843 - DNA, 633 bp, Homo sapiens
tgttttataggccttggcaatttctgagcatgagggactataaactctaaagttcagcacaggctcccttgaggagggaccacagggtcacaaggaagaggagcagacagagaggggcagggctgggttacagtgctgtcatcaacaaaacgttgtcttttcttactccaattgaagcaacctgtaaaaattaccccagactaacatattyaatgttcagatggaatgagatacactatatagtctaaacatttatgctccccgctaaaattcatatgttgatacctaattggcagtgtgacggtcatagggggtggggcctttgggaggtgattaggtcatgagggtggagccctcatgaatggaattagtgaccttataacagaggccccagggaggtctctcagcccttactctgtgtgaggacacagtgagaagacagatgcttgtgaaccaggaagcagtccctctccagacactgaatcaaccaacaccttgttcttggacttctcagccttcagaactgtgaaaaataaatttctgttgtttgtaagtcaccctgcctatgatattctgttatagcagtctgaatggactaagacaggataacaaagtttgtctattacttcggat

SEQ ID NO: 788844 - DNA, 474 bp, Homo sapiens
taaaatacaaaaattagctgggcgtggttgtgcacacctgtaatcccagctcaggaggccaaggcacaagaatcactcgaacctgggaggcagaggttgcagtgaactgagatcacaccactgcgctccagccctggtgacggagtgagaaaaaaaaaaaaagaccaaatgagcacgtggttactctgatattatgatgacgggaattgttaggcataacagaaaaaggtaaattctaggccaattatgaagctggtcttggttactttttcaatcytcccccctcccatcttccatccccctgacatttgctgggcacccagtgtctttaagtttcctggctcccactgtggtacccgctgaggcctgccctctgagccacaccctgcatcttctgccaattcttttcctgtacaaaacttacctgtcctgtggctcagtccttcaaggtcctgcttcaaggcactttctgag

SEQ ID NO: 788845 - DNA, 474 bp, Homo sapiens
taaaatacaaaaattagctgggcgtggttgtgcacacctgtaatcccagctcaggaggccaaggcacaagaatcactcgaacctgggaggcagaggttgcagtgaactgagatcacaccactgcgctccagccctggtgacggagtgagaaaaaaaaaaaaagaccaaatgagcacgtggttactctgatattatgatgacgggaattgttaggcataacagaaaaaggtaaattctaggccaattatgaagctggtcttggttactttttcaatctycccccctcccatcttccatccccctgacatttgctgggcacccagtgtctttaagtttcctggctcccactgtggtacccgctgaggcctgccctctgagccacaccctgcatcttctgccaattcttttcctgtacaaaacttacctgtcctgtggctcagtccttcaaggtcctgcttcaaggcactttctgag

SEQ ID NO: 788846 - DNA, 474 bp, Homo sapiens
taaaatacaaaaattagctgggcgtggttgtgcacacctgtaatcccagctcaggaggccaaggcacaagaatcactcgaacctgggaggcagaggttgcagtgaactgagatcacaccactgcgctccagccctggtgacggagtgagaaaaaaaaaaaaagaccaaatgagcacgtggttactctgatattatgatgacgggaattgttaggcataacagaaaaaggtaaattctaggccaattatgaagctggtcttggttactttttcaatcttccccccwcccatcttccatccccctgacatttgctgggcacccagtgtctttaagtttcctggctcccactgtggtacccgctgaggcctgccctctgagccacaccctgcatcttctgccaattcttttcctgtacaaaacttacctgtcctgtggctcagtccttcaaggtcctgcttcaaggcactttctgag

SEQ ID NO: 788847 - DNA, 598 bp, Homo sapiens
tgcattaaacggactaggaaactttggaggcaggaagagatttagcttatgagagaatgggttttctttttttgtttctttcttttttttttctgagatggagttttgctccagtcaaccaggctggagtgcaatggcatgatcttggttcgctgcaacctacacctcttggattcaagtgattctcctggcccagcctccctagtagctggaattacaggcacctgccaccatgcctggctaattttttttgtatttttagtagagatggggtttcgccatgttggccaggctggtctagaactcctgaacctcaggtgatccgtctgcctcagcctcccaaagtactgggattacaggcgtgagccaccatgcctggcctagagaatgggttatcccaggagactatactaagatgtgagcacatagaaggwgagttccttctgttaatgcacaatgaaacaagtcaaaggggtaacataccagaaaagagatttgttggacaaaaataattaagcccctggcattaagctgatatgcagtggatcattcttgacaatttgtgtttcaatccctggggatctttaacaaaaagcaa

SEQ ID NO: 788848 - DNA, 588 bp, Homo sapiens
acaggaaatcttcccagttgacttccccaaccatttctgagaatccaggtcgatgcctgtgtgttccacaaatctgaatcatttgccagcacagccagctcatggatgcccctctgcccgcggccctccttgctgggttgcaaatcaccgccagccccccagctgccccaggctgctgttgccctctgttccaagcacacaggacaggccctgccctgatttcaccactttacagcagaaaccaaacagcaacttttaaaaagctttcactttcagtttttgggataagaatacgaaaatacagtaaaaagggtgacaacgtggttgcgaaatgtggctattctcaaagctcatggggtcaggctggtgttctgggtccctgacagtcagccttcctgtctactcgcagcctgtctccttgtggcaggactgggttctccatgctctyccccaaactcccgtggtacccagaacacgttttcatctgagtccaggcccaactgccgtgagttctccagcgagccagggccttctccctctagtcgtctgatgtctgcctgttacatctgccccctttgcaggatgatt

SEQ ID NO: 788849 - DNA, 565 bp, Homo sapiens
tcctaagagtgcgaaccctattgtgaactgcacgtgagaggggtctaggttgtgtgctcctcatgggaatctagccatcctccctctaccccacaaccctgtccatagaaaaattgtctcccatggaaccggtccttggtgacagaaaggttggggaccgctggtctgtggcatctgggtcatgtggtaccgtctgtgactaaycaaatgtagaatccaagggaaaggcaagtgtatggacaagtgctaagtgagcagggggtgttaagagtgaaaaacatcaggtgatggggccaactggtcaggttttgagatgcttggggatccaggatgagaatttgggagggagctggagtcaagattttctctattctaaccacaccccataacctccctgggaacatcacattcagggcccccctgacgcagaaaagagaactgtaaactacccttaaagtcttcctatgcagcaatgatgcagactactgatatagcttctgatatttgtctttttctgaaccataattaaagttaagtgaacaatagcatttggaattctcaaaag

SEQ ID NO: 788850 - DNA, 453 bp, Homo sapiens
aaaatcacatgaaaggatttggccaatggaaacttgacatcctcataataaagcagttttgatggatgagtatttatttggtgctgtaacataggcatggctggggggtacctgtatgataacattgcagtcaaacatatcttgtgacaggacagttttttgtggggaggagaattagaccaagttcggagatatatttaaggaactaaaasgaacgtaagatctggggtagggggatgagcagctccacaccctgctcctgtgtgagctgtgtgctcccgactgggaaatgtctaactccatcgaaaacatgagatgaggggcagggaaggggctacttccaagcctttcattataatactgtgtgtaaccttttgcatattttcagaaaagaaaccagtaaggtgggttcagttgtgggctcatcctgacttagaaaattttaaataattt

SEQ ID NO: 788851 - DNA, 623 bp, Homo sapiens
cgatctctagaggcagaaacagtgcaacatgtgatttatttctcagcctccaacacattttttccttccttcatgaaggaatttccaagttactcctcctccagaaatcatgtgggctgtgtctctgctgcatagaggaacaacttcgtatacgtgagctcccctgagtaagagtcagccggcaaagcccttactcactccagaggcatgcggcccttcacatttgcgccgtgctaaaggggagaacattttccatttctcttttgtaaacaaactatactctgtctattttaagaagaagaagaaagaagaaaaaaaaaacagtttaagcggctcttaaccaatacttgcaagactaagttgactggtttacaattaaactctttcattcccccaatcataacatctcattttcaagtagttgctcccattgtgtaatatttgatgtcacatagagactcgactccaaactctatgacattcgygggctgaaagacaaaggagcatgactggctttttcttcactttgaagacatctgcagtttattaattccacaaggaaagctggagggccagaggacgtcgagattctttcactaaaaaatttccttttgagacagtag

SEQ ID NO: 788852 - DNA, 629 bp, Homo sapiens
aagaggaactgatctaaactgaaagacagagtattaatattagaaggtgaggagcaggatgcggtgtatttaagatgaaaataattaatgcaatgaagatttactagatgaaatgagagggtggggctagaaaatggaccacgcaagttatctcacttaagcctgtcaataatccagagatcratattattaatcccatttaatgggcgatactacaaactcagaaaacttaagtaactttgcagagatgtcagtgttgtggcacaggtttacttgttacatgtaacacgtaaggacaggcaaagagatttcctccaacttgcaattattgtttttaactcaatgaataactttagagccagaatatttttaaagagagaaaagcttctctatggctggacaattttaagacctctctctggagaggtccttgttaacatgtttacatcttcctggctgctagctcccatgacatccatacgtacctctcctgaactgctctctctaccctgccccacaccactcatgaagcagggccaagggcatcttcttgtgccccatataacaaaatattgtaattgcctgtttatgtcactgtttttccttttttttttttttttttttttttt

SEQ ID NO: 788853 - DNA, 629 bp, Homo sapiens
aagaggaactgatctaaactgaaagacagagtattaatattagaaggtgaggagcaggatgcggtgtatttaagatgaaaataattaatgcaatgaagatttactagatgaaatgagagggtggggctagaaaatggaccacgcaagttatctcacttaagcctgtcaataatccagagatcgatattattaatcccatttaatgggcgatactacaaactcagaaaacttaagtaactttgcagagatgtcagtgttgtggcacaggtttacttgttacatgtaacacgtaaggacaggcaaagagatttcctccaacttgcaattattgtttttaactcaatgaataactttagagccagaatatttttaaagagagaaaagcttctctatggctggayaattttaagacctctctctggagaggtccttgttaacatgtttacatcttcctggctgctagctcccatgacatccatacgtacctctcctgaactgctctctctaccctgccccacaccactcatgaagcagggccaagggcatcttcttgtgccccatataacaaaatattgtaattgcctgtttatgtcactgtttttccttttttttttttttttttttttttt

SEQ ID NO: 788854 - DNA, 575 bp, Homo sapiens
attattaccatagcactacctttcatcctcaaaagtgtctccatttagatcataaattctacagttgactgggggttattacctcatgtatgccttatactaccccataggttttgactctggcagaacaggacacagaataaggcagttttatggaggagaggagctggaagggggttgtaaggcctcagcaccatccagctcsgtaggtattgcagtaggatttaagggcctagcaacctggggacactggttgctgggaagcaaggtcagaggttggcttccacagcctaggaggggaatgagcccctcttcaatctcccatcctgttctcagtcggccctttggacagagtcaactgaggcgcgtggctgaccaaaaccaatgagaacatgacgccaagaataaaaaatcacaactgtgccctgctccagtctgcttagcaagtagagattagtcctcgtgttggaccaagctaggacataggtatccttcagcctaaactgctatgtgaaaacacaatctcaaactcctcattcaaccccagcccaccccattctacagaggagagaacc

SEQ ID NO: 788855 - DNA, 575 bp, Homo sapiens
attattaccatagcactacctttcatcctcaaaagtgtctccatttagatcataaattctacagttgactgggggttattacctcatgtatgccttatactaccccataggttttgactctggcagaacaggacacagaataaggcagttttatggaggagaggagctggaagggggttgtaaggcctcagcaccatccagctcggtaggtattgcagtaggatttaagggcctagcaacctggggacactggttgctgggaagcaaggtcagaggttggcttccacagcctaggaggggaatgagcccctcttcaatctcccatcctrttctcagtcggccctttggacagagtcaactgaggcgcgtggctgaccaaaaccaatgagaacatgacgccaagaataaaaaatcacaactgtgccctgctccagtctgcttagcaagtagagattagtcctcgtgttggaccaagctaggacataggtatccttcagcctaaactgctatgtgaaaacacaatctcaaactcctcattcaaccccagcccaccccattctacagaggagagaacc

SEQ ID NO: 788856 - DNA, 530 bp, Homo sapiens
tattatcaaaaatcatggccccactccacataagatacatgggaatttgggttggaggaagaaaggtatgcattagttaagcctcttttttttgaaaagcagaaaaaatctaactgaaactagcttaagcaaaagaaggaacatactgatacaatgcattcaaaagggcagaatagcttcaggcatggctgacttaatgtgctcagaagtaggtttctctccatctcttagtttctctctcagaacaggaagatgaggactgtagctgcaaatcttgacacctcccagcctcaaatatgacaggttagcgtctctgtctttcaaaggctttcggaagtctcatagcgtctcrttggttctgacagccttgtctatccaccagtgaaggaggaatgtaagactcttattggccaaatctgagtcacctttcacccgtggaattggtgtggaaccgggggccactggtgtcacatgactggagaatgagcccaaaatataaatttgaaccaatattataagaaggtgaagca

SEQ ID NO: 788857 - DNA, 573 bp, Homo sapiens
cactacttccctaatttcaaccatctaattttttcccatcctactcatcatgtcttatcatcagaggagaaagttcgatttaaggaacaggtaacaagtgtgttcttgacccatcatctgaatggaacaggatcaattttctccttgttagcacccaatattatttttctattccataccgcctccatttgttcattctctcactatgcttttattaactttgcctcgttctaagccagctttcttctggtttccatgaagattacttccayagacaccgcaaagtatttgttttattaccatctttatattcccaggatagcaaaccaggttaagagggtgcaatagaaagcaatctcaattattggacaattcaatggtgtaaatagcattgttaaactcctcgagttaaaggtcgatgctatgatgttcccgaattaatacaaaattagatgatgctacatttttgtgtggctgaaagacttgcctgaggacctcagaattgcttgtgaggaaaataaagtaagtttgaatactaaggttacaggtttcacaacccagaagtcatagatt

SEQ ID NO: 788858 - DNA, 593 bp, Homo sapiens
tgcagtgagccaagatcatgccactgcactccagcatgggcgacggagcaagtctcaaaaaaaaaagcaactttttgatagtgagcatttataactgttataaaaagaaacctttatttttaaaaagttaaataaattatggcacatcaatgtgtgtatgagtatgtatgtatgcactctttaaggaaacaaagccttttactatttctgtgccttggaaagaagaataagaagtttctgcatccatgaagtggaggtaacattcatgtctaatgtttggggattgcaggaaaaaaaaatggaagtaactatgatgcctacttcatgtttgttttttttttctttctttttggtgaggatttaatgggtttgtgtgctaagaacagtttgtattaagtacagacggttttcaacttacagagtttcaacttactattttttgactttaagattgagygaaaacgataccattcagtagaaactgtatttccagtaaccatacaaccattctgtttttcactttcaatatggtattaaataaattacatgagatatgcaacactttgtgataaaataggctttgattagatgat

SEQ ID NO: 788859 - DNA, 595 bp, Homo sapiens
aggaacctctggagccatggggactaaatgtaatgcaatagcctagatgggatcctagaacaggaaaaggacactgtgggaaacctaggaaatctgaataaggtatgaactttaattaataatgtaccagcattagctcattaattgcagcaaaggtatcatacacatacaatgttcataatacggaaaactgagtgcgtgatatgtattaatttctatactatcttaatttttctataaacctaaaactgttctaaagtaaaaagtttatttttaaaaaaattcagatctggccrggcgcagtggctcacgcctgtaatcccagcacttcgggaggccgaggcggacggatcatctgaggtcaggagttcaagaccagcctgaccaacatggagaaacccccgtctctactaaaaatacaaaaaatcagctaggtgtggtggtgcatgcctgtagtcccagctactcgggaggctgaggcaggagattcacttgagcccgggaggcagaggttgcgatgagccgagatcctcccactgcactccagcctgggcaacaaaagcgaaactccgtctcaaaaaaaaacaaaaacaaa

SEQ ID NO: 788860 - DNA, 687 bp, Homo sapiens
tacaccagagatcatgatctttatcctctcagttcataaaagcttatccgttgctcagttactctcataccattattagcgtggttgtagagcacatatatgtatataattaagtgcccctctgtggccattaaagggctgcctgcgtttccgcagggagcacacgtggaagttgattcacaagcttataagagtgtgtcagtacctttcacctttatgacatgctgcatggaaatatgtggcatctgccacttatgatccaaagcaacagtggggaaagtatggcccatggccaaatctggcccaccacctgttttgtaaataaagttttattggaacacagccacacccatgtatgtacatattgtctatggctattttagtcctgccacagcagaactgaataattgcaatggagattgtaaatggcccacaaagcctrcaatatttactatctggctttttaaagaaaagtttttgctgggtgtgatggctcatgcctataatcccagcactttgggaggccaaggtggtgggatctcttgggtgcaaggccagcctggacaacatagtgagacctcatctctactaaaaaataaaaataattagccaggcatggtggtgccggcctgtggtctcagctgctcaggaggctgagatgggaggatcccttgagccagagaggtt

SEQ ID NO: 788861 - DNA, 477 bp, Homo sapiens; identical to SEQ ID NO: 760588

SEQ ID NO: 788862 - DNA, 569 bp, Homo sapiens
ctccactaaaaaatagaacagatagatataggtgataagacaatagagaaaaaatggaacctaaaaatactcaatccaaaagaaagcagggaaagaggggaaaaaataaaaacagataaccaagtagaaataaaatagtraagtggtagacttaaatccatccctatcagtagctacattaaataacagcacttaaattaaaagccaaatattgtgagactggataagaaagcaagacccaattcagagttgtctaaaagaaacccaatatatagacaacaaatggatgaaaataaaggaatggaaagagatacactatacaaacactaataataggaaaacagaggtggctatattgatatcaggccaagtggacttcagaataaacaatataaccatggattaaaaaaggcaattcacaatagtaaaaggatcaattcattaagaaaacacaacagtcctaagtgtatatgtgcctattcacagagcttcaaaatacataaagcaaacactgaaagaactgagaagagaacaaatttttaattcacaattatagatgattttcaaac

SEQ ID NO: 788863 - DNA, 569 bp, Homo sapiens
ctccactaaaaaatagaacagatagatataggtgataagacaatagagaaaaaatggaacctaaaaatactcaatccaaaagaaagcagggaaagaggggaaaaaataaaaacagataaccaagtagaaataaaatagtaaagtggtagacttaaatccatccctatcagtagctacattaaataacagcacttaaattaaaagccaaatattgtgagactggataagaaagcaagacccaattcagagttgtctaaaagaaacccaatatatagacaacaaatggatgaaaataaaggaatggaaagagatacactatacaaacactaataataggaaaacagaggtggctatattgatatcaggccaagtggacttcagaataaacaatataaccatggattaaaaaaggcaattcacaatartaaaaggatcaattcattaagaaaacacaacagtcctaagtgtatatgtgcctattcacagagcttcaaaatacataaagcaaacactgaaagaactgagaagagaacaaatttttaattcacaattatagatgattttcaaac

SEQ ID NO: 788864 - DNA, 619 bp, Homo sapiens
tgattttcaaactgaacggttttcttgcccaacaaatggtgttgggaaagctggatctccacattgtaagaataaatttggacccttaccttatatcatatataaaaattaactcaaagtgtatcaaagagctaaatgtaagagctaaaattataaaactcttagaaraaaacagaaaaatttcatgacattggatttgacaagaatttcttggatattacatcaaaagcataggcaacaaaagaaaacatagataaactggactacatcaaaatctaaaaatttgtgcatgaaaggacactcactatcaacagagtgaaaaggcaacccatggaatgggagaaaatatttgtaaatcatatatttgataagggattagtatccagactacataaagaactcccacaagtcaattagaaaaaaccaaataatctaactaaaatatgagcaaaggacttggatagccatttctctgaaaaagatatatgaatagtcaataagcacataaaaagatgctcaacaccactaatcattagggaaatgcaaatcaaaaccacaatgagaaaccacttcacacccatttagatggccatcatttaaaaaaacagaaaataacagg

SEQ ID NO: 788865 - DNA, 619 bp, Homo sapiens
tgattttcaaactgaacggttttcttgcccaacaaatggtgttgggaaagctggatctccacattgtaagaataaatttggacccttaccttatatcatatataaaaattaactcaaagtgtatcaaagagctaaatgtaagagctaaaattataaaactcttagaagaaaacagaaaaatttcatgacattggatttgacaagaatttcttggatattacatcaaaagcataggcaacaaaagaaaacatagataaactggactacatcaaaatctaaaaatttgtgcatgaaaggacactcactatcaacagagtgaaaaggcaacccatggaatgggagaaaatatttgtaaatcatatatttgataagggattagtatccagactacataaagaactcccacaagtcaattagaaaaaaccaaataayctaactaaaatatgagcaaaggacttggatagccatttctctgaaaaagatatatgaatagtcaataagcacataaaaagatgctcaacaccactaatcattagggaaatgcaaatcaaaaccacaatgagaaaccacttcacacccatttagatggccatcatttaaaaaaacagaaaataacagg

SEQ ID NO: 788866 - DNA, 491 bp, Homo sapiens
tctataacccagacacaaaaggtaatggtctactcagaatctttccattgaaactgtttctctgatgctcagagctgtcatgcactgtgccctcaccaacccacacatggggatccactgtctttatgtctccccagtggtttcttcagagatagattctggggaggagggggaagccagaagcccaggttagtttaccattttgtcagttgcaaggagctctatgtcagttagctgtatattaatcttagctttttcartagttgtggtactctgtcaggatccccaaaagtttcctcctaattggttcagtgtacccatcccccagtttctacaggctttactcccaagagttcacatctgcagttctcttcagaggactcctcttggtaccctggaacctcttcacgcagatgcttccagaaccaaaaatgtctgggaactcgcaaacccccatggtggcctatatatactccttactagtgcaggag

SEQ ID NO: 788867 - DNA, 491 bp, Homo sapiens
tctataacccagacacaaaaggtaatggtctactcagaatctttccattgaaactgtttctctgatgctcagagctgtcatgcactgtgccctcaccaacccacacatggggatccactgtctttatgtctccccagtggtttcttcagagatagattctggggaggagggggaagccagaagcccaggttagtttaccattttgtcagttgcaaggagctctatgtcagttagctgtatattaatcttagctttttcagtagttgtggtactctgtcaggatccccaaaagtttccycctaattggttcagtgtacccatcccccagtttctacaggctttactcccaagagttcacatctgcagttctcttcagaggactcctcttggtaccctggaacctcttcacgcagatgcttccagaaccaaaaatgtctgggaactcgcaaacccccatggtggcctatatatactccttactagtgcaggag

SEQ ID NO: 788868 - DNA, 512 bp, Homo sapiens
gttacatgagtaagttctttagtggtgatttgtgagattttgatgcacccatcacccaagcagtgtacactgaacccaatttgtagtcttttatccatcatgccctcccaccctttccttccagtcccaaagtccattctgtcattcttatgcctttgcatcctcatagcttagctcccacttataagtgagaacatacaatgtctggtttcccattcctgagttagttcacttggaacaatagtctccaatcccatccaggttgctgcaaaygccattaattactttttatgccagagtagtattccatcatatatatatatatgtacacacacacacacatcatatatctatacatcatacatatcatatatatgatcatacatatgatcatatatggggtatatatatatcacatacatcatcatataccacagcttctttatccactcattgattgatgggcatttgggctggttccacatttttgcaattgcgaattgtgctgctat

SEQ ID NO: 788869 - DNA, 512 bp, Homo sapiens
gttacatgagtaagttctttagtggtgatttgtgagattttgatgcacccatcacccaagcagtgtacactgaacccaatttgtagtcttttatccatcatgccctcccaccctttccttccagtcccaaagtccattctgtcattcttatgcctttgcatcctcatagcttagctcccacttataagtgagaacatacaatgtctggtttcccattcctgagttagttcacttggaacaatagtctccaatcccatccaggttgctgcaaatgccattaattactttttatgccagagtagtattccatcatatatatatatatgtacacacacacacacatcatatatctatacatcatayatatcatatatatgatcatacatatgatcatatatggggtatatatatatcacatacatcatcatataccacagcttctttatccactcattgattgatgggcatttgggctggttccacatttttgcaattgcgaattgtgctgctat

SEQ ID NO: 788870 - DNA, 655 bp, Homo sapiens
tgagatcattgaggcttggggaagttaatctctgtgtaaacatttcacaactcatggcaaggcagccagattcagactgaggcccagagggctcagcagtccccacacagtcattcttttactcttggctcctctatgtaaagttttccttcactgtttcatttgttgatgtaaaggataggatatggsagcttctttcctgtgacgagtttaccacccaggcctcagtggtaatgaactgaaaactgtaggttgcaaagctgcactctggcagctgcaatagtgctgcggcttcagtatcgacatccccactttggggttctcctctgcttgtagtagccgcggcattctactgaattatgcatcagcctccgctcataaacacccttctcccagttagatccaaacacgtgaaagcagccgtgccctgacttgttaatttctagattcaacacactgaggattgaatgcagaaactctggatggttgggttctcccgtaaagtggtagcttagcacacaacattccttgtcaaaagcattcccactacccagcacttcagcagtgagggaattacaacaatcagaaatcaagaggacaatggcattaagtctgaagaggtctttgttaaaagtgcatatacatgatgcatgct

SEQ ID NO: 788871 - DNA, 608 bp, Homo sapiens
tatttcttctttggtgtcctgcatacacagttttaaaatgcttgcagacgttttacctggctctttgcattaaattatctcatcagtcgtaattgatcttcacttctccgaagttttcatggcacatggcaaactgggatgtacccttcctcctcctctgtgttctatcagttatttaatctcatctccaagcaacatgttctcgtaatggctagattttggtctagaacaatagccttactgctattattcttttactcaacagtccrgattgttacgtacccatgatctggagctctggacttcttggttttgtgaaccgcaggactcttgcaagtctactgtgttagtccgttttcacactgtattataaataaatacctgagactgggtaatttataaagaaaagaggtttaattgactcagaatttcacactgttggagaagcctcaggaaacttacaattgcggaggaaggtgagagaggagcaaaggcacgtcttacatggtagcaggtgagagagagagacagcaaatgagtaaagggagaagagctgcttataagaccatcagatctcatgagaactcactcagtatcatgaaaatagc

SEQ ID NO: 788872 - DNA, 517 bp, Homo sapiens
tttgaatatatagtctttttagttttccttttttctgacataaagtatagcatatgtcatatattcttttccaatttcctttttttcaataaacaatggatgtttgaaatcactccctatcaagctgtaggatcttcctttcttctttttaaacagatgcatgtagtacaacactgtgtggagatatcatagtttattccatcagtttcctattattgaatattgtcaccaatattttgctgttgcagataatgctgcaatggttgaccatgtgcatatgttgttttagatttgaaaaggtgcccttcaacataaatgagtagaaatgagattgcagggtcaagkgcacatgtaattttgttagatgtgacgaaattgccttacatagtatttgtagcattttgtgttggccatcagaacatgttagtgaacttttgaatgtttataaatctgaaaggtaagaaattggtgtcttttatattcttaaatttgaagcaacggtagtaacaacagcacg

SEQ ID NO: 788873 - DNA, 632 bp, Homo sapiens
tctataagcttttcaacacacacacacacacacacacaaacacacacaatcatattgctttttaggtgcaaacatgcctccttcattggaaacttttctgagaaacaagttccatataaatgtggtcatggcatttcttaagaacatgtttacagtttgaccaaagtgagtggaaaacttacatcaaaatcatttccaagttatcaatgttacaagccatgctacaattaacatcactgacacatgcctctaacttacaactgggggaaacaaaaaaattgcccaagattcmcctagaaatggaagtgctaagtttctgctcatggacattttcaactgtagtggttattaccaaattactcccctaaaaggttaaaccaatgtatgtacttctaaaagggagtaaagttttccatctctcctggtaaacacttggtttaattattcatttaatttttgccaatatgataaatgtaaaatggatcttattgtggttttattttatttcctggttgccaagcagtattttcacatattctcagacttgttaatccaaatacatccttttcttatttcccaacttgtttgcatgattttcttgatgatgttaggaattttccacatattctgga

SEQ ID NO: 788874 - DNA, 632 bp, Homo sapiens
tctataagcttttcaacacacacacacacacacacacaaacacacacaatcatattgctttttaggtgcaaacatgcctccttcattggaaacttttctgagaaacaagttccatataaatgtggtcatggcatttcttaagaacatgtttacagtttgaccaaagtgagtggaaaacttacatcaaaatcatttccaagttatcaatgttacaagccatgctacaattaacatcactgacacatgcctctaacttacaactgggggaaacaaaaaaattgcccaagattcccctagaaatggaagtgctaagtttctgctcatggacattttcaactgtagtggttaytaccaaattactcccctaaaaggttaaaccaatgtatgtacttctaaaagggagtaaagttttccatctctcctggtaaacacttggtttaattattcatttaatttttgccaatatgataaatgtaaaatggatcttattgtggttttattttatttcctggttgccaagcagtattttcacatattctcagacttgttaatccaaatacatccttttcttatttcccaacttgtttgcatgattttcttgatgatgttaggaattttccacatattctgga

SEQ ID NO: 788875 - DNA, 644 bp, Homo sapiens
agagacccaaagagggtgtcacagctctggcttggtgagcccctaggtctgggatcccggaagggccacagctcttctctccttgtctccttctcatcacccacaatgtggcaagcggtgggggctggggggtgtgtttcagccctgtttatgttataactctttcagtcccactattcagtgagtctcaagttcttttcccaagtccaggaagaatgaggtatggggacagctgtagggtgagcaaggtggagaggagcttcattgagcaayagaacagctcccaggagacctaaagtgggtagttccttctggcagttggtagtcctgatgtctgtgtgagtctggctgagtctctggggtttttatgggttccgaagagaggaagtgcatactgattggctcatgggcggccacgggcaggctgggaaaagcaccataagttgtcactctgggctgcaaactccaccctgaactagtagcctggtcccccaggcttcaggccatccctggcttgaaagtggagtttcactggggacccaccaataacctgtctgcctcctgccatcaacatgccatccaaggtgcccaagctgttcatgccaaagggtgcctgcaagcctgtgctgagctgccctcagctc

SEQ ID NO: 788876 - DNA, 609 bp, Homo sapiens
tgcataattcagaagtctgtgtggttaacatttaagttcttgagcagtctgaaaactctattgtcacaaaacctatttgaggtgtaaagggaaacagaaagttaaaacaaacatttatttattgcatgctttcaggctagagttccacgccagccaagcctgtgagataaaccacaagttgtgaaatactgtttatttgtatgagggtactaatgtggagtgactaaacatttccctcactatacactttaccattgagtgaaacctcacatttatgctgttcagaattatgtggacttatattgatattattgactgttttctctttarcctaataaaaacctttataactaaaagcaggattaatgccacagtaaaatcttccccccataagaatacttcttgtttaattgctatttctaatgggctctaaaaaaaaacataaaaataaatctatcttaaatttgtcatggatgaattattccaagtctttattgctgtttttaaaatatgtcattcaagctattaataatagaaattaaaatgaacatgcatagatgtagtacttttttaatcaggcattgtttctttttctttctttctttcttt

SEQ ID NO: 788877 - DNA, 607 bp, Homo sapiens
ctgagcaagaactcagttatcaccatgggaatgatgctaaaccattcatgagggatccatccccataatctaatcacatccccacttccaacattggcgaytgcatttcaacacgggatcatgaggggacaaatatccaaaccatatcagtctttcactctatttaccagtgacaaatatttaggtttgctgtaaatcttattgattaataaatgagggagacacatttgaggtaaggcagataactgtgttagtttcctaccataccagccttactacttgagccaaatctactctccagtcatatttatgtcaactctctccagtttttccaaacaccagtgacttgtcaatgtggtttcctaattttgatattgtcctcctttcccttggttgagaaatatacaaaatattccaggaaaactctggttaaatttggcctcatttattcctaatctatactccagccttacagtgatatcctcgttgaggtatggctcagcaccaaaggtcagagtaacttttactttaattttagcctattttttcctcataatttaaaaacaaaaaaagatagaacatatcataactaaaaattatagagata

SEQ ID NO: 788878 - DNA, 651 bp, Homo sapiens
atcccaatgctagtcataatcgtgggtcctaagaacccctgaaaagctggatttactaacattttcatatgtggtagatgggaatggggttatatggaagatgacaccctggattctgcaattggcaagtatttaaagtgtatgggagaaatggtaatagacttatatgtttgatttaggtacatggaaaaaaattagataacaatgcagaacattggaaatgactgtagaggtagacagaatttctctagcttctgttttcttgacacatttttcaaatatgagaaaacagcaagtggatgaacttctgtctgaagtactctgacagaagccttcttctagagggcatagacaataccagagcttttgttattttcacaggagtggagccagagaaattgggtctctagaggttaggattctaatgtgaagagatgtgtggataaatgacctcaacacatgtatgaaaatgcaagttttatttatttgccyaggtatgatgagaccaaaagaccaggagacaactgccaaaggttattataactccagatccaaagggaaagggacacatgacactatgggggagacacatggaaaagcaccaaggttggtcaggaggaagatggactgtgctgaaaatgcaggcaagag

SEQ ID NO: 788879 - DNA, 608 bp, Homo sapiens
gtggaatcctttatcacagagcaataaattgccctttggtgagtactaaatgatagtgggtttatgcagaagctaatttagataattaattctaccacataagtgttagatacacacttttttggcacagagcaatagacaaatacatattattctgtaaaattcattttataacccatcttaatcaagttctgtgtgctactataagatgcaatagcattagagcagatttwggcatctgagaaccaattatttatgtgattaaacaaccttaaaactcccagagcattttaataatcaagaatgttttgtaaaacattagcataataaaaatgatcttagtgaaaaatactaatatgagaatgtaatggatgcaagacactgttctaagagctttacaggtattaatttatttaatacaatcatactatgaagttggtcacattacattttctgttttacagataacagtgttgaggcagagaagtttcataatctgcctaagatcattgcatttacaagtgacgaacccactgcacaaattttggcagtatgtttttcattaattagcatttactatctgcattttagagttaattctgttttat

SEQ ID NO: 788880 - DNA, 514 bp, Homo sapiens
taggaaattcaactcaaataaaaagtgggcacaaatatgccaactctaaaggtcaacacggttgtctttggctctgtgctattttgaaatgatcagtctgtgttgaaggctaagatcttttttaaaaggcaagttccaaagcacatttattgttatgactttacttgagctttctgaagaaaacataatggttttaagaaaatattgaatgtggctttcaaaatccctaaatgaatctacatatacataaaaaatgcctaatgccacatataaaggtcatataccttcttgacccttcakccaggagccaaattcaggtgggtgccgacgacttctcagctactggtagatgaccactccctcttacctgttactcagcccgtgcatagatttgagtaatttcatcagttaccaaaagtgaagcattggactctgatcttgcaaagcaaataactctttgggtttacaaagggcaaaaatttccatgggaaatcccacatattataatcaccct

SEQ ID NO: 788881 - DNA, 596 bp, Homo sapiens
ccatgaagagtacaggaagagccaaagagagaaagtcttggcatttagccaaattcacctcaccaatatttcccaaaaaaatggccaacaaaatcctgtggagagcattttaaaaacacagatttctgcaccaaaatacacccatccccactcctgatggttytaaattcaacggattaaggcagaaccagagaaacagaatttccataaagcttcccacaagggtccactcgggagccaaggttgggaaccactgcttcaggctggtatatttcactgtgatgaccatcccttcatagtaggaaagagtgaatgaacacctcccttcactttcactgtcaaaattcttaatttattttaaaattttttttacaatgataataatgaatttcagttttttaaattacttaatggagattatctagttggaggtattatgatgccagtttcatggaagaatatgccctgaattcatcccaaatttgaagagaaaaaatactataccccactgctgccagaatatttcacttgtgaccaaaaaaaaaaaaaaaaaggaaaagaaaaactcaccgagcaaggctgggtatagtggacca

SEQ ID NO: 788882 - DNA, 583 bp, Homo sapiens
atacaagcctctatagaatttcactttctttaggtgatcaaggctaggatcacagaatcctaaccacatagatatattttcaaagcaaatccagctaaagattaattttactcatttgtaattttatttgtttgtttayaataatgctatagtgatttttaaatggattagacagaacattactcatattaggaggagcagaacaatgattctgggaaatgttaatcagggttccccaaacaaaggctatctgatcagattagctgggactagctagactgtatgctacagttcccatttggtgattcaaaatattgattgacattttaaagtatccagaagggcttcagtaaaaaaagtatcgaactttgcttgccgttaacaaactcacttaatagtgtaaggaaagtctatttttcttggcacaggattaatgctacattacaaggaaaactacgaagtttttctttgacaccagtttgggaagcactgcattagctaatttagactatgcttaatgctgttaaaaaatgtaactcaaaatgaacgctaagtctaaatcgaacacatcggtttagtttca

SEQ ID NO: 788883 - DNA, 583 bp, Homo sapiens
atacaagcctctatagaatttcactttctttaggtgatcaaggctaggatcacagaatcctaaccacatagatatattttcaaagcaaatccagctaaagattaattttactcatttgtaattttatttgtttgtttacaataatgctatagtgatttttaaatggattagacagaacattactcatattaggaggagcagaacaatgattctgggaaatgttaatcagggttccccaaacaaaggctatctgatcagattagctgggactagctagactgtatgctacagttcccatttggtgattcaaaatattgattgacattttaaagtatccagaagggcttcagtaaaaaaagtatcgaactttgcttgccgttaacaaactcacttaatagtgyaaggaaagtctatttttcttggcacaggattaatgctacattacaaggaaaactacgaagtttttctttgacaccagtttgggaagcactgcattagctaatttagactatgcttaatgctgttaaaaaatgtaactcaaaatgaacgctaagtctaaatcgaacacatcggtttagtttca

SEQ ID NO: 788884 - DNA, 605 bp, Homo sapiens
tgtgtagaggtactgatgagtctttttttagggggggatgaagaattgtgcagaactgcaaagtgcatcctggcttgaaacttttgattgttctaccttatctcatgagggttactttctctactgtcctttgcttcacaggtgctcacgtgacggccacagatttacccgaattacttggaaacctgcaatataatatttcccgaaacaccaaaatgaaaagcaagcatttgcctcaggttaaagaactctcctggggagtagctttagatacaaacttccccaggtcttctaataattttgactatattttggcagcggaygtggtctacgctcatcctttcttggaagagctcctcattacctttgaccatctgtgcaaagaaaccaccatcatcctgtgggccatgaaattcaggttggagaaggaaaataaatttgtagatagatttaaggagttgtttgacctggaggaaatttccagtttccctagcctgaatattaagttgtataaagctgtgaagaaaaaccggaggagcgtatgacatcctcgatgaggatgtggaaatgctaaggcaatttttagcaaataatcactttaaaga

SEQ ID NO: 788885 - DNA, 594 bp, Homo sapiens
agagacaaatactgaacaggcagttatattactctcagtaaaataacaactgggaacagtttctggggattactttacatatggaggaaatgcaaaaaacactttgtcaggattattcctgtagcaaattagatgtgactaggtcaaccaaacatggccactgtgaaccatcttattgagcatagaagtggttttgctaaaaatggatttctccacggagcacggtggctcatgtctgtaactccagcactttgggagactgaggcaggaggattgtttgagaccagtttgggcaacaaagcaagaccctgtctcaaaaaaaaaaaaatcagggcgtggtggtgggggcctgtaatctcaactactcgggaggctgaggcaagagcatcacttgagcctgagaggtggaagttgcagtaagctgagactgcactactgcactctagyctgggcgacagagtgagaccctgtcaaaaaaataaaaaataaaaaaataaaaaaaatcaatttcccgtatacttctgttataaagaagtctttaaaaaattgcctgctcccttaagtcagccttttcactgagtttaaatttcgttc

SEQ ID NO: 788886 - DNA, 558 bp, Homo sapiens
ctctttttgaaattctagttttattcaatacacactgacatgagcattttctattaaatttcctatctctgtgtcatgcttctgtgttgttttgggtacatggaaatcctttgctcatgcactcatatacagaccacagatttggctgaaacaatactggtgatcgaacagcaacatcattgtgtgctttcttatcctaccatgcacatagttattttagagtcagtaactttgctggcttcatcaggcaaattcagctttaactcattaagacctcctagaatttcatcagctagaaggaatgccaatgcagacaaataatgcgttataaactgaagttttccatgttactatattctacaggcaatccattcatctgaattttccgrcaaatgtattgggctgaatggaaaaagaaactgttgctaacaccttgaaatccacctttagaagttttgatggcacctaattccaaatctatcattatggtttgggaattcaattagctgtaagggcatttgttctttggggatttcaacattcaggatcatggcattt

SEQ ID NO: 788887 - DNA, 655 bp, Homo sapiens
tggcagtgcgggcattttatgaagtacgctcatttgggccgtatatgctaattgatcccaggggcaatccgagattcaacaaaaagagaatagggggcaaggtcatggaaccctagaggaaagtgtgagtacagactgttggcagagcctatcaaggtcacacatttctatgtttcattagctttaacattttaagtggctgggaaaactacttagggaattaagtcattattaggcagtgaagacatctcaagaaatgttagaaactaattcttctgttatctgactctstaagagtcattttaccagtcaaggaaatttggcacaatgagatttggcacagttgctcacctttgccagtgatgttcagctctgtgaaaagtgtgttctctgtaaaaacttagaaaaaataattaaaagggtcacgcatgatggctcacacttgtaatcccagcattttgtgaggctgaggcaggtggattgcttgagctcaggagtttgagaccaacctgggcaacatagtgagaccctgactttgttaaaaatacaaaaattagctgggcatggtcgcacgcacttgtggtcccaggtactcctgaggctgatgtaggaggattgcttgagccccggaggcagaggttgcaatgagtggaga

SEQ ID NO: 788888 - DNA, 655 bp, Homo sapiens
tggcagtgcgggcattttatgaagtacgctcatttgggccgtatatgctaattgatcccaggggcaatccgagattcaacaaaaagagaatagggggcaaggtcatggaaccctagaggaaagtgtgagtacagactgttggcagagcctatcaaggtcacacatttctatgtttcattagctttaacattttaagtggctgggaaaactacttagggaattaagtcattattaggcagtgaagacatctcaagaaatgttagaaactaattcttctgttatctgactctgtaagagtcattttaccagtcaaggaaatttggcacaatgagatttggcacagttgctcacctttgccagtgatgttcagctctktgaaaagtgtgttctctgtaaaaacttagaaaaaataattaaaagggtcacgcatgatggctcacacttgtaatcccagcattttgtgaggctgaggcaggtggattgcttgagctcaggagtttgagaccaacctgggcaacatagtgagaccctgactttgttaaaaatacaaaaattagctgggcatggtcgcacgcacttgtggtcccaggtactcctgaggctgatgtaggaggattgcttgagccccggaggcagaggttgcaatgagtggaga

SEQ ID NO: 788889 - DNA, 634 bp, Homo sapiens
ttaatttttagaccacactaaagttgctcttagtgatgatagggcttgtttctttgtttcattgtggctacttcttagcaccttctttagaaagcagttaggagaagatcatttgaaggccaacgagtgttgtgggttattgttaagctgatttaacattatctccccccacaaccacgcttgactagcttcacatttggccaggtgcagtggctcacgtctgtaatccagcactttgggaggctgaggtggaagatcacaaggtcaagagattgagaccatcctggccaacatagtgaaaccctgtctctactaaaaatacaaaaattagctggttgtggtggcgcacgcctgtcgtcccagctactcgggaggctgaggcaggagaattgcttgaacacgggaggtggaggttgcagtgagccaagattgcaccacagcactccagcctgggcgacagagtgagactcygtctcaaaaaaaaaaaaaaaaaaaaaaaagagaaagcaaacgtatttcttcttaaaacagaataaataaatagtctgtctctttctccttctgttcacatttgccccagtttcttctcttgaatcatgacagtttggaaaattgtctggattgcttagtgcca

SEQ ID NO: 788890 - DNA, 437 bp, Homo sapiens
agttaacccgtggattgaaagatgaatcgctggcttatatctatcattgccaaaatcattatttttgtccaattggcttcgaagcaacccctgttaaagctaataaagcattcaggtaagcattgacgtgttttagaaagtgcattttaagaaatattaaaaaatagatgggtgcggtagctcacgcctgtratcctagcactttgggaggccgaggtgggcggatcacgaggtcagaagatcgagaccatcctggctaacacggtgaaaccccgtctctactaaaaatccaaaaaaaaaaaaaaaaaaaaaattagccgggcgtggtggcaggcgcctgtagtcccagctactcgggaggctgagggaggagaatggcgtgaacccgggaggcagaacttgcaaaaaaaaaattaaaaaaattaaaaaatattcaa

SEQ ID NO: 788891 - DNA, 555 bp, Homo sapiens
ctgttagtggactgtagcaagacaggcctgtgctcttgccaaggatctttctttcccgcccatccacactgttgtactatcccaaagtacctggtctcatgggcatgctctacatgaaatgagttaggggtcagccctgttctcagcagagacttgtcacagaatctttcaccaccatcggcagcaattagcactaattrgtaccctgtgcacccgcagaacagcaagggcagtgatggagtgaacaggcaggacaaattaccctttcgcctctgggaagtgaacttattggttctgtgcgaagctgctctgttcccactacctcagctgggcctaggaggtggattaaggaggaatttattccctgaggctgtcaaacaaaaggattgaagaaggtcagttcactgagtgggcaaaacaaagcagctgagttatgaccacgaaacagccataaataggtctccacgtcctcactccgtattgcctcacccttcctatctctccctctcgctttccatttctccctataatattataaatccaatcaaagcaagt

SEQ ID NO: 788892 - DNA, 639 bp, Homo sapiens
cgaacctgggcagtgctgccacccaccccaccagggccaagtcctgtccttggagagccaagcctcaatcactgctagcctcaagtgtccccaagccacagtggctagggggactcagggaacagttcccagtctgccctacttctcttacctttacccctcatacctccaaagtagaccatgttcatgaggtccaaagccaggctcccagagagccctcattctcgtttgtcagtgtggtcccacagactctattgagcagaaattcctttmagtatcttgcatgtgaacttttgtaggctctcacagctgtgcaggtttcacctgtgtttgtgttctgttggttcagtcatgagcagaattggggaaggaatcaggcacacctacctcagtactaattttttttggctgttttttcccaaaatgtcatagatcagttacagataacagaagagtaactgtacaggaaaactgtcactttgggctgtctgtgctgcttaaatgggaaggcggctgcatctttgatcccaatttttaaatttcttcttactgtaactatgaggtaaaggagccggcacatcaaacattttcacctgcaacaaataggaatcattttcttatgcaccgaattgagaactt

SEQ ID NO: 788893 - DNA, 484 bp, Homo sapiens
tgataaatatgatgccagagccccaaaagcaggttgataattatgactccttggccctaggacttagtcaatctttggtctcacctgtgggaccaaatttatctggaacatcagaagcttaggagccaagttaaaaaactcaggatgacaagctttgagacgaaatgggtccccaaggaacgctgagaggtatagaacaacagaagatacaggagaactgcaaaaattggagctttggcctcttgmgtcttacagcttctgtccccaaggaacagcactagaaaatatcagctattgagttacagataaggaaaagctgggataaatatcataaagacattatcttatatatgcttatgatttaagacaaaattttttttttgaaagagtcttactctatcacccaggctggagtgcagtggcgcgatctcagttcactgcaacctccgcctcccaggttcaagcaattatcctgcctcagcct

SEQ ID NO: 788894 - DNA, 631 bp, Homo sapiens
ttgaaaatatgtatttaatatatagtatgcctttaggctgtagtgttgtctaaatgaatgctaaagtctccaagctttagcttttaagtcataacctcacagcatcatctgactttccaactcattgtggacagtattaccataaagtaatgatcaccaagccatatcttaccaccttgtgagtagtactaaggaagtaagtatagtttattcactgtgttgattgacctttctaattactatacttaagtacttgaatcaattcattttgtttcaaatgtgtcatgtaatcaaatagtagatgtgctttttgatgtctgacaaaaaataagtttttgcattctagtgataatatacaatacacataaatttttatcttacagtcagaaatgaagaagcatctgaaactgtatttcctcatgatactactgctgtaagtaaatatgacattgattagactgttgaaattgctaacaattttggaatgcyttgttaaattatttatcttacatttttaatttcctaatctgtaatttatctaagcctttgagaaagtctctaaacctggtcctatatgtgattttaacttcctgtgaaactctgctgtctctctgttaaagttgcatatata

SEQ ID NO: 788895 - DNA, 638 bp, Homo sapiens
ctctgagacgtcttcaaaggcagtttactaatcctgctgaagagacaactgtcatttacacagcattttaaagttttacaaaatactgtcatgaattaggttaaaccatatgaaattgctgatatttgaccagttgtgatttctcaagcaacagtttcatgtagtttaacctrtaaatcatttcaattaattcttggaacagacgtgaggtaggtgaggcaattctttcttttctctaaccaaagaagtacctttatagatgtgagatgattcccagctattaagtagtaaatagagctaggacttgagccccaatcttccagcttcaatccagatcatatgacagcttgctgattaaactagatgacagagaagatctctttccttcagatacacatactttttctctgttcccctctccctatcagctagattcccctaaatcactgatactggttttgtaattttgcatcggcatgtttgacaattggtatcacatttagggtttttcattcttttttggtccaaacttttcatttctgcttttaaaggaaatacttttggaaacataaatatgtgggtttgcaatttataaagcagcttttccacttattttcttagaatattgacatactttg

SEQ ID NO: 788896 - DNA, 629 bp, Homo sapiens
aatagagaggatcctagtcttctgtttttcccctaaaaaatggtcagctaatagaacagagatgtttgcctggtggtagaaagaggccataaaacacctcctaatttcttctgaaagggactgacttcaattgcatcagagattaaaataggtactcaaacctaaaggtactctcaggaacagttgagattttggccaaaaggtaattgaggggaggctcaagatactggttaaactgaaggtctgtgagtttgcaggagagaactaggggctgaaacaactgggaggagttctcctggaaccaaaagaaagaacaagcactgacatcagaaactgtttcttcaagggagccagaatttgaytaaattagtttatggagcaattcgtatccgagaacattgttgaaaaaaacagagcaattggctggcaatgagtaaagtgtaatagcttggtgtggccaagaatatagaggaagggagccctaccaaaaccactacaaggggcccatgggctaaacaaagctatgttccctgaggaacaccagagactgaacacgtaggtgtcactgaaagaatccagttggtctctgctgtggtttgaatgtgtcctgcagagttcatgtgttgaag

SEQ ID NO: 788897 - DNA, 532 bp, Homo sapiens
acatctgttgtctctcctcctgttcttatgaggacaccagtcatattggattaagggataycctactccagtatgatctcatcttaactaattacagccgaaccacctcttttcccaaataagatcacattctgaggttctaaaaagaaaaattattgaggggaggaatgaatgcacctagtatatttttccttaaatatttggtaaaaattcaccagtgaagaaatctcatactgagcttttctttgtgggatgttttcaaattactaactggatatcttagttactatatgtgtattcaaattatctattttatcttgaatcaatttcagtagtttgtgtctaagaattttttcatatcatctgttttatctaacttgttggcatacagttgttaatggtgtttattttttattatactttaagttctggggtacatgtgcagaacgtgcaggtttgttacataggtatacacatgccacggtggtttgctgcacacatcaacccatcatctacattaggtatttctccc

SEQ ID NO: 788898 - DNA, 518 bp, Homo sapiens
acagctttattgagatatacttcacatacctaacaattcacccatttaaagtgttacagtgtaatggtttttggtatatcacatcattaattttcaaaattgtggcaaaatacatataacataaaatgtgccattttgatcactttaagtgtacaattcagtggcattagctacattgattatgtcatgcaaccatcatatccatgtattttcaggttttttaccatcccaaacagacactctgtggctattaagcagtaactcccccattccccactctcaccagacgctggtgacctataatctactttctatgatcttacrtattctaggtgccccatataaatggaatcatataatgtttgtccttgctgtctactttatttcatgtagcataatgttttcaaggttcagtcatattgtagaatgtatcagaatgttattcctttttttggctgagtattccattgtgtgcatataccacattttgtctattcctttatctgttgatggacaac

SEQ ID NO: 788899 - DNA, 518 bp, Homo sapiens
acagctttattgagatatacttcacatacctaacaattcacccatttaaagtgttacagtgtaatggtttttggtatatcacatcattaattttcaaaattgtggcaaaatacatataacataaaatgtgccattttgatcactttaagtgtacaattcagtggcattagctacattgattatgtcatgcaaccatcatatccatgtattttcaggttttttaccatcccaaacagacactctgtggctattaagcagtaactcccccattccccactctcaccagacgctggtgacctataatctactttctatgatcttacgtattctaggtgcccyatataaatggaatcatataatgtttgtccttgctgtctactttatttcatgtagcataatgttttcaaggttcagtcatattgtagaatgtatcagaatgttattcctttttttggctgagtattccattgtgtgcatataccacattttgtctattcctttatctgttgatggacaac

SEQ ID NO: 788900 - DNA, 518 bp, Homo sapiens
acagctttattgagatatacttcacatacctaacaattcacccatttaaagtgttacagtgtaatggtttttggtatatcacatcattaattttcaaaattgtggcaaaatacatataacataaaatgtgccattttgatcactttaagtgtacaattcagtggcattagctacattgattatgtcatgcaaccatcatatccatgtattttcaggttttttaccatcccaaacagacactctgtggctattaagcagtaactcccccattccccactctcaccagacgctggtgacctataatctactttctatgatcttacgtattctaggtgccccatataaatggaatcatataatgtttgtccttgctstctactttatttcatgtagcataatgttttcaaggttcagtcatattgtagaatgtatcagaatgttattcctttttttggctgagtattccattgtgtgcatataccacattttgtctattcctttatctgttgatggacaac

SEQ ID NO: 788901 - DNA, 602 bp, Homo sapiens
gagaacatcaggctgtttacacacccgggaggggctggggctctgtgactggagctgcagggtccatcgaggcctcattagattctggttgggcaccacaggttgtgactgctgtgagccccccaaccttccagcacctcagagtgtatcaggaaggggcgctgggaggaaagatcagaagtgctgccttttgccccatcctgtagagtcccctgatgaagccaccgcggctgaccaggagtcagaggatgacctgagcgcctcgcgcacatcgctggagcgccaggccccgcaccgcggcaacacaatggtgcacgtgtgctggcaccgcaacaccagcgtctccatggtggacttcagcatcgcagtggaggtaygcaggggcagggcagctctggttcccagcttgtgctggcccaggcagaacccaggcaaacttctgggccaggggcttgagggaggctgggactgtgggtggccccacctacccgcggtggctgagcagggaaggatcaacactgggccccctttggagcctgccggaggtatccctgcaggggtgatgctgagtgggcgccgacctcccacaaatgcagtcatat

SEQ ID NO: 788902 - DNA, 639 bp, Homo sapiens
tttgctaattatttgttttgctgtgcagaagctttgtagtataagtcctatctacttatctttgtttttattacatttgcttttgggttcttcgtcatgaagtctttgcctaagccaatgtctagaaggatgtttccaactttatcttctagaatttttatggtttcaggtattagatttaagtcttttatccatcttgagttgatttttgtataaggtaagagatgaggatccagtttcattcytctacatgtgacttgccaattatcccaggtccatttgttgattagggtgtcctttccccactttatgttttggtttgctttgtcaaagatcagttggctgcaagtatttggttttatttctgggttctctattctgttccattgatctatgtgcctatttttatgccagtaccatgctgctttggtgactatagtcttatagtatagtttgaagtcaggtaatgagatacctccagatttgttctttttgcttagtcttgctttggctatgtgggctcttttttggtttcatgtgaattttaggattatttttcctagttctgtgaagaatgatgatggtattttgatgcgaattgcattgaatttgtagatcgcttttggcagtatggtcatt

SEQ ID NO: 788903 - DNA, 510 bp, Homo sapiens
tagtgccacctgctagtgaggctgaggtggtaagattccttgagcccaggagccggaggtttcagtgagctgagatcatgccactgcactccagcccggggtacagagcgaaaccgtgactcaaaaacaaacaaacaaaataaaacaaaacaaaactaaatgaaaacgtaggagaatatcttcatgactttgtggtagacaaaaatgtcttatatagggcacagaaagcactgactagaaaaagaaacccactgggcttcatcaaaagtatacatgtttgctcataaaggccctgttaagagtcacaggctaggagaaaatgtttgcaatacataygtctaaaagggcctgtatccagaagatgtaatgaattcttacaaatcaatgataaaaaagaaaagccaataaaaacaagcaagaaatttgaagacagtatataaaaaaggatgtctgaataatcattaggtacatgaaaatgtgctcaataattatagtcatcaagaaaatgta

SEQ ID NO: 788904 - DNA, 599 bp, Homo sapiens
tcaataggtattttggataccagcgcttctcctggaagccctttgtgaaatctttggaggtccaagtgataaagtttggaagccacatgccatctttggctgtgcaaatgcaaggctctgcactgacaccagaactaaggaaacaataatgatattattagctctgcgctaaagcctcagaggaaggaggcatcctgtaaagagcaactgatgagtaaaagcaagagagagggagagagcgccagatgtgtgagctgatctaaattgtcttctttcatgcctggaataaamgttgatcttatattttaaattttgcttttaacggataatgtctacagcacaaattataggaaggcaaaaacatgaaggattatagggatacaatatgttaaatgtaattttcaaaggcctttgtgaggaattacagtaaatttctctgaagacaaagtgactttgaagtcaagggtgctgtgtggccgtctgttctgtaatgccaggggcagagctatcattatgctgtcagcaagaatgccttaggagcactcttttctatatgtgtcttctacctattcatagaaaattctgcctccaaaatactc

SEQ ID NO: 788905 - DNA, 544 bp, Homo sapiens
tattatagctatcatttgctgaatacctatcacaggccaggtgcaacgctagttgtgtgcatatccttcaataaccccacaagccccaatttgacttagaaaaccaagcagtgagtgcctgagaggcttgcccaaaaccttacagctagcaagcagtagaatgggggatcaaatcgagtttggctgatcctacagcccacactcaaaactatgtttgcagacaactcatcaccaattgcttgagtttctgcaaggtattggtaaatgttcaataatgacatcaaataatgtaaactggcagttctcamagtgtgatctggtagcccttcaagtccttgaaaccctgtcagggcatctaggcggtcaaaactatcctcgcgtgcctctcccgctcttattctgtcacgaacgtacagtggcatttcccagaggccacgcggcatgtgctgccatcttccttccgatggtcatgacatatgtgcttgtagatattcttgtggtttaaatttttctcaacttcaatttctaaaatggtcagtggtga

SEQ ID NO: 788906 - DNA, 635 bp, Homo sapiens
aaggccaagggcacgagcccacctgaagcccacaccaggtgtctgggatcctgggattcctcaccctcaaaccctaagcctttttctaaggactgtgcaggcctcttccctgggtctcccctgtgggcagaccacactgctggaatgttcatcctggacctgaggtggggtggggttgggagagttgattaaggggcagggkggatggagctcggacatgagggccgagatgcccgtagccatgcatgtgaggcctttacagatgtgggaccagcctccgtgtgtacctttatcccagcctcacgaagatgaggagtgagtctgtaggtgtgcacagtcattgtccacagatcacagccgagagtcaatgaaatgtattacagccaaggaacttcagaaaaaaattaaaaaattttttttccgaatacatattctagcatggaagaatgacatttcaaatgtagattgtggtgttgaccaatagaaagagatggaagcgaaattaacacaggtagagagtttatttgggccacagttgaggactgtagtccaggaagcactcccaagttaccttggaaagtgctccagagaagagaggctcgagcttttaaatacaagaggacaaatcaggaaag

SEQ ID NO: 788907 - DNA, 498 bp, Homo sapiens
accccacccacatcctgctgattggtccattttacagagagctgattggtccgttttatagagcactgactggtcctctttatagagcgctgattggtccgttttgacaggttgctaatcagtgcatttacaatccctgagctagacagagtgctgattggtgtatttacaatcctctagctagacctaaaagttctccaagtccacactagattaactaracacagagcactgattggtgtgtttataaaccttgagctagacacagggtgctgattggtgcatttacaatcctccagctagacataaaagttctccaagtccccaccagattagctagatacagagtgctgattggcgtatccacaaaccctgagctagacacagagtgctgattggtgcatttacaatcctccatccagacataaaagttctccaagtccccaccccactcaggagcccagctggcttcacctagtggatcctgcgccagagctg

SEQ ID NO: 788908 - DNA, 563 bp, Homo sapiens
acacttgctgagagtaaatggatcctgggaaaagcacgcatcagtcaccttattaactgcaacaccaattaattacctggaaactgtgaaaaatgtctcattaaacctttacgtctcagctgcaaaataattacagtcctaattgggcccctaattttaagctcttctatgatgctgtacattttctttggaatatttatctcaagtatgactgggtggccgggaagtccttggtttaatrtcttcctgctggccctggcacacaatgagtgctcggcagtgaagagaggtaagggagagcagagccttcttcccacaaatctacctcgcgcttcctccacagcaagagctgctttcaaagaatcgatttcacctccaaatagatgccatgatgtgacagtcaagaaaagaaccacaacattgaaaattcttactttgaataacttgctatttttacaatctattcaaatatgttcctaaatagcagttaaagatatggaaataaaaacttacgggctaggcgcggtggctcacccctgtaatcccagcactttgggaggctg

SEQ ID NO: 788909 - DNA, 632 bp, Homo sapiens
ctcagtggtggagaataattagctctggttttaatataactgttcctgcctaaaacatctgaaaaagcaagaactgaaaggatcaaactatttccaagtaacttaattgcatccccaaacaaatctcaagaacatgaatagagatatagcactcaacaaagcaaaattcacaatgtcagacatccaattaaaaattaccagacacgcaaagaagcaggagaaggatttataatgagaagaaaaaccagtcaactgaactaaactgaamtgacacaaatgttagaattggcagacaaggacatgaatacagtattgtgtccaaaaagttaggtggacgtgaaagatattttaaaaagacacaaatcaaaccactagagatgacaacaacaatatgtacccacagatctctaattgcttaagtaaatttgctcacttaattaaaaaaaatgtgtgaaatgaaaaatttactgtaataaaaattaacagaatagacatggcagaaaagattaaagaagttgaagaaagcaaaggaaactatccaaatgttacacagaaaaaaaaaaaagaattaagagaaatagagcatcagcatcaactctaagaagcctaatacacgttattgggatccctaa

SEQ ID NO: 788910 - DNA, 632 bp, Homo sapiens
ctcagtggtggagaataattagctctggttttaatataactgttcctgcctaaaacatctgaaaaagcaagaactgaaaggatcaaactatttccaagtaacttaattgcatccccaaacaaatctcaagaacatgaatagagatatagcactcaacaaagcaaaattcacaatgtcagacatccaattaaaaattaccagacacgcaaagaagcaggagaaggatttataatgagaagaaaaaccagtcaactgaactaaactgaaatgacacaaatgttagaattrgcagacaaggacatgaatacagtattgtgtccaaaaagttaggtggacgtgaaagatattttaaaaagacacaaatcaaaccactagagatgacaacaacaatatgtacccacagatctctaattgcttaagtaaatttgctcacttaattaaaaaaaatgtgtgaaatgaaaaatttactgtaataaaaattaacagaatagacatggcagaaaagattaaagaagttgaagaaagcaaaggaaactatccaaatgttacacagaaaaaaaaaaaagaattaagagaaatagagcatcagcatcaactctaagaagcctaatacacgttattgggatccctaa

SEQ ID NO: 788911 - DNA, 596 bp, Homo sapiens
ataatgctgactcagtgtctgaaagatagcattggctttgctgaaagaaaatagaaaccggtcctctaaaacctactgctgtccctcaaagagttaacggagtcagttccaaaggagttaggcaacggctgaaacaggataataaatgtgacactctcagattatcagtagcaaatatttgakcttatcaaataacagaggaagtagtttagttacaaataaaccaatctctcataaaacaagttttcacacaggttcatttcattgagctggagacagttagaggccacttgtaggcagaactcccactctgtacactctgtaacagcccctcgtgattaatggacagccagggggaggctgcatcctgcggctccaggcttcatatcagcagaacagccataaacagcatctcaggattattgcgaggaagtgactcctcctctgggaacatagctgggcttgtgctccttctccctcaccacccgccttctttctgtcccgctcgctctttttccctgtagagcagagaccatcgtgtcctagaaactatagtagatgtcactgcttggcacttgctgtgcaaagagaggaca

SEQ ID NO: 788912 - DNA, 596 bp, Homo sapiens
ataatgctgactcagtgtctgaaagatagcattggctttgctgaaagaaaatagaaaccggtcctctaaaacctactgctgtccctcaaagagttaacggagtcagttccaaaggagttaggcaacggctgaaacaggataataaatgtgacactctcagattatcagtagcaaatatttgatcttatcaaataacagaggaagtagtttagttacaaataaaccaatctctcataaaacaagttttcacacaggttcatttcattgagctggagacagttagaggccacttgtaggcagaactcccactctgtacactctgtaacagcccctcgtgattaatggacagccagggggaggctgcatcctgcggctccaggcttcatatcagcagaacagccataaacagcatctcargattattgcgaggaagtgactcctcctctgggaacatagctgggcttgtgctccttctccctcaccacccgccttctttctgtcccgctcgctctttttccctgtagagcagagaccatcgtgtcctagaaactatagtagatgtcactgcttggcacttgctgtgcaaagagaggaca

SEQ ID NO: 788913 - DNA, 491 bp, Homo sapiens
ctagtctttttgagggaggctgccctgcacattgtaagatgtttagtatttgtctcgacttcctctcatttgctgccattagcatccccctcccagttgtgacaaccacatccagacaatagaacaacatcatagtgatccagacatttgcttaaaccaggragaggggaggaaaaggcaaaagtaggcaaacactaatcctggagcttaatccattacagtcaaaactgctgtcaagataagtaaaatttccagtctagccatccttgacagctacttcctcctgagaatcttttctctttcattgtgactgtcactggttttaaggaatgcaactgtctgtaaccccagaaagtaggtgtcaaattgagggctgtttagaactccaggtatggtctggaaagaagacattaagatgtgaattaacaagagctttgtgtttttgtaatttctctttttctctctctttttttcctcactctctttttaga

SEQ ID NO: 788914 - DNA, 618 bp, Homo sapiens
attaagtgtttattgtttgacattcacagtacggaggacaataaaccacaggttaggtggtaaaattagcctcattttacacatgaggaagctaagcctttgaaaggtaattaattagcagtggccatagaactggtaagtgctaaagctgtaatgcaaacctggatccatgtgactctggccttcatcctttagcagcatggccttcagtttgacgttcactcactttttagacaactactacatgacygtaccttagtagctcacttccaagtaactgacgcattgccagattacctcagattttggtaacagagataaggtacacatttagtggtcaaaaccatgctgagatatggagttcagttttaggtagaagggaacattaagaaattcatggtcaaaactcaagcaaggaaaacaattttgaaggtaaggtttctgttcacctggctgatgacaatggcaatttatataaatcacagcaaactccccgggaaaacaatcagaaatagtaatgaaattttagggtcaatgcttaaagaaatgatttgcagatgaacttatttgggtgaatatgtcaatgtcatattttcaatataagttttaaataaaatt

SEQ ID NO: 788915 - DNA, 586 bp, Homo sapiens
gattgcaagaggttatgagctccatgagaatagggacttatttttccctttatttttggttttatttccctatagcagcttttattgttactctgcacattgtaaagacttaatgtggctcactggcagaggtttcaggatatgggatagggacatgatctggtggaaactgtggtcccrgtgccaagggtgtagagaacatctctggtccaaggtttcccttacagctatgcctgcttattctgaggtccctggagggtttgcaagttgctataaccttcccaacacttgccttttataggcccttataacagagaaaggccctaaactttgtgcaggagttgcagggaactatgaaatacatacacctctctcctcctccctgccttttggcctctttgcttaataggagagaacttcgattgttgggaagatgctaggatgaattagtatgggaatcagaaaagtatgctgaagtaggggaagttcagattttatagttcctgaacacatcctcatgtccttaaagttgcagaacatctattgtggctcattcctattgcttcttttattttctgccactgag

SEQ ID NO: 788916 - DNA, 607 bp, Homo sapiens
aacaaaatttattctattttgtttacagcttgagtttttgtaatgaacagttgagtaaccatcaccataatcaagctatagaaccctagaagttttctcatgtccctaagatcaacctcttacctgaactctagccacagtatagttcattatagtgttgctttttctagaatatcatataagaggagcatacagtatgtagtctgttgtgttttatccctttcaatttgcctacttttttgaaattgattcatgttgagtaattccttattactaagcagtatttccaaatgtagatttgccacagtttgtttatctgttcaccagtygatggacatttgtgtatccaagttttggctattgtggataatactgttacaaatataagttgtcccacattctcctcgacatttaatattatcagtctattgaatttagtcattctacttagtgcatagtggtattttattatgattttagctcacattttcctcatgactagtgatttttgagcatctttccatgtacttaatggctgttttaatatacattattatctgaatgttttaaaatcatttgccaacttcttacaactgagttgtcttta

SEQ ID NO: 788917 - DNA, 607 bp, Homo sapiens
aacaaaatttattctattttgtttacagcttgagtttttgtaatgaacagttgagtaaccatcaccataatcaagctatagaaccctagaagttttctcatgtccctaagatcaacctcttacctgaactctagccacagtatagttcattatagtgttgctttttctagaatatcatataagaggagcatacagtatgtagtctgttgtgttttatccctttcaatttgcctacttttttgaaattgattcatgttgagtaattccttattactaagcagtatttccaaatgtagatttgccacagtttgtttatctgttcaccagttgatggacatttrtgtatccaagttttggctattgtggataatactgttacaaatataagttgtcccacattctcctcgacatttaatattatcagtctattgaatttagtcattctacttagtgcatagtggtattttattatgattttagctcacattttcctcatgactagtgatttttgagcatctttccatgtacttaatggctgttttaatatacattattatctgaatgttttaaaatcatttgccaacttcttacaactgagttgtcttta

SEQ ID NO: 788918 - DNA, 615 bp, Homo sapiens
agtgttcactgttttatttgaacttaccagaaagcctctgagagagagcctctctagggacactagtaaagctctaggttgattttcctatcaatttaaaaattgtagtgtgaattgttaatttgagaaatgtgcacttttaagaaatgttcctttgttaagaggtaaaaatcagaataccagagctggaaggtactaaggacataatctcattcagggcagtccttttgcatgtgagaaaagtgtcccagatgaggtgaggtggcgtttgcaatgtcagccagtgagctaagatggagatgtggatggaagtgccacatccgctgtccaggtgtagttattttcactgcatctcatcgccagctcagctggcaatggacttgaatgaggrcactgttttatttcttttttttcttcctcccccagtgttcactcatttcagtgaaactgtctatatgaatggtactttgtttacattttgctttattattaaagttcggatttaggaatctgtataaaataaggctagccttaaatttaaagacaacttacctgctttaaccagcaaaccagaatatgttcatgctattccacatttaagaatataaagaagaa

SEQ ID NO: 788919 - DNA, 536 bp, Homo sapiens
aactgaggaaagtaccaaacttgactgctgtcaatcagaacatatttctgttcctgtcttccactcacagatttaatgtcttttccatcttagcacctgtcatgcactgtggtcataagttttgcagtttgaggtgtgacaaccaaaactagcatgaatttctttctctttctttacaatttccaagatagaagattttttttttttttttttactgtagtatcaagggaaccagcccccaatatttcaatgtaggttmttttctattttccctaagtgtcggccggtctgagaaataaataagaaattttacagctgggtctccgggggtgacatcacatgttgacaggttctgtgatgcccccaagctgcaaaaccaacacgtctttattaggggtttcaaaaggggagggagtgtacgaatagggcgtgggtcacagagatcgcatgcttcagaaggcaataaaatatcacaaggcaaatgggggcagagcaagatcacaaggccagggtgaaattagaattgctgatgaggt

SEQ ID NO: 788920 - DNA, 503 bp, Homo sapiens
aaaaaggatatatgaatggcaaaaagcacgcaaaagtatgtctgagcattattcatttagccattagggaaatgcaaatcaaaactacagtgagacactacttcatccctactaggatggctataattaaaaaaacagataataagtgttggcaaggatgtgaagaagctgaagcccttatacactcctggtgggaatgtagaatggtgtagctgctttggaagacggtttgacaatccccccaaaattaaacttagttattatatggccaagcaattctactcctaggtatatatccaaaagaaataaaaacagctgggtgcagtggctcacatctstaatcctagcactttgggaggccgaggtggttggatcacatgagatcaggagttcaagaccggcctggccaacatggtgaaatggtgtctctactgaaaagacaaaaattagttgggcatggtgatgcacacctgtaatcccaggtacttgggaggctgaggcag

SEQ ID NO: 788921 - DNA, 602 bp, Homo sapiens
ttgaaacaactagttaacaaattagctatttttttcccacctgagtagaacctaaccttaggattaattttaatgcatttaacacttgagcagaaaagctagaaacacagcaaaagccattctgccaggagataggctatgttacagaagttcacagtagtattcagtggttaccagggagcttttaaaataatcctgggaatkagaggctactttgcaaccaattaaaccaaaagtttaccattctgtttaatcctaaactgaaaagagatacataacttaaataatcagcattaactcttcctaccaaactttttttttttttaaacggagtctcgctctgttgcccaggctcgcgtgcagtggcacgatcttggctcactgcaacctctgcctcccaggttcaagcaattctgtctcagcctcccgagtagctgggagtacaggtgcatgccaccacacccagctaatttttgtattttcagtagagacggggtttcaccatattggtcaggctggtcttgaactcctgacctcaggtgatccgcccacctaggcctcccaaagtgctgggattacagacacaaaccaccatgcccagc

SEQ ID NO: 788922 - DNA, 593 bp, Homo sapiens
aggatggcaacaagactgggtttacatttgagaagtggctgggtggacggtggattagaagggagctgagtggaatccttccagttaggaggcactagccctagtccagctaaggggtgatgtggatttgcgccctgggcagcagtggagatggggtgggcaccaggacctgcacactttgtggctcactagtacaatgcccagactcagacatgtcagcaaggccrtgcaggacgtgcttgggggtctagactttatcctggggcagtggggacctactgagggattctaagcaagaaagtaatctgctcaaactgtgtcttaaggaaaactctcaaagaaggctgaatctaggacaagactcgcaatctgacctttgtagtaatggcccagagaaacaggtgttgctctgcctcagcaagcccagtaagttcaccaaaaaccaatatcccccaacctcctgcctcttgtttcaagccttaagccatgggtgtttctctctgaattcacacagcttttggagttggcctctctggggcatatatactgtttccacccacccagcacccaattccctctgtgtatcagtcagc

SEQ ID NO: 788923 - DNA, 576 bp, Homo sapiens
tgcccttgtaagagaaaggagagggagatgtaacacagagacccaggaaggcccacggagaaggccatgtgaagatggaggtagaggtgggagcgacacagcacgaggcaggaacaccgaggactcctggcagccactagaagccaggagggaggcatggggcagactctcccacagaccccttaaagcagcagtcccccacatttttggcaccagggactggtttcatggaagacaattttttcacagactgggtggggggatagttttgggatgattcaagyacattccatttattgggcactttagttccattgtaatataaaataaaataattatacaactcaccatcatgtagaatcagggggagccctgagcttgttctcttgcaactagatggtcccatctgggggtgatggaaaacagtgacaggtcatcaggcactagattctcataaggaatgtgcaacctagatccctcaaatgcacagatcacaacagagtccgcactcctataagaatctaatgccaccactgatctgataggaggtggagtttaggcagtaatgcaagctat

SEQ ID NO: 788924 - DNA, 602 bp, Homo sapiens
gtatttcatgtgtggcccaagacaattcttccagtgtggcccagggaagccaaaagtttggacacccatgccctagagagagtcagctgtccaatccccctaggaaagaccatgctgctctaagggtagcccaagctagccacatggagaggtgcatattcaaagagacccactgtgctagctatcccaatcaaatcatcagacatgtcagtgcaaatgccatctagggtaatccaggtctagaaaacacaacatggagacaaattaaagagttcagccagcagccagaaccaaggccccagtaacacagctscgggaggtgccccagccatctcttattgttcaggtcatcctcgcggaggtggagccattgtgaatcggagaccagctatcttgcatgccctgccccaattcctaacctacaaaactgtgcatataatacaatggggctattgttctatgccactaacttttggggtggtttgttacactgcaagagataaacatgatactggacaaattcaagttgaagttcatctagtgaaaccatcctgtgaacagaagttactgttttatagctacagagtctccatttggaaaat

SEQ ID NO: 788925 - DNA, 584 bp, Homo sapiens
tccagcactgtgagacaataaatttttgttgttctaagccaagcagtttgtggtactttgttacagcagccctgggaaactaatacgaggttgatttgtttcgcaaacgtgccttcctggaactcctctcatgtcctgggccccatgtaccgagacgagtaggacacatgtctctttgtgttcaagtgtccccttgagagaaaaactcatcacaaagtgttatgagcaaattgtgtcccccctagattcatatgttgaagtcctaaccctcagactgtgacggtcgatttggagataggccttaagttaaaatgagtcattggggtgggtcccaatccaataggactggtgtccttatgggaaggggagattaggacatggatacacacaggaggaagacgatgtgaagacacagcaagatgtcaaccatctggccgggcrcagtggctcatgcctgtaatcccagcactttgggaggccaaggcaggtggatcacaaggtcagaagatcgagaccagcctggctaacacggtgaaacctcgtctctactaaaaatacaaaaaattagccaggcgtggtggcat

SEQ ID NO: 788926 - DNA, 436 bp, Homo sapiens
actttctctggctatgtgacctcaagataatactcccatccccagcaggctgttcctgggggctcaggaagacactgcagccatccagaagtaacaatggtcctctcagcagcagccagaagcctggtaaggagcacaaagtgcgggtgatgctctagcaagaggctcgtcaacatggcaccatgagcaaccaagaaacttcttcatctgtcccagctctcgtcactcttctgctatctctagcaaycagagatgcagtgttgtggggcaaattccagcttgtaatttgcagcacaggcttccttgggtgtcatggccaagggccatgatgggattttcataccaagaaatggttaggacttacagcggcatgtgcccatctagtgaaacaaacttaaggagggtagatggaccatacttggaaggaagagggctt

SEQ ID NO: 788927 - DNA, 617 bp, Homo sapiens
agccaggcctcttatgattctgcaattccacatgaactccgctgcacagggaggggtctcatctccctgactctacccctatcacgatccatactggggcctggtacatagcagattctctgaaattgttcattgaacagaagtgagagaagagctggacttcagcccagcctattcctggggtcccagttgccgcagtggccttgaagtgtttgcacagcttctgcagacaactgggacacctgctccttcacatgggggcatggacctactcatcaagtcagcccatctgtgaccaacgcaatgggtcatgaagcaggaagttacaccgtgcaagatggcagtacacgggkcatctcacccaagctgagccaatcagccccttctctgaggattctgaattgaagggatggggaaaaaagatggtgaaagagagacagacacaaagagagcctgggacaaagtgacacacacacataacacacacacacacacaatccacacagcctttgtccctggttcgagtcccttcctcccttccagaggctgacaaagcttacctagcagtgatgggagttgaagattcctattatccctgcctccaaccccattggttc

SEQ ID NO: 788928 - DNA, 637 bp, Homo sapiens
caagtacttccagcatcaccaacattcccccaagtcagtaattaaactgggagaactccccagttcataaaacttaagcaccagaacaaactacaaagctcacttggccctgctgtttttatctaatcacctgtcaagaaggactgaaacctcccatattttaaatccctacatgattctagctccctgtcatactgwccttgtacaataacacctacattcacaagaaaccaactcgagggaacccttgaagagtgagacacatctaaaggtttcagccaaatcctatctaaggtaaaacaagccagcttcactttatgagataaataaatcttccagaacaggactcattttaagatagacttatattaataaaactatgatttacatgtataagtcctctgctctttcagaggactcctacgttgaagtctttggagaaaccattaatagtcacctcctggcagggcatggtggctcacgcctgtaatcccagcactttgggaggctgaagcaggctgatcacttgaggtcaggagttcgagatcagcctggccaaccccgttacccctggtgaaaccctgtctctactaaaacaaaaatacaaaaagtacccaggtgtggtggcacgtgcctg

SEQ ID NO: 788929 - DNA, 614 bp, Homo sapiens
tttttgctcttacggcacactgcactgcagatccataatggatgaatattttttgataaacattttattttagaagtattttaggtttgcagaaaagttgcagccagtatagagttcccataatatagagttcccctaatgttaacatcttatattaccatggtacatttgtcataactgaaaaaccaacattggtatgttaacattaactatactccagactttattcagatttcattagcttttctaccaatgtccctgttccgttccaggatccaaataaacatatcacattgcatttagtgtagctgaatttttacgcacacatatacaagaattccktgacttaggcaatggggttatgtcctcataaacccatcataagttgaaaatatcctaagttgataatgcatttaatccaactaacctactgaacatcataacttagcctggcctattttaaacatgctcagaacacttacattagcctacagctgggcaaaattatctaacacaaaacttattttattagaaagtgtcgaatagcttatgtaacttcttgaatactatactgaaagtgaaaaacagaatgatggtgtaggtactgaaagtat

SEQ ID NO: 788930 - DNA, 570 bp, Homo sapiens
ccattgacattccctccaggatggagagcttgtttttcctagatttttgtgtatttttaggcagtcatcttgggcagtctggctttgtatcaaaagtgttattaattgaagagtttctcctttgggctattgggtagaaaaatacagtctctgtatcttcatgtctattttgggggtcatggcttgttccagttccccatctttttgcaaagtggctgttctttcatcttatccctgtagtgtgcctggagaaagaaagaaacagaatcccagagctatgatcacccttctaaaagtcttacttggaagtggcaaaagtggcaactttgggcctctgaattccttttctagaayttatggaaaatagaaaaaatcgttgatggaaaagcagaaggttgattagtaggcaaagaaggatggtggtctccaccttcaggatgaccactgtatgcagcttttgggagattttaattatacttgacttgatctctgcctggagttctccattgcatagttctcctcttcttacaagcaaaacatgcttgcacttagtttgggttcaaaaaacat

SEQ ID NO: 788931 - DNA, 624 bp, Homo sapiens
gacaaattttccaagcccaaaaggcaaccccacatagaagaaaggtcatatcaagagccacttccccctcatttcagccggataaaatgagagtctgttctgttggcattccacatatagcatttccactgcagctgctgctgggaatttcccttctgaagaagaccgaattagaccctcrgccaggctagctggccatgaggcatctgaattccaaatgtcaaagatttccatccaagaggttccgatcttttgctcacattgctctgtttgcaaaggcataattaacaagccatggacttctcctttccaggaaatctattttcctggtctcatgaaagaaattccagttctgtaccaggcattctttcttcacatgtgacatccctgggactcagcatcttatctctgaaggcttccttaaccatcccacaactgcagcatcactgactcatccctcctctgcacccctcactcactctatatgaagtgcacccaaaacatattcttgcctgtatttacttagaccatttgcttccttattttgttatgggttcctttagggtaggagagtgtcatatccatctctatatcctcagattaggccaaggcctggcacagaag

SEQ ID NO: 788932 - DNA, 570 bp, Homo sapiens
ttttatggagtattttctagaaatattaacatctaacactggaaagataatataattgaataattaggaataaaggctctggggttaggctgcttgcgtctattagtttcctgtggctcctgtaacaaattatcacaaacttagtggctcaaaacaacacaacacacaattattctctcacggctctggaggtgagaagtttcaaatcatgatgttgtcagggctgcattccttctattggcttcatggcagaatcaatctstcttgccttttcggcttctagagaccatctgcattcattccttgactcaggtacccttgcttctatcactcaacttcttgcttctgacatcacttctcatattactgactctgactttcttgtttctcttataaggacccttgtgattacattggatccccctaaataatccaagatactcttcccatctcaggatccataatttagtcacatcagcaaagttactcttgccataaaagataacatattcatagattctggggactcagtcataggtatctttgggagcccattattctgtctaccaa

SEQ ID NO: 788933 - DNA, 570 bp, Homo sapiens
ttttatggagtattttctagaaatattaacatctaacactggaaagataatataattgaataattaggaataaaggctctggggttaggctgcttgcgtctattagtttcctgtggctcctgtaacaaattatcacaaacttagtggctcaaaacaacacaacacacaattattctctcacggctctggaggtgagaagtttcaaatcatgatgttgtcagggctgcattccttctattggcttcatggcagaatcaatctgtcttgccttttcggcttctagagaccatctgcattcattccttgactcaggtacccttgcttctatcactcaacttcttgcttctgacatcacttctcatattactgactctgactttcttgtttctcttataaggacccttgtgattacattggatccmcctaaataatccaagatactcttcccatctcaggatccataatttagtcacatcagcaaagttactcttgccataaaagataacatattcatagattctggggactcagtcataggtatctttgggagcccattattctgtctaccaa

SEQ ID NO: 788934 - DNA, 570 bp, Homo sapiens
ttttatggagtattttctagaaatattaacatctaacactggaaagataatataattgaataattaggaataaaggctctggggttaggctgcttgcgtctattagtttcctgtggctcctgtaacaaattatcacaaacttagtggctcaaaacaacacaacacacaattattctctcacggctctggaggtgagaagtttcaaatcatgatgttgtcagggctgcattccttctattggcttcatggcagaatcaatctgtcttgccttttcggcttctagagaccatctgcattcattccttgactcaggtacccttgcttctatcactcaacttcttgcttctgacatcacttctcatattactgactctgactttcttgtttctcttataaggacccttgtgattacattggatccccctaaataatcsaagatactcttcccatctcaggatccataatttagtcacatcagcaaagttactcttgccataaaagataacatattcatagattctggggactcagtcataggtatctttgggagcccattattctgtctaccaa

SEQ ID NO: 788935 - DNA, 471 bp, Homo sapiens
cggaggagcaacacccaaacctctaccaaactaggtctcagactctttccagagaagatggagtagaatttgtagtgtaaaatatctcagatatgtaagaagagtatattaaaagtttatgagcagtcacaaacagggcaattttctttccattcagtttaactaacaagacacttagggataraagtttccaagacggagccacaatttacctattccagcctctaaaactatcctatttccacaccaccctgctgtgggaaaattaacactggcatgtccacacgtatacatgccacctatagaaaacaaagcggctctcaataaagtcatgtctttgacatattcattgtccttctagattctagaaacgtattaacctggtttttttttttttttaaaaagccctaaactttattcttgaagtagagtttctaaaatgaaccctattttatctttgctaaaatggtt

SEQ ID NO: 788936 - DNA, 638 bp, Homo sapiens
caaatcaatcaattgctacatcacattattgaaaatgaataaaagaatgaagaataaaaatcatgatcatctcaataaatgcagaaaaagcatttgacaaaattcaacatcttttcatgataaaaactcttcacaaattaggtaaagaaggaatacacttcaataccataaatatgacaaacacacagctaacatcatatccaatgatgaagaactgaaaacttttcctctaagatgagaaacaaggaaagtatgcctactctcaccacttctattcaacatatkattggaagccctagccagagcattttagacaagaaaaagaaataaaaggcatccaaataagaaaggaagtagtaaaattatctctgaagatggcacgatgaccctaaagtcttcattaaagaaagagttagaactaataattcagtaaatttgcaggatacaaaatcaatatacaaaaatcagtagcatttctttatgctaatgaactacccaaaaaattaaaacaaaaatctcatttatgatagtatcaaaaagaataaatacttaggaataaatttaaccaaggaggtgaaatctctatacactgaaagctataaaatattgatgaaagaaattagagaagacagaaaaaa

SEQ ID NO: 788937 - DNA, 555 bp, Homo sapiens
caaaaggaatgtcatagacaggggaaaaatgtgtgtcttcaggaaactgaaaaaggggaaagggccaccacaccttggtgaggggacccagtggtaagagatgaagcaggaaacatagacaagggcatctttgtacaaagccaaaagttggttcttttaagtctaataaaattgacctctggcctcaatctacccaattaattagtggaaggtgtgggaaggaacagaaatgaaaacaaaacaaacaagatatttccaaaactagagtaagatgctattctttttcaacagatatatcttcttgattacatactgtttgactctgtgatttttgttgctttaaattaaatctacaaggccttaaggggcctagctgagtctactatataatatgaaatatctrtgagaaaatacgtcttctttatggtaaagtatagctttagttgttgagctttgttcactctttgtgctcaagattgacgtggcgacagacttccaacattggtggctgctactgagggccaaagaggagatgtgtactcccactgaatctga

SEQ ID NO: 788938 - DNA, 633 bp, Homo sapiens
ggggaggcctcaggaaacaacaaccattgggaaaggcaaagggggagcaaggtgtctcacatggcaggagcaggagcaaggtggggaggacgggaggtgttgcgcacttttaaataaccagatctcccaagcactcagtatcacgagaacagcaccaaggggacggtgctaaaccattcatgagaaatccacccccatgattcagacccctcccaccaggccccacctccaacattgtggactacaatttgacatgagatttggtggggacacagatccaaaccatatcaataggtatttacactttaagaaaatgagatttgttctgaaagttagttactacattaatggtttgaatttgggatgatatatttgctcatagaaaccttcttttaaatccatattgaattcacaaccagcttgtagaaaccctatattgacaaattyactgaagacacagaaattttactaatgctgccttaatcttttacatttctttcctctttttcttcaattttaagagattttgtgcacatgacctccaaaaataaaaaatggaaaacacacctttagtgaagtagaagtatttgagtatcttaatgcagtaactgatagttgtgatcctgcacctgg

SEQ ID NO: 788939 - DNA, 508 bp, Homo sapiens
gtaactatgcatggtcccatatggaaaatataatcctgctaaaatttctctgtctctgcctatgtaagtgataccttacgtcctccactttggaatgctgaccccattcatttggagttggtgtcttccaggtggctacccttaagctgtgtgctcaaataaactctatccttaaatatattttctgaatctcattatttaargttaacaatgtgctaacctaaacaattcacaggatttgttttttattctcttttttcctaacccaaccacctggttcaaggcacatagattaagaaggaaaatggaaatgggactaatatcccaggcttcactgtccctcttcgggccctggggaggagactcccaaaagtctagacatgttcacccacatcctgtatgtggtttctggaaacgaaatgatcatggcttttcctgaaccatggcttaactttgtgaatccacaactctctcttccccaggagatccaaaaaggtagggtaggatg

SEQ ID NO: 788940 - DNA, 508 bp, Homo sapiens
gtaactatgcatggtcccatatggaaaatataatcctgctaaaatttctctgtctctgcctatgtaagtgataccttacgtcctccactttggaatgctgaccccattcatttggagttggtgtcttccaggtggctacccttaagctgtgtgctcaaataaactctatccttaaatatattttctgaatctcattatttaaggttaacaatgtgctaacctaaacaattcacaggatttgttttttattctcttttttcctaacccaaccacctgkttcaaggcacatagattaagaaggaaaatggaaatgggactaatatcccaggcttcactgtccctcttcgggccctggggaggagactcccaaaagtctagacatgttcacccacatcctgtatgtggtttctggaaacgaaatgatcatggcttttcctgaaccatggcttaactttgtgaatccacaactctctcttccccaggagatccaaaaaggtagggtaggatg

SEQ ID NO: 788941 - DNA, 508 bp, Homo sapiens
gtaactatgcatggtcccatatggaaaatataatcctgctaaaatttctctgtctctgcctatgtaagtgataccttacgtcctccactttggaatgctgaccccattcatttggagttggtgtcttccaggtggctacccttaagctgtgtgctcaaataaactctatccttaaatatattttctgaatctcattatttaaggttaacaatgtgctaacctaaacaattcacaggatttgttttttattctcttttttcctaacccaaccacctggttcaaggcacatagattaagaaggaaaatggaaatgggactaatatcccaggcttcactgtccctctycgggccctggggaggagactcccaaaagtctagacatgttcacccacatcctgtatgtggtttctggaaacgaaatgatcatggcttttcctgaaccatggcttaactttgtgaatccacaactctctcttccccaggagatccaaaaaggtagggtaggatg

SEQ ID NO: 788942 - DNA, 591 bp, Homo sapiens
cccaggagataggactgttgaccttctctcaacttgtggagtgacagccttgttctctgtgataggaagtcctagcaccagagagctccaagcaggatagataattttttcgattaggagaggaagaaatccaaaacttcctgtgtgggtcaaattaggggccagagctctacaaggaattctggcctgactccaattaacaaagaaggacgtggagcrcaaaagagaaatccaaagtgatatgcaatggaggctgcctctgtctggaagatcttcctgctccttgtgctcccctcttacattctactattgtgtcctcagcctggcaaactcttactcatccctcaaggcccactcaactgtcacctctgagaatccttcctgggctctcccaggtagaattcctctgtcctttatgctctcacagaaccttgaatattcctccattatagcacttactgcagtgataacttgttgcttgtttactcatttatggatgctttccttattaatgtttttacctccagcccctgctcagtggtcaggagctcaaaggtgaacaaaggaatgagtgaatgagtaaggagtgaa

SEQ ID NO: 788943 - DNA, 630 bp, Homo sapiens
cacataactgcatgatagtgacatcaaagctcaccgatcacagatcaccataacagatacaatcataatgaaaaaatttgaaatattgtaagaattaccaaaatgtgacacagagacatgaagtgagcatgtgctgttggaaacatggctccgatagatttgcttgatgaagttgccacaaaccttcagtttgtaagaaatgcaatatccgtgaataaaaaaataaagtggagtgcaataagagggcatgtgcctatacgcccaccttttctagttatctgtgtgagactgaatttcttcatacgcttcaaccaaaacaccatatttcaacagatcaaatgaagaagtagatatggaaatttagctgcatttcattaacccagaattaaaaagatttgtaaaaatgtaaaacaatgccatttttctcactaattattttgtttggaaatgtagggktttttttaaatttaacaatgttttatttatgttaacattaatttaatgagtctttttatttttaaataaatattttaaaaattcttaattttaacttttttctttttaagacagggtttcactctgttgcccatgctggaatgcagtggtgtaataatggctcactgcagcctt

SEQ ID NO: 788944 - DNA, 609 bp, Homo sapiens
tatttaccccttcaaaactccatcagacaggataatataagtgtttgttaaagaaaaataaaataaataaatatcttacaccaaagataaaaaggaaagaaatctggtcttgaatgaaagtcaattcactaactagctccacttaasttttcccaaatagcaaaccattaaaactattaagattacggcccaaataacaagtggttcctaagagagattttaaaagttgggcctgtagccttgataacctttagctttaaatccaacacgctacacaagaactttccctacaggtcctcaagacaagatattttcaagctcctgagcaatataacattaaatgtcaatcatgccctgttactcagcaaatatacagaactcatcatagtcacaaacactctcaggagctccaactgtgagttgatactattaatagcaaacatttatggaatgcttcttatgggtcaggtaccgttctaagtacttttaatatattaactatttctttttcttcttcttttctttaattgagacagtctcgctctgttacccaggctgaagcgcagtggcatgatctcagctcactgcaacctccacctcccaggttta

SEQ ID NO: 788945 - DNA, 664 bp, Homo sapiens
ggactgggtgtgtcaccaacaaggtacactcagaagagaaatactcaaattacagcagggaagattgagatcatctgtaaaagagaacttcctggcatccaggcttactgaattctggacttgctgggagctgtaacgggcctctgtctcactgcctttaaacaaagagcagccttttttgcaagcagactaaccaaatggctttcccatcccattgttttctgattattgaatgttccatggacagcaagagaaaaattccagcaggtctagracaaagggatgggaatggtggagtacacccaggtttccctggtgtttctgagatcccaggaagtctcccctgggagcatcagccagggtgcccttctgagctcaccaggtgttcaccacactatttaagacagtagtcttaagagacactgtctctgacacactgtctgtactttcaggatacaacgtatgttcactgaataaaccttggatatactctacctcccattccatttctaaagcctagcagtattagccaatattcgcattacccttggtctacttatttattcattcattcagcaaagatttactgggtttgtgccaagccaggaactgtgccataagctcaatggatagatagaagctgtccctactctccgatgattta

SEQ ID NO: 788946 - DNA, 612 bp, Homo sapiens; identical to SEQ ID NO: 760617

SEQ ID NO: 788947 - DNA, 581 bp, Homo sapiens
tgactgctgatgcatcaaggacaaaaaaaaatcatagactataactgagtgctttattttttttattagtagccctatcaataagaatattttaaatacaccctttcttgtatatatatacacatatgaacatatatgtatatctacaaaatgtgtatttttaaattacttggctttctaagcaataaaatacattgttttctttatcagttagactggagtgcagtggcacagtcatagctcactgtaactgctaattcctgagctcaagcaatattcccgcctcaggctcctaagtagctggaactacaggcatgtgccaccatgcctggttaatttttaaatttttttctagagacagtgtctcactatgttgcccaagctagtctcaaactcctggccccaagccatcctcctgcctcagcctcacaaagctctgggaatamaagcatgagtcaccatgcccagccccttgttttgacaaaaaataaaaagtacatcaaaagaaaaaggcagcattttaaaaccgagcaatcacgtataatggaaattacatttttactttagagtgactaagtgcc

SEQ ID NO: 788948 - DNA, 611 bp, Homo sapiens
tattgtggcactattcacaatagcaaagacttggaaccaccccaaatgtccaacaacgatagactggattaagaaaatgtggcacatatacactatggaatactatgcagccataaaaaaggatgaattcttgtcctttgtaggaacatggatgaagctggaaaccatcattctcagcaaactatcacaaggacagaaaaccaaacactgcatgttctaactcataggtgggaattgaacaatgagaacacttggacacaggatggggaacatcacacactggggcctgttgtggggtgggggacgggggagagatagcattaggagatatacctaatgtaaaatgatgagttaatgggtgcagcacaccaacatggcacatgtatacatatctaataaacctgcacattrtgcacatgtaccctaaaacctaaagtataataataaaataagaaaaaaaaaaactagggtctccctttgtattagtctgttctcacactactaatacagacatactggagactgggtaatttatttaaaagaagaagtttaatgaactcacagttcctcatggcttgagaagcctcataatcatggcaaaaggtgaagga

SEQ ID NO: 788949 - DNA, 486 bp, Homo sapiens
cttagtctgttttgtgctgctataacacaataccacagactgagtaatttatagtgaacagaaatgcatttggctcataattctggaggctgtgaagttcaaaattgagcagcctcatctggtgagggccttctcactgcatcatcccatggtggaaggcagaaggagaaaagagcccatgcgagagacagcaagagatcaaactggcagcctcagatcctttttaaatcagcattaatctattcatgagagcaaagccctcatggcctaatcacttctcaaatgtgccacctgtcaacactgttgcattggggattaagttcccaacacaggcttkctggggggcacatttaaattatagagtgtatagatacagatataaagatatatgaatatagagatgggtatagatctataaatataggtatctgtatacacatggatataggtttagagattaggtatagatgtagatatatctatatc

SEQ ID NO: 788950 - DNA, 596 bp, Homo sapiens
ccttttacccagtacactatgaccagctaacaagaaaaaattacaaggcatactaaaagtcaaaaaatacagtttagagagacaaagcaagcatcagaaccaaatatggcagggatgttggaattataagaatgggaatttaaaatatctatgattagtctattacaggttctaatggagaaagcagacagcatgtaagaacagatgagcaatggaagcagagagacgaaaatcctaagacagaatctaaaagaaatgctagagatcaaaatttctaagggagatgcagaatgcctttgaaggtcttcacaggagactggacgtgggtgaggaatttctgagcttgaggatacatcratagaaacctccaaaactgaaaagcaaagagaacacagactggaaacaaaacaaaacaaaaacagaacatccaagaactggtggaaaactacagaagatataacacatgcacaatgagaatatcagaaagagaagaaagagagaaaagtacagaagaattatttgaaacaatgaccaacaatttccacgaaataatgtcggacaccaagcgacagatccaggaagcttagaggacacca

SEQ ID NO: 788951 - DNA, 628 bp, Homo sapiens
acctggcatcagatgagctggtttagaatcttagatccaccactcaccagcactcagacttcgggcaagttacttaacctctcagggactcaaagagtcctcatctgtaaaatggggttacccacacctatctcacaraattgttttgaggactaaattccacacatatatctatataaagcatttagcatggtgcatagagctagttaaaaattttggttgcttttaaagttatggagaaacaaatggagatcctgggagtgtctcccaatgttcaaccatataggaacaagaagggaatggaatcctgaatctagatcatcagtcttcattgtagttacttcactcatcccttttgcaagttatcaccaaaacatcctggttcaccactaagaaactctccgtaagctgagcctgaaatgtcacaaaagacgtgccgttcctgtgacctcaaataagaacaggttcgctcttgatttgtccaggtaaaaagagcattgcaagtgatagatacagaaatgcttatgtacctcctttttgaatttatattaggttttacattttagcctctgcatctgaatggatgaaaagtgagcatatgtaacagtgggaaacaggtttttctgtg

SEQ ID NO: 788952 - DNA, 628 bp, Homo sapiens
acctggcatcagatgagctggtttagaatcttagatccaccactcaccagcactcagacttcgggcaagttacttaacctctcagggactcaaagagtcctcatctgtaaaatggggttacccacacctatctcacaaaattgttttgaggactaaattccacacatatatctatataaagcatttagcatggtgcatagagctagttaaaaattttggttgcttttaaagttatggagaaacaaatggagatcctgggagtgtctcccaatgttcaaccatataggaacaagaagggaatggaatcctgaatctagatcatcagtcttcattgtagttacttcackcatcccttttgcaagttatcaccaaaacatcctggttcaccactaagaaactctccgtaagctgagcctgaaatgtcacaaaagacgtgccgttcctgtgacctcaaataagaacaggttcgctcttgatttgtccaggtaaaaagagcattgcaagtgatagatacagaaatgcttatgtacctcctttttgaatttatattaggttttacattttagcctctgcatctgaatggatgaaaagtgagcatatgtaacagtgggaaacaggtttttctgtg

SEQ ID NO: 788953 - DNA, 527 bp, Homo sapiens
ttccccatcaagaacacctgctgacctctagcctgggttcaaacacctggtgaaaagggggagctcactacattcctgcctcagcttggccagcaacttggtgtgacctgaggcaagccccttcttatcctgagccctggttggtctccccatctgctcagtgagcagtgcagactgatgttccttctcactctgtgatctagacccactccaactgctaccctgagacctgcagcccttcttgctctactccctcrtccacctccaccctgaaatgaccacaggtggatgctgatattctgggccaggctggctgggcctgggatgctcccttaccaggttcgactggggatacagtctctgagctggggctaggggggtcagaggggtctttggcctttggcctgggggaccctttgggatgcgacagggacagagaaaaggatttatctcaggggcttggcctgcactgagctctcgggaccccctcccctccctgcccctaaggcttggctggagcacaaggg

SEQ ID NO: 788954 - DNA, 568 bp, Homo sapiens
ctccttttcaacctacaggagagatagtggaacagaagcagaaatgggcctgcctgctgtgcccaaaattcattggagattgttgtggtgaagaatttcatttatgatgaaggagaaataaaccctgtcagcttaaattcaggcaggtttattgaaaaggtgaagaagcgtcttgcagaagcaaagcatggctgaggcttgtgggctctgtctgggaaaatgagcagctgacagtggctgatgctgcccctgactctggggccatgtggtctcttgttccctgagagcatctcttctattctcttgcatcttccctcagcctggcagtctctgtgtactctgcaacacataattgagcaaggctgtgccagccccartgccacctggcactttaggtcaaattagaaaggcatgaaataaagtggcccttcataatacagctgttggaacaacagttggaagtacaatatcttgactccttatttagtgctttatgctgaactttctttgctgaatatgagcacagacttcggaatattaatgtcacctagcgttcttagctagtatt

SEQ ID NO: 788955 - DNA, 568 bp, Homo sapiens
ctccttttcaacctacaggagagatagtggaacagaagcagaaatgggcctgcctgctgtgcccaaaattcattggagattgttgtggtgaagaatttcatttatgatgaaggagaaataaaccctgtcagcttaaattcaggcaggtttattgaaaaggtgaagaagcgtcttgcagaagcaaagcatggctgaggcttgtgggctctgtctgggaaaatgagcagctgacagtggctgatgctgcccctgactctggggccatgtggtctcttgttccctgagagcatctcttctattctcttgcatcttccctcagcctggcagtctctgtgtactctgcaacacataattgagcaaggctgtgccagccccagtgccacctggcactttaggtcaaattagaaaggcatgaaataaagtggcccttyataatacagctgttggaacaacagttggaagtacaatatcttgactccttatttagtgctttatgctgaactttctttgctgaatatgagcacagacttcggaatattaatgtcacctagcgttcttagctagtatt

SEQ ID NO: 788956 - DNA, 568 bp, Homo sapiens
ctccttttcaacctacaggagagatagtggaacagaagcagaaatgggcctgcctgctgtgcccaaaattcattggagattgttgtggtgaagaatttcatttatgatgaaggagaaataaaccctgtcagcttaaattcaggcaggtttattgaaaaggtgaagaagcgtcttgcagaagcaaagcatggctgaggcttgtgggctctgtctgggaaaatgagcagctgacagtggctgatgctgcccctgactctggggccatgtggtctcttgttccctgagagcatctcttctattctcttgcatcttccctcagcctggcagtctctgtgtactctgcaacacataattgagcaaggctgtgccagccccagtgccacctggcactttaggtcaaattagaaaggcatgaaataaagtggcccttcataatacagctgttggaacaacagttggaagtacaatatcttgactccttatttagtgctttatgctgaactttctttkctgaatatgagcacagacttcggaatattaatgtcacctagcgttcttagctagtatt

SEQ ID NO: 788957 - DNA, 592 bp, Homo sapiens
atatgggaagcaaaaggtcttttcaatatttgaccacatcttgatggtggccctccagatcagaaatgcattgcccgatggaccaggaaaccatgccagggcattttgtgaaagataaaatatgacagttttcagtacagtgctgaaccatacatagatgttcatgtctctgtgcacattgggctgactgtgcttgcagaatgtgaagtgggaaatatctgaacgaacattttgtatttacagaaaatgacgaagatgaggatgaagatgttcaagttgaggaggctgagaaagtactggaatcatctgcccccaggtaacactgaatactcgggagcaagtaatgggtggtaacatatgaaaatgtstaggaggcacaccctctctggcatctatgatgggccaaaagcccgcattcgcttggccacagtatgtgaaattcaacccagcttagacacagggtgcggcagctgtcgtgtttctctatgtgtgccaagtgtcatgtctgtaccatacagggatagctgagtcttcatcctcctcagctcctatctgtccagtgcactgaacaccagctgctctcttcctctct

SEQ ID NO: 788958 - DNA, 517 bp, Homo sapiens
agaaaaaaattaaaaaggcaaaatgaaaccttttgtgctacacagaaacattggccactcatggggtaaaaatctcagggccaagccttgctttatagaaacttataagcaagaaaagtgtagaagtgtttatgtcctggtttcaaggtgactgcatagctaagataagttgacttaaaggagatcaagactggagatgacaagagtgaaaccagggaaacatcatcttcaaataagtagacaaggctgccrctgacatccctcagtgtgattaaacctatttgatttcaccagtttttaacccatcatgtgtttgcctttcttctccccagtccctggccccacctcttctgccacaaacgtcagcatggtggtatcagccggccctttgtccagcgagaaggcagagatgaacattctagaaatcaacgagaaattgcatccccagctggcagagaagaaacagcagttcagaaacctcaaagagaaatgttttgtaactcaactggcctgcttc

SEQ ID NO: 788959 - DNA, 613 bp, Homo sapiens
ttttggtttttttaaaactgataataatgctgaattatcttaagtgagatgttaagcccactttgttcttttaatgtaatggagcttatgggtagaagaccatgtctactaattacaaaaaaaaaaaaaaaaaaaaccatgcattgctgcttttcctaccacttccagtaagaaaatgggtgttttgaagaaatcatttgccttgtcctcacggaatctgattaagccctggcctcttgattgtatagagtcattgtgtatattccagttacctagatattcccttgagattttgatacaatttgagggaggcagaagtctgcakttgaagaaaaaaaataagtctgtttgtcatatttaagtagcctgtggctatttttatactgattttgatatcatgttcttttcatagtcgtattttgccaccgtaaacataaaaaaaaaaaaaaaagatttccaaaatgccgttttcagaacctgggttttaatagcagtattgaatttgtaagcttagtagttgcagaaattgaacactaggtggcactcagttatcttaacaggggaagtactgatataattgttgacttttcttttactatgtgtaagaaatacc

SEQ ID NO: 788960 - DNA, 451 bp, Homo sapiens
agccgaagagtgtcagccgggaggatcccgcacacggcgcttagttctggaactgcatacccaggggaggatgcgggagcccgaagcccgggtatgtgtccccgaagcccgggtgtgggtccccatggttttcgtgttgggggtgggcgcggaacgctaagcctgggcctattgggagccatagtcttcttgatggctggtgcttattgggcttttttcagtcgaatttcgaaatgcagttgaatttcttactttggaaacgataatagaaatggctgayctaagattttcatgatgatattttgccttttttggtgcatatgcagtttctgtggtgtagtggttatcatgttcgcctcacacgagaaaagtccctgattcgagactgggtgggaacgtcgtggtttgtttttttttttgtttgtttgtttgtttttttggtccctaaatt

SEQ ID NO: 788961 - DNA, 614 bp, Homo sapiens
gagggcacctgcagcgccgggatctgagtgcgaaactccgagcggaagctggtctggcaggtcctctggagcttggggccaggcgggggcgacttgggggagccatccttgggctcccagacggagtaggttcagttctgagcccggataccccggcgaggttggacgggatagccgtgacagggagtccccgggcggggacaaggtccgcctctcacctgggtcctcagcaactgacacccggagtgggtgtctggaaggtctgctcatcaaatgaatgactgcatttaatcagatcttcaactactstggtagtgaaggggcaccgatcatggaggcccaccgagggcccgaggtcgggaaaatcaccttcccgaggagcaggcgtggtgcagacccacaggggtttgtggcgggagtagagggtctgtttggggcgagataagagactgaacggcagagtagggagtgctggctaaggcagtgctgcagagcgaaactctagacctgcgctgtctaatagaactttatatgatggtgggaatgttctacctttgtgctgtccaatagagtaaccgttagccacatgtggtcattgaactcttgaaatgtgg

SEQ ID NO: 788962 - DNA, 644 bp, Homo sapiens
ggtaaccatccagtactttgcctctatgagttcaattgttttaatttttagctctcacaaataagtgataacatgcagtgtttgtctttttctgcctggctcatttcacttaacataatgacctccagttccatccatgttgttgcaaattacaggatctcattcttttttatggctgaatagtactctgttgtgtatctgtaccgtgttttctttatttattcatctgttgatggacacttagattgcttccaaatcttggctattgtgaacagtgctgcaacaaacatgggaatgcagatatctcttcgatatactgatttcccttctttsaggtatatatctcttcgatatactgatttcccttctttcaggtatatacccagcagtgggattgctggatcatatggtagctcaatttttagtttagttttttctttttgaaaaaatttttttttttttgagacagagtcttgctctgttgcacaggctggagcgcaggggcgcaatctcagctcactgcaagctccgcctcccaggttcacgcaattcttgggcctcagcctcccaagtagctgggactacaggcgcccgccaccaggtccagctaattttttgtctttttagtagagacggggtttcac

SEQ ID NO: 788963 - DNA, 629 bp, Homo sapiens
agcaattctatggcttcagcctcttgagtagctgggattacaggagtgcgccaccacgcccagctaacttttgtatttttagtagacatgggagcttcaccatgttggccaggctggtcttgacctcaggtgatccacctaccttggtctcccaaagtgctgggattacaagagtgagccaccgtgcccggcccatgctttgtctttgaagtcctttttaacttatttgttcaggaaactgggctagttgtccttggagattctcatggtctggattttgctggttgcatccttatggtgtcaattaacatrtttctttatcccatgtatttcctgtaaattggatgttggatgtaaagctaggtcagattcaggctcttctgcttgctttttcgtttgatcaagactccataagtagaatgtgttcttccatcaggatgtccctatgccagctgtctctcttttcaagatccaacccactcattagaggctgcaaaactgtgagcttctcatttagtcactcctgtgtatattaattagaattctataatgaggcactttccctccttactattggataaccagtggtacaggtcattcaggaaaggaaaggaaaggatttaacctgt

SEQ ID NO: 788964 - DNA, 607 bp, Homo sapiens
aggatgtggaggttgcagtgagccaagatcacatcactgtattccggcctggacgacacagcgaaactctgtctcaaaagaaaaccacaaaaaaacaacttgtgccccttactcctgccacctgggtaagtcctccagtgctttcccatgagataaagctggtgggaacctcattcccatttcacagatgagaagtgtgaggtctggagaggagccacaacttgtttaaggtcacacagccagggaggtggatgttagggtccctgcctcgggtttggagaagcatggtggacacagagctagtggatttgagaggctggggtggtcccgtattcacctctgttgctcccccaactccagagtgacagagctgggcctggcagtgaagcgtctwcagaagcagaatctggagaaggatcaggtcgacaaggacctcaccgagaagcttgaggccctggtgagcttcagctgcccctgagatggggcagggtgggatggggtaccggccagatccatggacacaggcttagggctgggctgcctgggccacccccagcatcccactcacactcaggttcagcccacacaggtgtgcaggctttgtggg

SEQ ID NO: 788965 - DNA, 687 bp, Homo sapiens
gcccaggaggcgctggagcaacagctccccacactgcaccatgagctcagttggctgcaggagcagctagcacaggtaggccaaactgtgtgtggggtggtctggagagcatgtggggcaggccaggctcgcagcctcctgcatccagtcctgggttaagtcacaggcactggagcctgcttctgggttaaatccagtcccacttctcctagctggggaccttggacaagctgcccaacctcccatacctcagttgccccatttataacatggggctagccgggygcagtggctcacgcctataatcccagcagttggggaagccgaggcgggtggatcacctgaggtccggagatcaagaccatcctggctaacacggtgaaaccctatctctacaaaaaattagctgggtgtggtggcacgcgcctgtagtcccagctactcaggaggctgaggcaggagaatcgcttgaacccaggaggcagaggttgcagtgagccaagatcgtgccactgcactgcagcctgggcaacagagcaagactccgtctcaataataataataataatgatacagattaataataggtggagactttttagaattggaatcttagacttttgggaacttcacatctcgaagagaccttaatgtttcagggatccagggaccttcatgcaaggtcca

SEQ ID NO: 788966 - DNA, 621 bp, Homo sapiens
cattctgactccaactgtcagattgtgacattttctctttctctgactttatgccaaatttacttcaacttctagcatccatcattctcatttatgaacaaatatgtatttaacaaatgtggaaatacaaatcatgaagcaaacaaaaccaaaccctgggcttacgtagccgatagtaaaaaattcaccaaaataaccacccgattacagtttcatgcaatgtgataggagtaagggaccaccatagggaggtcagaaggtgcttttcagaggtggagactacagctgttctcagaagaataggggttagaagaacyttccaggcacagagcaaagcatgagcaaaagctctgtggaggccaggaagctggtaaatagggaataaaagaggccagtttggctggagcagagagagcagaacagaattggtctgagtagtgagaagagatgaagaagtgggcaaggcgcctggccattcggggcttggttagttaggaggttttgtctaagagaatgggaaggtgtttaagtgctttaggctgggaagtgacacggtcacattatattttggaaaagccactctgcctgttgtgttgagattagagaggcgataaaggggat

SEQ ID NO: 788967 - DNA, 621 bp, Homo sapiens
cattctgactccaactgtcagattgtgacattttctctttctctgactttatgccaaatttacttcaacttctagcatccatcattctcatttatgaacaaatatgtatttaacaaatgtggaaatacaaatcatgaagcaaacaaaaccaaaccctgggcttacgtagccgatagtaaaaaattcaccaaaataaccacccgattacagtttcatgcaatgtgataggagtaagggaccaccatagggaggtcagaaggtgcttttcagaggtggagactacagctgttctcagaagaataggggttagaagaactttccaggcacagagcaaagcatgagcaaaagctctgtggaggccaggaagctggtaaatagggaataaaagaggccagtttggctggagcagagagagcagaacrgaattggtctgagtagtgagaagagatgaagaagtgggcaaggcgcctggccattcggggcttggttagttaggaggttttgtctaagagaatgggaaggtgtttaagtgctttaggctgggaagtgacacggtcacattatattttggaaaagccactctgcctgttgtgttgagattagagaggcgataaaggggat

SEQ ID NO: 788968 - DNA, 512 bp, Homo sapiens
aaaccagcgatttggagggtcgagggctggtgctttgaaagacaggcggaggggagagagggatttccccgtccccgctgcactcggtccttcccctgggttactcctttcctccgcctgcgcggcccctaacctgctcsaacccgttgtgcagaagaggccgccgggtccctttaaggccccgccgcgcctgcgccttgggttatcctgacacgcccatcgggatcctgaggagccagtgggctgcaggcgcaggcgcaggcgaggggctgggtggcggttgagacagcggcggtactgggaggcgtaggtgagggtcgcgaggctgcccgagcttctgagcgagcgcggtgcttttgggaacgcgggacgggcgatctgcggcgccaggagctgggccgaggcgcggcggcgcggctgccggctgccctgtgaatgggaagttacgcgaagtccacccagcgtttctgaggtgagggcgccgcgccaggctgggcgggcggtgaatccgg

SEQ ID NO: 788969 - DNA, 493 bp, Homo sapiens
ccgtccccgctgcactcggtccttcccctgggttactcctttcctccgcctgcgcggcccctaacctgctcgaacccgttgtgcagaagaggccgccgggtccctttaaggccccgccgcgcctgcgccttgggttatcctgacacgcccatcgggakcctgaggagccagtgggctgcaggcgcaggcgcaggcgaggggctgggtggcggttgagacagcggcggtactgggaggcgtaggtgagggtcgcgaggctgcccgagcttctgagcgagcgcggtgcttttgggaacgcgggacgggcgatctgcggcgccaggagctgggccgaggcgcggcggcgcggctgccggctgccctgtgaatgggaagttacgcgaagtccacccagcgtttctgaggtgagggcgccgcgccaggctgggcgggcggtgaatccgggacccgcgggcgcacagctgggtcgaggcgcggccgtggcaagttttgt

SEQ ID NO: 788970 - DNA, 763 bp, Homo sapiens
tcctttggcccctgacaaagggccgtaatttacacacctaacctggagctcagccaggcttctcttgccgtgtgcccaagcccttctgttggacctagacccttcttttccaggtcttgtcagccagcttgcacagtttgagtcagcatccagccttatgataggcattggttgattcagagagatatcacattcggtcatagccttctggaagtccagagggagagaagaaaaggtggggtcatgggcttaatgaatccaatgcaagagagcccagcctgtgtgctggacmattcttatctgactgaatgctgtgggaatccattagaagggagatgagtaagggtagggttacttggaggaggaggaacttgaactaggaggaggaagaagggcaaagaagaagtaattgagagttgttcttctaaggcatgcttaactatcagcacctcaccttcatcccagctcctcatcaagcgacaactcttgatccgaggaaaacgggatcacagaatttgtataagaagggaaattagtgtttacttagtctagccctcatattttatggagggagaaattgagttctgtggagattaaataaataatacaagaatgggaggtagagccagaactggaacccatctttctttttctcagttcatatccttctgcaaattcctctagagcagagaatacaatttttacttctttgagtgccctcaaaaatggagacattggccggggggcggtgactcacgcctgt

SEQ ID NO: 788971 - DNA, 575 bp, Homo sapiens
acaaataatatttgttagacacttgcccagggctgagattcagtgggagcactatcctggcacgactggttatttatgactgacatccatgccagtgcctgatgtgaagatgcatgtgccatatctgatgttgagtggtttgactaccctccctaaatgtttcctaagtgtagtgcaacagtacaacttccttttctttcttctgtgactgagtgagatcaacatatttttttatttttgagacagggtttcactcccatcgcccaggctggagtgcaatggcacaatctcggctcactgcaacctctgcttcctgggctcaagcaattctcccgcctcatcctcccaagtagctgggagtacaggcaygtgccagcatgtccagctaatttttttggtattttttgtggagacggggttttgtcatattgcccaggctggtctcgaaatcctgggctaaagccatccgcccgccttggcctctcaacatgaacattttccacagttaacactactgaaacaatattagaaatatattagaaccaagatattcagatatattgccatcgatttat

SEQ ID NO: 788972 - DNA, 619 bp, Homo sapiens
ccctatgctcgcagaaacatgtgctgtgttgactcaaggtttaattagggctgtgcaggatgtgctttgttaaaaatgtgtttgcaggcagtatgcttggcaaaaagtcatcgccattctcccgtcttgagtacccaggggcacaatgcactgcggaaggctgcaggcacctctgcccaagaaagcctgggtattctccaaggtttctccccactgagacagcctgagatacggccttgtgggaagggaaagacctgaccatacctcagcccgatacccgtaaagggtctgtgctgaggaggatcagtgaaagaggaaggcctctttgcagttgagataagaggaaggcatctatctcctgctcgtccctgggaatggaatgtgtcagtgtaaaacccgatcctacgttctatttactgagataggagaaaaccaccttatggctggaggtgagacatgctggtgacaatactgytgtttactgcactgagatgcttgtataaagtcaaacataaatctggcctacatacacatcaaggcacagcacctttccttaaacttatgacacagagtcctttgctcacatgttttcctgttgaccctttccccaccattaccc

SEQ ID NO: 788973 - DNA, 541 bp, Homo sapiens
gccatgcccagctaatttttgtattttaatagagacagggtttcaccatgttggtcaggctggactcgaactcctgacatcgtgatcctcctaccacggcctaccaaagtgctgggattacaggcgtgagccactgcgcccggcyctagcatagtttttaaatgattgactctaacctacaaccaggcttctactcagcgagacatcacagtccttagaggccaggacgcttcatttttccctaccccatggctccctagtagggaaggaaaggtactgatttcttaatttccctctatattcatatttcctggtatctttattatatctgtagcacttttccttagaatcactgtggagctttgaaaagccaaaaccaaaaccaaaaccaaacaccaatggctggcccataccccaggtcaactgaagaaactttggggtggggctcactcccctagtaattctaacatagggccttgacagaaccccctggccttgactacaggctcctgtgaacatgacgtgtactgtactcattttt

SEQ ID NO: 788974 - DNA, 595 bp, Homo sapiens
attgcattgtttgaccttaatgacctttctctggagtcaggtaagtacccagaacagttcatcatggtagggaggaggaggtggcacagctgatgacacagccctcaggaatctagcctgaaaagcaccttgtggggtctggggccaggagcaagggacagcttgatgctgtccatcacyaactggaatcccagctggaaaaaactcattacaggaccagaatctccaggaaaactcaatcccaaaccaggcatcacttcaattacacccctgactggagtttacaaactggtgggtggatggtagaagatggctgctttcttggggggtatgctagacctcacttgccctctgcacaacagaatttggatgcactgggaggtgtggcagatagactcccaggtggtcactgtgatccccacctgctgttcacagccttatgtactccctgccccttgagatggcctagacctgtgactgctaaccagtagagtgccacaaaggtgacaagatgttattttcatggttgccttatgtaagactgcaacatctgccttgctgagaaattctcttgctggctttgaagaaggaagct

SEQ ID NO: 788975 - DNA, 588 bp, Homo sapiens
tgggaggtcaaggcagggggatcacttgggctcaggagttcaagaccagcctgggcaacaaagtgagacctcgactctacaagaaataaaaaaatcagcaagcctggtggcatgcacctgtggtcccaattgcacaggatgtgaggtaggaggattgcttcagaccaggaggccgaggctgtagtgagccataaagaaaagaaaagattactaactaaaatgttctyaacgcactaaatgaaataccttggcctcctgccttggggctctctccgcagcctccccgacactactgttgagctgactgctcacaccaatcagacacccctgctcaaagatcaggcaggcccaagctcccccgctgaggcaggctctcctttccctgtaccagctcttccttgcaaccccctggctgtcatgggctcccacctccatgcctttgctcatgccttgctcctgcttggagcgcctgctgctctgcttcaaccctacccatcccttgatgctctgagcaaattccatctccacaaattggtttttctgacctccccacccctcccatccttctgagcctccaggacattcctt

SEQ ID NO: 788976 - DNA, 604 bp, Homo sapiens
tttttttgagacagggtcacctagactggagtgcagtggtgtgatctccgcttactgcactcaccgcttgctgcatgacagccaagatgtcgagggttgaggtgtaggggcagggaaggtgactttattccagagagccaccaaactgaacagatggtgaagtaacatcctgaagaaccatcttaaattaatacgattttcmggctccttgtacgttagggaagggaggaagaaggaggcgcttgaggtgaagaggtctgacaatgacagacatgggctgcagtgggagcccaaggggatggtgaaaattgttcgtcctttgtcaggtcacactgctcttataaatcttcagcataacactgttacttgtgtatacaacctctctatcttctcaggagttagtttggggaagggattattatcatctgtgctttaaagttaaactgtaagctaaatccctcccatagatagcttggcctatgtgcagaaataagaaaaagcagttagcctggaagatgtcaccacagggtaggaagggttaggagcaaaatgcagtcagtcatgctaggcctcattttcattgccatatatttaatgtatttga

SEQ ID NO: 788977 - DNA, 635 bp, Homo sapiens
aaatgatcttgatgttattatatttaaattgtgctatacgtctctctgagtcactctttccttatggtatataagccctaggtctggggaaaatggcactgagatccgacactttgttgcccaagctgaagtgtggtggcacaaacacagctgaatgcaaccttaacctcccgggctcragcaatcttcctgcctcagcttctcaagtagctgcgtgtacaggtgtgtgccaccacacaaaggaaattttttactttttgtagagatgggatctcactatgttgtccaggctggtctcaaactcctgggcttaagcctcctgccttggcctcccaaagtgctgagattataactataggtgtgagacactgttctcaaccttgatgaacatatatgcaaaaatcctcaacaaaatgttagtaaaccaaatccagcagcacatcaaaaagctaatccaccaggatcaagtaggctttatccctgggataaaaggttggttcaacatatgcaaatcagtaaatgtgattcatcacacaaacagaactaaagataaaaaccacatgatcatctcagtagatacagaaaagtcttgataaaagtcaacattccgtcatgttaaaaaccctcaactaact

SEQ ID NO: 788978 - DNA, 461 bp, Homo sapiens
atatgaaggggcggagaaactgaggttggcttcctaccccatgccacacaccattatgtacacatgagacttaaataacacttcttccctttcttgtgactgacacagatacttactataataaaatttcacctgaattaaacagaaggtcttagggtgagaccctgtagaatttttaatctctttactccattctgattatcacattgatgatccttaactcagaaaacatgmaatttcatttatgtgtgtttgaattgggcagaaagatatgaaattcagaaacatcattgaagggcttaaatgcaaattctgagtttcttagataaaaccttcacaaagagagtcctcctcaccccacccccaacactttactgctttcaaagtacccataacactactattactactagcaattaaaaatattgtgctcaatctgtgcagaggaaaattttgttaat

SEQ ID NO: 788979 - DNA, 581 bp, Homo sapiens
cagaaaaactaagactctattacccacagggaatatttgagcacttgagttctagagccaaattgcttatgttcataagttagtccttctgcttctggctcagacaagttacttaacatctctgctgatcagtttctgatctaaaaaataaaaacaacaataataatggtgatctttaaaagttgctgtgaggctaaatcaattagtgtctgcaaaacacttaaaacagttcccgaaaacagcaagccctcattattatttggkggtgctggtagtagttgtgattaataacttttataccaatgacaaatatttcttgtttgttcattttagcaggctaaactggaaaagctatacacacactctgatctattcatctttaaatccctagtattcagcatggtgtctgggacatagtaattactcaacaaatgtttgttgaataaagtttataaataatatgattacttaaaatgcaagctctttgttcttttggcttaggattggcttggcgatgcgggctcttttttggttccatatgaactttaaagtagttttttccaattctgtgaagaaaggca

SEQ ID NO: 788980 - DNA, 603 bp, Homo sapiens
caacaccagatctctcctaaaagaaatgttaaagacagttcttcaatcagaaagaaaaggacattaatgagcaataaaaaatcatctaaacatacaaaactcactggtaacagtaaatacagaaaaaaaacagctaaataacactgtaattgtgatatgtaaactacttgagtagaagggctaaaagtttaacctatcaaaaataataactacaaaaacttttcaagacatagatagtataataagataaatggaaacaacaaaaagaaaaagtgttgagttttgttttctctttgcttgtttattaatttgtttaagcaatcagtgataagttgttatcagtttaaaataatggcttatactatttgtaagcctcatggtaacctcaaatttaaaaacataaaacagatayacaaagaattttaaaaagcaatatgttaaaacatatcatcagataaaaacaccttcactaaaaggaagacagaaaggaaaggaagaagaaagaaaatgccacaaaacaactggaaaactaataacaaaatggtaggagtaagtccttaattatcaataataactgaaagtggaacaaactctccaataaaa

SEQ ID NO: 788981 - DNA, 653 bp, Homo sapiens
agctggtgatgaatcctgctagaactggatccttcccttcaaggcagaaggttcccctctggctcatggtgtgtctagaaatgtagtctaggagctacagcctagaatggggggcctcaggactctgcctgataccctattctactgtggctgagctggcatccaagttgccagacatagttgcctttactctctactatcttcatctcaagcagaaggaaggaatctctcccagagttgtaagctgcattgcctagggttgggggagggttgatgcaagtactccctgggccaccctagctggtatctcatcaggtcaygtggaccccaagtcaactggctctgagcccagcataacacgtgtccaggaattacaacccttgtggcctagactgcctttcaagtttacttatgaccccagagaactttagctcatggtggcagggtttgctggaattggaactcagattcagacctctgggatagaaaacttgcctctgtctagggctgatctaaatgctctttgtgggtgctggttgagttctgccaagtgttgctttccgctgtgacacagcagcactgtggatgcaacatcctacgagcatggtgctctcccttccccaagcacacggattctctttccacgccatgtg

SEQ ID NO: 788982 - DNA, 479 bp, Homo sapiens
tctgaattttaggatttttataccagtgaactaagctgtatttaagtaccatgggatatgatggttatgttccaaaattgaatgattgtctctagagcaacttataatctactgggaagatagaaaaaccaccaaaaactagctagttatttgwtttttaaaagtcaatgatatatatacagccttcattcacctattgactcaatcgacaaatatttgttgagtgtctcttatgtaccccacactccgttagttacaagagacacaaaacaaagttgactgtagtcctgtcaaaagcttagtttatctgggtaaacagacatttaaaaaggaactgaaataactgtaggaagtactatgccagaggaaataccaggtgctgtgacattaattaataacttgcaggtatactaatacgtagaatagattacttgaatgattaaaatccttgaatcaagatgaagctaatccaggaagat

SEQ ID NO: 788983 - DNA, 648 bp, Homo sapiens
aaaaaattagccgggtgttgtggtgtgcacctgtaatcctagctacttgggaggctgaggcaagaaaatcacgtgaacctggaaggtagaggttgcagtgagctgagattgcaccattgcacttcagcctgggtggcagtgtgagactctgtctcaaaaaaaaaaaaaaaagtctgttcatattttctgtccattttaaaatgggattatttggttttttcttcttgagctrtttgatttccttgtagattctatatatttgccctttgtcagatgcatagtttgcaaattgtttttctattttgtaggttgtctgtttaatctgttggttatttcttttgcagtgcagaagccttttagtttaattaagtcccatttgtctattttttgtttttgttgtgtttgcttttgaggacttggtcataaattatttgcctaggccagtgtcttttaaaagagttttttcccaggttttcttctaggatttttgaagtttcaggtcttacacttaggtctttaatccatcttggttaatttttgtacatggtgagaggtaggagtccagtttcattctctgacatatggttatccagtttctcctgcaccctttattgaagtaggtgtcctttccttggggagaacactcta

SEQ ID NO: 788984 - DNA, 640 bp, Homo sapiens
gtacagttgaataatccatcagaaagattaaacttgccctaaatctctaatcttttataatccaggcttaatttcaaaatgctttatgttttaaacagaaattaccctcctgggctgggtgcggtggctcacacccgtaatcccagcactttgggaggccaaggtgggtggatcatctgaggtcaggagtttgagaccagcctggccaacatagtgaaactccgtctctagtaaaagtacaaaaaaaaaaaattagctgggtggtggcatgcgcctgtaatcccagctactctggaggctgaggcaggataattgcttgaacacaggaggcagaggttacagtgagccaagatggygccactgcactccagcctgggcgatagggtgagactccatctcaaaaaaaagaaaaaagaaaaagaaataactctcctctttggttttggttcttctaaaatgtagagaggcttgtctttgcaaaaaatattcccatacttttcttttgccatctgacttagtattttcaagtagtattaggcacaatattgagattggtctgcttttgaacagtcatccaccatctcttctgttgcaaacgttttattagaaaggattttgtcatcctatacaacagcaactt

SEQ ID NO: 788985 - DNA, 516 bp, Homo sapiens
ttatgaatgatgctaaaattctgggctattccaatttcctgcaaatttactcttttgaatttatgttttgatgtaaacttgttggtttagttcttcccttagttttttctaaagcttttaatggtttaattatttagacatttattttgcaagtgcttaggataccttcgggcttatataaatattgaataaaccctcaaagtttcttcatttcccttcayttatccttgttttatatcagagtagttaagaatagagacagcagtgtctgcaccaattcaaagccaacttttgccgtttattcactgaattacctctctcagcagttggtttgtgttttgtgtcacgtgagctatgtatacagtacagagcatatcagcaagttcggagcggtttataaggagtggctgctgtgattctgagagtatcgacagtgccccgcttgctcatgcagaaatagtttggttagggttttaatcacatcttcatcgtctgtcttccatcagcctggagtgt

SEQ ID NO: 788986 - DNA, 612 bp, Homo sapiens
gtttaaaagacagtagtatctgggatgagagaggatagtggtgaatgaggatcaccttgagctgtgttatttctgggaaacttgatagaggtggaggaatcagttgggtcctcgtgtagaaaagatttagagaagcaaagagtaagatatgaatcccatgtatgacaggaaaaaatgatgttctcaagcagcatcagtggcccagatgaggaaagtccaaatgaatttgtrgtgaactagctccatcaagaactggaaaatattcagtaaatggtgttggtgattgtagatcatatttcttggaaggttcagaattagaaccctaactgtgatatcaatatacagaaggaaaaatagaaaaatatacaagtgttaatcctcttgccaactctaaagagaataacaagattgcaaataatgctaatttgagcaatacgttgatagattcatataagcagatatatctgtaattaattcaagtaaaaatgttttaaaactccatgccatgtttctcactacgaacatgcacctttttcattcttaatgtcttcaaaatagaagtgcatcttagagtcaaaggtaccttaaagtcactgtaaccaggcagcactc

SEQ ID NO: 788987 - DNA, 585 bp, Homo sapiens
acatcataggcaaaaaaacagtttcagactgattgagggcttaacactttttaaaaaagaatgtgatgtctttttgatagaaggatatcttaaataagaccaaaaaaaagtaaaatcataaaaaagtggttgatgtcattgaaacctaagaacctcagtttatcaaaagatatcttaagaagaatgaaaatcccagccacaagagtaataaagattatttgtaatgtatatcatcatctgaggagtgtgagattattcctaataatcagtaaaaaaatagctcagtagaaggggagcaaactatatggaaacaccaaaacatgaatgaccaataaacatgaaaaatgatcaacctcattaataatcaaggcaaggaaaataaaaaacaaaatgaggtaaaattktaccaccctcaggttgacaaaatttaaaattctgacaacacaatgtgttaggaagaatatagagtaactggaactcgtatacactgtggtaggagtgttttctttttagaaaataattttgccattatcgtgcaaagctgaggaagtacgtgccaatttaattctactgtgcaaacacatg

SEQ ID NO: 788988 - DNA, 568 bp, Homo sapiens
gagatggggtttcaccatgttggccaggctggtctcaaccacctgacctcaagcctcctaaagttctggggtaacaggtgtgagccacggtgctggttcaaatagttttaattctactgtgacatctatatataggtctaaatccaatcgtgaaaagagctgaggtgaccagaaccttcaatacttactgaaatagttcctaaaccatatacgagtccctaaaaaataaatttggatgcgtatttattgaaaaggaaagaggttcacaatccatcactgaggaaaaagcttttaaatggacccacttgaaagttgtcatcgtttggcgggtcraaaatgttcaaatatttgcaatttcctattttaacttaaatattatgcaagacaatatgaatattatgatctgattttgttgttttttaatatatactctgaaaatttagcagcagttatccttgggatgggattatgggtcacttttaattcgtttcctcttttggcttacctatattttttacttcttcaggaataaatccctgggtttaccctcaagctccagtctgaagct

SEQ ID NO: 788989 - DNA, 562 bp, Homo sapiens
aaaagtttcagttttgcctttcacgcttcagtattcaatcatcccagaacagatatctgtgttgtataaaatatgaggtctaatttaactgttatattatatggatggttccaatgtcattggttgaaaattttatattttccttagtgccctgcaatgccatctggatcataaatcaaatttccagacatgtgaggatgtatttggggccctctgttcaatttaattattgtctttgttagcccatttggcaatatcatattgttttaattattctacatttacattaattcttggtatctggcaggaaaatttcttcacctaagtttttggttcttgacccatgtctgagttmtacatggctcctgactctttcaaataaattgtaggatcagttttaaagcatcaccaaaaatattatgagttttaatggaattttaatctattaaatatattatttaatttttattaaaatttgcatctttaggatattgaattttcttgtccatgaataccatagagtactccacttatatagggcttttccaatgtgttctcacaa

SEQ ID NO: 788990 - DNA, 594 bp, Homo sapiens
accatctcattttttacaaaccatataccttcacaatttacttatttatttatttttgtcttaatgagctggttagaatctctagtgtaatgtacataagaaatagtaatggtgtggggcgcggtggctcatgcctgtaatcccagcactttgggagccctgacgggcggatcacgaggtcaggagatcgagaccatcctggctaacacggtgaaaccccgtctctgctaaaaatacaaaaaattagccgggcgtgatggtgggcgcctgtagtcccagctactcgggaggctgaggcaggagaacggcgtgaacccggraggcggagcttgcagtaagccaagattgcaccactgcactccagcctgggcgacagagcaaggctccgtctcaaaaaaaaaaaagaaatagtaatggtatgaaaatttcatgttcttgatcttgagttaattttaaattaactgcgaattattccactaaaatgctgcacattacttgaagataaatattatctacttttagtctgctataagtttttataatgaatagattatagattatgaattttatcaaaagctttttccttcatctatt

SEQ ID NO: 788991 - DNA, 606 bp, Homo sapiens
acaaatagtatttcttggcctaagggacctcttaggaataaactattttgcccattaaaacatggattttgggccaggcgcggtggctcacgcctgtaatcccagcactttgggaagccgaggcgggcggatcacgaggtcaggagatggagaccatcctggctaacacggtgaaaccacatctctactaaaaatacaaaaaattagccgggcgcggtggcgggcgcctgcagtcccagctactcgggaggctgaggcaggagaatggcgtgaacccgggaggcggagcttgcagtgagcccagatagcgccactgcagtcyggcttgggcaaaagagcgagactccgtctcaaaaacaacaacaacaataacaaaaaacatggattttgtcttaaataggactaacctgttagtagagcatgctattttgagactattaaagcgcacaggcaaaaaaaaagatggaaggtttcacagattattgaggcttgggatacattattttaaaaatttctacaacccaacagtttcatttttgcacttctgagtttttaacaaattggattcattgttcaaaaggacaccactgacagtcatttagaatg

SEQ ID NO: 788992 - DNA, 646 bp, Homo sapiens
ttgatggtagtcacatgactgtatacatttgtcaagactcagaattgtacacatgaatttggcagatccattttatgaaaattatatctcaataaaattgattaaaatataattgataaaaagatatatgtatatatatacttgatatgtatatgtatttacgtgtgtctatatatttgattttcaatattacgtgtgtctatatatttgattttcaataaagataaaattagctctgtagcctgtttcgtgtgtaccagtgggyatactaactgctaataattaagctacacaataaatatgagtggaattaataaaggaaaatgccataaattataattaaaaaccaatataaataaaatataacaaaattttcaattagaagtacatatgtatggaagaacatggaagcttgtatgagtgtatttgttaattgattgatttttcagtatacctgagccaactactttgagaattgttgttgatgccttaaggccatgctatgtactggaagctcatgtttgcgaaatgtgtgattaaaaaatcagttaattcaaatttctattttacatgaaattgactagggataagcaacagcaagagagggtcaatcaacagtggtcagagattgggatacagagaaaaa

SEQ ID NO: 788993 - DNA, 635 bp, Homo sapiens
agccagcagcatatagtcattcactcttccttctctctcttaccctaaattccagtagctatcaagttcagtaaaatcaaccacagtaatgtttgtctgcactctcatgactctgatatttttctatatttaataactttttgaaaatatctatttgatcatgcctttcctttgcttaaaactcattactaagttctccttgtttgagggataaatcttaaacccagtaacacctcctacaaggcccctagaaatctgcctctccatgcctatctccgtatcttgcgtcaggtccctaccctaaagttatatagtaggctgaatagttccctgcagagccattcatgcccccatccctgaaatctgwgaatatgttccctaatatggcaaaaatgattttgcagatgtgattaggaagttttagatgaggagattatcctggattttctgggttgttctattataatcccaagggttcttataagaggaaaggaggagggtcagctagaaacagagttgtgatgccagaagctgaaactggagtgatgcagggcacgtatccaaggaatgccaacaacctttagaagttgggaaaggcaagaaatagattcttccctagagcttccagaaaaaaa

SEQ ID NO: 788994 - DNA, 609 bp, Homo sapiens
aattctcataccattattactgcatcttgctccaaggagaacatttcaaggccttggtctggttcctgggtcatgcccttgtgtttgttaagattacaagactctgagctaaccctgggttagtgccagatactttggactatacgcacaataaacttggtgtttacggatgaggttaatctcattctgctattgaagtgatrgcaaggatgaacactgccatcatattttcttggtcttttgtgtattgttcctgaatgtattccccatcaggattgacactgatttctttagattctgtcaggcactatttttcctttttaaagtttgtttgtattttgcttttaagttagctatcatggccttcactaatctgcccttttacgtgattcctttttagataactatggtgataatagccacttatttttgaggacttactgcatgccaagttctctataagatatttataagatattattaaatatttgaaaggcaggcttgcttgctagttaggaacacaagctctagagtcaaactgcttgggtcagcatcctagatccatcacttacaaactttgtggactctgtgcctcagtttccaaacact

SEQ ID NO: 788995 - DNA, 529 bp, Homo sapiens
aggtgtgcagtaatatctcattgtggttttaatttgcgtttccctggtgatcagtgacgcagagctccttttcatgtacttggccatttctatgtctttgtagaaatgtctgttcaattattttgcccatttcttaatttgcttaatttttttttctgttaagttttatgagctccttatatatagatggtccctgaagtataataggrttatatctggataaacccatcataaataaaaaatcataagtcaaaatgaatttaatacctttataaatccagcataaagtcacaaaaatcatcagttgaactatcataaattagagatcatctgtattttggatattaaccctttatcagatatatggtttgcaaatatttttttttcatttcataggtcgtcttttcatttggttgattgtttcttttcccgtgaagatgctttttcgtttgattcagcagactacattaagacattgtgatgtgaagtagagccctaaaatgaagcagtagctgttaaggggatatgt

SEQ ID NO: 788996 - DNA, 622 bp, Homo sapiens
agatttcagtgcttttttcagtataatatactgaccccaacaaatacttaatgagcccatacttaacaccaggcactatgggggagaaagtaatacaaggtttctgccctcaaaacactataaaccagcttggaagacaagacacagacacagcaaaagttaagtaatgctataatagtgctatataataacacatgtatattacatatacaagtaggttatatatacgataacaataaaacaatagaagaaatgatgatgtataatatttactaacatttgcaatgtgtcaggttctgttctaaaggttttacaagtatcatcttatttattttgttttatacatgacraagctgaagcaaagaaaggcgaagtaattggctcaacatcacatagcttataagtggcagagtaagaactcaaacccaggcagtctgcctccagagcccatccctttagttgttatattgttttgccatgataaggatggtgctatcaaagggatatggaaaaatgctatgagagctcaaaggacgattaattaattctatctggaacagtctggaaagagttcccagaagaggcaatagttgagcagggtcttaaaggagagtaggaattt

SEQ ID NO: 788997 - DNA, 606 bp, Homo sapiens
actttgtggcagctcctcccatcacaggcctggaagcctaggagggaaaaatggcattgtgagccaggacaagggccccactgctctgtgcagccttgggaaatggcactctgtgtcccagccactccagctctagctgtggctaaaagggtccagggtatagcttgggccattgcttcagaaggtgcaagccctaagccttggtggcttccacgtggtgttgggcttgtgtgtgcacagaagtcaagaattgaggtttgggagcttccaccttgattttggaggatgtatggaaatgcctggaggtccaggcagaagtctgctgcaggggatgagccctcatggagaacttctactagggcagtggggaaggaaaatctggggttagaacttccacacagagtycccactgggggactacctagtggagctgtgagaagagagccaccatcaccatcttccagaccttagaatagtagatccactgacagcttgcactgtgcgcttggaaaagctgcagacactcaacgccagcccatgcaagcagatgcgtgtgctgtagcctatacagccaaaaaggtggagcttcccaagccttgggaggcc

SEQ ID NO: 788998 - DNA, 593 bp, Homo sapiens
caaatatcagcaatttttttcgtggatccaaacatgttgatactaaagtttatatggaaaaacaaaatcaaaatatcaacagtaaacactgaaaatagaaacttacaaggtaagatcagcctaccatacattaagtcatatcatagatttctattattaaacccgtacagtattcatgcatgaatagaccaacaatccagtgcaayagaatagggtgtccagaaatagaccaaagtacacatggaaatttagtatataataatgtaggcatctcaaatcactgggataaagatagacttttttttaatggtgtgggaacaaccagtcagccattttagaagaagacaaaaagtctatttccgaataacaaattccgaatggatcaggggtttaaatataaaaaataaaactatacaggtactagaataaaatctgaatatagggaaaaaatgtccacctatgactcaaatccagactgaataaaagaaaagatcaataaatttgttaatacaaaaattttaaagccatcaaaaagctccaggcccagaatcaaaggataactcacaaactaggagaaaattttcaacatatat

SEQ ID NO: 788999 - DNA, 593 bp, Homo sapiens
caaatatcagcaatttttttcgtggatccaaacatgttgatactaaagtttatatggaaaaacaaaatcaaaatatcaacagtaaacactgaaaatagaaacttacaaggtaagatcagcctaccatacattaagtcatatcatagatttctattattaaacccgtacagtattcatgcatgaatagaccaacaatccagtgcaatagaatagggtgtccagaaatagaccaaagtacacatggaaayttagtatataataatgtaggcatctcaaatcactgggataaagatagacttttttttaatggtgtgggaacaaccagtcagccattttagaagaagacaaaaagtctatttccgaataacaaattccgaatggatcaggggtttaaatataaaaaataaaactatacaggtactagaataaaatctgaatatagggaaaaaatgtccacctatgactcaaatccagactgaataaaagaaaagatcaataaatttgttaatacaaaaattttaaagccatcaaaaagctccaggcccagaatcaaaggataactcacaaactaggagaaaattttcaacatatat

SEQ ID NO: 789000 - DNA, 588 bp, Homo sapiens
catcatatcaaagtcagaatgagatttaaactctgattattttcagtataatcttacaataaaagcactttttaatctgctcagtgagaatgtctgcattataatatctagttctcttacaaggtgaatagaggcatgatcacttatggaagtagtatatattatacacttcattgcttcaacttctaaggaattagaacagaaagaaaaatctgctcttggattagatagagaccaataaaaactaactggcttcttttggtacatttgatgactttaaatatttcctaatcttgaactcttttccacatagatattaaaaattttctgaaatacaattaattatgatgggtatattatctgggcaggtaaacaagtttttcattattaaaatactgggcctctgtgtttgcaatataaatgtggtgcawaaaaagcttctcactgtctgcattgcatgttaacaatattccacatttaaattctcatttagcatcagaggtatatttttaaatgatattaaatcaatattcagtacctattatttgttcagtatgcatttagcactgtcttattctcaccagggat

SEQ ID NO: 789001 - DNA, 539 bp, Homo sapiens
gaaaaggtgttcaaccttattggtcatcagggaaatgcaaatttataccacaaattcaagtcataacaaacccacttgctcagcaaaacttataatgactccaaaaagattccaagcattgctgcagaattttcatacactgctagcgagagtataaaaaacattttaaaatctagattggcattatctactacagttgaagatactgtgtattctgtggcccatcaattccactcatgcaccaaatacatgtattaggttggtgcaaacgtaattgcagttattgcaattagactattcttgattttcttgtatttttttgtaagtggttaatgccacttttaatggtgaaagccacagttacttttgtaccaacctaataaaataaagagtagcattgtytgaaatagctaaagatggaaaacaatccaaatgttcactaatagtaaaatggataaataacttgtggagtattcatgcaattgaatactattgagcaatgaaaataaactacagctatttgcaacaacatagatgag

SEQ ID NO: 789002 - DNA, 610 bp, Homo sapiens
ctgaatttcaaagtaaacatgtccttgaagatgtggaaacagggtcaaactccaccaatgttctgtgagtcacatatttactctgagattcaggggtcaagggggaaagttaacctaagttgctgttttcaggcccaggtgagaaccagtctcagacttactagtaaaagcaagctggttttgtgtggaaagcgaaagacagctgccatgaacgaacgaggcaactgcaaatgaagaatctcaggaaaaaatactcccagatatagaccaatcctgcacagcactgatgagcagactggtctcttccaacaaagtccaagaatatctccacgaagaacacaagggtaatcaaccagaggccagaaataaacatttaaaaaaggacagggagaagacaggtatttagctaggagctaayaacttgtggaaaactgtaatgaattgttaaaaaagaaaaacaagcttaccttaaaggcatttttccttaaaaatcactagctgttttttcctccggggccattcctttccttggcagttgcacagtaaatttttttttttttgctctattctttttcctaggcacatatatttccttctgctcagcttcact

SEQ ID NO: 789003 - DNA, 664 bp, Homo sapiens
ctaaagtgctgggattacaggcgtgagccaccacacccagcctggtacctactttttattaacttcttattatggtaaaattgtaaccattcataaaatagtaactagtattatgaaccaccatgctcagcttcaacagttatctccatttttcctatcttgttttatctactcttaattatttattgatctgtttatctatttttattttgccatatttcttttgctggagtatttaaagtcaaatcttatacataatgtcatttcttctataaattcttcaattagatgtctmtaactgataaggtcatcttgttttttgttttttgttttttaacataaccaccctgttaatatcacatctaacaagattaatacattctttactgtcatctaatatagtaaagtttccccacttgtctcaaatacgtcattttacagttgatttgttcaagttaggattaaatgaagtttacagaatacatttggttcttatcgctcttgaaatctctcttaatgtacaacatactccctccttttttctccctcttcttttgatttatttccatattaatttgtttgagacactccttttgtggatttggctgacagcttccatgtgatatcatttatcaggatcctttaacttcttcctatgccctgg

SEQ ID NO: 789004 - DNA, 641 bp, Homo sapiens
cttgtagtgaaggcctgctttttttttttcaattagaaaaaaaaatttttttagaaatgggggtctcactatgtgacccaggctggtctcacactcctgggctcaagcagtcatcctgccttggcctcccaaagtgctgggattacagatgtgagccactgtgcctggcctaatattctgcttttaatggaatttttagctttttctatgattttggtcttaaaagtctttatttcatttttggttttgaaagatatcattctgggtatagaatccttggttgactgttttggttctttgggttttttctcctgagtactttggaggcatttgtctgttgtcttatggcttaacagtaaatttgctgtgattcttctttatgttcccctgtgtgtatggaactggttgttgtgttgratacacaactctattcatttggccaaaatcataaaattaagaaaaagagtgaattttactgtatgtaaattcttaaataaataaatacatatatgttaaaagcatattatgtactttgcattgtattagtctctaagaatacaatgatgaacaagataattttcagttttatgaagcttacaacctagtgtatgcacaaaaccaatgatacatggtaattgatg

SEQ ID NO: 789005 - DNA, 651 bp, Homo sapiens
catacacacacatagagataaacagagagaaacatttctatatttctgtatctctgtatatacaaaccctgagttaatagtagtatcttctattccaaaccaactccacagtgttctttctagccttccacctttccgtatttgtaatgtttctctgacagtgcggaacctggctctcattatttacgtatatttacttagttctggcacacatattaagtagttccagtattgctaactcataacactgtgcataacaaacctactcactggaacttcatatttgtttatagttcttttttgtccttagcctgaaggtatataggaaaatgcygtgtttaacagttacttagagttttttcttcctttgctgagttattaatttgaagcacaatcaagtttatgtttttatgtttgtattccaatttgggttctttttaccttattcttgttgatttcatttatatacgtatttggttttttgactatacgaaacagcattgttctaaaaattaaatctacattaaaaagtatatacgcagagaactgccatcccctctcccccaatttctttttagcctgtatttattttcacagaaacaagcagatacatatatattttcttatatccttttctttcttacatgaaag

SEQ ID NO: 789006 - DNA, 640 bp, Homo sapiens
gtaaagcaactggaatagtacttggtactagaaaatgcttaataaatgttaactattattgtattaatgtaaaaagacaggaaaactttatccccaaaatctaaatagtagttaatgctagaatggagggagtacagatggtttttattttcttcattttacttaacattactttctaaattttccatagcaaacatagtaagtatgcaaataaaaacattccctaaacacatacttttcaaagcaggacatcgagataagcaactcacaatgaaaaatatcagccagrgaattcagtaagaaatttcagtcaagaagaaacaaagtactctattgttctaccactgtattatttatgccacaaagtgtctactagtctgtaggcacccatcttcgatattgtgaactgcacaaagtatggagatttggcttttcagccaggcggtggctcatgcctgtaatcctagcactttgggaggccaaggcgggcagactgcctgagctcaggagttcgagaccagcctgggcaacatggtgaaacctcgtctctactaaaatacaaaaaaaaaaaaaaaaaaaaaaattagctgggttatggcagtggcacactagtagtcccagctactcggaaggctgaggc

SEQ ID NO: 789007 - DNA, 635 bp, Homo sapiens
gatgccaaaatagtatcctttctcatcaggggttggttttcttgtttgtttaaggtttgctaaaattcaagtgatttctttgggttttagcagttttccacaacaaagtacattcatttttacatgaaattttacagtaaaaatcatcagaattacaactgacttttcaggaaatacatgtataataaaatgagattattttcccttattcttatgaaagyatatgcgttacaaatactatatgtatgatctttcagtagaacaaacagttttaagatttataaggtgacaaatataaataatgattccaaccctagctgtggatcagaatcacttgtcgagctttgtaaaaatagttgtccatggcttcacagataattctgatgcacagcaagaattgagaatgatgaagctattccaaccatttacctaaacagcaatggccagtgggggttgggggatgatgtggggtggggtttgttgccatcaaggattgacagcagttgtgtcaggcattgaacatacctgaccttaaattttcatagtaatacactccaaatagttgtgccccctccccatcatgccaaaggtctaaagttaaaaacaggcagaagacagacataacttggaaaatc

SEQ ID NO: 789008 - DNA, 668 bp, Homo sapiens
taccagcataaaataacccagggtgtgcttcttgcaccagtcccaccaaatgctcacatagatttttttcaacgtggattaaaccaacatctcaggagatctagatgaacaaaactaagctagtcaatgacagaaataagaacaaggaggagctgtttcccagagaaatgctgttttaacatagctcagcgggcctcaaaatgagaaaaacatcacagtttgtgtgaaataggtcggtgttgccaaccccacttctttgggaaggagactgttccccgacattcctggcccacttcctagctgtgcctccagggcagtcaccctaagtggcttctctgacttctattcccttactggtgaaacagggataacagttcctcctcctcctgattcttgtgaggattaaatatttaaactcatggaaagcattcaggacagtgccaggcacaaaaatrccaagtattattatgattatgagagtacatcataatgaagacattatgtgcgtccttcctactttatcagctcctctagctggcagtgctctgcaggccctccagtcccttgtactgacattttactgtacagtaaagtctttgagactgcttgtgaagtctcaaagtctggatattacgacctaagacttggtagtaaactgaggccaggac

SEQ ID NO: 789009 - DNA, 655 bp, Homo sapiens
ggtgacatgtgcctgtagtcccagttacttgggaggctgaggtgaaaggattgcttgagcccaggagtttgaagctgcagtaagccatgatcatgccactgcatatgagcctgggtgacagaggaagatcctgtctctaaaaagaaaaaggtttgtaatcatggcatatatacataattttgcagcctccattgaaacaatttaacaaattattttttcatttgatacatggtaataaacatatattcaccatttactgagcaccttctaagtgtttaatggtttaaacgtaacatctttttattcctgccattgtgatttaggtattaaagattaaataatttgcacagcataagtcaaagaatgaagatttataacgctgaaacttaaaaaaaaccataatttacaatgactacatccttcaccaacaggatctactctcaygtacttaaccgttctttcactgttagactgctaggctacttccagtgcttcttgtgtagtatttcctaaactgccttcgtatagaaatcttagtgcttggtcactgttcaaaaggacttctggttctagtccaatgaactaacacacagttccttactgagcattaagcatttcctagcttctcaactggactccaatagaaagttaagcc

SEQ ID NO: 789010 - DNA, 599 bp, Homo sapiens
tccagtggttaaatctactgtccttacttcctccctgctcttggcatggaacattccatactctcagccacctctctgttagagctgggaatgaccccttcgggcaggcagtcccaagattaagacccctgcttatgtgagaatcaaaggattcccccatgtagtcagtgcagaaacaaatggtgtatcatgtcccttctgtaagattcagtcagtacatccctctttcactggtatccagaacaagtgtgcttctattcataaatgtgtttcctttgctccgtcaccctaaccttggccagtgattatattcccttcttgctttggctgctaggaagctcaaagccatgatgtaagtttaagcacagttactgtcttggtttagctttctgggacagttatcttcgtgttccttgtgttcacaaagtttctcaatctttgatgttttagttaatgatggtartgaggaggtggtagcccccaacttctccttgttctgcatgatattggaggtggctttccctcgctaaagaccactttccgtatctgtgaacggaagaaaacagttcttgttctgtctgtcaagaggccaagagaga

SEQ ID NO: 789011 - DNA, 664 bp, Homo sapiens
caaccatgggccagggctgtggtgtcgaactagagagcaaaagagccttggtggccgccttctcgatgatgtgtcaggtccactgtggcctttgggccctagagtggtggtggcaggggggtgatggaggaggcatgtggagtggatcagatgcttcttgaagtcgatagtgcacacaagtcacccagggatcttactaggatgcaaattcagggacaacaaatctgggtagaggttctatgtttctcctaagctctcgggggatgstgataccactggtgcatggaccacactttgagtagcaaggtagagactcaactgacaaaagaagacagtgaagcctagagcaagtcagggacttgcctcgggtcactggtcaggcagcaggagctgagaagggacggcctacctccgcgggccagggctctggaattcgtggggcaggctgggctgagtatgcctttgtgaggcatggcatacctggactcacccgagctgcccgtccctgcccatgaatagtgggcctctttccttcctgcataaggcttggcgggcgcaagcccacggccgccccctcccctgcacacacacttacacacactcacacacccctgccggctcagctgccctccctgtttggggaaagtcaacaagagcatttgaa

SEQ ID NO: 789012 - DNA, 532 bp, Homo sapiens
tgtgctatggaagggacactgggacatctgaggctgtgtcatagaaggccatggaacatctgtggttttggctgggacacttgttctcagagctctgaaccaccccatggcaaaactaaccactctgaagctgccattttgtgaggaagcccaagctacacagagaggtcatgtgtaggtgctgtggtcactgtgctggctgggctcatttttcagttatcccagccaacagactggcatgccatattagcttcccagggctactataaaaaatttccacaaccctagtgacttaaaacaacacaagcttattctcagasagttctgaaagttggaagtccaaaaggagtcttactgggctgaaatcaaggagccagcagggagaatttatttccttgcctgttctagctcctgcaggcctcctgcattctttggctcacagcctcctcctccatcttcatagccaacagagtggcatctcctgatttctctctgtctatgacctctgcttctgtcattagctgtttttctg

SEQ ID NO: 789013 - DNA, 399 bp, Homo sapiens
tctccaagtattttatggtttgtgacactaccatgacttttaaatttaattttccaattgtctgttgctattgcctataaaaaaatcaatctttgtgtattgaatttgtgtattgcaaattagctaaatttacttattagttctaatagatttttttagatttytttggattttcttttgcatattgatgtcatccacaaataaagacagctttatttctttccttccaatctgtattctttttattttttttcttcctcactattctggttaggtccctccagtacaatgttgaatagaagaaattagtgaatattttttgccatgttcccaatcatagagttcagttttttattgttaagcattgtgttagctaaagtaggtttttatagatgccca

SEQ ID NO: 789014 - DNA, 580 bp, Homo sapiens
gctgggggaacaactgaccagactttgcctgggtttggcctctgggggtgtggggctacccctgctctccctgtcacgccatctgttgcaggataccctccctgtcaccagggaccacctagctgatggagctggaatcaccagaaaacatgctgtcatcatctatgcacttcggtggggcccgtggcagcagaatctgacagggagtggtgggcggtagatccaatgatttgctgtcacggttgtggctctccaggagccaaagatgggagactcaggcccatttgccatctgctctcctgctggatttcatctttgtgtttttgggcatgtcactcccccggcccccgtgcctgggcctcctgggccctgccaggagggtctcttggggccctgccaagggactaggccactcagagggtcctggggagrtctggcttgaggtcctggagccctcacgagagctagttggcccagcagagtccttggccttcacccagcctacccctcccttgagacctagtgctgaccaatcaccattgttttctttctctctcctgtcccccacccagcagaaagc

SEQ ID NO: 789015 - DNA, 516 bp, Homo sapiens
attgagcaatattttactgatctttctggatagttgttgttgcccattcgttctctgctggtactacatttgattgccttatgcctagcttgcaagaataccagtctctgatgatgacaaatacatttcacactctgaaggaaaacaggcaaaagctagattgaatggtgaagcagaatatgtcaatgtcacttagactatcccattttataaatatatacatgaagctttcctaggaccaytaaacaattgtagttcattactgatccacaccacaggggtcttgtgtctagtggtatcccttggtcaaagatttctttgtggcttttatcaccaaagcacaaaacagagatgttggttttgttgttttctttaactagcatcacaaaattgctatactcagcatgtgaatctgaaaactggcaactcttaagaaaaatgcagttttgggaaaaagctaaaattgtgtattggattattaaaaaataacagaactgttggaaaaatagacattat

SEQ ID NO: 789016 - DNA, 516 bp, Homo sapiens
attgagcaatattttactgatctttctggatagttgttgttgcccattcgttctctgctggtactacatttgattgccttatgcctagcttgcaagaataccagtctctgatgatgacaaatacatttcacactctgaaggaaaacaggcaaaagctagattgaatggtgaagcagaatatgtcaatgtcacttagactatcccattttataaatatatacatgaagctttcctaggaccactaaacaattgtagttcattactgatccacaccacaggggtcttgygtctagtggtatcccttggtcaaagatttctttgtggcttttatcaccaaagcacaaaacagagatgttggttttgttgttttctttaactagcatcacaaaattgctatactcagcatgtgaatctgaaaactggcaactcttaagaaaaatgcagttttgggaaaaagctaaaattgtgtattggattattaaaaaataacagaactgttggaaaaatagacattat

SEQ ID NO: 789017 - DNA, 558 bp, Homo sapiens
caaaaagacacatacgctcatatgttcatcattgtgtcattsatcatagcgaagacgacatggaatcagcctaggtgtccatcagtggattggatttctttttttaaagaggtacatatacaccatggaataatatgcagccattaaaaggtaggaaatcacattctttggagcagtatggatggagctggagaccataatcctgagttaacacagaacaagaaagccaaatattgcgtattctcacttataagtgggagctaaacattgaacacacatcaacataaacatgagaacaatagacactgcagattccaagaggggtcagtgagggaggggagcatgatttgaaaaactaccactgggtgctgtgcttactacctgagtgcaatatacccatgtaacaaatctgcatatgtacccctgtatttaaaataaaagttgaaattttaaaattaaaaaaataaaagcagttaaaacaatacccaattttcaaatgggcaaagcatctgaacagacatctcaccaaagaagatatatagataacaaatatgcata

SEQ ID NO: 789018 - DNA, 656 bp, Homo sapiens
tagttcagccatgtggggaaagcagtttggaggtttctcaaaaaacttaaaatagagctaccattcaacccagcaatcccattactgggtatataccccaaggaaaataggtcattatgccaaaaagacacatacgctcatatgttcatcattgtgtcattgatcatagcgaagacgacatggaatcagcctaggtgtccatcagtggattggatttctttttttaaagagrtacatatacaccatggaataatatgcagccattaaaaggtaggaaatcacattctttggagcagtatggatggagctggagaccataatcctgagttaacacagaacaagaaagccaaatattgcgtattctcacttataagtgggagctaaacattgaacacacatcaacataaacatgagaacaatagacactgcagattccaagaggggtcagtgagggaggggagcatgatttgaaaaactaccactgggtgctgtgcttactacctgagtgcaatatacccatgtaacaaatctgcatatgtacccctgtatttaaaataaaagttgaaattttaaaattaaaaaaataaaagcagttaaaacaatacccaattttcaaatgggcaaagcatctgaacagacatctcaccaaagaagat

SEQ ID NO: 789019 - DNA, 558 bp, Homo sapiens
caaaaagacacatacgctcatatgttcatcattgtgtcattgatcatagcgaagacgacatggaatcagcctaggtgtccatcagtggattggatttctttttttaaagaggtacatatacaccatggaataatatrcagccattaaaaggtaggaaatcacattctttggagcagtatggatggagctggagaccataatcctgagttaacacagaacaagaaagccaaatattgcgtattctcacttataagtgggagctaaacattgaacacacatcaacataaacatgagaacaatagacactgcagattccaagaggggtcagtgagggaggggagcatgatttgaaaaactaccactgggtgctgtgcttactacctgagtgcaatatacccatgtaacaaatctgcatatgtacccctgtatttaaaataaaagttgaaattttaaaattaaaaaaataaaagcagttaaaacaatacccaattttcaaatgggcaaagcatctgaacagacatctcaccaaagaagatatatagataacaaatatgcata

SEQ ID NO: 789020 - DNA, 670 bp, Homo sapiens
tagttcagccatgtggggaaagcagtttggaggtttctcaaaaaacttaaaatagagctaccattcaacccagcaatcccattactgggtatataccccaaggaaaataggtcattatgccaaaaagacacatacgctcatatgttcatcattgtgtcattgatcatagcgaagacgacatggaatcagcctaggtgtccatcagtggattggatttctttttttaaagaggtacatatacaccatggaataatatgcagccattaaaaggtaggaaatcacattctttggagcagtatggatggagctggagaccataatcctgagttaacacagaacaagaaagccaaatattgcgtattctcacttataagtgggagctaaacattgaacacacatcaacataaacatgagaacaayagacactgcagattccaagaggggtcagtgagggaggggagcatgatttgaaaaactaccactgggtgctgtgcttactacctgagtgcaatatacccatgtaacaaatctgcatatgtacccctgtatttaaaataaaagttgaaattttaaaattaaaaaaataaaagcagttaaaacaatacccaattttcaaatgggcaaagcatctgaacagacatctcaccaaagaagatatatagataacaaa

SEQ ID NO: 789021 - DNA, 595 bp, Homo sapiens
catcctcagatttaatgtacccaagtctcgagtttcatagccttaaaaagtgaatgtttgttttgttttcttggtgtattgtcttggacattggacaatttttcttaaatgagaaaaaatatggcaaagaattttataaaatgtttatcctcctcatsatctaatttgtttcctgccgctgaaagccaccttccccacgggcttgagaatgacacctgtccactgtgtcagcagttggtttgcttccctgcttattgttttctctatgaaatcttaaaacctaactaaggctttgctgcccactgcaggtggagaggagaataaatcaattcccttctgcctgatttcagtggctttatctcaaatgttttgtaagttattctgttgctaattaaacaatctcatttatagatattttcttcctatgaactcaatactaggttaataggtataaatataagttttgatcaattattaaatccataacaaagaaaaataacaaggacttaatgtatatcaataattatgttagcttgaaattagacattcacacaaatgtttgtctgtcaaattcagttcttatatttttggctat

SEQ ID NO: 789022 - DNA, 504 bp, Homo sapiens
aatgaatttatgtacattaatttattttaccatttctcctttgtggatgtttagggtggttttcagtttttagtattgcaaaaagcaatgtagtgcacatactttgtacctttgtctttgaagtagttacatgagcacctctagcattgatttctagatgcgaaattatttggtcaaagtgtggcagattgcctttaaaaatgcctggtcaggctgagcgccgtggcttaygcctgtaatcccagcactttgggaggctgaggtgggcggatcacgaggtcaggagttcgagaccctcctggccaatgtgatgaaaccctgtctctactaaaaatacaaaaaattagctaggtgtggtggcgtgcacctgtagtctcagctacttgggaggctgaggcaggagaatcgcttgaactcgtgaggtggaggttgcagtgagccaagatcgtgccactacactccagcctggtgacagagcgagactctgtcaaaaaaaaaaaaaaa

SEQ ID NO: 789023 - DNA, 615 bp, Homo sapiens
ctttgaagcaaaagttatttagtagtaaattactaaagggccttttttttttttttggtccagcttttcttaatttatggggcttttttttcctttggtcctccctcatttttgatataaagctagagagtcccgttacttatttaagcgttttgaaatatgaaatatttaagtctgtcttatacttcattgtaacctgtcaagaatgaratattcctgcatgtttattttcttttatttgttgcttcatatgtgtctttttttcttcacatatgtctatgctctgttcatttattcatccagcacaggataatggagcacccactccatgccaagccactatgtattgttctgagaactgggtttatgcatagagatacacttggtctgtaatttatttgtagttttcctaaataatcacacttgcaaatattgtatccttttgtccctctacaaacaaagtttgagaagaaatttaccatacaccactgagtgctccacccatgctctgccatcagttggttgacttggcaagtctcttagcatgtaggatagcagtcttcaaatgacttggtttcaagacttgtttacatttaaataagttattgagggctc

SEQ ID NO: 789024 - DNA, 601 bp, Homo sapiens
gaggtggggacaccagattgaggggtgacttgaagagaggatgtgggaggaatcagacaatgagagattgaagagtcagagaaagatggggaatggatgtgtgttaatgtgtatggcagggctgtcttcacaagcctgagacctgggcagtcaacctatgagactagactgttacctttggcagaaagttaatgtttgcagtgctgasaggggttgcccttaggtaattcagaaggaattaccttctaagcacagtgaaagattttctgtgtttaggagtcccctacacttggtttaatcctctaatttgctgtctttaaaatgtttaataattctttttttttttttttttttgaagacaaggtctcattctatcaaccaggctggagtgcagtggcgcactcactgctcactgtagccttgaccacctaggctcaagcaatcctcccaccttagcctccagagtagctgggactacaagcccaccccaccacacccagctaagtttttaaaattttttcgtagagatgtggtcttattctgttgcctaggctggtctcaaatcctgggcccaagggatcctcccacctcagcctcccaa

SEQ ID NO: 789025 - DNA, 601 bp, Homo sapiens
gaggtggggacaccagattgaggggtgacttgaagagaggatgtgggaggaatcagacaatgagagattgaagagtcagagaaagatggggaatggatgtgtgttaatgtgtatggcagggctgtcttcacaagcctgagacctgggcagtcaacctatgagactagactgttacctttggcagaaagttaatgtttgcagtgctgacrggggttgcccttaggtaattcagaaggaattaccttctaagcacagtgaaagattttctgtgtttaggagtcccctacacttggtttaatcctctaatttgctgtctttaaaatgtttaataattctttttttttttttttttttgaagacaaggtctcattctatcaaccaggctggagtgcagtggcgcactcactgctcactgtagccttgaccacctaggctcaagcaatcctcccaccttagcctccagagtagctgggactacaagcccaccccaccacacccagctaagtttttaaaattttttcgtagagatgtggtcttattctgttgcctaggctggtctcaaatcctgggcccaagggatcctcccacctcagcctcccaa

SEQ ID NO: 789026 - DNA, 531 bp, Homo sapiens
ggccagagcatgagcctgaattgggaagaaaattagaaattccactcaaaaagtcagaagtttggctttcttgggcaagtcaaactggtaatctactgtgatcaagaaccaaagagaggccaggaacagtgcctcacacctgtaatctcagcactttgggaatctgagacaggaggattgcttgaagctaggggttcaaaccagtctgggcaacatagcaagatcctgtctctacaaaaagcaaggaaaaacaaattagccaggtgtggtggcatgagcctggagtcctagctactggggaggctgaggygagacgattgcttgagcccaggagttcaaggctgcagtgagctatgattgtgccactgaactccaacctgggcaacagagagggaccttgtctccaaaaaaaacgtaacaaaagaactaaagagagtattaatgataaaaatgaaagatggaaataataaaaatattcaataaagagattagataaattgtgtactcataatattgaactgtaaacaatgt

SEQ ID NO: 789027 - DNA, 639 bp, Homo sapiens
agatggagtctttgtggtagacaacctaagtttatttataggaccatggccaagttaggcagtctttctgggtcttgatctcagctgaaaaatttggaggcaaatcactaccttatgtgattcttataaatgagataatctgcataacacactcagtttaatatctgccatacagaatcctattcttcagtttaacagaccttgaacgcctaccatattccggctaactaggacatgtagccaatcgagccagyttaacccttcacacagactgctctgtgctcatgaaaaagtcaggatcacttttatggctaaattgcagtcacgcggtttctgaatccaatactgagagactgggaccccttaggggactattgcctacagtgggtgactgtatgacctatcagagattagagattcagatactgtcttccttaacccagtgagaaattcacaggagagagtgctgcaccctgtaagtggggcaacagcagcatttacggaggcaaaatgtgcagttaacaaaatatagacaattaaacccatgtctcattgacctagctttgtctgcattctgggactgttctctttgtagcagtgactttagttctggtcagaagtgctttcatcaacattaaa

SEQ ID NO: 789028 - DNA, 639 bp, Homo sapiens
agatggagtctttgtggtagacaacctaagtttatttataggaccatggccaagttaggcagtctttctgggtcttgatctcagctgaaaaatttggaggcaaatcactaccttatgtgattcttataaatgagataatctgcataacacactcagtttaatatctgccatacagaatcctattcttcagtttaacagaccttgaacgcctaccatattccggctaactaggacatgtagccaatcgagccagcttaaccyttcacacagactgctctgtgctcatgaaaaagtcaggatcacttttatggctaaattgcagtcacgcggtttctgaatccaatactgagagactgggaccccttaggggactattgcctacagtgggtgactgtatgacctatcagagattagagattcagatactgtcttccttaacccagtgagaaattcacaggagagagtgctgcaccctgtaagtggggcaacagcagcatttacggaggcaaaatgtgcagttaacaaaatatagacaattaaacccatgtctcattgacctagctttgtctgcattctgggactgttctctttgtagcagtgactttagttctggtcagaagtgctttcatcaacattaaa

SEQ ID NO: 789029 - DNA, 654 bp, Homo sapiens
acacttgctttttttttctttttgagatggagcctcgctctgtctcccaggctgaagtgcagtggcacgatctcagctcactgcaacctctgcctcccaggttcaagcgattctcctgctcagcctccctggtagctgggattccaggcaacagccagcatgcctggctaattttctgaatttttagtagagacaagttttcatcatgttggccaggctagtcccaaactcctgacctcaagtgacccgcctgcctcagcctcccaaagtgctgggattacaggcgagagccactgcacctggctgacacttgcttattcttttatgcaactctttatactttttctcacctcatggtttctccatatttattgtttgtttcctaatagtataggttccayctgatccctataatcatcaaatctgttggatcctctagtatttcccaattcaaaaatctggaagaaataaatctgattggcccagcaacactctcttaggaaagaaatgccatagatcttggactatcctggatattgggtacccttgggtcagagactacctgaggtcaaagcagctatgctctgggatagcaggaatagtacttgtttcatgacataaataaagcctaattgcttgtttcacattaggggc

SEQ ID NO: 789030 - DNA, 540 bp, Homo sapiens
tgtggatccacttatacctacaatttatattaaaaattttttttcaataaaagttacactgagtgtgcccgcctctcccaccttgcctttaacgtccttcatctcttcttcctcaaacacccctgagacagcaaaaccaaccctcttttttctcctcctccctcagcctattcaacatgaagatgattaggatgcagatctttataataatccatttccacttaacagtcaatatattttctcttccttatgattttcttaataacattttcttttctctagctttatcgyaaaaatgcagtatgtaatacatataacactcaaaagatgtgtttgttattagactgttcataagcgatgcttctggtcaaaagtggctattagtaaagttttgggggagtcaaaagatatatgttgtttttcaactatgtggtgaccagtgcccctatttcctgcattgctcaagggtcaactgtattatattctccctctctctctctgactctccctttctctttctttttctctctcacacacaca

SEQ ID NO: 789031 - DNA, 620 bp, Homo sapiens
agtacagctttgtaaaattcttttttcgcttatatatctgtatgtaggtattaaattgtgatgctaaatgcatttgttactgtaaatttaagctttgatatatgaaagagctttgtaaaatgtaaasagaggtacccaagggagcaaactagttgtccagaaatcataaatgtattttgttttccttcccccatattttcaactaaaaaaaaaaaaaaagaacagaatgcactcaacaaacatattctggtttcttcagctgcccccatggcttattgtcagcatgccacctgcttgacccccgaaacgtctgaatttgtgatatctgggtaaacggtaatatgtacatatctctaattttgcactttttgcactgaattaaaatggtttttgcaatggtctccaagcatcttaagaacaggaacatgatcttttaatgtatcctccaggctggcagtgtccttaacatagtagctgttcaataaatatttctcaaacaaaagcagagtcaagatttctggatccctgttgggctcagactttgccactggccatctggatgatattgagggagccgtttctctgctgtgtgccaacgtttccctcactggtaaagtgag

SEQ ID NO: 789032 - DNA, 620 bp, Homo sapiens
agtacagctttgtaaaattcttttttcgcttatatatctgtatgtaggtattaaattgtgatgctaaatgcatttgttactgtaaatttaagctttgatatatgaaagagctttgtaaaatgtaaacagaggtacccaagggagcaaactagttgtccagaaatcataaatgtattttgttttccttcccccatattttcaactaaaaaaaaaaaaaaagaacagaatgcactcaacaaacatattctggtttcttcagctgcccccatggcttattgtcarcatgccacctgcttgacccccgaaacgtctgaatttgtgatatctgggtaaacggtaatatgtacatatctctaattttgcactttttgcactgaattaaaatggtttttgcaatggtctccaagcatcttaagaacaggaacatgatcttttaatgtatcctccaggctggcagtgtccttaacatagtagctgttcaataaatatttctcaaacaaaagcagagtcaagatttctggatccctgttgggctcagactttgccactggccatctggatgatattgagggagccgtttctctgctgtgtgccaacgtttccctcactggtaaagtgag

SEQ ID NO: 789033 - DNA, 620 bp, Homo sapiens
agtacagctttgtaaaattcttttttcgcttatatatctgtatgtaggtattaaattgtgatgctaaatgcatttgttactgtaaatttaagctttgatatatgaaagagctttgtaaaatgtaaacagaggtacccaagggagcaaactagttgtccagaaatcataaatgtattttgttttccttcccccatattttcaactaaaaaaaaaaaaaaagaacagaatgcactcaacaaacatattctggtttcttcagctgcccccatggcttattgtcagcatgcyacctgcttgacccccgaaacgtctgaatttgtgatatctgggtaaacggtaatatgtacatatctctaattttgcactttttgcactgaattaaaatggtttttgcaatggtctccaagcatcttaagaacaggaacatgatcttttaatgtatcctccaggctggcagtgtccttaacatagtagctgttcaataaatatttctcaaacaaaagcagagtcaagatttctggatccctgttgggctcagactttgccactggccatctggatgatattgagggagccgtttctctgctgtgtgccaacgtttccctcactggtaaagtgag

SEQ ID NO: 789034 - DNA, 530 bp, Homo sapiens
aggtcattcattcataccctctcagagcatctaagtccgtgctttcctcaagcccagaaaaatgtcactcttcacccaaggacagagctcatattccaaaaggtttcaatagcttattcttctgcctagctgcaaactggccagctcaaagcatataggcagcaatatttactcatcacactgtcttagggagggcttcaatgcgtcctyagaaattttttaaaataaggacttttattaattttttaaaaaatactttgtctatttattcacccaacaaatactcacctcctgaactccctggaataatacttgatatttagatgggtaagttgaaaaagaaccatatgtaattttctgctttctattgatcacaatataacagttagagaaagagagctagataatactatagagtgtgaggggtgttataatgatggtcagtacatgtcaagacatgggcaaggcatttggaaatagaaatatcaaaatgattgagtaagatataaaaatgctgccttaaaacacaa

SEQ ID NO: 789035 - DNA, 530 bp, Homo sapiens
aggtcattcattcataccctctcagagcatctaagtccgtgctttcctcaagcccagaaaaatgtcactcttcacccaaggacagagctcatattccaaaaggtttcaatagcttattcttctgcctagctgcaaactggccagctcaaagcatataggcagcaatatttactcatcacactgtcttagggagggcttcaatgcgtccttagaaattttttaaaataaggacttttattaattttttaaaaaatactttgtctatttattcacccaacaaatactcacctcctgaactccctggaataatacttgatatttagatgggtaagttgaaaaagmaccatatgtaattttctgctttctattgatcacaatataacagttagagaaagagagctagataatactatagagtgtgaggggtgttataatgatggtcagtacatgtcaagacatgggcaaggcatttggaaatagaaatatcaaaatgattgagtaagatataaaaatgctgccttaaaacacaa

SEQ ID NO: 789036 - DNA, 512 bp, Homo sapiens
tgagtgttactatatgttaagatgttgagttctgtgagtccttcaagtgaattactgaaagcatggctagtcttaggtaaccccaccaaatattgcctcattcataaaccatgaaaaagttatattaactaaataatacatatttattttcttctcttttttttttttttttttttttgagaaagggtcttaccctgctacccaggctggagtgcagtgacaggatcatggctcactgcagccttgactttctggggaacaagtgatcctcccagctcagcttcctgtatatctggaactacaggtgcatgccattgtgcctgcctaattttttgtatcttttgtwgagacagggtctcacttgttgcccaggctggtctcaaattcctgggctcaagtaatccttcaacctcagcctctcaaagtgctgggaatacaggcgtgagtcaccatgcccattttcttttgtttttccaatgattcattgaataaatactcaccaagaacatact

SEQ ID NO: 789037 - DNA, 510 bp, Homo sapiens
aactgtgatctgaggcaggaagagcagtacaaagagccatgccagtgtcacagaaagcatctttgagaaaatggcatctgagctgatgtctgaaggacaagtcacaagagtaactagatgaagagagggtgggaaacagaagaataagacttttggagatacttcctatctctcttccaagctttaaaacctgggccaataaatgaaaagaaaaaaagtgacaatcataccactggatagccactcttgtcacgaggacaattttaagagcataaatgagacctatggagacgtatagagaaaggaatcttyagggatgtctgggccctagatggaacagatcttggtccaacattttgaacagcctatgagaatggtaaacagcggtgctctccattgctgtgagatttttagtcagatacttatttcttgccttgctgacagaggactgtcatgcctgggtcatctcaaccagccccagttttccatggtaaaaatcagggcatgctg

SEQ ID NO: 789038 - DNA, 510 bp, Homo sapiens
aactgtgatctgaggcaggaagagcagtacaaagagccatgccagtgtcacagaaagcatctttgagaaaatggcatctgagctgatgtctgaaggacaagtcacaagagtaactagatgaagagagggtgggaaacagaagaataagacttttggagatacttcctatctctcttccaagctttaaaacctgggccaataaatgaaaagaaaaaaagtgacaatcataccactggatagccactcttgtcacgaggacaattttaagagcataaatgagacctatggagacgtatagagaaaggaatcttcagggatgtytgggccctagatggaacagatcttggtccaacattttgaacagcctatgagaatggtaaacagcggtgctctccattgctgtgagatttttagtcagatacttatttcttgccttgctgacagaggactgtcatgcctgggtcatctcaaccagccccagttttccatggtaaaaatcagggcatgctg

SEQ ID NO: 789039 - DNA, 451 bp, Homo sapiens
gagaccctgccacagtgtcccagacagaggaagagccctataaaaggtcattctctcttctctgattctgattgatgaatatatgtcaaatgattaaatgaataaatcctctttcaaaaacccttttgatatatcttaagttgagctaaaatctgccttcctataacttttacccattgtacttagccctgccatctaaagccaaacacagtaaatcaactcacccttctaaatgaaaaccyttcaaatattcctgtttaataaattgaataaatacactccactttaataaatttgccctaggcccatgggcctttgcaaggaaggccaatataaatgaagatgctgtctgcacacgaaatgctttgtggatcacatgactgccactctgccccagagacagagggaagagtgtgggggagggttattgaaaatgagccggtagtagtgg

SEQ ID NO: 789040 - DNA, 451 bp, Homo sapiens
gagaccctgccacagtgtcccagacagaggaagagccctataaaaggtcattctctcttctctgattctgattgatgaatatatgtcaaatgattaaatgaataaatcctctttcaaaaacccttttgatatatcttaagttgagctaaaatctgccttcctataacttttacccattgtacttagccctgccatctaaagccaaacacagtaaatcaactcacccttctaaatgaaaacccttcaaatattcctgtttaataaatkgaataaatacactccactttaataaatttgccctaggcccatgggcctttgcaaggaaggccaatataaatgaagatgctgtctgcacacgaaatgctttgtggatcacatgactgccactctgccccagagacagagggaagagtgtgggggagggttattgaaaatgagccggtagtagtgg

SEQ ID NO: 789041 - DNA, 610 bp, Homo sapiens
tctgccccagagacagagggaagagtgtgggggagggttattgaaaatgagccggtagtagtggtcagaaatataagctttagtcttcctaaagcaaatcatttcagaacttggtttttttaattaaaaattcaatgtggccaggcatggtggctcaagcctgtaatcccagcactttgggaggccgaggygggcagatcacgaggtcaggagatcgagaccatcctggctaacatggtgaaaccccatctcactaaaaatacaaaaaattagctgagcgtggtggcaggcacctgtagtcccatgtactcaggaggctgaggcaggagaatggtgtgaacccgggaggcagagcttgcagtaagccgagattgtgccactgcactccagcctgggcgacagagcaagactccatcaaaaaaaaaaaaaaaatcaatgcttcctctcctccctcctgtatttcttccctcctttgttcacttattaaaaatacattgaaagcctactctgtgctgtttactctgctaaggtctttccatgttgatttcattattttattcagtccttactctgagggagacacattactgttcccattgtaccaatgaga

SEQ ID NO: 789042 - DNA, 589 bp, Homo sapiens
atgtaatcagagagtaatgagaagactggatttgaatgtggccattaggatagtcttctctggggggttaacagttgagctaagacctaagtaagaaggaatcaagaatataaagagacagcaggaaagcatttcatgcagaagaatcagcaactkcaagctctgaggtgagaatgagcacatttattatagaaactgaaaggccagcgtgactgaagcgaaatgaaggatggcatcagtggtacaagataaacagggagaggcagtcagggaccaccaattctcaagagctgcagaggccaaacttaagggtgaagtgccatggaaagaatcattacagagatttgtttgttttgttttataagcaaaggagtgataataaaatctgatttctggtttctcaaaatcattccatctcctctatgaaaactcctaacagtgctataatttcaaaggcctgtttgtacaacgtaaattgaatttcaccaatatttattgagtggatatgatatgccatatgttgtgtgaagcagaaatagagaggatattctctgactgcctacatctcataattttcttgggaagtcag

SEQ ID NO: 789043 - DNA, 603 bp, Homo sapiens
ttaatttactttctttataactgctttttagttaaatggtcaactggaaaataattaagttctattagtctttttacttcagatcgcttttttttctaagtggaagtggagcttaagctgaataaaatttctctatatctagcaaaatttcaaagatttcagttccaaaagcagtcacttttttttttttttttttttgagataaagtttcactctgtcacccaggctggagtgcagtggcttgaccacagctcaatgcagcctcaactttctgggctcaggtgattcttccacctcagcctcacctcccacctcagccttacctcctgaaagctgggaccacaggcacaagcatcacacctggatagttctcatattttcagtaragaagggatttcaccatgttgcccaggctggtctcaaactcctgggctcaagcaatgcaccttccttggcctcacataacttttattactgtagattatcataattgttctattgtattactagctattattgctaatctcttattgtgcctaatttataaattgaccttaattatagatatgtatgtataggtaaaaacaacatagtgtacgtaag

SEQ ID NO: 789044 - DNA, 545 bp, Homo sapiens
aaaggcatggtctgtgccctgaaggagcttacagttaagcagagaagttgcacgatttggaagtagtaaggtaaattgagtcagattttgaaaggcaatgtagagctgttagaagtttattcgcacaggtagccaggcacagtggctcatgcctgtaatcccagcactttgggaagccaaggtggcagatcactggaggtcaggagttcaagaccagcctggccaacacagtgaaaccccatctctactacaaatacaaaaattagccagatatggtggcatatgcttgtaatcccagctactcgggaggctgaggcaggagaatcgcttgaatccgggaggcagaggttgcagtgagccgagatcgtgccactgcagtctaggctgggcaaacagagccagactcygtctcaaaaaagaagtttattcagacaggtaatgtgagagagaactagtgatggtgaaggaagagggctagctggagtgggtaaagactggagaaagggatcctaatcagaaaactatgatgagggtttgattacaca

SEQ ID NO: 789045 - DNA, 362 bp, Homo sapiens
atgtcttgcataaggaaagaactttgggtttttgtctttctgttccaataaacgcaggggctcctccaaagtatcaggggcattttcccctctccacttgagtattttttacctctgcactcaaatgtccaccatcacaacgtggattgagcatctgccattgttggtggtcacccagaacagaaacaccttcgcagattatggaatttcctgtyttaagagacagagcctgaacatgccagagatttttcttccccagtctccttagtggaataaaccaaagtagaagcatatagcaaggttcctccagtcagatgcaccccaagcccaccctttggaaagaaagtccttgacaacatttc

SEQ ID NO: 789046 - DNA, 685 bp, Homo sapiens
ttttctggtattaaaccaaccttacattcctgggataactccagcttggtcatgatacacttacattgctgcatttcttatgctaatattaggtttaggacttttatacttatgttcttgagtgaacttggcctgtaattttccagtctcatattgttcttgcytgactttggtgtcacggttttcttaacctcataaactacaagtgtgtttgagatattagatttatttctatctggtgtgtttagaaagcatattataaaaccatctgggcccagtgtctttgtgggatggtttctattcctaatccagctttttaaatggttatatgattgcacaacttttaaaatgtctttttgagtcagtttgcataagtcgtatttttataggaatgagtcagtgtcatgtgctttcaaatgtactgttataaagttgttctggatatgtttctatttatttatttaatctctgtagcttctatgacatgatctgtttcctattattaatgctgtctctttgtgccttctcttgctgtttatgtttttcttttctcatttcagtcatgtgtgggccttctctttatttagtcttttccaagaaccagcttttggcattgttgatcttgtctattgtatgtttgctttaccttctctatgccttagtttccccatctataaaaataggg

SEQ ID NO: 789047 - DNA, 617 bp, Homo sapiens
tttcttataatgtgatatgctgatattctgaatctttgtttgtatagcagggactcacagcatatttcaagtctatttatactttatttatatttcaaagacatcagcccaagtacagtgagttcagcacagtatacaaaataaaatgcttgtggttaagcatttatcaatgcctttggagtcaaagaagtcaatgaaaagtgctgtaagcagagatgtattaaaacctgaagaaaagcatartaataaaatgtaaatttttatttttctttccctatggtttatagtacttatatttttcatggatttaggactatgagttttaatacaccattgggtatagtgagcacagactttgaaatcatgaagatctgagtttaaaaccatgtgagctatttgccgactagataaccttgaaaatctctggcaatgacagcctttttatttgtatcatggagaaggtatgtccacttcattagactattgcaaatagttaatggaaaaaatagaaaacacagtgattgacacaagtgattgttcaaaaattagcatttttctcaatgactaacccttattcctaacatctaagaattattggaagcctgaaggtttatttt

SEQ ID NO: 789048 - DNA, 492 bp, Homo sapiens
tagagcttatttatataaacctgaggagttaaaatgtgattgtaataagggattgacaatctttctaaaaataagttcagagtgtttatatatcctttcagagaaaagaagcattaaataaacttgttctaaagatgagaagtaacctgaaattttaagcaagcccaactcttcgcatcccctttttatcctctgcttctttacgcagataaaaaataaacaaacattttgcatataacttttggcacagatattgtgggctgatttccttttgattattcttttttaaaataatcayttttaaaacaacttcaaaatagctagagatattgcctttaaaactaatagcaaaaatattatattttaaaataaagagaaaatcaaaaccaatactttttaacttaatctccacagttaaaacataaccaaaaatcgataagataaatgagataattaaagttgaagttaattaaaattgaatgattttcacga

SEQ ID NO: 789049 - DNA, 599 bp, Homo sapiens
cagtctctcctccctgtgagcctttgactccctgctcttcaccaaggagggcccctggctcaggcctgcagagcaaccaccacaccccctggtggaactttctccctggtagcagctctgcatttctctggggtggagctcccaaaggcaactgaaagccccttgtcattgccactgcactgagactgcccttgctgcccccggactgggtaaggaacaaagaccctgagtgctttactcagaacaccatcacactgaagtcaccctaagtagaagaggccagccttttttccctgtgagcccccgactaccctacttatcaccaagcaggccatctcagcttgagcccacaatgcagtcaccccagcccaggctgatcattctgattggtagtggctctgtgtttctatggggtggagccccaataaamaagtgaaaggccctctgccattgccactgccaaggtcatggcccctgcagcccccaaagtggagaggaaacaaaaagcctgagttccccccaggggtgttgtgtgtagaccaggagtgccaagctgagatctgtagtaagaactccagtgggagaggagcccacaccat

SEQ ID NO: 789050 - DNA, 572 bp, Homo sapiens
tactccttgaggtaatatattaaatagacactcagtctaccacgttcacggtcttcagtttgcttcgaaattatgtttccacatgcttttgtacaagctgttgttaactcccttaaatacctttttctaatcccaycttgtaggaaagttcaattccttcttcaaagcacaagcaacaacttcaaaagcgaagcctcccttgacttcttctcccacttcaaagtggcattaatgactgaccacttatcactctgaactaccacaaaactgcatatctttatacctatctattgattgatcagtcattgcatatagtcattccatggtgagagcaatataaagtctgtaagtcttacagggcccttgaattactcatttaaaagtaatttattcgtttcactttgtacttattatatatatgtttactaggtgaccactgacagaaaattattttcctaaatttgcacaagataggtaaaaggggagcatatgtgccccctttgatgtacctcgtaagatctctgctaggctgggaaattattgtgcgcaccctttgtatcttcttgaatgcc

SEQ ID NO: 789051 - DNA, 572 bp, Homo sapiens
tactccttgaggtaatatattaaatagacactcagtctaccacgttcacggtcttcagtttgcttcgaaattatgtttccacatgcttttgtacaagctgttgttaactcccttaaatacctttttctaatcccaccttgtaggaaagttcaattccttcttcaaagcacaagcaacaacttcaaaagcgaagcctcccttgacttcttctcccacttcaaagtggcattaatgactgaccacttatcactctgaactaccacaaaactgcatatctttatacctatctattgattgatcagtcattgcatatagtcattccatggtgaragcaatataaagtctgtaagtcttacagggcccttgaattactcatttaaaagtaatttattcgtttcactttgtacttattatatatatgtttactaggtgaccactgacagaaaattattttcctaaatttgcacaagataggtaaaaggggagcatatgtgccccctttgatgtacctcgtaagatctctgctaggctgggaaattattgtgcgcaccctttgtatcttcttgaatgcc

SEQ ID NO: 789052 - DNA, 572 bp, Homo sapiens
tactccttgaggtaatatattaaatagacactcagtctaccacgttcacggtcttcagtttgcttcgaaattatgtttccacatgcttttgtacaagctgttgttaactcccttaaatacctttttctaatcccaccttgtaggaaagttcaattccttcttcaaagcacaagcaacaacttcaaaagcgaagcctcccttgacttcttctcccacttcaaagtggcattaatgactgaccacttatcactctgaactaccacaaaactgcatatctttatacctatctattgattgatcagtcattgcatatagtcattccatggtgagagcaatataaagkctgtaagtcttacagggcccttgaattactcatttaaaagtaatttattcgtttcactttgtacttattatatatatgtttactaggtgaccactgacagaaaattattttcctaaatttgcacaagataggtaaaaggggagcatatgtgccccctttgatgtacctcgtaagatctctgctaggctgggaaattattgtgcgcaccctttgtatcttcttgaatgcc

SEQ ID NO: 789053 - DNA, 620 bp, Homo sapiens
aatttatttcaataatctgcctccgattccctaaacataccattctctttccagcctctatacctttgttcatgcagcttcctctgactgggtttgttcttcacttggctaacccctcttttacttaagcacaccttgaacattccctccttccccatttccccgcagtgcccctaatggacatacttctgaataacacaggtggtattccttccttgttggaacctcctggaggaagagacagatgattaacaaatccttccatcaacccctttgaccatgacatcaacagtgctccaaattatggggtaccgtattagcctatgtctatcttgatcagaatccttacctcggtgtattgaaattatytatttcgtgcctgcctctttaaagtcagggtttgccttatctattgtctaacaccatgcagtaggtaacatgcagtaggaaacatggcattaaattatttgggttcaaatcccagttatggtgtgtaaatgcctaccaggcgtgaggcacctgctaagcaggttgcacgcatcatttgaattcacaccaccctttgcaatagaacagataggcaacagaggctcatttgggctaaaggatttgatggaggg

SEQ ID NO: 789054 - DNA, 528 bp, Homo sapiens
tctttcacaattccagagctcacagactctttcctttgttgtgttcagcctactagtaagccaatcaaggcaacaggtctgttgcattatttttttatctctactgtttcttttttgttctttccttggacttctgtctccctgcttacattgcctatctgttcttgaatgctgtctcctttgttcatcagagcccttakcatactacttagagatatttttaaaaatccctgtctgataattccagcatcatagctatgtcttgttctgatgatctgtcacttcaaattgtgatttttgccttttagtatgccttgtgctttttctttactcctagatatgagataccaggtaaaaggaactactgtaacagtgcatcctgtaatgataagaagctatagaggggaggggaagctgtcttagtccatccaccagcataacttagagcaagtaatttctaaacaacagaaatttgttgctcagtttggaagctagaaagtccaaagtcaaggttccaagagattcagt

SEQ ID NO: 789055 - DNA, 589 bp, Homo sapiens
aatggaattcataatgagccacaaagtcatctgagtccagatcaaaatgtcaacgtcttgagaaaaggcccaactgggagcaaactatgaaatctacatgagtctcttaaggacgacttagggaaggcttggcctttggtcgttattatgaractgatatggtttggctgtgtcctcacccaaatctcgaattgttgttcccataattcccacgtattgtgggagggacctagtgggaggtaattgaatcatgaggattgtgctgttcttatgatagtgaataagtctcatgagatctgatggttgtatgcaaggaagttcccctgcacatgctctcttttgtctgctgctgtgtaagacctgacctttgccttctgccatgattgtgaggtctccccagccaagtggcactgtgaatccattaaacttatttttctttataaattacccagtcttgggtatgtccatattagcagcatgagaacagactaatacggagacttattatgagtttgataggaaggtgcagaaacagagttctggagtcagattatgggtgacagctacataatcttttttattccagaaa

SEQ ID NO: 789056 - DNA, 487 bp, Homo sapiens
acagggaagggcccccgtctggtggacacgtgacccacgtgaccttacctatcgttggagatggctcacactccttaccttgaccccttgtcttgtatccaataagtaacaacgcagactggcattcagggccactactggtctctgtgtctaggtggtagtgttcccctgggcccagctgtcttttcttctatctctttgtcttgtgtctttatttctatgatctctcatctccacacacagggagaaaaatccacagaccctgtggggctggtccctacattattagtcataattttggttgctatgttaactttttcctagagttacgtctatgtggatatgttacatrgatttttatacccatataactttctatattgctataaaattgttctcacccataaaatactgataatactgatatgtgacagatttcttgctgcctaagttttcactataatttaaggttactacaagtttaaaa

SEQ ID NO: 789057 - DNA, 602 bp, Homo sapiens
ggagtccttaggtttttccaaatataagatcaaatcacctgcaaacaagaaaacaataataattttacttctttcaatttggatgtcctttattgtttttctcttgtctggattgctctagctaggacttccagtactatgttgagtaacagtgttggaagtggacattcttgccttgttccagatcttagaagaaaggttcagtttttctctgttccggatgatactggctgttggtctgttgcctatggtttttattgtgttgtggtatgttccttctaaatctagttttttttttagggtttctttttatcacagggatgttggattttattaaatccttttcagcatcaattgaaattaccatatggtttttgtccttcattctgttgctatgatgtgtcacattgawtgatttacatatgttgaaccatgttggcattcttggggtaaatcccacttagacatgatgaatggtctttttcatagaatgagtatggtaatactacagtcttctttgttttttggaatagtttgagtaggattgatagtaattcttccttcaatgtttggtaaaattaatcagtgaagccattggatcc

SEQ ID NO: 789058 - DNA, 651 bp, Homo sapiens
cttgataacagtggtagctgggacaacttggcaatgtaaataaatacatggcatctagattggaaaggaagaagtacagttatctttatgtacggatgacatgatcttgcatttagaaaatcataagaaatttactaaaaagtattaggactcatgaacaaatttaggaatgtaatactatataagattggtatagaaaaataactgtatttctttaccaagaaatcttgaatccaaaaatggaattacaaaaataaatcttgttacaatagaattaaaactggggtaaatttaacataagaagcttaaacttgaacactaaaaactacaatacatggttagtgttggaaacacccaggtaccatccytgagccttctctccttggctctgaggactttaccttcacggggtgaggaaaggtgttgcattcttgacttttacattatattaagtgggttcggggtgaggtatctgcaagccaaatgagtattacaatctctacttttatgtataagagactgcggcccacaaagagagggaatgacaatccatatcatggaaggtgaattgtcagacactgatttcccctatgtaaaccctgccaatcatcttgtatttaaaggatccccagataccttaccaataggtgt

SEQ ID NO: 789059 - DNA, 651 bp, Homo sapiens
cttgataacagtggtagctgggacaacttggcaatgtaaataaatacatggcatctagattggaaaggaagaagtacagttatctttatgtacggatgacatgatcttgcatttagaaaatcataagaaatttactaaaaagtattaggactcatgaacaaatttaggaatgtaatactatataagattggtatagaaaaataactgtatttctttaccaagaaatcttgaatccaaaaatggaattacaaaaataaatcttgttacaatagaattaaaactggggtaaatttaacataagaagcttaaacttgaacactaaaaactacaatacatggttagtgttggaaacacccaggtaccatccctgagccttctctccttggctctgaggactttaccttcacggggtgaggaaaggtgttgcattcttgacttttacattatattargtgggttcggggtgaggtatctgcaagccaaatgagtattacaatctctacttttatgtataagagactgcggcccacaaagagagggaatgacaatccatatcatggaaggtgaattgtcagacactgatttcccctatgtaaaccctgccaatcatcttgtatttaaaggatccccagataccttaccaataggtgt

SEQ ID NO: 789060 - DNA, 542 bp, Homo sapiens
cacaaaataaaacccttcaaaaatggtgaattatcaagcaggggtgtgtgagtggagagggacagagctgttgatctcagaaggaaccagaaatacacttttcaaagatgacgggcacagmctgagttgcagaaccaatccttcagatcactagtgtggttttttgactggagcttctttgcctattatggttctgggaagcaggagatgccatgtttaagtaggaatttgccaggatctgtttttgtttaacatggggaataagatattttctgcttggaaaacctccagacacatttaaccattctcagggaggagtgaaaagttaacatataggcaaaatcctgtctacaagctacttccatgcttaggagacagaaaaatggccatctcctgtacctgccagttgctgacccaagaaaaactggctatcttcaaagaagaatgatgaaaaaatagcaactattaaaacagccactattgttatatgaataaatagaaaaaaagagagaaaacaaatgacagataatgagcacttatta

SEQ ID NO: 789061 - DNA, 609 bp, Homo sapiens
ggaaacttcatttttatatatagctgtgtgacatctgaaactccaaaacacaaaataaaacccttcaaaaatggtgaattatcaagcaggggtgtgtgagtggagagggacagagctgttgatctcagaaggaaccagaaatacacttttcaaagatgacgggcacagcctgagtkgcagaaccaatccttcagatcactagtgtggttttttgactggagcttctttgcctattatggttctgggaagcaggagatgccatgtttaagtaggaatttgccaggatctgtttttgtttaacatggggaataagatattttctgcttggaaaacctccagacacatttaaccattctcagggaggagtgaaaagttaacatataggcaaaatcctgtctacaagctacttccatgcttaggagacagaaaaatggccatctcctgtacctgccagttgctgacccaagaaaaactggctatcttcaaagaagaatgatgaaaaaatagcaactattaaaacagccactattgttatatgaataaatagaaaaaaagagagaaaacaaatgacagataatgagcacttattaaaacctatgagtaggaagt

SEQ ID NO: 789062 - DNA, 642 bp, Homo sapiens
agggtgcagttcttcatttgattcttagattggtcactgttagtgtatagcagggctactgatttatgtacattaattttttatcttgaaactttgctaaattcatttagcagttctaggagctttttggaaagaacaaatctggaggccttacattaccaaacttcaagctgtactataaggccatagtcatcaaaacatcatggtactggcataaaataggcacatagaccaatggaacacactagagaattcacaaatgaaggcaaatacttaaagtcaattgatctttgacaaagcaaacaaaaacatgaagtgggaaaaggacaacctattcaacaaatcgtgctgggataattggcaagccacatgtagaagaataaaactggatcctcatctcttaccttatatgaaaatcaactcaatatgaatcaaagacttaaatctaagacctgaaacaataacacttctagaaggtaasattggaaaaatctcttctagacattggcttaggcaaagacttcatgaccaagaacccaaaagcaaacacaacaaaaacaaagataatagatgggacttaattaaactaaaacacttctgcgcaggaaaagaaatagtcaggagagaaaacagacaatccgc

SEQ ID NO: 789063 - DNA, 619 bp, Homo sapiens
cataatgtaggtgcttaataaatagagttgaaaatgaataaaaagaaagaaggcagcatgtgttcactgagtcgatccattttgattgccttaagtttccttttcagactgagggtgggggtggggctgatgggtactatgtatttaatatgtgtaggggtgatggggatggctttgagatgctatgtggaattgtagaaagagtcctgatcttgccacttacaacatgtatgaatattggcacatattcctttatctctctgagattcggtttgtcatctgtttagtgaattttctcagaggatcagtgttacaattaaatgagaccgtgatagcatacaatatctgttagttcccctctgcctgtccttaaggctctaaaaagcaatgtagratccctaagaaagtggccaatgcttctagcagtcaccttagcaactgttaaaattcttcagggagataatctcaagctgctgtataagggagtctagcctacagccaattctgaagtcctgagtacattctcaaaacactaagcatgagtctaccttgcaaggacattagagatttattcttctcttcttaaccttacatcaacttatattaaactggggctgat

SEQ ID NO: 789064 - DNA, 574 bp, Homo sapiens
ggtgtgattatagtgcactgcaaccttgaactcctgggctcaagagagcctcctgcctcagtgtcccaagtagcagagactataggcgtgtaccaccatgcctggctttctctgtatttcttaaatgaccaaaaaaccttccttwtttgtttctacagatttgtttacatttttgaatattctgtgtatgttgggccccagtttcttcatgtgtaaatggcagataacaatagtacttctctcataaggttgtttggaggattaagtgagctacagtaggtaatatgtgaaaacaggtctgtattataacaagcattaagaccttttgtttactgttattattgttttcagtgaatgtagataaatatgtagagagatgttctcaggctgttaatactggttctagtgtggcaggggagaaacactggaaagagagcgataaactgtgatttttgccaaatggaaatattatttatggtaaaaattagagtggaaatgtggaaattaacattctaagttatatctatgatataatgaatatgaaaaatctatgtatatgtgtgtaaaaattaaa

SEQ ID NO: 789065 - DNA, 574 bp, Homo sapiens
ggtgtgattatagtgcactgcaaccttgaactcctgggctcaagagagcctcctgcctcagtgtcccaagtagcagagactataggcgtgtaccaccatgcctggctttctctgtatttcttaaatgaccaaaaaaccttccttttttgtttctacagatttgtttacatttttgaatattctgtgtatgttgggccccagtttcttcatgtgtaaatggcagataacaatagtacttctctcataaggttgtttggaggattaagtgagctacagtaggtaatatgtgaaaacaggtctgtattataacaagcattaagaccttttgtttactgttattattgttttcagtgaatgtagataaatatgtagagagatgttctcaggctgttaatactggttmtagtgtggcaggggagaaacactggaaagagagcgataaactgtgatttttgccaaatggaaatattatttatggtaaaaattagagtggaaatgtggaaattaacattctaagttatatctatgatataatgaatatgaaaaatctatgtatatgtgtgtaaaaattaaa

SEQ ID NO: 789066 - DNA, 563 bp, Homo sapiens
ctgcagtgaactatgatcacaccactgtactccagcctgggtgatagagcaagaccctgtctctaaaaaaataacctggatatataaaataagcaaaagtagagttgtttgagttgatgcagtagcagggagtcttagctgagaaatatcttcttggatatttgtagttttcagaaagcaacaagtaaaataccctgaattacagsacagtatctaagatcacccccttgtgtcattgcatcccctgcccaccaacatgctatggtgcttagtacttaatttcattctataccagagaaagaaaggcaacactatgcattcactgaacacaaaccaggcacactgaccaataatgtatgtacaatccctctagtgatggctcaagcatgtctgtatgggggaacagtgacaatcaagtcagtatagtttagggtgctaggtttcctgaagctagataaactaataattttatttatattgtacagcctatttacagtggctctggggatggcgagagagattatggggtgattaaaattttccaatgttaactttttgaaacc

SEQ ID NO: 789067 - DNA, 511 bp, Homo sapiens
ctggccctattcctttactttctcaataaacttgctttcacttcactctacagactggctgtgaattctttcttgcgtgagattcaagaaccctctcttggggtctgtatcgggacacctttcctataacagacactgacactgcctctcctagggtgagccagttcctagagayggtaaatgactcacctgtgaatgcaccttccataggccaaccaaccaatccagagcccacaccccacacctgagctctcacactgcaggtcactgtgccctcatcacccagggccaggtagtggactaacccctgggacccacagcctgctgaaaacaattcaaactagccaaccctatggcagtttactctgccttgcatggtccttccctcaggaaacacaataaaggctcttgctcacgttttcctctcgctccttccatctcctaacctgggagctttctcgtgggatcccacatggcatgatgggcccccagctcttgggaactgggagaa

SEQ ID NO: 789068 - DNA, 511 bp, Homo sapiens
ctggccctattcctttactttctcaataaacttgctttcacttcactctacagactggctgtgaattctttcttgcgtgagattcaagaaccctctcttggggtctgtatcgggacacctttcctataacagacactgacactgcctctcctagggtgagccagttcctagagatggtaaatgactcacctgtgaatgcaccttccataggccaaccaaccaatccagagcccacaccccacacctgagctctcacactgcaggtcactgtgccctcatcacccagggccaggtagtggactaacccctgggacccacagcctgctgaaaacaattcaaactagccaaccctatggcagtttactctgccttgcrtggtccttccctcaggaaacacaataaaggctcttgctcacgttttcctctcgctccttccatctcctaacctgggagctttctcgtgggatcccacatggcatgatgggcccccagctcttgggaactgggagaa

SEQ ID NO: 789069 - DNA, 563 bp, Homo sapiens
aatgagaccaaatattattcaagggatccttaactgtgattgctaaaatttggcagaagtttttattttacaagtaaaataggatttataagatgaacacaaaagcctaaatatgaattgcatttttaaatatagagcttgaataaatctaacattgctgtctaaaaaccagaccaaacccctgaatgatcttttstatgcataaagtgtatactcaagaatacgtaaaagacctcatatttagcaatttgctatggaaccaggtagagctgacactgactgatgagctacatggggggtcactatccaaggaatagtaggatctcagaagggagggtccaaaggatggaaggtggctggcagagggaagagagaatttgcaggactgggctccaggagagaagttcttgctgtggaggggtggccaaagagtgtacgtggagatccagggtaactcagagaagtcacagaagccccctgagttcttagcacactgagaatctaaaataggtccaatatttccctcacgggtcacttcttccactgggtcacttcctctgctg

SEQ ID NO: 789070 - DNA, 598 bp, Homo sapiens
ctgtgatcaagttcagcctgaaagatggaggtttagaggaaaatagaaatcgattgcagtaacaagcatgacgaatagtgtgccaggagaaacaaacctagactgaaggtgtgagcgctcgagtttacaaagtcaagttttgcattggtttggctggtggggaaactctagaatgccatgcagcagaaatgaaaaagtaacatctcagaatctctgatcattttggatgtctatcaataaacctagcatggcagattagcrgagaataagtcaagaagaattatgaccagagaagattaattgaagtcaaggttcctatgactaaatttgtttatatctgggtgctgagttagaagcccaactagttcgtctgcctcacttttgtgttgctaatttctttaaaaaaacaacaacaacaaaagatcatcattgcagatgggaggcaggactagattgcagctctgactcagatggacagagcagtgtgcagaggcttgcatcatgaattttagctccagaatgacaagaataaaccagaaatcctgagaggatccacagaccctctgaaagaagcggactgctcctgcaggacctggaa

SEQ ID NO: 789071 - DNA, 528 bp, Homo sapiens
ctccagaactttttccacctcccaaaactgaaactctgtacccgttaaacactaactccccatttcccaaacctcccagcccctgataaccatcattctactttctgtcagcaaatctgactatgttaacttcctcatataagtagaatgaaacagtatttgtttttctgtgaccagtttatttcacttaacataatgtcctcaatgttcatccatggtgcagtgtcagaattttcttctttcttaaggctgaataatatcactttttatgtatatgccacattttgtttattcattcatctgyggacatttgggtagctttcttcttttgccgcttgtgaataatgctgctgtgaacataggtgtacaagcatctgtagagttgctgctttcaattctgttgggtatacacctaggagtgaaattactgggtcatatggcaattctatttttgccttttttgaggaaccaccacattgttttccataatggctgcaccattttacatttccatcatcagtggacaag

SEQ ID NO: 789072 - DNA, 616 bp, Homo sapiens
tatcacaagaacaaaaaaccaaacactgcatattctcactcataggtgggaattgaacaatgagatcacatggacacaggaaggggaatatcacactctggggactgttgtggggtgggaggaggggggagggatagcatcgggagatatacctaatgctagatgacgagttagtgggtgcagtgcaccagcatggcacatgtatacatatgtaacctgcacaatgtgcacatgtaccctagaacttaaagtataataaaaaaaagtcataatcacaagattrttttaatcagagaaaattattaaaattttatttcctaaaataagttgatggccaaaagcttttgaatggctttctaaatgattttctctacttgggaagttaaactgactaatgattgtgtgtctgtttctgatgttcattaatcacaggtaaattagtagacacctcaggttctgtttaattaataaatcatctctgcaattgtgcatcttgaacttcaaaatagcacttgttgaatctggggaagcattcaagattcctctgtaaatgaatcttactttttgtttaatgcttaatttaaaatactttttgatatgtaaaaaacttgtcatg

SEQ ID NO: 789073 - DNA, 432 bp, Homo sapiens
cccttaagattttcgttaatgtctaggtcaaaaaaaatacttattttcttatcatcacgaaatgcagatgcatagccccatctcatgcctcgcttctcctagttgggatagcctctgagaacatttccaacactcttctttgcagaaggtattctgcacctacagctggaagcaggagacgaaccggccaaaggtgtcttggctgtgctctgccttctttccttagctttcctaactctgcctttccggtgattttcatgttttccctttcattttacrttcagaaaatctctggggaatgcagcttttgttctgttgcttcacgtaattcccagggcagggaatgaaaattatttgctttcacaacttctggctgagtgcctttcacagcctggctgtgttctggggtgatttataaactgcagagcctgg

SEQ ID NO: 789074 - DNA, 620 bp, Homo sapiens
atatcattagctatatgttcatttgattgctattacatattctctctctctgacacacacatacacacacacacacacacgcacacacacacgactgaattatattcagcagtattttatgctctttggaaactgttacttattcagatacaggrtgttttgtttttgctttttgctgattctctactaattttattattcccaatactctctttcattttgaattatggagtttattgcagtattgtattttttgagatgtaaaaactattataattagaactaaatttttcaaaaatggaaacatgcaggttaaatgataaaaatagtgtatttgtgaaatttgggttccgttttgttttgtcatcatagcaaatagagaaaaaatgagttgattacagatggaagtgtaatttttttctgttgagaagacctggtcatctgcctccacatccatcaccacccaacagcactacaaagagcagctgaactctcccccaatactcctctgtgccccagtttctccagatgtaaaacaacaccacacaacacatctgtctccccctcaactcaaagaaatgttataagaatctttgagagaaaaaaatatccacaaaagt

SEQ ID NO: 789075 - DNA, 666 bp, Homo sapiens
gcaagaagatctgggaaatatagttcctacctagacagccacttctcagcaacaactccgcaatataatagtttggtgcataagtaattgcagcaatttgccaataatggcaaaacccgcaattacttttgcactagcctaataaagaaagagcatgaactttggaggacagctaacatccctaccatgaatattccattcacacaaaggttttaatacttgataaaagcttaagtcttctcaaagatgtgttcgcagaaatcatgattttaagctaaaagaatggtttagatggaatttcaggcatctgagaattgtgttgggtttcactcatctttatggccctagggcataagtcagtgcaggtagttcctagaaatcaggttattgaaggaacaaggaagaaatgtaagggagaggttttcgaagtgggatataagtaaatacatgatattctattctgaccccaactgtaacagaagcaattagatggcmacacaagttttaggccacataagaaaatgtgttcatgattattccttcacctcctttgagtgaatcttaatgatctcccgcttttaataattgctatgtttctaacctcccagaggtcctgcaggttcaagtgaattatgattaggagctgctaattatagtaatgagata

SEQ ID NO: 789076 - DNA, 666 bp, Homo sapiens
gcaagaagatctgggaaatatagttcctacctagacagccacttctcagcaacaactccgcaatataatagtttggtgcataagtaattgcagcaatttgccaataatggcaaaacccgcaattacttttgcactagcctaataaagaaagagcatgaactttggaggacagctaacatccctaccatgaatattccattcacacaaaggttttaatacttgataaaagcttaagtcttctcaaagatgtgttcgcagaaatcatgattttaagctaaaagaatggtttagatggaatttcaggcatctgagaattgtgttgggtttcactcatctttatggccctagggcataagtcagtgcaggtagttcctagaaatcaggttattgaaggaacaaggaagaaatgtaagggagaggttttcgaagtgggatataagtaaatacatgatattctattctgaccccaactgtaacagaagcaattagatggcaacacaagttttaggycacataagaaaatgtgttcatgattattccttcacctcctttgagtgaatcttaatgatctcccgcttttaataattgctatgtttctaacctcccagaggtcctgcaggttcaagtgaattatgattaggagctgctaattatagtaatgagata

SEQ ID NO: 789077 - DNA, 591 bp, Homo sapiens
atttaccgaatctggcctgattgtatgtccccagtggctgtgacaaagactgcctcctttgatcaaaacttgtatccagcccctctgagtcctctgcttgactaggctgaccttggggttctctctctgtccttgctgaatccagtttgagaaaaaatactgctaaatgagtgtcttagtctgttttgtgttggtataaaggaatgctgaggctgggtaatttataaagaaaagagagttatttagctcacgattctgcaagctggaaggttcatgatkgtgcattgagggagggcctcagactgcttccactcagagtggaagatgaaagggagtttgcctgtgcagagggtacatgagtggagaagaagtgagcaagacagagagacagaaaggaggggaggggagagagagagagggagggagacagagagagagagagagggagcaagagcgagcagagggaagtaccaggatctttttaacaaacagcttttgcaggaactaatagagaaagaactcactcatctgccctccagagagggcattaatggagtcatgagggatccattcccttgacccaaacgtctc

SEQ ID NO: 789078 - DNA, 613 bp, Homo sapiens
aaataggctgtgtctccccgtgccagccccctccccagtgtgcttccaagtaagcaggtggaaaggctgactttaggaaagggaaggattagcggaatcacctgctgctcagcttatggcctctgagagagttagccagggctgccctccaaaggcagcggcaagagctcagaggttaattttagaagttgtgaaaaaccaaggaagctaagcctcaggaggggagctggggaagtgctgagggacaatgtagcgtggaggagtttgtcttggaccttagacttttttctttttaagattctcaggattgcgttatcccatttagaacatagcatctacaatgagcagtgctgctctgtttggctctcttcttatgtgtgaaggttgccytcttgctagttaaaaccagaaagcttaagagtccctctctaactgcagagaacgtggctgatggcaagtgtggggaagtgtggcgccaatgtccctcatcctgagagcctcaggggtgggtattctctcatctaaaagataaatacgtaactggcctaacctgcaaggatgatgctagaggcctgggccttgtctggagagagccacaaatccgaggaagaag

SEQ ID NO: 789079 - DNA, 507 bp, Homo sapiens
ttgctcgcagcagtggggaaagagcatatctgtagcttttcttgccattaagtatatccagagaatgaatgcaccaggtacaaggcccaggaaagaggagagctgcctctgcagaagcaagggcacttgtctgcagttcagcttacctgatttgcagatcgccagtttatcagaattgaaccaaccggcttcatcttcttctgctttgttgatacccaagctggccttaatttttttttttttttttttttttcagctgaraatgtctaaagcctgaggtatgcttctgggtgttcttaagacttgaatgccgttgcttaaagagttaaagatccctgaggctacagtaaaaggacgataaggtaaatcactcacccactggagatgctccccttgtcctttaccaaaacaaggtttgaggaagatggaaggcattcaacagtttagagaaactctactgtgcaaagccaaacatcagtattaggtttttaaggttaaagaaagttc

SEQ ID NO: 789080 - DNA, 538 bp, Homo sapiens
atattaacatttgaggaacacaggtctcttgccttattcactagcccacaatatatacacatatttgacagatatggaaatgaggcccaaaaccagatgagaactccacctggaagcatcaggttataattggaaatccaagtctcttccacccaatgcccttcccctacccccatcttttggtccagagggcccatacatttcagtctcaggccttaagcaaagccaggatmatcattcttattccatccctcttcagttctgtgcacagcagggagctctggaaggccttgctggagccatctgagacctgacacagcatctgtaaaggaagtgctctccaaatcctgtttgaaatgtgtttatttatttctaatccataaacattttggagtgctcaccacatgcaaagtcttgggctggatgaatcagagaaaacaaagtggaatataacaacctcaggacacaccccagggtcacagtctggttggggaaacagacactatcaatatacaatttgcggtggctttagtggaga

SEQ ID NO: 789081 - DNA, 514 bp, Homo sapiens
aaagaagtgaaaatatttgaagtttgtacctactcattcatgtaagtgtgagttcttgatatattgtgataccaagaaaaagaaggaaaactgtgtatattgaatctgataatcagtgtttacttcctttttgcagcccaaacttcaaaatcatgatatttcagaacawagtgatcttatccattaactataaaatagaaaaggctttcccaaagatatttaagacatcatttgatattatagcatatacacatgtactatggagaaaaatgcaaataattttctacttgtgatgagccccagaggttcacttctactgcggttaggaatacaatagtgaagaatgcacttagaagcattactcgatgtaaccatgagagaatttgatcagttggaaagtatagctgccatgtaagatcaagagtcaggttgaacagagttagccacatgtgaagaatgaagtgaactttcaggcagagtttagaaggaaagactttttctacatcttagttga

SEQ ID NO: 789082 - DNA, 655 bp, Homo sapiens
aatacatgtacattgaaagcttaccaaatttaaggcaccgtgctaaaagttggaagcacaggggaaaataagcaggaatgtagtccctgctttcatggaggtgtagtctcacagagaaacagttattgcataaacaattgcagaataataatgaattatttacataatgaataacaagagaaattaggactacagtttcaggctacataataggggccctcaaccacaataggggagcatcaggcaaagtgtcccagaaaaagtgatgcttaggctgagataaaagggatttgcaagaagtatcccaaacaaaaatttgatcaagggtgtaccaggccaaggaaattgyctgtacaaagtctctgaaaccagaaggaccctaaagaagcccagtgagatttggccatagaagaaagtggaagaaaaaaatactgcttagaataaagcagcagaggaaaaaagggaccagatgatacaggggcttccaagccatttaagaattttagactatgccaagtgcattgagagcccactgaatggttataaatgaaaggatgatgtaattagggccgcatgttttaagaaatcatgctgaagacagttaaatagtggaagaagggggccaacggcagatgcagagggcccagtacaaaag

SEQ ID NO: 789083 - DNA, 607 bp, Homo sapiens
tctgtttcctcagacaaattaaaacatgtacagaaccagttttccctccacagtgcaagcaagttccaatctcttttcttttgtcaactttttgatgttacagagaaaatattgcaacaaaaatatgaaatgaaatgtaatttgctttattgcaaattaaatttgtctagctatgattagtgtaagtgtgcatgttttacgttggtgtcattgaagagcacatattttgtgttttaytcttttcatttaatatggtatgataaacacaagtccagatattgatgtaatttacactattgtcatttttaatagtctagaatgattgtttccaatcttttgctattataaccaatgtttatatcaatctatttaaaaaaactaccattttcctcttcagattatttctgtgaggtgtattttccaaaatgtcaaagagcataagcaattttatagctcttatttcagcttacttgtattctccaaaaaacaaattgaatcatttacagaaacatcagcaattgatggatgtaattacatgagctgcttagaataacctttgagttgcaatgtaaactttaagttggatgaatttgcattgtaactgcta

SEQ ID NO: 789084 - DNA, 561 bp, Homo sapiens
agttgtgattgagcttatcaggataaatttctacttatcaaggcttatctgtctagagaaattactgaatgggtaaactgccaactgcagagattaatactgaacccctaatatggcatgattccctgatagggaggagccagctacctggtcacaggttgaatatataggaccattggaccacatctaaaacagaaaaggccgcatgttgttctccagatatatatatttattatggatgcagatttgacttcccttcccacaatgtttctgttaaaactaacatcttacataaaagaaaagaatgtatgacaatgggctcacaaactaggaatttactggtattatatttaccattatcctgaaacagctcacacaagagaaaagtagaayggcattttgaaaaatcggtaatggtattatcggagtgataacacattgtgggactggggcaatgctttacagtatgtgagaggtccagatatatgttctgagaaagggaccaatatatggtgaacccatagcgaatataaggttaatgcaccacaactagcattaagt

SEQ ID NO: 789085 - DNA, 553 bp, Homo sapiens
acctgttcctatgcatgtggtacttccaacttattgatacatgtagatgtccaaagaaggactggtggtacgcattcccttcagtcatatcatacaggcttggagcggcttgatctttgagaacattcattgctacccagattattggtgcctttcgacagctcamttcaaggaaactgacctggtaaacttcttgttctactgctcagttaagatattccagaggatacctcaagcccagcattgtcctttttctgagcttcacaatcaggtgttatagccatttaaattactggaaaatagctcggtgtggtagtgcacacctgtcgccctagctactggagaagctgaggcaggagaataactcaagcccaggagtttgaggctgcagtgaactgtgattgtgcaactccagccttggagtcttttaaaatattgtaaatattgatatttgaattttcatatatatggatatatatatatatatgtatataaaaatagacaacatttcagtgaggcagcaagtaggtactatttaccactgttagatact

SEQ ID NO: 789086 - DNA, 553 bp, Homo sapiens
acctgttcctatgcatgtggtacttccaacttattgatacatgtagatgtccaaagaaggactggtggtacgcattcccttcagtcatatcatacaggcttggagcggcttgatctttgagaacattcattgctacccagattattggtgcctttcgacagctcaattcaaggaaactgacctggtaaacttcttgttctactgctcagttaagatattmcagaggatacctcaagcccagcattgtcctttttctgagcttcacaatcaggtgttatagccatttaaattactggaaaatagctcggtgtggtagtgcacacctgtcgccctagctactggagaagctgaggcaggagaataactcaagcccaggagtttgaggctgcagtgaactgtgattgtgcaactccagccttggagtcttttaaaatattgtaaatattgatatttgaattttcatatatatggatatatatatatatatgtatataaaaatagacaacatttcagtgaggcagcaagtaggtactatttaccactgttagatact

SEQ ID NO: 789087 - DNA, 650 bp, Homo sapiens
ttgatacatgtagatgtccaaagaaggactggtggtacgcattcccttcagtcatatcatacaggcttggagcggcttgatctttgagaacattcattgctacccagattattggtgcctttcgacagctcaattcaaggaaactgacctggtaaacttcttgttctactgctcagttaagatattccagaggatacctcaagcccagcattgtcctttttctgagcttcacaatcaggtgttatagccatttaaattactggaaaatrgctcggtgtggtagtgcacacctgtcgccctagctactggagaagctgaggcaggagaataactcaagcccaggagtttgaggctgcagtgaactgtgattgtgcaactccagccttggagtcttttaaaatattgtaaatattgatatttgaattttcatatatatggatatatatatatatatgtatataaaaatagacaacatttcagtgaggcagcaagtaggtactatttaccactgttagatactagaatgctagacatcatgctatactaagtggtttcagaataatggggtagtctgtccctggtaacaacccaaataagataatcttattgtgcataacaccaaggaggcttatataccatttccaaccaca

SEQ ID NO: 789088 - DNA, 553 bp, Homo sapiens
acctgttcctatgcatgtggtacttccaacttattgatacatgtagatgtccaaagaaggactggtggtacgcattcccttcagtcatatcatacaggcttggagcggcttgatctttgagaacattcattgctacccagattattggtgcctttcgacagctcaattcaaggaaactgacctggtaaacttcttgttctactgctcagttaagatattccagaggatacctcaagcccagcattgtcctttttctgagcttcacaatcaggtgttatagccatttaaattactggaaaatagctcggtgtggtagtgcacacctgtcgccctagctactggagaagctgaggcaggagaataactcaagcccaggagtttgaggctgcagtgaaytgtgattgtgcaactccagccttggagtcttttaaaatattgtaaatattgatatttgaattttcatatatatggatatatatatatatatgtatataaaaatagacaacatttcagtgaggcagcaagtaggtactatttaccactgttagatact

SEQ ID NO: 789089 - DNA, 508 bp, Homo sapiens
attcaagctaagtgaattggaccacacttacaactaaaatcaatttgtatttgctccataaaatagctactgctctcatttacttgagtcttagattgaaacccaaaatactacaccatagtttttaaagctttataaattatttcatgcggtgtcaggcaaaggtcatcaaaatatggtgtagtggttacactggagagtcagaagtcytgaattatattctcgacaacgttaacaactcccttttttttgactctgtggaaataagtcagttaaccaatagccaaaataattagctttgaaatagtccaatgatattacactcaggatttttaactcagaattttaacttcagcctaactttaatcttcttcattctaaggcaccacactttggccaagtgcagaaaagaaaatgtaagatttaataaaatttaaaaatataaaatatccattgccatctgactgagcaccagaatcacctgaagacccagagatgcatgtgaaat

SEQ ID NO: 789090 - DNA, 591 bp, Homo sapiens
atatgatgattaaagtgaataaacacatttagcctacatctgtcatctatcagcaggtaggcactgttcattcagtctctgaagcatttcttgatagtaacttagataggagagattattatttcaaaccagctaaagaaattcttattttaaaaaagccattgagcccacattccctaactataagaatgtaaaataataattaaaaaaagcttaccaacatggttattggttaaatatgtggagtaagtacaagtgttggctaatgtcctcaactttagcttgggtaaaasagcaggtagagtaatattaattagaattagtaaaaaaagttggactgtgataagagataataaattaattagggtaatctatttttgaaggtaactttctggtttaaatcagggtgggagagatgttgaaataaacaggatactgtgagtagaaaaccttggaggatataatggatagatacggctgctttgcaaacaataagtatgtgctatttgaaatttcttgacagcatcctattgtataaatttgggatttttttttttttaacagatttttgctcttgttgcctaggatgga

SEQ ID NO: 789091 - DNA, 617 bp, Homo sapiens
tctagggtataactaatactattaaaaaattgcttatggaagtatgaaatgttacttcagtcatatagattaatagcatgcctgttgaacaaacgacagtcattccttggtatatgcaggagattggcttcaggacccctgtgtatacctaaatctaagcatgctggaartcctggagtactgtggaacctgagtatacaaagttgaccctccatatacttgggtttcacgtccagcaaatacgtattttcagtaacaattggttaaaaaaaaaattcatgtgtaagtgtacctgtgcagttcaaacccgtgttgttacagttctggcaaagtcttatattcaataaactcacatttatccaatttaaaatcaggtattttcttaggtgtaaaataattcttagaataagttacccgtttaggtagaatttggtttctttatctaatcatgacatatcaagactctccaaattgataatttaaaaacttaaaaaattctcagatttatttttacattaaaagtgtagcaattaactttaatttgctttatcctaaacatgtcctgatgtttaattatatctgtattatataccttgtctttttctacaacacatttg

SEQ ID NO: 789092 - DNA, 581 bp, Homo sapiens
cttcagtcatatagattaatagcatgcctgttgaacaaacgacagtcattccttggtatatgcaggagattggcttcaggacccctgtgtatacctaaatctaagcatgctggaagtcctggagtactgtggaacctgagtatacaaagttgaccctccatatacttgggtttcacgtccagcaaatacgtattttcagtaacaattggttaaaaaaaaaattcatgtgtaagtgtacctgtgcagttcaaaccygtgttgttacagttctggcaaagtcttatattcaataaactcacatttatccaatttaaaatcaggtattttcttaggtgtaaaataattcttagaataagttacccgtttaggtagaatttggtttctttatctaatcatgacatatcaagactctccaaattgataatttaaaaacttaaaaaattctcagatttatttttacattaaaagtgtagcaattaactttaatttgctttatcctaaacatgtcctgatgtttaattatatctgtattatataccttgtctttttctacaacacatttgagatgaataagaatacaa

SEQ ID NO: 789093 - DNA, 635 bp, Homo sapiens
ggatcctgtatccttcagatattggtgagaccctaaggcagttgtggctacgggaagtatgtgccttggttctgggccattctcttctctgcttgtcttcaaacttgcctgtgtatcctgtgccaagtgatgactgcattactttctgctgttgaaaatgggaaccctaattgcaaggaatccttggttcccaagtctaaaattgctcagaatgcagatttaaagtacagagtatccaagaactgtacttttatggctctggttataatacatgccattctaattctgcaaaatccttgccacagctgccaggaaatgcccctgaaagctgccatcaagtgccttctgcaagcactgcggctgctggaagtttcaggaggaagagaaccacttcaaattttgggctatctggaagattctccatcctactccctctacatgggagacttcgccattgtcaccttggctaygataactagttgagtaaaaaataaaagacattgccctgctggggttgctatatatccaggccaggtgtatacatggggtattaggcagtcacatagtagaagccagtacattctaatagattgattaagtctcattaatattattttagattaacaattaggaaa

SEQ ID NO: 789094 - DNA, 635 bp, Homo sapiens
ggatcctgtatccttcagatattggtgagaccctaaggcagttgtggctacgggaagtatgtgccttggttctgggccattctcttctctgcttgtcttcaaacttgcctgtgtatcctgtgccaagtgatgactgcattactttctgctgttgaaaatgggaaccctaattgcaaggaatccttggttcccaagtctaaaattgctcagaatgcagatttaaagtacagagtatccaagaactgtacttttatggctctggttataatacatgccattctaattctgcaaaatccttgccacagctgccaggaaatgcccctgaaagctgccatcaagtgccttctgcaagcactgcggctgctggaagtttcaggaggaagagaaccacttcaaattttgggctatctggaagattctccatcctactccctctacatgggagacttcgccattgtcaccttggctacgataactagytgagtaaaaaataaaagacattgccctgctggggttgctatatatccaggccaggtgtatacatggggtattaggcagtcacatagtagaagccagtacattctaatagattgattaagtctcattaatattattttagattaacaattaggaaa

SEQ ID NO: 789095 - DNA, 619 bp, Homo sapiens
ggagaagttcagactcccaaagctttgaccatataaatatatttttcccagttgctttatctgtagaaattatagtctaaagtaattgaggaagaattaatgcaggaaagggtgctggtgtggatgtgtatgtatatgtgaattaccaactcagattgaattgtgatctttagttatcagctgagaagtagctctaaaaaatttatcwggagttaaatacatagagaatgctgtaagaatcttttaaatagtaaacatgaacatgggtattactaaactatattagtcatggaatggataattttattattaaaagttgttactaaggagaagaaacacaggatgacaaatggcctttctggctgtttttcctactcatttgttgcttgtcaattatttagtttccaggcctgtcaacttgttttattctaaatgtcttgtgatatgtaattcgtgactactggctgttggtgatcaaacttgctttcagaatgatagttactctttattgaacacttaccatgggccagatactttcataacaatttatatacattaacttctcttaaaatttaaagctgttatgattattgtatagctataaagctttctcttaaat

SEQ ID NO: 789096 - DNA, 527 bp, Homo sapiens
ctgcgctgcagctctttcatgtcctcagttgacaagctctgacttggagaaggcctgcagcctttgagcagtgaggagtggattattctaaactgtctccgagatcgggctcgcagattgttaaacaccgatgtgcgctttgcatggggctcctctgggatacgcgtaatttaaattacgacatgagcatttcattttgtattggctggtacacagtaaatggagcaagcgggagccggctgatttccagagagacagaaaactcgaaaactgcagctgagagtcatttattccctccattccacagtgttctctcactgaagtgcagaaatcagactgacatrcgatggccggcccttccatctctggaggatgcagcactccagaaaggcaagcagggttggagaaggggcccggatctgccctggaaattagccaggaagagtcatggaccctgctgtgctttgccatgatttcaggatccctcatcccaatcaactaacaggaggggaactgagtcccatcat

SEQ ID NO: 789097 - DNA, 527 bp, Homo sapiens
ctgcgctgcagctctttcatgtcctcagttgacaagctctgacttggagaaggcctgcagcctttgagcagtgaggagtggattattctaaactgtctccgagatcgggctcgcagattgttaaacaccgatgtgcgctttgcatggggctcctctgggatacgcgtaatttaaattacgacatgagcatttcattttgtattggctggtacacagtaaatggagcaagcgggagccggctgatttccagagagacagaaaactcgaaaactgcagctgagagtcatttattccctccattccacagtgttctctcactgaagtgcagaaatcagactgacatacgatggccrgcccttccatctctggaggatgcagcactccagaaaggcaagcagggttggagaaggggcccggatctgccctggaaattagccaggaagagtcatggaccctgctgtgctttgccatgatttcaggatccctcatcccaatcaactaacaggaggggaactgagtcccatcat

SEQ ID NO: 789098 - DNA, 549 bp, Homo sapiens
tatatggacactgattctcagggaagagctatttgttatttaactttctactccagccactctcaactataacagaatcaaattatgaatctttgccattgccttctgcgtttctgggaaacagtagcagaaaaaaacatgaatgttgagattggtatgaaaatggcaggaaaacactgagctcattttaatattatacttttgttgtgggttagccatttaaagttataactgattcattgccctctggaaaaaaaaatatatttaagggactgcttctacatcagttttaactsctctaaaaatagctactgtgtactgacccaggtaaaactataaatagctacaacagttcatatcttcataatatgtttcttaggggatgagatttctctttagcacaagcctgagcataccatattaggcataaaaacttatattagaaatcatttctgaaattcataggatgggctttgtatggtcaacagtaggtagactctttaatgtacttttcaaggtgctatctcttgatatttttattttgtaata

SEQ ID NO: 789099 - DNA, 630 bp, Homo sapiens
agagtaatacagtcacagatattttatgagaataaggtaattatgatatgtcagaaatgagtaggtcagaaactctaatgtaatgaataaaagcaaatactatctgtaattaagacactttaagatcaaggaacttaaacaaagtcttcaaagccttcaagatgtgataaattccttaggtgggactgtatgatacatactttgttctcaattattctgtatttaataccatgtattgaatacaagtactgaatatttactggygatacctctctagaggtaggtagactatcagtgcaggtcataagccaaatttctcaagttatgtttcgtggctttgaaaaatttctgtttcctatttctctttctccgagttatatttcacattgctatgaccttgtcattttatgacttcattttattgctagtcaataaccgtgagtgattaaaactatttcttttcttttctttttctttttctttttttttttttttgagatggagtctcattctgtagcccaggctggaatgcagtggtgcaatctcggctcactgcaacctctgcctcctaggttcaagcgattctgctgcctcagcctcctgagtagctgggactacaagcgcccacca

SEQ ID NO: 789100 - DNA, 630 bp, Homo sapiens
agagtaatacagtcacagatattttatgagaataaggtaattatgatatgtcagaaatgagtaggtcagaaactctaatgtaatgaataaaagcaaatactatctgtaattaagacactttaagatcaaggaacttaaacaaagtcttcaaagccttcaagatgtgataaattccttaggtgggactgtatgatacatactttgttctcaattattctgtatttaataccatgtattgaatacaagtactgaatatttactggcgatacctctctagaggtaggtagactatcagtgcaggtcataagccaaatttctcaagttatgtttcgtggctttgaaaaatttctgtttcctatttctctttctccgagttatatttcacattgctatgaccttgtcattttatgacttcattttattgctagtcaataaccgtgagtgattaaaaytatttcttttcttttctttttctttttctttttttttttttttgagatggagtctcattctgtagcccaggctggaatgcagtggtgcaatctcggctcactgcaacctctgcctcctaggttcaagcgattctgctgcctcagcctcctgagtagctgggactacaagcgcccacca

SEQ ID NO: 789101 - DNA, 584 bp, Homo sapiens
agtcaaggtccaatcagcagagtaaagcccctccgagtccagctatgaaccaggagggtgtaatgaggaggaggagctgagaagctgcgaggagacaaaaggaagcccagagatcaacccctacgctagagagacaaggcggggaggcaatgttagatgttcctagacccatgttgggggccgctgagcagcaggaactagagccccaaaggagatacatctgctgcaggagacaccacccagggcggagaggctgtcagagaracccccagccgactacttacctctggtcctgccagaagccagtataggggagccgggacaatgcagcccgcagggggtcagctctcctgtgacccagggcagagcagaggacggggagaaatagatgtgtgggcccccaggccagggctgcccctgtggtccatcgggtaactgtgaatgtccatctggacaccagctccctttgcccgattccaggcctgaaagcaattggccgagatgcaatttggtctctgggggaccaggcttgcaggaaggaaaggatactggcacctggcactgaaaaaacgcccgaggcagat

SEQ ID NO: 789102 - DNA, 602 bp, Homo sapiens
cctctgcctcctgggttcaagtgattctggtgcctcggcctcccaagtagctggggttacagattcccgccaccacgcctggctaaattttttgcttttttaaaaaaaattttttattttaagtagagacagggtttcaccatgttgcccaggctgatctcaaaatcctaaagtcaggcaatctgctcacctcccaaagtgctgggattacaggcgtgagccaccgctcccggcctaaaatgcactatttttaatgtcttctagagaacactctcaatttatgtatgagctgtgcttgggttttaaaragagaactattgtatcacgcgcattttaaaaaaccatcaagttccttatccagccaacaatgatcaacggtcagcctacttacagtccacgtttcagaacatttattcttaatcccaaagttggtttaactgaacacctctggactcattaagaatacttagcaaagcaattctaaaaacaaataccaatgttagactttggaactgaggagtaaacagaaagacagtttgtcattttgctgagctcaagactcagttgtttgaggtcaggaaccatcagataaataagcagag

SEQ ID NO: 789103 - DNA, 537 bp, Homo sapiens
aggcacttcaaaaatcatcaagcatttcatttttcaaccttttgttttttcaaccaggaatctgacgaccatggaagccaggtgaatttccagggacacaaaactagcagcagaagcagagttagctccttatagatgtggtattgattgggccttcctgggtgagggagaagagttttgggattaagtcaaccccaaaatgatttaaagattatataactacaattccaagtcagtagttasagaatttgcaaaggaactgtattacttacatgaccacgtaccattttacattcttttatctagataataaaaggcattaaacaagtaatcctggtttaatcaacctctaaagattgcctgaaataaaagctaaactttcagttataaagtactggctctttatttaacaacttttcttttctttcttttaatcttatggagtccctgggattgttgtagacagtttctcattatctgaataaccaacatagtcccttcaaagaaagatagctgtttccactgtctgtcttccat

SEQ ID NO: 789104 - DNA, 532 bp, Homo sapiens
gtagaatttacaactttttaactaaattaaaatcccacatctaaaagtcttgaggcaaaacatccacaaatatccattaatctatgtaagcatactcactacgtaccagagttcttatatatgaaaaaatacatgtactatacataaacatcacacaaatgtaataaatacaaacatgatatagcttagtttaaatattgtctaaatagatgtataacagcagtttctttgggacccaatctcacagttctctgagctgtagaacaggtctatacaatgcaatgttcttcacagtgtcttccttaggtcaactgtatcagtatcaactgggagtttgttagaaatgcaaatttggactttgtcttagtacatgtaacttaaatctggtgatgragaaaatgaacctgagttttggcaagccctccttatgattcctatccacttagaaatttgagaagaactggtattgtgatataatcccagaatttcatgacagcacaaaaccacaaaaaactacatatattacttttag

SEQ ID NO: 789105 - DNA, 576 bp, Homo sapiens
aatacctatatctttctacacagaagatatagtctctatatatgtccatattatgtcaaatttagcaatgtattaaatttagtaaaaataaattaatcacatcatttagagaaaggattcccatgactgaaaattcagtggttcttctcagggctaagactgggatgaagcgagcaaggtgcttctgctgcaaaatttgataggycctccgtccctccctccctctcgggagctagacctgtactggcatgaccccgagagggagcacatgaggtacttacattttgcatgtgggatgcctcactctggtcagacaagttcatttccttctggggtccagtcaatgctgccatgatcgggcaaggctggttattctcacagatgaggcaaagccaaccatatgagccaccgggagccgtcctgtggcctgaagatacagggctctcctgggcaaggacaggcagcactcgtttttgtcacacttgtgttattaaaacctgtgatagtagcctggttcagttatcctaaatagcactgaacagctcttgccgctggagtgaatccagccttccttat

SEQ ID NO: 789106 - DNA, 576 bp, Homo sapiens
aatacctatatctttctacacagaagatatagtctctatatatgtccatattatgtcaaatttagcaatgtattaaatttagtaaaaataaattaatcacatcatttagagaaaggattcccatgactgaaaattcagtggttcttctcagggctaagactgggatgaagcgagcaaggtgcttctgctgcaaaatttgataggtyctccgtccctccctccctctcgggagctagacctgtactggcatgaccccgagagggagcacatgaggtacttacattttgcatgtgggatgcctcactctggtcagacaagttcatttccttctggggtccagtcaatgctgccatgatcgggcaaggctggttattctcacagatgaggcaaagccaaccatatgagccaccgggagccgtcctgtggcctgaagatacagggctctcctgggcaaggacaggcagcactcgtttttgtcacacttgtgttattaaaacctgtgatagtagcctggttcagttatcctaaatagcactgaacagctcttgccgctggagtgaatccagccttccttat

SEQ ID NO: 789107 - DNA, 609 bp, Homo sapiens
aaaacattatagatgtcatcaattaattcacccattcaatacatatttactgcacctactatgtgccagacttttttctaggcccttgggacatagcagataagagcgaagtctcttatttacttatgttttctaatgggaatatgggatgacatgtctctatggctctaagtgtgtaatttaatatatctgggacagttagtaacttagctgattctaaccatttctagatattggttgtctaatatttctataaatgccaatcaaaccgaagttagagaaggtcactttgttatttaatgmatttcagttctttcattcaccctagataaacatttatgatgtgacattatgtgactgcgattattctaggtactaagaatacagagatgaaaaagacaagaggccattctagtaaggggagacgaaataaacaagtatataaaataatttcagggccgggcgcggtggctcatgcctgtaatcccagcagggattttgggaggccgaggcgggtggatcacgaggtcaggagattgagaccatcctggctaacacggtgaaaccccgtctctactaaaaatacaaaaaattagccgggcgtcatgg

SEQ ID NO: 789108 - DNA, 621 bp, Homo sapiens
acacctgcctgagacagttacaggcactgggagagtggccacatagtctgtacccagcaaagccatagcggtggggctgcctgaagactcaggagtttaccccaaccccagtgtgtccaagaggtgacatatggtgtgaaagactattctggagctttaaaaatttaatgtcttccctgctggatttggggcttgcttggggcctgttactcccttcttcctgcctacctcttccttttagaaggggaatgtctaccccatgcctatctcaccattgtagtttggaagtagataatttgttttgattttacaggctcacagctggaagcagtctgctttagtctcagatgagactttggacttttgagttaatgctggaacacattaagatttatggtactattgagatggaatgattgtattttgcaygtgagaagtatgtgagttttgggggtccaggggcagaatactatggaagtggtttgtcccctctaaaattaatgctgaaattaaattcccaacataacagtactgagaggtaatggagccgttaagaggtgtttgagtcatgggggctctgccctcatgaagggattaatgcggttctcaagagactggatt

SEQ ID NO: 789109 - DNA, 617 bp, Homo sapiens
tctcaaaaaaaaaaaaaaaaaaaattaaaaatttgtgttcatcagaggacactgtcaagagtgtgaaaagataaccaacataatggaagaagatacttgcaaatcacatatctaataagggtctatcagtatatataaagaactcttcttacaatttaaccacaaagtgattaacaacccaattaaaaactggacaaaggacttttaatatttctccaaagaaaataggcaaaaacaagcacataaaaggatattcaccacctttagtcattagcgcaatgcaaattaaaaccatagagagatatacagccacccaaatgactaaaaacaaaccactgacacaccagatggtggcaaggatgcagagaaactgaatcactcattgctagtgggaatgtaaaaccaccactctggaaaatagtgattgtgctcctgggattgttcgtacaaaacctgtacacacatgttcttagcagctcagytgggcagcatccagcccaaacgggaaacaatctagatatcttttgttgaataaactgtgggactccattaccatgaaatactgctctgcaataaaaagaaacacaattgatatggcaaaagatacgacaacctga

SEQ ID NO: 789110 - DNA, 614 bp, Homo sapiens
tgatattttctactagggtttttttttccctctgagagcatttctagcactctcagaagggcaatacaatcaatgtgcaacctccaatagttctgaacttagcaatgtggatgctattgaaatagccatagtgtgtggaaaagaagttgctgatacatcgagcaaatgtgtatcatacataggccagacaaagctggccatgtcctgtcttacactgtttagaaaaatagaatgatttcatttagggcagaagttgaacagaaatagagtcaattcaatttgattttataagtaaactctgctccaagaaatgtggctatgtataaaccaaaaatgcaatttaaacaacacaatacatttcagatttctgaacgttcattcggttttactataaatgaagtttcactttaagtgaattayaccatcacttttgggaatctaaataaatctcactctctaagcaatttacaggcattgatattccctaacagtttaaaatacccctgtttacaagaataaggcagatgggtaccagcagatgggcaccatgaggggaaaaggagtggtacccacctgttactgtgtgtgtgcccatgatcccaggtttactgggt

SEQ ID NO: 789111 - DNA, 611 bp, Homo sapiens
ttatattggagatccttctggaattggaactgcatcagaccagtctggttcaacttttgtgtaacaaggttgtgagttgtttttcagtttccgtggacccccagattgaaggtcccataacctgagcatgcccaggtgaacccaaaatgcaaccacaggcagaacctaagtaccggaccaaggagcaaggactgtattaagaggcagatacagaatggcaagatgtagaatccaatcagatcaagtcctgttgttaccatacggcatgatccagtcagatcctggcttccagcatcatttcactgcaagatccaatcagaccacacctcatgccccatccctataaaacctggcccagcccccagcttggggagacagatctgagtgtttcctcttgtcttcttaccagttgactcacaatacacctttctcactacaaaaacccagtgctttggtgttcagctttmcattgtgtgtgggcaaatggatcagttttctttagtgacagaagttgctctatatacctcttcaacctggctgtttatttgtatttttataatatttttataatgaatcagtaataagtaaaatactgccctgagttttatgag

SEQ ID NO: 789112 - DNA, 638 bp, Homo sapiens
gatgctcaaaaagtttaacaaacatgtttgcaaaatggagaaatgctgtttattatgagctgtgtatgggggtatgagtatgagggggtgtggctctaaattcagagagacctggataagaattctagttgtgctatcgctgtctgtgtgactctgggcaggttactaacatcacttgatcttcactatgacgattcacaaaggaaggcaaataacacattgctggaagaatttcatgaggtcaggtagataaagtgtctgagcccggcttggcactcaataggagcaaaagagatcgtccatggtgagtatttcccatgctttattctgtatcatttttacagccaccctgtgctctatgcattattactcccattttatccaggaggaaatggaagttctgraaagtgaggtaattttccccacacgctcacatcttggaagtggagggctaagcttcaactctaggatttcttcaaccacgaacacctggctttgtttgtttcctgtttttgttttttaatctgctatgtcacttcacaaataaatgataactattctttgttctcacctgtcatacctaatcactctctaagacctgagtattgttttcactttgtttttttaaatgactcttt

SEQ ID NO: 789113 - DNA, 665 bp, Homo sapiens
actgcatattgcatattgtatattgttaactcacatttgcagagactgatgtatattgaaaaggaagaaaaagagaatcatcaggaactatgaacaattgtgtgttctgtacaacatctggaatactggtcttaaagaactattcctttgctcttgaacttgcaaaattgtatacagatatatttcatacagcaatctacggaattataaaagtattctgaagtcagaagatttgggaatgaatttgtgtcctaagacaattgtggagaaattagcaaaacatgctttagtttaattaaattgatgatgtagatttggtcctttctaatatgtttcagaaaaataggatatattcattttctttcttttaagagggaagagaagcaatccagaaaacatgcattaaagcttcctaatcaagatcagcttttattgttaaaaagtgctaagcagagcctaagaggtgaaattatgatggtattagtactctatayttacttaaaggttatgcaaatcaggatagtctagattatgctgcagaaaatagccccagattcttaatggtttaaagcaaacaaggtgtatttcttactcatactacaagtccatctcaggtcagcgggtggctctattgttaattgtactcactttgtggtcttagctga

SEQ ID NO: 789114 - DNA, 603 bp, Homo sapiens; identical to SEQ ID NO: 773582

SEQ ID NO: 789115 - DNA, 581 bp, Homo sapiens
gtgtgggggctccaaccccatatttcctctctgcattgtccaagtagaggttctccatgagggctgtgtccctgcagcagacttctgcctgagcatccaggcatttccatacatcctctgaaatctaagtggaggctcccaaagctcaaatcttgtcttctgcatacctgcaggcccaacaccacatggaagccccaaggcttggggcttgcacccactgaagcagtggcctaagctgtaccttggccccttttagccaccactggagctggagcagctgggacacagcrcaccaagtccagaggttacacagagcagcagggctctgggcccagcccatgaaaccattttcccctcctaggcctctgggcctgtgatgggaggggctgcctctgaagatctctgacatgctctggggacatttttcccattgtcgtggcaaattaacattcagctcctcattatttatgcaaatttctgcaggtagcttgaatttctcctcagaaaatgggtttttgttttctactgcaaggtcaggctataaagtttccaaacttttatgctctgcttcccttttaaaa

SEQ ID NO: 789116 - DNA, 643 bp, Homo sapiens
tggacctgaagaaatataagaaagttggcaaagcagatctgtgggtcacctcactctccctcttctggattcaccttatccagagtaaaacctgggctataaatccctaaaaattgtaccaccacaagaaattttctttttccttgcttttaaaatgactatgagctcacttctttaagcctttccatttttactttgctaagggaaggtsctgagtctgacaatttgggaactttgagtttctactatacttcttcctaaactcataacagaatgcttatcagagaatttcagcaggaccagatttatccaaaacattctcttactgggaaagaccagagactctgatgtcttatccagtggagtgctggtaaatgtttaacaatatagccaccatgattgatttagtctccagtgtgtcatcactggagaaagagttgggaaggagctggcttcagcatcactgagtttatgcccctaggacattggtctccaaattttagtatgaatcactattactattattaaaagtagaaaagttgattcagaatctctggggctgaggccagagcatttagcaagtttcttcaggtgatcctgatccagtagtttgagttcttgttcccatgtttattcccataca

SEQ ID NO: 789117 - DNA, 656 bp, Homo sapiens
accctcaacaaactaggcatcaaaggaacacacctcaaaataaaaagagccatctatgacaaacccacagccaacatcatactcaatgggcaaaacctagaagcattccccttgagaactggaacaagacaaagacgccaactttcaccactcctattcaacatagtactgggctccctagccagagcaaccagccaagggaaagtaacaaatggcatccaaataagaaaagtataagtcaaactatctctctttgctggtgatatgrttctatacctagaaaacccttaagactctgtcaaaagcttcctagtactcttcaattacttcagtaaaggttcaggatacaaaatcaatgcagaaaaatcagtagcatttttatacaccaatcatattcaagttgagagccaaatcaagaatgtgatctcatttaaaatagccacaaaaaataaaatacctaggaatacatgtaaccaagaagtgaaagatttctacaaaaagaactacaaaatactgttgaaagaaatcatcgatgacacaaacaaacggaaaaacattccatgctcataaattggaagaaatcagaaacttaaaaagctaccaaccattaatatcaatatcattaaaataaccatgctgctcaaagcaatctacca

SEQ ID NO: 789118 - DNA, 662 bp, Homo sapiens
aactttgtaggttggtagatactgctcagagcaacctatcaactactaacatcattgttcatacaattagaaaaaaaattctaaaattcgtatggaaccaaaaaagagcccgaataaccaaagcaatcctaagaaaaaagaataaagctggaggcatcacattacctgacttcaactatacaacaaatttacaaaaaccaaaacagcatggtactggtacaaaaacagacacagagaccaatggaacagaatagagaacctagaaataaaactgcacacctacaaccatctgatctttggcaaagtaaacaaaagtaagcaatggggaaacgattccctattygataaatggtgctcgtataactggctatccatatgcagaggaataaaagtggacaccttccttatagcatatgcaaaaattaactcgagagattaaagatttagatgtaagacctcaaactataaaaattctagatgaaaacctagtgaacaccctttcaacataggtgtgggtaaagaatttgtggctaagtcctcaaaaacaattgtaattaaaaaaaacaacatgtgggaccttattaaactaaagaggttttgcataacaagagaaatgatcaacggagtaaacagacagcctacagaatgggagaaaatattca

SEQ ID NO: 789119 - DNA, 641 bp, Homo sapiens
caccttccttatagcatatgcaaaaattaactcgagagattaaagatttagatgtaagacctcaaactataaaaattctagatgaaaacctagtgaacaccctttcaacataggtgtgggtaaagaatttgtggctaagtcctcaaaaacaattgtaattaaaaaaaacaacatgtgggaccttattaaactaaagaggttttgcataacaagagaaatgatcaacggagtaaacagacagcctacagaatgggagaaaatattcacaaacaatgcatctgacaaaggcctaatatccagaatstgtaagaaacttaaacaattcaacaaggaaaaaccaaataaccacattaataagtgggcaaaggacatgaacagaaacttctcacaagaagatatacaagcggccaacaaacatgtgaaagaaaaaatgctcatcatcactaatcatcagaaaattcaagtcaaaactacaagataccatctcacaccagtcagaatgacttttgttaaaaagtgaaaaaatagactgggtgtggtggctcccgcctgtaatcctagcactttgggaggccgaggagggtggatcacaaggtcaggagttctagaacagcctggccaacatggtgaaaccccatctc

SEQ ID NO: 789120 - DNA, 515 bp, Homo sapiens
actaaggaaaacatgacaactaaattctgaaacagataaaggatgttactgaaaacctggtgaaatctgaataaagcctggggtttcattaataggactgtaccccatgctaatttctcaggttgaaactatgattatgtaagatgttagcagtagaggaagctgggtgaagggtgtacaggaactctctctactctttttgcaactcttctgtaaatctaaaattatctcaaagacaaaagttaaaaaaaatgtatcctasaagctagaggaatttaacaggaaaagcccaaaattatttctatgctgtctacaatctgggccccgcctacatctgcagcatgttttctcctcctattcttactctctggccacacagggtttcttttacttgccacaggccctttgcacatgacgaacacccctacttctgtgggcaatcactttccaatgaaacctcttactcccagcttctcaagctcagatgaagttcccttgctgtaaatcccacggca

SEQ ID NO: 789121 - DNA, 624 bp, Homo sapiens
ttccaatatggctttccattttatttgcccaaacatggaaatctagccatttttcaagtgcagctgcctacctttactttgggtaaatttctgtattaatattttttcactgtcttagttatcaaattctgttgcatgtaaatctggtttttttwaatatatgtaaagtttttaggtagaatgttaatttagtggtggtccccaaagtggagggcatttacctttaagtgtaagatgattcattggaaagaaagaacaaaattctatttttacatatgctgtatgtatcctaatgtattagcatagctgtacacatgtaaggtgtataaattaatattcttatattagatctgtgtggtgcaaagtttttttatacaagtatgaataataataaaattttgtgaacaattgtccagaggcatgaaatcaaatatacctatgtaggtcttaatcctatattttatgacatgtctgatgggaaagttcttaaaattactttgctaatgaaattgaaaatagcctgctaatttcagcccacacggaatgtgtgaaataccagtggaaacagctttggatcaggttcagacttttgtttttgtcctacttctgctaattactaatggc

SEQ ID NO: 789122 - DNA, 598 bp, Homo sapiens
aactataacttgtttataaaaaacactgggatcagccaggcacagtggcccacacctgcaatccagcgctttggaaggccgagttgggtggatcacttgatgtcaggagtttgagaccaacctggccaacatggtgaaaccccatctctactaaaaatacaaaaattaggcaggcgtggtggtgcccacctgtaatcccagctgctagggaggctgaggcatgagaattgcttgaatccacgaggcagaggttgcagygagccgagatcgtgccactgcactccagcctgggcaacagatcgagacttgtctcaaagaaaacaaaatgaaaaacaaaaccacctggaatcactactgctttaccatttgagactgcatgtttttcatgtgatttcacatctatagtcatctccccccaccaaacacacaaaagatatgtgtagaaaattgaggataaaccataacttacttatatagttttattctcttggaaataatgaggctatcatgaactatggactcagactaagagtggaactagtaagagaaaggaactaaaaaaagtcaaccaaaaaatgacatgaacaaggatgttcat

SEQ ID NO: 789123 - DNA, 629 bp, Homo sapiens
catttctcttctttaatcataagctgcgtatgaaaatgtattttctgtaactcattttttatgcctgcatatcctggtggttagaagctgcattgaaccaaattgattctagatatgaagtcagacaaaaatgataaataaagttttcataagcatccagtttgaattactsaaaaggtataaagggaaagaaataatgagaatgcaatatttatatgatatttgtaatgaggtcaactttaatgttatttttctgtgttttgggtcagctttgcatggggggaggatgatctagtcaatatgctcagttgaaagagatatataaccactagaaatttacaaagataatttatataaaacaacattgcttacttagcagacaagactgaaaagcagttaataagctgaaatatataacaaaattctgagaagacaaagtaataagcatgtaaaaaataaagcaataaaaagacatggtaggcagagtaaggtagtatgatctgcatctaatcgaagttctggaaataaatgtataaataaatgtgtaaatatgtaataatttcagaggtaatggtaaaatttatggcaagtgttgacacacagatttaagaagccccgagttcaaatca

SEQ ID NO: 789124 - DNA, 629 bp, Homo sapiens
catttctcttctttaatcataagctgcgtatgaaaatgtattttctgtaactcattttttatgcctgcatatcctggtggttagaagctgcattgaaccaaattgattctagatatgaagtcagacaaaaatgataaataaagttttcataagcatccagtttgaattactcaaaaggtataaagggaaagaaataatgagaatgcaatatttatatgatatttgtaatgaggtcaactttaatgttatttttctgtgttttgggtcagctttgcatggggggaggatgatctagtcartatgctcagttgaaagagatatataaccactagaaatttacaaagataatttatataaaacaacattgcttacttagcagacaagactgaaaagcagttaataagctgaaatatataacaaaattctgagaagacaaagtaataagcatgtaaaaaataaagcaataaaaagacatggtaggcagagtaaggtagtatgatctgcatctaatcgaagttctggaaataaatgtataaataaatgtgtaaatatgtaataatttcagaggtaatggtaaaatttatggcaagtgttgacacacagatttaagaagccccgagttcaaatca

SEQ ID NO: 789125 - DNA, 541 bp, Homo sapiens
atatatttttaaattaaaggccaaataaagaatgtttcagacaaacaaaagctgagggaatttattgccacagatctgcactgtaagaaatgaaaggaagttcttgggcagaaggggcatcagatggcggttgggatctaaacaaagaaatgaagagaccctgaaatggtaaaagagaataaatatgttatattttttcttatttttaattacattaattgataattgtccagagcaaaaacaatagtaatgtggggtttataagaggtaaaatatatgacaacattggacaaagcatggaagaagaaaatggaaatatactgtttatattagggggtctccagagaaatagaacatataggatatatagatttatgaggagatttaytatggaatttggctcacacaattatggaggctgagaagtcccacaatctgctgtctacaaactggggacccaggaaagccagtggtgtaattcattgtgcctagctgatggtataactcccagtccattgccaaagactcgaggacctgggat

SEQ ID NO: 789126 - DNA, 612 bp, Homo sapiens
atagaagatctaaggaatactatcagctaatttggcctcacttacatttatagaacaccaggtttagcaactgcataatacacatcgttttcaagtgcatgtgaaatgtttgttgagaaaagacatgctgaactatgaaatgtctcaataaattccaaggaatagaaatctcacagaatatattctctgactgttgcagaattaaactagatatatgaatatctagaaaataccaaacatttggaaattaaataacaaataacccatgagtaaaagaaggaattttgagacatttgaaatgtttaaaatcaatgaaaatgaaaacataaatattaaaatttggggtatgtacctgaagcagtgctaacagagaaatttttgccttaaatattaaaaataaatattagaaaaagaagaaaaatttagaattgactattacatttccaccttaagaagtstgaaaaaagaacaaatgaaactcattgtatgtacagaaaggaaataacaaatataaaaaaatcaattaagtagaaggcaactaatagagaaaatcaaacaaagccaaagtttaatactttgaaaatattaataaaattgataaactctttgtct

SEQ ID NO: 789127 - DNA, 583 bp, Homo sapiens
  misc_feature 550: n = A,T,C or G
aaaaaaaaaaaaaaaaaaaatatatatatatatatatatatatatatgtactaaaaaataagaaaaaaaattgggaagtaagacatctacagggtacacactttccactacataagcagccctcattctatggcttctgtggccaagagttctacgcattatacctacattgatgagaataatgcaccttaraacttccgaattcagtttcagctgtgtcatagactgtgtgtagtcaaagttatttttttctttatatctctattctttggtacagtgattgaaactaaactatttctttcacatgatagaaggtgctttgaaaataaagaaatgagatacatgttaaatatttgcattgggttgtaaacatagggtaagatgtgatttaccgttgtttgcatgttatgaaaaatgtctgtattgtacctatgtggagcaaaactaatatactgaaaggaattaggtgagattaaaagcaataggtacacagcaaggtattccttaaggagatagttatttgcagctattgtgcataaacaattattantgtgatctattgagctacttttatgcattttct

SEQ ID NO: 789128 - DNA, 646 bp, Homo sapiens
aacatttaaattacaaattacaacagtgattgcaaagggtatttaaaaaaaagcattggggcaaatagcaatccacctggtaggagagaagtgtgtttgtgagccttgctgttggggttcagaggccatttatggagggtgggtggagatggggtggctgtggaaggcctgccctggctgctgccgtcctcggccaccgcgtctctcctttccttggtgtctacactgtgccttggggyctggaatcccctgccatgcctcccattctaaggtggcagctggcaggactgctggctaccttctcctcagggccattgaaaaagtaaaacgtcactggaacagtttgggtgtttcttggcttcattcatctcttattcatccagtcgctcgctgaatattaatgcttggccagagtcagctgattttaattccggctgcaaattatgctgccaagaattccctccaaggccaagcaagttctttgctatgtaccattttggggaaagaacccatgtcttcaccagagttccatatatttgaataggtgggaattgctataatggagctggcaggaatgagtgaacaggtccccaaatcaagactgaaatgaagtctaagaagctctccccatggtccataaacccac

SEQ ID NO: 789129 - DNA, 528 bp, Homo sapiens
aaaaaagggagctggttcttaacttttcggcagatgtgtttgtatttgggagctgagggtcgctctctggaacttttcctcacaaaagccttcagtgttccacagacccgggccaaaccctgtggccccagagttgtcgaacagcttggatctgaaatcctacctttcagaatttgaaatgttctttgttytaggtaattacgggatagggggcttgttttgacatcttgggaactgtgcatgggcattggcccaggagcagcctgaagatgccacacacacctctgctcatctgaagctggtagcaggccttggagaaggtgttgcccttcattctgcacccaagggcgctgaggccagtgttcacagtgcattcatggcaggctgaccgggctggagcacactgccattcctggcagcttctgctcctaccataccagcgctaaggatctttaatgtggccctgggatgcactcttgagccacagacaaggcccagcacccccggggcgtccatcctgctgaaggg

SEQ ID NO: 789130 - DNA, 528 bp, Homo sapiens
aaaaaagggagctggttcttaacttttcggcagatgtgtttgtatttgggagctgagggtcgctctctggaacttttcctcacaaaagccttcagtgttccacagacccgggccaaaccctgtggccccagagttgtcgaacagcttggatctgaaatcctacctttcagaatttgaaatgttctttgttctaggtaattacgggatagggggcttgttttgacatcttgggaactgtgcatgggcattggcccaggagcagcctgaagatgccacacacacctctgctcatctgaagctggtagcaggccttggagaaggtgttgcccttcattytgcacccaagggcgctgaggccagtgttcacagtgcattcatggcaggctgaccgggctggagcacactgccattcctggcagcttctgctcctaccataccagcgctaaggatctttaatgtggccctgggatgcactcttgagccacagacaaggcccagcacccccggggcgtccatcctgctgaaggg

SEQ ID NO: 789131 - DNA, 649 bp, Homo sapiens
ataaaaggttgttgaatgaacttgagattatttgttgtaactatctttcaatagttacaaagaacagaaaatgtagaatctggctaattttattttggaaaatactttaaacgttgggattagctaccagaacacaatctcgataagactactttatacatttgaatttgtattttcagaagcatgttggttcaaagctttgtcycaaagttgaagacagataactagagatcaccaacttcagcctaaccagatatttaattaaatttcatataaatggattaaagcacactatatgcaaagagttgtgttctgtctaaacaccactcttccctggggcctccaccaaggtgtcagacctgcctgtcagaattcctaaaaagccaggaagctctgcaggcagctttctatgctgctttccaggactgtgctgccctctccaccagctcccctgtgcatagcaactggagttctgatgcagcagtgtagggcagctgggagttctcaccacatcatcctctcttgcctgtcagggacttcgctgactgctcactgatccacagtggcctcaaggccagggctgccttgtctcaaacacagtgggactcctgggcgtgtatacctcctgctggttttggggacactggta

SEQ ID NO: 789132 - DNA, 570 bp, Homo sapiens
agacccccgccaggcccagagccaagtgcagagcgtggcggcaccggcgctttattccctttgcccacagccggccgtctgggtggaaactggcttttcctcgtggtttgcaagaggaagtggcccaggagcgcggggtccttgcgcggcgaggcggggagggcggacgctcagaagaccgtcttctttgtttaggcaccggaggcggcccctggggcactgccctccctctcccaggcaagggtcctccccsaaggcctgatctgcccctttcgcctgaaggactggaactcttaagggcggcggcatcaaaaaaatgaccccaaccccctgcggctcgcgggatcctgcggcctttgtgtttctcgtgctgagaacgatttacgcccgcgcgtggctgcggggtgaggtctcaaacattctgctctgccggcaaaccagtgccacgggggattattctgcacgaagaatatctgttcactcactcagagcttccgtcatccttgaaatgtcttcccaaattttcacctcttgatgatgtctaactccgacaccaaccgcacatgggaa

SEQ ID NO: 789133 - DNA, 570 bp, Homo sapiens
agacccccgccaggcccagagccaagtgcagagcgtggcggcaccggcgctttattccctttgcccacagccggccgtctgggtggaaactggcttttcctcgtggtttgcaagaggaagtggcccaggagcgcggggtccttgcgcggcgaggcggggagggcggacgctcagaagaccgtcttctttgtttaggcaccggaggcggcccctggggcactgccctccctctcccaggcaagggtcctccccgaaggcctgatctgcccctttcgcctgaaggactggaactcttaagggcggcggcrtcaaaaaaatgaccccaaccccctgcggctcgcgggatcctgcggcctttgtgtttctcgtgctgagaacgatttacgcccgcgcgtggctgcggggtgaggtctcaaacattctgctctgccggcaaaccagtgccacgggggattattctgcacgaagaatatctgttcactcactcagagcttccgtcatccttgaaatgtcttcccaaattttcacctcttgatgatgtctaactccgacaccaaccgcacatgggaa

SEQ ID NO: 789134 - DNA, 570 bp, Homo sapiens
agacccccgccaggcccagagccaagtgcagagcgtggcggcaccggcgctttattccctttgcccacagccggccgtctgggtggaaactggcttttcctcgtggtttgcaagaggaagtggcccaggagcgcggggtccttgcgcggcgaggcggggagggcggacgctcagaagaccgtcttctttgtttaggcaccggaggcggcccctggggcactgccctccctctcccaggcaagggtcctccccgaaggcctgatctgcccctttcgcctgaaggactggaactcttaagggcggcggcatcaaaaaaatgaccccaaccccctgcggctcgcgggatcctgcggcctttgtgtttctcgtgctgagaacgatttacgcccgcgcstggctgcggggtgaggtctcaaacattctgctctgccggcaaaccagtgccacgggggattattctgcacgaagaatatctgttcactcactcagagcttccgtcatccttgaaatgtcttcccaaattttcacctcttgatgatgtctaactccgacaccaaccgcacatgggaa

SEQ ID NO: 789135 - DNA, 547 bp, Homo sapiens
atacaccaccatagtttgattgaaccttatagcaaataaatgatgtgaaaatatcaccaggtaataaaaaatatcagagggctttttacttcaatttaatagtatccaattcaattcattcatggataaggccataatttttatttttatttctggtgactttatgaagagattatcgaagtttcctttttttgagaatacaaaaccagacaaaggtaattcctcatttcggtctagtttttctgatgatatgttctttgtactatttacaaagacatcctttttaatacaaacaaaagatcatctggaagtatatgttttagagtgacagaaaataccaataaaaatacgttcaataataatggcataataccargtaacaatggctcattccttaaggtcactgtgatgtaatattgctgtgtttccacacaacattttgcattttgacattcctgaaaatcatcagtacagttttcagcaatagcaagttttactatagcattgtagcaattttaaccggcacaaattttgatttctacggtca

SEQ ID NO: 789136 - DNA, 575 bp, Homo sapiens
gggtgtccatcctctgaagcattatcctttgtgttacagacagttcagttacgctcttttagttactttaaagtgcacaattaaattattattcgctatcatcaccctgttgtgttatcaaatactaggtcttattcattctttctaacttttttttttacccattaactatccccacctccccactaaccccccactatccttcccagcctctaataaacatccttctactctgtgtctatgagttcaattgttttaatctttagatcccacaaataagtgagaacatgcaatgtttatctttctgtgcttggcttacttcacttaatgacctccagttccatccatgttgttgcaaatgacaggatctcatttcttttttatggctgaatagtacttcatygtgtatatgtgtcacattttctttatccattcatctcttgatggacacttaggttgcttctaaatcttggctattgtgcacagagctgcaacaaatgtgggagtgcagatatcttttccaaatactgatttcctctcagtatttggaaaagattgctggatcatatggtagc

SEQ ID NO: 789137 - DNA, 644 bp, Homo sapiens
gcagaaatctgattcaatgatttagactttacttataaaatttaaaaacaaacttaccatcttagatcactctcttaatctccagaaaaaaaagcaggaaggcacacarattttgaaaatgttattggcttttttgctcatagacatctaataatttgtccctatcttagaggtagttgtctatattttcttttgcatgcaaccttctggtaattaaggaagattcctaaaagaagtgttattgcattggtaaactctaccaagacaaatttaaccacaggaggaatttgcttatgaccaaataaacagaggtgctactgtgcttttcctgcctaactgggccagcttcccgcagcaacttgagaagacagcaaaggtaatgaacagccaccgaaaaaaatcatacatgcagaacccatcaccattttgctaagccagatgtaatagacctttatgattccctcttaatcaagggccatgaaataaaaatgtaactggctcatctgttaacttgaattaacaagaaacaactgcccacaatgcttaacagttcattagtcgtttttttttaaattaacttagttttaaagggacttggaactactgctaccattgagtgcagctctaatgctagtcagtaatct

SEQ ID NO: 789138 - DNA, 491 bp, Homo sapiens
agagggaaaaatcagttacatggcattttttacactttaaattttgataatggtacccttatgctcaaagaactagagaaaaaatcatgctactataaccttgaatgaggtttttaaaaatagtggcaatgttatttgaaaaagccaaaggaaatgaaatttttaaaattaaagtattttaaaattacaattgtttcaattacttagttttaatacckcgactaagtaatttactttttttctttttttttgagacagagtctcactctgtcgcccaggctggagtgcagtggcgctatctcggctcactgcaacctccgcctcctgggttcaagcaattctcctgcctcagcctccagaacagctggtgctacaagcgtgcgccaccatgcctggctaattttttttatttttagtagagatggggaatcaccatgttgcccacgctgaagtaatttacattttaattgattttactaagttaggtttgg

SEQ ID NO: 789139 - DNA, 572 bp, Homo sapiens
gtctcatggttatgaattttcatgtgcagaggggatggggcacatgcacacatcgacatgcttcagagatgactcagccagggtgggtgccacccagtaagatggcgttgtttctaaaatgcctgctcctccctcctgatttgcttccatcacatcctctgacatcaagamgtacatttagcacaaacaaggtagatgagaaatgagctgtcacagtttattcaccacattctgctgcaatttataaatcacagtacaattcaaaatgatttatttagcctttccatctaaaaaaaaaaagaaagggaaatgaaaaaaatatgaaggattaccagctccaacccaatcaatagcaaggaagcctgcttaactctgccaattaatcgtgtctcttggatatgagatgtccaatgacaggaggcttggagagaggttagccaaagtcaaaaccagattcaccgtcacttcaagctcaaggggtctagagttagctgctcccagctaaccattatcattggttgagggcactggtaggccactggattcctcagcttgttctgcagttctctagc

SEQ ID NO: 789140 - DNA, 671 bp, Homo sapiens
acagagaaaagaagagctttgtcccacatttctagcatagggaattttgatgtctgttctctatcaaatgattccattatgtatttaaataatagtacaccaaagattttcttaatcttttcaaaaatataatttgcccaaagatatyattaattccatgaatatttactgagcacctgacatgttccaaacactattctaggcactgaggatgcaggagttaatgagacacgatctttcctcaaaactctcccattctcttggaggggtgtcttagcctctgctgctgctcccccatggccccattgctgtccaagcccgctgcaaagtgcatctgattcactcttgagctccacagttcctggcagagttgatctctgaatcctttgctcctaagaagcaactattttatgtctcttggaacacccattaggacagggatccccaacacccaggccatgaactggtacagttccatggcctactaggaaccaggccacacagcaggaggtgagtggcaggccagcgagccaagggtcatctgtatttacagccgctccccattgctcacataaccacctgagctccaccacctgtgagatccgccctggcattagattctcacaggagctgaaattctgatgtcagctgcacatgtgagggatctaggt

SEQ ID NO: 789141 - DNA, 616 bp, Homo sapiens
ataaaaacatgtagctcagctgacgacaatctgttttaatttttcagatcaccagctattctaattatccaacactcagcaccatccacccaccatgcttcattgaactgatggcgcagggatgtgtgtgtgtgtgtgtgttgtgtgtgtgtgtgtgtattatacatatagtatgtacattaataaataatttcttccatcaaacataatttcatgaagttttgtcaatcaggcatcttttaaagatatatgtatgccactgtcctcagaagaagttaattcattcttgcaaataacatccaccaataattttaatagtttataagaaattactcttatataaatagggaatacatcaaattgtttatcactcagatatatcctrtaaggaattagttataatgtttaaaaagaatgtgttacatttatattcgttttaatgacttattgtaataacctgacaaaattaggctattatgtttggctttaagttatattaaaaacatatataagggtttcattagtttaaataaagccattattgtatataaactaatttgaattaaattatgtgttctaaaagccaaagtattcagttgtaaaatatcaatttaat

SEQ ID NO: 789142 - DNA, 576 bp, Homo sapiens
acttgtcccagagaccaggcatcattagagtggtcctgaatggtgcctggcgatggtgccatgaactcagtggtactttggaggaggtgccaagccctgtcatggacagatgagacaggcccattttgcacactcctgactggtgagtgaggaagcgaagacctcacctgagagagcccagaaacacaaaagcaggtctccaaaagccggcatctccttggctcccagtcctcagcactgtgggaggctctggggctgagagcctaaaatcctcaaggggaacggaaggttgatgggcttcatcatcactgacctgcttcaggatgtccaaatccctgacagcacagtcttgttttctgaccccaaggccactgttgamccagcttgtgacctcatcatatctgacaggcaacaactctgaacgctgtagctgcttcctgagcatttgttcacagcagggacacctgacaacctggaacacttttctttgttaaggatcatggtttacatgtagtggaccaatactagttaacagacagcatccccagcattgtgcatatagtagccaagttagcc

SEQ ID NO: 789143 - DNA, 587 bp, Homo sapiens
gtagtctgtctgttcattctgttgcttgtttcttttgctgtgcagaagcactttagtttaagcccatttgtctatttttgttcttgttgcctttgctttggagatcttagtagtaagttctttgctgaggccaatgtccagaagagttttttctaggtttccttctagaatgagcactttctttttctattagcacaaaatatatttatgtatgggagataatttaatccatgraagtagatagactaataaagagaatgtcacagaaagaaaggttcaaggtgggatcagaacaaataagaatatttaaaggatacagagagtagaaaaactgtgcagataggagaagtaatcagagactagaaagatcactgaggaagtataatatcgtgagaaggaaaaccaatgttaaacaaggtaagtgagcaagatttttcactttagaaattaatggattattagtgacttcatcaagagaaattccactagtggttgtgtgggtatgggacagagggatcaaatccagaacacagtgggtctgagagtgaatgttggggtgacaaagtgaagacagcaaatactgatta

SEQ ID NO: 789144 - DNA, 624 bp, Homo sapiens
tggctttgccattgttaaacagatggtctggcgcaaatagagaagatcaattagcttctcctgatttacatatttttctaataaagatccttttttgtaacaaagaggcatatgatacagatagaatttcccataagaagaattatattgagttaaattactttcttcttccaaattggatgagcaaatcagatgtagcaaacctttatgtcatcgtgtgctctgtgactttagccaaggtatagaatatgaaagtctgctgttgtaatattcctaaactttacatatacatgagrtaaatgtaaatggtctaaacatttctattagaaggcagagattgtaaaaatgactaaaaaagcaagacccaataatatattttttacaataagtgcactttaaatatacagacctaaatcatttaaaagtaagaataagaagatataaggtatcatgctattatgaactaaatgtttatgctcactgccccctccccccacaaaaatcatacatttaaaccctaatccccagtgtgatggtatatggaggtgggggtctttgggaggtaattaaggtacattaaatcatgaagatagacttctaatgataggattattatccttataa

SEQ ID NO: 789145 - DNA, 624 bp, Homo sapiens
tggctttgccattgttaaacagatggtctggcgcaaatagagaagatcaattagcttctcctgatttacatatttttctaataaagatccttttttgtaacaaagaggcatatgatacagatagaatttcccataagaagaattatattgagttaaattactttcttcttccaaattggatgagcaaatcagatgtagcaaacctttatgtcatcgtgtgctctgtgactttagccaaggtatagaatatgaaagtctgctgttgtaatattcctaaactttacatatacatgagataaatgtaaatggtctaaacatttctattagaaggcagagattgtaaaaatgactaaaaaagcaagacccaataatatatyttttacaataagtgcactttaaatatacagacctaaatcatttaaaagtaagaataagaagatataaggtatcatgctattatgaactaaatgtttatgctcactgccccctccccccacaaaaatcatacatttaaaccctaatccccagtgtgatggtatatggaggtgggggtctttgggaggtaattaaggtacattaaatcatgaagatagacttctaatgataggattattatccttataa

SEQ ID NO: 789146 - DNA, 605 bp, Homo sapiens
ttgcttgctaggttttttttaaagaaaaactttgaatatgtcattccactctcttctggcctgtaagatttctgctgagaaaaccactgataatcttatgggagctccctttgatgtaccaagtcacattttctttctgctttcaagattctttctgtctttgacttttgccagtttgatkataatgtgtctttgtgtcattttggatttatcagagttgtagtatgtttaacttcttaaatttggatgtctattttcatcctcagattagagaagtttccagccattatttattcagataagttctctgcctctttctctttttcttttcttctgggtctctcataatgcatatgttggcccagtcagtgatgtctcataagtatcttatgatttcttcatttctatctgattggtattatagaaaataatatcacttatattattatctaccttctgattagatgacttcaaatgacttatcctcaaattcagcatttttttttcttttgcttggccaagtctgttgaacatttatagtgaatttttcagctcagttattatatacttaaagtccagaaatttttttttaatgtgtaattcct

SEQ ID NO: 789147 - DNA, 605 bp, Homo sapiens
ttgcttgctaggttttttttaaagaaaaactttgaatatgtcattccactctcttctggcctgtaagatttctgctgagaaaaccactgataatcttatgggagctccctttgatgtaccaagtcacattttctttctgctttcaagattctttctgtctttgacttttgccagtttgatgataatgtgtctttgtgtcattttggatttatcagagttgtagtatgtttaacttcttaaatttggatgtctattttcatcctcagattagagaagtttccagccattatttattcagataagttctctgcctctttctctttttcttttcttctgggtctctcataatgcatatgttggcccagtcagtgatgtytcataagtatcttatgatttcttcatttctatctgattggtattatagaaaataatatcacttatattattatctaccttctgattagatgacttcaaatgacttatcctcaaattcagcatttttttttcttttgcttggccaagtctgttgaacatttatagtgaatttttcagctcagttattatatacttaaagtccagaaatttttttttaatgtgtaattcct

SEQ ID NO: 789148 - DNA, 654 bp, Homo sapiens
gtgctttacatccacccttctcagaacacaagaccctccctagatccctgaggattgtgggcattcctagcacactccagagttttacttttttgttttgttggtgaggaggcagttatgcaaaggtgggagagaagtgagctcgggtaacaccaccaccatgataactgtcatgaaatttcatcaattctttcactgctttctgtttgctcacccctccccgactctctctgttgtactttcattgtaagagaagaagccatgtctctgttcccaccaccattcctgacctggagcgaacattcaacaaacgtttgtggactgaatgaatgatgggactttactccatttcatcacttcccattttccattctctatttttcctccttttttgctgatggttcactctttatttttttggaaagccagttctaagataaacagtagcaaaagcaatagctgaaataaagacaaaagamttagtttctttgaactgtttttattttacaatttgatattacattattaaattatgttactgtttcctaacacattttcctttgtgtaactcacttatcaccatttggctccttgtaggtgcataaaataattttctctttgattgtaatgaactagagtaagggtacaactgtc

SEQ ID NO: 789149 - DNA, 619 bp, Homo sapiens
ttaaatgtaattcgaaagttgaagtttgaaaaatggtttgaatactaagcactaagtaggcacccctcaaaaatgttattgtcctaatcacccaacaaagaaagcattgttggactaggtatataactttgcagggtcagtgttctaaatagcaatactgatataaatagataaattatgaaaattttagtctttaaattgtttgctgactataatctgattgtcttcatgcccagagaaaaataaataaatataataagaactatcggaaagtactttttagaccttcaggtatgggcactattacattctagttttgatctacaagtatgaatattatcaaatagttggtcaatggttgttgatttgaaatttttcatgtagcatcattcagarggtataagcagtataaccagatcccagaaaggcttagtaacagtacaagggaaacaatcctagaggtttttattaattgaaagttccatatgtgtcagcagagtttcatggttgccaaaaaaaaggtaatgaaatctcaggcttcagaaactaaagtagagtgttcattgtaatgtgggcccagtcatgctcaaatgcgcactgataaggaaacctggactct

SEQ ID NO: 789150 - DNA, 555 bp, Homo sapiens
atcaactctgtacatcactgagacaaaacttgctcttcctgtcaaggtcctccatggaaaacaacagaagtaagactcgtgctgtctctatctcatttccttggaatgaaagtcgtcttttgtttagcatacgcactgcaactctattatcctcctgcttccatccttgactatacaatattggtgayagtccattttccggcacctgttataaaacagatgcattccccccaccatttaattcagttaatgttcctaacagttttgtgcaaagtatctcagtcaggttctccacacgaagtttctcaaaagtgtacacatgtgaataacactaaactaacttctacttccatataattctgtcacaaggtcacacaaaaaaactaaacagaaaaaaaaaatccagcttctgggagggctgcagttttgcaatcatttgcaaatagtccataagtctcatcagagcttgcttcactgttaaatcaggtcaaacaagaagaaaactatgacggtagcagggctgttcaataagggcagattcttcatcctcctttt

SEQ ID NO: 789151 - DNA, 555 bp, Homo sapiens
atcaactctgtacatcactgagacaaaacttgctcttcctgtcaaggtcctccatggaaaacaacagaagtaagactcgtgctgtctctatctcatttccttggaatgaaagtcgtcttttgtttagcatacgcactgcaactctattatcctcctgcttccatccttgactatacaatattggtgacagtccattttccggcacctgttataaaacagatgcattccccccaccatttaattcagttaatgttcctaacagttttgtgcaaagtatctcagtcaggttctccacacgaagtttctcaaaagtgtacacatgtgaataacactaaactaacttctacttccatataattctgtcacaaggycacacaaaaaaactaaacagaaaaaaaaaatccagcttctgggagggctgcagttttgcaatcatttgcaaatagtccataagtctcatcagagcttgcttcactgttaaatcaggtcaaacaagaagaaaactatgacggtagcagggctgttcaataagggcagattcttcatcctcctttt

SEQ ID NO: 789152 - DNA, 639 bp, Homo sapiens
aatacgactaacaggacactaaataaaaataatagctaaaatataaactgatataaaccataaaattatgaatacaatattgatgctatagactttatgatacaaattaatatgaattttattatagtaaatatttcaagtaaaaagtcccacaagagtatttcccttatatttaatggtttcggtttttaagctgaaaatcagtaaaatattttaaagaaaataaacattttcgatatttcaaatttatgaagagtaataaatactaacaaatcacctagacaattgtaaggcattaattttaaaataatcaagcattttgttgtgcttcttttgacaggaaatatttgaatgaatatttatcaaagcatgaagtcagtctacatcttatttttgccataaataaaaaaatatgtccaaaatgtgaacatattttattgttactgtggaatgtaacataaaarttttctaaaattgtttttcctaaataaggaagataatttcattatggcaaatatttttaaaagtcagcatccctctcctctggcagagaatctatgtaagtgatcttgaaagacagtgtaacattactcacaaaacagccagaatgaatgaaataaacaatgttctcctgcatca

SEQ ID NO: 789153 - DNA, 568 bp, Homo sapiens
ggaagtgaataagtcatgagggcagaatcctcttgaatgggattaatgcccttataacgggcataagggagtaagtactcctttctgtcccttctgccatgtgaagatacaacgtttgttcccttgaaggctgcaraaatgaggtgccatcttggatgcaagcaaagaacagtgctcaccagacaactgaacctgctggcatcttgatcttgggccttccagcctccagaactgtgagaaataaatttatattatttataatttaccaagtctgtgatattttgttatagcagcacaaacagacattctccatctttaatatcacctgacgtcatctgctctactttttgcaaagcatttaccatcgtttaatatacaatataatttacttacttctcatagtaaaatgtaagaatgttatgaatataacatcttcaaatataaaatcagactgtaaactcaacattagcaggtagatttgtctgtttttgttaactgatacatcccaagcacctatcatataatgaaaagtcagttaatatgacattaataaataaaaatgtgtcta

SEQ ID NO: 789154 - DNA, 502 bp, Homo sapiens
cacataaatacttaaaattaaacgtctgacaaaggttagcaagtcttctatttgttgtccagtagaaatccaaactagacaaaacaaaacaaaaatttaggaaaaaatatagctccaatctacaagtttggcgtttggattagttkttttgtgttttaaaatgatggacataatatagatgcagtcactgccaatataattatatataaaatcacatagattgttaaaagcaagctaggataatgcagttcagaacaattcttgtttatttatacatgagtttctagaagaggggaagtgatactaagtttgattagcatcaacgatgtaccataaaatttttgaaaattttgtctacttaatgcttataataaccctatgatatagatgtcattattcccatttaactcatgaggaaactgagacttactgttcaagctaccaaacagtttgttggagacacgctaagagccaggactgtctgactctgaagttcctgtct

SEQ ID NO: 789155 - DNA, 502 bp, Homo sapiens
cacataaatacttaaaattaaacgtctgacaaaggttagcaagtcttctatttgttgtccagtagaaatccaaactagacaaaacaaaacaaaaatttaggaaaaaatatagctccaatctacaagtttggcgtttggattagtttttttgtgttttaaaatgatggacataatatagatgcagtcactgccaatataattatatataaaatcacatagattgtwaaaagcaagctaggataatgcagttcagaacaattcttgtttatttatacatgagtttctagaagaggggaagtgatactaagtttgattagcatcaacgatgtaccataaaatttttgaaaattttgtctacttaatgcttataataaccctatgatatagatgtcattattcccatttaactcatgaggaaactgagacttactgttcaagctaccaaacagtttgttggagacacgctaagagccaggactgtctgactctgaagttcctgtct

SEQ ID NO: 789156 - DNA, 622 bp, Homo sapiens
tttttaaattttggaattagggataagaaattgtggacctgtaggtaacatttgttgcagtttgctgtatgccagataccatgctaaatgccttatacattatctcattaaatcctcacaataactttataaggtagatacgtctgttattcccattttgcaagtgggggaaacgaatgcaaagaggagttaagtaacttgcttgtgatcacacagctaattaaatagtaggctgtgaaccaaaactgaaattaaccaaatgcctttatgtgtcaggcattgttctgagtactttacatgttctmattcatttgatctgcatgcaaccctttaagatagtcgccattattatccccacttaacagctaagaggcagcagggagattacataacatgcccaaagtccagtctgttagtgtgattccagagcatgtgtgcccagccactgtctcatgtagtgtgatttcttagcaatgaaacaaccaactgtgagattcagcaaaattaatttctaccttaaaggccagagaagctctccccactgattccctcagacattggttttgatgttgccgtccttagacttggatctattctgtgcagattttggaatttctttata

SEQ ID NO: 789157 - DNA, 468 bp, Homo sapiens
aactcttagaaatgaaaagataaatccaattttaaatgggcaaaggatttgaatagatagttctccaaagatactcaagtggccagtaagcacatgacatgctcaacatcattagttcatttttatattggattatttgtctttttgctaagttgtaagaattttctatgtattctggatactagacccttaycagatatatgatttgcatatattttctcccattctgtcagttgtcttttcactttcctacatcctttaaagaacaaatatctaatttttatgaagttcattgttgtttgcttatgcttttggtgtcatatctaagaaaacattgcccaattcaaggtcacaaaaatttacatgtacgttttcttctaagagttttctagttttctctcttataattcagtttttgatccatttggaattaattgcaatgagaaatcataatgtgtattgttcaat

SEQ ID NO: 789158 - DNA, 625 bp, Homo sapiens
ttctatactatttcatatcctcttcatcttatttatgaatgaaccaaggcttagggagccttcaaccttgcctgaggttacattcatctttaaacttccagcccctagcacagcaatagcctcataagcacacacaatagtccgttcagtgcaaaatgagtgcacgatggttgtgatcagccagaacaagtggaaatccagatcatgtttgcattccacatgtatacagatacctacacatgcaggcttgtagacttagtttacttttagaaaagttttatgcagtcagtattccttgagaataaagcttttagacacatgcaatgaattttctcttgtgaaataattattcacaccatgataacttcagtactagtattctgctgaaatttgatgaatttgagtacagcaaactcaatkagctatattctaggtttgaacctcgtaccatcctagtttttggatattctgccaaatttattaaattgagggcccaatacattttttatgtgaagattttgtttccattattttgataaaaaatgaatttagcaatgaaatagaagcagttctgctgaggatttatgtataatataataacacatttcacccattcagtgagact

SEQ ID NO: 789159 - DNA, 629 bp, Homo sapiens
ttttaggtaagaacaattggtttattgatgagtctatggtaaatgtgaaagaactagtaagaaattaggaaactcaagtatattgctctgaaataattacttcataaaatatttgtaatgatggaaacatcaagattgaggaaacatgaggttatttatctcccattcaatttctggtcagaccaaattatttaagagtgtattagatacttgcactatcagagagtgttgtgtgtattaccaggcattgctgtgcaatgagaatgccttgtgctgtgggattctggtctggaaagacataagaacagagatgacttcccaaagatttttgatgctctactgtaattctcctaaattatttgaaatattttcatttctttcccaactgtaagatccttartgaaagagattctacactcttgccagttgaagagccaatttctcttatcaggaagttcctgataaactggatatctcctgcttctacttacttcagcttcttcttgctcagccttgagtgggagtacagaaccgaagggaaagtttattgttctttcggtagtaatccctcacaaaataaagcaatcttgggaaaatgcacactgcagcatcaacctgggtaatctgag

SEQ ID NO: 789160 - DNA, 599 bp, Homo sapiens
aaaatgcacactgcagcatcaacctgggtaatctgagcttagaggcagggcaattaacaaaaagagagaaagtgagaaaaaaatataagatagttttagaattaatgactgcattattatttaacacattaagaaagggttctaagttgtaagagtttgtctaatggatatgggttgagggtatgtaccttactagggwgctggcaagacacatgggaaatgtaaaatagtggaactatgataaatagaaagttggctgggtattattttggaagaaataaagtgttgggaagaaacaaagtcatttgtaaattcaagaaccataaatgcaaggagatggttgaagtatcttaaaaaaaagaaatccatggcaggaagaaaaaggccaggggttgtgcaggagttaccacacatgaacttgctgaacaagattctttcatgtcaattggtattacatttttatcatcttgaaggaatttggatctgatggtgatgaatgtcacattctctttcctaaaaccataaaatggaaacaacacaatgcaaaggctctggattaattattttgtgcgtcattaacttctccacaattagaagtc

SEQ ID NO: 789161 - DNA, 490 bp, Homo sapiens
catgcgcccatgtattctcatcatttagctcccacttacaagtgagaacctgtggtattttattttctgtgtctgcattcgtttgctaaggataatggcctccagctccatcaatgtccctgcaaagaacctgacctcgttcttttttatgtctgcatagtgtgtcatggtgtatatgtactacattttctttatccagtctgtcattgataggcatttaggttgattccatgtctttgctattgtgaatagtgctgcggtgagcatgcatgtgcatgggtcttcatactagaatgatatatatttctttgaatgtatatgcagtaatgagattgctgcattgaayggtatttctgtttttagatctttgaggaattgccacactgtcttccacaatggttgaacgaatttacactcccaccaacagtgtataagtgttttttttttctccacaaccttaccagcatctgttattttttgacattttaat

SEQ ID NO: 789162 - DNA, 598 bp, Homo sapiens
gggaggcagaggttacagtgagccgagatcatgccattgcactccagcctgggtgacagagcaagactccgtatcaaaaaaaaaaaaaaaaagaaaaaagaaaaaaaaggggaataacttatctctttcaataagacattctctcgtagaaatattcctactaaatcaactgtcctgttcgctrtgtttaattacctaggttttcttatattttctgtttacaagaaacagaaagattcttacagagaatctgtaaggcccagatttactgttaaggccacatgagtgacaattaatatatgtcctttgtttatctgtatgtttatatgtccttattatctggaagataataagatgggaaatgggagctcttttttcttgtcgatatcctatggatgctatgttatttactgatgaaatatggtctttctccagctatgaacatggaacgtttacaagtatttggaaaacttgagcgattacatatggtaattgacaatatctttttagttgtaaccctctctttcactacctaatttatgacttagtttgtaatcttatggcttaatttcagcacccatgaacaacgaattctaag

SEQ ID NO: 789163 - DNA, 465 bp, Homo sapiens
gttgtgcaggagttaccacacatgaacttgctgaacaagattctttcatgtcaattggtattacatttttatcatcttgaaggaatttggatctgatggtgatgaatgtcacattctctttcctaaaaccataaaatggaaacaacacaatgcaaaggctctggattaattattttgtgcgtcattaacttctccacaattagaagtcccccccttycacatctctcaagccaattatgcattacacagtaggtgatggctgtgcaacagtggaaaaattggcacaactacaaggcctttcttatcttttctttttactatagccaactattcatttacaaggtaggtctaggtctctggtgcaactctcttgggataacttatgttgtatgaataatccttttcacatatttccatttatcttttcattcactcagtaagcgtttacttgatgtctaataggtt

SEQ ID NO: 789164 - DNA, 465 bp, Homo sapiens
gttgtgcaggagttaccacacatgaacttgctgaacaagattctttcatgtcaattggtattacatttttatcatcttgaaggaatttggatctgatggtgatgaatgtcacattctctttcctaaaaccataaaatggaaacaacacaatgcaaaggctctggattaattattttgtgcgtcattaacttctccacaattagaagtccccccctttcacatctctcaagccaattatgcattacacagtaggtgatggctgygcaacagtggaaaaattggcacaactacaaggcctttcttatcttttctttttactatagccaactattcatttacaaggtaggtctaggtctctggtgcaactctcttgggataacttatgttgtatgaataatccttttcacatatttccatttatcttttcattcactcagtaagcgtttacttgatgtctaataggtt

SEQ ID NO: 789165 - DNA, 564 bp, Homo sapiens
gacatgcagcagctctgcctgttgaggcacctgggcagtttgttctcaggtcctgggagtgtgcctgctggcttccctgctcttggggaggcctccctgctgtgctgtactgcttgttccttgaggtatagagcactgtgtgggctcaggtgctggggttacagctgtaccactgggtccagttgtggatgtggcattgctgcytattgtatgagtgtgatgggaagagggaagtgctccagagaagtggagatgcagaggctcttgggtcccagggaaggatgcactgtagcagtgactttgttctcaaagtaataccatgctctagcagcttgggtcccagggagttgggggatgacatagcattagtttcttctctggattaatgcagccatgtgactccaggcagctctttataggctcagagcttgtgagagttatgacactctcctgtagctaggactgcaggcatccatggtagtaatggacactgctggggatatcctgggaatcttttccccacaatggagagtcacttctgactccaggccaatcccttccagg

SEQ ID NO: 789166 - DNA, 613 bp, Homo sapiens
gcacaacttatatcacacatacacatttataatgctagctctagagggagccagcacatacagcatttaccaaacttgttgagccataaaattctgcttccaaaggactggaattctttgcaaaaccatttgggaaacactagactacgagctatctgctaggtggttgaagccccaggagaccactctagctttgacattctaactagccagcaccatcatgggcatcagtccccaccaagtgrtaaagactgggttgttctctgttctcaacatgtgataatatcatctcacaattcagtcacatcaaaatttcccaagtcccaacagacacccttagcagaggtagcccagtgcaggtacagtcaacgggaatcaagcaatgttaaacaactggctgtccctttccaccaaacgtaaaacaatgataatctagtgcaactgggcttttaagttcaccaggcaatcttggatgcaatgatatatcattatctcaacaacccaatgagataggcagcattccattttgtaggtgatgaaaatggtgcttacacagctaaagtgacttagttgctcaaggtcacacagttactgggacttaacctcaatcttt

SEQ ID NO: 789167 - DNA, 579 bp, Homo sapiens
tatgtaaataaacatacttacttcacaatctttaagtctttaaaaattatgtccttaagaaagtctcaaatgtattggccttatgtttctattttgatctctggctccatgtgttaatgactctgatatttttctgacaaataaaaggttttaaaaattgctattgcttatttgggttcttcctaggttatttcttctcattagtaacatttctggggaaagatgtcatgctcttagtgtgcatccaacatgaaaaaatatttcaaaataaaacaatagtaattttttaaaaaccctcttacctttgaaaagaaccatcgccttatgccataatcttcctcttgctatttggctgtggttattttttaggattggtatatgtctggcatctasaagacattaaaatatttttaatgaagagtcagtgtcatgtgggaggaaaaaattcgtatcctgggatatgggtggaacttcatgaaagtgattgtgtctttcttatccaagggaagaagtttttgttctttctgaatgaacttgagggaaaaaggcaatcaatgtttttccagtgtaacctgatag

SEQ ID NO: 789168 - DNA, 579 bp, Homo sapiens
tatgtaaataaacatacttacttcacaatctttaagtctttaaaaattatgtccttaagaaagtctcaaatgtattggccttatgtttctattttgatctctggctccatgtgttaatgactctgatatttttctgacaaataaaaggttttaaaaattgctattgcttatttgggttcttcctaggttatttcttctcattagtaacatttctggggaaagatgtcatgctcttagtgtgcatccaacatgaaaaaatatttcaaaataaaacaatagtaattttttaaaaaccctcttacctttgaaaagaaccatcgccttatgccataatcttcctcttgctatttggctgtggttattttttaggattggtatatgtctggcatctagaasacattaaaatatttttaatgaagagtcagtgtcatgtgggaggaaaaaattcgtatcctgggatatgggtggaacttcatgaaagtgattgtgtctttcttatccaagggaagaagtttttgttctttctgaatgaacttgagggaaaaaggcaatcaatgtttttccagtgtaacctgatag

SEQ ID NO: 789169 - DNA, 474 bp, Homo sapiens
atagattgattaattttttttttttttttttcacagaaaagactgcttctggaagtgggctttttccttttttgttgtcttattttgttggttttttaataggcttagaacaattcagggacagaagggtccttaaatatcatcccctccagccccctgacccatggagtggctgcagtgttttctactgatttagtcactactgtgctttataacagaggcatcaagatatgcaagaatcaggcagagcaagtgttarctaaagcaagctagctcaccttaccagaaggaatttaaagttcagaatcaaattccttacgaatgaactgtccaaagggattcctaatcactttgccattcgatgcaccaccttatttttttttatttttattattatttttttttagtatttattgatcattcttgggtgtttctcagagagggggatgtggcagagtcataggataatagtgg

SEQ ID NO: 789170 - DNA, 474 bp, Homo sapiens
atagattgattaattttttttttttttttttcacagaaaagactgcttctggaagtgggctttttccttttttgttgtcttattttgttggttttttaataggcttagaacaattcagggacagaagggtccttaaatatcatcccctccagccccctgacccatggagtggctgcagtgttttctactgatttagtcactactgtgctttataacagaggcatcaagatatgcaagaatcaggcagagcaagtgttagctaaagcaagctagctcaccttaccagaaggaatttaaagttcaraatcaaattccttacgaatgaactgtccaaagggattcctaatcactttgccattcgatgcaccaccttatttttttttatttttattattatttttttttagtatttattgatcattcttgggtgtttctcagagagggggatgtggcagagtcataggataatagtgg

SEQ ID NO: 789171 - DNA, 575 bp, Homo sapiens
acctcattttaaaatttaacttccaagagatttactcgacagcaatctattaatctacttgtaacaatgatacatttcattttggtttttttgagtcagatttccctccctagccctctgtcattccttaaatggctttgaattacgaggttaatgtctcattttactaacctattttgtaaatttattgtattgaatattcttgaaattatgggccttgaatttccatttttttcaacttttattttagaattagggggaacatgtacaggtttgttgcaytgacatattgcatcatgctgagatttgaagaacaaatgaatccattacccagctagtgagcatataccccaaaggtagcttttcagcccttgcccttctccctctcccctcatctaatagtctccagtatctactgttcccatcgttatgtccatgagtacctaatatttagctcacacttataagggagaacatgcggtattttgttttgtttctgtgttagtttgcttaggataatggcctccagctgcagccatgttgctgcaaaggacaagatttcattcttttttatg

SEQ ID NO: 789172 - DNA, 594 bp, Homo sapiens
tgcattccaacattaattcaaaagtccaagtccaaagtctcatctgaaacaaggaagttccttctgcatatgtttaaccaaacctgcatcccagaaatgaagcctacttgatcatggtgaatttattttttaacgtgctgctggattcagtttgctaatattttgttgagaatttttgtgtctgtgttcatcagggatattggcctatagtttcctttgtcatgcgtctttgccaggttttggtatcagggttgatgctggctttattgaatgagttaggagaaagcccctccttctcattttttggaagttttggtagaattcataccagctcttcttcatgcatcttgtggaatttgactgtgaagcaatctgttccaaaggatggataaaggaagcctgtaaaatcccaagcatgttagttcctttattatacaatgggggtacggkcattggataaatgctcccattccaaatgggagaaattgaccaaaacaaaggggctacaggccccacgcaagtctgaaatcaaacagggaagtcattaaatcttaaagctccaaaattatctcctttaactccatatctcacgtc

SEQ ID NO: 789173 - DNA, 636 bp, Homo sapiens
tgaaggacattttaaaattgatgatatcccaatgagcactcacctgggcctctactagggcagtaatgggagtaataggaataaggggacaaaggccaatcagaatccatcagaggtggattctaaaagttgtgtgcccaactagatgcagagaaagggaagaggtacatgactctgaggtttctaatttgagtgacttaatggatggcaatgccctggattggaaactcaggaggagtgggttttaatagcagaaggaaagcagtggataaggtaaaatgggtttggtttatggttttttgaatgggacatcccagagggattcccaggtaaaaatgackgggatgcagatataaataaaacttcataactcaagggtgagtgagggtgaatcatggttaaagagaaatagtttttaatccacaacatctaaatggtagttgaaaccagggtgatgagtaccatcttccaaggaggatatacagagaagttgaagacagttagttatagaacaaaaacaaaaattaaagaagtaaatagagatttgaaggaaggagcagagagagaaaaaaattgttagatgatgtttacatatcttgtgggcacctcaaagacaaaaactgtcttacatgtatt

SEQ ID NO: 789174 - DNA, 603 bp, Homo sapiens
acactccaaatgacagaaaaattcatgggtaaaaatatactaccagaaatgaccaagacaacgtgttcttacttcgttttgttgggtttcaatgatagaagcaaagggtatttctttttatttttttgtttcacaactaaaagtagccaatagtataaaatgtctctttttttcattaggcaaaacaggcgtactgggttgcttttgctaagctaaatggttttacagttgatcctcattatctgtggattctgcatttgtgaatttgcctattcaccaacatgtatttttagtcccaaaaccagtattygtggtgctctggaggtcatctgcagacatctacagagtggtaaaaaatttgagtcccaggatgtgtatgttcccagatgaggtggaacaaggtgacactctgctttcttctttcagctctcttattgtaaataagtgtcctttttcacagtctagttagtgccatgttttcacactgttgtgttttttgttggtgatttcactttaaaatggccccagacatagtactgaagtgctgccttgtgttcagaagcccaaggaagttgtgatatgccttacagaggacaatacgtg

SEQ ID NO: 789175 - DNA, 646 bp, Homo sapiens
aatgggtgtgacctattttaaaacaaggatgtatggattaatgacattaaatatagcaagtaaagagttaagactgtgttttatccttctacacaacttctgtaatctataaacatatgtcacgttcattatttttatctggaggccataaacatgtcctgagcacacsaaggtctcctacagtgtaaaattcagctgttttcctctccatttccttgaaggtgatgcccagagatgttaatttaggctgggtccagccatcaggacacaatgctcagaaaataaagatgagtacttagggatcccattcttggcttcaacataataactcagaagttacctcgaagccacagtgaatctgaattttacaaaaacaataatctttatgattcttgggcaccacaacctgaaccaaaagggctggcagaaacataccaagcacctaatcgggttgtgaagtagaaccttcagtatctgcttcagtaaagggctaatttttctttcctccctttgttgctgccaagatgaaggttttcctgacaactcggcaacttcacctgtcctttcaatgcctcggggcacctacaaaagttcaggaataagtgtcctcagagagatctttccaaaaaggaaagacattcattta

SEQ ID NO: 789176 - DNA, 646 bp, Homo sapiens
aatgggtgtgacctattttaaaacaaggatgtatggattaatgacattaaatatagcaagtaaagagttaagactgtgttttatccttctacacaacttctgtaatctataaacatatgtcacgttcattatttttatctggaggccataaacatgtcctgagcacacgaaggtctcctacagtgtaaaattcagctgttttcctctccatttccttgaaggtgatgcccagagatgttaatttaggctgggtccagccatcaggacacaatgctcagaaaataaagatgagtacttagggatcccattcttggcttcaacataataactcagaagttacctcgaagccacagtgaatctgaattttacaaaaacaataatctttatgattcttgggcrccacaacctgaaccaaaagggctggcagaaacataccaagcacctaatcgggttgtgaagtagaaccttcagtatctgcttcagtaaagggctaatttttctttcctccctttgttgctgccaagatgaaggttttcctgacaactcggcaacttcacctgtcctttcaatgcctcggggcacctacaaaagttcaggaataagtgtcctcagagagatctttccaaaaaggaaagacattcattta

SEQ ID NO: 789177 - DNA, 646 bp, Homo sapiens
aatgggtgtgacctattttaaaacaaggatgtatggattaatgacattaaatatagcaagtaaagagttaagactgtgttttatccttctacacaacttctgtaatctataaacatatgtcacgttcattatttttatctggaggccataaacatgtcctgagcacacgaaggtctcctacagtgtaaaattcagctgttttcctctccatttccttgaaggtgatgcccagagatgttaatttaggctgggtccagccatcaggacacaatgctcagaaaataaagatgagtacttagggatcccattcttggcttcaacataataactcagaagttacctcgaagccacagtgaatctgaattttacaaaaacaataatctttatgattcttgggcaccacaacctgaaccaaaagggctggcasaaacataccaagcacctaatcgggttgtgaagtagaaccttcagtatctgcttcagtaaagggctaatttttctttcctccctttgttgctgccaagatgaaggttttcctgacaactcggcaacttcacctgtcctttcaatgcctcggggcacctacaaaagttcaggaataagtgtcctcagagagatctttccaaaaaggaaagacattcattta

SEQ ID NO: 789178 - DNA, 611 bp, Homo sapiens
tatttattcagagaaagatttttaaaaaattatgtctttgaagcttctgcaaattgtcagtttcatattgaaaatctgtgatttccataatttatataaggatctttctcgtgctgtcactcacaagactgaaaaaacttgttttagatgccaataacgtccattttctctagagatggmaaataattccttctaattcttccccacgagcacgcccatttctcctgccaacaacatcacccaagtgactgtatctggtcatgagttccatagaaggatttgatttcctgcatttctaggactcacctgtgtggtatttgtgtgaggactcttttaaaataggatggaatggcaccttttgcttatttgtaacttagttaaggcaaagaaagctttcattgaaagcatttgattgttggctcttgtgactgagcaaaggcccccgtaattgggaaaagatggcatttcactgttctcttctcccatgtggaaatacattcggaaaggcagggcaatttactgactcagcgaggggctgagagtgactgaacacgatctctggacctcctaattctgtaattacttcctttgacgtttttgtctctgcagat

SEQ ID NO: 789179 - DNA, 676 bp, Homo sapiens
gcaagtcaagttgctgagagtattacattatagtatatgtaccaatggcatttggttttaatagggagatatacattatatctctcacttaaaaaaatcataagcaatttgatatgcatttttacttctgaaatagtctcamacagtttctaaatttctgctattttaagagatgaagattttttgttcttaaagacctataaagccaggaatttctgtaagttatataaaatttacaaagtcatcttaaacagggatgcatttatattatagaggcctatgaaaatgctgtcaaactaacaatcagaaggccttaagagaagaaatcaagataaagacagaacagcaatagccaactaaattttctgatgcataaaaggtaaacttgaaaaatttaatcccacaatcaatggcttaactaaaaaagaaaaaaattcctggatctatgaaatgtgagataaaagaaaaaacaaaatgtgtatgtaaacttttttattactaatattcagccccaaagtagttagaaataaatgacatcttcaagtgtcctctctatatccaaaacaaaaccagggcttttcatgactattaaactggctcacagaactattataaaattagatgtcatattataatagttatttcaggataaataacaatgatctaaagcagccaa

SEQ ID NO: 789180 - DNA, 676 bp, Homo sapiens
gcaagtcaagttgctgagagtattacattatagtatatgtaccaatggcatttggttttaatagggagatatacattatatctctcacttaaaaaaatcataagcaatttgatatgcatttttacttctgaaatagtctcaaacagtttctaaatttctgctattttaagagatgaagattttttgttcttaaagacctataaagccaggaatttctgtaagttatataaaatttacaaagtcatcttaaacagggatgcatttatattatagaggcctatgaaaatgctgtcaaactaacaatcagaaggccttaagagaagaaatcaagataaagacagaacagcaatagccaactaaattttctgatgcataaaaggtaaacttkaaaaatttaatcccacaatcaatggcttaactaaaaaagaaaaaaattcctggatctatgaaatgtgagataaaagaaaaaacaaaatgtgtatgtaaacttttttattactaatattcagccccaaagtagttagaaataaatgacatcttcaagtgtcctctctatatccaaaacaaaaccagggcttttcatgactattaaactggctcacagaactattataaaattagatgtcatattataatagttatttcaggataaataacaatgatctaaagcagccaa

SEQ ID NO: 789181 - DNA, 609 bp, Homo sapiens
tgttgagaactagaataaaggtgactcctgctatgttttatcaaagagactggcagcattttgcccttgccctagagttctgtggaactttgaaaatgagagagatgatttagagtatctggtggaagaaatttccaagcagcaaagcattcaagatgtgacttgggtgctgttaaaagcattcagttttattcattcagaagatatggtttcaaattggaacttatgtttaaaagggaagtagagcatagaagttcaaaaatttgcagcctgatgatacaatasaaaagaaaactcattttctgaggagaaattcaaatcagctgcagaaatttgcataagtaatgaggagccaaatgttaatcaccaagccaatggggaaaatgtctccaaggcatgtcagaggtcttcatagcagccactcccatcataggcccggagacctagaagggaaaaatgatttcgtaggcgggccagggccttgctgctttatgcagtctcgggacttggtgccctgtgtcccagctgtagctaaaggggcaaaggtacagctcaggctgttgcatcagagggtgcaagccccaagccttggcggcttacacatggtgt

SEQ ID NO: 789182 - DNA, 528 bp, Homo sapiens
tcatcagttgcttattgaataaataaattactacacaggcgtttatttatttttattttttattttttattttgagacggagtcttgctctgtcacccaggttggagtgcagtggcatgatcctggcttactgcagtctctgcctcccaggttcaagcaattctcccacctcagtctcccaaatagctgggattgcaggggtgtaccaccatgcccagctagtttttgcatttttagtagagacggggtttcaccatgttggccaggctggtctcgaactcctgacctcaggtgatctgcccacctcggcctcccaaagtgctgagattwcaggcaggagccactgcacccagcccacacaggcattagaacatggacatggagctccagaccataggcacaggttttattgactcagtaagtgatgactgagcacctgctaagtgtctggcactgggccagtgctagaggtgcagtgatgattaagacggtgtagttgtccccccttatctgaggtttcagctacca

SEQ ID NO: 789183 - DNA, 519 bp, Homo sapiens
tgagcccctctatgtggaagctttttttttccttaaataatttaatgtcctattcagcattattgatttgctttttatcatagtcaaactattgttttccatctctagtttgttagaaaatgatactttttgccacaaggattcaagtgggcacagtaacagcaacatgccatctttcacatgtttctgaaagaagaggtgacctgccagcttcctttgagctgtgcttgctttagggccgacagtttttttatgttcatctgttcatgtcatgttttccctggccccttcatgaccaatacacatttataaatgctctagccatggaagatgaacaaggaccatgggctctacatctcaggtgtgctagtgaaatgagccggccccaarcagctcccatgagagctacaggttctaaaagattgcagagcggcatgcttggtcttgcagccgactttctggtgaaaagcattaactaagtttcctggtggaatcatgaactacacagcccaggtatga

SEQ ID NO: 789184 - DNA, 619 bp, Homo sapiens
ttgtaaagttgaaatttgtatattataagacatagcaattccacaacaaagtatataacctaggctagtttccaaacatcaggtagaaatgattaatgaaaccaattcattggatctcaaccagcattttaaaaaatggactagattttatcagtcattgttgatagtrgggaaaaattctacttcttgaagtttttgaagagatgaatagaggtatttgtgtatatgtcctactggatcatagtttttttaaaaaaattgaaagccacttccctaaagaaactattgtacatatatatatatatttcccccttcacagatatatatataaatataaatataaatatatatatatatacacataaagaaaccactgcacatactagaatattcatagcagtattactcaaaaaagcaaaaatctggaaataacccaaatatccatcgactagaggatgaataaatgacgaaataatcttacaattgaatttcatatagtaataaaaacatattaatgatatccacaaagattaatcttagaaatataacatttagtgaaaaacagcagagcctagaagatgacatagagtatgaaatcatttagtttaaaaagaaataa

SEQ ID NO: 789185 - DNA, 619 bp, Homo sapiens
ttgtaaagttgaaatttgtatattataagacatagcaattccacaacaaagtatataacctaggctagtttccaaacatcaggtagaaatgattaatgaaaccaattcattggatctcaaccagcattttaaaaaatggactagattttatcagtcattgttgatagtggggaaaaattctacttcttgaagtttttgaagagatgaatagaggtatttgtgtatatgtcctactggatcatagtttttttaaaaaaattgaaagccmcttccctaaagaaactattgtacatatatatatatatttcccccttcacagatatatatataaatataaatataaatatatatatatatacacataaagaaaccactgcacatactagaatattcatagcagtattactcaaaaaagcaaaaatctggaaataacccaaatatccatcgactagaggatgaataaatgacgaaataatcttacaattgaatttcatatagtaataaaaacatattaatgatatccacaaagattaatcttagaaatataacatttagtgaaaaacagcagagcctagaagatgacatagagtatgaaatcatttagtttaaaaagaaataa

SEQ ID NO: 789186 - DNA, 624 bp, Homo sapiens
catgcccagctaatttttgtatttttagtggagatggggtttcactgtgttgatcaggctggtctcgaactccttatctccaggtgatccgcccgtctcggcctcccgaagtgctgggattacaggcaggagccactgtgcccaaccacaacttaaaatattttgcaacccacctgggttttatggtgaaccaagtttggctaacaatttgcagcctctgggtttcacttctcttaagtccatttggcatctctctttttgttctatgagagagaaacaataaccaaggtcatgaaatcaatcaaattagagcttttcgtcctgggagagaacaaaccctttctcaaaccgacacaatatttggcctttcttccacygtcagacttcacaaggagggctgatatttgtttcttcttccttgccaccccacccttcctaatttcaccaaatctggcttttgtcttccgctgtgcactgtttgatttcagtgctgttctaatattcttagaggtcaccggtgaccttttaatcattaattcagtgttttgttgactatcattctttttaaaaaaattttgaaacgcacctttattatttcagttaaattcatgttactattggagt

SEQ ID NO: 789187 - DNA, 562 bp, Homo sapiens
ggcagtctgtggctaagaacattctcatgatttttttcagactagagttgtttccactaaattatactacagctattttcggaaattcacaattggtctgataaaggtatatgattatataaacttctatttggaaattcactacctctaaattggaactttatatgtaaggataactgacttccaaaataaagattatcattctaaaagacttctaaaggcatcatagtaagcccacagtgataagatgctgacaacacagtcactcattcaatcctcaaactcytatcatagttttcttatacatatggcttactcttttaattaagtgtgaagttagaattatcgtcttcaactgacaggaagttagaattatcgtcttcaactgacaggaagttagaattatcgtcttcaactgacaggataatcattaagagtaatctttagttcaccatttactgctggaagtgttgagaagtaatttaatctttttttttaaatgataaaagtgacttacagaagttatgctattgaccattaagacttaagtcatttatgcaac

SEQ ID NO: 789188 - DNA, 612 bp, Homo sapiens
attgtaaagcctttacttacacaaaatactaattgaaactacagtagaaaggtggattttaaagagcaaccccaccaatatttaggtaaaagtcaatgaaaggaaataacagggaatcctcagcttgttttttcacatgaccagtttttattattgtaaaaggatcagatattttgataacatacattttcttcttttttttttaagttatagacatcacaacagtttatttctgaatcctcagcatgcatttctaaggaagccattttttttctttatttttattttagatataggggtatgtgtgcaggtttgttacaggggtatatttatgatgctaaggtgtgggtgtctgctgatcccatcacccaggtagtgaatatagtacccaatattgattacttatatttaaaaaaatcttttcacttaaagacaacatacattggccatttttaatttattaacttatttttgtaraacacaagggtgatacatgttcttttgtgaaaaaattggtctatagagccaaatgactaatttgtttgacaggaagagaattgaattttttacctttgcatcagagtagctgcatgatttattatcttccagtca

SEQ ID NO: 789189 - DNA, 609 bp, Homo sapiens
taaaaattttgtaggctgggcgcagtggctcacgcctgtaatcccagtactttgggaggccgaggtgggcggatcacgaggtaaggagatcgagaccatcctggctaacacggtgaaaccccgtctctgctaaaaatacaaaaaattagctgggcgtggtggcaggcgcctgtagtcccagctactagggaggctgaggcaggagaatggcgtgaacccgggaggtggagcttacagtgagccaagattgtgccactgcactccagcctgggggacacagcgagactgtctcaaaaaaaaaaaaaaaaaattataaagggacatgttggagaaatggcaagttatattttatygaatatccttgaatatattgtttaacatatgtaggataccaacagtcaccttgtttacacattttaaaaatgggtttcacccgcattctaattggtattagagatatttacactccccaaagcttgtacgctccttaggaacaagataccattttaaatttacttctatagtacattctagggagtagaaatagaactctttgtaaataaatgaattagaactcagcacaacttggtcattgcgctgtgaaactac

SEQ ID NO: 789190 - DNA, 625 bp, Homo sapiens
cctcttatatgggatattttctctcgttttcctaagaaaattttatgcatcatttttagacacatcttccaggacctgcctctaaaccaaattaggcacatcttcctctgtgcaccttgcatttagtcacatctccctctgttgcaccttgctcaggggtttgcactataactttctaattacgtgtgcttttcccctactagcatgatgcatttttaattaarggcacaactctctgtggccctgtggcctcaaattgtgcacacaatacaatgataatccaatggtgatgagatgagaacaagaaggcaacactaacggagtcccatcaacaggcagaagaggatcatttgtaatatttctcttcattctattattgttttcttagagcctttacaatatggaatcatctatattatccagcacaagcaagtctgccgatttcagatgagttatattactggcaaagatgaaagaggagtaatgacaagttacatcagattttctattagaaacaaaatcacaaaaagcatttggctcttgataaagtgtgtgttcccagctttttaagatcaaaaaagaataataaagtataaacttgatacaacgtattcatggcagaaag

SEQ ID NO: 789191 - DNA, 662 bp, Homo sapiens
aattgaaattattttactttaataaaatattttacaagtcaaaaacctaaattagttttattgtaaatataactagcatgtccgtgtgtgtgtgtattttctttcttttagaactttacctgttcatgtacttgccatttaaaaaatagtttttttctcactgatgtttaactataaagtaaggttttatatctatttgtttatcagtccacctgtttccatttttgaagattttcatagtaaaaaatctcaaaataccaaaatatatgaagcataaaataattcaaacaacaggttttttaaatatatatatatatatayacacatataacaaaaaatgtatatattttgttttgtaatttaaacattctatcagtttgtttctaggcatacaaatgtacttgaatcaaaattgaattcagctgcaaatatagtttggtaaaatttttaaaaatattttatcatcaccatttctctcactcatgacttacatcactaattagtctataaaaatatagttttgataattgcatgataaaccactatatttcaaaatttacttagtcattctactatggttggacagaaaaactgtttcaaaattttcaaaacagtaaataatgcaacaaaaaacattttttgaagatcaatctttgtatgca

SEQ ID NO: 789192 - DNA, 647 bp, Homo sapiens
agacacaaatgtatgaactgtcctctttttgtaggcaagaatccacaaaatatttaataacacggtcatgttttcatcactgaaaacatacttgaggaagctcattataatggaatgagacaatacttttcattaatgactttcatttatttttaaaatttgaacaatggaacagtctgattattaaaataatattaatgtaagatgrcaattaaatagttgggaaattgcaaataagatgattggtgaaaaactaccaaaataagatgagctgcaaaaataggttctccctgaaagagtactcttctagggttaggggtaggaaacaggatgctttattcaaggaaagtcataattctgatcattgcagttcagtggaccaatgatattaatatacaacagcaggaaaagatggccaattttatgtgaatcatcctctaaaaggaagtacacaggatattattttatcatttcatcattatgccacagatgagtcaccacaaaaataaattccaacaggagcaaggaaaaaaaaaccctaatgttatagtagaaaggaaataatgaaaattaattttacagttttttttggggggggagacaatgacaataaactatatatatatatatatatatctcatggtatc

SEQ ID NO: 789193 - DNA, 569 bp, Homo sapiens
cattatgtgtatgtatttttttcaaatgaagaaaattttaaattatttgatgtggacacagtatcttttccattgaaaatgagacaaacactttaatgccctttgaggtttccttttaggccacgtgcctacactatctatctgtctgtctgtctatttatttattattattttttgagactgagtctcgctctgtcacccaggctggagtgcagtggcatgatcttggctcactgtagcctctgcctcccgggttcaagcaattctcctgcctcagcctcccgagtagctgagattataggcacgtgcaaccactcctggctaatttttgtatttttagtagagatggggtttcaccacgttggccaggctggtctcaaactcctggcctcaggtgatccacccacrtcggcttcccaaagttctggggttacaggagtgagccagcatgctcggttatactatctatttaaagaataattgtaaacatgtagtaactaaaaataagagtttattaccaagatatatgattttatttttgaagctaagtagcttacaaatctgtgttc

SEQ ID NO: 789194 - DNA, 569 bp, Homo sapiens
cattatgtgtatgtatttttttcaaatgaagaaaattttaaattatttgatgtggacacagtatcttttccattgaaaatgagacaaacactttaatgccctttgaggtttccttttaggccacgtgcctacactatctatctgtctgtctgtctatttatttattattattttttgagactgagtctcgctctgtcacccaggctggagtgcagtggcatgatcttggctcactgtagcctctgcctcccgggttcaagcaattctcctgcctcagcctcccgagtagctgagattataggcacgtgcaaccactcctggctaatttttgtatttttagtagagatggggtttcaccacgttggccaggctggtctcaaactcctggcctcaggtgatccacccacatcggcttcccaaagttctgggrttacaggagtgagccagcatgctcggttatactatctatttaaagaataattgtaaacatgtagtaactaaaaataagagtttattaccaagatatatgattttatttttgaagctaagtagcttacaaatctgtgttc

SEQ ID NO: 789195 - DNA, 570 bp, Homo sapiens
cggctcttcaggtcttcccatcttctctgatcgacggtcagcaaagccgtccccttaacagacaaaagaaagcaggaaaaggccttttgtcatgtgcttgcaccaagaacatggcagatggggtgccgagacaaacaggactgatgtgagggcttgcactgaccatgttcttccaaccgtggtggtgagagaaacatggtcagaatgctcaaagttggtctygggaggagttcccaaaatgatgaccaggtgtttcagagagaattcagcagccttcgacttgtatctttggagatgtgtaatattcaggtttgggaaaatgtaaagaggagtttctacataattacattttcaaaaaaggatactcactaatagtagttagtttcctttcatttcatagcagcaaaattatagcttgtcaatgctgtggcttccagttaagggtatgttgtctttctttaaaaaatgtctaatatgtgcaattgcaaaactgtttttgagagatacaaagtcatagagtttgcattttaagaaagtagtgctgtgataactgcctaaatggaattccat

SEQ ID NO: 789196 - DNA, 499 bp, Homo sapiens
tttcactgtcttctctttgtgcatttctatatctcactgtattggaatgctagaaataaattaacagggggtgtgttaaaacaggagggttttgaatgcaaaatatattatcagttaaaaaacttaaaactaatatctccctcaatataaagtataaatattaattacatatatttactgttaaacatatatttatatatttataytaaatgtatattttacaatgtatatttatactaaatgtatatatttacaacaaatatgtatatttacactaaatgtatatatttacattaaatatgtatatttatactaagtatatatttacaataaatatatatctatatgaaatgtatatatttataattatgtatatttatactaaaggtatatatttacattaaatatgtaatttaaagtaaatgtatatacttacattaaatatataaatttacagtatataaaatatgtatacgattaaatgtacatatttaatggc

SEQ ID NO: 789197 - DNA, 591 bp, Homo sapiens
ggatattaaaaatcatggtggtaaacagagctctgtgccaactagaaccatgtctatagggtattggtgatatcaggtgttctcattgccaacttctcgctcttgattttgcccggaacacttaataaaaaccatgtacttggactaaaacagcagtttctacagaatgaaagcagatgtagtatgcaagcactccaaaagctcaagaaataagagataagtggtgaaaaagagaaaaacgaaataaccccaaggctttgctaactttctcttgctagccctcctttctcaagtgccatccttggctctgaacattcaagattactttttaagccagttcatccagattcaacctaacgcctgtctttttaccagggcttcataattacggttatttaatatgcatttccyaaacctttcattgtaatctttgcatggtatagctgctgggccatataacgcttggcttctctgcatttttttcatgtctccttcatttcatttgggtctccgggataatgcagatgggtctacgataaccatcgtatctaaaattccctgcccccaaatccccacctttgatttatttac

SEQ ID NO: 789198 - DNA, 567 bp, Homo sapiens
ctgttccagcctgaatccctggacaggctgatttgtaaacggctttccatgctgaagtcagttgcaaagactgcaagagacgcccacttcctcaaatgcacagacaccaacataaatccacaatgatcacaaataatcaggggaacttgacaccaagaaaggaacaaaataaagcactaagtaactgaccctaaagaattcgcgatctagaaactatgtgacaaatatttcaaaataatcatcttaaagaagttcagtcagtgatacaagaacacagacaactaaatgaaatcaggaaaacaatatatgaacaaaatgagaagttcaccaaagagatagagatagaagygataaaaagtcaaacataaattctggggctgaagaatacaatgactgaactaaaaaaattccatagagagcttcagtggcagaacttgatcaaatagaagaaagagtcagtgaactcgaaaacagattgtgggaaattattcagttagaggaaaaaatgtttaaaaaaagaatgaaaaacgcttatgcgacttatgagacagcatcaactgaaccaat

SEQ ID NO: 789199 - DNA, 645 bp, Homo sapiens
caatgatcacaaataatcaggggaacttgacaccaagaaaggaacaaaataaagcactaagtaactgaccctaaagaattcgcgatctagaaactatgtgacaaatatttcaaaataatcatcttaaagaagttcagtcagtgatacaagaacacagacaactaaatgaaatcaggaaaacaatatatgaacaaaatgagaagttcaccaaagagatagagatagaagcgataaaaagtcaaacataaattctggggctgaagaatacaatgactgaactaaaaaaattccatagagagcttcagtggcagaacttgatcaaatagaagaaagagtcagtgaactcgaaaacagattgtgggaaattattcagttagaggaaaaaatgtttaaaaaaagaatgaaaaacgcttatgmgacttatgagacagcatcaactgaaccaatgtatgcattataggagtatgagaaagaacagagaaagcaaaataaacagaaagcatttttacagaaataatgtcagaacacttcccaaatctggacacgtaaatgaacattcagatccttgaagcctgaagaaccccaaataattaaacataaagagattttcaccaaaacatattataatcacattcttaaaagtaa

SEQ ID NO: 789200 - DNA, 507 bp, Homo sapiens
aaaattacatttttttaagcatttacgtgactaaatgctttacacatccttattctctactataaccttatttgacaggattttttaaaatttctttttattatactttaagttctagggcacatgtgcacaacgtgcaggtttgttacatatgtagacatgagccatgttggtgtgctgcaccaattmacttgtcatttacattagtatatctccaaatgcgatccctcccccctctccccgccccacaacaggccccggtgtgtaggattattttctctattttatagatacgggttattgactagaaaattaagtaactgcccaagatcacataacaggaagatagtattcaaaaccagatctgactccaaggcacctgcaaagcaaatgggaaataaggaaattccaagctaatgctggggtgactcaaattctcatgaataaagtatggattaggaaaatatgacatcaattaaaaggtgcatctgagggtgccccaatatt

SEQ ID NO: 789201 - DNA, 595 bp, Homo sapiens
  misc_feature 589: n = A,T,C or G
agctccaataatttctggcttataggaagtgttatatatgaactactattacacttaagtgggcatagttgaactctggagaaagagctagggttgaagtggggagacagtcctgtgcaaactgtgagatcagaccaacctacatttgaattccagtacttccactgtacaactttgggtgagttacttactcagtataaaactgcctttgcaaaaattatgtcagtgagaaaattatggcaatggaggagatttgatccagctcctctccctcttgtctttagccttcaatctgccaagatagctttgggagacatgtttatagtttaaatgataataagccttctcaaaaacttaaccacctatgtaaagctaataagagaccaccaggctagggagaggagaggagcctgaattctgctaaactgtaracatgaacaattgccagccattattccagaggtcctgcagataacatcactattgtagaacctgagattggccttttgagaatttttttctcagattttttgcatgtctgatacccatggctccacctggatccaccaaccagtggcttctgtgcccncaccca

SEQ ID NO: 789202 - DNA, 540 bp, Homo sapiens
gacttgcatttctggggtaggggagatacaggggaggaaagatgagctagtgggctagtgcagtagtccactgagagtggatggtggcttgtcagggaggtagtaagggagctgatgagaagttattggattctggatatattggaagatggtggtaacagatttgtggatgtcttacatatggaaggtaaatgaaagagaagagtcaagaacagcatatgcctctgtctgaactccagcagtggatgtggctgaagttgttttccaggagacactcaggwttccagtctgttctaccagttctccaggagccaccaaacattcctaaagcccattggtgacgtccacacttcactggagacccctgctttgatgaataaaaatgtggacacagccaagcttctgttaggaggcaagaacccacctaagcttctgttaggtgaggcaaaatcttccaagaaacaaagatccctggctcagcagtcagtctgtttttgttaaccatgaaagggcagaaagaagcatgacagtggttcctca

SEQ ID NO: 789203 - DNA, 469 bp, Homo sapiens
aaagaacgttagctctggctcacaggtgtgacttcttccaggcccatcaggaagaaagaacgaagagcagtggtcggagttcagtccccggttcccccttatccaaggtctgtgtgccagcagatacatttggtgggggtccaggttttgaaaacaactcagggacataygttaagaattaatctttagtttctatagggaaccaaacatcccatgactctaatttccttggctattgttttaggctactattaccttcttgctgatcaaattgctcatttacttctcagggccagctaagtgcctgcaatctgaaggaacttaagatttttcatttccatgcttgtggtagtgaggggggcacaggcccctaagaggggtccctgctccatctcaggatgggagatgcagccaagaaaaaagggaggaaggagaatcaggtggcgtctacaggcccttgcaaaagctt

SEQ ID NO: 789204 - DNA, 516 bp, Homo sapiens
agcaggcaggaaagagggtctgcaggttgctccaacatagacacataggtaatagagcttattcaggggagggaagagtgagaccccacaggaagtatcaataagattttgaaggttttcaaagagtaaaaagctcaaacctaacaggcagtaagggatgcaagctggaggcagtgctgcgggaggttgggggaagcagatggaagagcaaggacctggggtgaaaaagcaaattcagcctcggtttgtgttcaggcaaagggagggtcagcttttggctgtggtatagaaaatcagtaaggaagtgagaagactggaaaaggcaaaggggctgaaagccaggctgcrgagttgatatttcatacgggagtatcctgcagttattggaagagtctgaggagaatgatctgatcaaagcagcactttaggaaggctaatctgtcacagtgtgtaggagggactggaggagaaacaggcaggaaggcagaggtgggagaactgtcagctaggatgagg

SEQ ID NO: 789205 - DNA, 640 bp, Homo sapiens
caagtgcctagtaagaaatgagtttgtgctattgggtgggtcagggcaatcccagaggaagtcctgacagatggagagctgataaaggaaaacagatataagggagaggtataagtcacggtaggtcttcctaatcatgtgaaggatttctctctttacctaagaaaaatatagagccctgaaagcaatgtcagttggggaccagcatgtgtgactgccctttagaatgattgctgtagtatccattaggcagtgggccagattgtgcaatgctccccgacctcagattgaagaaacccacaaggagtctaaagccccacttcaggctggaggtgatggggaactgagctgagactgtgctgaccaggatcgaggtggattccaatgtaagaattcccctagaacacttaaacgcaaatttgggaacttgaaacaatcttgtagattattttactctctttttaaaagagaattgtggacattgggcygagagatggagcgacttttcttgagatatgtatccaactttcctatcaacactactttcctgtgctcttctgcaagaatggattcagctcacctctaggcgctcactacagaccaacccaaatgcagttagaattcacagtttttatcagga

SEQ ID NO: 789206 - DNA, 623 bp, Homo sapiens
tgacccaatcgaccataattcaccactctgaatgacacagatatttgtgatcacttccccttgaaattttgctttatctcattcttggaattgctttataactaaactgacaaatgcattttgttcatttgtttatttcttcaacatatatttattgagatagtccacaatgaataaaataagcatgctccctgctctcatgtagctaataattagaaaaagcaacacaaatgcatttaaagctattgacagatcaggctaagtgcwgtggagcatataaacagggcaccgagagagaaaataaaataaggtcgaaagtaagactggctggaaaaaactctgttggaagaaaagagatttcagctgagatagaaaccagaagaaacaagctattcacagtgtgggcaaaacactcctagagaaagtaaaggaaattgcaaacaggaactgttcaaggcaggaaagaaattgttataaactggacctggtggaaggtcactgtggctgcagtgttgtgagcaaaggagagaattgaagagggagatggggctagaatattgtgtgcatttgggttttgttttatgataagtgtaaaggcaagaccctgagttttcaatagaaga

SEQ ID NO: 789207 - DNA, 583 bp, Homo sapiens
ttctcatctattacagaaagtccaaggtcagaagccctgcctcgtgtaacttcatatgcttacagctcctctggtagacggaggcatttaattaataactaaatatgtttttgctgcatctgataattaaatacaaaacaactaaatcacaaattagcaaatctgccatatgcatgcagataaagtcaataattgtaagctttattgtttccagatgatcagaatttttgtccttgttagaatatgaaacatamcaatattgtttgagtgccttataagttctggttttcatgccaaaaaatcagatgaagctaataacatgtgatattttattagtttgatgttagactagatgaaatattgattatctaatttaagagctatcacagaaagcaaatcatgtacacataatctatgtgtaaacaagaaaaaagaatgcctaaagctacatctggtgatgaatgtatctcatatcaaaatgagggaaccaggaaaatattaatcacatggcaaaaaaattcaggcagatatcatgtcaaactgtagaaagttcaaacatagagtcttctcattgataggtcca

SEQ ID NO: 789208 - DNA, 600 bp, Homo sapiens
tcatatttccaacccaggcaaatgcattcagaatatagcaatgcctaactttactttgctgcaactctcatttctttccactttgtttaatttttttttatttccattatgtcacatcatgaagatgtctgctaagaactaagctgctggagcagcaaatattttgaacaatgactcaataaacagaagtttttaaagagaagatctgctttcacagtgtcaaacatgtcaggtaaacggtatttcatgcatttaccaagtcaatgtcctcacacaattktaagcataggggtgtgcattatttaaggtgtcactgatgggatcagaattttactttctgttgaatgtgtatggtttaagaaggctaaataaaatggtgatttattagaaaataagagagaagaaatgctggggtttttgcattcttctactctgcaaaatatatgatttcaggcacttattttaatgtgaatatgtctttttagtgtattatagcaacaactaacaatttatttatccaactgaaaggatggaactcctgaagttcatttcattgtttttcaggtaaacaaatgaaaaacgatttttgtctggggctct

SEQ ID NO: 789209 - DNA, 622 bp, Homo sapiens
tttagtgtattatagcaacaactaacaatttatttatccaactgaaaggatggaactcctgaagttcatttcattgtttttcaggtaaacaaatgaaaaacgatttttgtctggggctctgttttagtgaaggcagaaaaaatatcctctcatttaaaaggactgaataaaccttttgtcatttgcagataatatttgactgagaacaacatgcagattggttttagaccccaactttcagcagaacaatctatatttattgctaagcacctgtttcattaaggtcaagaatacaaagaatgcattatcccraatgaaaaaagagattataccctttgtcttaattaatcctttggaaattttcatgaaaatacaaatatgagaaaaaacactttgataagtcttcctattagtagtgtaagatttagaaaaatacagttcatattatgttttattccaaaagggacttttaagagatgtttgagatttctgggcccccctccatccctcaagcaccccaccctgtagcaaatgcaaacagtctttctcctataatgctctgagttaaattccttggtagatttttattatgtaaagacatcatattgtttggcttaattgt

SEQ ID NO: 789210 - DNA, 590 bp, Homo sapiens
tgcaatcaaaattaagttgctatcagtttaaaatagtctattataactatagcacttttaatcctagccccatggtaaccacaaagaaagaaattgcagcagatacacaaataagaaggagaaagaaaacaaagtttagcaccacagaaaaccaccaaactacagaggtaaacaataagataggaagaaaaaatcaaaggctgtgcaaagaaactagaaataattaacaaaatggcaagagcaagtctttatcagtaataaccttgaacgtaaattgattaaattcttcaactaaaaaatgtatagtagccaaatggatttttttcaagacccaaatatgtgctgccaagaagagactcaccycgctgctaaaaacaaacagaataaaagtgaagaaatggaaaaagatatctcatgcaaacagaaaccagataaaatagacattaaaaattgtaaaaaaagagacaaagaaagtcattatacaatgataaagggaccaattttacaagaaaatataacaattgtaaatatataagcacccaacaccagagcacccaaataaataaaacaaacattactggacctaagag

SEQ ID NO: 789211 - DNA, 488 bp, Homo sapiens
aggccggtcaaaggataaaagacagcgaaggagtagaaataatagaaaagtttactctgaatggtaatacagattcagtctccagtcgttcttctgtggaggaggtactttcctcttcttttctattcacatctgggtgggcatttgtactcattgcacctctcagacttcagtgctcagaagcacaatagttcattagataggttattatatttggctctgggaaattaggcttgtgaattttgaactactcagtccagtaggtaaatatcaccccagatgatcaagaatttagtcttttgtatgtttgactrtggaacaaaattctgaatataaagtaagccaaaaagaccacagaaagtcaaaattatactcacaaagtcccagtaataaagctcacatttttcgttaaaaaggctttcatccggggattatatcaatgaactagacatgatcttagtatgtttgttatatagtgtttcagcctc

SEQ ID NO: 789212 - DNA, 505 bp, Homo sapiens
ttgataagtgattatcgtattagcctattttaaaagacataccagaatggcataaaaatctaagttaccaactactgttatactttttaaagagtgggccacactttaattctaaaaaaagaaaatgcttttgcctaaaawaggtgtttttattaatagtgaatatattaatatgaaatttgacacaatcagcatcttgatgtagtggaaagaaaattagactctcaattaggaatcttgggttccagccctagttctatcactatgtgtttgccctttgatgatctctgggcctctgtttctttgtatgattcctttcttatcccactctgtctttaatatcttatgattataagttatattgatgaatgaaaaaaaaacccatgtacaaatttggattatgtccacatttggataatctattgaaattgcatcaggtttttaagtacaataagataaatgagggattttatttttcttttaatgccagaatcctcatagaata

SEQ ID NO: 789213 - DNA, 505 bp, Homo sapiens
ttgataagtgattatcgtattagcctattttaaaagacataccagaatggcataaaaatctaagttaccaactactgttatactttttaaagagtgggccacactttaattctaaaaaaagaaaatgcttttgcctaaaataggtgtttttattaatagtgaatatattaatatgaaatttgacacaatcagcatcttgatgtagtggaaagaaaattagactytcaattaggaatcttgggttccagccctagttctatcactatgtgtttgccctttgatgatctctgggcctctgtttctttgtatgattcctttcttatcccactctgtctttaatatcttatgattataagttatattgatgaatgaaaaaaaaacccatgtacaaatttggattatgtccacatttggataatctattgaaattgcatcaggtttttaagtacaataagataaatgagggattttatttttcttttaatgccagaatcctcatagaata

SEQ ID NO: 789214 - DNA, 551 bp, Homo sapiens
tggcgactgagaatggaatgtgtggcattgaagatagtgagaagtgcttagccttgagatatttgggatactggtactcttgaagacttagagttttctttgatctctgtgtctcctccttcagcaagctcatcgaagtccatgacttcaattaccgcatacatacacatggatggctcacatttcatttatgttctccactgatgcctctcatttgatattcagtcccttataatcaattgtctacttggcatctccatttaattttctcaaaaacatctcaaaatcaacagttcaaaagttgaagttataatctcctccaaagtttaacacacccctaacctgaacagtagcctgttcctcttccagtktttctcatctcagaaatagtacccccgtccatccagttacatgagccacatgcctaaaggtcattctggactacccctctccccttatcatatagtctgtcagtgaggctgtctatttgcctcgtaagtattgtatcaatagactcttctgcatccccatccctttgttctggtccaagt

SEQ ID NO: 789215 - DNA, 635 bp, Homo sapiens
aatagccagcatatggactcaacccaagtgtccatcagtgaataaattgataaagaaaaggtgatatatattcacaatggaatactattcagccataaaaagaaggaaatcttgccattttttacagaatggctggaacatttggggaggggatttgggaggttggtcaaaggacacaaaatttcaattagttaggaggaataagttcaaaatatctgttatgcaacagggtgaccatagttaataacaatatattgtattyttaaaaatgccaagatagtgcatattaggtattcccaccacaaaagtgataactatatgaggtaaagcatatgttaattagctagatttagtcattccaaaatgtgtacatatttcagaacatcatgctgtacatgacaaatacatatattttatgtcaattttttaaaaatatatacacacgtacacacgcacctggggaatcccccatttagaattttaaaaaacaacttataaataacccataaataaaaaacaaatcacagatggaataagaaaatatgtttaattgaatgacaatttaaaaaattgtgtgtgtttgtaaacttgtgaatactactaaatcagggtttagaaaaaaactgatagatttg

SEQ ID NO: 789216 - DNA, 635 bp, Homo sapiens
aatagccagcatatggactcaacccaagtgtccatcagtgaataaattgataaagaaaaggtgatatatattcacaatggaatactattcagccataaaaagaaggaaatcttgccattttttacagaatggctggaacatttggggaggggatttgggaggttggtcaaaggacacaaaatttcaattagttaggaggaataagttcaaaatatctgttatgcaacagggtgaccatagttaataacaatatattgtattcttaaaaatgccaagatagtgcatattaggtattcccaccacaaaagtgataactatatgaggtaaagcataygttaattagctagatttagtcattccaaaatgtgtacatatttcagaacatcatgctgtacatgacaaatacatatattttatgtcaattttttaaaaatatatacacacgtacacacgcacctggggaatcccccatttagaattttaaaaaacaacttataaataacccataaataaaaaacaaatcacagatggaataagaaaatatgtttaattgaatgacaatttaaaaaattgtgtgtgtttgtaaacttgtgaatactactaaatcagggtttagaaaaaaactgatagatttg

SEQ ID NO: 789217 - DNA, 631 bp, Homo sapiens
atataattttttgttctttgctaggaaagatatatatatttttcttctggattctttcaaggttttttttctttatctttgattttctgtagtttaaaaataatattcctaggtgtatattttttgcgggggtggaggtcatttactctgcttggtgttctctcaacttcctggatctgtgttttgatgtctgacattaatttggcagaaattcccagtcattattacttcaratatttcttgggtctctttctctatttattctccctctgatattcccattacacatatgttatgccttttttagttgtcccaccattcttgtatagtccattgcttttcccctgtatttaaaaagatttattttcttttcagttttaagatttctatcgatttatcctcaagctcaggattctcaacaatcactagtttactaataagcccaccaaaagcactcttcatttcctttacagtattttttacttctaacatttttgtacattattagaatttctatctctctgcatacattgcccatcttttcttgcatgctgtgtactttatccattagagctcttagcatactaataatagttgtttcaaattctccatttgataatttccaccatat

SEQ ID NO: 789218 - DNA, 631 bp, Homo sapiens
atataattttttgttctttgctaggaaagatatatatatttttcttctggattctttcaaggttttttttctttatctttgattttctgtagtttaaaaataatattcctaggtgtatattttttgcgggggtggaggtcatttactctgcttggtgttctctcaacttcctggatctgtgttttgatgtctgacattaatttggcagaaattcccagtcattattacttcagatatttcttgggtctctttctctatttattctccctctgatattcccattacacatatgttatgcctttttyagttgtcccaccattcttgtatagtccattgcttttcccctgtatttaaaaagatttattttcttttcagttttaagatttctatcgatttatcctcaagctcaggattctcaacaatcactagtttactaataagcccaccaaaagcactcttcatttcctttacagtattttttacttctaacatttttgtacattattagaatttctatctctctgcatacattgcccatcttttcttgcatgctgtgtactttatccattagagctcttagcatactaataatagttgtttcaaattctccatttgataatttccaccatat

SEQ ID NO: 789219 - DNA, 631 bp, Homo sapiens
atataattttttgttctttgctaggaaagatatatatatttttcttctggattctttcaaggttttttttctttatctttgattttctgtagtttaaaaataatattcctaggtgtatattttttgcgggggtggaggtcatttactctgcttggtgttctctcaacttcctggatctgtgttttgatgtctgacattaatttggcagaaattcccagtcattattacttcagatatttcttgggtctctttctctatttattctccctctgatattcccattacacatatgttatgccttttttagttgtcccaccattcttgtatagtccattgcttttcccctgtatttaaaaagatttattttcttttcagttttaagatwtctatcgatttatcctcaagctcaggattctcaacaatcactagtttactaataagcccaccaaaagcactcttcatttcctttacagtattttttacttctaacatttttgtacattattagaatttctatctctctgcatacattgcccatcttttcttgcatgctgtgtactttatccattagagctcttagcatactaataatagttgtttcaaattctccatttgataatttccaccatat

SEQ ID NO: 789220 - DNA, 614 bp, Homo sapiens
gcacacgtaccctagaacttaaagtataattaaaaaaaatctgaaacaatagtataagttgttcatagatacatttatatccagttaataacactccgatttcagaatagtggctactttaggggagggaaggaggggaatcatggaggaaatatgtacttgtttatttatttatttatttatttttgagacagagtcttgctctgttgcccaggctggagwgcagtggcacaatctcggctcactgcaagctctgcctgccaggttcacgtcattctcctgcctcagcctcctgagtagctgggactacaggcgcccgccaccatgcccggctaattttttgtacttttagtagagacggggtttcgctgtgttagccaggatggtctcgatctcctgaccttgtgatccgcccgcctctgcctcccaaagtgctgggattacaggcgtgagccaccgcgcccggccatatttattctttaaaaataaacggagaataaattgaagaaatacgaaaaatgttcatatctgcttaatcttgattgtgggtgcacagatgtctgttacagtacttttcatgttgaaaacatttcaaagttgaaaattaaggaaaa

SEQ ID NO: 789221 - DNA, 651 bp, Homo sapiens
ccactccttcttgtctttagtttacacgtatattagcttttgaccatgtttcacgtgtcttatgctctctctctgtttctctccccctgcaccccgtcctgcttcaggttgcatattttctattaacctgtctgaatttrttaatcctttttctgtgtttaattttctgttacgcacttctgctcagttcttaatttcagatgatatgtttttcaaatccagaaagtccatttgatgatattattctgccggagatggttcttccttcactttgttaggcggataatgagaggaactgattatctcaatccaatccactattcatctgggttggttttgggttgcaattttaggaagactcagccaacttgtggtttgactctgttccttgggatgtttccctcccaggtttgtgactgatagcctgtgaagtctccatcttttcgatcctgaatacctgggagattcagttctacctttcaggttttctgggtgtaattgattcccaatcacttcaaaatcaggcaaaggtattgaggggaaaaccaatggagtgttggaagcaggctccctctttctagaggacttgtcttcttggtaccatgagactgtgggaagctttgtttccagcctagaacaccaggctcttgt

SEQ ID NO: 789222 - DNA, 651 bp, Homo sapiens
ccactccttcttgtctttagtttacacgtatattagcttttgaccatgtttcacgtgtcttatgctctctctctgtttctctccccctgcaccccgtcctgcttcaggttgcatattttctattaacctgtctgaatttgttaatcctttttctgtgtttaattttctgttacgcacttctgctcagttcttaatttcagatgatatgtttttcaaatccagaaagtccatttgatgatattattctgccggagatggttcttccttcactttgttaggcggataatgagaggaactgattatctcaatccaatccactattcatctgggttggttttgggttgcaattttaggaagactcagccaacttgtggtttgactctgttccttgggatgtttccctcccaggtttgtgaytgatagcctgtgaagtctccatcttttcgatcctgaatacctgggagattcagttctacctttcaggttttctgggtgtaattgattcccaatcacttcaaaatcaggcaaaggtattgaggggaaaaccaatggagtgttggaagcaggctccctctttctagaggacttgtcttcttggtaccatgagactgtgggaagctttgtttccagcctagaacaccaggctcttgt

SEQ ID NO: 789223 - DNA, 600 bp, Homo sapiens
aggtatccagcacataaatgagaaatgagtcacgctaagcctcatcattgcaagagtccagaataccaagaagaagacaaccctaaaatcttccaaagagaaccaaagcagaggatatacacaaagggacagagatcaggatgasagatttttcaagggcaacaatactaactggtggacaaaggagcaaattgaccatggaaattaacttttcaacctagaattatacatccagccaaattatacatcatacattgcagctataataagacaatttgagacatgggaattctaaaaaatgttatgtctcttaaaagcactcttatctcatgaagtgaacagttgatctgctgcaacagaaagagggagaagccatgaatgaggatgacctggggtccagaaaatagagtccagcaggagagaagaaatctccaggatgtggataaagagaaataccattggccagctgagcagcaggtatagctgacaacaggctggagcaggttagggagtgctcctggagccatgcagcaaagaaagagaagttggaaccttttgattaggatgtttgattgtattaaaggagcttttttttttttt

SEQ ID NO: 789224 - DNA, 583 bp, Homo sapiens
cccattcttgaagtaaggagatcatgcttttacagccagggagttcacagtctcatgacctgtgtttctgctcccgcaaaccattggccatctccagggttaccaacactggagcagaggccatcggagggagcagaatagccggtacaggctatggatgcatggataaaggatgatgccctgaaatgtggtgggattcaaagtagaagccaggaatacttgcgtgtggtgtgcggtacgtggtgtggattgagtgcgtgtgtgcatgcacgcaagacaattaaatggcmcagagtattcagggaagactgaatattgataatggtaacagaggctagagaagtcacgaagtaaaaagacataggataaaaatactatggtcttataaaattaacagaaattatagtcacttgtatgaattacttgtcacttatttcaaattatcatacaatttaatgccatcatgtttgtcattcaatgtgctaggctatttttgttgaaaggtcattgaagtcttgttttcaagagcaaaatctgtatctgtggctagcattcatatctttggctcatgtaagatggttgt

SEQ ID NO: 789225 - DNA, 583 bp, Homo sapiens
ttttttttttttttttttgccagattctcttttttcctaataatttttacttatatttttagatttggggggaattttaaaatctggctcttctttactatcttaaataagaagtcatttattctgatcttaacaggccatagatgatggatcccaggttcgtaagaaagacattcctgggttgtaaaactggcaagttgtgttataaartatttatatacatctcaaaggagtggagaaaaaatttacagttacaagttaagtaaatgctttaagaaaaggggtgtcaggagtccagactcaggaattagcctgtctaaaatctagtcaatctgaagggaatattaaggctgacatgattatctaatttggtgttaactataaaagtatattaaatgcaagtccccaattgcctatcctgttctccttccttagtttgatttgtatgatttgatacacaactgaataatcttcaaggcatgaaaataataaagtagtcacaaaataatttcagttgttggtacaattatacagcatttgtagataacaccaaaggctggggagaatgataagaacaaattat

SEQ ID NO: 789226 - DNA, 627 bp, Homo sapiens
attcattacacccacataaatttcacatgaatattcagactaaatatttaagagtttaaaataaaataactctcagactactttttaaaatatgctgttatgaagaaacaaaatccgaaggtcaaaaaataaaatgttcatcaatttaacttcttcaagagacaaaaattgctacagaacaaaaaaagatacctgcaacacttaataaagggctagtctgcttaacmtacagttcttaaaatcataaagaaaacagaaagcaagcagtggaaaatgaacaaattatacaactagccagtttgcagaaaagaaaaatgcctcgaacataaaaagatgctcacatctggtgctaattaaaaagatgcatcttttctgaaagagtttatgttttaaaaaaagaactaggccaggtgcggtggctcctgcctgcaatcccagcactttgggaggccgaggaaggtggatcacgaggtcaggagttcgagaccagcctgaccaacatggtgaaataccgctctactaaaaatacaaaagttagttgggcgtggtggcgcacacctgtaatcccagctactcaggaggctgaggcaggagaatcactgtaatctgggaggcgggcttcacagg

SEQ ID NO: 789227 - DNA, 469 bp, Homo sapiens
tcaccatgctcctgacttgaggtgatccacctgccttggcctcccaaactgctgggattacaggcgtgagccaccacacccagcaggttaaccacgttaatggtggccagtgtgagcccattctttttaattgattaatggtgtccctgacatttagagtgtctatagtctttttgctattacaaataatactgtgatagtctgtgtgtaatctctgtgcacacatgcaagtgtttctgkaggacagtgtcctggaagtgggttagaggtatgtgcatttaacattgtggtagataccaacatggtatttcataagcacaaatcatttttaataataactagataaactccaaatcctgtgcatggggttagggctggctcacagtagatgctcaacaaatattttggaataaataaacacaattactcttctcatttcaggcatgggtgtaaggcccaaaaagattaa

SEQ ID NO: 789228 - DNA, 715 bp, Homo sapiens
atcagagacactcaaatggacatcagccaaattctagcatgtggcaactctggaaaggaaaagagtgataagaatgatcttcaacaaggagactctcctgaaatgggattatttaaacccacagagccccaggggaattctggtagaaggattagcaatctgtgatgtggtgtggatcacaatgatactaggaaggaatgaagcgatgggacagaaagctcatgtgtcctatactggaagaagcatgtttgattrtgactaataactctggaaagcaatgtgagctgagaatggctcgtgattgtgggaaaattatcccatatttcctgccaaggtcactgaggggttgggctagctgccatataatttagacttgcagaaggaactcttccagtgtgccacctgcccttaactactctaaatgtagttgattttttcctcctgtccacagccattgctggctttctcctgtctctccagcttttaactgatttccaagtttcctccccaagccaaatagaacatgctcctgaggccagtccttcctcagtgtaagcagaatcatttcaaggcccaagagaaaaacaaaagccattttcctctctctgccccctaaatccctcaccccagtatcatttgcatgtaaggagagggacgatactgttgaatttggaacaacaggctctccacaccgagagggacaagctccaagaac

SEQ ID NO: 789229 - DNA, 545 bp, Homo sapiens
aagaaggtgttaaacagagatgctaataaattgtttctgtatgagcgagcagaaaagtgaacataatattttagaacaaggattatttgggagacaaaaccattactaaaggtatttggggaatgctaccctctcactttttctgaaagtataaatttgtggtagagtagtttcagactttcagggggctctttaaaatcatctccytgtgaaagaataaagatgatgttctgttttaaaggggtttgaattctcagagttaaaatatttaagcaatgtaagtttcagggggaaaaaaactgaagtacgttgccttcttcctagttcctccccgcaaaatacttgcatattctgaagtcgactggttagcatttggaaataggctactgaacaaataccatcttttcacgtaaaacctcaatatgccatagatatttacatctaagaggtgccaatctgatattttatgatgttgtaaattttatgttttggatgattcttagcattagagaattgaaactgaggtcgaaactgttttccaaatg

SEQ ID NO: 789230 - DNA, 626 bp, Homo sapiens
gtccctcacaacaggagaccttccagagacaatggtgcctggctaccacccagaaggagaagatgacaagcgaactcccaggagaaggggaaattggagagggggcttgcacgtctaggtgataccacttactagaaattgggaagtgtctgggtcagrgaactttgaagggtatcaatggcttggggtcttttagtgtcccagagtttactttatctatggttagcagatgttcagttaaattttatcaggtatgcaaagcaggtaggctttaaatggctaaaaatatatttatttgagctatatttaaagcaactggatgtataaaaatcggagttgggtaccatttggctttgggctaatggtcctagcctgctgtgaagaagtaagaaaaacatgggggtccatctttaacccatttatataacatcacaagacaaaaaatatcattgtacacagaagcagaatctgagatactcagtatccacaggcctatgtctagagtttaacttaagaatcagagttcaaaagacatatcagaatactacttaaagctttattaaattattcaacaatcatttaaactcttattctctgccaagccctgttctatgcaccagatactc

SEQ ID NO: 789231 - DNA, 592 bp, Homo sapiens
ccgttcggggtccctgacttcccgcaacataggacctaactgaaactccttcaacttaccttggggaatcacttcactcttctaatctcccctagcaaatgacatttttttggaattataaagaaacttacaagcgggttagtttataaattgaaaatcaagcatagtacagtctaaataacactttcaaacctctyaacttacccctaaaatacagaacatcagttttacatcaaacttagccctaggagatgcttcatactgagaaaatcatcatgaccatatatgccataatagaaacttggaacaacaggttcctttctcccattgtatataccctctgggtcatacatatatgtatttctctcttcctatccatccctccactcaaaacttatagtggaattaaatgtgcatataatgcattttctccaagtatgctatcttgttcattttttatacatctatctccttagtcatattgtaagtatccccgtaaaaaaaaaaaaaaacctgtttaaatgtccagtgttcaaatgtacacatggtattctcttggcaaatactttctgcttactatatttggtaggat

SEQ ID NO: 789232 - DNA, 592 bp, Homo sapiens
ccgttcggggtccctgacttcccgcaacataggacctaactgaaactccttcaacttaccttggggaatcacttcactcttctaatctcccctagcaaatgacatttttttggaattataaagaaacttacaagcgggttagtttataaattgaaaatcaagcatagtacagtctaaataacactttcaaacctcttaacttacccctaaaatacagaacatcagttttacatcaaacttagccctaggagatgcttcatactgagaaaatcatcatgaccatatatgccataatagaaacttggaacaacaggttcctttytcccattgtatataccctctgggtcatacatatatgtatttctctcttcctatccatccctccactcaaaacttatagtggaattaaatgtgcatataatgcattttctccaagtatgctatcttgttcattttttatacatctatctccttagtcatattgtaagtatccccgtaaaaaaaaaaaaaaacctgtttaaatgtccagtgttcaaatgtacacatggtattctcttggcaaatactttctgcttactatatttggtaggat

SEQ ID NO: 789233 - DNA, 753 bp, Homo sapiens
ccccagaggtggaatctacagaggcaggcagggctgcttgagctgcagtgggctccacccagttcgagcttcccaggccactttgtttacctactcaagcgtcggtaatggcgggcgcccctcccccagcctcgctgctgccttgcagtttgatctcagactgctgtgctaacaatgagtgaggctccrtgggcgtaggaccctccgagccaggtgcgggatataatctcctggtgtgctgtttgctcagtaggaaatgcagaaattacccgtcttctgtgtcgctcacgctgggagctgtagactggagctgttcctattcgggcatcttggctcaagagccttcccaggctcttttgaaggcttccttctctgttccaattcatattggcatgactccggctttgtgttggccagtggttctcaaccagagatggttatacccaagggggggacatttagcaatgtctagagacattttgattgttatagctggtgtgtgtgcatacacatgctagtggcatctaatgggtagagttcaggaatgctgctaagcatcttgctgggttcgagacagctccctgagaaaaaaaagaattatctagccccaagtataaatagtgctgaaattgagagaccttctaaacttcattaactaaactttctccttaggtgatcttataaaaatcttcagtatttgataccataatttgtttcaagtgccccagtttatattttcaatctgcatctttt

SEQ ID NO: 789234 - DNA, 753 bp, Homo sapiens
ccccagaggtggaatctacagaggcaggcagggctgcttgagctgcagtgggctccacccagttcgagcttcccaggccactttgtttacctactcaagcgtcggtaatggcgggcgcccctcccccagcctcgctgctgccttgcagtttgatctcagactgctgtgctaacaatgagtgaggctccgtgggcgtaggaccctccgagccaggtgcgggatataatctcctggtgtgctgtttgctcagtwggaaatgcagaaattacccgtcttctgtgtcgctcacgctgggagctgtagactggagctgttcctattcgggcatcttggctcaagagccttcccaggctcttttgaaggcttccttctctgttccaattcatattggcatgactccggctttgtgttggccagtggttctcaaccagagatggttatacccaagggggggacatttagcaatgtctagagacattttgattgttatagctggtgtgtgtgcatacacatgctagtggcatctaatgggtagagttcaggaatgctgctaagcatcttgctgggttcgagacagctccctgagaaaaaaaagaattatctagccccaagtataaatagtgctgaaattgagagaccttctaaacttcattaactaaactttctccttaggtgatcttataaaaatcttcagtatttgataccataatttgtttcaagtgccccagtttatattttcaatctgcatctttt

SEQ ID NO: 789235 - DNA, 546 bp, Homo sapiens
aggcattgctctccaggttatcttctacgttcagtgtatatatctaacttgcccccttcttactttcaccctagtcctaactctcatttgcaatacagaaacaccgattctcaaaataaccattagagtgaaattttaagaaacaaataaaatcaagttactcctgtcattgtaatcaagctgctatcatcattgcaataaaattcttctacaaggccccatgtgaaccaacctcatctcctgttttttctcccctttgtttacatcctgagattcttgccttttccttttttcttagatttttattaatttgactatagtgttcttagacatgattttctttgcattcatttgtcttggggttcaaggarcttcttaaatttgttaatttgtggtgttcaccaaatttgaaaaatttacagtaattttttcatggactattttaccagccctgttttctctcttcttgcctctgggactccaatcttacctatgttacactttttgctattatcccacaggtccgtaaggcttgttcctttcatc

SEQ ID NO: 789236 - DNA, 582 bp, Homo sapiens
cactgggcccagtatttcctaagcccttgggatgctagtcatggctatgatatccagcaagggtaaccacattcttagtgtctttagaaagcactggatttggccgggcacggtggctcatgcctgtaatcccagcacttcgggaggccgaggcgggtggatcacctgaggtcaggaattcaagaccagcctggccaacatgatgaaaccccgtctctacttaaaaatacaaaaaattagctgggcgtggtggtacatgcctgtaatcccagctactcrggaggctgaggtaggagaattgcttgaacctgggaggcagaggtttcagtgagccgagatcgcgccattgcactccagactgggagacaagagcaagacttcatctcaaaaaaaaaaaaaaaaaaaagcagtactggattctgccagtcttggaccaccaaacccggccccaccaccaccaaaaaaaaaagtcattcttgtcctaagaaggtcaaggaatgtcatgatgaaactgatgtacttgccaccatgtgtccccaggatcccgtaaatcctcagaaacctgctctggataaaacctat

SEQ ID NO: 789237 - DNA, 630 bp, Homo sapiens
tatttgtagtgttaatgttcaaagtccacatagttaccaatgtaaataattggaactacacttcacataagttatttcttgtctgtatgtacatacacctttaagaataatatgtaatatgagttgtttaatgttgcaaaatgctcctcagatgccatgtgtaacagttgtgaatatgctttaatattttagtaccttcaaaaccaatgaattagatacaaaaagacatgagagaatgaatgcttggccttctgggaaataatactttcttcagtaagaatctatgggattcatgctgagactatgtatctgacaagcaagtgaattggtctattatccttcttaaattcttcagctcaaatctttctcattctcctgagcagtgtccatctctgatactggcaaaggcgcaaaaaccttcatggcgtttggcattcttcggtacatcagaagaaacctttccttggggcctgagggtgtgrattatgagagtaggtttagggttgtgggttttgctgtgccagcacagaacatcagagatgtccacgtgttctttaatgaatttatcttcctggtctttgtgatatcttcggtcctctaaagagcagggcccagagcctgggtctcttt

SEQ ID NO: 789238 - DNA, 777 bp, Homo sapiens
attctatagcagttgaagacgacttttctgtcaatcacaaatgtattgatgaaggacagttggtgattttcagccatggctttgggagtaatatgtacttttttgatggagggagagagagagtgtgtgtgtgtgtgtgtgtgtgtgtgtgtgtgtgtgcgcgcgygcacatgcatgtgatgtacagtattagttacatttagtgaaataggcatcaaaataatctacttaagtttgaaattgtagaaatggtacatataacctatgctaatttctttagacattttagtttttcttgataaggttagagagttttattaaactttggccaagggaaattatgaaggaagaaattaataggaaagaaattagtctaatggaagaagattcagtcattcttaataatctaattttcaggccatattcttattaatcatgatcttaaattatatctttgtttgcatcttccaaataaagagtaaggtactaagcaaaaacctagacttatgagctttatatattatttgttggcgttccatatagataatataaacaaaagagaaataatgacatttccctctcagcttatcaggtagcggaagttattacaacattggtaaattgtgctttacttgctgtacttactatctgctctatctatagacagaaaacctgtataccttctgatactgtgttcaatgcatattctgtctactaccaatttagaatgctgaagtaccatatcaatggatccattatttctaaatttctagtcgc

SEQ ID NO: 789239 - DNA, 647 bp, Homo sapiens
ggaggcagtataatttggcatgccgagagggccagcttctaagcaagtagcatcatttcccctactgggggaactcgcccccaacatttcaatgtaggttctttctattttccgtaagtgtcggccagctgagaaataaagagagacaatacaaagagaggaattttacagctgggccgccaggggtgacatcacatatcggtaggaccgtgatgcccgcctgagtctcagaccagcaaggttttattaagggtttcaaaaggggagggagtgtaagaacagggagtaggtacaaagatcacatgcttcaaaggacaaaaagcagaaccactgataagggtctaacaaagatcacatgcttctgagggaacaggrcaaagggcaaaagcagaaccactgataagggtccaacaaagatcacaaggcaaagggcaaagcagaaccaccgataagggtctatgttcagtggtgcacatattgtcttgaaaaacatcttaaacaacagaaaacagggttcaagagcagagaaccggtctgaccacaaatttaccagagcggagttttcccaaccctagtaagcctgagggttctgcaggagaccagggcttatctcagtccttatctcaactgcccaagacagacattcc

SEQ ID NO: 789240 - DNA, 647 bp, Homo sapiens
ggaggcagtataatttggcatgccgagagggccagcttctaagcaagtagcatcatttcccctactgggggaactcgcccccaacatttcaatgtaggttctttctattttccgtaagtgtcggccagctgagaaataaagagagacaatacaaagagaggaattttacagctgggccgccaggggtgacatcacatatcggtaggaccgtgatgcccgcctgagtctcagaccagcaaggttttattaagggtttcaaaaggggagggagtgtaagaacagggagtaggtacaaagatcacatgcttcaaaggacaaaaagcagaaccactgataagggtctaacaaagatcacatgcttctgagggaacaggacaaagggcaaaagcagaaccactgataagggtccaacaaagatcacaaggcaaagggcaaagcagaaccaccgataagggtctatgttcagtggtgcacatattgtcttgawaaacatcttaaacaacagaaaacagggttcaagagcagagaaccggtctgaccacaaatttaccagagcggagttttcccaaccctagtaagcctgagggttctgcaggagaccagggcttatctcagtccttatctcaactgcccaagacagacattcc

SEQ ID NO: 789241 - DNA, 615 bp, Homo sapiens
cagttttgccacattactaaggagaatgaaaagcactgaggaatttgcatcacagtcagcttcatggcagaatgtggccatttgtccttgagacacactctttcctccatgtctgttttcctctctcctcagtcttatctgagaagaatggaggagaaggaacttctcatacagckgttattattgatgaaaaccttcatttgagtctttccttataacatcttagttttggtttttttaaaccacattgcccaatcagcctcaccccttgtcctgaaaaggttccatttaaattagttgctataaattcatcaatactttttttccctattatatttttggttctattaggatttacttaactgaatcttataacaattcgaggtgaactgtggcaatgaaaaccagaaacagttaatgagatgcttcagctcacagtttgaagtgctgagaacctaagtattttgctgtacggtactgagctgtaccaaaatatgatggtttaggtttatgtgcaagactttgtgttgtagtctagacaaaggggtgggcaagagacatgcaaagctgaagccctgcttgaaaagacccttcaaggaagtaaaatggcagggg

SEQ ID NO: 789242 - DNA, 493 bp, Homo sapiens
caagagacatgcaaagctgaagccctgcttgaaaagacccttcaaggaagtaaaatggcaggggcagagtgcagcttaacatgttgctatccctgttgtttttgagttggttttggaatggattcaagttcttacacaatttattttgaatacaagcataatctaggtgatttgagttaatgaacttcttttcatgatgtagggaaagttgaatgtatatatttctaagaagaatttgtttagcagattacaagttggcaaaatagactgttcacagaaactaggcaaaaatttaaraaaacattctagtctctaaaacccattactaatgattaacattaaaatatttgtaactcttagaaagggggcattactaagacgactttaacttgttatgaaatctttgttgtgtgatgcaggtacagtgcgcccattccaactggaatagcagtttgattttaattgtaaaactaaacttcgggaatatgtatgc

SEQ ID NO: 789243 - DNA, 557 bp, Homo sapiens
tgtagattagttttgatttagccttcaaagctaacaccgttaatcaaacaactgacacaaaatatgtatgttttgaaaaaagttaccaagatagtttgggttcttctgaaagttgagcctgaatcaaaggcttggaggaggggtgaacccagaaaataagggactggagagaggtagattaggaaagagggaaaactgatatacaggtgagttatccaggtgataggagtacaattccacctggatctccgagtagtgtgggtctctgggtaggtagcctctcagaatcgtctctctgttggatgaaaccctggggcattcatcatccaccaccagttctgtccatccrttggttggggttgccctagggtgttaattgccttgtacttccaggctgtgttttgtaagggcctggtgggctcctgggagttcagcgaatgatttgaggcaagatgtggagactgaggtaagggtgtcgggtgggctccataggcgaatctgaactagcaggaactgtttactgcagctgtgaccgaaatcggaggtgagtcaagagg

SEQ ID NO: 789244 - DNA, 591 bp, Homo sapiens
atacagtaaattggtaccggtagcacatccctgtgtctcttctgcttcctgtaaggacaccagtcatattggacccaccctaacagttaagcatatatggccttgttttaacttaattgcctctttaaaggtcccatctccaaatagtccaattctgaggtactggaggtctggacttcaacatatgaatttcgtgaggggacaaaatttcataacactctcttacgtccatttggacaatctgaaggtctatgccagctccggagctccctgaagaatgggctgaggcctctgttgtgagcaaaacagtttctccttcacctatttcctgccttcttcattttctcccaggtggatctcctgggatgrcattacattgctaaaaatggcacataaactgacttcatgccactctgtcttagaatctgtttccagagagcctttctatgaccctcaaattataggacacaacggctacttatctgcgtatattacaaattctgatctctgcttcggcaatatcacactaagtgtgactgaagaatttattctctgaggagcagcaccatttaaagagaaagatgtgataat

SEQ ID NO: 789245 - DNA, 605 bp, Homo sapiens
atcacattagaactcaggattaagaagctcactcaaaaccacacaactacatggaaactgaacaacttgctcctgaatgactactgggcaaataataaaatgaaggcagaaataaagatgttctttgaaaccaatgagaacaaagacacactgtaccacaatctctgggacatatttaaagcagtgtgtagagggaaatttatagcactaaatgcccacaagagaaagcaggaaagatctgaaatcgacaccctaacatcacaattaaaagaactagagaagcaagagcaaacacattcaaaagctagcagaaggcaagaaaaactaagatcagagcagaactgaaagagatagagacacacaaaaaaaaaaacttcaaaaaatcaatgaatcyaggaggtggttttttgaaaagatcaacaaaattgatagaccactaggaagactaataaaaaagaaaagagagaagaatcaaatagactcaataaaaaatgataaagcgtatgtcaccactgatcccacagaaatacaaactaccatcagagaatactatgaacacctctacacaaataaactagaaaatctagaagaaatggataaattcc

SEQ ID NO: 789246 - DNA, 560 bp, Homo sapiens
tttgggttagggccttctttagggcctggaaagccacttctgtttcaggtgtccatcttactatatgggtattggctttctgagtttccttaattaatgtacataatggcctggctatttcactgtatctgggaatccatattcggcagaaggctgttatgccaaggaaccctcttagttgctttagggttttgggatgaggataagccagtatacgctggatacrttcctctctgagggccctggtgactttggataattttagccctaagtatttaacctgctgtgagcagagctgagccttttgtttggagccacaggtagcgaggaaatttaagagcgcttgggtggcttgatgccacaaggtttctgaatgggtggctataattaaatcatccccatactgaagaacaagaatgtccagctatgacaattggctcaagtcttgggctaatgcctggccaaatagacgggggctatccttgaacccttggggtaaaacagtccaggtgagttgagacattggatcttcaaaggcaaacaagaattgagagtcagga

SEQ ID NO: 789247 - DNA, 638 bp, Homo sapiens
ccaggctcataggatcctcctgctgcagcctccataagtgtgcaccaccataaccagcttttgttttgttttgttttgttttttaagagatagggtctcacggccgggcgtggtggctcacccctgtaatcccagcattttgggaggctgaggcggrtggatcacctgaggtcaggagttccagaccagcctgactaacatggtgaaaccccgtctctactaaatacaaaaaagtagccaggtgtggtggcatacacttgtaataccagctatttgggaggctgaggaaggagaatcgcgtgaacctgggagatggaggttgcggtgagccgagattgcaccattgcactccagcctgggcaacaagagggaaattccatctcaaaaaaaagagatggggtctcactttgttgcccaggctggtctcaaactcctgggctcctgccaaagtgtgcgattacaggtgtgagtcgccaggaaatatggaaattttttggtcaatttttccttttgttgtgtcttcctacttcattttaatgtcgtcattcttggatgccttgaaaaatcttgattctagagaaaactcaggtgactgaaattgcaagtgcagaaaagcaaaagagaaggacgtagcaaaa

SEQ ID NO: 789248 - DNA, 578 bp, Homo sapiens
catttggcctttcttactcaaactttatctcttagtttaaaggttatttgtttcgagaagcattccctgaatccctctggtaggatgtctgcctattccttcttgaaacaatagtggtaaaaaacacataacataaaatttaccgtcttaactatttttatttatttatttatttttgagacagrgtctcactctgtcgcccaggctggagtgcagtggtgcgatcttggcttactgcaacctccacctcccaggttcaagcgattctcctgcctcagcctcccaagtagctgggattgcaggctcgtgccaccactcccagctattttgtattttttgtattttagtagagacagggtttcaccatgttggccaggctggtctccaactcctgaccttaagtgatccacccgcctcggcctcccaaagtgctggaattacaggcgtgagccaccaagcccagcctaactttttttaaatgtatagttcagtagtgttaagtacattcacattgctatacaaccaatctccaccactcttttcatcttggaaaactgaaactctataccactaaacaa

SEQ ID NO: 789249 - DNA, 564 bp, Homo sapiens
cattgccatggcatttgtaaactgtcttggtgttggtgggagtgtcttttagcatgctaatgcattatagttagcacataatgagcagtgaggacaaccagagatcacttttgttgccatttttgttttggtggggttggcgattttctttactgcaccttttttttatcatcaggatcttaacaaaatttagatttttaaaattaaaaaaaaaaatttaaaacgagctgagtgttttgaaattttttttaaattaaaaaaagatgtaaactcctgggctsaagtctgagcaacagagcaagaccctctaataaactcggtatcctgtgataccagtcctgatgacctcctatctcatcctgtgactaagaatgcctaccctcctgtaaatgcagcccactaggtctcagccttattttacgcagtcccattcgacatagggtcactgaatggctctgacgctatatttcctaggctggtcttgaactcctggcctaaagtgagcctcccaccttggcctcccaaagtgctgggattacaggcgtgaaccactgcacctggcct

SEQ ID NO: 789250 - DNA, 544 bp, Homo sapiens
tggggtggctctcagaattgccccctcttcatgccttcagtatcctcatggtccattcccatcaccccacacctgaacctcaacatcagactcataactggtctcaccactacatccctccccaaagccatccttcccagagggagtagcactttatacatccaggatgccagggccttgcaaagatggagagaagtccaggccacttacattttttgaggcttccaatatgttatcaaagaagaaggaggaggaggaagaagaaaaacaaaggccaaggcgcccatcctggccaacatggtgaaaccccatgtctactaaaagtacaaaaaaattaccggggtggtggcaygtgcctgtaatcccagctactcgagaggctgaggcaggagaatcgtttgaacctgggaggcagggattgcagtgagcagaaatcgtgccactgcactccagcctggtgacagagcgagactctgtctcaaaaaacaaaacaaaacaacaaaaaaaacgcaaacaaaaaaaagaaaggccaaggcgggcagat

SEQ ID NO: 789251 - DNA, 641 bp, Homo sapiens
aaatacttctgcaaggacatctgctcagcaactgactgtccaaccccaaactggccccaccgttgttattgatccttgtagccaaggataattatctcaaaacaattatgtaatcctcatttttcctttgaaaacctctgtcttccttcaggtccctgaatatgcacatggtttactatcacacatgtattcccattgcaataccttattaccaaataaatatcattttcttttattagagggcctcactccatttgttattgagattgacataaatgttgtcagaagtgggatgaggcaggctcacttcagaagaatcagaggcccctgaaactgagtgtattctgactgagccctttgtgctctccatcttcatgagttgccttttccagccaggtgaatctcctgtaggattctcagactccctctctttggtgagttgtttttcactttatagaggatttgtttcagttacaagtctgyctttaataaaggacactacatccctccctcctgggatgataaaagactttttgtcctttctggaaagtcctttctgggatgaggacaagggcccttctggtttgagtgctctggtttctacagaatttatatcctatctgtgaggcaagtcttttctg

SEQ ID NO: 789252 - DNA, 612 bp, Homo sapiens
acaatcatggcagaaggcaaagggggagcaagtacttcacaatgctggaacaggagtaagagagggagtggggaggtgtcacatacttttagacaaccagatctcatgagaaccatcaggatgacaacttcaatggggatgatgtgaagccatgagaaactgcccccatgatctagtcaccatgccccacttccaacactggggattataactgaacatgagatttgggtggagacacagatytaaaccgtatcaactagcaaagctatcttgatcaattagtcaatacgatttatttacttgctgtctgctctgttcttaatgctgttatggaccaagtggacacatctgaggaaaaaaaaaaaaaacagatccttttgtagccagcttatccaatctctccctctaccctaaggcaatcttggacacccaggccaggtcagatctctggagaggcagaatcagcctcccagtacctactcagtgttggcagccaactggctcccaggtgaggagaacatttctggcagtaaaagcagtacacagcaggcaagagaccctaagaaaaagcaagggagaggagagaggcatgtgattccggagacaaataaa

SEQ ID NO: 789253 - DNA, 561 bp, Homo sapiens
cttaagcccaggagttcgagaccagcctgggtaacaaggtgagaccctgtctctgcaaaaaatacaaaaattagatgggcgtggtggcacacgcctgtagtcccagctacttattctcaggcaaacatcacgaagcaaagaaagtaatcttagcaggattatttcagttccataaatgaagacatttagactctgagcagttgcacggcaggtttgaagctgagtcagagccaggaaagagcccaggggcctgtctttagagccactgatctccccagggaatcatagtccagcacttacttataggtggatactagtggaaatgtcacaggaggtctttggcagctttgytccctccatctcttcttcaccccaaagatgtcagggaactctcccttaacctcaaaaacccgggctctcctttatcgtcaaaaacctatgataggccagaggtcacaaccgtacaagagggcttattgagagggagtgaaaactccttccactttgggccactctagaaacaaaattacaggttagcacatctaaaagcctatccacagc

SEQ ID NO: 789254 - DNA, 599 bp, Homo sapiens
gggttttagcatgttggccaggctggtctcaaattcctgacctcaagtgatctgccctccttggcctcccaaagtgttgggattacaggtgtgagccactgctcccggcttaagtttaagtttcatagtgccagtatctgaaatccctataagtatattctattgtctcttatttctggtcrcttttctttatgttatcttgtcttgtttctgaacattgtattattaatattgtttttgtgagtgccacacattgtatttttaaaattgtagaaataaattgaagctgaaaatgatgtcatctgcagagaatttgtttgcttctgacagtcacctggggttattataatccaggatcaccttaatctgatttgtaaaactgagacaatcagggactatgataattcaaagccagacaacagtcccttcaaagattagctacagacagacttaagcacagagggtttcccaggagcttctgcctttgacaggccctaaatagattccaatgtttgtcctcacaggtgggtcttctggaatcagcaaacacgcctagcggaaaaatgaacccaaatgtcaggttcacttctgcggttctc

SEQ ID NO: 789255 - DNA, 558 bp, Homo sapiens
tagtataatggcctctacctgcatccacgttgctgcaaagaatatgattttattttttatggccatatagtattccatggtgtatatgtaccattaacacattttctttatccaatccaccagtgatgggcacctgggttgattccatgtctttgctattgtgaacagtgctgcaataaacatgaatacaagtatcttttggayacaacaatttattttcttttgggtatatacccaataatgggattggtgtagttctacttttggagaaatctccaaactgttttcctcaggggctgaactagttcacattcccgccaacagtgtataagcattcccttttctctgcaagcttgccaacatctgttattttttgacttaataatagccattctgactggtatgattgcatccctctgatgattagtgatgttgggcatttttaaaatgtttgttgtccatttgtatgttttcttttgagaagtgtctgttcatgtcctttgcctacttttcaatggggttatttgttatttttcttgttgatttaagttccttata

SEQ ID NO: 789256 - DNA, 615 bp, Homo sapiens
gcattaaaaatctaatattaaattgtttcagttcagaaaccttgctctgctgcactttaaataaatctcccactgttgttttggttttgtttccttgacctgggtaccagactgtcttgggggcacgcctggaccraggggcaagtaaaggaggaaagctgtgggaagccattttctgagcatctaagcaaaaatagctagaggcttccaagtataaacgaattttgcatactgattaagtaactcctttaagaacctaaaaacatcccaagtaacagagaataaactgaatcaaacatacttgcattttccaccaaaactttgggcacacgctggcggttcattaggagtgggaaaggatctctcccatcattccgttcgtggacctctcgaatttccaccgtatcatccataagatagtaatgaatgatgtaggtccgacattcaccatacatgctgtctgtatcatcccagattgcatagaatcgaaggacctttgaagaatccaaagtagtgactcaagaatcctaaaagtagggagttcaacttggctactttggcaattatgtatcaacgatggaaagactagctggaaagactatgaagtaatttcag

SEQ ID NO: 789257 - DNA, 611 bp, Homo sapiens
gaaggctggactgggttccagtgactgctgttaagctacgtgattgggatggtccaatatttccaaatgatcaatgagattaaaaatgttcgtgaaatatataatgtagagaaattcataatgcacataaccccgagaattagtccttcctttatattttaacttaagtaaaagttaaaatataaacatacagcatttcctaacaagcccaaagaatcaaatacattgaaaaattatgatatgctatamgttacaaattctctgtcaattaggtagcctcttgggaggctaaggcgggtggatcacctgaggtcaggagtttgagaccagcctggccaacatggtgaatccctgactctaccaaaagatacaaaaattggccagttgtggtggcacacacctatagtcctagctatttgggaggctgaggcaggagaatagcttgaactggggaggcggaggttgcagtgagccaagattgcgccactgcattccagcctgggtgacaaagcaagactccatctcaataaaaaattaaataaataaaaataaaataaaataaaataaaaatcaggtagcctcatgctttgccaggtgatctaaaaatcaca

SEQ ID NO: 789258 - DNA, 611 bp, Homo sapiens
gaaggctggactgggttccagtgactgctgttaagctacgtgattgggatggtccaatatttccaaatgatcaatgagattaaaaatgttcgtgaaatatataatgtagagaaattcataatgcacataaccccgagaattagtccttcctttatattttaacttaagtaaaagttaaaatataaacatacagcatttcctaacaagcccaaagaatcaaatacattgaaaaattatgatatgctatacgttacaaattctctgtcaattaggtagcctcttgggaggctaaggcgggtggatcacctgaggtcaggagtttgagaccagcctggccaacatggtgaatccctgactctacyaaaagatacaaaaattggccagttgtggtggcacacacctatagtcctagctatttgggaggctgaggcaggagaatagcttgaactggggaggcggaggttgcagtgagccaagattgcgccactgcattccagcctgggtgacaaagcaagactccatctcaataaaaaattaaataaataaaaataaaataaaataaaataaaaatcaggtagcctcatgctttgccaggtgatctaaaaatcaca

SEQ ID NO: 789259 - DNA, 619 bp, Homo sapiens
ttggcttcacctttttgttttttcagtcttctattgattactttttgataaaatatgctgatggatagaagtattaacatagtgcctggcatgtaaatgctccataaataatggccattaactgtgtttttctttctttctttttttcttacaacttagtactctcccaactacagtggggtcagaagagagtggtgaaggaatgtgaacttasaagtgtcagatacactcccaagtcctggcatgtggaaccctgtgacttaaactaaggcacttggcctccaaagctgtcctcttaaatatttcaaataagacagtgcctcacccaataatttgcaaaaagcaacacctatttagaagagtatatcattattaaagtttcagtaaagccaaagaaagaagataacaatgcaaaaagattttgtttcttgtcagggcctgatataaatggaaaagaaaaagatttctgaattattcctaatgtttaattatctttgatcacgccgtttccacagcttaacaaggagataacacctaactaaattctctgaaaattgcaaggccctgtggaaataatagtttataatgttaatataaacaacatactttcccactgaaa

SEQ ID NO: 789260 - DNA, 579 bp, Homo sapiens
gttttattattactcaaatcagtctccagatcatccattttaatacagtgataatggtcttgcttagcaataagccagtaaatcgagatggcatagcaaaaaggcaatatttagttataaattttgaactgacaaggcatctatagaaataatattgtgtttgaatacatataaagcaaatcaaaagcaagtgaaaaactgcatattctcgctctagggccctccttcctcctccctggcctctgctttgcgaatgctggcaattagcagtagctgtgccccatgccacaggattgacagcagtagcaatacctgataactatccatatcatcaccatcctcatcatctctctggtaggaaaaaataaacacaaaggacaagcattttgtttttcaaaccrcatacagggaaaataattatttaagcttaacacacattaaaatggacagcttacctaacataagcaaaataaaacactaaattgaatctcaaaaaaggtaaaatggatttaattcacttgtctataaagaatttttcacataaagagtcattgaaacataaaaacttggctgggctca

SEQ ID NO: 789261 - DNA, 609 bp, Homo sapiens
tcattatattctaatttaaagtgagcagagtctgaagatttaaaggcaaaccaataaccggtgattgaacaaacgaggggatatgaaaaaaaaagaaaaagatttcagatgcctgctacagatcaattgaaaggtctctactctttggaaatggttcaactcaggctatcattgtggaatcacaatagtttatattttccataactgcagctaatccatggtctatttatctttagggtattacaatttacaagaccattcactattcagcctctgtatgygtccattctcacactgctatgaagaaatacccaagactgggtatttaattgactcacaggtctgcagacctgggaaggtctcagaaaacttacaatcatggtagaagagaaagcaaacacatctttcttcacatggccgcagcaaggagtagtgctgagcaaagggcagggaagccccttataaaaccatcagttctcaggagaacgcactatcacgagaacagcatgggggaaccgcccccatgattcaattatctccacctggtcccacccttgacacgtggggattattacaattcaaggtgagatttgggtggggacacagagc

SEQ ID NO: 789262 - DNA, 619 bp, Homo sapiens
gggatcttactcaaggccaatgccacagaatgattctctgtcccctcttctggtcatgagacctgccaacctttcccaaagctttcaaattctccagctccagattcccacgtcttctactactattaaatgggccgaactaarttctgccagttcaaagcactgtattattctgttggtttctggtacctaaatatgcttgcttgcaaggttagtttttttctttattattattattattattattattgttattattatttttgagatggagtcttgctctgttgcccaggctggagtgcagtggcacaatctcggctcactgtaacttccgcctcccgggttcaagtggttctcctgcctcagcctccggagtagctgggattacaggcatgtgccaccaggcctgactaattttttttgtatttttagttgagttggggtttcactatgtaggtcaggctggtcttgaactcctgacctcgtgatccacctgcctcggcctcccaaagtgctgggattataggcgtgagccaccgtgcccagccgcaaggttagttttatgctttcccttaactttgcttggggtggttagcagtaaatcagtgaatttgtcttt

SEQ ID NO: 789263 - DNA, 619 bp, Homo sapiens
gggatcttactcaaggccaatgccacagaatgattctctgtcccctcttctggtcatgagacctgccaacctttcccaaagctttcaaattctccagctccagattcccacgtcttctactactattaaatgggccgaactaagttctgccagttcaaagcactgtattattctgttggtttctggtaccyaaatatgcttgcttgcaaggttagtttttttctttattattattattattattattattgttattattatttttgagatggagtcttgctctgttgcccaggctggagtgcagtggcacaatctcggctcactgtaacttccgcctcccgggttcaagtggttctcctgcctcagcctccggagtagctgggattacaggcatgtgccaccaggcctgactaattttttttgtatttttagttgagttggggtttcactatgtaggtcaggctggtcttgaactcctgacctcgtgatccacctgcctcggcctcccaaagtgctgggattataggcgtgagccaccgtgcccagccgcaaggttagttttatgctttcccttaactttgcttggggtggttagcagtaaatcagtgaatttgtcttt

SEQ ID NO: 789264 - DNA, 619 bp, Homo sapiens
gggatcttactcaaggccaatgccacagaatgattctctgtcccctcttctggtcatgagacctgccaacctttcccaaagctttcaaattctccagctccagattcccacgtcttctactactattaaatgggccgaactaagttctgccagttcaaagcactgtattattctgttggtttctggtacctaaatatgcttgcttgcaaggttagtttttttctttattattattattattattattattgttattattatttttgagatggagtcttgctctgttgcccaggctggagtgcagtggcacaatctcggctcactgtaacttccgcctcccgggttcaagtggttctcctgcctcagcctccggagtagctgggattacaggcrtgtgccaccaggcctgactaattttttttgtatttttagttgagttggggtttcactatgtaggtcaggctggtcttgaactcctgacctcgtgatccacctgcctcggcctcccaaagtgctgggattataggcgtgagccaccgtgcccagccgcaaggttagttttatgctttcccttaactttgcttggggtggttagcagtaaatcagtgaatttgtcttt

SEQ ID NO: 789265 - DNA, 528 bp, Homo sapiens
atgaggcatataggaggcatcctgtggccaagatgacacacaaaattaacctttatgcatagagaataaactacaggggccagggtgaaagcaagaagactacttagaaggcaaacgtaataatccaggccagagatgatagtggcctggaccagcagatggtaggggttaatgtctttgggcagyctattgggtcattttctttcatgtaatatagggataataagaaatcatctcacaagattatatagaagattacagtagataatctagataaattacttagtacactgccagaatacagctagcatatatagctctactctttttagtgtggttatctagcttttgactgataatttccaggattgggacataccatagtactgactattcaattattggaaatttctaaattgaaaccatctttgctctacattcatttgaaactggtttctatgtaaattctaactattagcgttacttccactctctaaaataaaattggttagaatctaattttactat

SEQ ID NO: 789266 - DNA, 618 bp, Homo sapiens
gctcagtccaatgtaggaaatagtgagctatctagtagtgagataagtaggcctgctattagttccaattctgtcaataactctatgactcgaatcaagttatttctctagaatttcctcatttgtaaaaatggtggcttggtttggaatttttctttttctttctttctttttctttttttttttttttttccagacagaatctcattttgttgcccaggctggagtacagtggtgcgatctcagctcactgtgacctttgcctcctgggttcaagtgattytcctgccttagcctcctgagtagctgggattataggtgcctgtcaccatgcccggctaatttttgtacttttaatagagatggggtttcaccatgttggtcagcctggtctggaactcctgacctcaagtgttcctcccgccttggcctcccaaagtgctgggattacagatgtgagccactgtacccagcttgagatttttctaaaaccatgatttctttttcttcatcattttctcttctttaagctgagaatcctcaattactttaaccagccaaattgttttcctatgggaggtttcagtttggtaaggaagatatatcattcatcttact

SEQ ID NO: 789267 - DNA, 618 bp, Homo sapiens
gctcagtccaatgtaggaaatagtgagctatctagtagtgagataagtaggcctgctattagttccaattctgtcaataactctatgactcgaatcaagttatttctctagaatttcctcatttgtaaaaatggtggcttggtttggaatttttctttttctttctttctttttctttttttttttttttttccagacagaatctcattttgttgcccaggctggagtacagtggtgcgatctcagctcactgtgacctttgcctcctgggttcaagtgattctcctgccttagcctcctgagtagctgggattataggtgcctgycaccatgcccggctaatttttgtacttttaatagagatggggtttcaccatgttggtcagcctggtctggaactcctgacctcaagtgttcctcccgccttggcctcccaaagtgctgggattacagatgtgagccactgtacccagcttgagatttttctaaaaccatgatttctttttcttcatcattttctcttctttaagctgagaatcctcaattactttaaccagccaaattgttttcctatgggaggtttcagtttggtaaggaagatatatcattcatcttact

SEQ ID NO: 789268 - DNA, 618 bp, Homo sapiens
gctcagtccaatgtaggaaatagtgagctatctagtagtgagataagtaggcctgctattagttccaattctgtcaataactctatgactcgaatcaagttatttctctagaatttcctcatttgtaaaaatggtggcttggtttggaatttttctttttctttctttctttttctttttttttttttttttccagacagaatctcattttgttgcccaggctggagtacagtggtgcgatctcagctcactgtgacctttgcctcctgggttcaagtgattctcctgccttagcctcctgagtagctgggattataggtgcctgtcaccatgcccggctaatttttgtacttttaatagagatggggtttcaccatgttggycagcctggtctggaactcctgacctcaagtgttcctcccgccttggcctcccaaagtgctgggattacagatgtgagccactgtacccagcttgagatttttctaaaaccatgatttctttttcttcatcattttctcttctttaagctgagaatcctcaattactttaaccagccaaattgttttcctatgggaggtttcagtttggtaaggaagatatatcattcatcttact

SEQ ID NO: 789269 - DNA, 618 bp, Homo sapiens
gctcagtccaatgtaggaaatagtgagctatctagtagtgagataagtaggcctgctattagttccaattctgtcaataactctatgactcgaatcaagttatttctctagaatttcctcatttgtaaaaatggtggcttggtttggaatttttctttttctttctttctttttctttttttttttttttttccagacagaatctcattttgttgcccaggctggagtacagtggtgcgatctcagctcactgtgacctttgcctcctgggttcaagtgattctcctgccttagcctcctgagtagctgggattataggtgcctgtcaccatgcccggctaatttttgtacttttaatagagatggggtttcaccatgttggtcagcctggtctggaactcctgacctcaagtgttcctcccgccttggcctcccaaagtgctgggattacagatgtgagccactgtacccagcytgagatttttctaaaaccatgatttctttttcttcatcattttctcttctttaagctgagaatcctcaattactttaaccagccaaattgttttcctatgggaggtttcagtttggtaaggaagatatatcattcatcttact

SEQ ID NO: 789270 - DNA, 570 bp, Homo sapiens
tagtgatggaacgtaagccccttatcaggaaaggggctgaaaaaactgagaatgtctagcctgaagaagagaaaacttgagagaacataccttgtaggactttatataaataaaatgcagacctgttttgaattacaaaactaacccaaatatacagaaattacggcggagcaggggagcaggggtgaggtttcagctccatataaggaaaacttttgaataactaatgctgcccaacattgttgatcaagggttgaatgacatctaatatttatgttgtatttctatgataagatcatgtacagcaatgtatgccacttacagttatcatgggtggyttcatgaaactcaaacgaaggtgttacacaactacacattgtactatgataatagctttactgtgaagtccctcacatgttttttccttatcactaagaattgaggaaaagggattagatgacagctgtttaggaatttaggtatctgcctcccacaacctttttactataaattacatgatgtccacgtatgtcaaacgacctgttcgttagtggcagagggaaaactaaa

SEQ ID NO: 789271 - DNA, 606 bp, Homo sapiens
ttgaggaaaaagtacaatattcattgtagtatttacatatttcttaatttatttaacatgaataaaattatctttaagattttttttttaaattttttgagatggagttttgctcttgttgcccaggctggagttcaacggtgcgatctcggctcactgcaacctccgcctcccggattgaagcaattctcctgccttagcctcctgastaagctgggattacaggtgcctgccaccacccccggctaatttttttgtatttttagtagagacggggtttcatcatgttggctaggctggtctcgaactcctgacctcaggtgatctacctgcctcgtccttccaaagtgctggtattacaagcatgagccactgcgcccggccttatctttttttttaatgttcacaggtgatgtttccaagtgttacagccataattccttttttttttcccataagccctgtgtgtttttttgtgtgactttgcatagcatggtgatatttaggaacatgcctctggctcaaccactgactattaacattaacctctccaggatgccaaataggacggcagaacgtttcgacctatctatttagttgtcaata

SEQ ID NO: 789272 - DNA, 529 bp, Homo sapiens
gggagaaactgaaaagtaaacagataattataatacacatggcaatcttgcaatgggggtaaataaaacgaagtgctagaaagatataaattatcaataaggaaatattattggagctaataatcagttacaacagaaaaaacttgtggcatttaaaaaattttccaaattacatgaatttaaagtacacatgatcacagtgggactcaggagacatgtctttctacaaattctctgtgactaagactgacctgctccctttactgatgtatttctggctctaagcctctccttgccagctattttacattcctgtttttcatctttatttttcatttatctctctggctgtttttatctrtaagataaatgttgccacagaaagtcattcgggcacttaataagtgtcaaaccctttccacaacatgtagttacttcattttataaagatttagggcaaagctctaaaaattagtaagacactattagatgaccactgttaacagccatttacctatcaaataagtat

SEQ ID NO: 789273 - DNA, 641 bp, Homo sapiens
tatagaatttttcacccagcggtagagaggttgtggtggcctccatcctctcaaatatgtgaaaagcaaagaattttagcggtttcaaaacacatggaggcagggcacagtggctcatgcctgtaattccagcattttgggaggctgaggcaggtggatcacttaaggtcagaagttagaggccagcctggccaacatggcgaaacgccatctctactaaaagtacaaaaattagtcgggcgtggtggcacacacctgtaatcccagctactcaggaggctgaggcatgagaatsgcttgaacccgggaggctgaggttgcagtgagctgagattgtgccactgtactccagcctgcgtgacaagtgagactccatctcaataaataaataaatacaaaaaaattaaaaaaaagcacatggaaaggagatatcaactgatgtgatgtgaaggaagagcatcattcattcatttttatcttatttctctaacataaatgaggtaatttatgtgcgcatgctcttatgtgcacaaaatgtggtatgtatgtgttgtgtgatgccactgtggggagaagcacccgaagttgttatgaacaattaaaaaatttatttcagagaatactaacagtggggtccatga

SEQ ID NO: 789274 - DNA, 641 bp, Homo sapiens
tatagaatttttcacccagcggtagagaggttgtggtggcctccatcctctcaaatatgtgaaaagcaaagaattttagcggtttcaaaacacatggaggcagggcacagtggctcatgcctgtaattccagcattttgggaggctgaggcaggtggatcacttaaggtcagaagttagaggccagcctggccaacatggcgaaacgccatctctactaaaagtacaaaaattagtcgggcgtggtggcacacacctgtaatcccagctactcaggaggctgaggcatgagaatggcttgaacccgggaggctgaggttgcagtgagctgagattgtgccactgtactccagcctgcgtgacaagtgagactccatctcaataaataaataaatacaaaaaaatwaaaaaaaagcacatggaaaggagatatcaactgatgtgatgtgaaggaagagcatcattcattcatttttatcttatttctctaacataaatgaggtaatttatgtgcgcatgctcttatgtgcacaaaatgtggtatgtatgtgttgtgtgatgccactgtggggagaagcacccgaagttgttatgaacaattaaaaaatttatttcagagaatactaacagtggggtccatga

SEQ ID NO: 789275 - DNA, 549 bp, Homo sapiens
tactcagttaccctttgcgccaggactagacttgaaaacagaaggaattagaatgagctaatcttctcatctctcccttcctttcatgacatattgtagtctctttcataaaaatcagaatggtattggtcagcataattggcaattatttacaatctgtcataacatcacctatctttaagctgagcttgggtggtcaatacatttaaggttcttcttcacctttggatagctatcaaactgttatttaaaaattctgttatcttcccaacyggccaacaatgatggtttccatttttgagactagattccaatataagatcttagaaaatattgctaaatgtagaacatggcatattgataacatgggtgtaaagcacaaatgtgataggaatttggggcatacaaaatttactaattataaaccagttactaacactagcattgacagtggtaccattactactactactaccaattcacaactaaagatagggaggtttaagaggttaaatgacttacataatctaaaacaactagtaaatgaac

SEQ ID NO: 789276 - DNA, 549 bp, Homo sapiens
tactcagttaccctttgcgccaggactagacttgaaaacagaaggaattagaatgagctaatcttctcatctctcccttcctttcatgacatattgtagtctctttcataaaaatcagaatggtattggtcagcataattggcaattatttacaatctgtcataacatcacctatctttaagctgagcttgggtggtcaatacatttaaggttcttcttcacctttggatagctatcaaactgttatttaaaaattctgttatcttcccaactggccaacaatgatggtttccatttttgagactagrttccaatataagatcttagaaaatattgctaaatgtagaacatggcatattgataacatgggtgtaaagcacaaatgtgataggaatttggggcatacaaaatttactaattataaaccagttactaacactagcattgacagtggtaccattactactactactaccaattcacaactaaagatagggaggtttaagaggttaaatgacttacataatctaaaacaactagtaaatgaac

SEQ ID NO: 789277 - DNA, 482 bp, Homo sapiens
tttcagatataaaaatgttataagctgagcaaagtcttttcagtttttcaagcattattaatgctttctttttaaaaattaatagttttttcttttttttattttgagacagagtctcgctctgtcacccaggctggagtgcagtggctcgatctcggctcactgcaaactccgcctcccgggttcaygccattctcccacctcggcctcccgagtagatgggactacaggcgcccgccaccacacccggctaattattgtatttttttagtagagacaaggcttcaccatgttaaccaggatggtcttgatctcctgacctcgtgatctgcctgcctcggcctcccaaagtgcggagattacaggcgtgagccacctcgccaggccaaaattaacagtttttaaaagtttttgcattatttctttttctaaagttatgatatggcttggagatagctgttcatgaattctgctccctttaa

SEQ ID NO: 789278 - DNA, 632 bp, Homo sapiens
cttaaattctcctctgcttcactggatgccactggatacttgcaaaaacaaacaagcttatactgagtacgtccttgcaaacatttactatgtgtagcagtttggctatatggtgcttcagaagaatcctatcaaggaattcagaagagcaaaaaaatagcctgtaaacacttaacactttaaaataaccatacacacagaatgacatttatttttwtttatttatttatttatttatttatttatttatttatttatttatttatttattttaagacagggtctggctctatcgcccaagctggagtgcagtggtatgatctcggctcaccgccacctccacttcccggcatcaagccatcctcccgcttcaacctcctgagtggctgggactacaggcatgtgacaccacgcccagctaatttttgtattttttgtagagacagggtttcaacatattgtccaggctggtcacaaacccctggaccccagagatccacctgccttagcctccaaaagtgctggaattctaagtgtgagccactacacccagccatagaatggatgttgttatgaaaagttctgattcagaaaagtcattttgctctcacatgaagatcctctgcctctct

SEQ ID NO: 789279 - DNA, 613 bp, Homo sapiens
aaagatataattttatttgcaccttaaaatgaatacttaagctgctatatacaacatgagtgaaagtggagggaaacaatcaggaggttattgcagaccagggaggggaaacctgtgacttaggtgagtgaaaatgtcagtgaagatggatggagtggatggattgaagattactattctggacataagtgataggagctgctgactaatgagatrggggaggattaaggaagaacaagaatcaagctttctggcttagacaactaaatgaatgctgttgctattttctgataaggaaaagattgaggagaaaaaattgggagaaaatatcgagaattatttactggacatgttacatctgaagtgtctatgagaaattcaaatgaagatgccagttaggacttgaccccacatattgtcactcttttctcttgcaatctattctttaacataaaaacaagatgttcctgtggaaagttaagtcagatgttctctaaactatcctcaaattacacagtggcttatgaaaccctacctgacctgacccaccatttaatcttggacttaagctcctctattctctctgctggagccagccatgctgcgagcctca

SEQ ID NO: 789280 - DNA, 613 bp, Homo sapiens
aaagatataattttatttgcaccttaaaatgaatacttaagctgctatatacaacatgagtgaaagtggagggaaacaatcaggaggttattgcagaccagggaggggaaacctgtgacttaggtgagtgaaaatgtcagtgaagatggatggagtggatggattgaagattactattctggacataagtgataggagctgctgactaatgagataggggaggattaaggaagaacaagaatcaagctttctggcttagacaactaaatgaatgctgttgcyattttctgataaggaaaagattgaggagaaaaaattgggagaaaatatcgagaattatttactggacatgttacatctgaagtgtctatgagaaattcaaatgaagatgccagttaggacttgaccccacatattgtcactcttttctcttgcaatctattctttaacataaaaacaagatgttcctgtggaaagttaagtcagatgttctctaaactatcctcaaattacacagtggcttatgaaaccctacctgacctgacccaccatttaatcttggacttaagctcctctattctctctgctggagccagccatgctgcgagcctca

SEQ ID NO: 789281 - DNA, 613 bp, Homo sapiens
aaagatataattttatttgcaccttaaaatgaatacttaagctgctatatacaacatgagtgaaagtggagggaaacaatcaggaggttattgcagaccagggaggggaaacctgtgacttaggtgagtgaaaatgtcagtgaagatggatggagtggatggattgaagattactattctggacataagtgataggagctgctgactaatgagataggggaggattaaggaagaacaagaatcaagctttctggcttagacaactaaatgaatgctgttgctattttctgatarggaaaagattgaggagaaaaaattgggagaaaatatcgagaattatttactggacatgttacatctgaagtgtctatgagaaattcaaatgaagatgccagttaggacttgaccccacatattgtcactcttttctcttgcaatctattctttaacataaaaacaagatgttcctgtggaaagttaagtcagatgttctctaaactatcctcaaattacacagtggcttatgaaaccctacctgacctgacccaccatttaatcttggacttaagctcctctattctctctgctggagccagccatgctgcgagcctca

SEQ ID NO: 789282 - DNA, 508 bp, Homo sapiens
ttgttagtaccctgaactttttgatcagctaatgttaattaaacattttttacctatatttatttaaaatttgcatataattttgttttcctagtttaaggattaaggtaatacttacatagttaaatgaattggacactttgcctaatttaatacattgatttaatttgcagaagtatgtttggaaagagaaatagaatcggttccttgacattttgatagtatttacctgtwataccctctaggcctagaactatttgaagagaatgcctttttattacactcaaatttctttattggttatcaatcttttcaaatttcttactttcttttgaaccaacttgggcgtttcattatttgcctcaaatttacccacattttcaagtttattgatgtgtaattgtacataatattctttatgattttatatatctattttacctaaggttatttctcctttttatttaatatttggtctattaagtctgttttatgaggtgcttagcgt

SEQ ID NO: 789283 - DNA, 634 bp, Homo sapiens
tattatttaggtgttaacattcacagaaaagataaagcaaacatgtagatttttttgaaaacatgactaagtatattttctgttttcaccttatgagaaaatgtaggtattttaaagtgaattatttatatattttgaactctcattatgtcaaaaatattattattaaaagtcaataagttatctgtgttttaaaattagtatacatactacatttaaaatttaaataatttcatgtaatataatatgtaaagagtgcccctacatcattttaaaactaatagaacaccagatattatcaaagttcaaattatagtacaggttgagtatctctaattctgaaatccaaaatccaaaacactaaaaaattatgaactttctgagtgctgacatgactccactagtggaaaatttcatacctgatctcatatgacaaatgcayacaattattaaaaatgttgcataaaattaccttcaggctaattgtataagttttatatgaaacataatgtattttacatttaaatgtgtgttccattcctatgatatttcattatatgtatgcaaatattttaaaaattggaaaaaaaatgtgaaatttgaaacacgtttggtccaaagcattttgaataaa

SEQ ID NO: 789284 - DNA, 567 bp, Homo sapiens
ctggaaaatactagaaatggtttacagaaaagtattaaaaataacttcaatatattttcacatatgcaactttgctcttattcaaagaaatgaacatgaaaattttaagactatcccattttcacttctctgtttggcaaaggtctaaatgtttgttaacaaaattgtgttgatgggtgatatgatttggctgtgtccccacccaaatctcatcttgaattgtagctcccataatttccacatattgttggagggaccttgtgggagataactggatcagagggacagtttcccccgtactgttctcatggtagtgagtaagtctcatgataattgatggttttataaacggaaatccctttcacttggttctcattctctcttttctgttgcccygtaagacgtggattttgccttccaccatgattgtgaggcctccccagccacatggaactgtgagaccgttaaacctctttttctttataaattacccagtctcaggtatgtctttatcagcaaccatgaaaactgactaatacagtggtgttgtgaaaaaagaggtactct

SEQ ID NO: 789285 - DNA, 623 bp, Homo sapiens
tagtgaagtttaagttaaatatatggaattgaaatgtaagacaataaaaacacaaaagctagggggtcttacatggagttaaaatattctgttgttctaggattattatgaagtgtaatgttctggttaggttataatcaaggatacaagttataatctccagtgtaacaactgaaataacagggaatgaatgcatatctagcaagttaataagagaactataaattaataaaaatatttggttaatccaaaataaataagtatgaaaaatggatgggtcaatagataacagatgataagatgatataaacccaaatatagaagtaattaaattaaatacaaaaagattaaataaacctagyaaaagtctaagatcctcagacttcatgaaaaacaactaccaccaccatgtgtagcttaaaaaaggcatactttaaatataaggacatcaaaatgttgaaaatgaaaggatggaaaaagaaagctggtgtagatacactaatttcaaataaagcattaaggcaaaaaggactactagaagtgaaaaggagcatttcattatgccaaagggaccagtccaccttaaatatatcataatcctaagtctatttcatccttaataa

SEQ ID NO: 789286 - DNA, 510 bp, Homo sapiens
tactctcagcaaatttcaagtatacaatacagtgttaactatagtcaccatgccgtacattagattcacagaatttattcatcctgcataatggaaactttgtaccctttgaccaacatttccccacttcccccatcctccaacccctgacaaccaccactctactgtgtgcttctgtgagttcaactattttaaaatctacataagtgagatcatgcactatttgtctttctatgtctggcttattttacttagcataatgtccttcaggttcacccacrttgcaagtggcagaatttccttctttttttaaggctaaataatagtccactgaatattacgtgtacatatatgtgtatatatatatgtatatatgtatatatatatatatatatatatatgcacatacgcacacacagccctcattttcttttaaggctaaataatagtccattgaatattacatatatatatatatgcacatacacacacacccttcattttcttttt

SEQ ID NO: 789287 - DNA, 601 bp, Homo sapiens
tggttcctggagcaagaagtccacagtgtgagtctccacatgctgttctgtccatccaagttaagagctgcaggtcagccctgtctcctatccaccatcttgaacaatcatgccagaaggcaaagaggaatcgggcatgactacgtggacagagaaggaggaagaaagctgtgtatacattttatattcaacaagacaggaaatctcgcatatcaataaggaaaaggtagacaacacagtagaaaaacaggcaaaacacttgaacaggtattkcacaaaagaagatactctgttcattaatcatatgaaaagatgctgacattcattatttttcagtgaaacaaaactaaaactactttgtggtaccactatatcactgtggtatcactggaatggctttaatcatagacaagttataccaagttccaatgttgagtcactatgagctacttagtgttatgcagccctgggacctctccggttgccagtgcctccatctatgcataccaaatccttgtccactcagtcttctgaatgagattaagatcttgactccagaggcaaatgggcaaaatgtttaataaggttataaagtcacaca

SEQ ID NO: 789288 - DNA, 567 bp, Homo sapiens
tttaaagaacttgtctagtgagatgagtaactgagttaccttgaatagaagttagtctaaataattttttactcatgtaacaaaaggtaaatttcaaataaaacgatcatgctatacagaccagtgattttaggcaaaattaaatgccaactgtgattcagaaactaattacgttttccttaattttagaaatacagatttgatccacattttaaagggttcattttcaaagtatatttcaaaaaaatattatttctagtggctyaattttcaaataccttggccttccatttcgattcagccaactaccgagcttgctcttgcctttggattgattttggtattgttcagtgccattctgggtaaaaacataggaaacccatcaaattttgcttctcctggtattttcacaggtattacttttctactcttcccgtaatatgcctcaagcttttaatgttagcaagtttagaaaaaagattttcaaacatgaatttcagatacacacacacacacatacacaaaagtacaaaatacctgtcaaaatttggcaatatgccaagagct

SEQ ID NO: 789289 - DNA, 634 bp, Homo sapiens
ctttttttccattttttaattgtggtaaaatatgattaacataaaatttaccttaaccatttttaagtgtacagttcaaaggtattaaatacctttataatgtgtacaaccatcaccaccatccatctccagaacacttttcaccttgtgtaaagaaaccataaccactacacactaactcccccttccccatgcccctagctcctagcaactatcattccacttkctgtctctatgatcttaattactctaagtacttcatgtaagtggaaatatacagtatttttctttttgtgactggcttatttcacttaagcaaaatgtcctgattcatccaggttgtatcgtatgtcagaatttcctacctttttaaggcttactaatgttccttacacatttgctcatctattcatccttcagtgggcacttaggatgcttccctgttttagctattgtgaataatactactattatcatgcagtatttatatatttgcatgatatatgcaaacagggatttatattcctctttgaaggcctcctttgaattcttttgggtatatacccagaagtggaattgctgaataatacagtaattgtatttttaagacactgctatgctgttttccacagtg

SEQ ID NO: 789290 - DNA, 569 bp, Homo sapiens
caggaaaatcgcttgaacccaggagggggaggttgcggtgagcccagatcttgccattgcactccagcctgggctacaagagcaaaactccatctcaaaaaaaaaaaagaaactagaaaagaaaataaaaccaacagtaagcagaagaaaggaagtaaaaagcatcagtgtagaaatcaatgcaatagaamacaggaaaaatcatttacaggaaataaatgaaaccaaactctgtctctttgagaaggtccatagtattgataaacttctattcaggcttatcaggaaaaaaagagagaatacaaaaacaacctatcaggaataagagaagtaacataacaacagattcaacagatgctaaagagataataaatggtaattatgaacaacattgtgccaacagatttgacaacttagatgaagtggacaaatgtctccaaagacacaattatctagtcttactcaaaaacaaacagacagaatagcccggtatctattaaagaaattgaagctgtaatttaaaacctttccacaaagactccaatgctaggtctaaatggcttcagtga

SEQ ID NO: 789291 - DNA, 604 bp, Homo sapiens
atgatactgaaatgcacgtccgaaatgctgcctggagcttgtgaaggacagtcctgagtgagtgagttaacaggggcttcttaactgtgcctccctttgtttaatttggattaagtgattctctttaaattaaggaaatgcccctgtcaggactttaaaaatgttatatatatatacatatatatgtatatgtatacatgtataatcagaagatcaaaaagcatttttatctgttgacacaggtctaattcctgaggaatttgtaactctgccttgatacgcccaccrcacccccacccccacccccagctttggcattgaaattcttgtgtgtggtgcgcttgaaaggaatcccatcctgcctgcgtctgcggaggctcccggcccgtgtttggtcagcaagcaacagtgggtggtcgggctgctgtgcaggacaacggcccgctgtgcgcaggaaaatgtgttcaaaggtgtttaagggccatgaggaagtcggccacccttctgagagtctgaggctgcagatcagtgttccctacactattgtagactgtgagaaaacttgctgtagtaggcatgaaggatgagaaaatacagtaacctt

SEQ ID NO: 789292 - DNA, 537 bp, Homo sapiens
atattttgtttccctcttaatttctactttgaatgttgggttatttagaagtgtattaatttccaaatacctggatacttttctggatattgtgtttctattgctaacgaagattcctttgtaatcttcggaatttcggtctttggaattgcctgtgacttactttatggcccagcatatsgtctatcttggtgaacattccatgagcacctgaaaaggagttttataaatgtcaggtcaggatgaccaacagtgctgttcatatcttctatgttttttgtttgttttttaatatctagttattaatattgaaagggaatattaaaacctcaaactatgattgtgtatttatctctccctatcaatcagtttttgtttaatgggttttgaagctcttgtattaggtgtatacagttttgattgttatgtctttctgatgaatttgtcctttcatcattataaactctcctaccaaattgctttgtggtatcacttccccttcagattgaagaacttctttcagcatttcttgtcata

SEQ ID NO: 789293 - DNA, 590 bp, Homo sapiens
tacgtgtaatttgctctgcagatttgggcatgctttgaaactgtgtgccctcttctgaagagctagaggaaagcgcagggctgtaggaaggagcagaggagctggggacacttgcttcccttgccggtctgcaagtgaaacscagaagctggattgaattctgggaagagttctggggcttttgatagctatttaatctcacacaagaaagcatgatagtttttaaacacaatttatttgaattttcttatttttcttgttataaaactatcttgttgtattaagagcccatccgttaaaaatttagatgaagtttccaacagtttaaaaaatagtcagttcttcaagccagtgaaggccatgtgaaataacaaatgtgaatcaaaacagtgaaatcagccgttgctctcaccacaaagcagttttggtctgcgtgtgcaggaaagagttaaggtttctagttaacgaaatggttaatagtaggttaagatctcacctttagatatatcttaaatatagtgtatttttagataaaaatctttaaaacagccaaataattgatgaatattaagagtcagcattttaaaaag

SEQ ID NO: 789294 - DNA, 658 bp, Homo sapiens
atttgctcttattcctcagttttaaaaataaggtagttctctagcaaggaaatttcattagggatgacttttttcctttaatgaagatactatttgtatttttacattgctacctgacgttaattgttgggttgttcttcattctgaagtgggttaatatttaaaatcacaaaaatctgatattaaaatacttaaaaatattaagttgtctgttgacctggagtgataccaaaatayctactgtcaataattaagcaggttatacattgaaacagttgtttaaaaaacatatagactggtttttatatgcacagaatcacttgagcaagtgaacattgacatgttagcagtatttctctcgcgaggtggagtttggagaggctttcaatctcttaagttatttaagtttttcataacaaaaattattagaaaaaatatcaaagacatgcccattttgaaaaaaataattttgaataatgaatatatttaaaaatgtgttattataattaaaatataccagtagaaaccatagtcctgaggaaaccttttaatgccattattagaaaaacaaagttgcagacattagtgaattataggtattttagagaaacccctaaaattcattatttcaagcaatgtatctttaaagcatagttgc

SEQ ID NO: 789295 - DNA, 658 bp, Homo sapiens
atttgctcttattcctcagttttaaaaataaggtagttctctagcaaggaaatttcattagggatgacttttttcctttaatgaagatactatttgtatttttacattgctacctgacgttaattgttgggttgttcttcattctgaagtgggttaatatttaaaatcacaaaaatctgatattaaaatacttaaaaatattaagttgtctgttgacctggagtgataccaaaatacctactgtcaataattaagcaggttatacattgaaacagttgtttaaaaaacatatagactggtttttatatgcacagaatcacttgagcaagtgaacattgacatgttagcagtatttctctcgcgaggtggagtttggagaggctttcaatctcttaagttatttaagtttttcataacaaaaattattagaaaaaatatcaaagacatgcccattttgaaaaaaataattttgaataatgaatatatttaaaaatgtgttattataattaaaatataccartagaaaccatagtcctgaggaaaccttttaatgccattattagaaaaacaaagttgcagacattagtgaattataggtattttagagaaacccctaaaattcattatttcaagcaatgtatctttaaagcatagttgc

SEQ ID NO: 789296 - DNA, 595 bp, Homo sapiens
ttgaaaaatggtcttccacattaagacactagaaagaagctagattattgaatccctctttagtctttatataattatcttaatttaaatagtaaaaattcaccacaacagaaaccaagcaatgaaaagggatacaaccatatgccactattcaaaacatgctagcaaaagtaagaaaacaacatcctagtaatcgcagtttcgtggagtgcagcagcaggcatgtgtgtataggagaggcatggctgatgaggcaaagaatacctcaatacacttcccttctgttgccctacactacagaaagyggcttcaaaggagtacctgccctccaacatgcacacaagtactttagtactcttcctaggtcccaagcaagtggtggtagatgtcaaagagaattcacatatactttttaaggaaaataaagcaattggcatctctgcctattaagcaaaaaaggaattgaaaaaaatgacatttcagctatgtaattatattatagggtatataacaagaaaaagtaaattggaaaatataatgcaaataacagaaaaataagcatatataaacttcatgctaagaagtctttaaaaat

SEQ ID NO: 789297 - DNA, 619 bp, Homo sapiens
gatacatttccagaagcagatctggatctctagctgactagatagagaaactagttggttaaatattgacaataccgtactctttaagtattatcaattcaatatctgtttttttattatttcttcacatagtgtaagtacgtatgctttattttatggtttttataacttaattttcttgacaatgacatctatgtcagtcagaacacatttttattgagtgttaataaaactaattactccttaagaaaccaattattccctatcatatggggccagaccattaccaaattatcataaggggaaacataatataaagaatagcaagaatagayattggacttatgtaggcatggatttttgaaatataacgaaaaccttgcttatctagatactgaatatttagcttcaatttaaatatgctaaaaggctggacatggtggctcatccctttatcccagcactttgagaggccgaggcagggggaattacttgaggaccaaagatcgaaatcagcctgggcaacatagtgagaccctgtctgtaaaaataaataaataaataaataaatagcttagtgtggtggcatgcacctgtagtgctagctgtttgggaggct

SEQ ID NO: 789298 - DNA, 615 bp, Homo sapiens
aaactcagtgcgtcctgcccggggtttaagcgcgggaagtgggagaggcgggtggcgcccgagcgcagtagcaggggcgtagggcgcagggcgcaggagcgcgggaccaccggcgccggagcgcggcagggagcgctcgcgggggcgcacagcagccaagcccgcggaggaggagcgcgcgcgcgcagcatgggctgtggaccttcccaacctgctgaagaccggagacgtgtacgcgcgcccaagaagggctggaaagaggaattcaaggtaataaacaaacaaacaaacaaacaaacaracagacagaaagccttttgcctgggaggtctcgcgattcccacgcttgggggcgacaagagttggctggagcagggtcggtcgaggctagttaacaggtgggagcaactttattctgccggtgtttaactgctgtcttaaccgggactagacggatgcataaatatcaaaatatatctatctatatcgatagagagtatagatacagatatatggctataagatcaattttgagagcctttggtgtttaaagagattacgaaggtggtcacaccccagggcacaggcaaggaataaccggatgagcagcatgtt

SEQ ID NO: 789299 - DNA, 615 bp, Homo sapiens
ttctttcctttgtcctgactttagataacctgatgactatgtaccaaggcaatgatctttttgcagtgaatttcccaggtgtccttttagcttcttgtatttggatgtctaaatttctagcaaggccagggaagttttcattgattattccttcaaacatgttttccaaacttttagatttctcttcctcaggaacaccaatcattcttaggtttggtcatttaacataatctcaaccttcttggaggctttcttctttttttgttctcttttctttgtcttygttggattgggttaatttgaaaaccttgtcttcaagctctgaaattctgtcttctgcttgtttgattctgttgttgagactttctagtgtattttgcatttctttaagtgtgtccttcatttccagaagttgtgattgcttattatttatgctatgtatttctctggaaatgttttcatccatattctctaactttttttaaattttctttaagtcggtattcacctttctgtggtgcctccttgaatagcttaataattgaccttctgaattcttcttctggcaattcagagatttcttcttggtttggatccattgctggtgagctagtg

SEQ ID NO: 789300 - DNA, 526 bp, Homo sapiens
catcaattgaaacaataaagaaatatatcgatgtatttaactagaacacaaaaagtaaggcaggttcatgactggttgttccagggcttaacaggctcctgtgacctcaacatcagctttgtcctaaggtgcaaattccttgtagtcataggatggctttcagtagcagctggagctatatggttcctcccttacttctagcagaagatggtcatttcaggaagctttcccatcaaagcaaaaaggacatttcytaagggactatgaaagtggctccttgcattccttatgcccagattgtgtccatgccaattcctaaaccagtcactatctaggcagtggaaattatccataggccaatcaaatctccctttggagtgagggaccggaaggctttccctgaagcaagcgggtaaggggtggattctggaatcaaactgacttccactcagaagggagaaaggcaaaggaatgatgaacaggcaagcaccaatgtaaaccacaatcaccatcctggattcacttt

SEQ ID NO: 789301 - DNA, 647 bp, Homo sapiens
ggtaagctagtaaaacatagttcctacccaaaacaagcttatattccaactcccattttagaggtcaggtgatggtgaagacgaactgcagctggggatagagaagggcctgatcctttcataatctctctcagtcagtcttccctcaatgccaatagaagaaaacacagagtctggccgggcgcagtagctcatgcctgcaatcccagcactttgggaggccgaggcaggtggatcacctgaggtctggagtttaaggctagcctgaccaacatggtgaaaacccatctctactacaaatacaaaaattagccaggcatggtggcacatccctataatcccarctacttgggaggctgaggcaggagaatcacgtgaacccgggagatggagattgcagtgagttaagatcatgccattgcactccagcctgggcaatacagtgagacattgtctcaaaaataaaataaaataaaataaaagacagaatctatgaaaaaaatgtgcataattctagagtggtcaacaaattcagtatttcctgaactatttttatgcccaaattactttggaggccatgcaactgcccaaattgcaccagtgatctggtttcaccacaacttgaaatgctggccacagggtaatgc

SEQ ID NO: 789302 - DNA, 690 bp, Homo sapiens
actatctcctaatttacaaatgctagttaaaattacaaaaaaagtatttatttaaaaatattacgaacatatgttaaacgttgtaaaattcaaaaggttctcaagaaacaaaatttttggtccgggtaatatgatattctcaggtttactaaaaccatcacaaacaagctactagtccagtattttaaacataaaaatttacataaacctataactgctattttcattctttgataattgcactatcaccacaaagaaataaacacctactattcacgaaaataaattcrcaaaaatattttctccctgttgtaaatagaaacatcaaataattagttttctaaaatgaaaattgtcaagtttcctagggctttgttctacacataagaatcctttgttttcaacgcaggccatttcctttgctctaattctgggattattgatatgagagtttgtccaggaggtagcaggaagctgggccctgtggttgtactgcagaagcagttaagaaaggaaaactagcagaggtatttttcaatgaaggggcaatcaataaaagactctgagagcaaggaacagaaatttaagtggattctgataagcactggatgagagtctccagaagtggacaggtattgaacttgttccagtacgtttttttttttaattttatttttttgttcttgtttc

SEQ ID NO: 789303 - DNA, 600 bp, Homo sapiens
gcatgagtgaacgtctcagagtgatgaaaatgtcctatatctttactagggtagtggttacaaaatggtatatacagatataagatttcattgaattgttcagttgaaatatgcaatttactgtcaataagttataataaaaatgtaaatcaatcgagaaaagcatagatatgtttatactatctatgtatctgcacattttgtagtataacgtaaagaaaaaaaatttaacagcatccagaaaaagaaaaaaaaatcatattatctacaaagtaacatcatttagacaaaaaacagatttatcaacaacaatggaggccaaaatacaatggaatacaatctttaaaatgctgggagaaaataaatatcagcctaaaattctctaactggctaccctgtcattcaaaagtaaaagkaaagtaaaataatttgtaggaaacagattaagaaagtttttcacatatagaccctcaatgagaaaactactaaagaatgtgcttcaggaagaagacaatggaatctaaaaggaagaaatggagtgaaaaatgtgatatagaacaaggagatagatagatataaataagcatttactgtaaagaa

SEQ ID NO: 789304 - DNA, 600 bp, Homo sapiens
gtaggtttctaattagacaacatatagttgggtcatgtttttgatccactctgacaatctctgtcttctgattgttgtatttaggctgctgacatttaaagtgattatcaatatatttgaattaatatctatattatctgttactgtgttctaatggttgccattattctttattactgtttttgtcttccacaattttttcccttttatggctttcactgagcgttttgtrtgattcaagtttttttccttttttaacataccaattatgcttcgttttaaatttttttagtggttgccctagaatttacaatatatatttatagctaatccaagtccactttcaaatagctctatactacttcatagagagtacaattattgaatttttaccatattttaccatgaatctctatctcttctcctttgtgtttttattggacatcttatttttcaaatgatttaagtttttagataattcatgtaagtttttagataatgctataagatatagaaactgtaaaaagatgatgcttttaaaatgccacataaaatgtgtggatcctaccacagctcatgcaaagcctacctgaactcttc

SEQ ID NO: 789305 - DNA, 573 bp, Homo sapiens
ctcaatgcccaattaatatatgctgagcatatgcattacattgcaattttcctctgtaaaatacactcacattagtgtttatcagatcttctcatttggtttggattatgcatctaatgtgatgattttgttttgtgtgttaattctaaactctgtagcactggcaacccattatctgcaaatttttaagtacatttcttcactcttctgtcaaatcattttaraaaatttgatattttaaagtctagtacaaaatattatattaacttggccaggcgcagtggctcatgcctgtaatcccagcactttgtgaggccaacatggtgaaaccccgtctctactaaaaatacaaaaattagcctgggttggtggcgggtgcctataatcccagctactcaggaagctgaggcaggggaatcacctgaacctggaaggtggaggttgcagtgagccaagatcacaccattgcactccagcctgggtgacacagcaagactcttgtctattaaaaaaaaaaaaaaaaattgttaacctcttgctccaggaagaatgtaagaagaactaaaatttatt

SEQ ID NO: 789306 - DNA, 602 bp, Homo sapiens
ttctcagtacctggagacatcaggatttgtacctagatattatggttcctaaaaacatgccctttaccaatatactgtactgtctccctatcttcctgttattatctattggcccttttcatcactatgaatgacttttggcatagtttgtattgtctgatattattatagccatgtaaaagaaatccagactttggcagcctgtggctgctaagtggattacaaaggcatccagaattcagcttccatagcttctgacctcaaggaaactcagagtctaggagagttgctgaagttccagccaacacaaatgtattgcatttcagaaaaagaagacaggcagragaacacaaaatacttgtccatttaaaactctgctccctaatatgatagccaccagctgtatgtggctattgagcatttgaaatgggcatagcctgaactgaaatgtgctgaaagtgtaaaatgcacaccagaatttcaagatttcatacaaaaaatatggaagttaaccatttattatattgatttcatgttgaaataatattttggatatattggtttatataaagtacattattcaaattaatagcccaggcatg

SEQ ID NO: 789307 - DNA, 619 bp, Homo sapiens
aaatagatgacatactctggatagcttaaagagagtttaataaaggcactatttacaaggatatgagtagggcatagggaattcgctaagcatggtaccgtaccctggggctagtaacagcatggcaccattaccactcagcattaatgttaaaataaagatcataagattgatagaacagactctttgtggcaataagataccaaattataaacaggacctasgctatgccaggcaagcgttaagtcatgcactcctacacttaaaggataaactgtgctctaactgccacaagggttttctttttctctagcagctaaagaaatgctagtcttgagataagcaatagtaaaaaaacgttgcagctcatgccaaccgtgactaactgaacccctgttgcaccagccacaactatagccttgattggacaagagactggtttcaataactttcccctgataagaccaccgattacggactggttctggctggtttatggaggttgtgcatttatatgcgttcatgtcctgaaaagaccttctgatgtgcaggacctaatttttaaatgttacgtatagggcctaacatttaaatattaagtctccaccccaaggtgaac

SEQ ID NO: 789308 - DNA, 619 bp, Homo sapiens
aaatagatgacatactctggatagcttaaagagagtttaataaaggcactatttacaaggatatgagtagggcatagggaattcgctaagcatggtaccgtaccctggggctagtaacagcatggcaccattaccactcagcattaatgttaaaataaagatcataagattgatagaacagactctttgtggcaataagataccaaattataaacaggacctaggctatgccaggcaagcgttaagtcatgcactcctacacttaaaggataaactgtgctctaactgccacaagggttttctttttctctagcagctaaasaaatgctagtcttgagataagcaatagtaaaaaaacgttgcagctcatgccaaccgtgactaactgaacccctgttgcaccagccacaactatagccttgattggacaagagactggtttcaataactttcccctgataagaccaccgattacggactggttctggctggtttatggaggttgtgcatttatatgcgttcatgtcctgaaaagaccttctgatgtgcaggacctaatttttaaatgttacgtatagggcctaacatttaaatattaagtctccaccccaaggtgaac

SEQ ID NO: 789309 - DNA, 619 bp, Homo sapiens
aaatagatgacatactctggatagcttaaagagagtttaataaaggcactatttacaaggatatgagtagggcatagggaattcgctaagcatggtaccgtaccctggggctagtaacagcatggcaccattaccactcagcattaatgttaaaataaagatcataagattgatagaacagactctttgtggcaataagataccaaattataaacaggacctaggctatgccaggcaagcgttaagtcatgcactcctacacttaaaggataaactgtgctctaactgccacaagggttttctttttctctagcagctaaagaaatgctagtcttgagataagcaatagtaaaaaaacgttgcagctcatgccaaccrtgactaactgaacccctgttgcaccagccacaactatagccttgattggacaagagactggtttcaataactttcccctgataagaccaccgattacggactggttctggctggtttatggaggttgtgcatttatatgcgttcatgtcctgaaaagaccttctgatgtgcaggacctaatttttaaatgttacgtatagggcctaacatttaaatattaagtctccaccccaaggtgaac

SEQ ID NO: 789310 - DNA, 564 bp, Homo sapiens
gtcctttgcactcacaccacaacaatcaccagaatacttctgtgaccagatgtatgagagatttcccccaatgcaagcaatcgcttctgcagtggacaccaggtgggtgtcctcccacccagttcaattccaacattatctacctggagacagtgtcacatcccacaggttgagggctccccacttccaatcccaatctaaagccccaggttgttttacctatgcttctgactaactggctataaattggggttcccacaacctcttactccagtctgattaatgtgttagagcgacgcacagaactcagggagacagatttaccagtttattataaaggatattacaaaggatacagttgaagagatgcacagggcaaggcatgtaggaagrggatgccaccctccatgtgctcagccatctggaagctttctgaatccagtccttttggatttttatggaagctttgttaagtaggcaatgattgattaaatcactggctgttggtatcaacttaaccttcacgccctctctcctacccagagattaacaggcaggactgta

SEQ ID NO: 789311 - DNA, 595 bp, Homo sapiens
acggagctaaagaagtccttgagaaatttattttaatacatgattacaaattatattaaacaaaaaagttatctaaacttttacctttagaaaatagaacagtaaattaaactcaaagcaaacaaaggggtgctgtaataagaacagaatcaatgataytgaaaacagaaaaataaaatcaatgcagccaaacgcaggctctttgaaaagatcaatataattcataaatacatacactgaaacatcaggaataaaagatggtacagcactatagatctaacagacattgaaagaataataagaggctgggtgcagtggctcatgctggtactcccagcactttgggaggctgaggcaggtggatcacttgaggccaggagattgagaccagcccagccaacatagtgaaaccacatctctactaaaaatacaaaaaattagctgggcatggtggtgtaatcccagctacttgggaggctgagacaggagaatcacttgaacctgggagacagaggttgcagtgagccaagattgcgccactgcactccagcctgggtgttaaacacagcgagttctaagtttctcttcaaagaat

SEQ ID NO: 789312 - DNA, 623 bp, Homo sapiens
ccttcttatttatttattgttgttgtcttccccatgcagatagaggaccagcaaagctccctcatatttccaaaggcccagggatcctcaaaacatagactaaagcatgcataggaagatatgagggtggatgacaggagatgacagtagtgtctagatgcccrtgaaagcttctctgtgaacctgtttggagtccaaatagggcaggacaggacagcaggtggaatgggtggaggagtaacaatggggactcagatcaagtcccaccaggggtggccttgggctcaccacttcttttccctcccctgctgatatggtttgggtctgtgtccccatccaaatttcatgtccaattataatccccaatatgggaggtgaagcctggtgggaagtgattggatgatgggggtgggtttcccatttggtgctgttctcgtgataatgaatgagttatcatgatatctgttgtttaaacgtgtgtggcacctccccactctctctcttcctcctgctgtagccatgtaaagatgtgcctgcttccccttcaccttctgccatgattataagtttcctgaggcctccccagctatgcttcctgcacagcatgtagaaccatgagtcaa

SEQ ID NO: 789313 - DNA, 623 bp, Homo sapiens
ccttcttatttatttattgttgttgtcttccccatgcagatagaggaccagcaaagctccctcatatttccaaaggcccagggatcctcaaaacatagactaaagcatgcataggaagatatgagggtggatgacaggagatgacagtagtgtctagatgcccgtgaaagcttctctgtgaacctgtttggagtccaaatagggcaggacaggacagcaggtggaatgggtggaggagtaacaatggggactcagatcaagtcccaccaggggtggccttgggctcaccacttcttttccctcccctgctgatatggtttgggtctgtgtccccatccaaatttcatgtccaattataatccccaatatgggaggtgaagcctggtgggaagtgattggatgatgggrgtgggtttcccatttggtgctgttctcgtgataatgaatgagttatcatgatatctgttgtttaaacgtgtgtggcacctccccactctctctcttcctcctgctgtagccatgtaaagatgtgcctgcttccccttcaccttctgccatgattataagtttcctgaggcctccccagctatgcttcctgcacagcatgtagaaccatgagtcaa

SEQ ID NO: 789314 - DNA, 560 bp, Homo sapiens
tatgtgtgagtgtgtgtgtgtgtatatatatatatatgtttgtatatgcaacaattatcttagaaaggatagcaagaaatgggtaacagtggttgcctttggggagggaaactgggtggctaggtgaaagaggtggagatagacttacttttcactgtttaccctttttgtacctttgaattttgtactacatgcatctattactagtcaaaaataaatacataatttattttttaaaataaagtctttgttgaactgctccataaaattaatttcatccagagaaatgaatgttttggtggctgattttgttatattaatattatatgtctytataaattttagaatttgggttataggtttcttttgaatagaaaaggtttttaatttctctctctcctcctatttaatggtttcagagttgctcccacttggccatctgggcccccagtccacaactaggccttataatgacatttcggggctccattttaatcatgatactggaaatatcatacatagacattcagttactgactcagcaagtggcttcattcaat

SEQ ID NO: 789315 - DNA, 413 bp, Homo sapiens
ggtactcctactgtatgctgtgttgaataataaatttcttcatctgatccaccaaatctcatctacattggtaccaatggagttgtggctggtgaacctgctttcttgcttagtcgtctccgttggagtcttgttatttcttgctattctctaggaggttggggctcttctctaacaaagggtgccatgacacaggcacacacacacactacaaaatgaaaataaacatgaactagaaagatgtttccttattcragaaatgcagataaatggcaaagctgttggaaaccagaaaaccatgtaattttgagtatttaaaatcaatcctgtattgtgatacactaagaccaaacttgaatgttattccacataagaatctagccaacagaatgtagttcagatttgggaaatga

SEQ ID NO: 789316 - DNA, 634 bp, Homo sapiens
ataatgggtggtttatagtaagtagctttcttgtttccttgggcaaaagaagcttcagaattttccttagccctctcagttttctggggaaagtgtggctaaacaaatttccaggttttctcgggctttacctcctcaytaaataacagtgatagagttctgagaaggaccaaggtaggaaaaagtgggtacaggtggaaactgaggatctttcatttgtaatctgtgtgtaaaatatggaagtaaagagtaaaaaaaattaggagatgagggcctcagtttgaagatacaattgatttggttttggtttttggtagagatgaggtcttgctatgttggcctaggctggtcacaaactcctggcctcaaatgatcctcccgcctcagcctcccaaagtgctgggattataggcatgagccaccatgcccaaccagcaacagttttatataccttgagaaggttaaagggaagtccaagaagattaaagttttgctgttgctatctagagctcttgaaagcttctgccacttgtgatccaagaacaggaatgcatgttatttgtgtttgggagcaataacacatctatttgagtctatttcaactcgaactagaggaaaacagaatccccaataa

SEQ ID NO: 789317 - DNA, 535 bp, Homo sapiens
ttaatgctataaatgtccctctgaatgctgttttagctccattacatacaattttatatgttatatttacattttagttcaggtcaaaatatttcctaattttctttgaggctgtctcttagatctcatggattatttagaagaatattttaacttacacytatttgagaattttgcagatagctttttgttattgatttccagtttaattatattagtgtcagagactatatttcatatgaattcaatttttaaacatttgttaggttttattttttgacccagacctggcctatcttggttagcgtttcatggtcactcaacaggaaattaaaatctacagttgtttggcagagcgtcctattaatgtcattacatccaactggctgctggttttattcagttctttatactggctttccttctgtcagcatgtttcatcaattactaagagaaaagtattgaagtcttcacagccataattgtagatttgcttatttcttgtttcagttctcagtttttgcttcatgtgctt

SEQ ID NO: 789318 - DNA, 561 bp, Homo sapiens
ttttagctcccacgaataagtgagaccacgccaagtttgtctttctgtgcctgacttatttcacttgtcacgaaatcctccacttccatccatgttgttgcaaatgacagattctaattcttttcttctggctgattagtactctattgtgcgtacgtacaacattttctttatccgtttgtctcttgatggacacaggttgcttgtaaatcttagctattgtgaatagtgctgcaatagacacaggagtgaagatatctatttgatatattgatttcctttctcctgagtatatacctagtagtgggattgctggattatatattagttctaattttatttttttaaggaatctcraaactgttctccatagtggctatgctaatgtacattcccaccaacagtgtacaagggttcccttttgtccatatcctcaccggcattaattattgtttgttgtttggataaaagccattataactggggtgagataatatttcattgtagttttgatttgcatttctctggtgatcaattatgttgagcacttttgaatatacc

SEQ ID NO: 789319 - DNA, 665 bp, Homo sapiens
cagacactgataacatctacaggcatcaaggccatccaggaaaacatgacatcattaaacgaactaaataaggtgccaaggatcaatcctggagaaagagagatatgtgagctttcaggcagagatttcaaaagaattgttctgagaaaactcaaagaaatttgagctaacacagagaagaaattaataattctatcagataaatttaacagagattggaataatttaaaggattcaatcagaaattctggagccaaaaatgcaattggcatattgaagaatgcatcagagtcttacaatagcagaatcgattaagtggaagaaagaattaatgagcttaaagacagattatttgaaaatacaaagtcagagcagayaaaagaaaaaaagagtttaaaaaatgaaacatgactacacaatcaagaaaattgcctcaaaagaacaaatctaagagctactggccttggagaggaggtagagaaaaagacaggggaagaaaatttattcaagggaatagtaacagataaattaccaaacctagaggattacatcaaaatccaagtacaaaaaggttatagaataccaaagagatttaaccctaacaagactacctcatggcatttaatgatcaaacttgaaaatgttgagaggatcctaaagcagca

SEQ ID NO: 789320 - DNA, 602 bp, Homo sapiens
cacaacatatacatatattaaaatatcaccttgcatactataaatagacacaatttttatttgtcaagtacgccttaataaagctggagagtggggcagaaagagggtaagggaaaaaatgaaccagcttgccttgatgggagttagcacttcatccccsggtctgggaagaggacctcccactcagcaggaaaatctgttttgggataaatccatccctagggcccctgcatagattaacctcccttgtacagcgccccctcctcctcaggctgtttttatgactagggcatggggacaccaggctagatctcccagtctggaaggaagctacagtgtcacttgtcagcaggaagatggcaagggctcccagaggaggtgagtggggcaggcatccccggaggctggccaagttgtgcaccgcagggcttcgtgtgcccagagcaggtgctttattctaattttctcttggacttcccagtgagtagctcagccctgcacataagagagcatctccaggtaaacctttccatcaacttgccagatgatcaaaggaaattgccaactgggagaaataagaggaagaaggaagagacttggaa

SEQ ID NO: 789321 - DNA, 524 bp, Homo sapiens
ccacctgggaatgcagccaagtaagtctcagcctcattttactcagctcctacttaagatggagtagctctggttcaaacgcctctgacatttttcccctccctttcataagagaacccttaatcctaaaggttgcagagggatgaaaatccatcttctgtaacttcttcaggctgaataggggcaatgatattcctgcttaactattagggtctcttgtattcagagtagagaggagctcagtgagaaggcatcaayattgtgagggtcattcataactccaagttccaacaaaaggtggtatctggaagattagtaagtgtccaatttaagaaaacggtgagcaaacttgtctgcattcctacacaaagagtacaactgcaatatgttccacaacagcaaagcaaaataagtaaaattatcccaagtaaactaaattagaaggctttccatgaagtgagaaactgttggaaccaagctgatacggggttgctagctgattccaatgtgcccagaattagagg

SEQ ID NO: 789322 - DNA, 574 bp, Homo sapiens
agtgtatataaagcataaatgaattttgtgcttagacttggatccaactcccaagatatctcattatgtatatgcaattatttcaaaatctgaaacacttctgatccgaagcattttgggtaagagctacttagccttttctcccaggtcatttttccaaagcacataacagttcacactcgaccagcatctggtgagacatcactgtcctctcacttttactagcacaaaacatcatcagtatttttagtatttttattttttgccaacctgattggcaaacaactgagtctcattattgttgtaataaacattctctgcagyactagtgatgttgggcatatatttaaatgtttgacaatcattttcatttcaacttcagcgaattacctaatttccaactttttcctgcttaatgatttctcagaggttctcaatattagagatattaatcctctgtcatgtgtttcaaatattttctctagtctcatcatgtctgtcaatatttttgtgttgtcttatgccatgcaaaatgatcagattttttatgtagtcagatttgtcagacttttcc

SEQ ID NO: 789323 - DNA, 684 bp, Homo sapiens
tcttttgactgtctctttatttctttacatcttattttagctctttcaagaatgtttttatcatttttcctcattttaaaaggaggataatgatagtacctatcttattgttgaaagattagttaagataattaccataaaatgcctagcacagtgccctggttctcaaaaataacagccattgttttatgctgggacaaagaggtgcaatagacaataagacataattcttgttatgctgaatgtcttaatcactgtagattttctttatttttaaatcatcagctggcttattagaattacttttctggattataaattgtatacattctagagattttggaacatttgttctasagattttggaaaagaaataaagtaggaaaattacaactaaaactaaaatctcccccgattcctccacccagagaaaccagtgctactatgttgatgtatatgtagtgtggtttgtttcaggaggcatgtatgcatacatgcgatgtgtgttaacagctccatagtatttgggtaccagagacatcacgtttcttcttctaaatcatatctaaacctggctgagcctgacaaggcccgtgtcagctattctgcggctccatcctatgccttctattggatccattcagaaccctgggctatcgtgcttctggggaaaggggctgacat

SEQ ID NO: 789324 - DNA, 522 bp, Homo sapiens
gtaagtatgtaaaaacctttttacatttagtacccagcagttgaaaacgttaaattcagcacggatataaagcaatccaacattttcttatttctgaaaatgaccatgtatctgttttcttatttattaatttgtatacctattattcgttctttaatatttattgatgacattcaaggtgtagaaagatcctgaggttaaataggcatggaggctggtatggtgtgtagaagaaggtccttttcttccaggagtttatgacagatgagagaaaatgtccctctctccttttcttttgaaatattccgtcttgcccctgggatctaattaggagtggaggatgacrttcttgagaagaaaaggttctgccctccacttcactttttcccttgtagctggtggcactcagatgccagagggtggggagctaagccatagaccactgtgaaggccagaccaatagcaagtacagtgtagccacaacttggagggagcctgggtccccacaccatggggctgctt

SEQ ID NO: 789325 - DNA, 656 bp, Homo sapiens
tattcaaaaagtaactaaaaatggatcatagatctgtgtgtaaaatataaaactataaagtacttagagaaggccatgtctttaatcccactactttaggaggctgaggcaggaggattgcttgagaccaggagtttkaaaccagcctgggcaatatagcttagaccctgtctctacaaaagaaaaaaataataattaaggagacatggttgcacatgcctgtagtcccagctacttgggaggctgaggtagaaggattgcctgagccctggagttcaagtctgtagtgacctatgatcatgccactgcactccagccaggatgacagagtgaggccctgtctctaaaaacaaacaacaacaacaacaaaaaaaaagagagaagacttttaaaggaaaacgtaggagaaattacttgtgacctagggttaggcacagaatttgtagatatgacaccaaacatataatctataaaagaaaatattgatcaattggatttcatcaaattaaaaatatttgctctcaagaccctgataagagcatgaaagaaaaagccacagatgggaaaaaaattttcaatatcgtatctgacaaaggacttgcatcatccagaatacatagagaactctctaaactctatacaaacaaaattaaaaa

SEQ ID NO: 789326 - DNA, 656 bp, Homo sapiens
tattcaaaaagtaactaaaaatggatcatagatctgtgtgtaaaatataaaactataaagtacttagagaaggccatgtctttaatcccactactttaggaggctgaggcaggaggattgcttgagaccaggagtttgaaaccagcctgggcaatatagcttagaccctgtctctacaaaagaaaaaaawaataattaaggagacatggttgcacatgcctgtagtcccagctacttgggaggctgaggtagaaggattgcctgagccctggagttcaagtctgtagtgacctatgatcatgccactgcactccagccaggatgacagagtgaggccctgtctctaaaaacaaacaacaacaacaacaaaaaaaaagagagaagacttttaaaggaaaacgtaggagaaattacttgtgacctagggttaggcacagaatttgtagatatgacaccaaacatataatctataaaagaaaatattgatcaattggatttcatcaaattaaaaatatttgctctcaagaccctgataagagcatgaaagaaaaagccacagatgggaaaaaaattttcaatatcgtatctgacaaaggacttgcatcatccagaatacatagagaactctctaaactctatacaaacaaaattaaaaa

SEQ ID NO: 789327 - DNA, 656 bp, Homo sapiens
tattcaaaaagtaactaaaaatggatcatagatctgtgtgtaaaatataaaactataaagtacttagagaaggccatgtctttaatcccactactttaggaggctgaggcaggaggattgcttgagaccaggagtttgaaaccagcctgggcaatatagcttagaccctgtctctacaaaagaaaaaaataataattaaggagacatggttgcacatgcctgtagtcccagctacttgggaggctgaggtagaaggattgcctgagccctggagttcaagtctgtagtgacctatgatcatgccactgcactccagccaggatgacagagtgaggccctgtctctaaaaacaaacaacaacaacaamaaaaaaaaagagagaagacttttaaaggaaaacgtaggagaaattacttgtgacctagggttaggcacagaatttgtagatatgacaccaaacatataatctataaaagaaaatattgatcaattggatttcatcaaattaaaaatatttgctctcaagaccctgataagagcatgaaagaaaaagccacagatgggaaaaaaattttcaatatcgtatctgacaaaggacttgcatcatccagaatacatagagaactctctaaactctatacaaacaaaattaaaaa

SEQ ID NO: 789328 - DNA, 656 bp, Homo sapiens
tattcaaaaagtaactaaaaatggatcatagatctgtgtgtaaaatataaaactataaagtacttagagaaggccatgtctttaatcccactactttaggaggctgaggcaggaggattgcttgagaccaggagtttgaaaccagcctgggcaatatagcttagaccctgtctctacaaaagaaaaaaataataattaaggagacatggttgcacatgcctgtagtcccagctacttgggaggctgaggtagaaggattgcctgagccctggagttcaagtctgtagtgacctatgatcatgccactgcactccagccaggatgacagagtgaggccctgtctctaaaaacaaacaacaacaacaacaaaaaaaaagagagaagacttttaaaggaaaacgtaggagaaattayttgtgacctagggttaggcacagaatttgtagatatgacaccaaacatataatctataaaagaaaatattgatcaattggatttcatcaaattaaaaatatttgctctcaagaccctgataagagcatgaaagaaaaagccacagatgggaaaaaaattttcaatatcgtatctgacaaaggacttgcatcatccagaatacatagagaactctctaaactctatacaaacaaaattaaaaa

SEQ ID NO: 789329 - DNA, 586 bp, Homo sapiens
cctcccctcctcacacccggtctgggttacagtttcgttccttgactggccctcccccacctgcccagcaatttcctcttaaaaacatggctggagctaaaggcatagtcaaggttaaagctcctttttctttatccgacctctcccaaatcagttagcatttaggctctttttcatcaaatataaaaatccagcccagttcatgrcttgtttggcagcaaccctgagacgctttacagccctagaccctaaaaggtcaaaaggccgtcttattctcaatatacattttattacccaatccgctctcgactttaaataaagctccaaaaattaaattccggctctcaaaccccacaacaggacttaattaacctcgctttcaagatgtacaataatagaaaaaagttgcaattccttgcctccactgtgagacaaaccccagccacatctccagcacacaagaacttccaaacgcctaaaccgcagtggccaggcgttcctccaggcccgccgcccccaggagcttgctacaagtgccagaaatctggccaccaggccaaggaatgcccgcagcccgggattccac

SEQ ID NO: 789330 - DNA, 586 bp, Homo sapiens
cctcccctcctcacacccggtctgggttacagtttcgttccttgactggccctcccccacctgcccagcaatttcctcttaaaaacatggctggagctaaaggcatagtcaaggttaaagctcctttttctttatccgacctctcccaaatcagttagcatttaggctctttttcatcaaatataaaaatccagcccagttcatgactygtttggcagcaaccctgagacgctttacagccctagaccctaaaaggtcaaaaggccgtcttattctcaatatacattttattacccaatccgctctcgactttaaataaagctccaaaaattaaattccggctctcaaaccccacaacaggacttaattaacctcgctttcaagatgtacaataatagaaaaaagttgcaattccttgcctccactgtgagacaaaccccagccacatctccagcacacaagaacttccaaacgcctaaaccgcagtggccaggcgttcctccaggcccgccgcccccaggagcttgctacaagtgccagaaatctggccaccaggccaaggaatgcccgcagcccgggattccac

SEQ ID NO: 789331 - DNA, 608 bp, Homo sapiens
agggtgctgtcagaagttgaaaatttcttcttagtgaggcatgttggctcacaaatataatccgagcactctgggaggctgaggcagaaggatagcttgaggctaggagttcaagaccagcctggataacatagcaagaccctatctctacaaaaatgtttgtaaaaagaaatagccaagtgtggtggcacgtgtctatagtcccagctactcaggaagctgaggcaggaggattgcttagtctaggtgttcaaggctgcagtgagctatgatcataccgctgccctccagcctgggcaacagaacaaaactctatctaaaaaaaaaattttaaatataattaataaatattttaaaacataaaatttcttctttcctatgtgtgtcttcacygtatacctctcaaagtaaagtactaaaacctatgttttacagtataagccgagcccagtggctcatgcctgtaatcctagcactttgggaagctgaggtggctggatcacttgaagtcaccagtttgagacaagcctgatcaatatattcataataagtacaaaaatcatgccacaaaactgtgtgctatgtttttataaacaaatttatgtgtg

SEQ ID NO: 789332 - DNA, 626 bp, Homo sapiens
ggttgcaaggggaacaataataattacacagtgcagaaatcagatacccctttgactagtgactgaaatgaacatcaccaataaaggacagacagacatcatgtgcctctggatacgatgccccaaagaggaggtaatactactcttgtactatttgactggaaatgcatagcctgagtttaatgatgaggaagcgttatagaarccccaaacaaggaacattccatcttacaaacaggaactgtttttaacatgtcagtgtcataaagaagaaaaaaatctaaagagatatgtcaactcactacgatatatgattttagactgaatcctgtactgaaaaaacattactgtgtctgataggcagccactaaaatggtcccacttccagatatttgcccctctgtataatcatttcccttgaatgtaggctgaactaacgacttactgacttgcttttaatgaatagaagatggtagaagtaatagaatgtcacttcaaagataaggttacaaagaaatgctggaagtttctacctgtggggcttgttccctcacttattctaaggtactagctgccatgctgtgagcagccctatggagaggaccatgtggtgaagatatgagaga

SEQ ID NO: 789333 - DNA, 570 bp, Homo sapiens
gaacttaagaaccattttgtcaagttaaaaaaaaaagtgaaggccgggtatggtggctcatacctgtaatcctagtgctttggaaggccaaggtggaaggattgctggagcccaggagctgcaggctggagtgagttatgactgcaccattgcactccagcctgggtgacagagcaagatcctgtctctaaaaaaaaaaaaaaaaagaaattaagtcagttaagccaggcggctttgtacagctctgtggaatgayagaacttataaaatgtcctttctctagagctgtggggaaaatgaggcaaatactgtatgggcaacctcctgaatgtgtttcatttattcatctataatagcagggcttggataaatctttcctatatgctatgtgtggggctaagaaatgaccttattgtcaaaggttgatgaatgcacagatacagggtaagaagccaatctggaatgatggtttccattttccacttgagagtttaagcctgggcagcagatacctgctctgtgaactctttacatgagcaacttcccagcacaaattgttctcatttccca

SEQ ID NO: 789334 - DNA, 606 bp, Homo sapiens
cataggttaataggagctatcacctgctgttggtttgaatgtgatgggcacagctgagggaaaagggaccccatgcccccaatattgagtgccttctccagatattgtcacaccagatctattaaacacttcgaggtgttctttagccctaaattagatgaaacattctagaaagtggcaaaattgatgaatttcagatttttctctaaagcttgagagctttacatatcctttataagcctgcttgtgaaagatattgtttttaatacatgctttaatgttttcagggcttgtcatcagaatattgatacaattttttttaatgcagtaggacccaaactagaaatgawttacaactattgggaaagaaaaaactattgttattattgcagatgatataatggtccaagtagaaagcctgggaatctcatcttagaattaatatgaaattagcaaaaacctccagatatccaaaagttaatagacaaaggtagctttaagatataattgtagtatatcaccatttgttgtggcaacaagctttgtcacatttatagacaaactgagcatgtgtgcagaaactatacaaagataacagaagacctg

SEQ ID NO: 789335 - DNA, 678 bp, Homo sapiens
gtgagccaccacacccagcccatttctgcaccatccttatccctctgcaagcacctcccaaactaggcactatggcttctggtctactgtgacagcagcactatgcagagttgccagactaggaatcctgacaacagagttcaaatccctcctctggtgtcaaaaagctgtattgccttgggcaagtcagttaacccaccaattttctctagcttttgcatttttgagtggttwggcccaattatctcactgctctctattccctaagctcttgatttgtcaccaacttctactactaaaacatccttgcttcatcctctgtgtagccatatctaggggtcagctagcaaaatatatcctgataatgcactgactaaatagctctccagagtagtcttcgtctctgccagatgtatttctggaaatactgtccctgttgctgctgctcaggtaagagttgcattagcattactgggtagtttagcccaggaaggaaacatgcagtgagagaaagggctggtacgggaggtaagcaggggtagagtggaagctgggaactcattcacgtatatttgcttaatcaacttttgctaggaatctacttgttccaagcattgtgcaaagtgatgaaccagagctcacatcaagggcttctctgaccataggatttgtatttgg

SEQ ID NO: 789336 - DNA, 678 bp, Homo sapiens
gtgagccaccacacccagcccatttctgcaccatccttatccctctgcaagcacctcccaaactaggcactatggcttctggtctactgtgacagcagcactatgcagagttgccagactaggaatcctgacaacagagttcaaatccctcctctggtgtcaaaaagctgtattgccttgggcaagtcagttaacccaccaattttctctagcttttgcatttttgagtggtttggcccaattatctcactgctctctattccctaagctcttgatttgwcaccaacttctactactaaaacatccttgcttcatcctctgtgtagccatatctaggggtcagctagcaaaatatatcctgataatgcactgactaaatagctctccagagtagtcttcgtctctgccagatgtatttctggaaatactgtccctgttgctgctgctcaggtaagagttgcattagcattactgggtagtttagcccaggaaggaaacatgcagtgagagaaagggctggtacgggaggtaagcaggggtagagtggaagctgggaactcattcacgtatatttgcttaatcaacttttgctaggaatctacttgttccaagcattgtgcaaagtgatgaaccagagctcacatcaagggcttctctgaccataggatttgtatttgg

SEQ ID NO: 789337 - DNA, 647 bp, Homo sapiens
gctcactcattatggtgaggacagcaccaagccattcatgagggatccacccccaaacacctcccactaggcccacctccaatattgaaggccacatttcaacatgagatttggaggggacagacatccaaaccatatcagggagaggcgcctgaactgactcctagctcatggagagctcatgtgttaaatgcccggtagcttcatgccacctgcactaccatgggctggcagctgctctgaggtctcttctgatgacaccgttggctgatgaccacaggcaagagccaaagttgggcagaaccaagcctctcagcagacagatgatcaaccgccatggggtagcacccttaaatcacttgagaggtagcggctggctgatggatggcctttaacccccagatactttagcggatatttcccaagaacaagtacattctctgacgtaaccacagtccagttgccaaatccagagagttcacagtgacactatgctactatggaataaaytaccctgattagagaatcaggggcttcctggactgcatttagaactcgagtgttttgtgtctcccctcttgtagaacagccttttggggtgttttataacctgacattttttaagaattcaggccagattcttttat

SEQ ID NO: 789338 - DNA, 456 bp, Homo sapiens
cttacaatgcttttttcttattttttcttcttgtggctataataattttaaacaccactgtttcatagactccatcagattactgcactggctggaggtcttgctgttgatcctgctctttgtggtgtctgctggctctccctcacagtaaattggggkgtgtgtgtgtgtgtgtgtgtgtgtgtgtgtgacgtttttgtgtgtaaagatgggtgagtcatcttcaaaggggctttctcaccagcatggtttttgtatgtgcttgcatctgatggttattatcagcctgggaccaattttttctgttaatttcttaactttcaatattttggatcttgtggtaatgtaagtttggacttcaaactcatgtgaacttatagttatgaattgtctgagtgtagaggtggggtgagatatgagggaggataagtcccccactaagaatccagctcaaac

SEQ ID NO: 789339 - DNA, 665 bp, Homo sapiens
cttcctttgtattccactgtgtgactggcacaggtctcttcctgctgtgggccggcatcaaaagcttgttgactgcgtaactgtgccgttaagctgcgcggggaaaggactcttagccaacatccttctctcggccccagcagaaaatccagcatggtcatatgactcatctgggacccagaacgagytaggtgttgggaaaacaaagtacaaagcccccagcgtgctctgttccccacagctcgggtcccaggactggggctccttaagctgagtaggctgagagctaggctggggctgcctgtcccctccagcccctgcctgcttgattctgtcttcacagcctgggggttccacaaacaagaaagccagtctggagatgctcccacgctccttccccccagcaccaaggcctaaatgtccccacttacgctgcatgctctctgacaccctcacagccagctcattgtaatccagatctccagcaaagtcagctcccaatagtccgccattgccagcatacatgccgccttctgctgctgccccatagcctccgcctgggccgatgtcagtgccatagggacccctgtctcctgcagcttcaccaaaggcaccgcctgcacccagggagcctgcaccacctcctcctgtgctcatggaagagc

SEQ ID NO: 789340 - DNA, 463 bp, Homo sapiens
cacaggctctggaggtagactgatctgggccaaatcctttgtcctgctgcttattggccgtgggaccttgggcaagtcatttacccactccaagcctcagcctccccttctctaaatgctgagagcacattcacctcctatgctgtgaagtaggrtaactgatctacctcattgtctgagaatgcaagagtttgcttttctcaggccaaactccttattctctttaccaggttcagttcctgccctgggtttcaggatctgaagaaatatggctagagtcactaccgccaagacctattgctgatttggggcaaagcaagaaaatagactgacctggggcacctggaggtcctgggggtcccatggctccaggaggtcctggggggcctgggacagtgagcatcgatgacccctctgaaaacagaaggcacatggaacattgagccctacttttctcactcag

SEQ ID NO: 789341 - DNA, 621 bp, Homo sapiens
acaaagaaggtgctcagtaaaggctttccaataaatgaattgttgaatggaagacaacacactaggattagaacaatggaggaaacagctcactgtatggtgctgaaatatgtggacaaagttgatatagattttgtagaaagcagggagggtgccagcagtttctgagggctccatgagctgcatgtaacaggtgaaggccaaaggcttccagtcaagggcagtggctaatgtgcaagtgcctggccctaggcaggtatggagggtggagcttcctgcccccttctgataggaacattcatgggaatgttcacctttattcactcatggaaacatccaagaggcctttggggcaagttgcgtttgcaggcctaagaccactcatgggtcctatttcctcttccagtataccatgtgtattggaaggatacacaggcaggattactgcagagtaatcctccctgtgcaccagcctgawccctggcagctgggagcagcactcaccggcggaggtggaaacgccagtgttcacagccgcaggactctggggcatgtttttcttcaccccatatgctgcaagaaaggaagctgggtcagcatgggagggtggttccaggtgac

SEQ ID NO: 789342 - DNA, 615 bp, Homo sapiens
ccccagtcacccccaggttggcacagcggtggcaacctgtagggggtgcaccataaaatcaaccagatgattgatttgcagtgacagtgggctgtcaaggacagcagtgagctggcaagaccaccaacctaaccagtttggctgtgagagacacaggaacatacaagtgatgccttacaaggtgatgctgttgacaggacagccttccytgtgtgcttgactcatgtctgagccagttaatgatcaagattgatatcttgagtgttgtgtctttggtgggaaaggtcgactgattttcagggacattttgggtctcctaattcagtgagttgtagctgcaaagaggtgtcactttccagcgcctaagctccaaccctagcctactgacctgtggaagtggtggtggtgccatgggacagggtggtcaagctgggggccagattgttctgcatgccaaacactgtgaaagcaaccaaggtcaggtgagtacagggagcacgggggatgccccctggcttaggacggcccccagagtcccaaaccactttcatgatcaatggttttgccaacagattcccaaacttcctcggttcccacactctttgtaacgtagta

SEQ ID NO: 789343 - DNA, 662 bp, Homo sapiens
ggaagaatacctcagccttgagatgaaatcaaccagattgatagaatcagtcccagtgattattttttctttttattccttgttttttagattccttttgtatttatcttacatattttttgtttgtttgtttgtttgcctttgattgactaacacctctgtgggactgaaatcatctctgttttctgtgctggtctttcagtttccagctaaaaattttattaaaatatattcttcactatgaaatactatataatgttagaaaatgtaaaaatatagaaagaaaataaatgaagatttaaaaattattcctgtactcaccacccagggaataccttctgttcaaacaagagtaatatgagggtgtaatttttttagaatatgaaaccagtatggaactttcagacaacttatgtttcccagtatccctcatttgtttatgtaatgtggccawgctctactgatgattcatgaaaataaaaacagtgattttaggtgatcatgactgatatttgaaatctttttatcaacagaagttatatttttaaattaagattgggatttgttattccatttttgtttttaacatttgtttagttcagtagtgcccatcctctttggcaccagggactggtttcatggaagacaacttttccacagac

SEQ ID NO: 789344 - DNA, 637 bp, Homo sapiens
ataagaaagttatgttttagggggctttaagatggctggctagaggcatctggcactcacctcccccacaaaacaaaccccaaaatagtaagtaggtaatcacacttcacatagatcacctaaggcagaacagtggaattcagcagagaagtgacaggaaacactaaggcatagaaggagagagaagcaaggcagccagctgggccaggattgggtgggagactggagaggctcctygatgcaaggaaagggtgagtaaaagattcacagtgatccaaattcccaccacagactcatgcctggagtttgggcgatggcattgctccagagagggagctcatgctagggggagctcatgctaggtcccacatccccctaccaaacccaagcagctgtatagcgccatcctgacagtccagaccctacaacattgcatcttgccctggggtctaacagcccctgcacctctatatccctgaatccccactgatataccctccacatccacctggaggactacagtggtgccattgcccattggacccagcagtgtggcagggacctcaacactgcagcccacacaatgtcctactgggaacaggtggtgcagcacaccagggaggctgctccagacaaa

SEQ ID NO: 789345 - DNA, 637 bp, Homo sapiens
ataagaaagttatgttttagggggctttaagatggctggctagaggcatctggcactcacctcccccacaaaacaaaccccaaaatagtaagtaggtaatcacacttcacatagatcacctaaggcagaacagtggaattcagcagagaagtgacaggaaacactaaggcatagaaggagagagaagcaaggcagccagctgggccaggattgggtgggagactggagaggctccttgatgcaaggaaagggtgagtaaaagattcacagtgatccaaattcccaccacagactcatgcctggagtttgggcgatggcattgctccagagagggagctcatgctagggggagctcatgctaggtcccacatycccctaccaaacccaagcagctgtatagcgccatcctgacagtccagaccctacaacattgcatcttgccctggggtctaacagcccctgcacctctatatccctgaatccccactgatataccctccacatccacctggaggactacagtggtgccattgcccattggacccagcagtgtggcagggacctcaacactgcagcccacacaatgtcctactgggaacaggtggtgcagcacaccagggaggctgctccagacaaa

SEQ ID NO: 789346 - DNA, 562 bp, Homo sapiens
gtaaccagatgtgttgtcaaagagcagtaatattttttaaaagtttttttttctgagcagtaggtcttaatagcaggcataaaatattcagtaaaccaggctataaacagatgtgccatcccccaggctatgttgtttcatgtatagatctcatgcagagtacatttagcatatttcttaaaggcccttagatcatcagaatggtagatgagcattgattcaacttaaagtcaccggctgcattagcccctaacaagaaagtcagaaagtcctttgaagctttgaaactagtcagwgatttctcttctctagctatgaaagtcctacatggcatcttcttccagtagaaggctgttttgtgtacattgaaaatctgctgttttgtgtagccaccttcatccattaccttagccagatcttctggataatttactgcagcttccacagaagcacttactgattcaccttgaacttttatgttatggaaatggcttctctcctcaaacatcataaaccatcttctgttagcttctagcttttcttctgcagcttcctcacctct

SEQ ID NO: 789347 - DNA, 657 bp, Homo sapiens
ctgtatcttccactcaattttgctttggacctaaaactactctaaaaaataaagtatatttaaaagaattaccctctgaaatattgggcaaattctaaggtcttgctcagggggcagatcaagggctggttccccacatccttccccttagctatctcatcaccagcttctatgatttctatgggtgatctgggttgggcatcttaactttctggcttctagaggaaacagaaattcatgggactgtgctgaatttctggcatggtttgaggtatattcatggttcagsaagcatgttttaaatgatgtctgtgatagacgattcccagttctgcaccctagaatttcatggtgggtgagagtttgaattcccattggtcagtaggtatttttgcttatgattcaattgagacacagctagagttctcaactccagaattctcctctcgataatattccacacacattctcatttttctgtcttatattaagcatttgtctttctgcaaccatctcatctgatctcaagaaattactctaagtaatatttggagttaaaggaatgtctcaaacttgcttgtttcgaatttttttaaagggtcagaggattaaaataatacaatgtttttagatttaaaaaactttaaagaccaggct

SEQ ID NO: 789348 - DNA, 657 bp, Homo sapiens
ctgtatcttccactcaattttgctttggacctaaaactactctaaaaaataaagtatatttaaaagaattaccctctgaaatattgggcaaattctaaggtcttgctcagggggcagatcaagggctggttccccacatccttccccttagctatctcatcaccagcttctatgatttctatgggtgatctgggttgggcatcttaactttctggcttctagaggaaacagaaattcatgggactgtgctgaatttctggcatggtttgaggtatattcatggttcagcaagcatgytttaaatgatgtctgtgatagacgattcccagttctgcaccctagaatttcatggtgggtgagagtttgaattcccattggtcagtaggtatttttgcttatgattcaattgagacacagctagagttctcaactccagaattctcctctcgataatattccacacacattctcatttttctgtcttatattaagcatttgtctttctgcaaccatctcatctgatctcaagaaattactctaagtaatatttggagttaaaggaatgtctcaaacttgcttgtttcgaatttttttaaagggtcagaggattaaaataatacaatgtttttagatttaaaaaactttaaagaccaggct

SEQ ID NO: 789349 - DNA, 626 bp, Homo sapiens
gcaagacacaaacttctgaatctgagtctaaggcctgtgtctttaactacaacattcatctgcctataaaaggaggaaatcaggatttgtagagcatgcacacattttattattgagcaggaataagaacgaaggcctctatatgcccaccgcaaagtgtactctgccttcagacagcttaagttcctaggtatagccttatggttaagctgtagattgctaagacctaacctataatacagtgcttcaaactgtgcatttcagagtcctggcatttctacctrcctcgtggactggttatcattttagaatgaaccttttgcagtgctaattcctgggctaaataacaatagtaatgatgacaataataaaaatattcagtggtggtggtgatgatgatgacaataatgatgttatcactacaggttccattccaagtggccttgtttgtcagagaattgagcagaaagcaaattggaaatctgaaatgaaaagggttaactggtaaattgccatgtgtgaatctgctttggtttttgcattttctgtaagacaatttgaattctaaatggcactccaacccagagagtgtgaaatctgaaacttgcactgtgaaagtcatacaa

SEQ ID NO: 789350 - DNA, 626 bp, Homo sapiens
gcaagacacaaacttctgaatctgagtctaaggcctgtgtctttaactacaacattcatctgcctataaaaggaggaaatcaggatttgtagagcatgcacacattttattattgagcaggaataagaacgaaggcctctatatgcccaccgcaaagtgtactctgccttcagacagcttaagttcctaggtatagccttatggttaagctgtagattgctaagacctaacctataatacagtgcttcaaactgtgcatttcagagtcctggcatttctacctacctcgtggactggttatcattttagaatgaaccttttgcagtgctaattcctgggctraataacaatagtaatgatgacaataataaaaatattcagtggtggtggtgatgatgatgacaataatgatgttatcactacaggttccattccaagtggccttgtttgtcagagaattgagcagaaagcaaattggaaatctgaaatgaaaagggttaactggtaaattgccatgtgtgaatctgctttggtttttgcattttctgtaagacaatttgaattctaaatggcactccaacccagagagtgtgaaatctgaaacttgcactgtgaaagtcatacaa

SEQ ID NO: 789351 - DNA, 375 bp, Homo sapiens
ctcagaggcagttcgtgaggattaggtggccacttacagtgcctggcagagcaagggctcaaggacaacagcttctggaactgcattccccaaaggcctgtgttttctccatctgtgtgggtgagacctagggtctcctgtcttcctatcctgtaagaggacctgcaggcgcccaaccctgcatcytgaattcatcaagaaagggaaaacagtgaatgttttttcatctacatgctagagctttgggcctaaaacatttaaaactgctcaaaataaaatgctattttaatagtatgagtcaaaatcacactgaaggaattttgaaggccacattctcaacttttaagtgcttctccccaagctgcccaccaagat

SEQ ID NO: 789352 - DNA, 592 bp, Homo sapiens
tcttcatctgttaagtcctccatatctccaaagagagtggccagattttccttttcgtctcttgtctctcctgtttctccatcatcagcctcttctgtataagattcaccgtcgccgtcggcatcaaagagctcatcaaatgcgtcgggctcgccattttcccgcgtcaagaagttattttcttctgaattacaatccaaggctgactcattttcttccagcagtgcggtcagcagagacagattgtcttcctcctctaggggaaaagaagagaaaggacagagaataagcacrgctaattccaaacattcaactttaggcaatttaaatgaccccatgggggtaagagaaactacctaatgggtacaatgctcattacctgggtgatgggttcaaccatactccaaacctcagcatcacactatatatacatctctgtaacaagcctgaatctaaaatgaaagctgaaactaaaaaaacaaacaaacaaacaaacaaaaaaaacaaaaacctacagatgcaccattttgcctggtctttgttctccttgtctccatctttcttgtccccaggtgcttcttaggggacactg

SEQ ID NO: 789353 - DNA, 579 bp, Homo sapiens
gaccatggccatgagaaaccacaagacaaaaaaaagaggccgggcacggtggctcacgcctgtaatcccagcactttgggaggccgagacgggcggatcacgacgtcaggagatcgagaccatcctggctaatatggtgaaaccctgtctctactaaaaaatacaaaaaattagccgggtgtggtggygggtgcccgtaatcccagctactcgggaggctgaggcaggagaatggcgggaacccgggaggcagagcttgcagtgagccaagatcgagccactgcactccagcctgggtgacaaagccaaactccatcttaaaaaaaaaaaaaaaaaaaaaaaaaaaaaaagacctctggccctgctaccttcaaaaagaacttaattaagcctcgaaaatctgataggtctgccgatcatgccaagcagatgcgagaactcctctctgggtgggatattagagatgtcaatgcattagcggaggaatatgagggaaggtcagcattaaagaagctttccctacaagccagtttggctagaccggaagcccggacattgcagaaagatatggctgatctt

SEQ ID NO: 789354 - DNA, 601 bp, Homo sapiens
tattaaattcagtgttaaaaatacttaatttgcaaaatatactaataaaatcatccttgtatctgttttctatctgggcttccacattattttggaatgaaatttagcagctaagagggtctaatatattggtgaaaaccctggaactcaaattaatatggggctctcctctattcctctagtcactgttcagaggagaatgaaagcaggcagtggggagaagaaagatttactccatgttgagggcctcccttatctacaacaataacaagttagaatcaagtactgcctattggtgcttaataccccaaagatctacatactgatcacatcttctcaatcycagacataaaccaagaatttggctattacttattctatctttgcttccagactggcctacaggccaatatctctcataaacttagatgtaaaaacaaattttagcaaatgtaatccaaccatatataaaacaaataatatatcatgacaaagtgaagttcatcaaatgaatgcaagactgattaaagattagaaaattaatactttcaccatattttcagaattaaaaaagaaaaatcacagatctcaaaagatacag

SEQ ID NO: 789355 - DNA, 634 bp, Homo sapiens
attgatctcagtcagattatttctctgagctttagtgtcctggtctgtagaatggaaatagaatatttccttcatagggttgatgtgaagattaagggatcaaatgtgcatgaaacacctaaagtgaaatctcaataagttggccacttttatataataataaatccttaatgctttagtacttacataagtaatgaattacattcacttcaaataaacacaacacagaaaaaccacttacagtaattataggctaaaataacaatgcatgacttgcctgctaatattatacattagtgagtggtttcttatttataaaagttgaaggtctttaagtagaagagcttctgcatttwaaaaaaaaaaaaaaaaaaagagctgccgaattgtaacactaacattttgaaaaggaagcagcaaaaacttggattctagaagagattatcttctagtggctcttaagactgtgacagtacagctagtgtcaattcgatagtgattaacttaatccagtgtttaatgtaaagcacaacttcttggtagatgtgaaatgttttcttatatttagggtccagcttatctgaaatacattatgcccgaaaatatgaactactcgccagaactctgaagttta

SEQ ID NO: 789356 - DNA, 657 bp, Homo sapiens
aggtaacaaacaatctatgcattggctaccattcaatcaagtgcttacaatccagtatctgtagccaagggggcagggtcatagatataaaatatgactttttggctcatcttttttgcattttctgtgagtatggcaatgaagtgcatgagtagagttgttgcaaaggttgtaaatgcagtagataccatagttcattttcctagaataaatggagcacttaatggtgctgaaaatacttatrtaactatccactgcatctcggattatcaatacattgaagacataactggtttaattgcttctttttttttatatatcattccagaaaactggatgtggctttcctataacattttatctccctcttttcccccgaaaactgcccttaaaatccacataatgcatttcctctgaataaaaattgtatcatgattttccctggaagctgcagtctgcaagtaattagtctggccctatcatggcaacagaaaagaggtagcaatacatatatatgtgttccttcctgatttcaaagatgttcttgttgaccaaacattagtcaggtttctaaaccttcttttcaagtaagctttgactttgggcttcagtggacatcatcgatgggcctggatcacccaatttcagcaagaatcc

SEQ ID NO: 789357 - DNA, 657 bp, Homo sapiens
aggtaacaaacaatctatgcattggctaccattcaatcaagtgcttacaatccagtatctgtagccaagggggcagggtcatagatataaaatatgactttttggctcatcttttttgcattttctgtgagtatggcaatgaagtgcatgagtagagttgttgcaaaggttgtaaatgcagtagataccatagttcattttcctagaataaatggagcacttaatggtgctgaaaatacttatgtaactatccactgcatctcggattatcaatacattgaagacataactggtttaattgcttctttttttttatatatcattccaraaaactggatgtggctttcctataacattttatctccctcttttcccccgaaaactgcccttaaaatccacataatgcatttcctctgaataaaaattgtatcatgattttccctggaagctgcagtctgcaagtaattagtctggccctatcatggcaacagaaaagaggtagcaatacatatatatgtgttccttcctgatttcaaagatgttcttgttgaccaaacattagtcaggtttctaaaccttcttttcaagtaagctttgactttgggcttcagtggacatcatcgatgggcctggatcacccaatttcagcaagaatcc

SEQ ID NO: 789358 - DNA, 657 bp, Homo sapiens
aggtaacaaacaatctatgcattggctaccattcaatcaagtgcttacaatccagtatctgtagccaagggggcagggtcatagatataaaatatgactttttggctcatcttttttgcattttctgtgagtatggcaatgaagtgcatgagtagagttgttgcaaaggttgtaaatgcagtagataccatagttcattttcctagaataaatggagcacttaatggtgctgaaaatacttatgtaactatccactgcatctcggattatcaatacattgaagacataactggtttaattgcttctttttttttatatatcattccagaaaactggatgtggctttcctataacattttatctccctcttttcccccgaaaactgcccttaaaatccacataatgcatttcctctgaataaaaattgtatcatgattttccctggaagctgcagtctgcaagtrattagtctggccctatcatggcaacagaaaagaggtagcaatacatatatatgtgttccttcctgatttcaaagatgttcttgttgaccaaacattagtcaggtttctaaaccttcttttcaagtaagctttgactttgggcttcagtggacatcatcgatgggcctggatcacccaatttcagcaagaatcc

SEQ ID NO: 789359 - DNA, 546 bp, Homo sapiens
catcattagacttacactgaattttgcagcagaaactttatagggcaggagagaataagatgatatattcaaagtactgaaaaaaacctagcaatgcaattattatactcagaaagattatacttcagaaatgaaagagaaataaaatatttcacagacaaagactaagrgaatttatcaccgctagaccagccttagaagaaatgttcaaggtaatcttacatctggaagtgaaaagatgatcaccattatgaaaatgtgcaaaaactataaaactcactggtacagttgatactcaaaggagaaaggaatcaaaccttatggctacttaaaaccacccaaattgcaaaaataagatgggaagtaagaaacaaaaatttatataaaacaaccagaaaacaatgaagtgacaggagtaagtcttacttatcaatagtaaccttgaatgtaaatggattaaatttcccatttagaagataaaaactgggttaatagattaaaaacaacaacaatgaggcctaactatatgctgtttatgagaaactc

SEQ ID NO: 789360 - DNA, 550 bp, Homo sapiens
gcaaccagagtaatagggatgtattaatagaatcctagctgcttctggaacctatacctaaatctgggagttttgtgtattatctcttagcaaggaaaaggcagagaaggctgttgtttctatcttacttttttatgtcctgccccaaggatctcaatttctcttctcagagtcttttcagtctcatagcactgaagtaggaagaaaagytgagacagttgtttcttcccactataaatggcactgggtggtgtgactatctaaaatagactcattagaaaaccaggcccttaacctaattttcataatgcaaatactgacagaaagcttcagggagcaaagtcgcacagacagaagagaaaaaaacactatcctgtctcaccaaaactaggcttctcatctcaggaaggcaaaagacagaaaaatacctaagagaaagaatccaacaggtgtggtggctcacacttgcaatcccagcactttgggaggttgcggtgagaggattgcttgagcctaggagttcaagaccagcctgggcaacatattgaga

SEQ ID NO: 789361 - DNA, 538 bp, Homo sapiens
ctatttctgccagtcgtacttgttagtttaattaagtaatttaactagatgtcacttgagtgaatagcacatgagtgaaagagttgtgttttctatgaaaacagatggatgctttggaaagataagatgctagaaatcgtacttttgaatgagccataggmaaaactacagacaggataggggaggggtatgtagtaatcttgaaagaatctcctttcagatttttttaagtgcccttaatttctaacttcactttataaaattccaacctggaaattgttgaagatgcctaatgaaagtagtttatgaagttcctatcagtagactcatgtcacaattagaagcctttggccccatatcaaaagattagtgacgtgtatgtgttaagtcaaaataaaatgtctaaggcatgcacgtatcatctttacctgttcaaccaattatgtattgaagtgatggggaaccagtgggcggcaggaagggagtcgggtatctttctctttcaatagattgtgagtttcttgaagacagggaccac

SEQ ID NO: 789362 - DNA, 437 bp, Homo sapiens
ctgaaacaagttgctgggcttccattggccattgccacttgcttgtcgttgtgaggaggggccgtgcctccacaggcccatacctgtaacctgacgatactgttgtgagcgggaatggaggaagtgcatggaagcccctcagcacgatgcatagtgaacagacaagctgtgaaccttgggagttatcaccatgtgtgatgatgctggtgaagaaagcctgcactgaggaggctgwcagcctgggtttgaatcccctcatttggaatataatcttggcaaagtctgaaagcctcaattgctcgtttgtaaaactggaagatagtaggacttgctgcccggggtcggggcaggatggagggggcccatgagaattaaggcagagcccagcggagtgcattgtaaggatccatgagtgtgaaccttcgtttttactactg

SEQ ID NO: 789363 - DNA, 609 bp, Homo sapiens
cagctcctgctgcatctcctcccttccccctgagaccgctggtgtaggtgctgtcggttgtaaacagcacagtcagggtgagactgtgcttggctctgtagttactgtcatgtggcatgatagaactcttgcctacaggtagaaattataatgagggacctgaattcgcaactttgacttcactctcaattccctccatcatccagttattagtcctttaatgtcactctagcttttttatgtcttttagcgayatcatctcatgattttgctgttggatttggaaaggaggaacctcagcttgtaatagaaatgtatgaagtgaaatgagttctaaggaggaagccattataacctcttgtaagagtacgtaaatgtgtacatatttggcagattaaaaacactgggcttacgttaagtcatgatattttatggcaacaagcattctgatagccagtggaaatatatttttgaagtgccggtaaaaggcaggtcgtccattggggaactttatttctgaatttgctaagtaaaacttgcttgcaaatgtgtaatatctgtagcacactgctcttattaatccactggagctgacttcctgttgtccaa

SEQ ID NO: 789364 - DNA, 675 bp, Homo sapiens
tttcctacaggcagagtgccccaagttcacgttggatacgccgaaactcagcgtgtttccacaggcaatttaagaacaaatcaatacctcagacagtaatacgtcttagaaagagatttctcatataagcaatggaagttttatcttttgaatttggttgacttataataatcaaatgtttggaggaggagagacctattcttttgacagtcagtgcaacctgtatgctcggcctggtttttgtaaggaaaacaggctacatatgtgatggataactcagagtagcttttaaaatctacttactggcttatttctggtctccagttttggctttcaaggagacctcttagatatttgtacctttacatatacatggaatagtacagcagaactttctcaatggcctgtgtctaggcagaccctgagctgatgctcttgcatgtgccacattttactgggtgcgaatgtctttcarcaaagtcctgctttataggctcttgcatattattcttcatctccaccttgggaataatgagctttttcctttctttgagatgtatctcaggaggtagaaagcaccatcaagatcgcattcgctagggacacatgaagaatttgagatgatgtgttatgcagtacgggaaagggagtcagaaactgcaggagttagagaaa

SEQ ID NO: 789365 - DNA, 566 bp, Homo sapiens
tgttctgttgcataggccagaaggcagtggcacgataatagttcactgcagcctcaaactcctggactccagcaatcctctcctccagccttagctactcaagaagcaagttgctgggactacaggcacaccccaccatrtccggctaaagtgtttgttgttgttgttttgtagacaaggagtttttctatatcgaccaggctggtctagaactcctggcctcaagtgatcctcctgctttgccctcacaaaacatcaggattacaggcttgaaccactgcacccaccctgcaaagtaaaatttttatttgtgtgtgtgtgtgtgtgtgtgtgtttgtattttacttaataccgacagattttgtactaaaaatatcatacattggaataaattttaattttctcccattaaacatatagtatttagctgtagaggaaacacgttcagttttccaggaagcccagtgattacatgaagataagacaactgtttggaatgtttacttcatcctcataatgtctaatataaatactgaatctccagagcccaagtgtgtctttgcaat

SEQ ID NO: 789366 - DNA, 566 bp, Homo sapiens
tgttctgttgcataggccagaaggcagtggcacgataatagttcactgcagcctcaaactcctggactccagcaatcctctcctccagccttagctactcaagaagcaagttgctgggactacaggcacaccccaccatatccggctaaagtgtttgttgttgttgttttgtagacaaggagtttttctatatcgaccaggctggtctagaactcctggcctcaagtgatcctcctgctttgccctcacaaaacatcaggattacaggcttgaaccactgcacccaccctgcaaagtaaaatytttatttgtgtgtgtgtgtgtgtgtgtgtgtttgtattttacttaataccgacagattttgtactaaaaatatcatacattggaataaattttaattttctcccattaaacatatagtatttagctgtagaggaaacacgttcagttttccaggaagcccagtgattacatgaagataagacaactgtttggaatgtttacttcatcctcataatgtctaatataaatactgaatctccagagcccaagtgtgtctttgcaat

SEQ ID NO: 789367 - DNA, 566 bp, Homo sapiens
tgttctgttgcataggccagaaggcagtggcacgataatagttcactgcagcctcaaactcctggactccagcaatcctctcctccagccttagctactcaagaagcaagttgctgggactacaggcacaccccaccatatccggctaaagtgtttgttgttgttgttttgtagacaaggagtttttctatatcgaccaggctggtctagaactcctggcctcaagtgatcctcctgctttgccctcacaaaacatcaggattacaggcttgaaccactgcacccaccctgcaaagtaaaatttttatttgtgtgtgtgtgtgtgtgtgtgtgtttgtattttacttaataccgacagattttgtactaaaaatatcatacattggaataaattttaattttctcccattaaacatrtagtatttagctgtagaggaaacacgttcagttttccaggaagcccagtgattacatgaagataagacaactgtttggaatgtttacttcatcctcataatgtctaatataaatactgaatctccagagcccaagtgtgtctttgcaat

SEQ ID NO: 789368 - DNA, 596 bp, Homo sapiens
tacccccaaattgtattttacaagccagggcactgaggggcagagaattaatgccacttgctcaggttcactcagcagagctggggttggactgaagttttctgcctcccaagcctgggctactctaggagaggtgagtaagcagcagcattctgagtgtggtgaggggctgcgactcgaaactgcacctgccacgtggggcccctgcagacgctgagaactatagacacagacagcgatttctctcagtgtgtaggtctgggacactccccaggtatgtcgaartggaataaaaagtgagccatgggaatctggattgtgagtgccttggggagcaggcactgtgtcttgcacataacaggtacataacaaataacagtcactatgttttactgctacctctactagggtgctatttgttagataactccaataaaaacagccatgcttcccatcctccataaagacactacagtttatcggtatacagtgtagtctagaggggaaaaaagcacgtactgtttctctggttgcacgactgcaatctttctcttcttttgtgctgtagaaaaggcaaaacggaaaaagaaaatcag

SEQ ID NO: 789369 - DNA, 659 bp, Homo sapiens
actggatcctgccatggggtgatgccaggactccatctgattggatcctggattctgtcatgtgatgtcttttttttttttttgagatggagttttgctcttgttgcccaggctggagtgcaatggcaccatctcagctcgctgcaacctccgcctcccgggttcaagtgattctcatgcctcagcctcccgagtggctgggattacaggcatgagccaccacgcctggctaattttgtatttttagtagagatggggtttctccatgttgatcaggctggtctctaactcccaacctcaggtgatccacctgccttggtctcccaaagtgctgggattacaggcatgagccaccacgcccagctgcctacttcttaattcagtccaaattcctgggtctgagcactttatttccacccatggttgcatgcytcattgatctgggcatgctcaggttatgtgaccgtcaatgtggagatctgtgaaaactgaaaaacagctcacaccttagttacattaaatttgaaccagattagtctggtgcagttattcatgcagctcaaaccagtgttgttcaagggtcaactgtagtcttaagaggcctctatgacccttcagagacccctggagctaggatggcattttagagttgcccctga

SEQ ID NO: 789370 - DNA, 579 bp, Homo sapiens
tggtgtgaatgcaaactagtacagccactatggaaaacagtatggagattccttaaagaaataaaagtagaactaccatttgatccaccaatctcactactgggtatctacccagaggggaaaaaaaaatcattatttgaaaaagatacttgtacacgcatgtttatagcagcataagtcacaattgcaaaattgtggaaccaacccaaatgcccatcaatgagtggataaaaaactctgatatatatatacaatggaatactactcagccataaaaaggaatgaattaacagcattttcagtgacctggatgagattggatactattattctaagggaagtaactcagcaatggaaaactaaacatcrtatgttctcactgatatgtgggagctaagctatgaggatgcaaaggcataagaatgatacaatggactttggaaacttagggggcaagagtgggaggggggtgacagataaaagatattaaatatggtacagggtatactgctcaggtgatgggtgcaccaggctctcacaaatatccactaaagaacttatgtaatcaaatattactga

SEQ ID NO: 789371 - DNA, 648 bp, Homo sapiens
ttctagcgacctcaccgtgtctcccttggaaaacaggaatgaggggacttagaaaggaaggttctcattcctgaagttacccacacaagctttgacccctcacagtttctactgcattggtcctttccctcctctgtcttcccttcctcttcccattccttcccttttatttcctttcacttccaggtcagatacggagcctacctccctgccctccacagcctacctccctgccctccacagccgtatgctccgtccagccaaggactatctttctcaggcttgccatggggcagtaactatttctaaggcagcactgaaacttcaggaagtctaaggcattttttttttttaaagctaggaacaaagataaagggacagaatacgaagacctggtcctctggtccttcctcctccccaccttctcttttcttttattaaaacctctggagaatgacatggttgccatgtaaatgttcaggaagtggcttccatcctagccycgtgaatgccataggatctctggaggagagggaagagtcagatagaagtcttgaagccatctggggagaaagaaaggcttaccttcccaaatttcagccctcgttttctgtctctactgacgctgctgccaccactgtcctccta

SEQ ID NO: 789372 - DNA, 655 bp, Homo sapiens
tacataaaagttccaaatatctgagaaagaaacaaaattgtttttcagtaggagctgcagagtaaaaataaatacacacacacacacacatgcacacactcccacactcccaaaacacaatgaggtattgatgtaatagtttataaatagaatgctgatggggaaaaaaatgagatttgacttayaggaaccgataacaaagagtgtgagatctggactgatgtggaaattcaagaacacatcaaaaaagattaccataaattatcttctccttctacacagtaataatagtgatgatgcaaggaaaatgttttaaagaaagtttttcccttaaaataatatattacaaaatatgttttcatatgaacactaaaatgagaccatgagttggaaaggtcaagccattcaaaaagcttataatcactcctggattaattaaggtgggggcaaccttctaaagtacaacctttagaagaaaagagaaactagggcagggaatctattgtctcccccaattcataagtgcactttgcaagagagagtttattaaactttgctattaatctcttaaccatgctggcatctagaattgttcactgaaaagaagtctccagattctatttcttccatagattgacccaggaatgactataag

SEQ ID NO: 789373 - DNA, 636 bp, Homo sapiens
gcaatgtcttcagtgaacggtattgaaaaactgaatattcacatgcaaaagaatgaaattggatccttatctcacactatacacacaaatcaactcaaaatcaattgaagactaaaacttgaaacctgaaatgaaaatattaagaagaaaacatagaaaaamgttttttgacactgatgttggcaatgatttcttgcatgcgaccccaaaagcatagttgacaaaagcaagcatagttgacaaaagcaaacatacacacatgagactccatcaaactaaaaagcttctgcacagcaaaggaaacaatcagcagaatgaagaaacaaactatggaatgagagaaaatatttacaaaccttatatttaataagtaattaatatttaaaatacataaggagctcctacaactgaacggcaaaaaaccaaatagcccaattaagaaatgcgaaaaggacttcaatagatatttctccaaacatacaaatggccaacaggtatacgaagagatcgtcaacatcactaatcatccagggaatgcaaaccaaaaccacaatgaggtatcacctcatacccattataatggctattatgaaaaacaaacaataacaaaagacagcaagtgttgacaaggattta

SEQ ID NO: 789374 - DNA, 636 bp, Homo sapiens
gcaatgtcttcagtgaacggtattgaaaaactgaatattcacatgcaaaagaatgaaattggatccttatctcacactatacacacaaatcaactcaaaatcaattgaagactaaaacttgaaacctgaaatgaaaatattaagaagaaaacatagaaaaaagttttttgacactgatgttggcaatgatttcttgcatgcgaccccaaaagcatagttgacaaaagcaagcatagttgacaaaagcaaacatacacacatgagactccatcaaactaaaaagcttctgcacagcaaaggaaacaatcagcagaatgaagaaacaaactatggaatgagagaaaatatttacaaaccttatatttaataagtaattaatatttaaaatacataaggarctcctacaactgaacggcaaaaaaccaaatagcccaattaagaaatgcgaaaaggacttcaatagatatttctccaaacatacaaatggccaacaggtatacgaagagatcgtcaacatcactaatcatccagggaatgcaaaccaaaaccacaatgaggtatcacctcatacccattataatggctattatgaaaaacaaacaataacaaaagacagcaagtgttgacaaggattta

SEQ ID NO: 789375 - DNA, 593 bp, Homo sapiens
tgcaaaagaatgaaattggatccttatctcacactatacacacaaatcaactcaaaatcaattgaagactaaaacttgaaacctgaaatgaaaatattaagaagaaaacatagaaaaaagttttttgacactgatgttggcaatgatttcttgcatgcgaccccaaaagcatagttgacaaaagcaagcatagttgacaaaagcaaacatacacacatgagactccatcaaactaaaaagcttctgcacagcaaaggaaacaatcagcagaatgaagaaacaaactatggaatgagagaaaatatttacaaaccttatatttaataagtaattaatatttaaaatacataaggagctcctacaactgaacggcaaaaaaccaaatagcccaattaagaaatgcgaaaaggacttcartagatatttctccaaacatacaaatggccaacaggtatacgaagagatcgtcaacatcactaatcatccagggaatgcaaaccaaaaccacaatgaggtatcacctcatacccattataatggctattatgaaaaacaaacaataacaaaagacagcaagtgttgacaaggattta

SEQ ID NO: 789376 - DNA, 535 bp, Homo sapiens
tcatagttcagtagactcacagacatgtaagcaaacaatttcagttcaaggtgatgactgctctgctggaccgtatcaaatgcgtgggcaccatgtacgctcacagacctatgcctgattaaagaggcaggaaagactttatagaagaagtgcagcagaaccaagacttattacaaggagtttgccaggaagatgaatggggaaaggtattcraataggccttatctactctattacttcagctatcgttgatatgcacatatctctgaaaagtttatcttcagccaaaatttatctcccaccttaatgccttaatatcacatttctagcagcatatttccatttggatattccagtggcaattcaaatttatcccatccagtgtcatctctacctagcccctctagaaccagttttgttctcacatattccctgtattggttaatggtataaacttctgcccagtagaacaagcaaaactctcgggtgttagcttggaatcttcattttctctcatgtcccatgttcaatgagt

SEQ ID NO: 789377 - DNA, 495 bp, Homo sapiens
attttgatccaaacaagagctgtttagcctcactgaggccaagtttagagacccatcctaccaattcaatagaacagagacttctcagatatcctgcaagtgcaacatgtccagaactgtgtatccaaagtagctcagcaccctcatttgcagaagctctgctaaaattaataaccattctggatatatgtaccataatacctgtgtctgtattcagaccatgtttttttagtgacttatatttaacgtgcctaaatagcaggcacgttaaaagtagcttatattttaacatttctcaaattaaactttccayatcgtttttactctgcctagaatacttactgcagcactctgttactgtgcatcaaagccctctagcaacactccaactactacccaaagtggatcttgacgtcaaacttcaagttcatcactgtttttttgtttttgtttttgtttttgtttttgtttttgttttgagatggagtttcactc

SEQ ID NO: 789378 - DNA, 628 bp, Homo sapiens
tggggtccagagcaagagaaggctgtgcatcagtttccagtttatttctttttattgtgaaagggatacaaaagtacaaatagccagcacacaatttttgataaaaagacaggtactgcatttaaatgaagaatgaaatatgcaaagatttgagagcagggaagccctggtgagaatgtctgtatagcttaggagagataggacacaaaatagtctactgtttaataaatkaaggcacagtagttatctaacctactcagttttacggtatagccaatggaacaataagcattttaaaacaagcagttttacttagatttagatacccaagaacaatatttttaagagagagtattaatatagtctatgttatagaaaataaaatatacacactgatttgagattaattggcacacattgaacatatagatgcacccatggcccagaataggaagaagtgtttattctaagaaaagaattatgtttaaactatttatataaatgtaaggggaaaatccaaaactcccttttttgataaggcatattgcagattttaacaaagaagactggaagcatttgagggaaccaagatttattgctagaagtttctttctttctctcctaaact

SEQ ID NO: 789379 - DNA, 635 bp, Homo sapiens
ctttcccaccaatgatgtacaagagtccacttttctctaaatccttgtcaacacttgctgtcttttgttattgtttgtttttcataatagccattataatgggtatgaggtgatacctcattgtggttttggtttgcattccctggatgattagtgatgttgacgatctcttcgtatacctgttggccatttgtatgtttggagaaatatctattgaagtccttttcgcatttcttaattgggctatttggttttttgccgttcagttgtaggagytccttatgtattttaaatattaattacttattaaatataaggtttgtaaatattttctctcattccatagtttgtttcttcattctgctgattgtttcctttgctgtgcagaagctttttagtttgatggagtctcatgtgtgtatgtttgcttttgtcaactatgcttgcttttgtcaactatgcttttggggtcgcatgcaagaaatcattgccaacatcagtgtcaaaaaacttttttctatgttttcttcttaatattttcatttcaggtttcaagttttagtcttcaattgattttgagttgatttgtgtgtatagtgtgagataaggatccaatttcattcttttgcatgtga

SEQ ID NO: 789380 - DNA, 629 bp, Homo sapiens
tgagtttaggagagaaagaaagaaacttctagcaataaatcttggttccctcaaatgcttccagtcttctttgttaaaatctgcaatatgccttatcaaaaaagggagttttggattttccccttacatttatataaatagtttaaacataattcttttcttagaataaacacttcttcctattctgggccatgggtgcatctatatgttcaatgtgtgccaattaatctcaaatcagtgtgtatattttattttctataacatagactatattaatactctctcttaaaaatattgttcttgggtatctaaatctaagtaaaactgcttgttttaaaatgcttattgttccattggctataccgtaaaactgagtaggttagataactactgtgccttmatttattaaacagtagactattttgtgtcctatctctcctaagctatacagacattctcaccagggcttccctgctctcaaatctttgcatatttcattcttcatttaaatgcagtacctgtctttttatcaaaaattgtgtgctggctatttgtacttttgtatccctttcacaataaaaagaaataaactggaaactgatgcacagccttctcttgctctggacccc

SEQ ID NO: 789381 - DNA, 494 bp, Homo sapiens
agtgaaactccatctcaaaacaaaaacaaaaacaaaaacaaaaacaaaaacaaaaaaacagtgatgaacttgaagtttgacgtcaagatccactttgggtagtagttggagtgttgctagagggctttgatgcacagtaacagagtgctgcagtaagtattctaggcagagtaaaaacgatrtggaaagtttaatttgagaaatgttaaaatataagctacttttaacgtgcctgctatttaggcacgttaaatataagtcactaaaaaaacatggtctgaatacagacacaggtattatggtacatatatccagaatggttattaattttagcagagcttctgcaaatgagggtgctgagctactttggatacacagttctggacatgttgcacttgcaggatatctgagaagtctctgttctattgaattggtaggatgggtctctaaacttggcctcagtgaggctaaacagctcttgtttggatcaaaat

SEQ ID NO: 789382 - DNA, 548 bp, Homo sapiens
actcattgaacatgggacatgagagaaaatgaagattccaagctaacacccgagagttttgcttgttctactgggcagaagtttataccattaaccaatacagggaatatgtgagaacaaaactggttctagaggggctaggtagagatgacactggatgggataaatttgaattgccactggaatatccaaatggaaatatgctgctagaaatgtgatattaaggcattaaggtgggagataaattttggctgaagataaacttttcagagatatgtgcatatcaacgatagctgaagtaatagagtagataaggcctattygaatacctttccccattcatcttcctggcaaactccttgtaataagtcttggttctgctgcacttcttctataaagtctttcctgcctctttaatcaggcataggtctgtgagcgtacatggtgcccacgcatttgatacggtccagcagagcagtcatcaccttgaactgaaattgtttgcttacatgtctgtgagtctactgaactatgagcaaagggaacat

SEQ ID NO: 789383 - DNA, 647 bp, Homo sapiens
agcctcactatacagatgagaaaaatctacagctgggcgtgactgcagaagcacagtcttagtgcccttccacgtacctttgccagtgcacccccctgcacccctttctgtgagtttctccctcttgtcagctgcaactgaacctgctcttcttgctcrttggtctctttagtcacatggtcctaatcaatacacctgagtgagatataaggctccttcctgatttaagctttctttcttcctggctcggacaacctggtcatttcattcctgagccaatataaccccttgatctcctactgtgacaattttcagacccagataaccctgattgtgggttttctttacatgtggacttcaacatgcagctgataaaatgaagccatttcattacaaatgtaagcttttgaaattgggctgttttgactgctcaaaaatccttttgttctcttcttgctgactctctggtgaagttatcaacttatgactctcaaaaccctctctaggtcttttcaactttcccaatttcaagtttcttatctttatctgcctggtgaaaatgctactagggcttaatgtgtttaattcattactctcattccctcaaactggtttcattctccacatccttatgtctatcagaggca

SEQ ID NO: 789384 - DNA, 697 bp, Homo sapiens
ttttgccattggtacctttcagcagatgttaagattaattcgcaacctatgtcagtaaggtatagaagccaatgagcaaccatttatattttagtaaattttggattacagttggctcaaattgtggacctctgtttcattttattgttgttggtggtgtttccttccgatgtctccatgtttccagatkctctctctttctgcctcatgtgtgtggtttttggatatactttggggagagagttctctctatcctgtttatatttataaatttccttattcaaagagcttcaaatcagtagcatcagggttaagtatctcccttagggcaattgtttctttaaaggatctaaggaccccagtttagaccacgtttggattaacccctattctgtaccataagactgctaggagtcttcttcctcatagccatgttaatagaggtttgttttgttttgttttgtttgcaacagaggcacagacagcagcagcaaaggcatttgtagacccatataaagagcaatctgcctttaggagtgtggctttcagtaactcaattcttcaaataatgactggtcttcaaatagtgactgcttttcctccacaaaagtgactacccaatggtcccatatgacacacagcagcattccattgagaactctattaaataggatccaacatccggtagggacacagc

SEQ ID NO: 789385 - DNA, 635 bp, Homo sapiens
tgagtgcattgattctaaaagtgctgtgttttagtaacattagctgtgaaataagcaaacacattaaggtcaaaattgtttccttctatgtgtgtgcacaatgatttagaggaaaatatcccatcacatttctttaagaattaggctatacctgcagaagatgattatgcaatgaagataacatttccccccctagtcttgaagaaggcccagaagctgctatttagaagtctaatccttgtttagactcatgataaatatgcagactcttccaggtgaagagaacaaggagggtctagaggcctggttattgggatcctttaggaattgtgtctaatgccaggaaacttttcagaactactcccaatacttttyaacattgcttttcatggtggatcaaggctgagactttgacttaaacaaaaaacaagaattcttgtattagagacaacccctttatcagtacttggtatttggtgtgctattattgaaaaaagaggggtaaagaagtgtattctgaagtaaaggtaacaagagtatgccctgacagagacaatgtggttgctggcagatttgccagacaaattctgacacctgggatactgggttctctaactgacaccataacttctata

SEQ ID NO: 789386 - DNA, 509 bp, Homo sapiens
agttttttatcacccagtctacaaatgactattaaacctttccactttgacagtgtgcaacaaaagaagatgcaaacataaagcagcagagagggtcacaggaaagaaaaaacactgcattaagttgtatgacaagaggtttcacaaagttgaagactgagcaagttctagactaacaacacatagtcaacaaagaggctttagtccaaaaggaaagcatgatgttcattcaagaagctgaacaaaacaatgtgaccagaatagaggaggaaaattaaaagttggattgaatctaagaaatggatggtcctgaaagcctggccaacgttttawcaaattctatagaaaatggggagctacgaaaggttttcagcaggggactttatatagcttaagtaactttcatctgacagtcttttgtagaaatgactggaaggagagaggctctagactaagaactctttgaagtactaagcaccagaactaaggtgctaaccaccttagtctac

SEQ ID NO: 789387 - DNA, 619 bp, Homo sapiens
  misc_feature 522: n = A,T,C or G
tattcttaatgtagcttacacatgtttttatgttagtgaactttaagtcatttttgtagttagtatgattctattcatgaattttagcttattctcaagtcattggaactgtgtctgttatatccaggagtattagaagtttactgtacttcagaccatctttatatcaagcaagaaagctttgaagcatttgcacatctacccaaaattactttttggtgtaatatgaacatgattttaaatgycatgaataaaatgaagctgttttatgagcagttcagttaattttacattctgaagtttcacattaagactgtttcttgacaatattttacttcaaagagttaagtataatgagtgttgtgaataaaaatatatgtcttcttttatttaaccatatacttgcttttttataattcttataattataaaaattataaagaattataacaaacaacagtctcatgctaacttaaagcatggcctcttaccttctttcctccttaaaggaatcataataanagctattgctttaggatatgatcttaaagcaactttaagatcttagctgactcaaaggtatattaggttctgtatgacagatcatctttctacaagc

SEQ ID NO: 789388 - DNA, 590 bp, Homo sapiens
aagattaaaggaaagccctgtgtttctcattgaatgactagcccagggagagatttggactaaatatcccaggaagcttttcagtaaaattataggaaataaaggctgggttgaaattttaataatatctttttccccacctgtccagtctcttatttccttatgttcttgggatcatgaaaatacaaatattttccaaattccttttaaaaattcaaagaaatatattttaagttaaacatggcagattgaacacccatgtctgtcctcaccctctctttagggataccattaatatgaccaaaaaaaaaaaaaaaaawatatatatatatatatatagtctcacagggacaaagagaacagaggagacaacactaaataaaagatttcagcaaaattttttcttttttcttctttttttttttttttgagacagaatctcgttctatagcctaggctggagtgcagtggtgtaatctctgctcactgcaacatctgcctcccaggttcaagtgattctctcgcctcagaactcccaagttgctgggattgcagacatgtgccaccacacctgactaaattttgtattt

SEQ ID NO: 789389 - DNA, 617 bp, Homo sapiens
aaatattccctagtcttcatgtcttctcctgagccctcataaaaatcacccttaatgctctgttcagagcaatacaggctttttctagcctgatcctccaaattcttctagcccctgcccattacccagttcaaaagccgcttccacatttttaggtatccgttattagcaacaatcccattcccaataccagttttctgtcctagtccattttctgttctataacagaatatcacagatggaataatttatatatatatatatatatatatatakagagagagagagagagagagagagagacttatttggtttacagttcttgaggctgggaagtccaagagcatagtgctggcatctggtgagggccttcttgctgcatcataacatggcagaaggcattacataattagagggcaagagcatgcatgttagctcaaggttccctttctcttcctacaaagccaccagttctatcatgggggcccctccccagtgacattatacaatcctaattacctcctaaaggccttaccttcaatcaacatatgaatttggggattaagtttccaacatgtgaaatttgagagatacatccaaactatcccaggatccaa

SEQ ID NO: 789390 - DNA, 627 bp, Homo sapiens
ttgagagatacatccaaactatcccaggatccaattactcctactgtatttaggttgttcaactgagtgtctgcaattctcactgtaatttatggtcaacatagaagaaaggccatggaactcttcaaaaatattgggccttacctcacaaattatttctcaaaataaaaggtattttgagaatacccagccagtgtggatgagtaggtcttaaatggaaaatccactctaccattccaattctcctaagcctttgaattcttccctctatgttaatccaaggtagttcaggcatttccaagtcacatgcagtgagctatctttagatccatgtttcagtcaagtaaccaaactgttagagccctttctaactcccaagctgcaacattaaatgcaaaatctttatttagcaagctcayacaaataaatttggcccgattcgacttaatgttccttccatcattctctcacatctttactatccattcccacatgtgatccaccagatttctgcttgcataaatagaaaaatcaagtagttattgtaaagtatagtgcacttcctcacgggtgacactttgatctcacctttaggtacttgcttggccttaagtctagttgtaaatt

SEQ ID NO: 789391 - DNA, 548 bp, Homo sapiens
taggtacttgcttggccttaagtctagttgtaaatttagaaacaaagaagggtgatgggagcaggtcctgaggagaatcagcattgtcttgcatggcaactgcctcagggaaggccattaccatttcctccagcaacatagggttaattccattagactaaggtagaaagaccagaatgctatgagtggggaggccactaccactagggatggwgagaccacttggggtgagaatgtctcttccactaggggtgaggagaccccttccactggcaaacaggattcaacagaatctagaggctcaatgtccccagattcatcagggtcttcccacaaatcaccatcccaatttacaggatcctattctttcccaatcaatgccttcactttaacagcagacactcagtaagtctgggagttcaacctatgttgtaatttagtaaactacagatgattttctgcatttaattttcagcaatttcaagcctgtggctataggaggcaaggctgtcattcagggcatacttagaagctcttaggttatttat

SEQ ID NO: 789392 - DNA, 632 bp, Homo sapiens
ttagtattttcccatttatggagttaactaaataatcacatagaaacagaatagaatggtgtttagcaatggctggggaaaggaggaaatcgggagttgttcaatagatataaatttttagttataccagataaataagttctagagatgtgctgtatatcacagtgcctatagttaacaatattgttcacttaaaatttttaagagggttgatctcatgttatttttagcacaaaaaccctccaaacaaaaacaacaaaaaacaagggcatttagaaatgtttggaagtgatgaatgtttattatcttgattgtggtgatggtttgcatgggtgggtacatatgtgaagttgtatcaagttgtatacattaagcaggtgcaatattttgtacatcaacgacaaaatatattcattcttgccataggctgcaaggagtgggggagataggagatggaagagattgctaatgggtacaggktttcttttttgcatgatgaaaatggtctaaaattgattgtggtgatggttgtccaactctgtaaatatactaaaaaccatttaactgtataccttaaatgagtgaattttatgggatgtaaattgttaataaagccatttaaaaaagtagat

SEQ ID NO: 789393 - DNA, 632 bp, Homo sapiens
ttagtattttcccatttatggagttaactaaataatcacatagaaacagaatagaatggtgtttagcaatggctggggaaaggaggaaatcgggagttgttcaatagatataaatttttagttataccagataaataagttctagagatgtgctgtatatcacagtgcctatagttaacaatattgttcacttaaaatttttaagagggttgatctcatgttatttttagcacaaaaaccctccaaacaaaaacaacaaaaaacaagggcatttagaaatgtttggaagtgatgaatgtttattatcttgattgtggtgatggtttgcatgggtgggtacatatgtgaagttgtatcaagttgtatacattaagcaggtgcaatattttgtacatcaacgacaaaatatattcattcttgccataggctgcaaggagtgggggagataggagatggaagagattgctaatgggtacagggtttcttttttgcatratgaaaatggtctaaaattgattgtggtgatggttgtccaactctgtaaatatactaaaaaccatttaactgtataccttaaatgagtgaattttatgggatgtaaattgttaataaagccatttaaaaaagtagat

SEQ ID NO: 789394 - DNA, 605 bp, Homo sapiens
ctttaaggatattatcttaaagtgcttggggtacattgtagaaactgtaagaatgaataaaatcaacttttatcttaacatctcttaccatatggcaaaaatatatattatttattcaaaaataacaagatggcaaaattcataaaatgtgggkgacaaaacaatttgataattttttgcttttatttttgcaggagttgcaaaatgaaaataaaatggaataaaatgtgatacactcaaaaattgtaaacctgggcctaccaaaatatttccacatagtaggtgctcaacaaacatttgctgaatgattgaaatatcttccgaatgaaaaaatatggtgattcaacagtaagccaagtaatttaccaataaatgaataaagttatttacaattatgatggtaatcacttcttttcctcattcacattaaacacaaagtattgaaaagaaaacgtttgcatagcaccttgagtttcatcatggaatcttgacataacttgtctccccgagctgcggaaacttcatcaatcccgatcaatttggctttgtaccggaccccttcacctttaaacctctttatcaaagtggcttcactgcgatcctga

SEQ ID NO: 789395 - DNA, 615 bp, Homo sapiens
tctcactcctgtacccccagtgcctagcagagtgcctggtgtagagtagaagaccaatcaatgtgtgaggggtggaaggatgagtggatggatgaatcaataaacagcatgcctgtaatccacagtgtgcattgcttatctgaatctatagctttctttttatttcaatggctctgccagaatgcaggcctctcctttgttggaacttgaggctgcctggagatgattggatttggttcagatagctatcgggagagacaaagaggtttgcacatcagagactgaagttgagcctttgcaaatgtgcaaaactgagaattgaggcagaagtcattattaactcacacatttaacaggatgtttgcctttcaacmaagggtgactaattaatgtaacagttgattatgtagctcccttaatttgttactggttttcaaataccaaagtaattacatcactaaaagaggacagttgttagaaagtcagtctacagaagagattcaaaaaggattgcctctgttggttctaaagtcctgtttcggtgtagtcttgtgtttgggtctgatttggcagccattcacaagtccctgagtagaagtcagacccagtaccatg

SEQ ID NO: 789396 - DNA, 517 bp, Homo sapiens
cccaggagcaccaagacccagctctgccttccgcctcccacggggcctctcctctgcaggaggccatacaaggactgcacggaaggggagcggccccgcagggagggggcgcctggcagcccgcccgccgcagcagcctgcaaccccgcccccaggcgcagtgcgcgccacagcagccctgccagagcccgtgtgacacagctgccggcatgccygggcacgctgcccagctgggctgggggaggggcgccgggccaggagccgctgaatcagctgcacccggacggccccgcctgggcaaggatgctggtgcggcggggcgctctctcttttgggaaccgtcaggaggcgcgccaggcggtggggtggggggtgtttctggactgcggcctctgcagcctgctgcatgggaagtgcggctcaccggggctgggtgcagggcagcccccgcctccgagggcatgagcggaggcctgcagggagggcctgggcagagaggggccctttccaaaggaga

SEQ ID NO: 789397 - DNA, 517 bp, Homo sapiens
cccaggagcaccaagacccagctctgccttccgcctcccacggggcctctcctctgcaggaggccatacaaggactgcacggaaggggagcggccccgcagggagggggcgcctggcagcccgcccgccgcagcagcctgcaaccccgcccccaggcgcagtgcgcgccacagcagccctgccagagcccgtgtgacacagctgccggcatgcccgggcacgctgcccagctgggctgggggaggggcgccgggccaggagccgctgaatcagctgcacccggacggccccgcctgggcaaggatgctggtgcggcggggcgctctctcttttgggaaccgtcaggaggcgcgccagscggtggggtggggggtgtttctggactgcggcctctgcagcctgctgcatgggaagtgcggctcaccggggctgggtgcagggcagcccccgcctccgagggcatgagcggaggcctgcagggagggcctgggcagagaggggccctttccaaaggaga

SEQ ID NO: 789398 - DNA, 642 bp, Homo sapiens
aattctctcaattaacttgcttcagattgtgattgcattcgctaatttaatcagccccagagtaatctagcggctgggaaatgatgaattcctgtgaacatgagcccaaggggggccagggcgggacaccaacgctggggccgaaggccttccgaggtggggacggagaaccagctctctttccacctggggagctgtttcagtcactccctgacgtggaggtaggttcggtcaaccaggcacggggctcgacttcactgctacctgggaacggcctggggcagcctccttcccacacctgaatcagccagacctgggaagcaccgtctggaaaaagctccactccggttttgtttggctccaccaacctcggcctgggtccctctgtgtcttttcccgaacaatgagaacccaaatgtgctcagaatggctgtttccttccacatcaccctttcagagcccgcttgtacctactgaagattccckattaaatcaggattatgtccttttctgggggaagggggcctgtctcggacaccgcgggctggaggtggcgcctgcactgcgggcgcggaacctctcgggtgtccgcggctctgccccaggcttactcggccactgcaggaggccgcctcgtccagc

SEQ ID NO: 789399 - DNA, 561 bp, Homo sapiens
tgcccttatggaagttagattttggtggaaatgagattgattataattttcatgaacacttaggaaacaaacaggatgctatgcatttgtaacaggtatacctagcctggcctagggaaagttgcctgaggaagtcacgagacctgacttacatgagtgaactgagcaacagagataggtcaaaatcatcccagcagacagaacggcccatgaaaaggcctttaggtctcaagaagaggaacaaatatgactgcaatggactgagcggggggatgagccatgagctaaagctagagacgtagctgggacctgactgtaggattgaaagctgagtgagagatttggatttatttcctaaagggaataggaagtcatcagktagtttcaaatagagaagtgaaatgtccaaactgcactttggaaaaagactgctacgaagaatagattggaacaggacaagagggatgcaattagaagagatggcctccgggactgggtggtctgggtgtaaacctgggttttgctatccattaactctaccattttaggaaagtgtgttaa

SEQ ID NO: 789400 - DNA, 578 bp, Homo sapiens
ctcagcaaattacctaggctgtactgctgcaaagcttcacagacagcccccattacttcaatcaagcccaaatttcttcctcatctgttacctatttcggcataattctcataaaaacacacgtgctctccctgccaatcctgtccgactaatctctcaaacccaagcaccttctacagaacaactcctttccttcctaggcatggttagcacggtcagaatttttacacaagagccaagaccacaccctgtagcctttctgtccaaacaacttraccttactgttttaacctagccctcatgtctgtgtgcagcggctgccgctgctttaatactgttagaggccctcaaaataagtagaggcctttcctaccgggtctgagaaggccaccacggtcatttcttcccttctgtcagacataattccccggtttggccttcccacctctatacagtctgataacggaccagcctttactagccaaatcaccaaagcagtttctcaggctcttggtattcagtggaaccttcataccccttaccgtcctcaatcttcaggaaaggtagaacggactaat

SEQ ID NO: 789401 - DNA, 619 bp, Homo sapiens
tacaatacagggctcacttcatcaggaaactttcctctcataatattctcatatatcaaaatttcaaagtgcattatgaacatagtgcattttaggcacttgataaattttgtccttatgtggcggtggttcccctcaaaaatgttggatgtaataaattgctataatcaaatctaatttccgaaaaatacctgtgggagtaacaaacaaaaaagcacgtcttgtataaaaaaatgataaataacaccgaaggcagctgtttattataatcaacttggtgctgaattacaaaattaaaattatgtagccctttgtaagtaaccctagcaatatacatgatctgtagaattatgttgacttattttgcatttcataggaacagttcaaagaaatataacagaaaaaaatggaaagatttatcacaaaggaccctgtagcacagaatattttgaaaaaatccayttattttggtctattaagaaaactagcatggaaatgatttgcttagaactcattaagtgtaaaacattttgaaaaagtgctaattttctaaaagaaacatctatgcagtaagcaaattatatttttctatgacttattagtatgggaccatgggaat

SEQ ID NO: 789402 - DNA, 676 bp, Homo sapiens
tgaaaagtgaaaaaagggaaacagggactgtcagcaaagtgagagtgctgctagcaagctttctgcctcacagattgaatccccagttaccacacaggaataggaggggtcaggctcctctttcttgcaaatggcatgaacttcccaaggccccascctgtcctcccagtgcacaggctggtcggaggttctccggggagacctttttacttggagacctttttaccttctccattctaaagaagtacatctaactgccattagaataaggataaggataaggacaaagaccaatcttaattgcttcctgctgacaggaggtgctgttttgggaaaacagcagtcagatctccctcagagacatatctaaggattcctggcaaaaggggccaatgtctgaagctctggttgcatgaccgttttggagtttgtttgatggcctgaaggtgagaagacacaaacagggttattagaaaatatgtatcaaaataaaatgtggggtaggtggtaaggacagctcaaaaatcccaaggccttttaccagtttgcacagggaagggagggccaaaagcctgactggtaagaaaaacttttacccttttgctggtatgtcaggcttctaggttcccttcccctgagcccaatcctaagctgaccagtttaaggtttgagaaat

SEQ ID NO: 789403 - DNA, 513 bp, Homo sapiens
gtcctgagagtggcacagtgggttctgcagctgatcagggttgtccccatccgccattccccgtgcactgccacaaatggtcgccaggtaattctcacctgcagcctggatgccgggatgaattcagagtccagtctcaacttggccrataaaggctcagtctcaacctccctatctcaaaaatggggttatcagctacctcctgggtcaggctggagattcagtgagataaggatgccaagggcttcacatatgacttggtccataacaattgctcaataaagagggaagctgtgattgttacaaccacttcctggcccagtgcacagggtcagcagatccatgggaaatgctcaactaagggttagaaggcaaaaatggtgagagaaaagcatggacagaattttctctgttctaagtttttttcccaccaccttttcagaacccagagccttctctgctgatctgcacgggtcaggccgggctccaaagacttcccgtgtctctgccacc

SEQ ID NO: 789404 - DNA, 640 bp, Homo sapiens
tatacatgccataaaggagcattagtactccatgttgatgggtctatgtttctttccatttgttatgctcccaccactgactggccaatcttctctctaccaatacctgttatagatcaacagatcaccatttgcttctctgaaggcctccagatgatttctggatgaaccttccactgtctattctaaaggcccacgttttccattctcccacactgcaytgatccccatgacactttatgtccagaatgctactctctggccattcctgtcatccccaaacatttttgtttttaattccaacataacattttcaccttccaaaaacctttatagagaagatgaaaccttactttgccctcatggtctggcaatgacataccaatagctactgattctctctaaatgtttccccaaaacacttagccatgaaaaaaaaaaaaaaacaattaagttcaaaggaatttatgggacactccaaattgcagtataacttttgatgttttaagctgtgtcaccattttactttacctggcttttcttcctccccttcagcaagcttgcttttgggaggagtttcccgggtagaattcacagttcgacgaatcggcatggtgctatcttctaccttctaagaaaa

SEQ ID NO: 789405 - DNA, 513 bp, Homo sapiens
tttttgaggggtaatcttcagcagaaaactaaaagcgccttacctgactgactttcaggcatacgcagaagctcctatattctctacctctgcctctcatgctacattcaaaaagccatctatctactctcctttggagaggccaggcagtcttggacattccaaaagcagcctattggcacagtgcagtggtttgcaatcttggccgattttgcccctcagagcaatgtctggagacatttcttcgccgtcacataacagggaagtggccactggcattaatgggcagaggcccggggtgctgttaaacaccctacagtacacaggacagcctcactataaaattatccagtctgaaacgtcamgaatgcacctgttgagaaactcttgtaaagctgacagaacacgggctttgaaatcgagaccacctggagttaaaactaggcaaatcccttcacccttctgaacccacttccccatctataacagggatccggtttttcccgggtatag

SEQ ID NO: 789406 - DNA, 551 bp, Homo sapiens
ttatgagaatctaatgcctgaagatctgtcactgtctcccattacccccacatgggaccgtctagttgcaggaaaacatgctcacggctcccactgattctacatgatggtgagttatataattatttcattatatattacaatgtaatactaatagaaatgaagtccacattaaatgtaatgcacttgaatcatcccgaaactatcagaccccccaccccgtcctgacctgtggaaaaattgtcttccacgaaactggtccctggtgccaaaaagactggggacagttgctttaacagaccaggcctctcttccttttggatcaccaatggccagcagccatccttccggccatgtggagaaagccttcagttwgcataccaagggaagcaggaacaagaggtgaagacacaggccaggagcagtggctcacgcctgtaatcccagcactttgggaggccaaggcaggcggatcacctgaggccaggagttcaagaccagcctgaccaacatggagaaaccctgtctctactaaaaatgcaaaaaaatta

SEQ ID NO: 789407 - DNA, 551 bp, Homo sapiens
ttatgagaatctaatgcctgaagatctgtcactgtctcccattacccccacatgggaccgtctagttgcaggaaaacatgctcacggctcccactgattctacatgatggtgagttatataattatttcattatatattacaatgtaatactaatagaaatgaagtccacattaaatgtaatgcacttgaatcatcccgaaactatcagaccccccaccccgtcctgacctgtggaaaaattgtcttccacgaaactggtccctggtgccaaaaagactggggacagttgctttaacagaccaggcctctcttccttttggatcaccaatggccagcagccatccttccggccatgtggagaaagccttcagttagcataccaagggaagcaggaacaagaggtgaagacayaggccaggagcagtggctcacgcctgtaatcccagcactttgggaggccaaggcaggcggatcacctgaggccaggagttcaagaccagcctgaccaacatggagaaaccctgtctctactaaaaatgcaaaaaaatta

SEQ ID NO: 789408 - DNA, 654 bp, Homo sapiens
actctgtatctagctaatctagtggggacatgaagaacttttgtgtccagctcagggattgtaaacacaccaatcagcaccctgtcaaaacagaccaatcagctctctgtaaaatggaccaatcggctctctgtaaaatggacccatcagcaggatgtgggtggggccagataagagaagtagccagcagtggcaacccactgaggtcaccctccaggctgtggaacctttgttctttcactctttgcaataaatcttgctgctgctcactctttgggtccacactgcctttatgagctgtaacactcactgggaatgtctgcagcttcactcctgaagccagcgagaccacgaacccaccaggaggaacaaacaactccagacgcgcagccttaagagctgtaacactcaccgcgaaggtctgcagcttcactcctgagccagccagaccacgaacccaccagaaggaagaaactccaaacacatccgaacatcagaaggagcaaactcstgacacgccacctttaagaaccgtgacactcaacgctagggtccgcggcttcattcttgaagtcagtgagaccaagaacccaccaattccggacacggtaagactggggcaagaggtggaagagatttgcaagattcatttgg

SEQ ID NO: 789409 - DNA, 558 bp, Homo sapiens
ccatgaactgaattttaattaattttctgtctttggccagttgcatttacaaagtattaaattttcttttttattaagcatatagaattaccagtttaatccactaaaatatgatgtatccaggattaatagaataagttggtatcattccagccaactattctgcttcraactttatcattggaaatcccgagtaaaacactgaaatactggaaggaatgttgtaaactagtaggctgcatttaaaattaaagcatgaagctagaggtctgtggcatgaagattacacctatagcagaaataacaagagattcaaacccaaaagtaaatgtcatttttctatagagtatcatccttggaatttttccaggtttggtgggaaggatatagtcttgcttatatgtgtcttgctctaagtttgtagaaaaaaatatagattctttttcagaattatttccagaaatactgaagtattgctaacatcttttccatgggtttttgtctctttgaagactctactagatgcaaaacagaatgacatttgtaaacggaacctgg

SEQ ID NO: 789410 - DNA, 640 bp, Homo sapiens
ggaacaggagtcagaatttagatgtcagggataaaaaatcagttataccacaataaaaaaatcaaggagtttcctaaattaaactcagatgctaaagttataccacaaccatcagtacaagaccaaggtagtccaagtgcggtagctcatgcctgtaatcccagcatcttgggaggctgaggcaggcggatcacaaggtcaggagttcgagaccagcctggccaatatggtgaaaccttgtctctactaaaaatacaaaaattagcagggcatggtggcrggcacctgtagtcccagctactcgggaggctgaagcaggagaatcgcttgaacccaggaggtggaggttgcagtgagctgagatcctgccattgcactccagcctgggcgacagagcaagactccatctcaaaaaaaaaaaaaaaaaaaaaaaaaaagaccaagataagccaaatacttgagtccacagcagtagttaaagctggtgttatatagggggttatccttggcccactccctgaaatggagggcaagaagatgtgaggcaggataagtatccacatccggtgccagttccctgacttaagcaagaagaggacacccaagaaaggtgcatattgaggatgcaaaataaatttta

SEQ ID NO: 789411 - DNA, 623 bp, Homo sapiens
gaaaccctgtctctactaaaaatatgaaaattagctgggtatggtagtggatgcctgtaatcccagctactcgggaggctgaggctaaacctgagaggcagaggttgtagtgagccgagatattgccactgcactccagcctgggcaacaaagcaagactccatgtcaaaaacaaaacaaaacaaacaaacaaaaaacaacatgatctcactactttcagggtcatgaaaaagaagaaaaaaaaatacatgacatgggctgggcatggtggctcacgcctgtaatcccagcaatttgggaggccaaggtgggcggatcacraggtcaggagatcgagaccatcctggctaacacggtgaaaccccatctctactaaaaatacaaaaaacttagccgggcgtagtggtgggcacctgtagtcccagctacttgggaggctgaggcaggagaatggcatgaacctgggaggtggagcttgcagtgagcagagatcacgccactgtattccagcctgggtgacagggcaagttctgtcttaaacaaacaaacaaacaaaaaaatatatatatatatatatgacatgacataaaataacctcttgaaaattgaaaaactatttagct

SEQ ID NO: 789412 - DNA, 623 bp, Homo sapiens
gaaaccctgtctctactaaaaatatgaaaattagctgggtatggtagtggatgcctgtaatcccagctactcgggaggctgaggctaaacctgagaggcagaggttgtagtgagccgagatattgccactgcactccagcctgggcaacaaagcaagactccatgtcaaaaacaaaacaaaacaaacaaacaaaaaacaacatgatctcactactttcagggtcatgaaaaagaagaaaaaaaaatacatgacatgggctgggcatggtggctcacgcctgtaatcccagcaatttgggaggccaaggtgggcggatcacaaggtcaggagatmgagaccatcctggctaacacggtgaaaccccatctctactaaaaatacaaaaaacttagccgggcgtagtggtgggcacctgtagtcccagctacttgggaggctgaggcaggagaatggcatgaacctgggaggtggagcttgcagtgagcagagatcacgccactgtattccagcctgggtgacagggcaagttctgtcttaaacaaacaaacaaacaaaaaaatatatatatatatatatgacatgacataaaataacctcttgaaaattgaaaaactatttagct

SEQ ID NO: 789413 - DNA, 623 bp, Homo sapiens
gaaaccctgtctctactaaaaatatgaaaattagctgggtatggtagtggatgcctgtaatcccagctactcgggaggctgaggctaaacctgagaggcagaggttgtagtgagccgagatattgccactgcactccagcctgggcaacaaagcaagactccatgtcaaaaacaaaacaaaacaaacaaacaaaaaacaacatgatctcactactttcagggtcatgaaaaagaagaaaaaaaaatacatgacatgggctgggcatggtggctcacgcctgtaatcccagcaatttgggaggccaaggtgggcggatcacaaggtcaggagatcgagaccatcctggckaacacggtgaaaccccatctctactaaaaatacaaaaaacttagccgggcgtagtggtgggcacctgtagtcccagctacttgggaggctgaggcaggagaatggcatgaacctgggaggtggagcttgcagtgagcagagatcacgccactgtattccagcctgggtgacagggcaagttctgtcttaaacaaacaaacaaacaaaaaaatatatatatatatatatgacatgacataaaataacctcttgaaaattgaaaaactatttagct

SEQ ID NO: 789414 - DNA, 623 bp, Homo sapiens
gaaaccctgtctctactaaaaatatgaaaattagctgggtatggtagtggatgcctgtaatcccagctactcgggaggctgaggctaaacctgagaggcagaggttgtagtgagccgagatattgccactgcactccagcctgggcaacaaagcaagactccatgtcaaaaacaaaacaaaacaaacaaacaaaaaacaacatgatctcactactttcagggtcatgaaaaagaagaaaaaaaaatacatgacatgggctgggcatggtggctcacgcctgtaatcccagcaatttgggaggccaaggtgggcggatcacaaggtcaggagatcgagaccatcctggctaacacggtgaaaccccrtctctactaaaaatacaaaaaacttagccgggcgtagtggtgggcacctgtagtcccagctacttgggaggctgaggcaggagaatggcatgaacctgggaggtggagcttgcagtgagcagagatcacgccactgtattccagcctgggtgacagggcaagttctgtcttaaacaaacaaacaaacaaaaaaatatatatatatatatatgacatgacataaaataacctcttgaaaattgaaaaactatttagct

SEQ ID NO: 789415 - DNA, 653 bp, Homo sapiens
caaccactttgggcccattttacttagaaggaaagtgaaaatttaaagaatttaaggactctgcttcacttcctaacagaacaggtatctaaaatagttctgactacaatggccacatgctgaatccaatttattaaactaccttcttaacaatttctcttttttttttttcttaactgggtttgttttagggaagggaagtagaggacatgagaaatttattcattttattttattttttcttccaacttctattttaggttcaggaggtgcatgtgtgggtttgttatataggtaagttgtgtgtcacagagatgtagtatacagattatttcgtcacccagctactaagcatactactggacaagtagtttttcgatacttactctcctcccactytccaccctcatgtaggccccagtgcctattgttcccttcttagttgctttgttagattgtatactcaatgtttagctcctacttataagcgagaacatgtagtattttgttttctgttcctgcattaattcgctgaggataatggtctctggctccacccatgtttctgcaaaggacatgatctcattcttttttatgaatgtgtagtattctatgattttaggtaccacattttctttatccagtccattatt

SEQ ID NO: 789416 - DNA, 597 bp, Homo sapiens
ttgagtaacagaatagaaattgctttcagtgaaaaagctagtccatcattttcagttttagaccattaattatagagtattcttacttactgctttctgttagtaatagatggtttcatggtaataaatgcaacgtaaatttagctctttataattccttatgacctcttgattttaaagttgacaaatctccttagattataatgttctgtaaaatattccatgtatataggagtcaaatgctatccaaagtatttacctctccaaaattgcccctaaactacccactcaaccacaaatacacataaagaacctatagaggtacaatctttattttcttttgtatgatagtacaatctcactctctctaaagtggcagataaggttgccttttgtgaaaragcagagtattgcagttcatgtcatatttcttcacttattctacagcatttattgatagacacaatatggcctttcatggaaactacagtcattggactgtcattggcatatattaacactcgagctcactgcattcttgagactgtgtccattcaagcacaacctgggcaacttgagtagttcttctttaagtac

SEQ ID NO: 789417 - DNA, 587 bp, Homo sapiens
gttcaaggacagtactggtttattaaagaggacaacaatgcaattcagtatctggaggctcccatgtactaaaattatgctttggagtttaattcaagtaaaacatggagatttgcttgataatagacctaaatgctggtgttaatttcaagggagtaatatggggggggggggtcacaatatttattatattaatargttttttgggggaatttgttagtcatattaattctttttaagtgcacaattcagtgctttttagtaaaattacagtgccatgcaactattacctcaatcccgttttagaacatttctgtcacaccaaaatgatctcttttacctgttttaagtcattcccaccttcagcctattacagttttcttttcttttttttttaaatcagctggtgcattttagaagttcttagtaataaaaccaacctatagactttaatctataaacctttttaaacttttaagaaacggagaggccggggcgcagtggctcacgcctgtaatagtagctctttgggaggctgaagtgggtgcatcgcctgaggttgggagttcaagaccagcctggccaac

SEQ ID NO: 789418 - DNA, 541 bp, Homo sapiens
taatgtttactaaacagacccagacttgggagtgtcctgatgtccctgataccttgagagcaaaagcattcctaattttgctttaaagataataatattaattcttgcaaaatatggtaattaagaaaattaatcttttaccacaaaccctcgtagcagagcacatcttcccatgatctttttttttttaactcctctataaatgaatattgtacctagagtggatgcattcctcttcttccttttgggaacgccctactctgtctatagagtaagtggacattcaccacttcrctgtcttaaacttgcttttgctttggactgtggacttgccctgaattctttcttgtgcgaaatccaagcaccctctcttgggatctggattggtacccctttctggtaacaacattatgaagcctccacagaaatccctgaagtacggggttctaagagcttctgagttggtgaacacatccatatcccaaaaaggtcatacaccctgattccatggggacagaagttcctgcacttaggatccttc

SEQ ID NO: 789419 - DNA, 692 bp, Homo sapiens
gactgacataggttgggcttgaaatatgacctgaacagagcagttttgccatttgaatgtggagccttatattgaataaactgaaacttttccacttggttttttccatctctttggagaacaggactggacactaaagcaggctctggcaggagaatgtcctggtcttgcagaatcttctggttgctaaggctgaggacacagccccactgtcctttctctggcaacaaaggacatttgtcacatgttggggcgacttatgtttctaatttgggacttaactgcactagtaaaagacagcaaatgtggaatcagtagaaaggtagagattgtgcatttgaatcaagactttcttccacttcacattaaagtgtaaaaacttaatgctttgcatttgaataccttctgataggtggctaggtgtctcacataagcgtaaaagatgagtaatgcaggtggtattatcattcttatgggcaagaaggagaggctgtaaatcaagttaattgtataaaagcataaagctytggggacgaccagtttaaggtcacacagggagttaatgttagccagatatctagacccactaaggcttcatttttgctctaaaacttatgaatggagagaaactccatttacaaaagaattcacttggaaactactaaaatgtatttctggggatcctgcaatga

SEQ ID NO: 789420 - DNA, 544 bp, Homo sapiens
tcaacttatccctgatgggcacagcttacacttgagtatttgagtactggtgtaacagatgccatgtgacaaaataattaaaatcccaaaacggaagtggctagtgtgactttttatataggtcctatcgtgaaaagtgagtcatccatcattttatacttctctatctctaacccacttttttcagaatatttacatctttctccaacccctcccgtgataacacttggcattgtccctacccaagggaataaactgaaacgcgggaaaggtggtggaaacagaaacaatcaaagtggaaaaggcattagtgaacaagctctgagacttctcagatgtktttttttcctcttgccaaggagagacactggatatattttctatgttccaaatgttgccaaataccctcccacaatgtggcacccgaattgtaaaaacacatattcaaatgcaaatagggtaaaagccccagatgcagaacgttaagactattatataatacagtgaaattatcattttttctcatctcaagatctatcattat

SEQ ID NO: 789421 - DNA, 529 bp, Homo sapiens
gggtagaaaaacctccatggatatgtaacaaagctgtacatgtaccctttgtatctaaaagttgaaatttaaaatgagtaaataaatgaaatgtttaggaataaatctaacaaaaaagtgtacactaaaaaccacaaaatgttgttgaaggaaatattaaaagacctaaataaatggaaaggaattccatgttcatgttccacattcatggattggaaracttaacagagttaagatggcagtaatcccaaattgatctatagatttgttgcaatctctatcaaaatcccagcaggatctctctctctctccttttttttttttttttttttttgtgtgtggcagaaattgacaagctgctcttaaaattcaggtagaaaagcaaaggacccagaataattaaaaccatctttaaaagaaggaaaaaggtgtgagaaggactcatacttctgatttcaaaacttaataacaagcaacataattaagacagtgtggtattgaaatcagaatagacatacaggtcaatgga

SEQ ID NO: 789422 - DNA, 529 bp, Homo sapiens
gggtagaaaaacctccatggatatgtaacaaagctgtacatgtaccctttgtatctaaaagttgaaatttaaaatgagtaaataaatgaaatgtttaggaataaatctaacaaaaaagtgtacactaaaaaccacaaaatgttgttgaaggaaatattaaaagacctaaataaatggaaaggaattccatgttcatgttccacattcatggattggaagacttaacaragttaagatggcagtaatcccaaattgatctatagatttgttgcaatctctatcaaaatcccagcaggatctctctctctctccttttttttttttttttttttttgtgtgtggcagaaattgacaagctgctcttaaaattcaggtagaaaagcaaaggacccagaataattaaaaccatctttaaaagaaggaaaaaggtgtgagaaggactcatacttctgatttcaaaacttaataacaagcaacataattaagacagtgtggtattgaaatcagaatagacatacaggtcaatgga

SEQ ID NO: 789423 - DNA, 458 bp, Homo sapiens
tttaaagccatttcattttttaagtgaggacagttaggcttctagagaaatggtctataacatagctatttagtaagagaactgggaatggaaaaggatattttgagttgttttaacttagacttttttcttcactgtctctaactaagcctagttggcattctcaaattctaagaattcagatttagtgaaaatagttaaatggattttaaatgtgtagtttttttttttcaaatggtaaatatttgggcttgcctattttgcctatttataatctaaatctatttgggagaatgctkcactctaattatgccctcctggggccactttatccactcaaacattttttatttttcaaggcaaagtgcaaattcaactcctaatgaagctttctctgatcaccccagtaagaactgactactctttcttatgggctcccccagagtcaacgtttttta

SEQ ID NO: 789424 - DNA, 539 bp, Homo sapiens
aggcttctagagaaatggtctataacatagctatttagtaagagaactgggaatggaaaaggatattttgagttgttttaacttagacttttttcttcactgtctctaactaagcctagttggcattctcaaattctaagaattcagatttagtgaaaatagttaaatggattttaaatgtgtagtttttttttttcaaatggtaaatatttgggcttgcctattttgcctatttataatctaaatctatttgggagaatgctgcactctaattatgccctcctggggccactttatccactcaaacattttttatttttcaaggcaaagtgcaaattcaactcctaatgaagctttctctgatcaccccagtaagaactgactactctttcttaygggctcccccagagtcaacgttttttaaactcaggctgaaacttattagtgggtcatgaaatccgtcgggtgggtcactggcagaaaaagaaataggaaatatcagaggacatcacacatagtgatggtgacaattacttttt

SEQ ID NO: 789425 - DNA, 647 bp, Homo sapiens
tattcttgaatagaaaagacatttacagaaataactataaaagagtgtagaagagaagaaaacaggcaccagaacaaagagaaacaaaagatgcaggttgaggggcacctgagagcagggttaagtgaggggattcagaaaaacggaagaaagtagcttaggtaagagcagtctggaagattaaatctatggaaggtggcaactgtttcattaaattatgcattctttcatctattaccaatttatcacatgcttattatgtactggctactgtgcaaattagtgcggcaatgtggagaggtgaaatagggaatgctggcaggctgtccatagggaaatgtccaatgggaggctggaaatgcaggtcttgcattcgggaaaagagtcagggttggctgataaatttcagtcatccttatagaactgmcagttgaacctataagaattgatgagcacactgggtatgcaggtgagattagatggtgagggaaggaggaagggcagggacagaaacttgtgggggaatccacaaatatgaggttgaaagaggaagagaagtcaacaaagcacactaaaaagagtctcaaagaggtgggaaaaaagggtgaaagatgctatgaaagggtaaccagctgcatcctattcta

SEQ ID NO: 789426 - DNA, 657 bp, Homo sapiens
ggctgggccgtgaacctcccctctgcccaacagtgtctggcctgggcccatgggcccccttgtcctccctctcactatcagaggggaagccaaagtcactgttcactggggaggtgggaaaagacgaagagagagagtaggaggaataggaagaaacgctagatggagaatccataggtccagaagcaggggctatagaacagctcctggagtacccaaagatcggaacctgcaactgaagagcaaagcgagggagtttgaaaccrgagtttaaggattaggaaatgaactgggagattggggtgtactgcgtgggataatacttgttctccccctccccaatattaccggtctcaaacacaatagaaaaagacatttctacccccacccccgcccattaagagcttgggattccctctctggccgccgcagagcagctctcggtctgacgcggcctccgttcttttcttccctcagttcagagtaaataccgacttgaaagacaccttcccctccgcccgttgttcgccagggctattcgccagcctgagtccgcagcaagcctctccacctgaggccatgccacccacaagcagtcaatctgggcacgcgaacccacctggtgatcctacgggaaccgcccccatagagactggc

SEQ ID NO: 789427 - DNA, 631 bp, Homo sapiens
atatataacattagtaggtgatgtcaagttacagtgagtggccccagacttgaaacgatacccaggaaaaggtgtcagctcatggccctgctgtgcaggattggaacaattacctcctgcatttctgaatccctgcaaagctatctgaaaaggagagtaaggatagaatttctctgggccgaattgtgaacccagagcaatmagctcaactcaacataaggtaaggacagttcttcagcctttcagaggaattccaaacttatttgttctattaaggtaggaagagaaaagagtcttggccaaacctataatacagagattactagaagaaaaaacaagagaaaaacaaagtcccttaatgaaatgaaatttgatacttacctaatgtggatctgggtatgctgacatcctctttggcagtcaatgaagtgctatcatctctggaaggtatctgcattgaaccctaaaaaattgcaaaagtcaggggacttaggaagatgcaggaactatgatcacaatgacagtactgagaatattctcagaatttggtattaaaattatcaaacttacacctcaaatgtaaaaaggaaatggaatcagcatgaattatgtaagtctatagttcttactt

SEQ ID NO: 789428 - DNA, 631 bp, Homo sapiens
atatataacattagtaggtgatgtcaagttacagtgagtggccccagacttgaaacgatacccaggaaaaggtgtcagctcatggccctgctgtgcaggattggaacaattacctcctgcatttctgaatccctgcaaagctatctgaaaaggagagtaaggatagaatttctctgggccgaattgtgaacccagagcaatcasctcaactcaacataaggtaaggacagttcttcagcctttcagaggaattccaaacttatttgttctattaaggtaggaagagaaaagagtcttggccaaacctataatacagagattactagaagaaaaaacaagagaaaaacaaagtcccttaatgaaatgaaatttgatacttacctaatgtggatctgggtatgctgacatcctctttggcagtcaatgaagtgctatcatctctggaaggtatctgcattgaaccctaaaaaattgcaaaagtcaggggacttaggaagatgcaggaactatgatcacaatgacagtactgagaatattctcagaatttggtattaaaattatcaaacttacacctcaaatgtaaaaaggaaatggaatcagcatgaattatgtaagtctatagttcttactt

SEQ ID NO: 789429 - DNA, 631 bp, Homo sapiens
gaagcacacagcaggacctttctagaaagatgtgtatttacttcagtgggcctaacaattagaatagtggagtataatcctttcacaacataagaaaacataagaaaatattatggggtcaaataacataggcaaaaaagagtctatcttcctctaaaaactgactacggggattctgagctactggtatctgaaatgcagcacaagtcaactaagagtttttagccttgaggagaaaacacatagaaatgaggaaaaattaacamtttactatgggcagggcatggtggctcacgcctgtaatcccagcactttgggaggctgagatgggtggatcacttgaggccaggaatcgtaagccagcctggccaacatggtgaaaccccatctctactaaaaatacaaaacttagcgggcatggtggtgcatgcctgtaatcccagctacttgggaggctgaagcagaagaattgcttgaacccaggaggcagaggttgcagtgagccaagattgcgccatcgcactccagctgggtgacagagggagatgccatctcaaaaaaaaaaaaaaaaaagaatttacttcttaaatattgtgaaattaatataccctgtactattatgagattgttt

SEQ ID NO: 789430 - DNA, 631 bp, Homo sapiens
gaagcacacagcaggacctttctagaaagatgtgtatttacttcagtgggcctaacaattagaatagtggagtataatcctttcacaacataagaaaacataagaaaatattatggggtcaaataacataggcaaaaaagagtctatcttcctctaaaaactgactacggggattctgagctactggtatctgaaatgcagcacaagtcaactaagagtttttagccttgaggagaaaacacatagaaatgaggaaaaattaacactttactatgggcagggcatggtggctcacgcctgtaatcccagcactttgggaggcygagatgggtggatcacttgaggccaggaatcgtaagccagcctggccaacatggtgaaaccccatctctactaaaaatacaaaacttagcgggcatggtggtgcatgcctgtaatcccagctacttgggaggctgaagcagaagaattgcttgaacccaggaggcagaggttgcagtgagccaagattgcgccatcgcactccagctgggtgacagagggagatgccatctcaaaaaaaaaaaaaaaaaagaatttacttcttaaatattgtgaaattaatataccctgtactattatgagattgttt

SEQ ID NO: 789431 - DNA, 631 bp, Homo sapiens
gaagcacacagcaggacctttctagaaagatgtgtatttacttcagtgggcctaacaattagaatagtggagtataatcctttcacaacataagaaaacataagaaaatattatggggtcaaataacataggcaaaaaagagtctatcttcctctaaaaactgactacggggattctgagctactggtatctgaaatgcagcacaagtcaactaagagtttttagccttgaggagaaaacacatagaaatgaggaaaaattaacactttactatgggcagggcatggtggctcacgcctgtaatcccagcactttgggaggctgagatgggtggatcacttgaggccaggaatcgtaagccagcctggccaacatggtgaaaccccatctctactaaaaatacaaaacttagcgggcatggtggtgcatgcctgtaatcccagctacttgggaggctgargcagaagaattgcttgaacccaggaggcagaggttgcagtgagccaagattgcgccatcgcactccagctgggtgacagagggagatgccatctcaaaaaaaaaaaaaaaaaagaatttacttcttaaatattgtgaaattaatataccctgtactattatgagattgttt

SEQ ID NO: 789432 - DNA, 637 bp, Homo sapiens
ttcccaacacccagaaaagtgtttgattcacagaggtgcttaataactattttctgaatattaagtctttataaaagacttcataaaagactgcttaagtcagggctatatgtactgtttcttatacttgttagtaagcatcttaattcacaaattatattttctatttattttaaatcctcctgattcccacctctctcaatgttttccatatggcagggactcagcacaggtggattaatatcttaaaattatataaacaaatttcagagttctatgagcccagttttcattgaaatcatgtaaactcacctgaagcaactgctccttgtgactcagactatggtttaggtgctggatgttttgttcctgggttcgaatctcattgtatttttcagcctcccaggcacgaagctgttggctcttattctgcaatwcttcttgtagctgctgcaaggcttttcgcaattcctgaattaaacatattacctttttaaagagatctaaaattgtcacatggttattagatacagaggccttaaaattttcaaggtatataaactgaaagaggagcagagggtgccattattaaaattgctatagaagtattatacatgaattgaataggatatggaaa

SEQ ID NO: 789433 - DNA, 637 bp, Homo sapiens
ttcccaacacccagaaaagtgtttgattcacagaggtgcttaataactattttctgaatattaagtctttataaaagacttcataaaagactgcttaagtcagggctatatgtactgtttcttatacttgttagtaagcatcttaattcacaaattatattttctatttattttaaatcctcctgattcccacctctctcaatgttttccatatggcagggactcagcacaggtggattaatatcttaaaattatataaacaaatttcagagttctatgagcccagttttcattgaaatcatgtaaactcacctgaagcaactgctccttgtgactcagactatggtttaggtgctggatgttttgttcctgggttcgaatctcattgtatttttcagcctcccaggcacgaagctgttggctcttattctgcaattcttcttgtagctgctgcaaggcttttcgcaattcctkaattaaacatattacctttttaaagagatctaaaattgtcacatggttattagatacagaggccttaaaattttcaaggtatataaactgaaagaggagcagagggtgccattattaaaattgctatagaagtattatacatgaattgaataggatatggaaa

SEQ ID NO: 789434 - DNA, 630 bp, Homo sapiens
ggcagtcgccccttacccacaggggatacattctaagacgcccagtggatgcctgaaaccagatagcactgaagcctgtgtatactgttttttcctgtgcatagataactatgataaaggtttacatacaaattacacrtactgacagattaacaataacaataaaatagaagaattataacaacatgctgtaacaaaagttacgtgagggaggccaaggtgggcagatcacgaggtcaggagatcgagaccatcctaacacgatgaaaacctgtctctaccaaaaatacaaaaacaacattagccaggcatggtggcgggcgcctgtagtcccagctactctggaggctgaagtgggagaatggcatgaatacaggaggcggaggttgcagtgagcggagatcgcgccactgcactccaaccttggcgacagagcgagactctgtctcaaaaaagaaaagttacgtgaatgtggtctctcttaaaatatcttaatgttttttgtctgtggttgaccccagataactgaaaccatggaaagtgaaactgtggataaagagggactactgtaactagcatatggtacaagggcagcaagtgttgaactgaaatacttagattatgcaactg

SEQ ID NO: 789435 - DNA, 630 bp, Homo sapiens
ggcagtcgccccttacccacaggggatacattctaagacgcccagtggatgcctgaaaccagatagcactgaagcctgtgtatactgttttttcctgtgcatagataactatgataaaggtttacatacaaattacacatactgacagattaacaataacaataaaatagaagaattataacaacatgctgtaacaaaagttacgtgagggaggccraggtgggcagatcacgaggtcaggagatcgagaccatcctaacacgatgaaaacctgtctctaccaaaaatacaaaaacaacattagccaggcatggtggcgggcgcctgtagtcccagctactctggaggctgaagtgggagaatggcatgaatacaggaggcggaggttgcagtgagcggagatcgcgccactgcactccaaccttggcgacagagcgagactctgtctcaaaaaagaaaagttacgtgaatgtggtctctcttaaaatatcttaatgttttttgtctgtggttgaccccagataactgaaaccatggaaagtgaaactgtggataaagagggactactgtaactagcatatggtacaagggcagcaagtgttgaactgaaatacttagattatgcaactg

SEQ ID NO: 789436 - DNA, 630 bp, Homo sapiens
ggcagtcgccccttacccacaggggatacattctaagacgcccagtggatgcctgaaaccagatagcactgaagcctgtgtatactgttttttcctgtgcatagataactatgataaaggtttacatacaaattacacatactgacagattaacaataacaataaaatagaagaattataacaacatgctgtaacaaaagttacgtgagggaggccaaggtgggcagatcacgaggtcaggagatcgagaccatcctaacacgatgaaaacctgtctctaccaaaaatacaaaaacaacattagccaggcatggtggcgggcgcctgtagtcccagctactctggaggctgaagtgggagaatggcatgaatacaggaggcggaggttgcagtgagcggagatcgcgccactgcactccaacyttggcgacagagcgagactctgtctcaaaaaagaaaagttacgtgaatgtggtctctcttaaaatatcttaatgttttttgtctgtggttgaccccagataactgaaaccatggaaagtgaaactgtggataaagagggactactgtaactagcatatggtacaagggcagcaagtgttgaactgaaatacttagattatgcaactg

SEQ ID NO: 789437 - DNA, 555 bp, Homo sapiens
cattttttgtttccctcacactttcagacttgattaccactttcaaggcagtggagttacagcttaccttaaatcccttcctgccagcaactgactggaagcataaaaattgcagaagaaaaatctcttctattcctccagtgctatttatcaacttttctaacacctactaaatgctataataagcaaagcaccatgtgaggcactgtgaggaatacaatgctgacataacatatatctgttgcacactaactatgtgctaggcactgtcttgaagatagagtatcatgcaagacaaagtccctgtgctcttgaaacttatattttgcaggggttggagtggggagtacatgataaacaaacaaggaaatgcaaaaaatattatggacaagccctgtgyggcaaaacaggaaagcataatacagagtgggtggttaaattaccctaaattgtttgatcagagaaaggtctttatgaggcagcatttaaatagatatctgaaggaaaaagaatcagtcctgcaaagatcagcagaacaatccaggcagaaagaac

SEQ ID NO: 789438 - DNA, 603 bp, Homo sapiens
catgataaacaaacaaggaaatgcaaaaaatattatggacaagccctgtgcggcaaaacaggaaagcataatacagagtgggtggttaaattaccctaaattgtttgatcagagaaaggtctttatgaggcagcatttaaatagatatctgaaggaaaaagaatcagtcctgcaaagatcagcagaacaatccaggcagaaagaacagctaatggaatatgagcctggaaaagagaaaggcctctgtggctagaatagcactctccartagaaatataatgtgagccatgtatgtaatttttaattttctagtagcttcaatgaacaaagtacaaaataaataggtaaacttaattttaacaaaatattttatttaacccaatatatccaaaatgttatcataaacatgtaaataatataaaaattattaatgagataacattattatctgagataatattacatgatttttcataagtctgaaattcaaggtatattttatactcacagcacatctcaatttggactagccacatttcaagggttcaacagctcctaagactagtggctagcttactggatagcacagggctagagcatagt

SEQ ID NO: 789439 - DNA, 606 bp, Homo sapiens
aaggaaaccggaactaactccatctgtcatgctagggccaggcttggctccaggtaggctggatttcactggaatcggaagcctgctccctcgggggctctggatgggcttataatcaagacctttaatcatgctaagagctaattccagcttgtgattacacccatgctgcggagcctgatcatctgaacaacagtcacactttccaagttcctttgcacttctctcagtctcctcatcttyctgttgtggagggctagcctggacgcttgcatccaaagattccacagaggaaccaggcgtctcttcctccatgctttctccatctgggggtacctttgtgcttgctaagtcgggtggcccaacctcagacaacgctggttcttcagtgcaaatgctggtcgaccacctgctagaagggccgcaggagatacttctggccacctttcgaggtaccttacaaatggcttcatagtcagaatcagcaacccgcaaagcggcacaaccacggcatctcctgggtcggtttccagggccttctgaaccatggcagctgtgtggctcctggatctgatcctcattctccacccagcactcaaaccctga

SEQ ID NO: 789440 - DNA, 500 bp, Homo sapiens
gatccctgtatgctgtgtgtcctgagggcactaactcagagtgtcctgttactccctcatcagtgtgtcacctggacaattcactgagctcgttctctctctctctctctctctgtgtgtgtgtgtgtgtgtgtgtgtgtgtgtgtgtgtgtgtstatctgtctttctctttcattcttttccatttggccctgttctgtcccaacatgaaggcaataatttgttacctcattaatggatctatccttttagttttttaaccacttccctatgctacccatgaaacctagttggggctctgttgtgtctgatttcccctggcttattctttactttttcctccttttccaggctcagcagggagctgctggaggtagtagagcctgaagtcttgcaggactcactggatagatgttattcaactccttccagttgtcttgaacagcctgactcctgccagccctatggaagttccttttatgcattggaggaaaaacatg

SEQ ID NO: 789441 - DNA, 500 bp, Homo sapiens
gatccctgtatgctgtgtgtcctgagggcactaactcagagtgtcctgttactccctcatcagtgtgtcacctggacaattcactgagctcgttctctctctctctctctctctgtgtgtgtgtgtgtgtgtgtgtgtgtgtgtgtgtgtgtgtctrtctgtctttctctttcattcttttccatttggccctgttctgtcccaacatgaaggcaataatttgttacctcattaatggatctatccttttagttttttaaccacttccctatgctacccatgaaacctagttggggctctgttgtgtctgatttcccctggcttattctttactttttcctccttttccaggctcagcagggagctgctggaggtagtagagcctgaagtcttgcaggactcactggatagatgttattcaactccttccagttgtcttgaacagcctgactcctgccagccctatggaagttccttttatgcattggaggaaaaacatg

SEQ ID NO: 789442 - DNA, 607 bp, Homo sapiens
cattttatggaaaattattgagcacagtcttttcatgatccctgtatgctgtgtgtcctgagggcactaactcagagtgtcctgttactccctcatcagtgtgtcacctggacaattcactgagctcgttctctctctctctctctctctgtgtgtgtgtgtgtgtgtgtgtgtgtgtgtgtgtgtgtgtctatctgtctttcyctttcattcttttccatttggccctgttctgtcccaacatgaaggcaataatttgttacctcattaatggatctatccttttagttttttaaccacttccctatgctacccatgaaacctagttggggctctgttgtgtctgatttcccctggcttattctttactttttcctccttttccaggctcagcagggagctgctggaggtagtagagcctgaagtcttgcaggactcactggatagatgttattcaactccttccagttgtcttgaacagcctgactcctgccagccctatggaagttccttttatgcattggaggaaaaacatgttggcttttctcttgacgtgggaggtgagtacctttctatgaaggtgataaggatccactgagtcttccat

SEQ ID NO: 789443 - DNA, 576 bp, Homo sapiens
cctgagggcactaactcagagtgtcctgttactccctcatcagtgtgtcacctggacaattcactgagctcgttctctctctctctctctctctgtgtgtgtgtgtgtgtgtgtgtgtgtgtgtgtgtgtgtgtctatctgtctttctctttcattcttttccatttggccctgttctgtcccaayatgaaggcaataatttgttacctcattaatggatctatccttttagttttttaaccacttccctatgctacccatgaaacctagttggggctctgttgtgtctgatttcccctggcttattctttactttttcctccttttccaggctcagcagggagctgctggaggtagtagagcctgaagtcttgcaggactcactggatagatgttattcaactccttccagttgtcttgaacagcctgactcctgccagccctatggaagttccttttatgcattggaggaaaaacatgttggcttttctcttgacgtgggaggtgagtacctttctatgaaggtgataaggatccactgagtcttccatataaagatcatattcctgctccaag

SEQ ID NO: 789444 - DNA, 559 bp, Homo sapiens
tgtcatgttttcaacgaaggctgaattactcctactgtcattgctgttggttttcattgcagtagatgtttaggtttccatttcttcctccccttatcatttcctaacgtaccataggttgaccatacttcaaaagctgtactctcatggccactgcatcgaattttgagcatattttatggaaaactattgagctcactcttttcatgatcacagtttgctgtgtgtcatgagggcactaactcagagtgtcctttgactcccttaccagtatgtcacctggccaattcactagstcactttctctctgtctctgtctctgtctttctctctctgtctttctctttcattgttttctacctggccctgttctatcccaacataaaggcaataattttttttttttacctcattaatggatctatcctttttcttttctaaccagttccttatgttacttctgaaatctagtggggctctgtggtgtctgattttccctggctgcttctttagttttgtctccttttccaggctcaacggcgtgctgatggaagtggaa

SEQ ID NO: 789445 - DNA, 597 bp, Homo sapiens
aaataaccataaaaatgggcaaccagcagcctttgggactgctctgtctatggagtagccattcttttattcctttgcgttcttaataaacttgctttcactttatggattcaccttgaattctttctcaggcaaaattcaagaaccctcttttggggtctggattgggaccactttccagtaatacaaaggtctttataagagggaggcaggagggtctgagtcagggaaactgtggtgatggcagcagagatcagagtgatgctrttgctggaaggggccacaagccaaggaatgcgggcacctctagaagctgcaaggaatgggtttgcccctggagcttccagaaggaatacagccttgccgacaccttgattttagccaagtaagattcatattttggacttctgatcttgcaaactggtaagtaataagtttgtgctgtttgaagtcactaagtttgtagtgatttgttacagcagcaatgtgttatattaagtttaccccacagctgcctccttaggtattttaagttcggctgaaaggttttttcgtacatagtaaactgtaacctaactggaggtgtaaacagcccgt

SEQ ID NO: 789446 - DNA, 597 bp, Homo sapiens
aaataaccataaaaatgggcaaccagcagcctttgggactgctctgtctatggagtagccattcttttattcctttgcgttcttaataaacttgctttcactttatggattcaccttgaattctttctcaggcaaaattcaagaaccctcttttggggtctggattgggaccactttccagtaatacaaaggtctttataagagggaggcaggagggtctgagtcagggaaactgtggtgatggcagcagagatcagagtgatgctgttgctggaaggggccacaagccaaggaatgcgggcacctctagaagctgcaaggaatgggtttgcccctggagcttccagaaggaatacagccttgccgacaccttgattttagccaagtaagattcatattttggacttctgatcttgcaaactggtaagtaataartttgtgctgtttgaagtcactaagtttgtagtgatttgttacagcagcaatgtgttatattaagtttaccccacagctgcctccttaggtattttaagttcggctgaaaggttttttcgtacatagtaaactgtaacctaactggaggtgtaaacagcccgt

SEQ ID NO: 789447 - DNA, 621 bp, Homo sapiens
gaaggtctagggtgtggtccaggaacctgcatcccaacccccagtgattaaggtgagctctttgcttacagctgtgtcggcgggggtgggggcacagcaagtgttagtggaatgaatacatcaagccagggtcatcagctgctactcatctcagcggagcccacagagcaaagaaataggaacccttctctggcacaaggaacttacataactgactttaaaattgtgttcatttcatgtcttaagcttgggttgagttttttgttgttgttgtttttgagacagggtctcactccrttacccaggctggagtgaagtggcgtgatcatggttcacagccttgacctcccaggctcaagtggtcttcccacctcagcctcctgagcagctgggactacagatgtgcaccaccatgcccagctaatggttttacatttttccgcagagatggggtcttgttatgttgcccaggctgggtcatgcttactcctgaataggtaccacagtcacatgattccaagttcagagtctccctcctgccctgtgccttacccacctgcaggtggaggtagtgacagtgttacccgtttcttatatgtctttccaaataaatgttatgca

SEQ ID NO: 789448 - DNA, 506 bp, Homo sapiens
tgataaatttgttaactagactccgaccatagaaagagagagatacaggaagtcaatgtaaattgcagacatgccagctctgttggttcacattacagctacctaatgttgggcttaatttctttttcttcttcttcttcactatcatcaacctgttggatgaccagatcascagacccatcttctacaatctccacataggatctattctcatcttcactcaagtgccatctggaatccttatctccatctgatggggacataagatgttgttcagcttccaagtcaatggggaggctgtctatgccaaattctgcaagacactcattacacagtctgtagcgcctggttccctcctgtaccacttgccctgttagatctgtcacatgacgtttacattttctgcagatgagtttacatgcctggtgaatctgtgtagagatttaaatagtgataaaagtgatttttcaaaagcaggacagtttgatattttaggtaccagttca

SEQ ID NO: 789449 - DNA, 578 bp, Homo sapiens
atatgctgacctgatggtgaaaagcacaataaaaaattatgagtcagagtggtgtgaaatcaagaccgtaaaaaaaatagagaaggtgtaaagggtaagacctttttacaatggtagatccccagccaacccccattgtaaccctcccttccaccctatccctacctagcccaaggcttactacaactggtactaggactcagctacacatttaaagtaggtcttttgctttatttagtgctttttcagacaccatttytgggacccagtagtaccacatgacttcctgggtgatcacctttctgcagggcctcatgtcatctcacccagacatcaatttacagtgactactgtactcactggtagatggccaccaggtatccctgactgtcattaggagtgcataaaggacgacgggcaaggaaccagttaacagaaccaggctctgacaaacctcagggtctcaaggcacctctttatcaaaagagcatcgctatttactttaactgtggcattaggagcagtggcaacagtttgtgtcggagcgagtatgtaatataggtaaggtgtctgaccag

SEQ ID NO: 789450 - DNA, 581 bp, Homo sapiens
tgcagtgcctaaaacttggaaaataataatgctcagaacaataaataaaagcaaatgccaggtgtggtggctcaagcaaaggccgggtgcggtggctcacacctgtaatcccagcactttgggaggccaaggcagccaaccacctgaggtcaggagtttgagaccagcctggccaacatgaygaaaccccatctctactaaaaatacaaaaattagccaggcgtggcgatgcgggcctgtaatcccaactactcaggagactaaggcaatagaatcacttgaacccaggaggcagaggttgcaatgagcagagatcatgccactgcactccagcctggttgacagagcgagactctgtctcaaagaaaaaaaaaaaaaaaagcaaagtaaaaaataaaataacataaattggagtaacgtggtggttaaaagaaaaagcagcttatatagtaaataatttgtaccagaataataaagtttattttataagcatttttctcttttccagaaacccaagaggcagtgctaaagtcattctttaatgttatttggaataaatcattggtagcataatacagtgg

SEQ ID NO: 789451 - DNA, 525 bp, Homo sapiens
gctctctgggacttcttctcccttgaggaaagctgcactgcccaattccaagttcactcctccttctaggggacagcccacaagaaagattggctgaattgaaaataggaaggccacgcttctctcctcaattaaaaaacactacatgacgctctcagcccttgggatcctccgcaggagcagctgggtctttgttctacctgcactgtagctcagcacctcgctcctcctacagtcctgcctccccatttcctgaggcatgctgaccctacagctcttcaggatgcttcctgcattcctgtatccatctctagtctgccttacagagaaactgaccttggtaagttgtctgtaaarcttactctaaaatataaatttgaagcctgaatactcatcagctcgcaatgaggacctcagggctggcagtgagtggggctgggcaccatggctgggatgcaattgataaaactttcactggcagtaagctgggatggcgtaaccacaggcaggaaattccttggcatc

SEQ ID NO: 789452 - DNA, 525 bp, Homo sapiens
gctctctgggacttcttctcccttgaggaaagctgcactgcccaattccaagttcactcctccttctaggggacagcccacaagaaagattggctgaattgaaaataggaaggccacgcttctctcctcaattaaaaaacactacatgacgctctcagcccttgggatcctccgcaggagcagctgggtctttgttctacctgcactgtagctcagcacctcgctcctcctacagtcctgcctccccatttcctgaggcatgctgaccctacagctcttcaggatgcttcctgcattcctgtatccatctctagtctgccttacagagaaactgaccttggtaagttgtctgtaaagctkactctaaaatataaatttgaagcctgaatactcatcagctcgcaatgaggacctcagggctggcagtgagtggggctgggcaccatggctgggatgcaattgataaaactttcactggcagtaagctgggatggcgtaaccacaggcaggaaattccttggcatc

SEQ ID NO: 789453 - DNA, 629 bp, Homo sapiens
ctggccctgtcctaagaaccgaggccacagaactctgaacttttcctgtaacaccccatctccaatatcgaggctccaagatttttaaacgcatttgcagaaattctacaaaggtaagagatttttgcaaaagttaagcggaaaattctctgcctgccacatcctaaatcattaaaagtcttctaataaatctatccctttcagctttcgccacttcacccaagtcgtctctcaatcagagtttgtaacggggaacaaayttccaattattagagctgtttatttctgtagcgatggacccccaagcctttcataagcaaacctattgagcccaaaccatgcctttcatggatgacagcttcagaataagagcagtttgtctacattgcagggagaaaccagatgtttcccttgagtcgaaacaagcaaatgacaattcagtcaaactgcagaatagcctaccaaaaaaattttttttaataaattccagggcagtaatatgtgtgggcctattttttgaccctgaacacctccatctatacttgtatttttcattgttcatgcagggcactgattgcttttgtagatctctaacaacaatctccatgcactaaccctggttaatgtat

SEQ ID NO: 789454 - DNA, 633 bp, Homo sapiens
cgtgattgagctgcaaccctgtggcccaggagccagaaggctgacctcgtgctgtgagccggctgtagacctgggagttgacttccttgtcccgcacgtagcatcggatctcctccaccgcctcacggatgacagtgacggccagcacgaagccctgcagagacagacgacagtgagtcttgctacaggcagtgagccctgctgcagccaaccgtcccctcctggtgccaggggcaggaaaggcragaggtcacttgggagggcaggggggcaggacctgtgagttattccaaatgcacacgccgctgcaagccccctctctgaatctgtcttagggaacatgcactcccaaacacaacctgtagaaacactaccctagagaaacactcactgccacacacacacaagcacgtccacattcaccacctcagggtgagggtgacacacacaggaatactcaaactgtccctccacaagcaaacgatggtgactactaatactgtctctcacccaccatgtgctgggcagtattggaagtgcacttcatcctcataacaaccctgagatatgctcctataactgagatccccatgcagatgaggaaactgaggcacagagaggctgagtaatctt

SEQ ID NO: 789455 - DNA, 633 bp, Homo sapiens
cgtgattgagctgcaaccctgtggcccaggagccagaaggctgacctcgtgctgtgagccggctgtagacctgggagttgacttccttgtcccgcacgtagcatcggatctcctccaccgcctcacggatgacagtgacggccagcacgaagccctgcagagacagacgacagtgagtcttgctacaggcagtgagccctgctgcagccaaccgtcccctcctggtgccaggggcaggaaaggcgagaggtcacttgggagggcaggggggcaggacctgtgagttattccaaatrcacacgccgctgcaagccccctctctgaatctgtcttagggaacatgcactcccaaacacaacctgtagaaacactaccctagagaaacactcactgccacacacacacaagcacgtccacattcaccacctcagggtgagggtgacacacacaggaatactcaaactgtccctccacaagcaaacgatggtgactactaatactgtctctcacccaccatgtgctgggcagtattggaagtgcacttcatcctcataacaaccctgagatatgctcctataactgagatccccatgcagatgaggaaactgaggcacagagaggctgagtaatctt

SEQ ID NO: 789456 - DNA, 477 bp, Homo sapiens
ggaataatggaataatcagtggatattcctgataatgttttaaaaatagagaaatatcctgggtgaagaaaacttcctttggtgttgatttggatctgattaatgattttgataccagtgggctagggaagatccccaaatgccagtgaaaccttggcctcagctgctgtccaggctcttgacacygtcctgagaatgaattcaaggatgagttggaaaatagtggaagtacacagatttattacaaagcaaaaagtacgcattcaagaaagggcagtgcaggcagattcaagaaaagggagtggaggcagactcaagagagagtcaggtgcaagggggttgggactgctacctttatgggattctgtaaccaaggggtagaagattcatgaagattcctggaacaaggtggagatttcttggaactctggtaccacccatttttgcactaaatatggatgtttctagaactgtcat

SEQ ID NO: 789457 - DNA, 602 bp, Homo sapiens
catatgctacagggatatagtaaccgaaacagcatggtactgacttaaaaccagacacatagattaatggaacagaatagagatcccagaaagaaatccatacatctacattaaactcatttttgacaaaggtgtcaagaacatacatttgggatgtatgtatgttttcaataaacagtgctgggaaaactaaatattcatatgcagaagaattaaactagaccccctacctctcacaatatacaaaaatcaaatcaaaatggattaaagacttaaatctaatacctcaaactatgaaactacttaaagaaaacattggggaaactcttcagtacattggtctgggaaaatatttctttaaaaatacctcacaaacacagacaaccaaagcaaaaatggacaaatgggatmacataaagttaaaaagcttccacatggcaaaggatgcaatcaacacagttaggagactacccacagaatgggagaaaacatttgcaaactatccatttgacaacggattaataaccagagtacataaggagctcaaacaactctgtaggaaaaaattctcaaaatctgagtaaaaaatgggcaaaagagct

SEQ ID NO: 789458 - DNA, 599 bp, Homo sapiens
tactcaacagtccacatcagtgtggattcacagacatatactttatactttgggctataatccaatatgacttatttactatactgctgtaattcattcttccaggtttgcctttggcagctcttctagttagccmctgtgtccctttgacacgtctccatctgtgtgtgtgtgtgtgtgtgtgtgtgtgtgtgtgtgtgtagcactttgttacttcctggtactgcatgagcttcatgttgtatgttaattgtcgttgtactattaccagccatttatttgaggaaacttggctttcgttttcaggcatggcgttagaaaccaatatctggcttctagttgtgctcattactactgggatgtcatttattttaaatgatctcagctgactgagcaaagaaatatatatttgtatactaagctgtaaatatatatatttctatatgtaagcctctgtgtataaatattaaactaagcataagttcatactgatgtcttcaactgttatccattaccacgtggatcagtcttgtttctttccattgcctatctgtatattctactccaaccatgaggaagctagctcccaccatccacca

SEQ ID NO: 789459 - DNA, 631 bp, Homo sapiens
taactgtatataaatttataatagaataatgaaacaggtagtaacttggagtatagtatgtcatctctgattatttattgaattgccatttagtaaaaattccgtagaatttatacaaagagtaaaagaaaatattgactgttaacatcttataattttctctcttcaaaatttgttttctctagtgacataaggtacaataataagaaaggcattttaatattattttcagttcctccatatttaatgtgcctaaaaattgattatttcattgtgctctctcttcctctatctctctctacctctctcttcccccatccctctccctcccatttgctttstttttttcctgttctgaacggttagatttactttatttccattatttttactggacacttatttttgtttgccatttttgttttgaaaagtataaaatctaattacaagtttaggtcaccaagaaaagggaattgatatttttcacgatttctattgtttgaagagaatgaattaactggataaactatacttatattgctgtatttctgatctgaattcatcagagaaatatgtataatttttagacagaattagaaactacagttaaagataattcatcatactaaga

SEQ ID NO: 789460 - DNA, 615 bp, Homo sapiens
caatctttagatacacatttcaaaattattattataactgaaaaccagatctaacaataataggaaagtaatattgacattcaggagagaactagataccaattgaacctttccttcttgtcaattcttgttaaaatatatgttctggtagttactttcttctggacagtttaaatgacttcattttcaccaagtatatctctgttggtgcctgctaagtgataatctctttgaaattttaattttatgggtctcaaggattgaaaatgtattaacagcagctgccttgtcattgttattgctttagcttgaagctggctaattgctgtaatatcgcagcactggaaaagacaaaagagaaaggggagacctgtaataaaagacsattttctgtaatgtgtgctatttgctgtgcaaattgatggttttaagggttggaagactgcaggagtcttcccattagctgtactttaaaatgtagttaaaatatcacttatatccctaaataaggaagtagcaaattatacaggcataggtaatttgggctagatttcttaaggacggatataagaaataccaacatagtttttccttaataactcctgtaatattccc

SEQ ID NO: 789461 - DNA, 604 bp, Homo sapiens
cttcacaataaatcttgctgctgctcactctatgggtccgcactacctttatgagctgtaacactccctgcgaaggtctgcggcttcattcctgaagtcagcgagaccatgaacccaccgggaggaacgaacaacctgcgtgccacctttaagagctgtaacactcactgtgaaagtctgcagcttcactcctgaagtcagcaagaccacgaacccaccagaaggaagaaactctgaacatctgaasgaacaaactccgtacacaccatctttaagaactgtaacactcaccgcaagggtccgcggcttcattcttgaagtcagtgagaccaagaacccacgggaaggaaccaattctggacaaactaggaccagacctaaagggcctgttaagcaaatcttagatttttaaactaagggcaatgagataatcagcaggatgactgaagaaggcctggggattgctggctagagttaaaaagaccagaggcatggagacagactaggaagccgtggcaggcatccaagcaagagatgctgtaggtctgagtgagggagtaaaatcaggaggtcttggttattgattagatgtgtgtagtgagaa

SEQ ID NO: 789462 - DNA, 624 bp, Homo sapiens
gtaacttcaagcttctatgggtgagtgataccgcagcagcagcatcagcagcatccactatggtcagcaatgatggtataagctgtgatatacagtattcaaaagtggaagctggttttatgctatagtcttggatactgcatagcctcccttgtttgtaatcatttttcaagtccgagataaccaatgcccttccaataaattcctttgctgactaaatcagtgtgcaattaagaatcctgactacttmatttttttaaaggtcttaagaactggataaacaacaaacttttgactcttgtagaagtaagttgatttattagagtggcaagattataggaaatttttattttcttcattatgtgattagtattttctatttttcgtaaaataaaaacattttttgtagttttaaaatcgtatttaagctgtaaaaacaggtactatcacatagagagttattagaggatagaaaatggaaaatgactcaatcctaagaaaaattcatagattagagaagaagccagtatataaggctgagaaataaagtcaactgagataggaggaaacccaaaaggaagctgaaagaggagcagcagaaaacagggctactaataccttcaa

SEQ ID NO: 789463 - DNA, 606 bp, Homo sapiens
aggggcagtccaaatctagagataatgtcccttattagcacttttgttacttctcgtgctttctctgttctggtggggaaagcctcaacacatcctgaaatggtgaagattagtactaacatataccaatagccccctgctcgaggcagctcagtaaagtccatgactaggttttcacagggtgtggctcccatttcttgaattcccgggggctgagtgggcccttgccatgggttattctggacacagattagacattgttcacaaacagcttgagggatggtagtgagccgtggcatatagaaatgaygttccagtagtgtttctagtgccgtttttcctatatgagttccttgatggaattgcttcacaaatctaggggccactgtttcagggatggctagcctcctattggagaatttccaccatcctcctttaatgtaacttccagtatctttggcaaaccaggccctttcatttggagaataatttgggacctctagaaggggaggctctgggaggagaggtaaagctatggcttcctcttcacaatgtagggtagccattgctacctctctgtccacttttctgtttcctttggcctct

SEQ ID NO: 789464 - DNA, 616 bp, Homo sapiens
aaactttcccaactgttcgtagggataatatcaccgttgtaaaacctaagattggtgctccagatatttgtcaaatcctgcacttgatggagcagctggcgccaaccaggtcaataaactggctcgtcttgtgacctccactcagaaactgaatcagcagaagacagcttccactccctatgatttcatctatgacccaaccaatcaacactacacgccccacttcctggacccttcccactgaattatcctttaaaaactctagtctctgaattttcaggagattgatttgcttaataactctgtctcctgcatggtgcagctggcctcacatcaattaaactctttctttatggcaatgctgtggtctttgtttgtgyagagggcaggaagaacccatcagttgtttacaaggcttctttaagatttaatatatatggaaacaacaataaaaaagcatacttaggctttgataataaaaatccctctgatttaaattctttctgacccattgagagccttctcctgtaatgttgctttgccaggcttgcacttgacctttgatctccagtaacagaggctaactccctgttccatccatgcttatcctgacttt

SEQ ID NO: 789465 - DNA, 613 bp, Homo sapiens
tgatattttctactagggtttttttttccctctgagagcatttctagcactctcagaagggcaatacaatcaatgtgcaacctccaatagttctgaacttagcaatgtggatgctattgaaatagccatagtgtgtggaaaagaagttgctgatacatcgagcaaatgtgtatcatacataggccagacaaagctggccatgtcctgtcttacactgtttagaaaaatagaatgatttcatttagggcagaagttgaacagaaatagagtcaattcaatttgattttataagtaaactctgctccaagaaatgtggctatgtataaaccaaaaatgcaatttaaacaacacaatacatttcagatttctgaacgttcattcggttttactataaatgaagtttcactttaagtgaattayaccatcacttttgggaatctaaataaatctcactctctaagcaatttacaggcattgatattccctaacagtttaaaatacccctgtttacaagaataaggcagatgggtaccagcagatgggcaccatgaggggaaaaggagtggtacccacctgttactgtgtgtgtgcccatgatcccaggtttactggg

SEQ ID NO: 789466 - DNA, 603 bp, Homo sapiens
agtatttcccatgctttattctgtatcatttttacagccaccctgtgctctatgcattattactcccattttatccaggaggaaatggaagttctgraaagtgaggtaattttccccacacgctcacatcttggaagtggagggctaagcttcaactctaggatttcttcaaccacgaacacctggctttgtttgtttcctgtttttgttttttaatctgctatgtcacttcacaaataaatgataactattcttttttctcacctgtcatacctaatcactctctaagacctgagtattgttttcactttgtttttttaaatgactcttttattaatcccctcatttccattctcactgccagcaccataattctgacaattatcaccatataatagaaatacggtggcattttaaatcagctttttagctttcatttcctccaccttccccaaattagtttccttaaatcactctcagagcaataatcactgatttagacccaagtagggcatcaaattaacaaagacctagttcatctactccatcctttcctaggtgatgtgaactggatatttccctccacaattcctcattactagg

SEQ ID NO: 789467 - DNA, 502 bp, Homo sapiens
cctctgaaggatggaatttatgggctgcctgttccagtgtgcattagatttgcagtcattgaatagattagtttaagcaattaaaagagacaccatataaaccttacacaagcatataatgatgccaggaggcagyaatggccttgggagaatataaatcgaataatcagaataagattatattgtggttccttttcaaaaatgcaaaagagaaaatataaactttttcatgcattcatccttgatgttatttaatgtttttgagaagacaggaaaatgcgatttttaaaaaagggatttttaaggacaaatcagtaaacattattctgcaggtttgtgtttggttttgtttatattcatttgcatattatggactgctgtttgcataataagaccactgttatttctagttagtccatgggtgattacacatatgaataacacaatcgtgtatcctttgtgatatacattattgtaatctatgaaaatttcctgactgttc

SEQ ID NO: 789468 - DNA, 634 bp, Homo sapiens
taatattgatacaggaagaaattacttcatttaactttggttactttatattactttacctgaaacagtattatatactggtttaatcacgaagtttcttcactaaagttgcactcaaatgatttttgtgcctgaaaacacatgcagactttcttttcctgtgagcatttaaatagygaatgtaaaacccatagatagtttttataagattttgcataaatacaattaatcaacctaacctaaattttacccttgaactgtatgtaagctgaagtgttagttaagagttggcatttaaaaggcccttcttgttcaaatacaaacactaatagaaattaaaatgaggaaatgccaaccaaaggaaagatgaatcatactacctattactacaccaaaaagaaaatgttaacagtggtggagtagagtctcgagtgtcccgcaaatagaaaggtctaattagtgattgggagaagaaagagtttcacttgtattttctactttcaaatgtgtaaactaacatgacagccatttgttgttctttataaaaatcaggacttaccaggcacacatgttcaggagggtaacatggacagagatgtaaatgaatgtctttgttttcagatgttttcaagca

SEQ ID NO: 789469 - DNA, 625 bp, Homo sapiens
ctacactgtggtcacttggtcataagattagtccttgttatgtatgttactgctcatggaaacaacattgcatacctagatgtagtactctgccttgttctattttatggtattcagttgctctgtttcttgcacatactttttaatcccctcaggctccaacagtgccctaggcagtgaaataagaatagaaaatgrgttgcttctagacaaatcaggtacatttttatgcaaataatttcttccttagtatcatcagagtacattaatttgcgtgtttgacatagtgatttatcagtgtctattctttgttatttaaatattaaaatcttactggcccaataagatttggttggaatggtggctaatccttccaggattttttttgttcagtttttccttagctgtctagtttagtactatccatttctcatacaatttattgtatggtaatgttagggatttttattcccatgttttataggttgtcacgttatatattttggcactgccttttcttccattaaaaaactctcatagttattatgcttatcctgaaagttctgcacgtaagaaaatattgaaagaagaggctcaatccataagcaattttagaggcatgaga

SEQ ID NO: 789470 - DNA, 567 bp, Homo sapiens
caatatttgttttatattttgtatgcatgtacacataaacttcctacaaaaaaaggcaagaattctagtgtacagtcttattgttacaatatattattcaagtgattgataactgtatcaatgttgtcccttctctcctgctttcctgccctttcctcatcacaagtctgtcctacccctgcacccattaataatggtgggtggttttatgttaagtctttgtggatcctcatttaccacttcattcccttcaccaacaaacccagcatgtggtatatgtgtgaaatagctttcttcacagtaaytgtacctagtatatctagtgtatgtattttctcctcaggttcagaattctactgggtgagcttacattaaataggggccatcacagaagaccaagaagatcatactctctttcctgcagagataccggaagacgtaatagtcatctttacttcacccctccgctttgcttctaattggtatatagtagttttgcagttcaggaaaacaactaaaatttcagggacatgtgacagccagcatgcttcacactaggtagctaaa

SEQ ID NO: 789471 - DNA, 567 bp, Homo sapiens
ctataccagtccatacaaagacattacaaaaaaagaaagccccagtccaatgtaccttacaaacatagatgcaaaaaaacctgacattagtaagtgcaattcatcaacatataacaagaattacacaacacaatcaagtggagattacagagatacaaggatggttcaatattcagaaatcaatgtaatctaccatgttaacaggctaaagagaaaaaaaacacactcatattggttcatgcagataaagcattttacaaaattcaacacccattcatgagttaaaaacaaacaaaaaatctcttagcaaattaagaaaagaactcccccaacttgacaaagagcatctacaaaaamacctgcagctagcaccacactttatgataaaaagttgaatgatttctcccaaatattgggaacaaggcaaggatgaccattttcaccacttttattcaacactgtgctagaagttctagctagtgcaataacacaagaaaaggaaataaaaaatacagggaccagaaaggaagtaataaaattgtagctatttgcagatgacataattgt

SEQ ID NO: 789472 - DNA, 646 bp, Homo sapiens
cttataggcaattttaacaatcactatttctagattgcaatcttcctgtggttacatagaaagccaagagaggcactgtgctgacatagcaaaggtatgcccgtccaggagagaaaaattggatgcctaacgattgccaaacccctgataattcagactattagcgtcaatgtcaacgcgcagtatttaggacagatactgataaagatagggtggacggccacctcaccttgtcaccatctgaatgaggagccctgagatgggtcccctcccacctgcaatggcccgctggcatctgcaggtggaaggtgcagggatgcagagactaaagctgttctcctgcccctgcagagcccagccttggaacagacagacaccatttcatttcattcactcactgctggctgcactacctgaacacacgccctctgacaccatctgygagttactcatgcttcccacagcagagggagaaggtactttgctcacccctcctcccacagagggggatgaagtcaggagcctggtggaggcaccgctgaggaagggcctctgaaaggaccaaagacagtgaccagcaagtgtttcttgcaaggccaaggagctaaagcttccaggaggggctgcacagtcttgaaaagcatca

SEQ ID NO: 789473 - DNA, 628 bp, Homo sapiens
tcttaagttagcatcaggtaaaccttttcttttgggtagttttcctcctaggcctttgcatatgagtttatttggagctggttagctacaagcatacattctaggaggggcctgcatggtactcaccatcagcccagactgactcagccccaagagacagagctgcctgcctccaggtcttgctgtggctgtgatcttggcaataaattcctctgtgaattggactctgagttccattttcagagggagagtttcatgatgtaatgacaaattagctgcagccaagctcactgcaagagtccttgtcacttgaaatgtactctgggtaagccagtcccgtggacagacactccaccaacttcagcttgtgtgagtatctgtcacgtggcctttgaggctgccttagactgggcttgagtgcagcaytgaagctgggtctacccccatgcccttgggaaggcctaggtgtgcaccctcccagtcttcccataaccactggctacacctgactgataggcacctacctacgtcctagtgtaatcacgatcactgctgtcatttactcaacactcatcctgagccaggcattgtgctaagcactttaacatgaatttaaaaagaaaaaaaa

SEQ ID NO: 789474 - DNA, 588 bp, Homo sapiens
gtcttaacaacattttcttttctctaacttactttaagaatatattatagtacatataaaacataaaataagtaccaactgaccgtttatgttatcagtaagtcttccaggcaacagtaagctattagtaaaacgttctggggagtaaaaagttatactggaatttttgaccgcatgggggttggtgtctctaaccctcacattgttcaagggtcaattgtacttcactctatacttcatcaattactaattactacctgatcactgagatacggcttttgcccctgtcattcacataaacagacttccatatgaccaactatgttctaactgatattcggtgtagatcaaaaacaatctacatcttacctatyggtaacagacgatgttgactacctgattccttgaaacatcatctatctttgctttccaaacactccttgccttgttctcccatccacttgtcttaattggctttcttattttcttttgcttcttcctgctttttcactactgatgcacctaaaggtcctgacatggatcctctgctccttcttggaccacctctcctatttccttaacttcaat

SEQ ID NO: 789475 - DNA, 590 bp, Homo sapiens
acagtccgggaaaccttttaaaactggcaaatagatttccaaccccaaaagattcaacaggctgggagtcaaaaccaaaaatacacatttttccctcaaagttccccaagtggtactgacccataaaactccccactgtcaaactccttacccttcaacaatcttaagttacccttcaaaaatctgcttccgtctctgcttccttcatcaaccttcactcacctttccccagttgtccaagcacaactaacatctctatttcatctcacataacacrttgcttgtccatctctattacccaacttagcataatggactacaaacctttatttgctgccccctacccttccttttattatttctctgacaccagtgactttatttctctctaaattcctagggcctaccacatacaaaagagagaggcatttaatagcaactaacatttattgagcatttaggatacgaggcattattttagatagatacatacacaagaaagaaagaagaaagacaggaaggaggagggaagttggaaggtaatctcactaatcctaacaactctatgggaggaaatattattatcccca

SEQ ID NO: 789476 - DNA, 528 bp, Homo sapiens
tcaagaccagcctggccaacatggtaaaaccccgtctctactaaaaatacaaaaaattagccaggcatcatggcaggcacctgtaaatcccagctactggggaggctaaggcaggagaatcacttgaacccaggaggtgtaggttgcagtgagccgagatggcgccattgcactccagcctgggcaacaagagtgaaacttcatctcaaagaaaaaaaaaaaaaaaggtagatttttttaaaacacatgcaacattcaggctgggtgtggtatctcacgcctgtaatcccagcattctggaaggccgaggmgagcggatcacctgaggtcaggagtttgagaacagcctggtcaacatggtaaaatactgtctctactaaaaacaccaaaattagccaggcatggtggcgtgcacctgtagtcccagctactctagaggctgaagcaggataattgcttgaacccgggaggcaggggtggcagggagccgagattgcgccactgcactccagcctaggcaacagagtg

SEQ ID NO: 789477 - DNA, 528 bp, Homo sapiens
tcaagaccagcctggccaacatggtaaaaccccgtctctactaaaaatacaaaaaattagccaggcatcatggcaggcacctgtaaatcccagctactggggaggctaaggcaggagaatcacttgaacccaggaggtgtaggttgcagtgagccgagatggcgccattgcactccagcctgggcaacaagagtgaaacttcatctcaaagaaaaaaaaaaaaaaaggtagatttttttaaaacacatgcaacattcaggctgggtgtggtatctcacgcctgtaatcccagcattctggaaggccgaggcgagcggatcacctgaggtcaggagtttgagaacagcctggtcaacatggtaaaatactgtctctactaaaaacaccraaattagccaggcatggtggcgtgcacctgtagtcccagctactctagaggctgaagcaggataattgcttgaacccgggaggcaggggtggcagggagccgagattgcgccactgcactccagcctaggcaacagagtg

SEQ ID NO: 789478 - DNA, 601 bp, Homo sapiens
aaacattcattagctcttagctttccatcaaataacctattcttatcaagtgtatgtgactgaaacaatactgagtttctatcttattctaaaacaaggtgtgtattaagttagcaactgtgtttaacgcccagtttaaaatgaatgaaaatgagtgtgaacagttctggacatggtggaatagaattcagcaaactcactgaaataatctttccacaaatagcaattataaaccctgggaaaaaaaatacttttaaagaatgacttgaaaacagaggaaagcaatcaagagcaagtagaaactggagatctgatcatgaaagaaggggaagtatagtggaggagattcaaatttgtacagcattactcctgaggacactcccagtttgcagcagcatagggcagatagagctcaagcagaaagctgttttattcaaggcwacaaagtggctagaaaatcaaagggaaaattcaaaggagagagctacggtagggaagcctcaaaaatataaaaatataaactccttcaaattatttgctgatccccgaacttcatatgctcagggaagattccaaggatcccagaagaaaacaacaacta

SEQ ID NO: 789479 - DNA, 627 bp, Homo sapiens
gaataacagtttgtataggagaggcagaataaaggttgtttttttttttttttggttgtcaattttctgaataatgaaatgatgctttagcaacctccaatggtgatcaataacattgttggactcagatatttgtatatattaaatgtgttgtagattatggaattttatgacatttgatgctcagatggtctcactcttggccagtgggcactccgcagaattgctcctttggtcttcttttgacaagatcccagtagtttgtgatgatgacttctttgatttctggtaaatagaatatcctcgacttacccagaaggctttttacactagatgtagattgagtcatttctccaaagtggactggttccctagtgagaaagggcatttagagaacataatcttgattctagaagttaatttattatctttttaatgcttctatggcattccatgacataccatgaaatatttaacyattttctcttgctggcattcacttaacctctggttttgctatatcctgtctttcaattgcaaagtcatgttgaagatgggaaaacacagttcaagaagctttctataggccttacacaattagtagaaatgtaaaactgaaaaataata

SEQ ID NO: 789480 - DNA, 585 bp, Homo sapiens
gggtgacagagtgagacctggtctcaaaaaaagagaaatgccttcaatgaacgtttcccaacaacaacacgtcaggcaaaaaaagagagaagcaaaagtaaggtagaatagatggataagtatccttgtgtagtctactgttactgaaatccctaaggatggaattatttgtatattaaagctattaattttactgaaagctacagtaagttaaacgaaataatttatgtaaaaggatayataataaaaatatgttcaatcagtaaccagaaaatatgtgtatatcaatatttatctaagtctagaataaaaacaagattaagaaataaaaagtttaattttcactgtttaaaataactgctcaacctgaaaattaaatcccagatctagtatcctaatttgttaagcattctgtttgtcaaatgttctacttttaacagtttttatgttccaaatatatatgtcaaacttttaaaaacactatttaaaatccactagaagttatttaaaaataaatcatatctacaactgactttgcaacattcaccttagtatgctaagtacctcacaattttatgttaagtt

SEQ ID NO: 789481 - DNA, 503 bp, Homo sapiens
tattgctgacctccagaagtgttaagagaataaatttttgttctattaggtcactacattcgtggtaatttgttacagcagcaaagggaagtgttcaaatgttgcggtggaagtgggattcaagcggcgcaaagggacacatrttaagtactttatttgacttcttaatgaatgagcatgtgacacgtagataaaaattacaataatcaacctgcactgagtgctcacagtagtgtgagagaggagagctggagaggcatgagctatagagcttggcccctcagacattaacgtgcacacacatcttccatggactgtattaaatacaagctctgattcaggaggtctgcagtggggcctgagattgatctgcatctaaatctttgctcctgatttcaaaagctttgcttccccttaccttgcttgcaaaagctttgcttcccctcacccctttgcagaagcaaagatttagactcgagggaccccagaggactagaaagggg

SEQ ID NO: 789482 - DNA, 529 bp, Homo sapiens
aaatatgaagtaaaaaaattaaatgtccaatttataaaagcttcttctcttttctatgtcaatgaaataaacaacccaaggaaaaaaatacacaggatatgaattctcagaagaaataaagttggccactaaacatgcrgaaaattttcaatctttattatttagggaaatttaaattaaaacattaataaaatatcatttttctttaatcggattaggaatactatttgttaattcctcaatgttgtggggaaacaagcatcccaaaattttttggtagggatataaattgatactttgtttttgttgttatttccactgaccatacatctaactttctgtctcagtgtaatctcccatggtgtataatcaagctggtaggtgcacttgtcttctataatgaagtgtaggggccagatcatagccttaactaacagtattctcctccctagatttcaaattttaggcaagcatatcttagataaaagatgttgttatggactaaattgtgtcccctccccaccccaac

SEQ ID NO: 789483 - DNA, 692 bp, Homo sapiens
ggagcaagaagctcaagagccctagttgcaaattttctgggatttaagtaccctttagagatttcctattggttactccctgtttaaatgaagacttggcctgccgccagttggaggctgaagtgaaggcttggcccrtgaccaatcagaggctgaagtggagttacactctatgcaaatgaagacttggcccatgaccaattggaggctgaagtgaagttaccccctgtgcaaataaaggctgggctggtgaccaatcaaaagctgaagtgctgcctgtctccagaccctattctgcctcactgaccacataaaaagcagaagacaaaaatctcatgaagaagcttcatcatctgcttcaaaaattggtaattatttcaagaagactgtgcctaaagatgacaatttagcacctgcagttgcagaaggtgcttttacacatacttggttaatcatgatttttcatttagatcaaataactagtcttctaaactaatcttcctcatttgaaattccaaattttctcattcatttatagaaagtgaaatgatagctatttatattttcatgacattagcagaactttgtaaacaggtaaatgaagatggattcagatcaatgtccttagagccttcaaattgaagttagttaattccaataatgtttgtgtttttcatctgcttcatggaatc

SEQ ID NO: 789484 - DNA, 495 bp, Homo sapiens
ggctgagttccctctggggtttctatggaagaatcccttttcttgccttttccagctcctagaggctgtacgcttggctcacggctgtctcttccatcttcagagtaggttgggtcattctcgtatcacattactgtgacctacccttcggcagtctcttccacattkaagaacccctgtgattacattagatgtacctggatgatccaggataatctccatattttagggtcagctgattagcaaccttattccatctgctaccttaattcccctatgctgtgtaacctaacatattcacaggttctggggattagcacgtagacatctttggagggccattatttttcctaccgcgtgcacctataagattaaaaaaacaaaaatgaaaggctctctcctaacataatgtgaatggctacttgaggcctgggataaatcccctctgacagtgccatgtgtcaagcaacacatattaccaggaagttaatctac

SEQ ID NO: 789485 - DNA, 656 bp, Homo sapiens
gtgttattcttttagaattacagtatttatgtttggcttattatagtctgtgattaatgcttttgccaccatccgaacaatgcaaaaagtttaaaacaattcagctgtatctgcctctctagcctttgtgctaaagttgttgtctattttcagtataaaaatgctacagtatccttgttgaatagtcatgttctcatatttacccatagattttccatttttgctctgttctttttttaagaatcattatgtgctatcatcttagttcatttttcttctttttttttwaaatttcttgttttcagcactttgactgtggtatgcctaggtatgattttcattttatttaatttgcttggagtttactgactggttgatgtctttcatcagttttgaaacatttttggctgttatctcttcacatattctacactattttctctttctgacattccaattataaatctattagattgcttgtatcccatctgcctttaagtgtattttctgttctttccactttttctctgtgtgcttcattttggatatttctgttgatccatcttcagatttcttttgctgtctgttcttcccgttaacttttcaattagttattaacttcaaatactgtatttttcaggccagtgtggtggctc

SEQ ID NO: 789486 - DNA, 603 bp, Homo sapiens
aaaattagtcgggcgtggtggcgcatgcctgtaatctcagctactcgggtggctgaggcgggagaatcacttgaacccaggaggcggaggttaaggtgagccgggatcgcaccattgcactttagcctgggcaacaagagcaaaactccatctcaaaaaaacaaacaaaacccccccmcacacacacaaaaaaacaaatcggattgggtggttcaaacaacaggaagttattttctcacagttctagaagctgaaagtccaagatcaaggtgccggcagggctggtttctcctgaggcctctctccttggcttgcagatggccactttctcatcatgtcttcacagggcctttttctctgtgcatgcatccctggtgtctcctcctcttcttgtaaggctacagtcctgttggttcagggtctcacccttatgacctcatttacccttaattacctctttaaaggccctatctccaaatatagtcactttagaggatagggcttcaacatatgaattttagaaggacacaattcattccataacagaagggatatgaggaaaagtgtgaatacttttagaaaagccttttagaaaagcaattt

SEQ ID NO: 789487 - DNA, 639 bp, Homo sapiens
ttagatacaagaaagctccggctggcatctggcgggagtaataataatggccatcttacagttgtacaggaaggcttgagagctaatgggccctaaaagactaacatcagcttgtggcaagatggccgaataggaacagctccagtctgcagctcccagcgagatcaacgcagaaggagggtgatttctgcatttccagctgaggtacccagctcatctggttaaacagcgggtacagcccatggagggcaagccaaagcagggtggggtgttgcctcatgcaggaagcacaagtggttagtgaacctcctccactagccaagggaagccgygagggactgtgccatgaggaatggtgcactctggtccaggcactacacttttcccacggtcttcacaacccacagaccaggagattccctcgggtgcctacaccaccagggccctgggtttcaagcacaaaactggacagccgtttgggcagacaccaagctagctgcaggagtttttttttcataccccagtggtgcctggaatgccagcaagacagaaccgttcactcgcctggaaaggtggctgaagccagggagccaagtggtctagctcagcggatcccacccctacagagcccagcaagtt

SEQ ID NO: 789488 - DNA, 639 bp, Homo sapiens
ttagatacaagaaagctccggctggcatctggcgggagtaataataatggccatcttacagttgtacaggaaggcttgagagctaatgggccctaaaagactaacatcagcttgtggcaagatggccgaataggaacagctccagtctgcagctcccagcgagatcaacgcagaaggagggtgatttctgcatttccagctgaggtacccagctcatctggttaaacagcgggtacagcccatggagggcaagccaaagcagggtggggtgttgcctcatgcaggaagcacaagtggttagtgaacctcctccactagccaagggaagccgcgagggactgtgccatgaggaayggtgcactctggtccaggcactacacttttcccacggtcttcacaacccacagaccaggagattccctcgggtgcctacaccaccagggccctgggtttcaagcacaaaactggacagccgtttgggcagacaccaagctagctgcaggagtttttttttcataccccagtggtgcctggaatgccagcaagacagaaccgttcactcgcctggaaaggtggctgaagccagggagccaagtggtctagctcagcggatcccacccctacagagcccagcaagtt

SEQ ID NO: 789489 - DNA, 639 bp, Homo sapiens
ttagatacaagaaagctccggctggcatctggcgggagtaataataatggccatcttacagttgtacaggaaggcttgagagctaatgggccctaaaagactaacatcagcttgtggcaagatggccgaataggaacagctccagtctgcagctcccagcgagatcaacgcagaaggagggtgatttctgcatttccagctgaggtacccagctcatctggttaaacagcgggtacagcccatggagggcaagccaaagcagggtggggtgttgcctcatgcaggaagcacaagtggttagtgaacctcctccactagccaagggaagccgcgagggactgtgccatgaggaatggtgcactctggtccaggcactacacttttcccacggtcttcacaacccacagaccaggagattccctcgggtgcctacaccaccagggccctgggtttcaagcacaaaactggacagccgtttgggcrgacaccaagctagctgcaggagtttttttttcataccccagtggtgcctggaatgccagcaagacagaaccgttcactcgcctggaaaggtggctgaagccagggagccaagtggtctagctcagcggatcccacccctacagagcccagcaagtt

SEQ ID NO: 789490 - DNA, 607 bp, Homo sapiens
cttactagctgttacaagttaatctttttcagttttgactgccttaacccattcagatcaccactgatgctcattctcttatagcctagtattgtataaaatgtaaaaaggaaatagcatgtctgtggacaaactgggaagggagtaagaggcagggcacgcatgaaaattctcacggattttccaaagcagaagcggccaagctctccacaacaagagtggcctggcatagtggcaaaatgtggatcattttttccaaggccaacgttcctttgctctacagatacttsgtttgggcaaagatcacacttaaaaattacaattaggcactttaaccctatgtacagggtatcttgacaatattgatgtttcttagggaatatctaaaattaaaacaataataatgtcttttcctcatctttctcttacccattcactgatatcctccctcagattatttattatttacttacctgcagtttattttaaaatgactgagcttatttccatgggaaaagttgaagaattttggttattttcattttttcttagctatattttctcatttttcttcactgattatatattactgtttttaaaaaggtga

SEQ ID NO: 789491 - DNA, 626 bp, Homo sapiens
gaatactctcagtgggatcctccccatgactgtttaacgtaactgacctttcttaaaatgaacaagtcattgttgtcggcttcaaaggaaagtgaaacaaacaaaatacccaacaacaacaaaccagacacgtccaagatggggaaatttactaatcacaaagatggatgtgtccaaaatgcaaactgtcagaagcctgtaaccccgtaacgcacccacagtacttactgtcagctcaatgttgccatcggagcctgcgtagtcctccatgactgctgcctcaaaacccaggtcctggatgaactgagctatctcgaggggctggatgacctctgggtcatacttgatctctgcctttcctgccatcaaggcaaccaacacggagagaacacctggaaccatcaggtcatggctgtaacactctgggtgggcagggcctctaggktgacacagtcaatataaccgaacaaagaaacacatcttcccagaatcctctagaacagcagttttcaaacactgtttgaaaatgaggctgcacatgaggcttgcttggaaagccttcgacaatcacgatgtctggtctcttacccagaccaaccaaatcagagtatcccagggtaggtggc

SEQ ID NO: 789492 - DNA, 545 bp, Homo sapiens
aagttcaatcccatcatatgtgcatcagaacagtgatgcaaagccatatgatttatcagtatcacccggggagcttgctaaagcacaagctcctgcactagaagaaattgttgcttaaaagaatcccgtgattcaactcatggaatgggaggaaatatttgcaagtcatatatctgataagagcataattcctggaatatatgaagaactcctacaactcaacaacaaaaawcaaacaacccaattaaaaattgggcaaaggccttgaataggcattttgccaaaaaagatatataaatggccaacaagcacatggaaagatgttcaacctgactagtcaatggggaaatgcaaatcaaaaccacaatgacataccacttcacagccattaggagagctgctatcaaaaatataagtcaataaaagaaagaaaataacaaacattgacaaggatgcgcaaaaattaaaacccttgtgcactgctgatgggaatgttaaatggtacagccactgtggaaaacagtatgaaggttcctcaaataatt

SEQ ID NO: 789493 - DNA, 555 bp, Homo sapiens
gtggctcacaccgggcgaatcacgagtcaggagatcaagaccatcctggctaacacggtgaaaccccgtctctactaaaaatacaaaaacaaaattagccgggcgtggtggcgggcgcctgtggtcccagctacttgggaggctgagggaggagaatggagtgaacccgggaggcggagcttgcagtgagccgagatcgcgccactgcactccagcccgggcgacagagcgagactccgtctcaaagaaaaaaaaaaaaaaagaaagaaagaaaaagaaagaaacacacagcaaaagaatccactaagtatagtgtttctaagaggattcattagcagatccataccattaaaatattagcaagaaggtatgtgtccactgaattacttaatgtatttctayagcacagccaaaagagatgcacacacatcgatggctatcatcaaaatgtaaatatggacacatctgtatacatctttctttatatacttctttctgtccctctgctgccaacccaatgaataagtcctgacatacactgctcagaggtggttt

SEQ ID NO: 789494 - DNA, 517 bp, Homo sapiens
tggtctgtaaatcatagactgatctaatattaatttaatttttctactagactgtgtgggcaaggagaacgggtaacataactatcacttatctcagggtccaacatggctcttggcatatagtatcctcttcaacaagtatcagttaaatgaaagaaagaaattataaaatttacagaatttacagagttcatcctaaagagacaagacaaagtagtatttggttgttgrgtccacaatgtcacaacataaattcatatatgattctaagcaaatgacatgtggtattctttctatttgtcttattaagtgaatagtaagagccatgagggttcttgttagttattcctttattatagttggaaaattatggtgatgatgacttacatttcacagataatgaggctaagaggcacaaggaatgaaggtgtgttcacagaataaatggacagaattggtctttgaatgcttgttaatatggcatctggaaggcagacctcatgcttcccttcctttc

SEQ ID NO: 789495 - DNA, 551 bp, Homo sapiens
ctggtacagagtaagcactcaacacatattactatcactttgataaacattatatcatttgtgtgtgtgagtgtatgcatgtgtatattagagtgtacatgtgctacaagactgctttcatgtccttcctttaaaaaaaaaaagcatatcctacttctcggtggctttttaagttcatgttttattatctgtcctaacttctttgggtggaaaccagaaggccttctaggaaaacaactgaggagacagtgccatacagtttctctacaaaagaaacttctccaagggaaatcagaaacctcctctttcttctcccccaggacctaagatatttttcatgcctggaaatgagagttgcagcaytgggacctgtttcctctctgctttttctgccaggaagattaggtgttgtacccgacacaccaactgcacttgttcctatgtttggcatacccactttccccttaaactgagttttccctttgtaattctattttattcatccaaatgattatgtctattttgagcttttttacccacacacatacaca

SEQ ID NO: 789496 - DNA, 599 bp, Homo sapiens
ataggccctctgaaagaaatgctttcgactacgatggcagcagcaaaaactctgttaaggacagcttcatgagcacaacttcccagccactattcccacctgaaaagtacatattctggtctgcatttttttttctacaagtattttgctttgattcattgttgatacacatgacagcagaataataaactaggtagtttgagcctgtgtgtgactgggattmggcataagcatcacaattttggtttgtaaattcctttggttcagtagatcaaatggggaaagacttgtgtaatgtgaaattcaatgaccagcaatggcagggatcttttggatatgtaatctgctgttggagccatgcttggggaccaaatagatgagcaggccatgttaggaagggcagcaaggaaaagagaaaacatgaattaatattaaaaatgtgatgcaaaataaaatggaggttatagtcatatccttccaattgtattgagctgaaattgtttctggatttggaagctccttgctaagctaaattgcaaaaataagattatatgaggagaaaaggtaatttccaaaatataataaacataatacaatta

SEQ ID NO: 789497 - DNA, 593 bp, Homo sapiens
attaaaaatacaaaaaattagcctggcgtggtggcaggcgcctgtagtcccagctactcaggaagctgaggcaggagaatggtgtaagcccaggaggcggaggttgcagtgagcagagattgtgccactgtgctccagcctgggtgacagagcgagactccgtctcaaaaaaaaaaaaaaaaaaaagaaagaaagaaatgtgtccaaaaataagattcatgaatgatgaatggayagagggatagaatgatgcacagtggtgggtatatgagtatttactgtaaacttctttaaactatttggaatagttaaacatttgaatataaaatgtttaaataaaaaaattctttaaaactaagactttcacaaaaaaaaagaaaagaaaaattaaaagaaaaaaagagaaagcaatcccagctttgtaagttactagccatgcttcataaatagtctaagcataatttcctcatttataaaatataaaaaataatatctactatacaggactgttaaaggactatacttgccaatatatgtaaaaaacagttcctggtataaataagcactgaataaatgttttagctactattttt

SEQ ID NO: 789498 - DNA, 601 bp, Homo sapiens
acatttgaatataaaatgtttaaataaaaaaattctttaaaactaagactttcacaaaaaaaaagaaaagaaaaattaaaagaaaaaaagagaaagcaatcccagctttgtaagttactagccatgcttcataaatagtctaagcataatttcctcatttataaaatataaaaaataatatctactatacaggactgttaaaggactatacttgccaatatatrtaaaaaacagttcctggtataaataagcactgaataaatgttttagctactatttttagtaagcatagaacgtctgtagccataaacccacaaaaataaaacttcctgagaaagaagacaatgtttgcacactttgttaaaacaattgttatgtttgttgcatagaaaaaaatcagattcaccgtgatttttttctacatgtgaataccatttattaggctccctaagtgaatgagctagtagaaaggaaatattatatttaaaaaaccccataaggcatatttttagaaacggtatttccttgactttcattccaggaaaattctaacacacggcacggtgcatgtggagcccagaaaagaaagcctgccagatgc

SEQ ID NO: 789499 - DNA, 605 bp, Homo sapiens
cacattttaatgacctgaaagaacatcaccttcttcctaccaaaaagagtaacatacagagtgtctgatatataatgatggaagcagaattccacagaggggagggggcaccacacacaggtgatactttggggactactgggtgtgtctgaggcacagtcaccctgagagacacactcgacataacatagtgctctgcatcccacatatctacccctgccaacctcaaagagtcgagtggacgtggattatatagaggagagaggcacaggagtgctagagaamgagaaggggctctgaagccagataccagctatgaggcttagggcaagaaactaaacctccaagagacctcagggtccttatccaaaaaatgtagtcagtactgtgaggattaaataggtaatagggttttttttttttcttcaaaatgaaaaaaatatcccccaacagattaaaaattagttcttcctagttttaatttcctatccattcatttaacaaaatcttgcccccctaccatgtacaatgtagtgggctgggcattctttatgttcaagtttatgctctcacacttctttatgttagagtttatctactagttt

SEQ ID NO: 789500 - DNA, 629 bp, Homo sapiens
tcactcaccagattttaaaatcaatcattgagttcttattagtattttacacatcatacgaaaccttcccaccgttgagtgctttgtaaatttatagggtgctttacaaacatctttagtatcttttctcccaaagacctcctcccagaccaggagtacagcttccttagcatggctgctgcttgcccaggaggtgtgtgtcctgaatgaaggtggggctgmacctaattcaaggtcctacggctgaactctggaaacctctgccttccccaggaaagaaagcagcttttagggatgtacccatgctcaggcaccattctaagtcctctcctgctgcacagcagccttctagatttggggatcaaaggttttttttctgagcaaacctgcccccctgccctcacactttaaccagaggagataactggcctgggaatgcccacaaaacaccctgtgaatgacagactcaagtttccttgaaaatctcaacccataggcacagaacacacttactgagtatcgtagccacttataccattttgttaactctggaatttcagtctaagttcaaccctcagtgaactccagctgcaatggtttcttatctcatttcatggaccgaagcagct

SEQ ID NO: 789501 - DNA, 565 bp, Homo sapiens
aatcagacagagctctcatggagaaaatggtctcatatctctcaaaaataaagctaaatatgcttcacggggaatggcagcaaagtcaggcagtgaaaaaaaacagcatgaaatctacaagattttatttgatgagaaygtgagaggggcagcaacagctcctacgccatgcccattgtaactttttggctaatgtttcagatgctagacactgcctgtccttgctcaaacattctgtctcctctgtggaccctcatgtaaatgaacacacaaacacacaaacactcatagcagaagttgaaattgaattgaccatcaataaacatttcagaaaaagtctcgggcctaccaactcttcaaataaactctctatgactgccagattaaagacaggctgcctccttaaatatgatgttcagattagtaatacataatttttttaagtataagtatgtcccaaatattgcatgtaaaatatcccatgtaatactgggaaatacttgggtaaaaaattacttgtttatctgaaaatgaaatttaattgagaattctggatttttatatg

SEQ ID NO: 789502 - DNA, 565 bp, Homo sapiens
aatcagacagagctctcatggagaaaatggtctcatatctctcaaaaataaagctaaatatgcttcacggggaatggcagcaaagtcaggcagtgaaaaaaaacagcatgaaatctacaagattttatttgatgagaacgtgagaggggcagcaacagctcctacgccatgcccattgtaactttttggctaatgtttcagatgctagacactgcctgtccttgctcaaacattctgtctcctctgtggaccctcatgtaaatgaacacacaaacacacaaacactcatagcagaagttgaaattgaattgaccatcaataaacatttcagaaaaagtctygggcctaccaactcttcaaataaactctctatgactgccagattaaagacaggctgcctccttaaatatgatgttcagattagtaatacataatttttttaagtataagtatgtcccaaatattgcatgtaaaatatcccatgtaatactgggaaatacttgggtaaaaaattacttgtttatctgaaaatgaaatttaattgagaattctggatttttatatg

SEQ ID NO: 789503 - DNA, 629 bp, Homo sapiens
aacactgtctcaaaataaataaatagatttaaaaaaaaaacttagaactgagtatttcagaaacttttttacacaaggaataatgaatatccatgctactatttgctgtctcaaactactgcggaaacgggctttttctcatcatgtctattgtgcgaataataatctgtcaagaacttctactttggccaggtgcagtggctcacatctgtaatcccagcactttgggagaccaaggcaggcagatcacttgaggtcaggagttcaagaccggcctggccaacacggtgaaaccccactctactaaaaatacaaaamttcgctgggcatgatggcacacatctgtaatcccagcttgaacccaagaggcagaggttgcggtgagctgagatcacactgctgcactccagcctgggcgacagagcaagactctgtctcaaaaaaaaaaaaaaaaaaagaatttctactttaatgccaagttagaatttcttctgacttgctcattagagtctaaaattatctctaaagctgtgagaatttctatttacctttttcttatgaaatcaatttcaagttttataacttttctaggacctaatataaacatataatgtatttagtattcttca

SEQ ID NO: 789504 - DNA, 629 bp, Homo sapiens
aacactgtctcaaaataaataaatagatttaaaaaaaaaacttagaactgagtatttcagaaacttttttacacaaggaataatgaatatccatgctactatttgctgtctcaaactactgcggaaacgggctttttctcatcatgtctattgtgcgaataataatctgtcaagaacttctactttggccaggtgcagtggctcacatctgtaatcccagcactttgggagaccaaggcaggcagatcacttgaggtcaggagttcaagaccggcctggccaacacggtgaaaccccactctactaaaaatacaaaacttcgctgggcatgatggcacacatctgtaatcccagcttgaacccaagaggcagaggttgcggtgagctgagatcrcactgctgcactccagcctgggcgacagagcaagactctgtctcaaaaaaaaaaaaaaaaaaagaatttctactttaatgccaagttagaatttcttctgacttgctcattagagtctaaaattatctctaaagctgtgagaatttctatttacctttttcttatgaaatcaatttcaagttttataacttttctaggacctaatataaacatataatgtatttagtattcttca

SEQ ID NO: 789505 - DNA, 642 bp, Homo sapiens
gatctctagaactttctcatcttgtaagacaaattctatatccactgaatgcccactcctcatggaggtacgtttttaaaataactttttttttttctcgagacagagtcttgttctgtcacccaggctggagtgtaatggcacaatctcagctcactgcaacctccgcctcccaggttcaagtgattctccttcctcaccctccccagtagcagggattacaggcacataccacacacctggctaattttttgtgtatttttttttagtagagatggagtttcaccattttggccaggctgatctcaaactcttgacctcatgatctgcccgtctcggcctcccaaagtgctgggattacaggtrtgagccactgtgcccggcctaaaataactcttatggcatttttctgactataaaatgaataggttcatagaagtaaataacaatcactaacccctgattatgtcagtagtggagttacatttagaggtacactttatccttatttctgtgtctattaacagagaatattcacataatagatatttgccttcatgaaactgaaaaaaatgttatgaaagtgccgttttctaacctgctttttaatgtgtacaataccatgaatactttcctgtgtca

SEQ ID NO: 789506 - DNA, 587 bp, Homo sapiens
tgctgttcttgtgataatgagttctcatgagatctgatggttttacaaggggcttttccccctttgcttgacacttctccttccagccatcatgaaggacacatttgcttcctcttctgccatgattctaagtttcctgaggcctccccagccatgcagaactgtgagtcagttaaccctctttccttcataaattacctagtctcaggcagttctttatagcaagcagcgtgagaacggactaatacacatgcaaacacccttttatataacagaatggatttaaagtagatttgctaaaagtcaatgctgtctttgcctgaaaagctatcgtagttcctgagtttcagacatctagaacaayccaatcctgaatcactgaaaatcagaatgactcaggattctagaaactcaagaaacccaaaatttaaaaacctcttttctgaaacagtcaccgaatctggttacatggtacactgaagtttgtcaactcaggtagcaaagtcttatgaagacagaggaaatgtgaccagctttgccagctggaagtactgctccccctgccatatctgcatgaggacaggaca

SEQ ID NO: 789507 - DNA, 647 bp, Homo sapiens
agagaatgaaaaatcatgccactatgaacacgatcaccacgtctttgtgtttatttttaatatttttttatttatttgagatggagtcttgctctgtcactcaggctggagtacagtggcacgatctcaggctcattgcaacctctgcctcctgggttcaagcgattctcatgcctcagcctcctgagtggctgggattacaggcttctgccaccgtgcccagctaatttgtgtatttttagtagagacagggtttcaccatgttggccaggctggtctggaactyctgacctcaactgatccgcccatcttggtctctcaaagtgctgggattacaggcgcatgccaccatgcctggccctctttgtgtttaaaaacaaataggatttgttttctcgattttattgaaccttaacccttaattgaatattttcctctggaagtaaaaaagaaaaaaaaaaagaagatcatacttgtgtcaccccacaataaaaatggcaaggctgcagttagctgtagtttctatgagacctgtatgtgcgtatgggaagaggtggcatgttatatgagagagaaaaacacaacgaaaagtaaacaaacactggtgtctacagaaagctcatgagttctctctactgtctcaccac

SEQ ID NO: 789508 - DNA, 635 bp, Homo sapiens
ataaaaaaaaaaatagtttgaggctaaaagaaacaggagagaagcagacacatttttagacatgtcacaacatttacagtgattttaggtgaaaagagcagtaaatttcaatagactgaaaaaatttgcagcacagcaggcctagggggaaaaaatctgtcttttaccaagatcttaaaaacttctgttgtcaaaggcctcttgaaatgtgaagatgctgtatattgtcttcagaattctgcatttatactattgttattttagcattttctaaaatgtctgcaatcctctgtgggatccttgaaagtaatgtaggtttatgaaggtgtcttcaataacccttagtgctatcaccaatgaatattgagactaaggtctgccatgaataagtctcatgcctacttaaaagtttctggctratggtgaggagagccaaagggaggagccatctaatctcagttgctgtcctccttctcctgacattctcaatgcccttgtttataagtgtcctagctccagccatttctgccacataatacttcttttattttatttcacttttcttagaatggtctatgctttactcatcagcttcaaaactctgctcagactcagcttcaggcatgattatgatg

SEQ ID NO: 789509 - DNA, 635 bp, Homo sapiens
ataaaaaaaaaaatagtttgaggctaaaagaaacaggagagaagcagacacatttttagacatgtcacaacatttacagtgattttaggtgaaaagagcagtaaatttcaatagactgaaaaaatttgcagcacagcaggcctagggggaaaaaatctgtcttttaccaagatcttaaaaacttctgttgtcaaaggcctcttgaaatgtgaagatgctgtatattgtcttcagaattctgcatttatactattgttattttagcattttctaaaatgtctgcaatcctctgtgggatccttgaaagtaatgtaggtttatgaaggtgtcttcaataacccttagtgctatcaccaatgaatattgagactaaggtctgccatgaataagtctcatgcctacttaaaagtttctggctgatggtgaggagagccaaagggaggagccatctaatctcagttgcygtcctccttctcctgacattctcaatgcccttgtttataagtgtcctagctccagccatttctgccacataatacttcttttattttatttcacttttcttagaatggtctatgctttactcatcagcttcaaaactctgctcagactcagcttcaggcatgattatgatg

SEQ ID NO: 789510 - DNA, 631 bp, Homo sapiens
ttatttttaaaatgctgataaaactattagtacttaattcatataattgattcaagtattaaatgtattagtgattgcaaagcacttagaacatttcatggcatttagtatagccccaataaatgtctgcaattactatgcaaatatttattcatgaggcttggggctggacctcaccaccttttcataacaagcttactgggcctgggctggtgggtagagggaaataaatgaactaatggagatattagaattgaaaaagttctgtcattccaaataatagaatagagtaaatggtcaaacattttctctttgatattcagggagagcaagtgtaattgaaaatgatgacaacaccaaaaatgcttctgtttcaggattttctagttgaaagttcaggagttgaggataagaattatgctaatgaagattyttcactttttttcatttccccagtatcccaacctgtttactcttctgattgctgcaggacattcagtgtgagaaaaataattctatagataaactaccgacaaaccattgatttcaaagctctttaagaactgagtgattgatgcctgtcattaattcatatcctgatcacaataaggacgttttggctgccatatgg

SEQ ID NO: 789511 - DNA, 607 bp, Homo sapiens
tatcctgaaaatgtgcatactttgatgctagctctygaactatagcttattcttactcattctgaaatccaatatgtcttttcagtctttttgaattctatggattttccccttatccctctatttttattacaatttatccatcatacaacatcggccgtctgataggtagtttcccatactctacattttgccagttgtcaacacttaatggtgaaaatcagcatatctgtcttatcttctgtattttctgcagattggagtctagaggtttgatcaaattcaggtttgatccctttggcaagaccatacatgtagtgtattatcaggaggcatatattgcctggttttctctctttatgtaatgtttcagctcttcatcagtttattgcctatagctattaatcactgagggctgcacaattgtgatattttgtcatatcttttattttcattttcacttattaggctagaactctttattaaagacattcttcccttaaattattgtttggttacccagtgtttcaattcctattggaaagacaagaaaaatgcttgattccttaacttgatttacaaattctcaagaaaacaaattgatctc

SEQ ID NO: 789512 - DNA, 611 bp, Homo sapiens
tgtcaagaacatacattggggaaaggatagtgtcttcaataaacggtgctgggaaaactgcatatctatattcagaaggatgagactacaaggctatctctaaccatacacaaaaatcacattaaagtggattaaagatttaaatctaagaccttaacctatgaaactactatgagaacacattaaagaaactctccagtatgttgggctggtaaaatatttgttgagtaatgctcccaaagcacaggcaaccaaagcaaatatagacaaatgggatcacgtcaagttaaaaagcttctgcactgcaaaggtaacaatccaaaaagtgaagaggyaacccacagaatggggagaaaatattctcaactctataggaaaaaaaatctaataatccaattaaaaatgggcaaaagatctgaaagacagttctcaagagaaaacatacaaattggcaaacaggtgtatgaaaaggtattcaacatcattgatcatcagagaaatgcaaatcaaaactacaatgaggtaacttcttacctcagtcaatatggcttatatgcaaaagatagacaattacaaatgctagagaggatgtggagaacagggaagccttg

SEQ ID NO: 789513 - DNA, 651 bp, Homo sapiens
aaagagaaggtgggctccaactcagaagcaaagccaggccgaagtaaagcttgtgctatcaataaaaataatctattaaaacaagaaaatttctgcatactacttcaaaataatagtcaatctcacacttctgggtctttccgygaccctgcacgtctcagtcagtattccaaattcactcccactagtctgcatattttgttttattctgcaggtgcctagtttctggagtcaaaaagcccacttcacttcagtgcacacagatccatgccttcatcttgagctacagagtaatcaagaaaggaatgtccagcctagccacccacagatgggtggcagaggcttggaaaaataataaatctaccctagcatgtttcatctttttctaggctatggccacagcctcctgtctgaatctgtgcatgcattctgcctttccgcagtttgttctccacaatgcagtcaaggtattcttttcaaaatgcaaatctgatcctgtttcttgtcctagaacagtgttcccttcctctcatttcctgattaattcacccctatccttcagatttcaggaactcaaccatcacctccttgggaaacctactctggtcttcctgacatggttagataattatattatatgcctttatagta

SEQ ID NO: 789514 - DNA, 615 bp, Homo sapiens
agttttaccaaggaggggaaagatgtgtatgctaaaagctataatacatatatgaaagaactggagatgacacaaataaatggaaagctatcccatgttcaggatcagaagaatcattattgtcaaaatgtctgcaatacacaaagtagtctacagattcaacgcaatctctagcaaaactccaatgacatttttcacagaaaaaaaaaaaaaattcctaacatccatacagaacccaaaagacccagaatatctaaaatgatcctgagcaagaagaacaaagctggtggcatcacacttcatttcaarttatattacagacctacagtaatcaaaactgtatggtactggcataaaaggagacatatagaccaatggaacagaataggaatcccagaaataaatcctcgtttatgtggccaactaatcatcaacaaaggtgtcaaaagtacacaataaagaaaggatagtctctttaataaatggtgttgaaaaagctagataaccacatgccaagaaatgaaattggacccttatcttaccccatccacaaaagtcaattcaaaatggttaaaagaggccaggcgcagtggctcttgcctgtaatcctagtcc

SEQ ID NO: 789515 - DNA, 552 bp, Homo sapiens
ggaggatcacttgaggccaggagttagagaccagcctgagcaacacagtgagactctgtctctataaaaaatttaaaaattagctgggtgtggtgatgtgtgcttatagagtaatatagttactcagaaggctgaggtgcagaaaatacaaatattagccatgcctggtggcatgtgcctgtagtcccagctactcaggaggttgaggtggaaggatcactttgagtccaggagtttgacgctacagtgagatatattcatgacactgcactccagcagcctgggcaacagagcaagaccctgttatccctccaaaaaaaaaaaaaaraaagaaaaagaaaacaaaattactccagatggtaatgaatccacaagaaaaataaacaaacaacctgaaatgataaataaggttactataacaaaagctacaaatatatatttgctttcctttgttcattttctttaaatgatgtaaaagtaataattgtagtaatgtattgttgagtttgtaacaactataacatgtacaacaacaaaaccacaaaaaaacag

SEQ ID NO: 789516 - DNA, 552 bp, Homo sapiens
ggaggatcacttgaggccaggagttagagaccagcctgagcaacacagtgagactctgtctctataaaaaatttaaaaattagctgggtgtggtgatgtgtgcttatagagtaatatagttactcagaaggctgaggtgcagaaaatacaaatattagccatgcctggtggcatgtgcctgtagtcccagctactcaggaggttgaggtggaaggatcactttgagtccaggagtttgacgctacagtgagatatattcatgacactgcactccagcagcctgggcaacagagcaagaccctgttatccctccaaaaaaaaaaaaaagaaagaaaaagaaaamaaaattactccagatggtaatgaatccacaagaaaaataaacaaacaacctgaaatgataaataaggttactataacaaaagctacaaatatatatttgctttcctttgttcattttctttaaatgatgtaaaagtaataattgtagtaatgtattgttgagtttgtaacaactataacatgtacaacaacaaaaccacaaaaaaacag

SEQ ID NO: 789517 - DNA, 613 bp, Homo sapiens
aacttccaagtttgtttacttgctattttcttgagtcttgaaggaggcattgttgccatgacaaggaattctttttctgtgtttgtgcccagatattagagaacagccaatatacagaagatactaaataggagctctgtacctgtaatgaagtctgctgtttgcagagagcttgctccagggcacacaagtgttgactcaaagagagttgatccgattgaatagctgatgctgcggaagcatccacttgttgcttcagttgctctcccagctcatggagaamaaagagggaatctttaactgtgcccagtcctttgaggaggtcctagaagaggtgaaaatatgcccactctgaagcatgttgatactccttatcataaacagcaatcggcaaagggctacacatgtagaaacacaccattcctacggatcatattattaggctaaataaacttcacctgtggaaaaatgaacacgcactgaaccccattttttaaaatgctatgttaatattttaaacatacattatacacatataacctatggctatatataattactcttttgttagtaaaagctatgtaggttcattacaggaccttggggaaatgca

SEQ ID NO: 789518 - DNA, 613 bp, Homo sapiens
aacttccaagtttgtttacttgctattttcttgagtcttgaaggaggcattgttgccatgacaaggaattctttttctgtgtttgtgcccagatattagagaacagccaatatacagaagatactaaataggagctctgtacctgtaatgaagtctgctgtttgcagagagcttgctccagggcacacaagtgttgactcaaagagagttgatccgattgaatagctgatgctgcggaagcatccacttgttgcttcagttgctctcccagctcatggagaaaaaagagggaatctttaactgtgcccagtcctttgaggaggtcctagaagaggtgaaaatatgcccactctgaagcatgttgatactccttatcataaacagcaatcggcaaagggctacacatgtagaaacacaccattcctacggatcatattattaggctaaataaacttcacctgtggaaaaatgawcacgcactgaaccccattttttaaaatgctatgttaatattttaaacatacattatacacatataacctatggctatatataattactcttttgttagtaaaagctatgtaggttcattacaggaccttggggaaatgca

SEQ ID NO: 789519 - DNA, 602 bp, Homo sapiens
gaagatttagaactagataaattatataacctcactataaaatatttataaatttatttttataatttctgtaattctttaataacacaaaattattcaaaatcattcctagtactggatatttcttcttatttctataactgataatgcatttttcttgctattgaattcctatctggtcactgtgtaggaaacatacattccaagacttgattaccataatttgagttttttagttctttcaaataaaatggtctgaaaatatgaaaagttaaaaacaaaaaattttaattaccttatatttmtgaaggtattcatgaattgccttgtaacctatggaatttttaatattatcttcatccttctgaataacattttccattagagaaatccaactcatgacttcagaaatggcatggcgggaaggcagtttatccatctggagctgtccaagtcagggagagaaccagtcccaagtgttaaaatggaaaccccaacttctgctaacttaaaaaccctacaataattcttaaaaatgtaccaagagagataacactccttaatgacatttggagatcttaccctttctgaaagcttgaagt

SEQ ID NO: 789520 - DNA, 629 bp, Homo sapiens
gaaataagtgccaaattggacttcaccaaagtttaaaacttatgctcttcggacaataccattaagaaaatgaatgggtaagcaacagattgacagacaatagttgcaatgcatatatctgataaaggacttgtatccataatatgtaaagaactctcacaatgcaataagaaggcagtccccgaaaatgtgggaaagatttgaacagatgcttcacaaaggagtttcacaaaagatttatagatgtccaagaagcacatgaaaattgttcaacgtcattagtcactatggaaaatcaaattaaaaccacaatgagatttcaccctacactcattggaatgtctaaaattttaaagactgacaataccaagtgttatggaagacatgtagcaactagaactcacatacattgctgatgagaatgtaatatggtacaatcctttggaaaacagctactggtttyttataaagttaaacatacacttccttgtgacaatagttcaagtcttgagttttgtattttcttagattctgcatttgtctatttgacatccgttaatttcagggccaaactaacaaccaaagttgtttacatctcctctgagatccagagcctatactctgaacca

SEQ ID NO: 789521 - DNA, 615 bp, Homo sapiens
agacaggacacaaaatatacaattttaaaagaaaaaaatgaattagacttcaaccgtaaaatcttttgtttgccaaaagacatcatttaaaacttgaagggtcaagtcatagacttgagagggaatgttcaacatatcatgcacaggtgtgtgcatacacacacacacacacacacatatttgtcaaagagcttgtgtatccagactacataaataactcctacaacatcatgataaaaagtaaaacaactcaattttaaaattatgcaaaaaaggccaggtgtggtggctcacacctgtaatctcaacactttgggaggccgaggcaggtggatcacttgaggtcaagagttcaaggccagcctggccaayatggtgaaaccccgtctctactaaaaatatttttaaaaattagctgggcgtggtggcaggcacctgtagtctcagctacttgggaggctgagacaggagaatggcttgaacctaggaggtgaaagttgcagtgagctgagatcgcgccactgcactccagcctgggcgacagaccaagactccatctcaaaaaaaaaaaaaaaaagaaaaaaattgtgcaagaaactttcaaagaccctttac

SEQ ID NO: 789522 - DNA, 643 bp, Homo sapiens
tggatttcctttgagtatatatccagcagtgagattgatggattgtattgtagctctaattttagtttactgaggaacctctaaacagttctccatagtggttgtactaatttaccctcccaccaacactatacaagatttccctttctccacatcctcaccagcatttattactgtctgacttgtgggggatttttttgtttgtttttctgagacagagtctcactgtgtcgcccagggtggaatgcagtagcatgatcttggctcactgcaacctctgcctcccgggttcaaggaattctcatgcctcagcctcckgaacagctgggataacaggtgtgcaccaccatacctggctaatttttttgtatttcagtagagatggggttttgccatgttggccatgctggtctcgaactcctggcctgaagtgatccacctgcctcggcctcccaaagtgctgggattacaggtgtgagccactgcattcagcctgactttgtatttttaaatagcctgtcttcatgttcactagttcttctgcttaatcaattctactattaagagactctggctgaacagacacatgaaaaaaggctcatcatcactggccatcagagaaatgcaaatcaaaaccacaatg

SEQ ID NO: 789523 - DNA, 643 bp, Homo sapiens
tggatttcctttgagtatatatccagcagtgagattgatggattgtattgtagctctaattttagtttactgaggaacctctaaacagttctccatagtggttgtactaatttaccctcccaccaacactatacaagatttccctttctccacatcctcaccagcatttattactgtctgacttgtgggggatttttttgtttgtttttctgagacagagtctcactgtgtcgcccagggtggaatgcagtagcatgatcttggctcactgcaacctctgcctcccgggttcaaggaattctcatgcctcagcctcctgaacagctgggatwacaggtgtgcaccaccatacctggctaatttttttgtatttcagtagagatggggttttgccatgttggccatgctggtctcgaactcctggcctgaagtgatccacctgcctcggcctcccaaagtgctgggattacaggtgtgagccactgcattcagcctgactttgtatttttaaatagcctgtcttcatgttcactagttcttctgcttaatcaattctactattaagagactctggctgaacagacacatgaaaaaaggctcatcatcactggccatcagagaaatgcaaatcaaaaccacaatg

SEQ ID NO: 789524 - DNA, 602 bp, Homo sapiens
tgaaaggaggtggaaagcaaatcaatacatacaaaaaatactgagcacctacggtgtgccagttcagggaagcctctgggccccagagatatgaaagctcaagatgctcacagtccaatgtctactttccttgttctttactcaagagaatgcctggttttgtgtacttacgaccatttcccaacccagcattggggttgatgccatccaggtcatctggtacactgggaacaaggccactaggagagaacacatgagataagagatgagctaatgtttgaacaacagagactgttaagacggtctggactgcacatgacaatcatcccatggccaggagggatgcacacagctgggctacctaygtggcatgaagcacagaggttaagaactcaggctttggggctgagttccagctccaacacttgatagctgagtgaccttcagtaacatcattcattcagtcatacatcaaatgttctgtgtgccaaatatgtgctagtggcagaggcactgtgacaagtacaagatacttatgtttctgagtctcaccctcttaatctggtacatgaggataccatgccctccctgtaaaaattaaa

SEQ ID NO: 789525 - DNA, 611 bp, Homo sapiens
gattcctgggattgccctggccttcaatataagttttgaaatataaatgagatgtattttctgtcctgactaaaatccttcagtgtcttctcattataattataattaaacccaaactcttgaccatgacctgcaagaccctccatgatctggcccctggcctcactctagttttgtaccattcttacctgcatttgtggatctttcctccaataagttcattcctgcatcagggcctttgtttttttggcttcctctgcctaagagtttttcacctagtattttgcatggctggcttcttctcatgcrtgaaatctcagatcaagcatcaccttcccagactgtcacctaatatagctacagaccaactcctcagttactctctcttatataatcctattctgttgtcttcatggcactttgactatcaaaattatctttttaatattgcccatgtccttccactagaatgttaaacttcttatatctacaaagtttagaatgagcctgtcattcaaaaatattaattatgaatgaacaaagaatgagtgaatgaatggagtctctgtgtccccttagcccacacacagggctccacataggagcctgaa

SEQ ID NO: 789526 - DNA, 603 bp, Homo sapiens
tgtagaatgtgctctaatgcaagagccaaagttggcttgcttactgtatccctctaaaacagctcacctgagagaaagtttgaatctgcatggcagatatacttcttctccatcatctcttcccactggttcagcagagaagaaaggagaacatatatcagattacctcttatctggagttcctcccaactgataaccagttgttgtccaccaaccacatgattcactccctttagtatagaggaatagaggctggggtaagatgcaagacgctatgtagcagtgctctcaacaagatgggaataacagaaagaggactaaktttggtgtggggagtaagaagaaggtcatgaatttagagtttgagatatggcactcaattggatataaaggttatcattccaaactacctcttaagtcatgccttttctttttcatttgtgtaatgagtacgttggccaatcttagagccactgacaggtgttacaaattaagaaatctgtgcagcataacaagaatcttcctagtgaatagatttgtacatttgagtctttaagcaagaccagagggcgtttgttgaaaatgctgagaagaggatttctt

SEQ ID NO: 789527 - DNA, 593 bp, Homo sapiens
tgagagaaaacttctgcaaatcatgtctgataagagtctagtattccagtatatacagaaatctctaaaagcataatagtttaaagagaacccaattttaaaatgggcaaaggacgtgattagttttccaaagaatatgtaaaaataactgataagcatacaaaaattgctcaagatcattacctatcatggaaatgcaaatgattagctaccatgggaatgcaaatgaaaacaataataccagttcacagccactaggataggtataatttwaaaaaaaaacagataacatgttgagaatatggagaaattggaaattttgtacatgctggtggtaatgtaaaatggtacagtcattttggaaaagagtctgtcagttcctgaaaaggttactatatgacccagtaattccactcctaggtatataatacaagagacttgaaaatgtatgttcccacaaaaaatttatatataaatgttcatagcagatttattcataatagccaaaaagccgaaataacccaaaagcctatcatctgatgactgggtaaacaaaatacagtatatctatatgtaggggaaaataggtaaca

SEQ ID NO: 789528 - DNA, 643 bp, Homo sapiens
atattacagttccattaccacagcaatgaggaagggaacttcgtctaccaaaaacctatagtaaacatcattttgtgatgaaacactaaaagcatttctttcaaaaataaagaataaagataaactcgagggccaggtgcagtggctcacgcctggaaccccagcactttgggaggccaaggcaggtggatcgcatgaggccaggagtccgagaccagcctggccaacatagtgaaacccagtctctactaaaaatacaaaaaattagctggttgtggtgatgggcgcctgtaatcccagctattctggaggtcgaggcatgagaatcgcttgaacccaggaggcagagattgcggtgagcccagatccgtcactgcactccagccttggcaacagagcaagaccctgtctcaaaaaaaaaagataaacttgactactataactgcttctattcaccactatattatgtcttagccagcatgtaagataagggraaaaaagtgagaattggggaaggaagaaataataattcatagataatgtgtttatgtatctagaaaaaacaggagaatctacagaaaaattatcaaaattaaaacagctcagcaaagttgatatataaaagttcaagatacaaaattat

SEQ ID NO: 789529 - DNA, 659 bp, Homo sapiens
tcctttgccactgactttctttagtacactaaaaaaaattatttgcattcagtattacacttagattccaaaacatgaactttttaaaagaccaatacctgaaacagtttttttcaagaaataaaaaatacatctctcctgaaaatagaaaaatcatatgctcataagtctttttaagtttataaaactgtagatcaagtataataaagcaaggtataatcatatgccatagtacacattaatatattcttttaaatattgtgcctcaatcattttgcatatactaatttcttttaataaataaaaaactgtgttaaaatattatgtaaatacattaacaaaaaataaaagatattttaaaaatatttagctagcagttagtatataattaactttgagagaaagctaacagataggttaaaacactgaatgaagacctacctgttatttacattagtgtcttgttcaygaatactttttttattggaagttccattggtaactcttgaaacaggtcgagattttatggctataaattaagaaaaagtgagtcataagagagaatacattaaatatgtaacaaacgtgtaagtttactggttagacactataaacaaaatgaaatattaaagtgggaaggactaccattttctctgttt

SEQ ID NO: 789530 - DNA, 543 bp, Homo sapiens
tcccctagccccacaacccctgacaggccccagtgtgtggtgttcccctctctgtgtccatgtgttatcattgttcaactcccacttatgagtgagaacatgcagtgtttggttttctgttactgtgttagtttgccgagaatgatggtttctagcttcatccatgtccctgcaaaggacatgaactctttctttttatggctgcataatattccatggtgtatatgtgccacattttctttatccagtctatcgttgatgggcatttgggttggttccaaggctttgctattgtaaatagtgctgcaataaacctacgtgtgcatgtgtctttatrgtagaatgatttataatcctttcggtatattcccagtaatgggattgctgggtcaaatggtatttctggttctagatctttgaggaattgccacactgtcttccacaatggttgaactaatttaaattcccaccaacagtgtaaaaacattcctatttctccacatcctcaccagcatctgttgtttcttgactttttaatgattg

SEQ ID NO: 789531 - DNA, 657 bp, Homo sapiens
tctccctcccctagccccacaacccctgacaggccccagtgtgtggtgttcccctctctgtgtccatgtgttatcattgttcaactcccacttatgagtgagaacatgcagtgtttggttttctgttactgtgttagtttgccgagaatgatggtttctagcttcatccatgtccctgcaaaggacatgaactctttctttttatggctgcataatattccatggtgtatatgtgccacattttctttatccagtctatcgttgatgggcatttgggttggttccaaggctttgctattgtaaatagtgctgcaataaacctacgtgtgcatgtgtctttatagtagaatgatttataatcctttcggtatattcccagtaatgggattgctgggtcaaatggtatttctggttctagatctttgaggaattgccacactgtcttccacaatggttgaactaatttaaattcccaccaacagtgtaaaaacattcctatttctccacatcctcaccarcatctgttgtttcttgactttttaatgattgctattctaactggtgttagatggtatctcattgtggttttgatttgcattttcttttatagattaacaataataccctgctcgatctgtatcatgaaggcaaaaaaca

SEQ ID NO: 789532 - DNA, 526 bp, Homo sapiens
ctcccttcaatccaggagcctgtctgcctcctgctgccatccatggtgcctatggtgcccaggctgcttgcaccaaaaggcacctgcaggccagtgccaagccaccctcagccctccccctcagtttctcctctcatgctcattttgcccaaattctggaggaggccgaggtagcagggtactggcatgtcagcactgccccaagcatgtgcacacctggccaggctgtgccagtgcccaggataggccccaacctggctccaagattggagtagggtgccaggagtggagaggccaggcagcaggagcagacactctmgagcctgtggggccagggggttgggggggacttctgaggcccccaagagtgaagactgcagagactctcgggtcctgcgcttgggagggtggccacagctgcacctagggaactcccgccttgccaactcaaaaggggtggggctcccacttgtcaccagctcctgcctgcctcacggagtgtgcagccctggggtggtgcctccct

SEQ ID NO: 789533 - DNA, 603 bp, Homo sapiens
gtagaccagagcctgaggtatacttctgtcaccgcttcctctggaattgggatcctgcccatcaacagcccttgacctcaatgcactgagacccacatccttaagtctattttatgagcttaaggaaagaagcagatacgggagaaagaccataaactttggagtcaggagactgggtttgaatcctggctctgcaactttctagttgcttcgtcttccttcactgtaaaggggtaatgctatttctctctcagggctgtttgggttaatgaaatatgagcactgtgcctggcccataacaggggttctagacatgttctgcttcctggccaccttcaaatgtcacctattccttctgtggatatccagaaaggatgtccccacacctccccaattctgcaggcatccagcccgaaagggaggctgaaaamgacagacaatcatgggaagaggggagctctaatggactctctacttacgctgcacaaacaagctcggacagaaactcctcctcctttgttctttaggacccagcaatgcttcagcccctgccaccctgcattaagcaatctttcaactctctgtccttctttatctaataag

SEQ ID NO: 789534 - DNA, 556 bp, Homo sapiens
gatctagcctagaaaacagagggcagctaattataaaacccagcatgcctatgacccagcagtagcgccctcaggtgtttatcccagggaaataaaaacttatgtccacacaaaaacctggggagctttatttgcaatagccaagtgttcacagcagctttatttgtaatagtcraatatactacagtttgtttaaccattcaaatataccacagtttgtttaaccttttgcctgttggttgaagatgcctttcaacaggtgactggttagacaaactgtggtatatacacaggatggaatactactcagcaataaacaagcaacaagctattgattacaaacaacttggatgaatctttggggaattattatgagtgaaaaaagtcaatgccaaaggctacatatgtatgattacatttatataacattttgaaatgacaaatgttacagatagagaagggattagtggttgttgagggttaagaatgtggtgaggtggagggaggtggttataaaggcacaacatgaaggatcctcatggtgatggactggctg

SEQ ID NO: 789535 - DNA, 585 bp, Homo sapiens
aagtggaatttgtttttgtttgtttgttttttgagacagggtctcgctctgttgctcaggctggagtgcagtggtacagtcatggctcactgcagccttgaactcctgggctcaagcaattcttctgcctcagtctcctgagtagccaggactacaagtatgtgccaccatacctagctaatttttattttttagagatggggtctcactatgttgcccaggctggtcttaagcccccagactcaagcaatcctcctgccatggcttcccaaagctgtgggattataagcktaagccaccatccccagccacaagtggaatttgaaatgaagaactcaatagcatttgtgttaacactccccaaaattaaatacataggtgtaaatgtaacagaatatgtacaagatctatatgaggacaactacaaaaccctgatgaatgaaatcaaagactaactaaataaatggagagagattccatattcatggataagaagactcaatattgccaagatgtcagttcttcccaactaaatctatagatttaaagcaatctcaatttgtcaaaataattctggcaaattat

SEQ ID NO: 789536 - DNA, 656 bp, Homo sapiens
tttatttcagtgtatatgtgacttctacaaaagatggacttgtaatagacgatagtaaactgggaccctttctgtcttgttcttcactcaggctctcaacaaattctgttaaataaatgaatgattgacttttgcttggaaaacagagaaggaacatggcaggtgaaggaagaaggctttgttaattgaaaaattgtgggccgggccccctggctcacacctgtaatcccagcactttgggaagccgaggcaggaggatcacaaggtcaagagatcgagaccatcctggccaacatggtaaaaaaaaccccatctctactaaaaaaatacaaaaattagctgggcatggtggcacacgcccataatyccagctactcgggaggctgaggcaggagaattgcttgaacccaggaggtggaggttgcagtgagctgagatcgtgccactgcactctagcctggcaacagagtgagactccatctcaaaaaaaaaaaaaaaaaaagaaaaagaaaagaaaagaaaaattgtcactgatatgagttttaaatgtgacgatcaagccctatggagctaagtagtagcaagatgtattcagacatcacgctaaaatgaatgatatcttgtattagattttaataggtcaacaaaatttttaa

SEQ ID NO: 789537 - DNA, 656 bp, Homo sapiens
tttatttcagtgtatatgtgacttctacaaaagatggacttgtaatagacgatagtaaactgggaccctttctgtcttgttcttcactcaggctctcaacaaattctgttaaataaatgaatgattgacttttgcttggaaaacagagaaggaacatggcaggtgaaggaagaaggctttgttaattgaaaaattgtgggccgggccccctggctcacacctgtaatcccagcactttgggaagccgaggcaggaggatcacaaggtcaagagatcgagaccatcctggccaacatggtaaaaaaaaccccatctctactaaaaaaatacaaaaattagctgggcatggtggcacacgcccataattccagctactcgggaggctgaggcaggagaattgcttgaacccaggaggtggaggttgcagtgagctgagatcgtgccactgcactctagcctggcaacagagtgagactccatctcaaaaaaaaaaaaaaaraaagaaaaagaaaagaaaagaaaaattgtcactgatatgagttttaaatgtgacgatcaagccctatggagctaagtagtagcaagatgtattcagacatcacgctaaaatgaatgatatcttgtattagattttaataggtcaacaaaatttttaa

SEQ ID NO: 789538 - DNA, 611 bp, Homo sapiens
agtggatcctttcactttcataaaaggtattccttcccacgtcaagagaaaaagccaacatgtttttcctccaatgcataaaaggaacttccatagggctggcaggagtcaggctgttcaagacaactggaaggagttgaataacatctatccagtgagtcctgcaagacttcaggctctactacctccagcagctccctgctgagcctggaaaaggaggaaaaagtaaagaataagccaggggaaatcagacacaacagagccccaactaggtttcatgggtagcatagggaagtggttaaaaaactaaaaggatagatccattaatgaggtaacaaattattgccttcatgttgggacagaacagggccaaatggaaaagaatgaaagagaaagacagatagacacacacacacacacacacacacacacacacacacacacacacacagagagagaacgagctcagtgaattstccaggtgacacactgatgagggagtaacaggacactctgagttagtgccctcaggacacacagcatacagggatcatgaaaagactgtgctcaataattttccataaaatgtgctcaagtttccatgcagtcgc

SEQ ID NO: 789539 - DNA, 601 bp, Homo sapiens
cttaaaatcttcaggacacaggacacttgccttttctctatagaaaagttggtttcttggaaagaaggtggctggaacagctaagtatcccttggataattctagctataagttagtgttaccctccctccccattcctcattccccatacccacacctccaggcagaagtgacaaaacagagacttctgaacacatttatttgatatgtcaagtggagagaggagtgatttagggtttctccccacttctacctgtgggggtgttcataagctcagacagacagaagagcagcttagagcccatgacccaccccctgggaaaatgagacaatctgttgtagttgttggaggaacagggtgggaataaaaagcaggaagttgagaagtgaagttgagagcagtaaagacagcagcagaactgargctgggggttgctgcaggaacccccaagaagagtgaaaaagatatcctgaaaagtggttggggttagaagcagggtgtgaataaggagccaggcctggagaaagaagcaagacctgcagaatgggctgggatgtccacggagagagtgtgcaaaatcatgataggctgtgtttcagg

SEQ ID NO: 789540 - DNA, 506 bp, Homo sapiens
gtaaaaattgtacttactgaaaccatacagaatacattgttttgaaaaatattatttgtctctacacacagtttcaagttttttataataaacatttatttagcagagtaattttcttataagaggactgtcttcatggaaacttaggtaggtgaaggtgaatcatgtgatgtttttccagaagacttaacttcccaaggtggcctcagaggtctttgaggacacgatccatatagtcatctccactctcccaaatttatctaacaataaacaaaggtgaccatgttcattttattaatgctttgaaatgactgatgtgaccaatgcatgagaattaaacaacagtgaagtastaaaagatcaattgaaaaaataataaattcatgcctaagcttctcaaactatcacgtctcaataatttcatagttgcttcatgtatgaatgaagttttcaaaagcaaaaatttggtttacaataactagatgttcacagctgtgcaagctggt

SEQ ID NO: 789541 - DNA, 667 bp, Homo sapiens
caggaagaacaccaacaggatttagaagtttctttgaccaattactgaagtgcctggcacataattgatgctcagtaagtatttggatgaaggcataaaaatatattcacctgtgacaatgatgatccacactgtcacatgcagtggactcagtcagctaactatatttttaaaatattgtgtaatttaggttctcttaaaattccaaaccagatggagattaaatgagaattggttaaaattaatgcataatgtttcctgaataaaatagctcactcaatctgagaggccttttcctgtttgctggaattctgtttcccttattattttttcagttccaggtaagactgtttcrggggagactttctcctccagatcccacctctataatctggcaggtaagggcaccataaactggaatgatgcttcctatttgtacactgagatttctctagtgcagctcaaccctgccacagggatgatggtttgcttgtaaagcttgggtaatgaatagcccaagatttattttcacatttatttaggacaattttctctctgtcactgtgccaacactatcagcacaactcaatgttgcataaaaaagcacaagctttggagaaaaagaaaaaggtctgggcttaaatgtctgctctgccactcatcaatt

SEQ ID NO: 789542 - DNA, 652 bp, Homo sapiens
ataatgtgaatgaagtatattttaattgtgatgtaacattgctctctcaagtaatctttaggatcatgaggagggtaggaattaaagatagatttttatgaatgcttgtgctagcttgataaaaagccattagatatatattaattgacaattatgaggagttttaaattttggattctttttcaagtttatttaaggaaaatagtatcaacaaatgtaagatcataaagagacaaaaacatagaactccagtatggaggacgatacggtactgtacacctgcacagtattatgtggtgcattctgtctgctgactctaagtgcactgtggtaccgagctaaaggggcctctcagtcagtatgggtgtgcagaggttgtgtttggtagtcctgcctctcggcttatgttacttacktgagttttcattttttatttttctttgaaaagccatagaatgctctctcagaaaattcctttcccaaaacagatttgagtgaaaactctcagagccaaaaacattgaaaacaaacaaattaacaagaacaaactcagatcatttttcttgcttagcaatatgtagtttcacattttaattactctatattcttattaatttgatactttttaatggtagatatatttcgaataata

SEQ ID NO: 789543 - DNA, 527 bp, Homo sapiens
ctagaacagttctaagaatgaatcacagtgtttgatattacttttcccaaattagcatcagctgagtttctaggccaggtatttgggattgaagtgtggaggtgcttttactgttttgttgcttacttgctctactattttctcagcctcctggcttctaccacatcatgagttctggatagtgtctctcctctctgtgagtgcctgggcttcargatcttgccttcagtgtgtctccccttcagactctccgagaggctccaattggttcattaatcagtattcagtattcgataccccaggtggtaaatttctcctttaaggccatgttatatacctggggcttccctcagggagactgtcaactgtatgccttcaggtttgctgccagtccctggtagggtgagagttaccattatttttcttggatgataaaaggtcatgtaacacatacagaatagtaaaaaggagaaagtaaaaattatctctgttgacaatttttatattttttcctgctagttatattt

SEQ ID NO: 789544 - DNA, 545 bp, Homo sapiens
ctgggtaaatataaacatcagtaattatacatcaaatcccaatataatcactgcatttgagtacttgtaatttcagtatgaccaatatcttattaattagtaaaagacgtgtttaatgtaatatacccagctatgccctattctccttctagctaagtgtttatgtatatggatttgtttttatggttaaaaatcttataattrcattatcttcatgctctcaaaataccatttggcttaaagaactgatgttttctctggtaacttccacatggcatctgctcaaactaccctttaaactactgcattaatttgctgaatagttatctctttgcacttgccttgtgaaaacctatcttttactaattccccttcccccaaatcagcaaaacctcagcctgttccatctggcaatatcattgtttcccacttggcaatatggtgtagtggttatgagcctgggctttagagttcattaggcacaggtctgagtcccagttttagaacttgctagacatgtgattttgagcagtttatatcaactc

SEQ ID NO: 789545 - DNA, 623 bp, Homo sapiens
gaaattgttcgtaacatttccttatcaagttgtaaatatttgtagaatctgtagtaacgtctcccttttccttcttgatattagctatttctccattttatattctttatcagtctcacccggtatttaccaattttattagtattttctaaaatctgcttttggctgtgtttatcttctttcttctatgtttgtttcattatgtcattaatttcttctatttttattatttttttctgtattctttgggcttatttaaatgttattttgttacctctaaaaatggttgcttagatttaatgtttgcctttcctttttcctaatatattcatttaaatctataaatatccctatattactgatttagccatattctacaagtttcatttctaatatttttgttatcactyagttcaaaatcttttcttatgtccattataatctcttatttgattcgtggattatttaaaagtatactttttgactatatttttctattgttttccagcttaaaggcatttggtcagaaaaagttctctgtataatttcaatcttctgaaattctgtgaaatttgggtttgtttttttttttattccactatatggttgattttctaaaattt

SEQ ID NO: 789546 - DNA, 647 bp, Homo sapiens
tgtgtattatttatttgttcttccatgacctcttgatacataaatcagtgaagatattgtagccaggtagtccatgattgattcatttttttcagcctatatttgttgagcatctaatatccatgtactgtactagttactagtgatgctaagttcagtaaaattgtgttatgtggtctagtgggagagtaatgacttcccttataagaaactcaacagccaaaatatggtaatttatcaggtatcaatattgagatagactatagtaaatttaatctatactggtggttcttaaacattaacttgcctcagaagacttgttaaaacacaaattgctagacgcactggcagaacttctgattcagtaggtctgggtaaggcccctaaatttgtatttttaacaaattcccagggatgctaatcttgttaatccggggaccacccttcaagaacctttgatmtaagccattctgttgtgacatgtctgctcataggtggtacggtgatggcccaaacacaaaaatttttataattaagtctaattccaggccattcttttaagttactgttttaaataattttaaatttagtgattaaatagagaaaatggattttgtgccttcttactagcattaccatttcataga

SEQ ID NO: 789547 - DNA, 507 bp, Homo sapiens
ttgaccctttcttcttgcttagcttatttccttgtctgtttcaaaagaagaaaaggttcttagctttccagagcagatcaaatagctcatggtgaatacacaaaaactgtgtgacccagaaagtacaaaatcttcatccagggcatcagcctgttgttgagaaacaagcgtggggaaatgggytaggtggcaccactccagaaagccagctgggactgaaagagtgaggtaagacaggagcctgtgctcctccactgcatttctgaaggattgtaatagaagttagcatgagggctgtgaaataggtcatggggtgagatgacaaggacagaggggtagtggcggagatctgacttctggtgataggtcccacctaacaccaacccacaatgaatccactgattttgttcattaattcactattaaacactaccatgttgcaggcactgttcttaatactgtggactcagaattgaacaagacagatactgctcttgccctcaggga

SEQ ID NO: 789548 - DNA, 687 bp, Homo sapiens
agccttttattctgaaataatttcaaatgtacaaaaaacttgcagagatagacaaagaacttggctcttctaagttgtttggaagtaaattgtctacattacccatgaaatcttcagtatgtattttctaaaaagaaagacattctccaacatagtcaaaatgcaaccatccaagccaggaaattaacactgatgcatgaccaacatcttcccgaggtcccattcagggttaccagttgtcccaaagtccttcattagaaaagggtccagtacagccagtacatgatcatggattgcatttagctgtcatgtcgccttagttcttcagtctggaataagtcctcactctttatacaactttcacggctttggcctttttaaagattacagaccagttgttttgtaaatgcctctcatgcttcctcatgattggattcaggctgtggagttttccattttgggtaggaatatcaccaaagtgatactgtattcttctcattttatmctatcaagtgctatacaattgtgatgtgttacattattggtaatcacttgattaaggtggtgtctaccaagttctcttgtaaaattattctttttctctgtaactaataagtactttgagactatgtcaacaaaccattctcattaagctgtgatccattcttttccattgctatttcttga

SEQ ID NO: 789549 - DNA, 553 bp, Homo sapiens
ctctacttatcccttggtttttctggtgaccagcctccatcctgaagctccctaggggctgccagccatccatcaactcatcagcatacaaagacattgttttggaaattctaattattttttagtcattgtatgccaggaagcaggatcaaagaccaaatacattatttcacaatatcatagaagacactgcccaggaactcaacgagctggattactgtgactcccacagttgtcaatgcccagtgccagaagatttacaagsagtgggaaaccctgtactctctgacccacagtcacagggaagccctggagaaaatgaagaagcagctggaggccactgatcatctgtacctggagtatgccaagtgggcagagccttctacaactggatggagagtgccgtggaggagctccaggacatgttcctcatctacaatactgagaagattgagggcctgatctcagcccacagccaaaagttgaccctgccagataatgatagggagaaagaggctatcctggccacccacaaggaagcccagaggatcac

SEQ ID NO: 789550 - DNA, 631 bp, Homo sapiens
gatttgtagtttaattttacgaaatttgaaatcctttcaaatatgtaattatttttcaggctcaacataacacaagaatgctagctacttatgcagctattgatcctagagtgcagtatttgggatatactatgaaagtgtttgctaaggtatttatgaaaaaattaatgatctgctttgttcatgataattaaaatgaaacataactaatgtcagatttgtgaaaaattttgtctcagttttgtttatctgagcttttaaaaaagaaactttcagtattatatagcttgaatagatacctatcagagtagggtggctctgtctttttttcctgtatgtattctattcccatgtgcaactgactagtcagtttctcagcagtaacatttctcaatgcagtgatttyagccccaggcatgggagttggcatatcatcctagttaagaatttctgagttaagaaatcttatatttgagtttagtgataagtttttctgacccagaaaacaaaacaataccaataataccttacgcttctcctattataacacttgttatgacattgaatttagttttctcattcttttgctaattgtgtaaactaggtgagaacaggaacctctgtttctcta

SEQ ID NO: 789551 - DNA, 521 bp, Homo sapiens
ttagttcaatcaatgcaaactcttaatacctcccaactcaagtatttcccaaggtgtgctctcattaaatgagcttgaaaatgctttgtattttattggcctcttgggatatcaaaggatctgagaatttctgcagtaaacaaggtttttaatttcattcaacttggcaatttcaaacttataaccaccattcccattgctaattcctrtagaaatttcacacaattaaatgtccccagaaacatagtttgggaactattgttctttgtccccctttcccattacagctgtgtagtggatacccttggtaccccattcagatcctctagggtcttttaaccaactttttttcaccattgcccagctgtgctcttgccattaaaagtttatacctttgaccttcagaggactgaccttgggcctgtaaccagcctcacctgtagagagagtcagaagtgactcagagtttacatctcccttaggatggattctagcccatggctagctggtatgggatacag

SEQ ID NO: 789552 - DNA, 646 bp, Homo sapiens
agaaaaaaattgcttttatcaacatctgatacaatggctctgaaaaaaatttattgatggatctgagaattttttcacacatgaatcatttctccttccaatggttattgatactgatagaagttccccgctgagactccctggacccatrgtttgtgcctgctgggcatcccactatgctgattcctactctaaaagacacttacagcagaaagcattcacccatgaccattatgaaggaaatattctgtccctcactcaccctctggaagctaatatggagcagcagtcactctatccagagccacatgttcacagttctctagcaagcaggtcacaccccgtgggtcccctattccccgtgacccttgttgatccatcctcttcctgctcagttgctcccctgctcacctggactgcgggaggcatgggtgcgcccactgaggccatgctgaggagctgggatggaatgcaggacagggagagaggggagactgagctgagagggagcactggatcctgggaggtgtggatgcactgattacagtccaaagacattggcagcaacaaaggacacacaatgactgaaaacattaacgttaccttctgggatctctcagtgccctgagcgatctgtgtgtctacc

SEQ ID NO: 789553 - DNA, 614 bp, Homo sapiens
ccccaggtcactgggacagccagtaagggtggtgctgtccacttccagagtccatgggcataactactgtgctgggtggcctcttgctatacagaccatagcaccaccagctgcagagaatgctaggttatgatctggattctgctaggaaagtgtcttccagtgtctttctcagaaaccagattttatgggcaaattgaagaatctggaaagttgtgaggagcattaaaatacctccgtaacggccgggcgyggtggctcacgcctgtaatcccagcactttgggaggccgaggcgggcggatcacgaggtcaggagatcgagaccatcccggctaaaacggtgaaaccccgtctctactaaaaatacaaaaaattagccaggcgtagtggcgggcgcctgtagtcccagctacttgggaggctgaggcaggagaatggcgtgaacccgggaggcggagcttgcagtgagccgagatcccgccactgcactccagcctgggcgacagagcgagactccgtctcaaaaaaaaaaaaaaaaaaaaatacatccgtaacttgtacaatagtttacttatgtaaacttgtaaacactccacaggctttacactcttt

SEQ ID NO: 789554 - DNA, 614 bp, Homo sapiens
ccccaggtcactgggacagccagtaagggtggtgctgtccacttccagagtccatgggcataactactgtgctgggtggcctcttgctatacagaccatagcaccaccagctgcagagaatgctaggttatgatctggattctgctaggaaagtgtcttccagtgtctttctcagaaaccagattttatgggcaaattgaagaatctggaaagttgtgaggagcattaaaatacctccgtaacggccgggcgcggtggctcacgcctgtaatcccagcactttgggaggccgaggcgggcggatcacgaggtcaggagatcgagaccatcccggctaaaacggtgaaaccccgtctctactaaaaatacaaaaaattagccaggcgtagtggcgggcgcctgtagtcccagctacttgggaggctgaggcaggagaatggcgtgaacccgggaggyggagcttgcagtgagccgagatcccgccactgcactccagcctgggcgacagagcgagactccgtctcaaaaaaaaaaaaaaaaaaaaatacatccgtaacttgtacaatagtttacttatgtaaacttgtaaacactccacaggctttacactcttt

SEQ ID NO: 789555 - DNA, 542 bp, Homo sapiens
tggccatgtaatatttaatatttaaataagaagtttttaaaaatatttacgctatccctgcaagttcattattaggtacggaatcaaagtgtgctttgaaagtcaaggagagagcaatggacaacagtgaagagaggtaaaagagttactaccagcaatgcctttacctaccttaggccctgggacggtggccctgaaattattaaagttccttccccagaaattcttaatctrtgggtctgggttgaagcccaaggacatttttcatgagctctgggagtgattctgatgcacatggtccagtgaccctactttgagaaaacaggtagaactcctacccattattcaagacccaattcaggaaggtttccctttgtgaattcttttttttttttttttttttttttgagacggagtcttgctgtgtcgccaggctggagtgcagtagcacgatttcggctcactgcaaactccgcctccggggttcaagcgattctcctgcctcagcctcccaagtagctgggactataggcgtgtgccac

SEQ ID NO: 789556 - DNA, 583 bp, Homo sapiens
gatgcaacataaagagacagggtctttccagactgttggagagttgaaatcctcagataccagctgtgcttcagacttagacggcaactactgtggaacagaataaagcccagattggttagaagtctcttggagaaatttcttcaagaagataaaattgatagaatatttaataaatctgaaggcatgtagaaaggattttgacaattagtatayagtgtggtttagagtatgagatgcgtctttcaaaaataagcaagtttttaaaaatcaaggcaaccaataactccagggaaaagaaaaagctgagcaagaaataaaaatttatagtagtgctttacatagctttcagccatgaataataacattttcaaaatcacaatcattgaagcactttttatttaaccaaaaattataatataactatgttgagagaatgagagcaggaagtaggacataaaaggagtgtgtgtgtgtgtgtgtgtgtgtgtgtgtgtgtgtgtgtgtgttggaggtggaaaatagaagagacctaatcctcatctttctctctacagaagtcaattttcaaaacccaaatatg

SEQ ID NO: 789557 - DNA, 549 bp, Homo sapiens
ctcttttgcatgtgggttttgggcaggtcagtgagccttcctgggtctccactgtaaagtggaggaaatagtacctacctcatggctgacagtgagactttaaaggcatcagaataggtgcacctctccttgtcctccgcgcatgctctcccccacctctgctccagccagtactgtggcaaccagctccatagaggtctagtctgaaagtgcttcacctcaggccactgcattacgccttcttcccagggttctctggcattgctgcgggaccttcttgggaactggcatttatgcatatgcaactgaaaatgccagggggatagtcactccacaagacccccratggtggagatggcgcccggggaatcagtgccaattgcctgcttcagtcctatgggcaggtggctctgaggtcatcctgtctgaagtagccagtttggcaactcaaccttgttggggcttctttccttccctgtttcatactcctccagcccccacacctattccctggagtcagttcacaaaacaagccaccctcacgcatgc

SEQ ID NO: 789558 - DNA, 555 bp, Homo sapiens
ccacagagactgtgaaatgattttctaattctgccatttcttctatacttattaattggtattcttttataaagaagagctttccatccccatcctgaacctcactctctttagtatcaggatgagcttatggccttttaaaaatggacatacactccctatattytttattttgaagctcaaattgtcccatattggccaacggaagtgccttcaagctggctcctatgtacttttgatatgtcattattattttttgagtacttccttactttcagtactgttttcaccctgtttctgaattctgccatttcttcaaggagccctccttcctcttaggcagaatggtatttagaaatcaagccctgggcaccaggagtgttttttgctacgggggtgtcactgtagacacttcagaggacagagagaggaaatataattctttctaaaaaatcatgagttcacactcatactgatatatttctatttccaaaccaacaccataggattatttccgccctttccctataccacatatgtaaccccctcccactg

SEQ ID NO: 789559 - DNA, 577 bp, Homo sapiens
gcccctgtgggcagggtttttgggatccagtggtccttggcatgttgcaatatttctgccaaaagtaaaagataagttgctacatcttgaacctgctaccacttaaaaggaggtgcagcacttggtgatgtctgcattttgaaggcatccacgcacatttgatcatgctccwctcacttatttgctgagtgaattacggctgccaattttggtgaagcccataacgagagctgacgggcagctggtctagactgcagtaccaaagagaagatcccatggtgcccaaacagacagaaaggaagtttcaaaggagcaattgacaaaccttgaccagaaaaacagcacaaaccctgggaattctttcaaagcttcttctgcaaataactattctcggttagagaaatagttgctggcttgccactgatgtccctgaaggcccaaatacctcaggcttccatggagccagttcatgctgtggaattcctgtttctccctcagcccatccccgcagtctcatggggcattctatgagatcagccagatcaggaagggaaagtccaggtggttccattcggca

SEQ ID NO: 789560 - DNA, 577 bp, Homo sapiens
gcccctgtgggcagggtttttgggatccagtggtccttggcatgttgcaatatttctgccaaaagtaaaagataagttgctacatcttgaacctgctaccacttaaaaggaggtgcagcacttggtgatgtctgcattttgaaggcatccacgcacatttgatcatgctcctctcacttatttgctgagtgaattacggctgccaattttggtgaagcccataacgagagctgacgggcagctggtctagactgcagtaccaaagagaagatcccatggtgcccaaacagacagaaaggaagtttcaaaggagcaattgacaaaccttgaccagaaaaacagcacaaaccctgrgaattctttcaaagcttcttctgcaaataactattctcggttagagaaatagttgctggcttgccactgatgtccctgaaggcccaaatacctcaggcttccatggagccagttcatgctgtggaattcctgtttctccctcagcccatccccgcagtctcatggggcattctatgagatcagccagatcaggaagggaaagtccaggtggttccattcggca

SEQ ID NO: 789561 - DNA, 549 bp, Homo sapiens
tcccttgccccttccaccatgtaaggacacagggagaagatggctgtctgtgaactgggaaacaggccctcatcagacactgagtcagctgaggtattgatcttggacttcccagccttcagaactgtgagaaataaatttctgtttaaaagacacccagtttcaggtatttttgccatagtagcccaaacagactaacagtggatatwattttgttgagccagttataaaatccaagtccaagtcaaaactgcaggctgatattagctgggcatggtggtgcatgcctgtagttccagctactccagaggcggaggtgggaggatggcttgggccccagaggtcaaggctgctgtgagtggtgatcacaccaatgcacaccagcctgggggacagagcaagaccctgtctcaaaaacacaaaaatacaaaaaacttgcaggctccaaaactacctgaacttcaacctaccttctttcaatacaatgcccagaacatagtctctctcaatgacccagtcaagcttaaaaaaaaaaaaagaaaaaaaaag

SEQ ID NO: 789562 - DNA, 616 bp, Homo sapiens
aacatctagagttgaacccatttctggctctttggctttgcaagccacgcataactgtaggatgaagagtcacctctgagcggccatgttgggtaatgaacagcagggctgagaacctgaaggcatgggtcaagtcttggctttgccatataacatttgctctgcaatgtcacacaaatcacgtaacttctctgggttaggagtcctgtccacctgcctaaaaatccagtgctctttctaccatacctctgtttttagactttttttctaccttaattgatattttactgttttgtttttgtttttgtttaatgatcagtacatagacctaatgattcatttctatatagttcttttattttttttcccaaacctccaggtagtatttatcccagattccaaactttcctgtggcytaaaagctatttagtctattggaaacattcagcaagctctttacaaaaatgactgcagtgtcttcaacgcgtttgagttgcactcatagtttgccccagtcacgtgcgagtttaacgtacaactctacatcacgtaatgggacatctttaacaacaaaaccttcccgtgcccaaggtcatgcacaggagaagaagggagt

SEQ ID NO: 789563 - DNA, 616 bp, Homo sapiens
tcttgaaatcaagcatctaagtatctcaccagacttggcctaaggcataattccagggttggtggtttggataccagcctcactgatggctctgtttgtccccccaccttcagcactgtcagcgttagcacctcctcctcccgttttccctccctcttctctctyagcatgagaaagaaactggtccctgtggggtctgcatattgtttgatactcttttctttaataggtggagcttaattccccttgtgtttggcttggacttggtgactgactgccaatgagtagagtatgcagaagtgaggatgtgtggcttcccagaccaggtcacaaaggcattggagcttcctcgctctctcaaaccacttgttctggggtaagtcagctgccacgttgtgaggacactcaagcagccttatgaggagattcacatgtgaggaactgaggcctcctgcctgtagccataccactgagccatctcggaagtaggtcctccagccctagccaggctttcagatgacagcagccctggttgattcttgactgcaacctcatgaatgaccctgagccagaactgcttagacaagccattcccaacttcctgatccacaggaat

SEQ ID NO: 789564 - DNA, 616 bp, Homo sapiens
tcttgaaatcaagcatctaagtatctcaccagacttggcctaaggcataattccagggttggtggtttggataccagcctcactgatggctctgtttgtccccccaccttcagcactgtcagcgttagcacctcctcctcccgttttccctccctcttctctctcagcatgagaaagaaactggtccctgtggggtctgcatattgtttgatactcttttctttaataggtggagcttaattccccttgtgtttggcttgsacttggtgactgactgccaatgagtagagtatgcagaagtgaggatgtgtggcttcccagaccaggtcacaaaggcattggagcttcctcgctctctcaaaccacttgttctggggtaagtcagctgccacgttgtgaggacactcaagcagccttatgaggagattcacatgtgaggaactgaggcctcctgcctgtagccataccactgagccatctcggaagtaggtcctccagccctagccaggctttcagatgacagcagccctggttgattcttgactgcaacctcatgaatgaccctgagccagaactgcttagacaagccattcccaacttcctgatccacaggaat

SEQ ID NO: 789565 - DNA, 616 bp, Homo sapiens
tcttgaaatcaagcatctaagtatctcaccagacttggcctaaggcataattccagggttggtggtttggataccagcctcactgatggctctgtttgtccccccaccttcagcactgtcagcgttagcacctcctcctcccgttttccctccctcttctctctcagcatgagaaagaaactggtccctgtggggtctgcatattgtttgatactcttttctttaataggtggagcttaattccccttgtgtttggcttggacttggtgactgactgccaatgagtagagtatgcagaagtgaggatgtgtggcttcccagaccaggtcacaaaggcattggagcttcctcgctctctcawaccacttgttctggggtaagtcagctgccacgttgtgaggacactcaagcagccttatgaggagattcacatgtgaggaactgaggcctcctgcctgtagccataccactgagccatctcggaagtaggtcctccagccctagccaggctttcagatgacagcagccctggttgattcttgactgcaacctcatgaatgaccctgagccagaactgcttagacaagccattcccaacttcctgatccacaggaat

SEQ ID NO: 789566 - DNA, 568 bp, Homo sapiens
aatctgggaggcagaggttgcagtgagctgagatgacgccattgcactccaacctcggcaacgaaagtgaaaccctgtctcaaaaaaaaaatcagtctttctaagaaagggaggtcaggggtctatcatcaggtgcctggaacagtcagatcagttgtcaaccttgagtttttccagacgaactcaaggggggctggattttcccagagctcaggctgtaggctgctagaagccatgtcagagtttggtcaaagctctcaagagasagatttagatgaagtttttcaggccgagagtttttgcggttctcagaagacagtggcattgagtacattcacactgccgtacaaccatcaaaaccctccattgccagaactttttcatcttccaaaaatgtgtacccattaaacaatagctccccattcctcctccccttagcccctgacaacaccaattctttctgtctctatgaatctactctaggaacctcatataagtagaatcatacagtacttgtccttttgtgattgatttatttcactgagcataatgttctccaagattcatc

SEQ ID NO: 789567 - DNA, 601 bp, Homo sapiens
tgtcaagaacatacattggggaaaggatagtgtcttcaataaacggtgctgggaaaactgcatatctatattcagaaggatgagactacaaggctatctctaaccatacacaaaaatcacattaaagtggattaaagatttawatctaagaccttaacctatgaaactactatgagaacacattaaagaaactctccagtatgttgggctggtaaaatatttgttgagtaatgctcccaaagcacaggcaaccaaagcaaatatagacaaatgggatcacgtcaagttaaaaagcttctgcactgcaaaggtaacaatccaaaaagtgaagaggcaacccacagaatgggagaaaatattctcaactctataggaaaaaaaatctaataatccaattaaaaatgggcaaaagatctgaaaagacagttctcaagagaaaacatacaaattggcaaacaggtgtatgaaaaggtattcaacatcattgatcatcagagaaatgcaaatcaaaactacaatgaggtaacttcttacctcagtcaatatggcttatatgcaaaagatagacaattacaaatgctagagaggatgtggagaacag

SEQ ID NO: 789568 - DNA, 601 bp, Homo sapiens
tgtcaagaacatacattggggaaaggatagtgtcttcaataaacggtgctgggaaaactgcatatctatattcagaaggatgagactacaaggctatctctaaccatacacaaaaatcacattaaagtggattaaagatttatatctaagaccttaacctatgaaactactatgagaacacattaaagaaactctccagtatgttgggctggtaaaatatttgttgagtaatgctcccaaagcacaggcaaccaaagcaaatatagacaaatgggatcacgtcaagttaaaaagcttctgcactgcaaaggtaacaatccaaaaagtgaagaggyaacccacagaatgggagaaaatattctcaactctataggaaaaaaaatctaataatccaattaaaaatgggcaaaagatctgaaaagacagttctcaagagaaaacatacaaattggcaaacaggtgtatgaaaaggtattcaacatcattgatcatcagagaaatgcaaatcaaaactacaatgaggtaacttcttacctcagtcaatatggcttatatgcaaaagatagacaattacaaatgctagagaggatgtggagaacag

SEQ ID NO: 789569 - DNA, 601 bp, Homo sapiens
tacggcatcaaaacataaagtagaatcatatcaggatagctcttttgcccccaggttcatcattatttttagtcacagtcttgactgagcaactactaaatatgaaccaccaaactgagagaggtagaataacaaagtgaaagatgcctagagcaataaacggattttaattttttttttaagcctccatctctctagtgtccgtttgtgatagaaggtttgagagaagacatcacaaaattcagcaacataaacaaaaatgtgatgctcagtacctgascacatgtacttggcagggcgttcctcaatgagagcttagagtacttctcagaaatatggcaatgggtcatttggacagagtggtcactgtggccatgtctcgtggcaatgttcatttttctttcacttatgcagaagctatctgccctgggtaattattttgagagcctgaatatctgtataaacacttacttttgccataatgttacaaaattcccttagcagtttatattttccatattcagttatatttattaccttatgccatgacagccttatcatatcaggaagttatccaccatgatgattgcaaacaaactga

SEQ ID NO: 789570 - DNA, 622 bp, Homo sapiens
ttatttttaaaatgctgataaaactattagtacttaattcatataattgattcaagtattaaatgtattagtgattgcaaagcacttagaacatttcatggcatttagtatagccccaataaatgtctgcaattattatgcaaatatttattcatgaggcttggggctggacctcaccaccttttcataacaagcttactgggcctgggctggtgggtagagggaaataaatgaactaatggagatattagaattgaaaaagttctgtcattccaaataatagaatagagtaaatggtcaaacattttctctttgatattcagggagagcaagtgtaattgaaaatgatgacaacaccaaaaatgcttctgtttcaggattttctagttgaaagttcaggagttgaggataagaattatgctaatgaagattyttcactttttttcatttccccagtatcccaacctgtttactcttctgattgctgcaggacattcagtgtgagaaaaataattctatagataaactaccgacaaaccattgatttcaaagctctttaagaactgagtgattgatgcctgtcattaattcatatcctgatcacaataaggacgttttggct

SEQ ID NO: 789571 - DNA, 606 bp, Homo sapiens
cagagatcaatttgttttcttgagaatttgtaaatcaagttaaggaatcaagcatttttcttgtctttccaataggaattgaaacactgggtaaccaaacaataatttaagggaagaatgtctttaataaagagttctagcctaataagtgaaaatgaaaataaaagatatgacaaaatatcacaattgtgcagccctcagtgattaatagctataggcaataaactgatgaagagctgaaacattacataaagagagaaaaccaggcaatatatgcctcctgataatacactacatgtatggtcttgccaaagggatcaaacctgaatttgatcaaacctctagactccaatctgcagaaaatacagaagataagacagatatgctgattttcaccattaagtgttgacaactggcaaaatgtagagtatgggaaactacctatcagacggccgatgttgtatgatggataaattgtaataaaaatagagggataaggggaaaatccatagaattcaaaaagactgaaaagacatattggatttcagaatgagtaagaataagctatagttcragagctagcatcaaagtatgcacattttcagg

SEQ ID NO: 789572 - DNA, 566 bp, Homo sapiens
ttaagctctgttctgatttatattcttgtgcaataaactactctaaaacttgttggcttaaagtagaagaaaaacacaacattttattatgctcatgaattgtgcgtgacaaaaaattaacatagaatataatggggtatgaggttgcctattttctttatgtctgaaaactcacctgagagacatagcctaggagtgatttcacattggctaactccttcttatcctcctttgtgggttccagttcttcacatagaattatttaaatcctattccttgggatttcatacttttccaccttggtctgtagcctttsattgggtgattttatctcattgctttggttaatggctcgacaaatctatattggaagcacattttttctttcttgagcttcacacatgaatatagcagaaaagtgtaaacctaatatgttataagtgctcctttccaagtttgctcctctgactatattttttaatgagtgatcacatagttaggtaaatgtttcaaataagaaaactgcaagtaatccatttctcttaaacctaaaattcactgaaact

SEQ ID NO: 789573 - DNA, 566 bp, Homo sapiens
ttaagctctgttctgatttatattcttgtgcaataaactactctaaaacttgttggcttaaagtagaagaaaaacacaacattttattatgctcatgaattgtgcgtgacaaaaaattaacatagaatataatggggtatgaggttgcctattttctttatgtctgaaaactcacctgagagacatagcctaggagtgatttcacattggctaactccttcttatcctcctttgtgggttccagttcttcacatagaattatttaaatcctattccttgggatttcatacttttccaccttggtctgtagcctttcattgggtgattttatctcattgctttggttaatggctcgacaaatctatattggaagcacattttttctttcttgagcttcacacatgaatatagcagaaaagtgtaaacytaatatgttataagtgctcctttccaagtttgctcctctgactatattttttaatgagtgatcacatagttaggtaaatgtttcaaataagaaaactgcaagtaatccatttctcttaaacctaaaattcactgaaact

SEQ ID NO: 789574 - DNA, 595 bp, Homo sapiens
accttatgattcaggtactagttttgctgtcatcattgtgcagtggtgtgattgaaacttagaggcggccaggtgtgttggctcacaactgtaatcccaacatttttggaggccgagagaggttgcggtgagccaagatcatgccaytgcactccagcctgggcgacagagcaagactccgtctcaaaaaagaaagaaagaaacttagaggcattcatttaattacttgttcaaagtcactgtactagtaatgaccattgctgacattagactccaaagcagtctgattcttgaatccattttcttattgaacatactagaatcagtgaatttgtgcatgaataaatttctgaaaggcaataatgagcttctataatgtctttatatacctgtttatagcaaaacttacagctatttaaactttggtaaatggtagatgactgatggaaactaaaaataaatgatgaattcatgcctggaaatggcagagagattaattaaatcagtgtttctctgaacttgacaatttttaaaatcacttggaatgattaaaaaaatacacaccctgagcaacacccctgagtggtgtcattat

SEQ ID NO: 789575 - DNA, 628 bp, Homo sapiens
cttttgttgggcatgaattcatctacatcatttcttccacttaagtctcttcgcttcccttcctctaaaattaagtgatgcctggaatgcagactgtgccattttcttcatcccaccaagctccagagaatgtgaatatagcatgtgattgtggacagaccacctgagtgagtaaaaaaagtaaaartgtccttttcactcctctctggctgtgtgcattgggcaaggtacatatcctttctaagcatcagctttcttgggggtactgggaataaaattagtcatctagaagagatgaagagtaaattttgtaaggtaagtagttggtaccttaactaatgcttcttccttttaaattcttaccctctacatttgactctactaatagctccaggagccttacgcgagagtactatcagaaactttcttcctttgatatttccttatgctttgtgtgtcagaaaactacttatgaaagaaattacttgtatatgtgtgtgtatacaataatgtatattatacttacagttggaaaaataaagcaaaaaaagagcaggaataaaacaactaaaatagttaaaaatatctgaaaatgcttgtctatattgtccacaatccttatagaaat

SEQ ID NO: 789576 - DNA, 585 bp, Homo sapiens
actgtactccagcatggcaacagaacaagactctgtctcaaaaaaaaagaaataaagaaatctcactaaaagatagctcttatgtaagcttgtaagctattagctattacattctatgttcaagttcccttatagttggaagggtagtacaagttgtactcaaagaaaggtcaatggacgtgatattctggtagtacccagaagagaataataacgtaatatttttcttaatgggaattagttcattggcaataggctaaagataaggaaaaggtaaacaatccttactctagctatacactattaccatagataagattttggtgctgataactatattcaaacattttctccaacactttacagtgtcaagattagaatctaaataaccgtaactaaataatastgatgtaattaatgcaatgatcttttaatacccagagtattatcattattttgtcaagaaataaaccagtgattccttctctaattcagcaatacaaatatccctgcataaaagtttatattacctggtggaattctgatcttaaaagagaacataataacttttattattttttttga

SEQ ID NO: 789577 - DNA, 565 bp, Homo sapiens
ctgcaaggagctcagtttcctcagatgtaaatatggaatactgggctaaattataggttgctttatgttctaaagtattataatttaaacctgtagtctcatccttccagatacggcaaaataaggcagcagaaagaaaaatctcatgagattttttcctcagtgttctgcctaattcattcatgcatgattcacaatcacagtctacaacaaattaaaaatctattcactctcaatttacacatcttatccaggatacggcataacttaatatttatttccaagcctatatgtaaccactgtacctcaagtatagatgggtttctaacatacatattaacagcttatgtttatttccaagcctatatgtaaccactgtacctcaagtatagatgggtttytaacatacatattaacagcttatgtgccagttttgataaaggaagccattaaagtcaaactgttaccatataagccaaagccctctaccttgcatcacatataaaaagatattcagattgacggaatatgtataaatatgaaaaaagaagaaaatctaacatgt

SEQ ID NO: 789578 - DNA, 605 bp, Homo sapiens
tatgcaatcacaaattatattagtttgtcctattttgataacccttataattgaaattctacataggaaactttattactattttaaaacacacccataaaacattactgaggtggcataagtgacagcctcacagaactggtgatgaggacagaacagagctttgcatgaactgcttctaccagggaaattaaaaagcattacaggagggaggggtgaattcagtgcattttaatccaratcggagattaagccataactcttcacacttataaatttgttctttattacttttcataattaaggagaattagctaaacatgataaattggttctgatgtgaaaactagtgtaaccaactacacagcttactactgactggtagattcatacagtgaaaatctaatatgatttttaaatggaatggtaattacattctatgcataaaatgtagtgaatcttttgatatttaactttgaatgaacagagaaatgaaagcagctatatagccatctgaaatcattactttttgaacttgaaagagatattgacaacatcataacaacaactcaaacataatttgcagttggcacaaatctctactt

SEQ ID NO: 789579 - DNA, 575 bp, Homo sapiens
gacataattttatatgtggaaaaccctaaagagtttatttttgaaaacctgttaaaactaataaatgaatttaccaaagttgcagaatacaaaattaacacacaaaaatcaggtgcacgtatatacactaaccacaaacacttcgaaaaggaaatagttctactggggaaaagacctgaatagacaattttccaaagaaggtattcaaatggtcagcaggtatatgaaaaaagtgctcaacatcactaatcatcagggaaacaaaaatcaaaaccacaataaatgcctcacacctgtgaggatggctaatatcaaaaagataagagataacaaggattggtgaggatgtggaggaaagggaacccttgtacactgttggtgagaatgtaaattcatacatayagtttggaggaacctccaaaaattaaaaatagaattaccgtacgacccagcaatccctctattgggtatacacccaaaacaaatacaatcagcatcttatgcaaacatctgtgcttctatgttcaatgcagcattatatacaatagccaagatatgtgtccactgatagatga

SEQ ID NO: 789580 - DNA, 592 bp, Homo sapiens
ggaatctaaaaattaaaaggttgaatatacagagatagagaatgaaacagtggttactaggattaaggtagagggtatggggagatatatgtcaaaggatataaagcagcagatagataggctaaacaaacctagaaatataatgtaccacattaggactatagttactaatactgtattcaagatttttgctaattgagtagatattagctgctcttgccacgaaggagaaaaaatggttaactatgtgagatgctggatatgttcatttgcttcattctattaaccrttttgttatctacatgtatctgataacaccaacttatatgcaaaaaaaaatttaaaaagaacataaaactgtaaaaataaattaataaacaatcgcattggctcaccatacaagaagtgaaaactgatggtgctatatgtaagagaaaatagaaaaatccaccatcactgttgtagtcaaatttcatcctctcaacaactgataagtcaatcagaaaaaaaaggactcaatactttgagaaaactattaaaaacttgacttcatggacatatcaaccattgatttttaatgatatcactgcca

SEQ ID NO: 789581 - DNA, 629 bp, Homo sapiens
gtacaaatgaagaaagaacttgtgattaacttttgcttgcaacagaagttttacactggagtgatagcatagcctattgctgcagaaaagacaaagggacaaaataatgtgtgtgctctgcaagatggattctgacatgtaagcttgagaagtctgattagcagtgcagttttcaggttgttatcagcatttgatgcatttcttaagcatttatgaatagatttgttcagaaagatggtttgtttatgtgttgttcaagcaaggacataatggcaaaatcactgyatcatctcctattaccaattcctctgaaccatccagttcccatagaagccatttgagaaacgttaactactccctaaagggagagttgtagaggaacctgcatttacaggtcattagttaccttctgcattacattacctgttatttttagataatctcactaatctggtattcagggtaatttctaaataatttagtccccagatgtatttggatttccaaattcagacccttaggaaagtacacagggaaatctcagatagagcaaaattgatgactcgtgccaacgaatttcccattctgaaatacaaggtagttcatctagtgtagatcttttttttttc

SEQ ID NO: 789582 - DNA, 514 bp, Homo sapiens
tatcccctatgaaagcccatgaaagcaaggcatgagactagagtcagtgtaaaggtaatttattcataaagcaatttcagggaaaaggagtgaaacctgaaaaaagtaaagcaaaaaaggaagaaaagcaaatacaagggtgtattaaccatgcctttttattatttgtatttctgatgctttgatatctgggcctttgctgaccctagagggactgcccctcccaaggttagcccattaccagagatagctggtaagaggtctcctggaagcgtgcttttcatatgccaactwaccaatccagcacccacacctgatgactgcctcatttaatggctcttacactccatgccattattcccctcctctaatacccccagggccaggtactacactgttaagagtcaacccccacacagaggagcctgctgaaatcattccaaccagccaaccctaaccctttctgccctgcttatcctacctggtccattctttcctgcaaaaaacacaataa

SEQ ID NO: 789583 - DNA, 620 bp, Homo sapiens
ttaaatcgtttttaatctgtgttttcacgttgggttatttttattcatgtgtgtccactcactgacaacttttcctttttgctctaatctgctgttaattccatgcaatacatattttcaaattaaaggcattttttattaaaggcattttttattaaggcattataatttccattatagatttttcacctttatcatttttaatagtttcaatttatttggtgacactccatctgttcattcattatgacaatgtttttcttaaagttcctgaatatacttataatatctattttaacatycttgtcttctaattttactatgtagatcatcttggggccttttctgttaatcctttttcatcttgactatgaataatatttaatattccttcattctctggtaacttttattttaggctggagattgtaataatccaagaagtttggattataatgtttccatttaaagagtgtagaattttgttttggtaggcaactaaattattgcacaattacttaatacctgttgtctattttgtatttttattttttagagtggatctattttaagctttagcttagttctacagcatgccgcttatagattatggctcttac

SEQ ID NO: 789584 - DNA, 620 bp, Homo sapiens
ttaaatcgtttttaatctgtgttttcacgttgggttatttttattcatgtgtgtccactcactgacaacttttcctttttgctctaatctgctgttaattccatgcaatacatattttcaaattaaaggcattttttattaaaggcattttttattaaggcattataatttccattatagatttttcacctttatcatttttaatagtttcaatttatttggtgacactccatctgttcattcattatgacaatgtttttcttaaagttcctgaatatacttataatatctattttaacattcttgtcttctaattttactrtgtagatcatcttggggccttttctgttaatcctttttcatcttgactatgaataatatttaatattccttcattctctggtaacttttattttaggctggagattgtaataatccaagaagtttggattataatgtttccatttaaagagtgtagaattttgttttggtaggcaactaaattattgcacaattacttaatacctgttgtctattttgtatttttattttttagagtggatctattttaagctttagcttagttctacagcatgccgcttatagattatggctcttac

SEQ ID NO: 789585 - DNA, 633 bp, Homo sapiens
aatacctagcaatccaatttacaagggatgtgaaggacctcttcaaggagaactacaaacactgctcaataaaataaaagaggacacaaacaaatcgaagaacattccatgctcatggataggaagaatcagtatcatgaaaatggccatactgcccaaggtaatttatagattcaatgccatccccatcaagctaccaatgacttccaatgcttttggaattgggaaaaattcttcacagaattggaaaaaactactttaaagttaatatggaaccaaaaaagagcctgcattgccaagacaaacctaagccaaaagaacaaagctggatgcatcacgctacccaacttcaaactatactacaaggctacagtaaccaaaacagcatggtactggtaccaaaacagagatatagacaaatggaacagaacagaggcctcagaaataacgccgcayatctacaactgtctgatctttgacaaacctgacaaaaacaagaaatggggaaaggattccctatttaataaatggtgctgggaaaactggctagccatatgtagaaagctgaaactggatctcttccttacaccttatccaaaaattaattcaagatggattaaagacttaaatgtt

SEQ ID NO: 789586 - DNA, 714 bp, Homo sapiens
ggatccatgagaacaaggtgggcttgggggagacccattattaggagataatgagttatagggaatctctaaccagtcatgggactgcacctattaaaccataggttaaagttctgatgagaaacttcgaaaattaaaccagcctcattattaaatgagaccattcttggagggatttttcttttcaaacactcaaagagatgaaggtctctccaaacctcacctccaccactgctttccgtctctgcgctctataaggttctgcagcatcttgctagtttagctcaggtaaagccagggggagagctgggagggaaggctggagtggcagtccctgacacgctctgggaaagcctgtgttcctcagtgacatagcttagaagtggggagaatccacctgcctgttcctgcagggactttttgcaactaacttgatcaggagatttgaaaggaagrctggtgctaactgaacagggaggtgcctcggggaatcctgggactggaaaatcccttgctataccctctagtataactcccagcccttggaaattagtgccatttcaagagaatcaagtcactggcctgtgactgcgatgctgggctacttaggaaaaccatctcaattggtgttactaagtttgaagaaagctcttctaaggagaggaatctagaaacaagagttgagagagccctcttgaatttccctcctaccca

SEQ ID NO: 789587 - DNA, 543 bp, Homo sapiens
tttgagcacctgtaccaaaagatgtgctagacagaggaatgaggataaaatttgaattcttggccacaggattgaggttagtagtggaggaagagtataagctcctcctaaatctacagtgtttgaagttcttcagaaataagtctaggtcatcagtatttttaaaaaatgtgttacatgcatgatgcactatttttgtgtcgagaaaaacaacaaaatgcatattttaaagagagatgagcatgtggggagctctgttgactttgactgcagctactgaaagtagctgacagacaaggataaatagagatcaaattttatataaagtaactcaatttttcttatgaactagattgacttacatcctgtaaaatatgagatttgtgtccaytacctacccctaaaacccacaattgcatgtcaccaaaatacagtctctgaagagttcttatctgtggttatagggctgacactgctggcggcattgccactgggtctgtcactgaacagtaccttgatcttcatggtgctgggtgctagggc

SEQ ID NO: 789588 - DNA, 590 bp, Homo sapiens
gaataaaatgagctagctagagaaaggcacacagtagcggatccttttgtaccataacattttttggggtgggtgggcaggataactactctgtgttataattattttatgacagaaagtttgttatattgtattttcagttaaccaggatatcttatgctgaatcagctcctcaggggcctcacaattttcaaaaagtctgagatcctgttgcctgggccagtggatagcaggttaaacctttggcacatttctcaccctccaggaaagaggtggtgctgtctcaggaccaggcctagtccagaaggtttcagcggtgcatactgaacgagatacggaagaagtgggcagggagagacctttcagacttctgctctctgaagttctaggctattaattatatctgaggctctaggaaccttttagaggcatcttgggattctttgtagggagcmgaggaggaatgcaattattcaacttcatattgcaagtggagactttaacattggcagggttcaagtctcaagcctcaaatttggagcataaaataagcctcaggcatgttcagaaacctaaatgtttggacaata

SEQ ID NO: 789589 - DNA, 557 bp, Homo sapiens
gtgtgtgatatacatgatgcttacaaatatatgaattatatatacaggttaatatacaaaagtttattgacttatttacgtacatatatatggattgatcttcaaaacatcatattgagtggaaatatcatgagatatgttaacatacaatcaacctgggaggtggaggttgtggtgagccgagatcgcaccactgcactccagcctgggcaacaagagcaacactccatctcaaaaaaaaaaaaaaaaatgtaggtacacaagacagcaataaatagttcacattactacacacaaagagaaacgtgcattttaaatacattasaatggctacctattaggaatgccaatagaagtggagtctgggaataaaatacataaatgaaaaaatgttttcaagtgttcttgcatggactgatgataatacacccagactgaagaataagacaacctcaaacctctcttcactcccaccctccacaggaaaccagcacagtaaacttacctgttctaacacttgctgttattgacagttaagggcggaacatgaggtaagg

SEQ ID NO: 789590 - DNA, 533 bp, Homo sapiens
gagcccgctgattatccaaagaacaaaggcttctttgttaggccttgctcccttatctctgcagctaaagctaaatttttccccaggctgctctatctgtgcctgtagctttgattttttcaggctatttctctgtttgaaggagttttaccaaggacccctcctaactgtctgcctaaccagtttcttttccttcttctctctctgaactttctgtcttgtggaagacagmtaagacagagctactaagacagacctactgccaaacactccctgggactgtggcttctaggaagctacaggcctaagggtctgagaagattcggcacagcctatgaccagtggctgagccaagctgcccccaaatgcatgactgaatctgtgatagtcctgatatcaccatgatgtatgagcctcaagattatctcagtaaatcttggctcagaactggggactctggaagaactggcaaaagaacacacagaactattaaatatggagagatgagtgcagagagaaaaaaatgggctatt

SEQ ID NO: 789591 - DNA, 685 bp, Homo sapiens
aaagtttaaaaggtagcagggttgtgttgagcctaaagatctatactgatttatcataacgaactgtgttattattttttagtaaaatagaaaatctgggtaataatggtagtaaatctataacagcaacttagtatttgaaaggtggaaaaaattctaaacctttgaattatcaacattgaattctttatataarttttggttattttgctcttctagttttctttggtagtcttataattttactaaatcaaacatcacaaatattaacctctgtttcatcggatatattttcttaaaccagcataatcaaagccattttatttctctttggtcctctaggactaaatatatcaccactcattacagcaacgttgtttgatggtaaagaaaattctcttttatttttgaagtaaaattactggacacaaaaatatgttacactaaagagaactttttaatttttgaaattgaaagctcagttatacaaatcaccagaaactggtaagtacagtttgcagtaatttctgtctctgatgaaatcttggtttattttttcttaaagaatacttaccatggaaatgtactttattaaccacaccctgatagattcccatgtcaaaaatgcaacaggagttgctggttgccaatgagacaataagataaacaaaaagtacctcataat

SEQ ID NO: 789592 - DNA, 685 bp, Homo sapiens
aaagtttaaaaggtagcagggttgtgttgagcctaaagatctatactgatttatcataacgaactgtgttattattttttagtaaaatagaaaatctgggtaataatggtagtaaatctataacagcaacttagtatttgaaaggtggaaaaaattctaaacctttgaattatcaacattgaattctttatataaattttggttattttgctcttctagttttctttggtagtcttataattttactaaatcaaacatcacaaatattaacctctgtttmatcggatatattttcttaaaccagcataatcaaagccattttatttctctttggtcctctaggactaaatatatcaccactcattacagcaacgttgtttgatggtaaagaaaattctcttttatttttgaagtaaaattactggacacaaaaatatgttacactaaagagaactttttaatttttgaaattgaaagctcagttatacaaatcaccagaaactggtaagtacagtttgcagtaatttctgtctctgatgaaatcttggtttattttttcttaaagaatacttaccatggaaatgtactttattaaccacaccctgatagattcccatgtcaaaaatgcaacaggagttgctggttgccaatgagacaataagataaacaaaaagtacctcataat

SEQ ID NO: 789593 - DNA, 553 bp, Homo sapiens
taaagagaactttttaatttttgaaattgaaagctcagttatacaaatcaccagaaactggtaagtacagtttgcagtaatttctgtctctgatgaaatcttggtttattttttcttaaagaatacttaccatggaaaygtactttattaaccacaccctgatagattcccatgtcaaaaatgcaacaggagttgctggttgccaatgagacaataagataaacaaaaagtacctcataatttaggatctcattgcgctgttactgaactaggaataaacagatatgtttctcagaacaactgtctatttttatgcctctagagatgacatgggttaactttcttgtgtggcttataaactgaaaaaaatctaataatgcagtattgtttaggcacccatagagactgctctgggaagaaagacacatataagttctaggaggtttgtcttaaaatattacgaatattattttacatttgaaccgagtatttttgaaagtgcactttattatacaagtataatagttacccttccatacgagctcaataaaat

SEQ ID NO: 789594 - DNA, 553 bp, Homo sapiens
taaagagaactttttaatttttgaaattgaaagctcagttatacaaatcaccagaaactggtaagtacagtttgcagtaatttctgtctctgatgaaatcttggtttattttttcttaaagaatacttaccatggaaatgtactttattaaccacaccctgatagattcccatgtcaaaaatgcaacaggagttgctggttgccaatgagacaataagataaacaaaaagtacctcataatttaggatctcattgcgctgttactgaactaggaataaacagatatgtttctcagaacaactgtctatttttatgcctctagagatgacatgggttaactttcttgtgtggcttataaactgaaaaaaatctaataatgcagtattgtttaggcacccataragactgctctgggaagaaagacacatataagttctaggaggtttgtcttaaaatattacgaatattattttacatttgaaccgagtatttttgaaagtgcactttattatacaagtataatagttacccttccatacgagctcaataaaat

SEQ ID NO: 789595 - DNA, 671 bp, Homo sapiens
tatgaccctgaaggagatgaaagaccattttgtcctgtgtagacattttcacaaactttcttattgcctgttttttctcctgcaaatgcatttatttttccaaaaagtcatttgtttcccataagtgcctttatccctttacttattaaaatggtatataagccccaaattctaaccacccctttgagttactcatcaccaagctctcccacatgtacgcatgttgcatgaatgaataaacattgtaattttctcctgttaatctgttttttgttagtctgattcacgggccctggtggctaaacataaagaaggcagaagaaagttttttgccccctcccctacatattatatttctatctgtgctatgtttataaggataatagacttttttcccctcaagaagaaatttcatttcctgggaaaacaatattacyctcattgagaatgtatgagttaaaatacaaaaaacaaccccatattaatggtcaaggaagaaagctatagtgtctaggaagtttagtaggtcaaaatcctggtagtagcaattcagatacacaaacaaacctgttgatatttcatgggttatttaccacaagggctgttttgagtttcatgcctggaatagaaatgagcaggcagttctggccccaaaaatgcccatcaaaaga

SEQ ID NO: 789596 - DNA, 644 bp, Homo sapiens
attactgagtattaaggtgactagtcttctgacgtgtgtaacatatataataccacttctgcaactctcctgatgtctgcctttgcaccattagtaccgcctctctccagcagaacacactgaaggatggaagatgattaagagcatgggtaaagtaccacagaaaaagacagctaatactaaattaagctaattattaagctagaactaacacctgattacctgcagcatatctggctataaaatcctcaacctctattaccagatcagtcaaaagtggagaatttctgtcaaaacctgtatttatcaagaatacataaattcagactagttttctaataaataatctactcctggttaactcrgaccaatacctggtattatactttgcccatcttcttcctagttttcaaagaagtcccttctaaatgtctaaattctagtgcctttaccttataaaaacctagggtgtaattcttcagatcacaggtgggtggagaactacaaccacagaagcaaatacactgacttcccagactctcaggtatattctaataggaccgtagttaaagctttaagccagaagcagatggaaagcatcaccatccccaactctcccaaagacacctgttttaaacttccta

SEQ ID NO: 789597 - DNA, 601 bp, Homo sapiens
agctcaggactttgaaaccagcccgggaaatatagtgagacccgatctgcattgtgtaaataaaaaaattatttattagaaaaaagagaaattaagataactcgactgtgactactctgaaagatggtatctgcgggaataggcatatttgactatgagaaagagacaaattaattctttaacatatattctgaagaagctgragatgtatatgcagtaagtatatcattctaaagatacttaagtttttttggaatttggtaaaaatcaaagaaaatcagagttgaccgtagcaaaataaaattataggtatggaaggtctttttgatgaactggaaatgtatccctttaagcactaaaactcaattttaactatttttgatacccttttgaaacttcattatccactttcctgagttattaaacagcatatggatcaatgcaatcttggcttgatggctttaggtggtgaccagtaacagcaataatcacaagcagcatttgttgtgtgcccacttcatgtctgataccattctaagtgctttactatcacatttaagcctcaggatccaacaaagtgggtactattaacctcatttta

SEQ ID NO: 789598 - DNA, 601 bp, Homo sapiens
agctcaggactttgaaaccagcccgggaaatatagtgagacccgatctgcattgtgtaaataaaaaaattatttattagaaaaaagagaaattaagataactcgactgtgactactctgaaagatggtatctgcgggaataggcatatttgactatgagaaagagacaaattaattctttaacatatattctgaagaagctggagatgtatatgcagtaagtatatcattctaaagatacttaagtttttttggaatttggtaaaaatcaaagaaaatcagagttgaccgtagcaaaataaaattataggtatggaagrtctttttgatgaactggaaatgtatccctttaagcactaaaactcaattttaactatttttgatacccttttgaaacttcattatccactttcctgagttattaaacagcatatggatcaatgcaatcttggcttgatggctttaggtggtgaccagtaacagcaataatcacaagcagcatttgttgtgtgcccacttcatgtctgataccattctaagtgctttactatcacatttaagcctcaggatccaacaaagtgggtactattaacctcatttta

SEQ ID NO: 789599 - DNA, 565 bp, Homo sapiens
cccaacggctaataactgggaaaagattcataatgcctaatactttctccaaaaaggttgtttttagggtcaagactcaaaataacttagctcaaactaaaaactatttcctaagaagccaggtggtaaagaacttacattttcctatcctctccctggtttgctgagcgaatatacgggactacatattacacagataagaaatttggctgaraagtgggctaaagaaatcatttctcatccataaaaatgaaaactttgtatgtctttgtaacaagttccattgtattggtatttctataataagaaaatcattatgtatcttattttaatttgaagatggaatgagattaaataccatttgaattattaatatttcatttccttatgctaatacctgaagctctttttctaagagcaagttcttgattatgaaaagtgttttttaccgaaaaagccaatgaaaaccaaaaagcaaacgtcaggcctaagagacctagtatatttttaatgttcaataacaaattttaaaatcataaatgttttaacagagaaccaaatagtc

SEQ ID NO: 789600 - DNA, 565 bp, Homo sapiens
cccaacggctaataactgggaaaagattcataatgcctaatactttctccaaaaaggttgtttttagggtcaagactcaaaataacttagctcaaactaaaaactatttcctaagaagccaggtggtaaagaacttacattttcctatcctctccctggtttgctgagcgaatatacgggactacatattacacagataagaaatttggctgagaagtgggctaaaraaatcatttctcatccataaaaatgaaaactttgtatgtctttgtaacaagttccattgtattggtatttctataataagaaaatcattatgtatcttattttaatttgaagatggaatgagattaaataccatttgaattattaatatttcatttccttatgctaatacctgaagctctttttctaagagcaagttcttgattatgaaaagtgttttttaccgaaaaagccaatgaaaaccaaaaagcaaacgtcaggcctaagagacctagtatatttttaatgttcaataacaaattttaaaatcataaatgttttaacagagaaccaaatagtc

SEQ ID NO: 789601 - DNA, 565 bp, Homo sapiens
cccaacggctaataactgggaaaagattcataatgcctaatactttctccaaaaaggttgtttttagggtcaagactcaaaataacttagctcaaactaaaaactatttcctaagaagccaggtggtaaagaacttacattttcctatcctctccctggtttgctgagcgaatatacgggactacatattacacagataagaaatttggctgagaagtgggctaaagaaatcatttctcatccataaaaatgaaaactttgtatgtctttgtaacaagttccattgtattggtatttctataataaraaaatcattatgtatcttattttaatttgaagatggaatgagattaaataccatttgaattattaatatttcatttccttatgctaatacctgaagctctttttctaagagcaagttcttgattatgaaaagtgttttttaccgaaaaagccaatgaaaaccaaaaagcaaacgtcaggcctaagagacctagtatatttttaatgttcaataacaaattttaaaatcataaatgttttaacagagaaccaaatagtc

SEQ ID NO: 789602 - DNA, 631 bp, Homo sapiens
ctactttgatacataaatgtataaatctgaagaatctaaacccagttgtaaataatcaccactttgtaagagtcgttgcttcagtggctggcttaagtatttttggtggaatgtactcctcaacatttgaacttgacttttttttggtcatgcatgtagaaaaggtttaccgattatgagcaarttagtagaagttgaagaaccaattacttagaggtttatttcctggaactactgccttcaatttcttgtgcagttgcatagagaggaatagggtgaggcattacaggtttccataaagctatcagtccctctcttaacttttcagtcagactcacatcttcacccactgtccaacatccagacacaacaggcagtgagcagaccaactttgttcctggtgttctccctcttctctctgggtttcttttttcttttcagtttcttctctgggcttctttttttctattcagtttcttctctggttttcttttttctattcagtttcttctgtgggtttctttttctattcaatttcttctctgagtttcttttttctattcaatgtcttctctgggtttcattttttctattcaatgtcttctctgggtttcattttttctattcaatt

SEQ ID NO: 789603 - DNA, 631 bp, Homo sapiens
ctactttgatacataaatgtataaatctgaagaatctaaacccagttgtaaataatcaccactttgtaagagtcgttgcttcagtggctggcttaagtatttttggtggaatgtactcctcaacatttgaacttgacttttttttggtcatgcatgtagaaaaggtttaccgattatgagcaagttagtagaagttgaagaaccaattacttagaggtttatttcctggaactactgccttcaatttcttgtgcagttgcatagagaggaatagggtgaggcattacaggtttccataaagctatcagtcccyctcttaacttttcagtcagactcacatcttcacccactgtccaacatccagacacaacaggcagtgagcagaccaactttgttcctggtgttctccctcttctctctgggtttcttttttcttttcagtttcttctctgggcttctttttttctattcagtttcttctctggttttcttttttctattcagtttcttctgtgggtttctttttctattcaatttcttctctgagtttcttttttctattcaatgtcttctctgggtttcattttttctattcaatgtcttctctgggtttcattttttctattcaatt

SEQ ID NO: 789604 - DNA, 611 bp, Homo sapiens
ggctctgtgtccccacccaaatctcaccttgaattgtaataatccccacgtgtcaagggtgggaccaggtggagataattgaatcatgggggcggttcccccatgctgttctcgtgatagtgcgttctcctgagaactgatggttttataaggggcttccctgccctttgctcagcactactccttgctgcggccatgtgaagaaagatgtgtttgctttcccttctaccatgattgtaagttttctgagaccttcccaggtctgcagamctgtgagtcaattaaatacccagtcttgggtatttcttcatagcagtgtgagaatggacgcatacagaggctgaatagtgaatggtcttgtaaattgtaataccctaaagataaatagaccatggattagctgcagttatggaaaatataaactattgtgattccacaatgatagcctgagttgaaccatttccaaagagtagagacctttcaattgatctgtagcaggcatctgaaatctttttctttttttttcatatcccctcgtttgttcaatcaccggttattggtttgcctttaaatcttcagactctgctcactttaaattagaatataatgaa

SEQ ID NO: 789605 - DNA, 627 bp, Homo sapiens
accaaaattataacactactaggttttagactaataattgcttttaaaaaatgtatcagtctcttacatcatggaggaaacaaaaagcagagttacaaaccattgttasaataacaccagcttttataatcgcccttctttacctttactgagatttttatttcttcatatggcttcaagttactgtctaatgtcctttcatttcaacctgcaggactccctttagcatttcttgcagggcagttctagtggtaatgaactccctcaacttttgtttatctggaaatgtcttaatttctccttcatttttgtaggacaatattgctggataaatgattcttgttttttctttttgcactttgaatacatcagcccactgcattttggcctttaaagtttctgatgaggaatatgctgataatcttattattgttcccttgcttgtgatgagtcacttcccttgctgctttcaagctcctttttttgtcttttttgaaactaagctttcaaaagtttagttaaaatttgtctcagatgcatagtttgcaaatattttctcccattctgtaggttgtctgtttactctgttaatagctttttttttttttttttttttttttttttttt

SEQ ID NO: 789606 - DNA, 622 bp, Homo sapiens
tgaatatttactgcagcactattcacaatagcaaagacctgaaatcaacctaaatgcccatcaatgacagaatggataaagaaagtgtggtgcatatacaccacggaatactatggagtcataaaaaaaagaatgagatcatgtactttgtgggaacttggataaagctggaggatgttatccttagcaaactaacacaggaacagaaaaccaaataccgcatattctcacttataagtagggttaaatgataagaacttatgaacataaagaaggaaacaacagacactggagtctacttgagggtgggaggagtgaaagragcaggaacagtaactattgagtactggtcttgatacctgagcgatgaaacaatctgtacaacaaacccccatgagacgtgcttaactatgtaacaaagccttacatgtacccccaaacctaaaataaaagattttttttttgagacagtgtctcactctgtcacccaggctgaagtgcagtggtacagtggcgcaatctcagctcacagcaacctccacctcccgggttcgagcaattcccctgccgcagcctcctgcatagctgggattacaggtgcctgccaccacgcatggctaat

SEQ ID NO: 789607 - DNA, 622 bp, Homo sapiens
tgaatatttactgcagcactattcacaatagcaaagacctgaaatcaacctaaatgcccatcaatgacagaatggataaagaaagtgtggtgcatatacaccacggaatactatggagtcataaaaaaaagaatgagatcatgtactttgtgggaacttggataaagctggaggatgttatccttagcaaactaacacaggaacagaaaaccaaataccgcatattctcacttataagtagggttaaatgataagaacttatgaacataaagaaggaaacaacagacactggagtctacttgagggtgggaggagtgaaaggagcaggaacagtaactattgagtactggtcttgatacctgagcgatgaaacaatctgtacaacaaacccccatgagacgtgyttaactatgtaacaaagccttacatgtacccccaaacctaaaataaaagattttttttttgagacagtgtctcactctgtcacccaggctgaagtgcagtggtacagtggcgcaatctcagctcacagcaacctccacctcccgggttcgagcaattcccctgccgcagcctcctgcatagctgggattacaggtgcctgccaccacgcatggctaat

SEQ ID NO: 789608 - DNA, 697 bp, Homo sapiens
tctttctagattaacatccttccaccagaagttcagacccagttcccagggcacctactccattaagcctttcctgattttctccagctacaatttttcccttctattcactccttcttacgaaacattcacactctttgtggtattaggaatgatttatatacagctgtattcttctctaccagatgtaggcaaaaacctcagtttactcatatttctatctctctctcctctccaccccaaggtccagatagagtctcaatttttaatagatgttcattaaatatttcttaggttaacaaaaagcatataaatttacttcactatgctggtctctctttatataaaaatgactagaggccagtgtggtggctcatgcccataatcccaatactttgggagtccgaggcaggaagaccacttgaggccagaaattcaaatttagctggccatgaaggcacatgcccacagtcccagctactcgggaggctgaggcaggaggattgcttgagcccaggagggtaaggctgcagtgagctacattygcacccctgcactccagcctgagtgacagagcaagactctgtctctaaaaaaaaataaaataaaataaattagtataggaaagagtgatcatattggctaactagcttgagatcacctaaaaaaaaggatagcaaatatttattacaaaatt

SEQ ID NO: 789609 - DNA, 550 bp, Homo sapiens
gaagggtgggcgggccttccatagattgggaagatcctccagataattctgataaatggcaattttgaaagaggacgctagcttaaggaaggggggtagtggagggaaggtttaaatctaatgggaggtaggctgtsggggagggaggtgagggcagaaggaacttaacataaatctggggagagggatacttggctgcagggccagcctggggtaagcagaaaggctggcatgtcccaaagcccagggaaaggcataaccctacaaaagggcaaggagcacattggaggtaatgggagacatggacagatgacgtgaggctggagggctaggggggagttcacaattgatggccgaggtgtttatcagtgaactaagagtggatgttgtcaactgatagggacgagagtttgagggtaatgataaactctgggaattgggggaaaagggccagcatgaattagcaaaactgactggtaggcagcagcagagggggccctgccctgctgagctgtgaactatacatttgtgatggaagaaactggtagtt

SEQ ID NO: 789610 - DNA, 620 bp, Homo sapiens
cctgaaactcttctaatcacctccccagttcctcaggttttagcccagcaaacactcagagagtttcctggaggaaattagaaagaagaaagcaaagaagtagagatggtttaccaggcacaatctggctgactgctaagggcacaagacccagcccacgggatggtgggcactgtawactgctccctccacacccccagccctgggcagcctgcacatgtgaaagtcccccccatggaaaggtgggctccatggcaattccagcatctggtgtgctcctcggggcctggcatcctgccacagaggctgtggtcacatgggagtgcttcctgggccacaggcaggaaggtgagcccacagccgtgtacccctggcacctggacaaggcttgctggggtcccctgccggtggagtgctgccttcttgggacaaaggctggacctggaggcaaaagaagttcctctctgagtgcacgggggccacagctcaggtacaagaacatgagagccagaatagttgccacctgtggatttcaggaagtgcctcaaagggaccagcatgctcctcttcttgccctttcctcctttgctttgctggccagaggcagacaggaccgatgg

SEQ ID NO: 789611 - DNA, 620 bp, Homo sapiens
cctgaaactcttctaatcacctccccagttcctcaggttttagcccagcaaacactcagagagtttcctggaggaaattagaaagaagaaagcaaagaagtagagatggtttaccaggcacaatctggctgactgctaagggcacaagacccagcccacgggatggtgggcactgtaamctgctccctccacacccccagccctgggcagcctgcacatgtgaaagtcccccccatggaaaggtgggctccatggcaattccagcatctggtgtgctcctcggggcctggcatcctgccacagaggctgtggtcacatgggagtgcttcctgggccacaggcaggaaggtgagcccacagccgtgtacccctggcacctggacaaggcttgctggggtcccctgccggtggagtgctgccttcttgggacaaaggctggacctggaggcaaaagaagttcctctctgagtgcacgggggccacagctcaggtacaagaacatgagagccagaatagttgccacctgtggatttcaggaagtgcctcaaagggaccagcatgctcctcttcttgccctttcctcctttgctttgctggccagaggcagacaggaccgatgg

SEQ ID NO: 789612 - DNA, 620 bp, Homo sapiens
cctgaaactcttctaatcacctccccagttcctcaggttttagcccagcaaacactcagagagtttcctggaggaaattagaaagaagaaagcaaagaagtagagatggtttaccaggcacaatctggctgactgctaagggcacaagacccagcccacgggatggtgggcactgtaaactgctccctccacacccccagccctgggcagcctgcacatgtgaaagtcccccccatggaaaggtgggctccatggcaattccagcatctggtgtgctcctcggggcctggcatcctgccacagaggctgtggtcacatgggagtgcttcctgggccacaggcaggaaggtgagcccacagccgtgtacccctggcacctggacaaggcttgctggggtcccctgccggtggagtgctgccttcttgggacaaaggctggacctggaggcaaaagaagttcctctctgagtgcasgggggccacagctcaggtacaagaacatgagagccagaatagttgccacctgtggatttcaggaagtgcctcaaagggaccagcatgctcctcttcttgccctttcctcctttgctttgctggccagaggcagacaggaccgatgg

SEQ ID NO: 789613 - DNA, 657 bp, Homo sapiens
ggtcctcaccccaccaccagcaggtctcggccctgtgcctcataggttcccagccttcccctgcttgggccctgggtttggctctggggctgacagcccgtgccttgactgtggcatgtgggctgtggctgccaggtcaggaagaatcagtggacagttggtcacaagcaccctggtcccaaatcttgaaatgctcacgttcttcaacttcttcaactactaccccacccctccaggccttttcctctctctgacrgcttcacttcaccccagtgtctcctcctcctcctcagaagtggccgttccccagcatttggagcccaggacccctcccagccctgaagcatttgcctcccagcctcccccgaaccttgctcccctactgccaccccctgtctgtcccggaggaggcctcatagacacttgctgcgtgccactccaaggaggctgtggtgctcctgccaactctccagtggctgccacaactgctgtcttcaggaggaggagggatggccccctcagcctccctgcctctgctatctcagccccagcgtcccggcatcatctgctccacctccaggcaagtcagagccaggcttgccatctgcctggcagcctggggcactgtgcctttatggctcccgggtaggacgtgga

SEQ ID NO: 789614 - DNA, 657 bp, Homo sapiens
ggtcctcaccccaccaccagcaggtctcggccctgtgcctcataggttcccagccttcccctgcttgggccctgggtttggctctggggctgacagcccgtgccttgactgtggcatgtgggctgtggctgccaggtcaggaagaatcagtggacagttggtcacaagcaccctggtcccaaatcttgaaatgctcacgttcttcaacttcttcaactactaccccacccctccaggccttttcctctctctgacagcttcacttcaccccagkgtctcctcctcctcctcagaagtggccgttccccagcatttggagcccaggacccctcccagccctgaagcatttgcctcccagcctcccccgaaccttgctcccctactgccaccccctgtctgtcccggaggaggcctcatagacacttgctgcgtgccactccaaggaggctgtggtgctcctgccaactctccagtggctgccacaactgctgtcttcaggaggaggagggatggccccctcagcctccctgcctctgctatctcagccccagcgtcccggcatcatctgctccacctccaggcaagtcagagccaggcttgccatctgcctggcagcctggggcactgtgcctttatggctcccgggtaggacgtgga

SEQ ID NO: 789615 - DNA, 620 bp, Homo sapiens
tctcacctgcattgttaaagaagggagagagactcattacttcaggccctgctaattaagaatcaccatcatgggaggctgaggcaggagaattgcttgaacccaggaggcagaggttgcagtgagccgagatagcaccactgcactccagctagggtgacagagtgtgagactccgtctcaaagaaaaaaaaagaactgccttcagattggcctaggctgaattctgccttcattctaggactggcgagctggctcacctgaaggcagccttttctatcttggccttacaggagcattgtgggtgggattcctagccattcctttcttggggctccataagtactgggagtgggagccccctgagccaagcatggtgcctttgagctacaaacacctggcaagtgcaggacgaacygccgtggccggactctgagcagcttagatatgcagcagccaactagcgaagaagcggaagtgtaacttggattccagtgaagaatgaaaggcccctaagcaagggcagcagtccaactatccatgtcgacacaagtgatgggaactaactctggcttcactcagcctcagtaaacctccaaaggcaccgttctggagggccat

SEQ ID NO: 789616 - DNA, 645 bp, Homo sapiens
aaccctgaatgcaggcagagaagtctgtcacagaggcccctggggacagtggacgctggctctgtgggccgaccaaggagcgagaccagctggagcatgtcaggggatggtgggtgtgattggagaggagggcggtcacagcaggtgaggttgtgtccctctcctaatatgcagggccagcctttgaagttcatttcttcagttcaggtaaagtcaatacgattgatttctagacctatagacctatgtgaagtatctcaaccaaagagatgtttatctccaacctaagcatagctctattttatttctccttttgtttttkggaatcattaaagataaaactactcccagccattacaactgtcatgatgacataaaatactgcatcagaaatagtaaccagggtctttatactgttgtttatttcattacttggaatgaaaatgacaatctaaggtgaagagatggacttggtttgtctgaaatagggaaacatctaggtgtagattttcagatctcacaggggacaaatttcttcatctgcagaggaggaaataaacaggatctgtgtagctcttggatgaccagctcaatacatggatgctggaggtgaagggagctctctagggaaagtttgatggctgc

SEQ ID NO: 789617 - DNA, 645 bp, Homo sapiens
aaccctgaatgcaggcagagaagtctgtcacagaggcccctggggacagtggacgctggctctgtgggccgaccaaggagcgagaccagctggagcatgtcaggggatggtgggtgtgattggagaggagggcggtcacagcaggtgaggttgtgtccctctcctaatatgcagggccagcctttgaagttcatttcttcagttcaggtaaagtcaatacgattgatttctagacctatagacctatgtgaagtatctcaaccaaagagatgtttatctccaacctaagcatagctctattttatttctccttttgttttttggaatcattaaagataaaactactcccagccattacaactgtcatgatgacataaaatactgcatcagaaatagtaaccagggtctttatactgttgtttatttcattacttggaatgaaaatgacaatctaaggtgaagagatggacttggtttgtctgaaatasggaaacatctaggtgtagattttcagatctcacaggggacaaatttcttcatctgcagaggaggaaataaacaggatctgtgtagctcttggatgaccagctcaatacatggatgctggaggtgaagggagctctctagggaaagtttgatggctgc

SEQ ID NO: 789618 - DNA, 612 bp, Homo sapiens
tccatcataccacctcctcttgctcctaggcgagcctaacttcctttggaaggggatatccagccacctcctggtagatagtatctggcacgacagtcatatgctgcacaggtgtgtggactaggagcaataggccataccctacagcctaggcatggagtaggttgtaccatctagattgtgtaagttcactctgtgatgtttgcacaatgacagaatcacctatggatgcatttctcagaacatatcccttttgtcccctcccccaccccatcctcttcatggccacatgktgtgttttgtcgttactatacctatatcttggagacagcactttttaagcatattttggacttctctctgccaaaaatgcggacaagtggcctctcttttgccctcagtgggtccttactcccagtctgtctagtttctccccttgattgaaagcctccttgagagcagccaccgcatgattttgtttactgttgtgtcctggagtgtaagacacagtgccttacacagggctggtgcccagaaagatttgtgaatgagttggtgaatgaatgaaattatctatttgaacaaaccaaagctggacacacatgggtagcc

SEQ ID NO: 789619 - DNA, 622 bp, Homo sapiens
ctcataagtggattggtgcccttgttaaagaggcacaaaggagctgcctctccccttttgccctttcatcctttctgcctcatgaggacacagcgagaaggccctcacaagacagaaaatgccagcaccttgacattggacttcccaacctccagaaccatarggaaataaatgtctgttcttcacaaatcacccagtttgtggtattttcttatagcagcacaaagggactaagacacccatctgcccaggctgaacgtgctccttacctccctgacaaagctctccctgacgtccctagttttagggaggtgtccccctcatgcttcttattggccaccacccctggctctatcatatcacccaccaaacctgtgtgggatctggtctctgctcaaatgttccctccacagatcttctccctgcaccctctatgttcctgccctctttatttctctttctcgctcttatgacagcttggaaactatatatgcctttgttcattgtcttactctcccgacagaaggcaaatttcatgaggacaggatgtcagtgttcacctcagtatctccacttcctaaaacggtgtgagacaaatagtagtacctagtggacagaagga

SEQ ID NO: 789620 - DNA, 570 bp, Homo sapiens
ctttctggaaagcaggagttcaagccttagcaagcccagaggcccccagcagatgatgaggacattgtcggctcaacatctcaggccactcattaccttcgctcatgatcccagcagccatttttcttttttttttttttttttttttttttgagacggagtctcgctctgtcgcccaggccggactgcggactgcagtggcgcaatctcggctcactgcaagctccgcttcccgggttcacgccattctcctgcctcagcctcccgagtagctgggactacaggcgcccgccaccgcgcccggctaattttttgtatttttagtagagacagggtttcaccttgttagccaggatggtctcgatctcctgacctcatgatccacctgcctcggcctcccagagtgctgggattacaggcgtgagccaccrcgcccggccagccatttttcttaacaccttctgccactttctctcggtgctaatggatggaattcctgcacaagttttaactgaacaagaaatcccagcaaaaggcattttctttctacttctttgattgtggaaaagc

SEQ ID NO: 789621 - DNA, 653 bp, Homo sapiens
tgatttttttttctcagcactttaaatattttatcccactctgttcttgcatggtttctgaagaaaagtctaaggtaattcttatccttattctcctgtgggtaaagattcttttaaaaacatttttcagtggttgattttctgcggtttgaatgttatatgcctacatgtagatttttgggcatttatctggcttggtattctctgagcttcctagggtggagtttggtatcttacactaatttgrgggaatgtttagtcactattgcttcagatatttctcctgtttctttctctctttctcttcatttttgtatcctcattatgcatatgtacaccctttatagttgtcccacagtccttaggtattctgttctgtgttgtttttcattatttttttctctttgttttttagtttggaaaatttctattaccatatcctcaagctcactgattcctcagtcatgtccagtctactactgacccatcaaatgcattattcacttctattacagtattttttgtttctagcattccttttttattcattcctagattttaatctttggttacattactcatctgtttttgcatgtttactttgtccattagagcccttagcatgttaattacagttatttaaaattttcata

SEQ ID NO: 789622 - DNA, 620 bp, Homo sapiens
cattgcttaacagggatacattctgagaaatgagtccataggcaatttcattattgtgtgaacataactgaatatgcttgcacaaacctagatagtataacctattacacacctaggacatatggtatagcctagtactcctaggctacaaacttgcacaacatattactgtactgtatgctgtaggtaatcggaacacaatggtaagtattggtgtatctaaaatagaaagtgtacagttaaaatatggtataaacaataaaaatggtacacctgtataatcagttaccatgaaaggagcttgcagraatggaatggaagttgctctgggtaagtcagtgagtgagtggtaagtcagtgagtgagtggtaagtcagtgcaaaggcctgggacattactatacagtactgtagactttataaacattggacacttaggtcacactaaacttataaaacaattttttttcaacaaagaaagatttttctttcctcaataatgaaactttaacttgctgtaacatttttacattataaactttttaatttcttaaccttttgactcttaataacactcagcttaaaacacaaataaattgtatagctgtacacaaatattct

SEQ ID NO: 789623 - DNA, 538 bp, Homo sapiens
atacatggaaaatggggaaattttatgttatgtaaattgtatctcaaaaaggctctttaaaattttttaagtgagagaaaagttaagaatttattagaaaattagaaacaagaaattttaaaggaagttattcagatcaaagaaaaatgatactagaaggaaatttggattcgtacaaagcaatgaacaaaacccagaaatggtcactatgtgggtaaacataaaatatattttgctcatgtaaaaatatccttaaaatgtaattwactgttcatggaaaaacaataaaaatgtattaggggtttataatatatcagcatgtagcataaatacataaaagtaatagcttaaaaatggagggggagacagtgaagtgatgtttgaagtttgatgtgaagtggcacagcattatttgaaggtggattgtgatacgtaagtggtatatatgttaatatctagaaccacactttccagcaagtaagccattatatgcatgtgactactgagcacttgaaaagtgatgaatgatactatgcag

SEQ ID NO: 789624 - DNA, 646 bp, Homo sapiens
aaatattattgacattcccattcactttccaaaaagatttattcatccaataaatatgatatgcctcactattcaccagaatctgaactagagactggtgttgaaatggatgggggaaaatggacacagtttctgcctcagagtacttacagtctagcaggaaaatagagtaagtataagaaataaataattataagaaataaattatattacaatatgataaggtttttggttgcaaaataaagagggaaatgggagtacacagttgtagtatctgacctaatctaggtatttcactaaaagcttcctggaagaagtaagatttgagctgataactgatgaaatggttaagccaggagcatagaagaaaaggaagtattttaggcaaagggaatagctcataggtgaatggaaacatgaggtataagaacaattcagaaaccctcaagatgagtacagggggaaacgatgagtgtaaatggtgasagagaatgatggaaagagggacactgggcagaagagaccagaaggaccaaaaaaaaaaaaatcaatatgtggcctttgatttcaccctggaaaggaaaaacaatgatgaaaaaattttagagaatattgaggatactgggtattagattatattatgcaa

SEQ ID NO: 789625 - DNA, 591 bp, Homo sapiens
cacaagaggacgggggaactcaccagacagagtgttctacccttgtgcctgtcattaattcatccacgattttggtcaagacgcctatccactctgacttcggttattcaataaaaaatgataagcaactgctagatagactttaaatgtttttctagacctaaagatccttggaacacttgaattgcacaacatgtggttggctgcgtttgtattttccaaatcaccaaatagtctagttaatttcaccttgaggaatcaaaggtagagagaaatttgagatagaaggaaagaaaaaaaaaaaaaacagaccttagagatctcatctgatttatctcttctctaarggtatcccatcttggattatcccaaacacttagtttacaggatatgcagcacttttattttaaataattcacatggtgctttaagctctccttttttatcataagagagacctggttccaaggaacagttcttgaataacttcttaaatatatcattgcaagatgaaatttcctcattatctctgcttcgagatggttcacatttttaacttttatttcacatactctcctgggagtagacagt

SEQ ID NO: 789626 - DNA, 600 bp, Homo sapiens
cctcacatacttatttttggtggtaagaaagcttaaaatctactatcacattttcaagtgtacaatccattattattattattaattacagtttttaagtatagtcaccatgttgaacaatcgatcttaaatttgttcttcctatctaactgaaattttgtatcctttgacaaacatctttccaattcccccactcctcaaccgtagaccctggtaaccgccattctactctttgcttctatgaatttgacttatttagwttccacatataagtgagtacaagtgggccgggcgcggtggctcatgcctgtaatcccagcactttgggaggccgaggcagacggatcacctgaggtcgggagttcaagaccagcctgaccaacatggagaaaccccgtctctactaaaaatacaaaattagcctggtgtggtggcacatgcctgtaatcccagctactaggaaggctgaggcaggagaatcacttgaacctgggaggcggaggttgcagtgagccgagactgcaccattgcactcgagcatgggtgacacggcgagactccgtctcaaaaaaaaaaaaaaaaaaagtgagtacatgtggt

SEQ ID NO: 789627 - DNA, 529 bp, Homo sapiens
cacacgaagacaggggcagagactagagtgacactgccacgagccgaagaccaccaggaaccagcaaaaactggaagagcggttggagggatgagtgtgatcctgctgtcaccttgattttggacttctggcccccataactgaatacatttctgttgttttaagccacccagtrtgtggtcatttggtatagcagccctaggacactcacatagaaagaagggcctagtcccctctcccccttgaaactgcctggacttgtgacagctttaaacaagaaagcccagctgagggatactctgtgccttctgaaactgggccatcaaaagaatacagcctccactcacctctctcccagcacctatcccctggaaagcccccctaagccaccattcttagaggcagcccaaactagcactgtggaaagatgacagggagaggtccatgcaggaagcactagggcctccagcccatagccaacatcaacttccaggcacaggaggaaacaggcttccagatgattccagca

SEQ ID NO: 789628 - DNA, 602 bp, Homo sapiens
gccctggccagcacccagacccctggctcatgtgtgtgagggtgtcacaggagaggccagaaatggttctgtgccagctcactcactcccgctttctggaaaaatgattgcttggcccgagggctctgctccctcccccaacccctctctcagcctcaagaagtgtgagcaccattcagggctctaccggaaggaagcaggatgatactatcatctcctgcccaaccccatctcacagctgccctgaaggaacagtacayggcaggcttgcagctcctatgtgcagaagagaacacagagccccggaacagggaggggattcactctgggtccatggggcttgaggggagctgagattccagctggccagtgcctcactccatctggacctctgtgcactctaccccgaaggctggagagaccccaggatggtcttctgctcagaacccacgagttcagaggcagtcctcagaacccaccgagccatttcactctgctcagagcccacgggggagggctggacccacctgggagggagccgcgctggggatgttgcgctggacacccaggctaggcatggtgggtaggtggacagcaatgga

SEQ ID NO: 789629 - DNA, 624 bp, Homo sapiens
aaacttgccaacctgtctggtttattttagaagggtccggatgcaacaagcctgagagctgtgtctgggggaggagagagcacaaatggattcatcctccttycaccactgcccaacaactgaagaccaccaactgcggaccacagactgaagagaaacaactgagggtgccaactgagggcactaactgaaggcaaccaatgagggcacccactgaaggccaccaagtgaaggccagttgccctgccaaccagaatgcatcctggttcagaggaaacaatcaggtccagaatcccctgcatgcatccccagaaccctggaacttgagaacacaggcacatggctcacaaggcccctcactgccagtggccctgcccccgcttgcattcattgctggctgctaggaactttcaggtttctcactgtgaagaagttcctaggaatcatcaccttacaatgaatgatactaaaattactgaaaccaaaactgcttcatgcagtgtcagggattcatagaatcccctttcccccataatctctgaaacattaacaaactagaaataagagagatttctgcaggtactttcacaaaaaaaacattgccatgagctaagcctaccctat

SEQ ID NO: 789630 - DNA, 624 bp, Homo sapiens
aaacttgccaacctgtctggtttattttagaagggtccggatgcaacaagcctgagagctgtgtctgggggaggagagagcacaaatggattcatcctcctttcaccactgcccaacaactgaagaccaccaactgcggaccacagactgaagagaaacaactgagggtgccaactgagggcactaactgaaggcaaccaatgagggcacccactgaaggccaccaagtgaaggccagttgccctgccaaccagaatgcatcctggttcagaggaaacaatcaggtccagaatcccctgcatgcatccccagaaccctggaacttgagaacacaggcacatggctcacaaggcccctcactgccagtggccctgcccccgcttgcattcattgctggctgctaggaactttcaggtttctcactgtgaagaagttcctaggratcatcaccttacaatgaatgatactaaaattactgaaaccaaaactgcttcatgcagtgtcagggattcatagaatcccctttcccccataatctctgaaacattaacaaactagaaataagagagatttctgcaggtactttcacaaaaaaaacattgccatgagctaagcctaccctat

SEQ ID NO: 789631 - DNA, 611 bp, Homo sapiens
aagggaaaacatatttttctgttccagcatccagtccaggatttcacgttgcattttgctgtcatgactctgtagtctcttgtcatctagaacagtctttctttgcctctcattaccttggtatttggaagagtgcaggccagttatgttgttgagcctctcagtcgggcttctctgatacttctcaagattcgatccaggttatgaatatttggcaggaataccacaagagcggtgctgtcctcagctcctcataccaggaggcgcgtgctgtcttgtctgtcccgttactggtgatgcatgcctggatcgcttgattaggatactgtcgggccgggcacagtggctcaygcctgtaatcccagcactttggaaggccgaggtgggcagattacctgaggtcaagagttcaagaccagcctggccaacatggtaaaaccccatctctactaaaattataaaaaattagctgggcatggtggcgggcacctgtaatctcagcactttgggaggccgaggcgggtagatcacctgaggtcaagagtttgacaagcgtggccaacatagtgaaaccatgtctctactaaaaatacaaaaattagccgggcgta

SEQ ID NO: 789632 - DNA, 637 bp, Homo sapiens
cccatcagttacataaagaaactcagattatagtgattgccacccaagccagctctggtaaagtgagcaaaaaaacttcccttttcttgtttagcatcttttttttttcatggctcaaattggcacacacttagaaagtgtgctcacaggagaattttaatttattgatgcgtcttgcccctactgtacattcccagctcctagctgagtgtaatggatgaagcagatgtttgacacgcagcacctcttcataacttcactcttcaaaaacagttttacaagtacttactcgcatcggttcccattcagcacaggaaactgaggtcattgtgaaacatgaggctckagcagaagtctgaactcatgtgccctgcagctgggcctccatcttctgagcacgttagcaatttatgaaacagccataattttcagcttatggacaaagaaataaaagtgttgacaccattattgtaacatctgtgaagggaaaaatatgagccgatttctaagtgcacaaatggtaccagagttataaagattcttttatgcttaattgtattcattatcagcagtaattatttctaacgcgagcagtttcttccaatttaatgtcaacctaaaaggttaagaccttacc

SEQ ID NO: 789633 - DNA, 508 bp, Homo sapiens
cgtggccgtggatggtggccaacacctgcgccctgcgctcctgcacgctgacggccgccctggacagggtcctgcggggctcccgggccgcgccgttggtgacgatgatgttgctggggaagcggggtgccttgggctgcgccgggtggctgggccccgggccagggtctccactgcggggcccccgggcggcaggtgtcctccactccccgggccggccctccctgaacggggaggtgggcgagagggcttcgttccccgccatcctctyggaaatcttctgcgccataacgaggggcgtgggaacagagcgcaggagtctggggtgctccaccggcggggagggggcgcgcagctccctcctggggggatcgggggtgctaggcaggggtggtggcgcaagaagggtctcgggagccggggggtctggaggtggaggagtctcagcatcttgtttcctgtgctccttcccagcaggtgcaggccctggaagacaagggaggagcct

SEQ ID NO: 789634 - DNA, 606 bp, Homo sapiens
actgaaggttaacctgatcaatgtcagaatggcaactacttttcctttctccttgaattattacttttttttagagacagggtcttgctctgtcacccaggctggagtgcagtggcacaatcatagctcactataacctcaaactcccgggctcaagcaatcctcctcacacagcctcccaagtagctggtattataggcacaggccaccatgcccagctcatttttttttttttgtattttgtagagttgggggctttctgtgttgcccagggctggtctcaaactcctggcttcaagtgagcctcccgcctgacactcatgaagcactgggattacaggtgtgagccatcatgcgtgtyctcttcttgattatcgaaatgtaactgaaccttctctttgtgttgcaggattaaaattattgtgagatgcaggtcatgtagctaagatgctgtattagtccattttcatgctgctaatgaagacacacccaagaatgggtaatttataaataaaaagaggtttaatgaactcacagttccacgtggctggggaggccttgcaatcatggcagaaggcgaaaggcacatcttacatggtggcagac

SEQ ID NO: 789635 - DNA, 536 bp, Homo sapiens
tcttgtgtgttttcttgtccagactagtaatagccatgttaaagcgactggattatattccttggtaacagcacttcaaatgagctttctttgaaaattttagatgctgatgatttaaaagtaacacattttctccattactagaaatcagaaatccaaaattagagtgatatagtggagcgaaggctggaaagaggagcgatgcttttaggaaggtctgagcgtgtttgaatctgtggttgccgggggtgggggagttgcccattaattcattcaggaatatttgtagactgaccacctacagcgcgcagagccgtgactggtcgtccagcatacagtcatttytagataacagccacatggcccaaactgattaaaaccagatcaagcaagccttcatcggcagctgaagagatacctggccttggttccaaagttcttagacacccaaggcgcccagagttggcactgtgtgttgatttggaagatcatctcagataactccaggagtggagcctggaaacctgaagggggag

SEQ ID NO: 789636 - DNA, 629 bp, Homo sapiens
cctctagctcctgcccagagaggaggtggttactggcctcaccttactgacatcatccatcatctggctcgcaaagggactggtggaagatgaggttaaaagtttcatgctttggattcccaccaggaggtcttgtgtgagcttsttccaccctggtgtggatttaaatctgttcaacttgagataagatatgtaaatcagaccacggctgccagtctaaccaggtgttataaataccagtgctaaatgaacatgctctaagccagctttcttttcactgggagcatggattaaaaattcagccaagaattttgagcttcttggggtgggggtgttgggggagcactgtagaaccctaaacaataaggtgtaataattccttcctagcaagaagtactacatttatctcattagtgaagcacatattgggtgctcggtaatatttgctaagcaaataaagacaaagcacacaaacttgtttcacaaaagtagaatgacttcaactggaattttcttctatccataaataatttgctcaggaatccagaaatgtaatagacataccagctgtccatttttcaaaaatgagctgagtaaaaaacatgcagtgtctctcttcacaaacattt

SEQ ID NO: 789637 - DNA, 609 bp, Homo sapiens
gtgaccgcatcaatgtttcaaactccagaacaaaactgcccacactcccagcagccaacttccacctggatctttctttgatcttcagtgctgggatatagtcctcgtttgcttagggagaatttttggaagcattcttttctttccaaggtttttttcttgaaattgagaaatagcgcagactaaagagtagttgcttcatatgcttcatatttattttactgcagcctctgtatttctgtggaggcccatttttaagattaattttgttcatggattacacgtgtagagcatacacattcatattgacatggattacctgttaatattgggaggcgttactgggttagcgtgtgtaatgtttattggtgtcaactttttaatacatcgttatttatgaagctgggttaaacgtcctttytactgctgtgtgtttaaactcactcccctccaccgccccatgtcccgatttaaatgtataaattggatgagattaatttctcctaaattggaaggacttgatctataaatatggtggagagggagggataataaccacactgatgttaacatgtctgaaactactcttaagtatttaagcttttcttt

SEQ ID NO: 789638 - DNA, 555 bp, Homo sapiens
tgccccacccatctgcacctcctcactctagactattttgaggtgaatcccagaccacattttaatgttatttttataagagattactaactcttgaccactcttcaagtatagcttaacgataagtctctaccagaaacagttcctgaaagggctgcctgttgaggccttgagacgttcaaattatgtcattgtttggagagtaattttggctaaggacctggaggactccttcggccagggacctagataagttatgttttataggtcagcaagtgaaagatgygggaccctaaaaatgtaggtcaaacagttttcagcaaacacagtttattttccactcaagcaccttttaagtaataatcctattatctgccctggtttctcagccctatgaggatgaggtctatgaacagacccagtctaatcatggcttctctcccaagtgatgttgtctccttttatacctaagaagattcacatcaataacatccaattagaactttgcctgtgccactcagagccctgagaggtaggcttcctttttatctacca

SEQ ID NO: 789639 - DNA, 635 bp, Homo sapiens
ttgcactgtgtatctggaaaaactgcagacactcaacaccatcccatgaaagcagccagaagggaggctgcccaagaccatgtgaatccacctcttgcatcagtgtgacctggatgcaggacatggaatcaaaggagattattttggagctttaagatgactgccatgctacattttggacttgcatggggcctgtagcccctttattttggtcaatttctcccatttggaatggctgtatttacccaatttctgtacccccattgtttctaggaagyaactaacttgcttttgcttttacaggctcataggcagaagggacttgctttgtctcagatgagatgttggactgtggacttttgggttaacactgaaatgagttaagactcttggggactgttggaaagacatgattggttttgaaatgtgaggacatgagatttgggaggggccagagttggaatggcattgtttggctgtgtcgccacccaaatctcatcttgaattgtaactcccacaattcccacctgtcatgggaggaacctggtgggaggcaattgaattatggtggtgggtcttaatgagtctcatgatatttgatggttttaaaaatgggagtttcccttcacaagctt

SEQ ID NO: 789640 - DNA, 658 bp, Homo sapiens
gaaataaaaacaaagcaaaagagttgcgtaagtcagtcttcactgttatccatgtactacgttcagtataccataaaacatgaccacagatgtaaatactgtgttcagtatgacataaaacatgaccacagatgtaaaaaaaagggacccataagaaaatcaacaaatcaaaagcaacaaattcacagataacccagacattggaactgacagaaaaggattttaaaaactagtattataaatatatttgggaaattataagataaaatgaatggatgaatatatgaagaatcttgtaaaataaataaaaattagaaaagaaactcatagaatgaattctgaaaaacaaaaacatacctggtggccttaacagyagaacaagcaatgcagaaggaagagtcaattgtcttgaagaaaggtcaatagaaatcatccaaaataagacatagagaaaaaatactgaaatatttataaatctatacagtgtctacaactttttaaaataataattagactcgggcagaaataatcttttaagaaataatgaccaaattttccctaaattgaaaaatattaatctataagttcagaaatcctagtgaatttcaaacagaataaatacaaagaaactatgccatggcatgtcatagtcaaactg

SEQ ID NO: 789641 - DNA, 620 bp, Homo sapiens
gttgtaatgtctagcaatttgagatttgatgctaaacattatgaattttgtgttgttaagctcaagattttgttttcttattttaaagtgttggactttgttatggcatgctgttaaattatttaaggatcagattgagctttacaaggcttgttttgaagctttattagggtaggtgtaaaatagtctattttgaggctatgtcatcatattacaagtcattatgatcttggagttattattgaatgccctggctattccactaagactccccaytctaattattcagaattcaaaaattttcctactctgtgtgagttcaggggattttgattttacagctcatgaaaccttagtcattctttgccatgccttgtgaaattttgtagtatgtgtggacagctttgtatttgtcaacagactcaagggaagtcctatgcagtctttgtgtacctaagtgccccttttctagtacattgttttacaaatgacagccaccacagcctccccaaactccctctctatctccttaactcagcatgcatgtcatgctctctttgagactctttgtcctccaacatagtagtctggaaagtgcatctgtgcattgaactacagct

SEQ ID NO: 789642 - DNA, 561 bp, Homo sapiens
cccacctcagcctccagagtagctaggactacaggcgctcaccaccatgggtggctagttttttaattttttgtagagacagggtctcactatgttgcccaggctgatttcaaatgcctggccttaaacaatcctcctatctcagcctcccaaagcacttggattataggcatatccaagtgctttgggatatgttgaagctagcagaatcttcacgcacatcctaaattcatatgtgcaagtctagtatagagagtgtgaaatgttacttttctcaagcaaacactctccaacmgttaagtctcacttattttttctgggtgttcagggaccctgactgccaagagatttacctcccagctaggcaaacatgattttggcctccttatttctttggcatcagaaaggtctgctacccctgtaagtttcctgctctgtcctctctaagataagaacacagcatggctgggctaccatcaccatcatcgctgcagctcatgcttgcccaagtggtgttggccctttccctacattgtctcttttaatagctgtaagtaaagg

SEQ ID NO: 789643 - DNA, 652 bp, Homo sapiens
ctcttaaaccgggaggtaaagcccacaatgaggaggaacagcaagcacgccaggactgccaaggcaatcaagcccatggaggtgtagctcccacctgctctggaggaacataggctgtctctcagcacaggacccctctctacatatatccaatcccctggtctaggcatgtgtgagggtaccaggtgcttcttatttcctcctccacttaaaaccccaatttctattcctcataagtttagattccccatcttgttttcagtgcctgggcatcccaaattcagcccactttgrcatttgctagtgtagcaatagagggaaagggcaacagctttgtagcaaggcagacctgaatctaaatccagcccgtccactttctatgtggctccgggcagttaacctatctcccgccttcattcctcatctatataacgaaaagagcagtacttgcttcaaagaaaactgtgaatgatgagattgagatattatatgcaagaattcattggcccctacacagggagcactcaaccaaccaagctatctttgctaacctgccttcccaaaggcctggctccttaagccaaggaatgaatcgtcctgggattgtttattcgctgctacttctggatccctgagttttgtagtcttgttt

SEQ ID NO: 789644 - DNA, 544 bp, Homo sapiens
acacagccagcactaaagagtttttgagggcacaagaagttttactctctcttccccctctttcaccatatatctccctgacgacttcttcaaacctaatacatcagtttcctctctttttccartttgtttcacttcccactctctgacctagaagtcaacccagggttaggtcctctgttaaatgacaggctgtggaggccagagacaaaatggcaggtctgagagttcctatctaaggccaccagacttcaaagaagcaaagaggctacagagaggtagaacatagaggtggaaccagaagagacaaggatcggaagagaagcagaaataagtgaaatgaagtaggatggttccgatctgctcgtgcctaaaaacatttactgtgggatccttttcttagggtccttggcgtgactcctggggcaagggcagagtgttagaggagccctgtctaggacaaaaacaagaaaaggtactcacgagggagagaaggatgaagattccaggaactgcgtgtgagaaagaggacagaaacagagta

SEQ ID NO: 789645 - DNA, 558 bp, Homo sapiens
tcctggcttccccaagttagtgctgtctgacctgagccaggccactgcttggtgcctctacaggccactgtgcatgttgagaattgcccaaaaggattagtgaagctcctgaccctggcgaggccataatgaacactgaagtgcacaggccaagggatgtaattgaaaggcatttatttttgtgaagatgctrtaaaattagcatttaaatatcccattcccttctcttggcctcctcctatccccctatggtatttctcctcctctcctcaaggccaggctttttgtgaaaggcattggctcatctttgtcagcgtggtcctgacgttcacctctgggctgctggagaggactgagagatgtgtggtttggtaggaagggggtgtgtgtgggggttagtggggaatcccatttttttgcatcactgtgaggtagcttcaggccctgtccctggagaaataattgctgcgcagaagtcacaggccatactgggcagttctggtacaaacctgcccttattaataataacaataataataataactccatttgcataga

SEQ ID NO: 789646 - DNA, 612 bp, Homo sapiens
ttgactatggctgtcctaaaacctttgtcatccacagccaattgttatcttgttttggtcctctttagaaggtgattttataatcagctataaaactctaacaggtgctcttgaatgtaggtttatgataactttggaggtagtaacatcagaatagaagaaaaactttcacaattcttggggagctaatatgttcatgagtatcaagcagaacagttattaactgcatggactgaactaatctttttgactttttgcttaaaatgtttgctgatcctttgttttgtttttcagagtcttggaagtgttcttttgagctgttgacagcttttaacaatttagtatactcctatgaacaaaatttggagcatatttgtttctctctacctgatttctccagactttgaaagctatttgtcaatattcttatggcaawacagttatttgcataagtgcaataagaatctgttttcatttgtaacaggacacaattggagaaactggttattttaccaaggctttgactggaatggtgtgatttcccttaaggaatcaaacttgatttatggagctaacaaagactttggaaaactgttgtcttattttgtgtac

SEQ ID NO: 789647 - DNA, 621 bp, Homo sapiens
actcatctgtgctctgccttttggccttgtagttgcctgcctctggatcccttagatccagttctctttcttagaacattgacccgaagcctggaattgagtttgggacaaaaatatgtctcaggggcttgcatggactccttctcataagccgaatgttaaagtgagactctggaactgagtccttctccaacaaggaagagaaaaagatggcttgtgacacacctagataactggtggctatagttatccttgctacgatttgagtgtagtgcagctttttaacttcygttaaaaaaatacttgattcaagtactggtctttctttaggccaaattaattagagctctttttacagacattacacataataacacacacagacaggcagaagaaaacccagtccctacgagattctttttcacaatgaaaaactttatggagagtacaaacagtgatagttgtggggcttggcctagtaaaacgtcttctaaaaaaaacccaaaaaacaaaaacaaaaatcttgcttaaaacttaactgctgacagggtagagaagagggtaaaaaagagaatagtttaaaaatgcctggggaagaatctcttattcttaggcaagggg

SEQ ID NO: 789648 - DNA, 560 bp, Homo sapiens
aattttgccacatatcacctggtgacatttatgatagcagaaacttacaggagggtaaagtttgtttatgcttcccatgacctcccgctgtgtggtccgtatggtttgtaattgaggtttgcttatagtagcagggcctgtaaagtgaagtttgctggcttcactggggcgcctagataagggcttagaaatgtaaagagcttgggggaaagaggggggtggcacggaaaggagttgcagagtggggatgggcgggcagcacggagaggtttcaagaagcttttttggggcagtttgtccctaacattccagccttttaataggtaayagaagagggatgccattgtctggctacttcctgctgggaaggggcgacggttatgggggaaggctggatggtagggactgctgttcttggagccattggtattcctggaacagcatcatattttgtactgtcccatgggtgagggctctgatacggtcctgtaaaactggggtagaaggcgtaagagacaagggctgaatgctagaaaaagaagaatggttatggccaggtc

SEQ ID NO: 789649 - DNA, 546 bp, Homo sapiens
ttacaggcatgagccaccatgtgcagccagcttcattatagtcttatgggactaccattgtatatgtggtccatcattgactgaaacgttgctaagtggtttatgactgtaatttatccttttaatcacctaaatagtacactactatgtggataaactataactgatttagctagtgtgatatggtggtcaagagcaagaactataggacccaactccartgcttgaatcccagctctgccacttagtaactatgagaatttggacaagattcttaacttatcagtgttgcagtttcctggccataataatgattttggcaggctagaatttgtggctcacttgttgaggtcttctttgcatatttgtcattaaaggacagccaggataaaatgcaccctgcctcacttccctgtgataagtggtgttgaggaaggtagagcagggagaagggagcaggagcaggaaaacaggaggaggatgtagctttaaatggaatggggaggaaaggaccagggtagatcccactgagaagggagcattcct

SEQ ID NO: 789650 - DNA, 612 bp, Homo sapiens
caggtgtttcacagcatctagtgaatgaccgttgctcccataccagattctggtgacctgatcttaggcttgacagctgtggtggagacttgggttggcagaagcctaccttggtgtgttggaagagtgattgcttagtgcatgaggtgccttttacagcccattttgcagtagttctggctgcagccctgctgcttygaccttgcaggccaaatttcctggctcctccaaaggggatgatgttctttccctccagacacagttagagggaatcctgacagttgcatcaaggctggtccagactctcaccacgctttctcttttgtgctgcttggtcctgactgccttttgaatctcttttagagctctgagctcttcaccctgacctatggtgccctggtcacccagctatgtaaggactatgaaaatgatgaagatgtgaataaacagctggacaaaatgtgagtgagctccttcataggagagacagaaatggggcctcccagcacactgagtctacattgtcctttagagcttaaaacagggttctctctctttcttagccaacattttgggtacatttctcactaaactcatttactgggatgtttt

SEQ ID NO: 789651 - DNA, 603 bp, Homo sapiens
gcctgctgagtcctctaagacattcattattcttaggtgatttgcaaacagctcacattggaagctgcaaacacacttaatccagttgtggccaactcagagcctttgatagatgttttctttccacggggcagggccrggttggcttttataactgagcaatgaggctcataaaagccctggtcacaatgcactgtgggctgccctgggtttgatccagcctgacctttgtgatttgtcagccccacctcgacatggagggaccagccctggatgaggatgaaactgtcatgtgggcctcagatgcctgggctcctttacatgctgccagccctctgcttttctctgcacttcagcaaatgttcccgggatagggctaggggcctcaaagctgaggaagacacaataccttcccttaaagagctaggcaagtaaaagccatagaaaatgcaacattttaaatgcaaagtaatagccagaatgtattcaggggccacatactctgagctgagagctctcagatgtgacctgccgtcgtccttccacctctcctccaggtgggtgtgtcattccgagtttacagtgaagtgcaggctgttgacg

SEQ ID NO: 789652 - DNA, 631 bp, Homo sapiens
atgatgaaacttttggtggtaatatagtttttaattatttaatggttttataggatccagggttgttactgtagaggatatttaaactgtacttgaaaggataacataaatctataggaacatttgattcaagttaaattgtattttggtgcatagagtycatattgtgggatataacatcaattttcttatgagattccttgttttatcttttttttgtaataaaggaagaatttttaactttgaccatagagcataggaaggggactcaaggatagacttcaaaagatctgtgatctactccaaaacagtaggtaaaatattttatatatatattttaacagagtgtcaagattctcatcccagggacactgagagaagttttacgtagtgggaagaacactggatatagtacaagacaaacctggattgaattgtagctctgccatttgtgacatctctgagtgatcatggcaaattacttaaaccctttcatttgcttatgtatgatgtatacacattgttgagatataggagacatttgataaatagaattgcttgtattattattaatacttacctgcagaatttatatgtatttgtttaaattttctctttctttctttctttc

SEQ ID NO: 789653 - DNA, 601 bp, Homo sapiens
agtgagaattggctggatctggaaaaagaccaaatactcatatacttgagctgttttaaggaggttgatccataaaatgcattactaatgtatagtggcttcaatcccaaagcaagtgaaagtcgaagtgaaagcaatcagctgttactttctccttttacctgaggggatagagaatgttttcaatttgtagatggaatcatttctgttcattgacatgggtggtattttccttgctattcacaaactgactgtgatttgcaagtttcagaatttctcactgatgaataattcagagaaaaggatatatctttatttttgtatattttccttccagtttcccttaaataaagggaatgtattatgttcattcatgccactgtttcattcatgaagttatgtttagaagtaaaaataaaagtctmagaaaatttagaaacacacattttaaaggaaactaaacataaattaaatattctcattataattcagttgctgtgatggcagatcaaattcaaggaattcagaccttttgacaaacctttattaagtatggtagtaatagtctaaagatttgcatagagggacatcattttaacct

SEQ ID NO: 789654 - DNA, 528 bp, Homo sapiens
atgactcattcaaaggaaaacaaaacaaaacaaattgacagaaaccatccatgaggaagaaaggaacttaccagccaaagactttaattaactggcttaaatgtgctcaaaaagctaaaggaagccaggaacaaagaactaaaaagaaccaggaaacaatgtgtgaaaaaaactaaaatatcagtaagagatggaaaccatacaatgtaactgctatggactgaactgtgtcccgccctccccctcaaattcgtatgttgaagccctaastccaatgtgatggcattcggagatggggcttgggaagtaatgaggtttagatgcggtcataaaggtgggcctccatgatgggattagtgtcataaagaagcagtagagagcttaacttcctctctgctccaacgtgcacacagagaagacgtcatgtgggcacagagcatgacggcagctgcctacgtgccagaaggggccacagaatgaaacctgccatgctggagccttcgtcttggatctcctagcttccagagc

SEQ ID NO: 789655 - DNA, 547 bp, Homo sapiens
gagggagtaaagggcatgaagaatatttgaagaaatactggacaaaaacttcccaaatttgttgaaataaataaatctacacatccaagaagctatatgaatccaagtaggagaaacaccagaagtccacgcagatactttatagtcaaactgttgaaagtcatagaaaaagagaaaatcttgtacattgttggtgggaatataaaatggttcggcrgctgtaaagaagtttgaaaattcctgcaaagttaaacaaagaattaccacgtgaccctgtaattccactcttacgtatatacccctccaaaattgaaacagatactcaaacaaatacaggtacacacatgttcacacaagcattattcacaatagaaaaagatggacatagacctggtacagtgactcgtgcccgtagctccggcactttgggaggctgagggagcagatcctttatgccagggagtttgagatcaatctgggcaacataatgaaaccccatctctattaaaaaaaatacaaaaattatctaggtatgggtggcacgcac

SEQ ID NO: 789656 - DNA, 620 bp, Homo sapiens
cactcttacgtatatacccctccaaaattgaaacagatactcaaacaaatacaggtacacacatgttcacacaagcattattcacaatagaaaaagatggacatagacctggtacagtgactcgtgcccgtagctccggcactttgggaggctgagggagcagatcctttatgccagggagtttgagatcaatctgggcaacataatgaaaccccatctctattaaaaaaaatacaaaaattatctaggtatgggtggcacgcacctgcgttcccagctactcaggagtctgaggtgggaggatggctcgaggctgggtgacagagtaagaccctgtctcaaaaaaaaaaaaaaaaaagaaagaaagaaaagaaacaacaaagctggaaatagcccaagtgcccatgaatggatatatacaaattgtgatatatacatacaatgggatactactcagcctggaaacagarcgacatattgatacatggatgaaactttgacaaacatgactgaaccttgaaaacattattctaagtaaaagaagacagatacaaatatcccatgttaaattagtctgtttatataaaacatctggaaagataaatccatagggatagaga

SEQ ID NO: 789657 - DNA, 643 bp, Homo sapiens
ttgattttacttgtcacaacctaatgtgtggtacattggaataaagaaggacatggtaattttgtttaaacaagtagacagtaacaacaaaaaccttgtgtttatagtaacattggggaagactgcagagtcaaagcatcaaatgcaaagagttctttggaattatttactagaaaatggaaacgtgtgatgaatgtcgattcattcttagattttaatacacgtaatagcagcaaatgtagttttccttttcagttttgttttccrtttgatggaacttgccattccatcaaaatgcattttcttgttacaaaatgcatttttttgtcaaacataaagtagctgcacaatttataagagatgaaatgtctacactgccaaaaaataaggaataatggctcaataatgtaatacaaatgtaaacaatattaacagtttgttccgatattttttaaatatggaaagattaaatttctagtaatatgaataaaatacatatttggaaagtttaagatgggtttaatgagattaaattgccaacaggcttagtaagccttgattatttcttggggttgagtaacacttacaaataagaatgtaattttgaaaaaaatatacaatttatggtcaagatagaataata

SEQ ID NO: 789658 - DNA, 657 bp, Homo sapiens
gtacaatggtaagaagtggcactttgtttcccgtggctgccacccaacaaaggcagcagtgagaagcagggtctggttaccctggtagccatggtgccggggctggccatcctggcatcctgtctttgtactcacaggctgccagggccctccgcgttgaaaggatgaatatgtgggcctttacacaacatcgtggctcaaattagttggatacatggggcctcttgcagcacctgctcccgttctcaaattccagctctgttgggaattattatctagctcccttcttccctctctctctccctttgtaattatgtttaatcccacagacacctgccttggctttgggggactactgataaaaagagatgaaaagaccttttttccatttgtatccaaatctaccaaataaatacaacaggccccagctaattaaacatgtctaaggrgaaggtgtaagaaaccccccaggattaagactctgagttcatactgtcctcccattctattcggtcatctttgtctggctccaaatttaggaaaatattatctaagccatgtttaaaatcttccatccttgaagctcctgatggcagttctgtttagatcctttgtgatgttttgattttcagtacagtatttatctgaaaagcaggg

SEQ ID NO: 789659 - DNA, 645 bp, Homo sapiens
cagaacatcactacagatcccatggacattaaaagaataatcaaagaggattataaacaactttgttcccacaaagttgataacgtagatgaaatgggccaattccttgaaagatgcaatcagccaaaattcacaaaataatttaaatattgtctaaataggcctatagctagtaaataaatggaatcaacaattaaccttccaaagcagaaagttccaggccaatgagttactgattaattgtatcaaacaattgaagaataaagtatatgattctccacagtctcttccagacggtagaagcagagasaatacatccaaactcattctatgagaacagcattaccctagtgccaaaaccaggcaaagtcatcacaagaaaagaaaactataaaccaatatatctcgtaaaaatggatacaaaaatcctcaaccaaatattagcaaaaggaatccaacaatgtataaaaacaattatacacagtgacccagtgggatttatcacaggtatgcaaggctggttcaacattcaaaaatcaattaatgtaatccatcatatcaacaggctaaaaaggaaaaaatccacatgatcaagtcaatagatgcagaaaaaaattgacaaaatccaaagcaattatgaaaaaa

SEQ ID NO: 789660 - DNA, 564 bp, Homo sapiens
ttctcactcaccttcagaagtgaattctaaacctgtagtgatttccaaccctgatagcagcattaaaatattctgatgagctttacacaagtgtagatctcacagccatagctctgaactgctgaatcaggatcttttgagggtgaagtgaatttattacatcatactttcattattttccagttactctgagttctgacaaaagtacatatgtattgtggctgagcgcggtggttcaagcctttaatmccagcactttgggaggccaaggcaggcagatcactcgaggtcaggagtttgagaccagcctggccaatgtggtgaaatcccgtctctactaaaaatacaaaaagttaatgggcatggtggcaggtgcctgtaattgcagctacttgggaggctgaggcaggagaatcgcttgaacctgagaggcggaagctgcattgaacagaaattgtgccactgcactccagcctgagagaaaggtagaattcacttctgaaggtgagtgagaataggaaataggataaaaaagagaatttagagtccctaaaagaaaaactt

SEQ ID NO: 789661 - DNA, 769 bp, Homo sapiens
cggtttcacgtgagattttcaataggatcccagatgctcccaacgcccggcctgtcttcagactctcctatgaggtggacggctggggccctccggggtggcaggacacctccctccacacaagggccagccatggggcacacagcggggtgcacagggggccctcatgggacttctccagagcccagtggtgcctactttgtggggtcataagcacaggaccccaaagtgctgaccccacccagcttccctagcctgccccaatgctgcaaatttgtttactctgcatctgagaaaaatcaagtcagtctgtttctttggagaccagctactcctttaagaagcatctttcagactcaaggacacacagcgcccaccaagaacagtgtgtctcgttccacacactgaatgagtgtctccttccactgccgatactctactgctagaagtcttgcttcattggctaggmaggacagtgttgcattggacaactgtccggggataacgtgatttccagcatgcttcacccgggaaaccgcagggccatgggttatggaaagttggcgtggagccaggtacatggcttgaaggaagcatgttcttctttcctttgtgtctgaccgacgtgtgtgagactcacactggagaaagactcagatgtgatttgatgccttggctgtagttataaatgtcagctctctgtgctgagaaaggagaaacaatttaagaataaatttaaatatcagatgatgtactcttcagagaagtt

SEQ ID NO: 789662 - DNA, 514 bp, Homo sapiens
tcagaagaagagctgaaagccagaaacaaaaggcgttagaaccaggcagtggagcagtgggagggactcaaaagatggaaaacctttgctttctgttgcatgaccctttgcactggctgagatttttctgcacccgtgttcgtgattattttaataagtttaaaacattagagttgctaaaaaacgggggtatccgatacgtgatgttttctgtgatgtataacctrttccttgtgactcacaaaacttccctgaaggatctgctgtaccctaaagcctcacatctgtggctgtcagagagacatcaagaaggtaccagcacagctacaggacgagggatggccaatgagagctgcgcagagctggtgtcaggctcagagcggaagctggggggctcccagcaggatgcagagagtatcggggcaccccggattccccagggctcaggtgggggatcagtgatgggaacctaggcctccaggggcgaatggcccaggagtggcgggaaggtcca

SEQ ID NO: 789663 - DNA, 527 bp, Homo sapiens
attgttctttatttccttcaaagaaaacaaatttgtggctgactacttagcagagcttgtcccgtcgccgtcccgaggctgtttgcccttgggaaggaggggcggcccgtccctggccctgcaggcgtccgcgcagccagatggtcacccacacgtttcctcaggcgtggaatccaaacaccagacgtgcacggagcctggtgaaaggaaggctgttctcaggcccgcggtgcacagcctgccagggcgggggcagtggggarctcttggccgctggcccttcatggctgggtctctctctaggcgttccttcatgggcccctcaccaccattccctgcatacccggcccagcagctctgcaccgtgggcaggaggggacctggttctagaagaccttccatcgtgctgaacccaaggccctgggcgagctccccacctcccggcccccccacctcctttcctggagtggcctgagccagtaagttccaccagtaggtcccctgcccactgctgggaggcagctagg

SEQ ID NO: 789664 - DNA, 674 bp, Homo sapiens
ttgcttactgcaacagccattgcgtggcccatctgctagcagcatagagcaacactgagcccccaatgtggcaccactcccagggtgatcagtcagctacttggggtgggattacattggatcgattccatcatggaaggggcagtattttgtctttatttgaatagatactctaggtttgcatcttccttccctgaatgcaacacttctgccaaacctaccatccatgagcttacagaatacagcattgcttctgatcaaggaactcacttcacaacaaaagaagtataacgatgggcccatgctcctggaattcagggtcttactgtgttctctaccatcctgaggcagctggcttgatggaaccacggaatggctttagaagatgcagttacagcaycagctaggtggcagtaccctgtgggctggggcagggttctccagaaggctgtgtgtgttctgaatctgtgtccaataatggcaccctttctcctagagccataatcatgctccaggaatcaagaggtggaaataggagtggcactccctatcacccctagtgacccattgacaacatttttgcttccaactttatgctctgctaacctagaggtcctagttacaaagaatacaaagaaaggcatgtttccaccaggagacacagcactaatccc

SEQ ID NO: 789665 - DNA, 613 bp, Homo sapiens
gggcactgccactggacagctccttctgcgcttgagaccctgctcatgattcaaattacagagagagataaacctgacttggctgagctcaggtcatgggcctgcccacttcctaggccattgggggtaggattctgaattgccagctccaccaaaactagagacttagatttcagcagttccccaaaggaagggggttatggcagaaacaatgctttaggttcaccaaattctgttgctattgttcttttcctcttcctgagcacaaaggaagacttatttcctaccctccttttaagttaggttacagccaatggcatttgggtagaaacgatgttctccgtcaagactgttgatgtaaaatsttggtaaacttggaggctacctgtataagaagtcaggatcatcagggggaaggagcctggagcctaatcaccactcaaaggagagatactgtagagaccttgcaacttacatcagactgtgagggaatcgagatataaaactttattttttaagactcttgagatttggggtgttgtctgttatagcagccagcataattactctaatacagggatattattttagaagaaaggggatgagggaagct

SEQ ID NO: 789666 - DNA, 632 bp, Homo sapiens
cattcaggctagttccatttcttcttgctattacaaatcaggctggaataaacttgtacatatcattttgcacataagtaaatctgatagatggtgccaaattgcccttcctagaagttgtaccaatgcacacatgctgcaaagtaccaaagacttctgacttttctaaaatgcacatacaaaggaactaragcacataaacaggaagtgtgttcatctgttgtatctcgtactgtcacccaggctggagtgcagtggcgcgatcgtagctcattgcagccttaaactcctggactcaagtgatctggccaccttggcctcccgaaatgctgggattacaggtgtgagccactgtgctggccttgaaagataatgtaattatatgttaatataaataacactttaataaaaaataactattttccaaaaaaattagtgagaagagtggcattgctttttatttttgcaaacctggcttgatagataatagctgtattctcctatctgcttctgcattcaagctgttgcaatttcatgtctaatagcctctggaaagctccactgtatacttatgaaagaatgattgtgaaacagactaataacattcttagtattattattaaaatagtttt

SEQ ID NO: 789667 - DNA, 583 bp, Homo sapiens
tgaaaaacatatttcaggatattgtccatgagaacttccccaatctagctagagaggccaacgttcaaattgaggaaatgcagagaacctcagtaagatacctcacaagaaaatcatcctcaagacacataatcatcagattctccaaggttggaatgaatttaaaaaatattaaaggcagccagagaaaaaggtcatttaccaagggaagcccatcaggcaaacagcagacttctcagcagaaacactacaagccagaagagattcacagccaatattcaacattcttaaagcaaaggaattccaaccaagaattttatatccggccaaactaaactccataagaaaatgagaaataaaatccttttcagamaagcaaatgctgagggacttcattaccaccagacttgccttacaagagctcctgaaggaagccctaaatatggacagaaaataccattatcagccactataaaaacacacttaaatacacagaccagtgacactataaagcaaccacctaaacaagtctgcatagtacccagctgacatcatgatgataggatcaaattcacatatatca

SEQ ID NO: 789668 - DNA, 496 bp, Homo sapiens
accccgtctctactaaaaaatacaaaaaattagccaggcgtggtggcaggtgcctgtggtcccagctacttgggaggatgaggcaggagaatggcgggaacccagaaggcggagcttgcagtgagcccagatcgagccactgcactccagcctgggcgacagagctagactccgtctcaaacaaacaaacaaacaaacaaacaaataaaaacttagcattgcagggaaaataaagtcgaattaaagaggaaatccagataaaagtggtagagggaaacacccataaaatctcagagaatkaattaatatttttcattacacacacacacagacacacacgtacactcacacatatacacacatacacatgcataagtagttactataaaattagaaaatatagcatctgccttaaattcgggacaattaaattcacataaagatgagaaacataaagtaataaggtcaatatcactttgagacactgagaaaaatg

SEQ ID NO: 789669 - DNA, 527 bp, Homo sapiens
tcctagagacttagagggctcagaagaaagatgtgggtaagcttggaacttcctagagacttgttgaatagcttacaccaaaatgctcatagtgatactgacaatgaagtccaggctgaggtggtctcagatggagttttggaacttattgggaacttgattaaaggtcactgttgctatgcaatgagactggcaacagttcatgcctcccctagagatctgtggaactttgaacttgagagatgatttagggtatctggcagaaaaaaatttctaagcrgcaaagtgttcaagaggaggcaaagcatacaattttggaaaatttgcagcctgatgatgcaatagaaaaataaaaatccattttctgagtagaaattcaagcctgctgcataaatttgcataagtaaagaagagccaaatgttaattgccaagacaatggagaaaatgtttccagggcatgtcagaggtcttcacagcagcacctcctatcacaggcctggagacctaggagggaaaatggttttct

SEQ ID NO: 789670 - DNA, 597 bp, Homo sapiens
aaagcatgtgctgatgaaacagcaaagaaatatgctgacaaatttttcaaggcctatgttaagaaaaatctgatgccagagcatgtctataaggctgaagaaatgtcagtgttttggtattattgccccagaaagacactgactacagttgataagccatcccctacaggaatcaaagatatcaaagacagaacaattctgttggaatgttctaatgcagcaagcatgcgttaagtataacttaactctctttgataagcaaaactttctttcttgctgttttcaagaaataaatttcttatcggttcattattatgctaacagaaaggcttggatcaccaagaaaatgttttctgttyggtttcacaatattttgaaccagtggcttgtgctcactgcaggaaagctaaactgaatgacaactgcaagattttcttattccttgacaactctgctgctcatcctccagctgaaatcctcataaaaattaatatcaatttcatgtaccttccccaaaatgttacttcattaattcagtcatgtgaccaggttacccacagatcgatgaagaataaatataaaaatgctttcctgaac

SEQ ID NO: 789671 - DNA, 595 bp, Homo sapiens
taggggaaggtatgtgaagggggagcaaaggtcacagacacagtggctcctttgggcactctgacctggaacccaaggatatgggtcttccattgcccactgaatgtggaccttcatgccttatgtcttgatagttcgatgggagaggcctcgatgatcctctgatcatcatacttctattacatttatcaaaaatgtaattcacaatgtttcaggactgatgccgttttctcactttgttgataattttgtccataaattctacccaataaatatttattgtgcacaaaaacctataaaatttcacaagtcyacttgttataatttaattaaattataaaaattggaatactgatctatgatactctaaatttttaaagaaaattttcctcatttagaagaataatttgatatgtaaatatgtgtggtttgcttaataattaaactaattttgtaaaatatagaactaaattctcatgttgaataatatgaaggtaaagaagaaaacactaattggcaaactaataactgacaaaacataatgtaatgcgaactgtaaaatattgagactttgaatcaatcaaaaagataacac

SEQ ID NO: 789672 - DNA, 604 bp, Homo sapiens
ccctaagatcgcgtttttcatctttttcttcttctgcagttctcttaagcagacgttatttcatccactatgcctctttttccagtggttctgatctatgcctcccttgctcttcattgtcatctccgagccattttcttcttctctcttttagtatgtatttattttgtcttccttccattgttacatttttttctccttcagaatactttatgtgtctgttatacctccaagtttctcatctttcatttgagatagtttttgtagtagtttacaaaccaccactttaatgctcaaaaaaatcccattcttcgttttaacattyactgtttttaagttcataattttttttcaaaactctttacattttaaatttcatacaaaaggcctatattctatgagctgtttcagaagtaaggttgaaagtgttgtttctatttacagaggttcgttgttttattttgtctttttgttcattgttttcttgttgtctatttacagaggttcgttgtttcttttctttttgatacatacttagttggggacagaagaacatctttattgaccacatcaaaccccaagaatttgatacatccatatgtac

SEQ ID NO: 789673 - DNA, 617 bp, Homo sapiens
ttaggtgtatattttggttattaaatctgtacttcctatatattaacttctgtcataattttgttttatttcattttattttattataaagtacttaagtgatttttaagaccaagatttctatccattaattctgtcttcagctgtgtttacaaattttaacagctttattttacataccataaaactcattcatttaaattgtacaattaactgtttttagtatagccacagaggtatgcaaytatcataagaatctaatatctgaacattttcttcactcaaaaatgagactccacatttataagggtcttgtttttgggtgaagaatttatttatacattttcataccaccattttccagccccaggcaactgctagattttgcctatcatgtacatttcacataaatgaggtgaaacaatttgtggatttttgtttcatttagtgtaatgggtgttcaaggttcatcatgctataacatatcttaatatttctttttatatccaagtaatattaaattgaaaaagttatttaacactttgtttattcatccatctggcaggagatatgtaggctcttaggaataatgctgctatgaacatttatgtgcaaat

SEQ ID NO: 789674 - DNA, 617 bp, Homo sapiens
ttaggtgtatattttggttattaaatctgtacttcctatatattaacttctgtcataattttgttttatttcattttattttattataaagtacttaagtgatttttaagaccaagatttctatccattaattctgtcttcagctgtgtttacaaattttaacagctttattttacataccataaaactcattcatttaaattgtacaattaactgtttttagtatagccacagaggtatgcaattatcatwagaatctaatatctgaacattttcttcactcaaaaatgagactccacatttataagggtcttgtttttgggtgaagaatttatttatacattttcataccaccattttccagccccaggcaactgctagattttgcctatcatgtacatttcacataaatgaggtgaaacaatttgtggatttttgtttcatttagtgtaatgggtgttcaaggttcatcatgctataacatatcttaatatttctttttatatccaagtaatattaaattgaaaaagttatttaacactttgtttattcatccatctggcaggagatatgtaggctcttaggaataatgctgctatgaacatttatgtgcaaat

SEQ ID NO: 789675 - DNA, 617 bp, Homo sapiens
ttaggtgtatattttggttattaaatctgtacttcctatatattaacttctgtcataattttgttttatttcattttattttattataaagtacttaagtgatttttaagaccaagatttctatccattaattctgtcttcagctgtgtttacaaattttaacagctttattttacataccataaaactcattcatttaaattgtacaattaactgtttttagtatagccacagaggtatgcaattatcataasaatctaatatctgaacattttcttcactcaaaaatgagactccacatttataagggtcttgtttttgggtgaagaatttatttatacattttcataccaccattttccagccccaggcaactgctagattttgcctatcatgtacatttcacataaatgaggtgaaacaatttgtggatttttgtttcatttagtgtaatgggtgttcaaggttcatcatgctataacatatcttaatatttctttttatatccaagtaatattaaattgaaaaagttatttaacactttgtttattcatccatctggcaggagatatgtaggctcttaggaataatgctgctatgaacatttatgtgcaaat

SEQ ID NO: 789676 - DNA, 612 bp, Homo sapiens
aaactaagcagtatgattagcatatttttttaaagtcagaaacagcaggaagtcaaataataagcaaaaggtgacttgacgagtgtggaatcagtataatgtttgaatgttgaattgcatgaggctaatccacgctatgctcgtcgccataatacagytatgaatgtcaatggcactataatacccaaccattggctgaaactccttctgacctcacatgtgcttggatgatcaatatgtatatttgttctataagtatttgtgtctcaccaaattttcttctgattgtctcatctttctttagttaatgaaaattaatcagattttaattaagtataacccatctgagaagattgctaacattgatacaatatgctccactttatctctcaaggtataaacaagcctggaagttcaaaatctgccttggttctgtgtcttgcctgctgtcaaacatcatttttaatttcttaaagcaaaacgaattttttaacaattaacataaagcaataaaagtagccaataatgtatatagatatgttaaatgcacatatttaaaatatcaaagtgtctccaatattttttcttctatataaatacaggtagggtcag

SEQ ID NO: 789677 - DNA, 587 bp, Homo sapiens
ttttctgacattctgtttactttgggaagttattgtttgtagaatgacattttctgcagcagacaatctagtatgcaaaaatctgtaaataacgtcacccagtacaataaaatgtaaggagtgccaattctcacaatcagctttgcaacttacaatgttaaacaaactaaaatgttcaagwgaagcaatcatctctgcatgtagtcgtgcatggctttcaatattagaggtcattttaacaactaattctcctttctcattttctataataaccaccttatcttgttctctcttttctgtttaattatttcaaacaaagcatttatactccctggattcccagctgtttaagataatttgtgttcaataaagtttattgctgtacaagaaataatgagagaaaggtatcccagtgcattccttttagactataacactttttctaagtggaaaattaagaatttcaaagctcccggtgtgtcatttctgcttgagtgatacagttgagtaccttcatggaaacactttataccatttaatttaagaagacaattgtgaagttaaatgttttttgaaagttatattag

SEQ ID NO: 789678 - DNA, 651 bp, Homo sapiens
atgtatctttcataataaggggtggcttacgtttacaaaaagtctattgaatattggttttggttttctaaaaaacaaaaaattcaggtttgtagcgtaagttttgatttcctagaaggcttcaccaacttcaacaaccttaaaaacaatatgtacagaatacatatagtgtttgtatagggctttttttttttttttctgagacagagtctcactctgttgcacaggttggagtgcagtggtgtgatctcagttcactacaacctccacctcccaggttcaagtgattctcgtgcctcagtatcccgagagggtgggattacaggcaccctccaccatgcctagctaatttttgtattttttatagagacagggtttcaccatgttggccacactgctctcaaattcctggtctcaagtgatcttcccacctcggcctcccaaagtgctgggattacaggcatgagccaccgtgcccrggctttatagcgcttttaagagttaaagcttcactataatcatcagggatggagtatttttattacacaaggctctgtagtgcattagtcagtcagttatcttcctgatggttagtacctcttcattgtgtcatttgtcatggcatttattcaatatggtattttacataaa

SEQ ID NO: 789679 - DNA, 459 bp, Homo sapiens
aaaaatgccaagaacacacaatgaggaaatgacggtctcttaaatggtgctaggagaatgatatacaaatgcagtagaatgaaattagacccttacctcacaccatatacaaagataaattcaatatggaataatagtggaatatatttgcaaactctatatctgataataagttaatamaaaaaatgtataaggaactcaaacaattcaagagtaagaaagcaacctgattttaaaaagggcaagggaccaaaacagacatttctcaaaagaagacatacaggtggccaataggtatatgaaacaatgttcaacgtcagtaattatgatgggaattgcaaagtaaaatcacaagatatcacctcatacttgttaggatggctattatcaaaacaatgaacaataactgctagcaagaatgtggagaaaagaaaagccttgcacattattgataggaat

SEQ ID NO: 789680 - DNA, 587 bp, Homo sapiens
agttatacttctaaaatgttgtacagactcttctggctcattttcctttcagctgactgagatgatgtatatagtagcaaccacccgacagtctgagatccaagtatcatgttaagaatggtaagacaccgaatcagctccaaatcacttaccttcgagcagtatcatgacagagaaatagattttaggcttttctctcttgcttagaacatatgaacctgtaatccaatacagcagtcttctccaagtttttatcatcaatttcctaaaccaacatacaaaattaatcttaatgctrgggtaacatatgagttttccccattagaaaatagatgagtataaaaggttggaatgtttatagactttggttgttgttcttgtcacgtacacaattaatgttatgctaacatataggtttacactcattatttaactttacagtcttccaagttattaatgaaatatttctggcaccttattctgcatatccaataaaaaacagaaaagtggaagtcattgaatggagattggcttttgtggaaatattttcttggtcatgagatgataacagtacagatcactggttg

SEQ ID NO: 789681 - DNA, 627 bp, Homo sapiens
gtgacctttgctccagttcccaataagtttcttatctttatctgagaccacctcagcctggacttcattatctatattactattaacatttttgtcacaaccattcaacaattctctaggaaattccaaactttcccacttttcctgtcttcttctgagccctccaaaatgttctaatctctgccagttacgcaattcccaatttgcttccacattttcaggtatctttatagcagtgcccaattgccagtataaattttctctgttagttcattctcacactgctataaagaactacttgagactgagtaatttatgaagaaaagaggtttaattgacttagttctgcagggtgtataggaggcatagctgagagacctcaggaaacttaaaatcatggcagaaggtgaagggaaacccagcaccttcttcacatggcagcatcagagagagggcaagggaaaagtktcatagacttttaaaccaccagctctcatgagaactcactcagtattgtgagaataacatgagggaaatgcacacccatgatccaatcacctcccaccatgtccctcccccaacgttggcaattagaactcaacatgagatttgggtggggacacagag

SEQ ID NO: 789682 - DNA, 536 bp, Homo sapiens
tactacaaagctatggtaattaaagcaatgtggcactggcataaacacagacatatataccaatggagtggaatataccaatagaaagcccagacataagcactcacatatatggtcaaatgatttttggaaaaggtgtcaagaccattcaatggggaaaggacagtcttgtcaacaaattgtgctaggaaaactggatgtttacacgtaaaaaattaattttgatgcttaccwaacatcatatacaaaattaactcaaaatgggtgaaagacctaaacataagagctgacatataaaaacttttagaatgaaacatagggaaaaagctatatgacacttcatttggtaataatttcttggatatgactttaaaggcacatgcaacaataaaaagtagacaaactagacttcataacaattaaagacttttttgcatcaaaggaaatattcaacagagtgaaaaggcaatctacctactacaggcttcaagaaaatgttaacaaatcatatatctgataagaggttgatatccaca

SEQ ID NO: 789683 - DNA, 469 bp, Homo sapiens
tcaacacattgatttaggccaggaccttcctctctggtgtagatggttgcaatagcttctcaggtggtctttgtacttctacttcctacctatctcttctttactgatcagctggaataatatttttgaaaacataaacaaaagtcactcctctgctcaaaatctttgcacggtttcctgctgtacttggaatacaaccccaagtcctttcctagggcactagccttgtwttggccttgatcactgctcctgcccacctcataccacttgtcatttggccattatagtccaacaacatccactcatccgctttctcgcaggccctggaatattctaagcactttcccatctcagggtgttgtgaatgctgtttcctctacctgctctcatcctcccactctttatcaactaagttctcacatacacatgtttgatctcaagctgtgtgtgtttacttgtttgttatttg

SEQ ID NO: 789684 - DNA, 549 bp, Homo sapiens
ccgtttagattcaatatgaattttagtatgagttttcctatttgtgcaaaaaaatctttgggatgtgatagggattgcattgaatctgtagattgtattgccatcttaataatattaaatccatgaacacaggatgtctttccgtttatgtatgtcttctataatttctttcagcaatgccttagagctttcagtgtacaartattcccctacttggttaagtttattcctaagtattttattctttttgaagttattgtaaattaaattgtttttcttattttttggattgtttattgtgagtttatagaaatggaactgatttttacagttgattttgtatcctgtaactttgctgaatttttaattagccctaagagtttttgtgtgtgtgcttgtgtggattttatacacatgagattatattatctttaggattttatatatatgagattatattatccatgaacagaaatcattttgcttcttcctttctaattaagatgtcttttatttcttgttcttgtctaatttttctagctagatctt

SEQ ID NO: 789685 - DNA, 618 bp, Homo sapiens
aaatgtacatttcatggttaggcagctcaaagccactgactagaagaagacaatagggatcgtgagaaaaagaagaatatttgaaaaaacttaaaacatatagaaaagaatcagaaacccatatatatagattgtataaagattgttgaggtatgaggcttttaactcatgagaggaaaatccttcaaggctgggcaagcaamacttactgatgttttgggtggaatccaaagtcaaatatggatgacaatggagaggttatatagacctaaaaccccataattctccttagattctattaaaaatgaacacagtgtacccttggagtctggggagctctctattctcctttcataatcttaaccatcactactaggctctgcctgatcttcccctacttccctactccaaccacatcagctccctctgttctgtaaacaggccaagggcactttgccttagagcttttgcacctgttgttctcctcttttcctaccacactcttttcagcagtcccccactttgttcagggttttctcccaacatcatctcattagaaagagctttcctggtcactgtgcctaaaacagcaatccccaccccatccttctctcttgc

SEQ ID NO: 789686 - DNA, 618 bp, Homo sapiens
aaatgtacatttcatggttaggcagctcaaagccactgactagaagaagacaatagggatcgtgagaaaaagaagaatatttgaaaaaacttaaaacatatagaaaagaatcagaaacccatatatatagattgtataaagattgttgaggtatgaggcttttaactcatgagaggaaaatccttcaaggctgggcaagcaaaacttactgatgttttgggtggaatccaaagtcaaatatggatgacaatggagaggttatatagacctaaaaccccataattctccttagwttctattaaaaatgaacacagtgtacccttggagtctggggagctctctattctcctttcataatcttaaccatcactactaggctctgcctgatcttcccctacttccctactccaaccacatcagctccctctgttctgtaaacaggccaagggcactttgccttagagcttttgcacctgttgttctcctcttttcctaccacactcttttcagcagtcccccactttgttcagggttttctcccaacatcatctcattagaaagagctttcctggtcactgtgcctaaaacagcaatccccaccccatccttctctcttgc

SEQ ID NO: 789687 - DNA, 636 bp, Homo sapiens
tcctgttgaagctcattcagctggcttgaagtgaagggaaagtctcccttccccatggaagggcgcccccccttccccatagtagcacagcattccaatgactctttatggagaaatcctctcccctccttctcttcaacttcgactcctgatatgggtgatgtgccaagagccacaaagccagcttttggtcatctcctttgtcaatccctgaaaaagtgggcaagctttgtaatgtggggagagcttagcatctattgttttgttttgttttgaaagcaaccacaccaaggctaactgatttttggagcctgggctcaaactaaacaagaaagaatctcattttaaatcctttyacacatgcattatctcacgtaatcgtttaggtatattggtcccattttacacatgggaaaacaggcttagagaggtcaagtgatttgttcaaggtctcatggtaagtggcagaaaaatctaaacccagattttttctgactccaaagttagtgctcgttccactttgaaactgttaattgattaccagagtcctgagtcttttggttaatgctctgagttggcatggggagtcttgttcaagcactggtacctctgactcacgactgtgttcttagtcca

SEQ ID NO: 789688 - DNA, 625 bp, Homo sapiens
aaagtgaaaataacttacaaaataagtaactgaagattttaagaatgaattgtggtacattcgtaagatgtaatactattgggtcattttaatgactacaaagaaaattaatgataggagaaatttaatcaaaattaaaataatggtattctttacaagtttttttttttttctttaaatgttttgctgtattaagcattctttttcttcagagtgtaaagagctagaaggatgaccaacaggagagaaataagtcagggagagaacaaaaagttcatctagccagggaggcttgtaggtaccagttttcttggcctaraattttcttctcctcctcatatgctgaacaaactcctactaatcctttaacattcaaattaaatatcagctctgtgaaatgttcctcaattctgcctcctaaatataacatattgtttgtttttacagattaaaatatataatagaattgtatgattttgtacataatttttaaaactctttatttcttacaagttaacaggatattcttttgcatatacctgaatgtgttaaaatgtctattaaataaaatgtttggatacatatatgctgagtgaatagatacatgaaggaattaataactttg

SEQ ID NO: 789689 - DNA, 623 bp, Homo sapiens
gatttataaaaataactatgcatttttttatctaatttgctacaaggtatagctggccaaagacttaacatacttacaggcaagggattcagactcatgccatgtgactccaaatccaatgattctttaaatcaagcacagggcaacattgaatacattttcctactttatatagcatttctgcaagtgctggggttacattttagtcttcayagaatgcgtgattcaaaagtttatttttttgatttaaagacacgaatttcctgagggttacagtaaaaatgatgtataatagaagatatacttggaccctgtcatcactcccgatgattccagtcttatttatactgttcagcccataaagtatccaaattcaatcttctttccattttgcttattcaatcacccagtgctataaaacactctccttccacctcatcaactcatctaatgcagtgttattcaaagtgtggtccaaagaccagtttcattccacagacttttatcaagctacaacatgataaatacagcaattgagagcagcattttagaaattttgatagcgatttgacattgccatgacatccaaatgcataattagtggactgtctctttggaaaaca

SEQ ID NO: 789690 - DNA, 653 bp, Homo sapiens
cttgctcttgtaattactatttcaaatttatctcattttctaatacacagagatatgggaagccaatacatgaaaacttccttaaattttgcaacttattttccaaatgttaatttatgttcacttattgcttcctgctttttcctattataattgawggatttcctttccatatctttgctgagtgcccaattacctcataccctatcagcaacctcagcaatatttttccttccttaatctttagatttctttctttcttaatatatttgtgtaaacatttccgtttcttcctacctctccaattttatttttacgaaattctgcatactttcttcacctttcaaacaacttttcttaattatctttaaaatatttggttaaacaggccgggcgcggtggctcacgtctgtaatcccagcactttgggaggcggaggtgggcggatcacaaggtcaggagatcgagaccatcctggctaacacagtgaaaccccgtctctactaaaaatacaaaaaaaaaataaaaaatagccgggtgtggtggcaggcacctgtagtcccagctactcaggaggctgaggcaggagaatggcatgaacctgggaggcggagcttgcagtgagccgcgctcgcaccactgcattccagcct

SEQ ID NO: 789691 - DNA, 598 bp, Homo sapiens
tagtttgacacttatataagttaccagcagaaaataggttagtttttctgagttgcttcttggtggtgtcactttagcttcaggagtgttaaatggagctatgtggcctggcacagtggctcacacctgtaatccyagcactttgggaggcctaggcaggtagatcacaaggtcaggagttcaagatcagactggccaatatggtgaaaccccatttctactaaaaaaaaaaaatacaaaaattagtcaggtgtggtggtgcacacctgtagtcccagctactcgggaggctgaggcagaagaattgcttgaacctgggagtcggaggttgcagtgagccaagatcacgccactgcactccagcctgggtgacagagcgagactctgtctcaaataataataaaaaaaaattttttaatggagttttgctgccgtctctcctcctgagtctgagtttttcttttcctgtggtggttgtggttcacactgcaaagaatgagacaaatcaagagaaaatcaggaatgactgactggaaaaacaaaccagacagttaaatatgtaagatgtttgtctagatatgcctaaaattttaagaat

SEQ ID NO: 789692 - DNA, 633 bp, Homo sapiens
acttattcactatcatgagaatagcacaggaaagacctacccccagattcaattacctcctaccaggtccctcccatgacatgtgggaataatgggagctctacagttcaagatgagatttgggtggggacacaatcaaaccatatcaaaaaccaaaccagcatctattgtgttcttttttttgactttttaataatagccattctgactggtgtgagatggtatttcattgtggttttgatttggatttctctgatgattactgatgctgagcattttttcatgtttgctgagtgcttgtatatcttcatttaagaagtgcctgttcatgtcctttgcccattttttaatggggttattcgtctttttgcttattggtttaagctccttatagattctggatattagaccttwtgttgggtacatagtttgcaaatattttctctcattctgtaagatgtctgtttacggtaatgatagtttcttttgctgtgcagaagctctatagtttacttaggttccacttgtcaattttcgtttttgttgcaattgcttttggggacctagccaaaaattctttgccaaggccagtgtcaagaagggtatttcctatttttttctaggatttttata

SEQ ID NO: 789693 - DNA, 627 bp, Homo sapiens
tagaatatttagtgagatgcagcgtaccaaagtggttaggaacttggtctttgaagtcagatgggcttgccttggaatcctgagacatccactaacaagctgtgacttggatgacttacttaatgtctctaagtctgtatttcctcatctgtaaaatcgtcttttatagagagtattaaaatgagaaagtatatggagtgtatttattacagcgcctggtgtagactcagtagctcaaaaactggaggttgttatcaatgtktgaatatattctgagcagtttctaagtctcttgggaaacttgaccttgaaagatgggtaccattaagaatttctgagacctgtataggtgaaatgtgaaatgggtcttcataatctttcagttttcttttctgctcctaatttcttgctgggcagtacagaaggaaaaacaaagatgtcataatatttgagggcaaacatccattgttgagtgtacttatatatcataattaaaaaaaagaacctaatggaaaaatagacaatttagaagaaaaattgtaaatgttcaataaataattaaaatagttccacctcactagtaatgaaagaaatgcaagaaaaaaaaagttaagttacttttttggg

SEQ ID NO: 789694 - DNA, 384 bp, Homo sapiens
actgtcccaattttctccctccctgtgtgtcactagagaaaaaaaaaaacaaaaacctagattccggattaggggatgacatcccaaacagcccggagtatttgcagaaggctcaggcaacgagtgggccacatctcacttctgcttcctcatctcagcccactctgaaaatgtgcagcaccctcactggttcctccccccaacgcaaggaggatgcccaattgttgccctctraaaatgcacagttctcctggccctaggacttacttattacatttttttctctttccttgagctgcctttggcaagggaagagacccccaactctgcgcccctactccatgctgctgatccccacctgcgcactatagctcagggtcagca

SEQ ID NO: 789695 - DNA, 628 bp, Homo sapiens
atgtcttttgttgatctattaaaaaaaccagctcctggattcatttattttttgaagggttttttgtgtctctatctccttcagttctgctctgatcttagttatttcttgccttctgctagcttttgaatttgtttgctcttgcttctctagttcttttaattgtgatgttagggtgtcgattttagatctttcctgctttctcttgtgggcatttagtgctataaatttccctctacacactgctttacatgtgtcccagagattctgttacattgtgtcwttgttctcattggtttcaaagaacatctttatttctgccttcatttcattatttacccagtagtcattcaggagcaggttgttcagtttccatgtcattgtgtggttttgagtgagtttcttaatcctgagttctaatttgattgcactgtggtctgagagacaggttgttgtgatttctgttcttttacatttgttgaggagtgctttacttccaattatgtggtcaattttagaataagtgcgatgtggtgctgaaaaaaatgtacattcttttgatttggggtggagagttctgtagatgtgtattaggtccacttggtgcagagctgagttcaagtcctgg

SEQ ID NO: 789696 - DNA, 613 bp, Homo sapiens
acacaccaaaatacccacccatacgcatacacacccacactctgttccccctctgaaacctggaatcactcctgcctgccccacccagctccacccaccctggctaggcaggttctgtagagacctgctccgctgtctctctggcacccccacccccatcccagctcccagaaggtacctgccccccaacacagcacacaaaagcagacacgtgtgcacattcatgtcccatagcaccccattccctagccttccccagacccattcctagtccgtcttgaagagaacactgggggtggaaaggctgcaggagaaaaggtgagtaatscccctggcatctgtcccaggtgggggccggcgggaagacgggacactaagctggtgggaaggcaaccagggcttctggattctccatttaatttttaccaacaggcaggccccacaatttccaccaccaggctttgagctgcttcctcccttggcctaggcagagaactggcccgtacctgcccaccaggtgagctgtggaagaaccaagaaggaaagcaggcagcttgaggtgtcttcagggagagggtggacaatgggaggtgggtgagttgtgctgacccgt

SEQ ID NO: 789697 - DNA, 594 bp, Homo sapiens
aaaaaccctagaagaaaacctaggcaataccattcaggacataggcatgggcaaggacttcatgtctaaaacacaaaaagcaatggcaacaaaagccaaaattgacaaatgggatctaattaaactaaagagcttctgcacagcaaaagaaactaccatcagagtgaacaggcaacctacagaatgggagaaattttttgcaatctactcatctgacaaagggctaatatccagaatcaaacaaatttacaagaaagaaacaaacaaccccatcaaaaagtgggcgaaggatatgaacacatacttctcaaaagaagacatttatgcagccaacagacacatgaaaaawtgctcttcatcactggccatcagagaaatgcaaatcaaaaccataatgagataccatctcacatcagttagaatggcaatcattttcttaatattttagatgaagttgaatttaccattttttaatggttagcgctttgtttgtaccttgtctgagaaatctttaccaacaccaagatgatcaagatattttctcatttatcttctagaagctttataatttcagcttttatttattaggtctat

SEQ ID NO: 789698 - DNA, 594 bp, Homo sapiens
aaaaaccctagaagaaaacctaggcaataccattcaggacataggcatgggcaaggacttcatgtctaaaacacaaaaagcaatggcaacaaaagccaaaattgacaaatgggatctaattaaactaaagagcttctgcacagcaaaagaaactaccatcagagtgaacaggcaacctacagaatgggagaaattttttgcaatctactcatctgacaaagggctaatatccagaatcaaacaaatttacaagaaagaaacaaacaaccccatcaaaaagtgggcgaaggatatgaacacatacttctcaaaagaagacatttatgcagccaacagacacatgaaaaaatgctcttcatcactggccatcagagaaatgcaaatcaaaaccataatgagataccatctcacatcagttagaatggcaatmattttcttaatattttagatgaagttgaatttaccattttttaatggttagcgctttgtttgtaccttgtctgagaaatctttaccaacaccaagatgatcaagatattttctcatttatcttctagaagctttataatttcagcttttatttattaggtctat

SEQ ID NO: 789699 - DNA, 609 bp, Homo sapiens
attagtccgttctacctttcctgaagattgaggacggtaaggggtatgaaggttccactgaataccaagagcctgagaaactgctttggtgatttggctagtaaaggctggtccgttatcagactgtatagaggtgggaaggccaaaccggggaattatgtctgacagaagggaagaaatgaccgtggtggccttctcagacccggtaggaaaggcctctacttattttgagggcctctaacagtattaaagcagcggcagccgctgcacacagacatgagggctaggttaaaacagtaaggtyaagttgtttggacagaaaggctacagggtgtggtcttggctcttgtgtaaaaattctgaccgtgctaaccatgcctaggaaggaaaggagttgttctgtagaaggtgcttgggtttgagagattagtcggacaggattggcagggagagcacgtgtgtttttatgagaattatgccgaaataggtaacagatgaggaagaaatttgggcttgattgaagtaatgggggctgtctgtgaagctttgcagcagtacagcctaggtaatttgctgagcttgatgggtgtcagggtcagtccaagtgaa

SEQ ID NO: 789700 - DNA, 629 bp, Homo sapiens
taactcagtttcaatagacagcaactactccagaagccatgtctgaagagaaaaactttagctaggatttgaaggcaggaaagcagatatcatttggtgaacattggactgtcgttttttcaacatacatctatggaacactaacatttgttgaatagtactccgatacacagcaaagaagaaaaactaataagcccrtaactgacattgagttctagttgagaaaaaagacaattaaaaaaatgtaatgcaatgtgataaatggtatagggatgtatacaaaatacctgattaaaagaaattgaggacagttttagataatatagtacttcagcttgtttttagagaatatgaaggatttggcgggaattgtacaaagtcctagaggtatggaaagtttgaggaaggctggttgtgagggagacagttagataaatctggagaaataggtgagaccacatctgtacaatctggcttgagaagtttgtatagaagacaaagatgaaaaagaatgctgtgttctaagtcatttttagagtgctattcctttagtcacagcaaaggttaagtttaggatacaagctttagactttccaagaaggcaaatcaaatttatcctggccttcttg

SEQ ID NO: 789701 - DNA, 576 bp, Homo sapiens
agactaaatgggaaggttttaactgattcatgtagggaactgaagcacagcatgtgatgtggtgtgcaatactggataacaggcaaatccaattaagggatctttatcctgttaaagacttgtctacaaacttaaaaaaaatccaggggccagccacagaagagcccactcagtcatcgtcagtggtaggtatctctcaratcctaataggtgaacatgtttcctctgtggcattgtagtgaggagtgctagattttgaaggcagacagacctgggttcaaagttcagctttgctacttattagctgtatgacttttgacaaattatcttcttttagcttcaatatcctaatcagtaaaacaaaagtactgccagtactacctcatacggctgctgtgaggactgagatcaagtttgcaaagtacttagcatggtggctggtggtgctcaacaaacaatagttattagtgcttcctttttcttctcctttccttctctccctcttttctttttccagttccctctttttgccttttgcctcctcttccttgtttcttttttccctctgcctaccac

SEQ ID NO: 789702 - DNA, 512 bp, Homo sapiens
catcacttgaccaagtcttaatccttggcaaggtgaatgaaactattatgtttggattaaatcagcaaatttcaacctctggaactggaatggggctcatttccaacaatatacatggccatgaggaagacaggagatatctggagaattatattagcagaagagaattacagtggcagaaacacttaccagcttggactgaaagtgacatagacagtacaaaatgaaaaragacctctggatcccccaccttgaaacttctaccagcagaaagcagattaaaaaaaagctacttggttgcaaaaacatgttatctttcgtgaaaaaagaaagatgactcagagggtggaaataagagccaagaaggtagaacattattctcaggctttgagacctaatcatggaaaagccaatcagtgcttaactgaatttcagaattgctaaggaccagttactcttgtgttacttccctattccccttttctgaataggagtgtctgtgtagcagttaa

SEQ ID NO: 789703 - DNA, 641 bp, Homo sapiens
ataaattaattggcccacattaaactaaaaaactgctgcacagcaaagaaatagttatcagaacaaatagacgatctccagaataagagaaaatatttgcaaactgtgcatcagacaaaatattaatatctagaatctacaaataactcaaacaaatcagcaagaaaaaaaaaccaycaaaagtgtgcaaatgacatgaacagacatttctcaaaaaaagaaatacaaatggctaacaaacatatgagttatcaggaaaatgcaaattaagacaacaatgagataccatctcactcctgcagaaatgcaatcattaaaaagtcaacaaacaatagccgtttctgtgaatatggtgaaaaggcaatgcttaaacattgctggtgggaatgtacattagtacaatctcgatgggaaacagtgtagagatttagtcaagaaataaaaggggatctactattcaatccatcaatcccactactgggtgtctacccaaataaaaagaagtcattatattaaaaagacatctacaggtgtatgtttattgcagcacaattcacaattgcaaatatggaaccgttctaagtccccatccaccagtgagtagataaagaaaatgtggtataggctgggcgcggtggctt

SEQ ID NO: 789704 - DNA, 641 bp, Homo sapiens
ataaattaattggcccacattaaactaaaaaactgctgcacagcaaagaaatagttatcagaacaaatagacgatctccagaataagagaaaatatttgcaaactgtgcatcagacaaaatattaatatctagaatctacaaataactcaaacaaatcagcaagaaaaaaaaaccatcaaaagtgtgcaaatgacatgaacagacatttctcaaaaaaagaaatacaaatggctaacaaacatatgagttatcaggaaaatgcaaattaagacaacaatgagataccatctcactcctgcagaaatgcaatcattaaaaagtcaacaaacaatagccgtttctgtgaatatggtgaaaaggcaatgcttaaacattgctggtgggaatgtacattagtacaatctcgatgggaaacagtgtagagatttagtcaagaaataaaaggggatctactattcaatccatcaatcccactactgggtgtctacccaaatwaaaagaagtcattatattaaaaagacatctacaggtgtatgtttattgcagcacaattcacaattgcaaatatggaaccgttctaagtccccatccaccagtgagtagataaagaaaatgtggtataggctgggcgcggtggctt

SEQ ID NO: 789705 - DNA, 536 bp, Homo sapiens
ctaagcaagtgttttcagatggctgatgatacacttgactgcagaacttctcaacctctatttcccagacatattttatggacatctaaattataattttccttgtttccagttgatttccactgactctaccaactcatagtctgctggcttccgtgcttttcacagggcattgcacaggccacaacacaacttgcttctcctaccactatccaagcaattaccaatgaccaagtacccttcattttattgataagtgccctgctggcwgactataaagtggagaagctagctgagtgcatctagcaagggtggaaaacaacagggtatcatggatcctgtttcccatttggccacaggttaaagtgagaactgtgtttactgcacatacagcttacacaccaaaagatgagactagctggaaaaacaaagtgagggtctatctatcccatccagttttattttaatgtaactataaattataatagtctatttaaaaatagtaaattcataatgagtactaaacaggatgccag

SEQ ID NO: 789706 - DNA, 507 bp, Homo sapiens
tatgccctgtgctccactccctcccctatttctctatcctaaggctgactttagcctactcatcaccatggctattattcttctttattcttctcaaaatctgcgatttcatcattttacccttttctacaggcttctgagatcagtttgttcattcgtatagttggccccagtaacaaagctaaaacttctatatttcaccggatttccagaatgtgaatgttgggtcttaaaccttatggtcaaataatatatttttttattttaaaaaatcattgcagtrtagaagaaaaaatacatggctttgaggccaaagagatccaagtccaaatccttgctttcccagttattagctcagtgacaaaggacccagcctctctgagcagttttcccaattgttatacaatttatggtaaaaatcatgagtaaattgcatgagatcaccagaagtcataacacatagcaggcactcatcaggatacttgtccatcatcacaaaataaggtg

SEQ ID NO: 789707 - DNA, 480 bp, Homo sapiens
tttgctcaaagtccagtccacagtttatttatatcagacatgctttgagaacttaataaaatacaaatacaaattcccggggtccactatcactataaaatgcagaaacgtttataagaattttgaggatagcatccagaaatgtgcattttttttttttttgagatggagtctcgctctgttgcccaggctggagtgcagtggtgctatctcagctcactgcaacctccacctcccaggttcargtgattctcctacctcagcctcctgagtagctgggattacaggtgcccaccaccatgcccagctaatttctgtatttttagcagagatggggtttcacggtgttggccaggctggtctcaaactcctgaccttgtggtccactcgcctgggcctcccaaagtgctgggattacaagcttgagccaccgcacccggcccagaaatttgcatttttaaaaagtgttgcttagggtaa

SEQ ID NO: 789708 - DNA, 526 bp, Homo sapiens
gaagatatttacagcacgaaagtgataatgtattctgttagaatacgtagtgtccacaaatcaataagaaaatggcaaatagctcaatataaaagtgggcaaaagtcttaaacacttcccagaaagaaaaatccaaatggccagttagcacmtaaaaagatgccctcactagtgattaaaaaaatgtaaactctagccttaggattatgatatttcatactcaacacattggtaagtcatgaagttggacagtttcaagggttgcagaaactatcccctgccagaaggtacatatctattagagtaggctaactgcataacaaacaaattcaaaagtaatttaatatagaaatgtttattttgtttttaacgtaaaccaaaaaagatatcccagttatcaagtagcagggacccaatatcctttcatcatgtacctctgttacctccaatatgtggcttctgcccggtgaggtggctcacacctataatctccacactgtgggatgctgaagccagaggactgctt

SEQ ID NO: 789709 - DNA, 473 bp, Homo sapiens
tcatcaatctattgtcaaaacatgaagacttgattggggttgctggagaggtaaatgttagtaatcttcacaagatcaaagtaaacacgttggactttcaggaggaagagaacctatggaggaaagggcagaagcactcatttcttcatctcacaaagagagagtcaagaagtattggcagaagttgatggaaaaaaaaacgrgaggaggttaagaagaatgctatcgatagtttaaaaagtagttttaaaacctttaaagtaatgatattaaaatatctaattgagagaaggtagaatagtatgagataaatcctcatgtaccgaattatgaagacaagatgtattttagtatttttttagtcaagaaatagaggtacaagtatatcgttcagagttgtgaaggtaattatcaccccaaactaaaagagacagttaaaggagcttacctttgaggaatagaaccagaggtgg

SEQ ID NO: 789710 - DNA, 486 bp, Homo sapiens
ccccaaggtaaagaaagatggtgactagtatacatttgaattgtttttgagattactacttgataccgagcctttacaggtttgggggtatcaaaatgaatgataaggtactcatgggggctagaagtttggaagggtctgccagagatgggctcagaacggctcactctattggtgatgcctaggaagaattgacccagaaagtgaggtctgagctatgtttttagagagacctttgccaaatggagaatagtgatccaggcttaaatgggaggatcctataccttacaacaatgaaccctgggaaaggtacatctgaaaaagagaccagtaaattgwtatctggcctctatttcttgccgtatctcctttatcaaagagaataataagtggatggaaaaatactgatataaggaataaaacctacaatcgttggaaagattgcacttgattcttagtctcttagacctgcaagatgataagaga

SEQ ID NO: 789711 - DNA, 434 bp, Homo sapiens
gactatatattagtcatatagtacatatactgtcattagtactaattttataatcttcagtacttaatataatgatcacattttaaaaaattagaacaaaattgagacttaaataatcgatagctttataagagtggttcatttaattagttaattggttcattaaaatacttatcaaaattactttttttccaaaaattttatgctttgaargttattatttgaaccattcacacaaatctgagcaaatactgcttaaatgcatgtacatcatggtgtggtgttttctgaagaggtgtggaatctttcgtgagatagcatgtacagatcaaaagatattgttccataaattttcatttgcaattaaaaagaaaaatttgttagattgatttatttttttccatatctatgctcagttccaagtgtttctgtat

SEQ ID NO: 789712 - DNA, 597 bp, Homo sapiens
gcatagcaagtacgcaataactgttgactagtgttatgattatctaagcctcagtttactcacctagagattgggtattggaatgtttactttgaagggtattttgagaattaaaatggagattgtttatagaaatatgtatagattaataaccggtacattgtaagcacacatccaaagattattcatctcttcttcytataaaatagttataatattattcatctcttcttctcataaaatagcttattaaaataggtgcccaaacaaatgcaaatctttactgttcataagtaccagtatttatttccaatggaagagaattcctgttacctaggaattaggagataagaatctttggttttgtggagaaggggcaggttatctaaggaaaggtaaggtgatttaagggttttaatatgcaaggtcatattctcaactgtgaaaagaaacttaaaattactatctgtgaatcaatatgtattaggctttaaggtgacactataaaacaactgtcataggctctgatatcccagccatacccatgcaagtgcacatcaacaagccaatttacaccatgtggttgtaatcttgttc

SEQ ID NO: 789713 - DNA, 630 bp, Homo sapiens
ttcctttttctccacaacttcgcaaggatctgttatttttttactttttaccaagagccattctgactggtctttgtgtgtgtgtgtgtgtgtgtgagacggagtctcgctctgtcgcccaggctggagtgcagtggygtgatctcggctcactgcaagctccgcctcccgggttcacgccattctcctgcttcagcctcccgagtagctgggactacaggcgcccgccaccatgcccggctaattttttgtatttttaatagagacggggtttcaccatgttagccaggatggtctcaatctcctgacctcgtaatctgcccacctcggcctcccaaagtgctaggattacaggcttgagccaccgcgcccagccctgactggtcttaaacccctgggctcaagtgatcctcctgcctcagcctcccaaaatgctgagattataggtttgagccactgtgctgggccttgatgtgtttttaaaaaatattttgtttggtgatcattgagcttctggacctttgggtttatggttttcagcaaatttggaaatatttttccacattgcttcttcagatatttatgtccttttcctctctaacccctttttcccttgggactccaattatg

SEQ ID NO: 789714 - DNA, 630 bp, Homo sapiens
ttcctttttctccacaacttcgcaaggatctgttatttttttactttttaccaagagccattctgactggtctttgtgtgtgtgtgtgtgtgtgtgagacggagtctcgctctgtcgcccaggctggagtgcagtggtrtgatctcggctcactgcaagctccgcctcccgggttcacgccattctcctgcttcagcctcccgagtagctgggactacaggcgcccgccaccatgcccggctaattttttgtatttttaatagagacggggtttcaccatgttagccaggatggtctcaatctcctgacctcgtaatctgcccacctcggcctcccaaagtgctaggattacaggcttgagccaccgcgcccagccctgactggtcttaaacccctgggctcaagtgatcctcctgcctcagcctcccaaaatgctgagattataggtttgagccactgtgctgggccttgatgtgtttttaaaaaatattttgtttggtgatcattgagcttctggacctttgggtttatggttttcagcaaatttggaaatatttttccacattgcttcttcagatatttatgtccttttcctctctaacccctttttcccttgggactccaattatg

SEQ ID NO: 789715 - DNA, 647 bp, Homo sapiens
atgttatcacagcaaaactggaaagaatctaaaatgtgaaataccatgcgggggaaattgttggatcaaagaaggtatttgtcgggagaattaatgtgcaatttaagtatattaagtcctgtaattaactgagataacttccaggaacgtgaagagaaacaatggggaaaaaaaacgaaagcgaaaaaacagaaacaacagggttcatcctacttcaccccagaaaaatctgttaatgaaggcccaaggtaaagagtctaaactgccagaattgactctataaatttatgtaggactggtacaaaagacatgaagactgttatatgaaaaaatataaaatatcagagcatatcacatayagtaagggcaagtattgttttgttaaactgattttacttgtaagcatgttggcacactgggttgggatataaaatgtgtttcttattatggtgaatggtcaaaaggtttacagacactcctccagaatatgtgagtatgcaaatgttcaaagtcttttacgttgtgaatttacgctcccacctgcagcgtttgagaagccctgttctacatctctactagccttagtgaagagaaattcctttattttttctaattggtattaaatggaatctcccagtggtttaaat

SEQ ID NO: 789716 - DNA, 619 bp, Homo sapiens
atcctcctcaaaatcaaataatccctacttgtcaagctcataaccacttccctaggcctcaatatggagggaaattataggtagtgggaagatagcatcttttcttactctttactgacttcactgaatatttgggatakgagtttctcatttagattatgtttcagtattaccatacctgatgcaaattgcactttccaaaatacatacagttggaagagtttggttttttaaaattgcttccttgtctgctgggttttaacttttactagtgaggaagggtcttcatagggagcaaaaattcaattagcctttttcttcctcaagattctgggtacaggctgggaaagaagccaaatgatgaagctttaagaatgagtctgtcttgcctcccccaaactgcacagctttcctccttggcttgcaggccttggtacttatcagcagttttcctagtttgattagatttaatgatagaatcttttctttcatgaaaccttgggtggacactgagaatatcatcacaacatctgagatctaggcagtctcttctgcggttcttaattcaacccaaccgtggtatctttaagtggcccttaaaatcaccactgccaggtaa

SEQ ID NO: 789717 - DNA, 655 bp, Homo sapiens
gctacctggaggcttcatctacataacaggaccttggcttccacaatcccccttatcttaacccatgcatttcttcccgctgccttcaacaattcaggtgaagctgaactctttcaaccaattgtcaatcaggaaatctttgaatccacctatgacttggaagcccccactttgagatgtcacagttttcttggccaaaccaatgtacaycttatatgtattggtttatgccattgcctataacttctagctccccaaaatgcataaaatcaagctgtaacccagccaccttgggcacatgttctcaggacctgatgaggctgtcacaggtcatgatcctcacatttggctcagaataaaccttttcaaatattttacagagtctggcttttttcctcaacaaagcataatgaccaatagtaaaggaaaattctcagggtttcccagtgaagagaaaaatgggtccccagaaatggacccatattgcaagcagcccgtcctggagtgtgactgtgcactgagtcaaggtgggtgaggagcagagaggacccctccacgccttattaggaagttgtggtcatgggccagcagcagcagagtaggcaggctgaaagggacctgagcgtcacaggatttcaaccacttgttcatagag

SEQ ID NO: 789718 - DNA, 610 bp, Homo sapiens
ataagatccattgattatatgaatatcaatatccaagtcatgatattgtatcataattttgcaagatgttaccattgggtaaagggtacatgacattgctaagttttatttcttacaattgcctgtgaatctacaaatttctcaattaaaaatttgatttataaaaagaaaaaaagaaattacataaaaagaggggcaggraaatcaggtagagtgggaggggatgtgaagtgtggggtcaagaggaagattttctaaagataaaaagtgctcgagcctcttctaatactattggaaataatccagtggggacagagagagaaatgatgaggaaagagagggagggagggaggagagagagagagagagagagagaaagagagagagaaagagatattaaagaagagaagtccttgagaaagagatgagtgatgaagagaggaaccccagtgggggaactgagctttgagagcaggagggacatgtcttccactctaataggagagaaggagaggtatcagttaggcaaggatgcaggcagatttggtggtgggaagatgaaggattttatttctattttctgaatgaaatatgaggtggagacctcaga

SEQ ID NO: 789719 - DNA, 610 bp, Homo sapiens
ataagatccattgattatatgaatatcaatatccaagtcatgatattgtatcataattttgcaagatgttaccattgggtaaagggtacatgacattgctaagttttatttcttacaattgcctgtgaatctacaaatttctcaattaaaaatttgatttataaaaagaaaaaaagaaattacataaaaagaggggcagggaaatcaggtagagtgggaggggatgtgaagtgtggggtcaagaggaagattttytaaagataaaaagtgctcgagcctcttctaatactattggaaataatccagtggggacagagagagaaatgatgaggaaagagagggagggagggaggagagagagagagagagagagagaaagagagagagaaagagatattaaagaagagaagtccttgagaaagagatgagtgatgaagagaggaaccccagtgggggaactgagctttgagagcaggagggacatgtcttccactctaataggagagaaggagaggtatcagttaggcaaggatgcaggcagatttggtggtgggaagatgaaggattttatttctattttctgaatgaaatatgaggtggagacctcaga

SEQ ID NO: 789720 - DNA, 648 bp, Homo sapiens
agagcttgatataggtgtgaacaaagtaccatggccacgttttgcctggggttgtctagggatacccacagagatgggtgacatttgaattgggtgctgaaggtggtaacaggaagagatagaggggaatgatattcctggcaatgagacttgaatgtgtaggatcaagatttgtgaaagggcaatgtgcttaggaatggtgagatactacatgtgactagagtccctggtgtggaggtaattacatgtctgaaaagacttttatgtcagtttacggaaggtggttttatgttgcagcccaggggtggaacagattcatgctccaatctatttccacctctggttaatgtatagaggttgtactgaagtgggaaggctaggatcggttgaaaccacattggagactatttgtaatattctagctctgaaatgatgaggttcccactaaagccaaggccatgggcatggagatgctrgcctgggctggagggggacatttctaaggatgaatagcaggatgtgatgactggttagatatggaagatgaggtgggctgtaaggaagagggaagacaggctctttggctaacagggttagtaggctccattaactgaaacttgtagaattggaatgagagcagaaatgtgt

SEQ ID NO: 789721 - DNA, 565 bp, Homo sapiens
catacatcgtataatttatctggcaaccctgtccccatgctcttgcatttttctcaaatagacacacagagagatcagcaaggccactgcccagtgagagaataaaatgctagtatcacttctggtggccaagtagaatgattctcttggccagttgcttgcttgacytgagatagggatcccagggaagggtggggaaaactcataatgaatactgcatttccattgacttgtatcctccaatgatttctttgattctcaggtttgcatttatagactaagagagggatgggcagtgaactttgagagtcttccgtggtgggtgtccatctctagttgtgtgttatgtgttgttttcttggtctcagcttggggtagctggcttcaaattttgggaattaggaaaaactctcttccacatcctgtacatactacaacacagctgcatcaaggcaatcccagactttctcatctgaagttgtgatagaacttgcttttgttattctaagtagtctcttgtatttcaacagcatgtggtgttggaatatgtcagtttccacatggt

SEQ ID NO: 789722 - DNA, 593 bp, Homo sapiens
tctgctcattgtctatattagtcagttcttcagagggacagaacgaatagtgtgtgtgtgtgtgtgtgtgtgtgtgtgtgtgtgtgtgtgtgtgtgtatgagtttatcagattaaaagctgacacaattacaaagtgaagtcccatactaggccatctgcaagctgaggaaaggcagaaggcggtagtagcccagtccaagtcctaaagcctcaaaactagggaagcctacagtgcagccttccatctgcggctaaaggccagagagcccctgggaggcttctggtccaagttccagagcccaaaggctgaagagcctggagtctgatgtccaagggcagarggagaggaagcaagatctcagcgtggagagacagcaggagtgagagggtgcagcaagctgcttacccccttcttctacctgctttgttccaactgcactggcagccgattggatggtgcccacccacgctgaaggtgggtctttgactcccagcccactgactcaaatgccaatctcttctggcaacaccctcacagacccacccagaaacaatactttaccagtcatctaggcatccctcaatccaagca

SEQ ID NO: 789723 - DNA, 630 bp, Homo sapiens
ttccaaagatcacctacagttagatcttttgggggtttgactgctgtggataggagatggaggtgatgcaggatttttgctccttagttcagctaaatgtgtgttcttgtctcacagctagaaaaaattaggcatgcagaaacattgaatggtgagaaggatggaatttattaagcgaaaaaaagctcttggcaaaagaggggaggtcctgccaacaggttttcacctccctaattgaatatcagggctaccacacacgcgctaaagaggccactcctcccttgcataaggcatgaattcctggtggctccatcccattcccccagtgckcaggcaggcacgccctggcaagccatagatagtattggaaaaggcagcatttgattggttgaaaggccttattcagaaagaatcaattgggaaagggtggacaaacaggggcagaagttttccctctgggttgcaggtttcatccggaaccagcactctggtctttcagctttcaggctgctttaagcttgaagcgggggtctcacccgagacccttccctagctgcctaggcatttgtctgcctcctgcctttattagagcaagattgaaagaggctggccagagagccccttgcccag

SEQ ID NO: 789724 - DNA, 630 bp, Homo sapiens
ttccaaagatcacctacagttagatcttttgggggtttgactgctgtggataggagatggaggtgatgcaggatttttgctccttagttcagctaaatgtgtgttcttgtctcacagctagaaaaaattaggcatgcagaaacattgaatggtgagaaggatggaatttattaagcgaaaaaaagctcttggcaaaagaggggaggtcctgccaacaggttttcacctccctaattgaatatcagggctaccacacacgcgctaaagaggccactcctcccttgcataaggcatgaattcctggtggctccatcccattcccccagtgctcaggcaggcacgccctggcaagccatagatagtattggaaaaggcagcatttgattggttgaaaggccttattcagaaagaatcaattgggaaagggtggrcaaacaggggcagaagttttccctctgggttgcaggtttcatccggaaccagcactctggtctttcagctttcaggctgctttaagcttgaagcgggggtctcacccgagacccttccctagctgcctaggcatttgtctgcctcctgcctttattagagcaagattgaaagaggctggccagagagccccttgcccag

SEQ ID NO: 789725 - DNA, 630 bp, Homo sapiens
ttccaaagatcacctacagttagatcttttgggggtttgactgctgtggataggagatggaggtgatgcaggatttttgctccttagttcagctaaatgtgtgttcttgtctcacagctagaaaaaattaggcatgcagaaacattgaatggtgagaaggatggaatttattaagcgaaaaaaagctcttggcaaaagaggggaggtcctgccaacaggttttcacctccctaattgaatatcagggctaccacacacgcgctaaagaggccactcctcccttgcataaggcatgaattcctggtggctccatcccattcccccagtgctcaggcaggcacgccctggcaagccatagatagtattggaaaaggcagcatttgattggttgaaaggccttattcagaaagaatcaattgggaaagggtggacaaacagrggcagaagttttccctctgggttgcaggtttcatccggaaccagcactctggtctttcagctttcaggctgctttaagcttgaagcgggggtctcacccgagacccttccctagctgcctaggcatttgtctgcctcctgcctttattagagcaagattgaaagaggctggccagagagccccttgcccag

SEQ ID NO: 789726 - DNA, 704 bp, Homo sapiens
cttctcaaaagaggatccagaaggcaggctcagcattgcagcctggctgcaggccacagtgtggcagacgcatgtattcatgggcatgtcaaatacatcacttcaatacgaaattcataggcccaacattcatctgcragattgaacactgggtagctcaaaagctagtcttctgaaagcatcctacaaaacacccgaagttgccgttccagaattgctataatttcacgactgtgcaagctgtactagtagtacacaggcaaagggatagaaaaaagattatattaatgctcaagggggaaaagcaagattataaaggacttagcagagctatgttctgataataaaccaagagcatttaggacccaacctagaaaaaaatggatttacagccgaagtctttcctgtttggggctacagcatcattctgtcattctaaccacatttatcctgaacctccccccaccacccgctgcccatgtgctggccaccgtgctgggatcaacaaaactgaatgagacacaggacctgatactggggagctgaccatctagcaggtgacgtatggatggatgaagcatcttaggacatctaaagaaagagatcactcctccatactggtaagtccacagacagctttacggagacatttgagtaaagtcctaaaaaggggcagggatgcagccatgtgcaatgggaagaaa

SEQ ID NO: 789727 - DNA, 604 bp, Homo sapiens
cagcttgcgggtaggtatggagggagaggcgcgggcgggaaccggggctgcgcgcggtgcttgcgggccagcgtgagttccgggtgggcgtgggctcggcggaccccgcactcggagcagccggccggccctgccgccccgggcaatgaggggcttagcacccgggccagmggctgcggagggtgtactgggtcccccagcagtgccagcccaccgacgctgcgctcgatttctcgccgggcctcagctgccttggcgcagggcaggcctcgggacctgcagcccgccatgcctgagcctcccaccccctccgtgggctcctgtgcagcccgagcctccccgaggagcactgccccctgctccacggcgcccagtcccatcgaccacccaagggctgaggagtgagggcacacggcgcgggactggcaggcagctccacctgcagcctcggtgcgggatccactgggtgaagccagctgggctcctgagtctggtggggacgtggagaacctttgtgtctagctcagggattgtaaatacaccaattggcactccgtatctagctcaaagtttgtaaacacaccaatcagcaccctgtgtctag

SEQ ID NO: 789728 - DNA, 604 bp, Homo sapiens
cagcttgcgggtaggtatggagggagaggcgcgggcgggaaccggggctgcgcgcggtgcttgcgggccagcgtgagttccgggtgggcgtgggctcggcggaccccgcactcggagcagccggccggccctgccgccccgggcaatgaggggcttagcacccgggccagaggctgcggagggtgtactgggtcccccagcagtgccagcccaccgacgctgcgctcgatttctcgccsggcctcagctgccttggcgcagggcaggcctcgggacctgcagcccgccatgcctgagcctcccaccccctccgtgggctcctgtgcagcccgagcctccccgaggagcactgccccctgctccacggcgcccagtcccatcgaccacccaagggctgaggagtgagggcacacggcgcgggactggcaggcagctccacctgcagcctcggtgcgggatccactgggtgaagccagctgggctcctgagtctggtggggacgtggagaacctttgtgtctagctcagggattgtaaatacaccaattggcactccgtatctagctcaaagtttgtaaacacaccaatcagcaccctgtgtctag

SEQ ID NO: 789729 - DNA, 604 bp, Homo sapiens
cagcttgcgggtaggtatggagggagaggcgcgggcgggaaccggggctgcgcgcggtgcttgcgggccagcgtgagttccgggtgggcgtgggctcggcggaccccgcactcggagcagccggccggccctgccgccccgggcaatgaggggcttagcacccgggccagaggctgcggagggtgtactgggtcccccagcagtgccagcccaccgacgctgcgctcgatttctcgccgggcctyagctgccttggcgcagggcaggcctcgggacctgcagcccgccatgcctgagcctcccaccccctccgtgggctcctgtgcagcccgagcctccccgaggagcactgccccctgctccacggcgcccagtcccatcgaccacccaagggctgaggagtgagggcacacggcgcgggactggcaggcagctccacctgcagcctcggtgcgggatccactgggtgaagccagctgggctcctgagtctggtggggacgtggagaacctttgtgtctagctcagggattgtaaatacaccaattggcactccgtatctagctcaaagtttgtaaacacaccaatcagcaccctgtgtctag

SEQ ID NO: 789730 - DNA, 537 bp, Homo sapiens
cttttgggaggctgaagcaggagtatcacttgagctcaggagttcgagaccagcctgggcaacatagagagacccctgtctctacaaaaaaaaaaaaatcaaaaaattagccagatgtggtggtgcatgcctgtatgcccagctactcagcattgattgagcccagaaggtcaaggctgcagtgagccaagatcgcaccactgtactccagcctgggtgacagggtaacaccctgtctcaaaaaaaaaaaaaaaaaaaaaattttaagtgccaaacaaagagaaaaaacaatacccagacgccctcctgagagaatcactgaytctggcaggttagagaatgagggctgggcccaccagcggagccacagctggaggaaatgcagatttcagctgctcattgctttgaaatccatggatgttccctccctaaggaagaaattccatcagaataattaaaagtgtccccagtagagagctcttggcactctgcgactcccaatcctctctgtctgtcaaagtcctccgcggccttcaa

SEQ ID NO: 789731 - DNA, 392 bp, Homo sapiens
gctctactggcaaatgggtaccctggctcttttaagccacactttatatgctagccattacagcactaatagaatatgtaggtgctggtgctgggaggctgagatcagatatgaatagaatttcaaggtctgggaggtaaagcaagagtgaagcaagggtggtattagataagatatgcacttaatagaagtagctgccaaggatgggaagggccaatggtctgggctgggccagacctgctgaattggcaagktagaaggaaaggacagtgggactagagaacatatctgtgagatcaggtaaattcacactgataaccattcttggtgtggccagacctgttttcaacccatccctgacagccttggagaagctgtattctgtgccgggg

SEQ ID NO: 789732 - DNA, 649 bp, Homo sapiens
tcagtggttttcactttggtttactgataatgggcagctgatcattgaaaagcctagtgcagtactagcttagtaaatagagctgactgctgaactggtatgcaaattgttttactaataataaataacttggtgtcttctatggaaggaactgctggaagctgtacagaaacaaaggcattcattatcctagttttcataggcttctgtataaggaagaagaraaacataaagctatactgaacaagattagagtcaacagtagacagaaattacttagaacagtataagatgacttaccaaaggggttattcagacagtatctgaggtttttgttggtagagcagggtgtgggtggtacatgccacagccttctgaaaaatgagctaccgctgatttggtaagggtgttctgcatccactgatagaccttgaacaatttactgttgttcttttggtttgcactaggatgcaaaagaaagaaatccctgcgctttctgtctgtctttgtggcggcccagattgaattggggaatacatctttagcctggaaatgtaggctgcatgttaatggtaatgtaacttttgcagtgtaatgtttgaaaaatattaatgtagtttttgcttttacagtaacaaatgtggcaatt

SEQ ID NO: 789733 - DNA, 443 bp, Homo sapiens
cccttcagggttgtcagatgtgctgaacattggaaacgggaaatattctgtttgatgacctttgccaaattgcaaagtgcaaactggcaaagtgagtttcatcactcagaatttcagttttggagatggcagagatacataattatctagttaaatccctcatcaaatcaagaaataaaatgaggtgtccgggctgtgactcatgcctgtaatcccaccagtttgggagaccaaggcaggckgatcacctgaggtcaggagtttgagaccagcctgaccaacatggtgaaaccctgtctctactaaaaatacaaaaattagctgggtgtggtggcctgtgcctgtagttgggagctacttgagaggctgagacaggagaattgcttgaacctgggaggtggaggttgcagtgagccgagatcacgctattgcactccggcctg

SEQ ID NO: 789734 - DNA, 602 bp, Homo sapiens
caagctttgggtcaaagccctaggaaggaaaactggatctgagggatccagaagcaggtaataatgaaagttaaaaggtacagcgcaggtgagcatggctgattcctgctaaattagccaagcccaagcttcctatttcatggataaaggccttgttagtatccatggcataaatgaggtctagggaactccaaggctactgacagtaggtgggaaagagacataggggagagtggataattcctactctctagcccccgctgcttcatgggtgcgagccgctttgatgtccatggtggcacctgccaaggtcrccggaactcagaaatacgaggatggaagagggaaagaggacactcttccctctctacctcaagtaccctgggtatctgctaggaagagaagagaagcagggatgcctgctccccgctttctagatggctagccattcaccttcagtctgtacccttttcaaatgcatcctaaacccctgggactcctttgaaaaaactccttcttctctatcctgtcttcactcatagtaattgcgtctctctagtatggaacactccccacaaatgcatcctccaaactggaaagag

SEQ ID NO: 789735 - DNA, 655 bp, Homo sapiens
ctaggaaggaaaactggatctgagggatccagaagcaggtaataatgaaagttaaaaggtacagcgcaggtgagcatggctgattcctgctaaattagccaagcccaagcttcctatttcatggataaaggccttgttagtatccatggcataaatgaggtctagggaactccaaggctactgacagtaggtgggaaagagacataggggagagtggataattcctactctctagcccccgctgcttcatgggtgcgagccgctttgatgtccatggtggcacctgccaaggtcgccggaactcagaaatacgaggatggaagagggaaagaggacactcttccctctctacctcaagtaccctgggtatctgctaggaagagaagagaagcagggatgcctgctcccckctttctagatggctagccattcaccttcagtctgtacccttttcaaatgcatcctaaacccctgggactcctttgaaaaaactccttcttctctatcctgtcttcactcatagtaattgcgtctctctagtatggaacactccccacaaatgcatcctccaaactggaaagagttaatttctcaaatcttaaactggttggcttaggactgggctcaggggaagggaacccagaagcctgacatg

SEQ ID NO: 789736 - DNA, 622 bp, Homo sapiens
ggttggcttaggactgggctcaggggaagggaacccagaagcctgacatgccagcaaaagagtgaagttttttttttaaccagctgggctcttggcctccctctccctgggcaaactggtaaaaggcctcagaatttctgagctgtccttattcctctccttgtttcgttttaatacatgttttctaacaacttagtttgttcttgcctttaggccatcacactcgtcatgcaaycggagcctttgacgatggccccttttgctgggaacccttagataggactgtgggggagctctgactgctgtttccccaaaatggcgccccctgtcagcaggaagctgttaagatgggtctttgtccttatcttcagtctaacaacggttagaagtacttctttatagctgggaatgagacaaccaggtgaaatgtggaccctggagaaactccaaccagcctgcccactgaagtggaccctcaggtagttggtaccctttgcagcggggagaagcttggcccctcctcttcctgtgtggaagctgggattcaaatggcaggaggtaagtgctctaacaggggactctggccttgcagaggatccctgtttccccttttttctccctc

SEQ ID NO: 789737 - DNA, 622 bp, Homo sapiens
ggttggcttaggactgggctcaggggaagggaacccagaagcctgacatgccagcaaaagagtgaagttttttttttaaccagctgggctcttggcctccctctccctgggcaaactggtaaaaggcctcagaatttctgagctgtccttattcctctccttgtttcgttttaatacatgttttctaacaacttagtttgttcttgcctttaggccatcacactcgtcatgcaaccggagcctttgacgatggccccttttgctgggaacccttagataggactgtgggggagctctgactgctgtttccccaaaatggcgccccctgtcagcaggaagctgttaagatgggtctttgtcyttatcttcagtctaacaacggttagaagtacttctttatagctgggaatgagacaaccaggtgaaatgtggaccctggagaaactccaaccagcctgcccactgaagtggaccctcaggtagttggtaccctttgcagcggggagaagcttggcccctcctcttcctgtgtggaagctgggattcaaatggcaggaggtaagtgctctaacaggggactctggccttgcagaggatccctgtttccccttttttctccctc

SEQ ID NO: 789738 - DNA, 625 bp, Homo sapiens
tgtttaatgttgacagtggggtgttaaaatctgccattattattgtgtgggagtctaagtctctttgtaggtctctaaggacttgctttatgaatctgggtgctcctgtattggttgcatatatatttaggatagttagctcttcttgttgaattgatccctttaccattatgtaatggccttctttgtctcttttgatctttgttggtttaaagtctgttttatcagagactaggattgcaacccctgcctttttttattttccatttgcttggtagatcttcctccatccctttattttgatcctatgtgtgtctttgcatgtgagatgggtttcctgaatacagcacactgatgggtcttgaccctttatccaatttgccaggcagacatccaattttctatctgtaaagacacaaaactcattatcacacaatttagatggaaatataagtaaagagaaaacttttttttttatagccrctagcactttcttaaaaggaaaatcacataattattcagacagatgttactgtaaagttgtagaggtcaaaccattggagataaacttgggttccaattctggctattggggctatgcaggccacagatgtagaaattaact

SEQ ID NO: 789739 - DNA, 617 bp, Homo sapiens
tccagtactgtttaaaactgaattagagaaggtgcactctgaaagatgtgttagttttaggatttccaactagtggctaaagcgccctaaaattaaacaacttgcccaaggccagtaagtgttataaccttagagttttggactgagatttctgcacttattaatgttgcatcacacacacacacacaaacacacacacacactctattgtacacagtagggatgtagtttgttacctattataagttgagcaaaaaatgctaactatgtttttaaatgtcatagtcctcaggaatgtgaaacccatagagcatttaagcttctatttttctaaagactaaaggatgattttaataaagatgtcggtacccatgaaaggtaycagataaacagataaatagatgctccatttattccatttatgcacagaatagctactcagttcctgttagcacatgtctttctggtaaagtcagggcacttgaagcatttcaatactctgttgggaggataatttgtgtttcaataaaggagcttcctttggggggatttgaactaagaaattaattcattttcagtaggattactaagtagatcttcctggagcacagaagttg

SEQ ID NO: 789740 - DNA, 627 bp, Homo sapiens
gtatacaatgtggaatggctaaattaaggtaattaacatatgcattaccttacctacttattttttcgcggtgagaacacttaaaacctatctcttagcaatttacaaatatgtaatatattaattatagtcaccatgttgtacrttagactcctttgaacttctcctcttgtctaactgaaattttgtattctttaaccaacatctccccaatttctctcttctcccagccctttataaccactgttctactctctgcttctataaatttgactttttaagtttttttagatttgtttttctgtgcctgacttatttcacttagcataatatcctctatgtttgtccatgttgttgcaaatgacaggttttcctccactgggaagtcagaatagtattctattttgtatatataccacattttccctattcattcacccattattagatattaaggttgattccatatattggctattgtgaataatgctacaatgaacatggaactaggaagcttttgagggtactgaatataaccattattttcattttggtgatagtttcacgggtgtatacatatgtcaaaacttaacaaattgtgcaatataaatgtgtaatgttcacctc

SEQ ID NO: 789741 - DNA, 627 bp, Homo sapiens
gtatacaatgtggaatggctaaattaaggtaattaacatatgcattaccttacctacttattttttcgcggtgagaacacttaaaacctatctcttagcaatttacaaatatgtaatatattaattatagtcaccatgttgtacgttagactcctttgaacttctcctcttgtctaactgaaattttgtattctttaaccaacatctccccaatttctctcttctcccagccctttataaccactgttctactctctgcttctataaatttgactttttaagtttttttagatttgtttttctgtgyctgacttatttcacttagcataatatcctctatgtttgtccatgttgttgcaaatgacaggttttcctccactgggaagtcagaatagtattctattttgtatatataccacattttccctattcattcacccattattagatattaaggttgattccatatattggctattgtgaataatgctacaatgaacatggaactaggaagcttttgagggtactgaatataaccattattttcattttggtgatagtttcacgggtgtatacatatgtcaaaacttaacaaattgtgcaatataaatgtgtaatgttcacctc

SEQ ID NO: 789742 - DNA, 509 bp, Homo sapiens
tgaatgagaagaaagaaatacctgagactatggagaaagacaaatataagagaaggcagaatttagatcagttgtagtttaggagtgtggactgcattttgaaaaacctgttacctaatcagtctttgtacctgaaggtacaaaccacagtagactgtggaaaatatttccttggccttaaacggcagggggaccctatgtaacagtttgcccctttccaaaaggattgagttgaaatgatgattaggstcacttctatatgtgaagttctgtgatatttgatgttcaggcaggtattttcatgcaagaattcagacactattggatatcagaaagaacattaggaatagaggaatcagaaaccataactgtgtgacttatgacaaggcatttgacttctcaggttgttttagaactaccatttgacccagcaatcccattactgggtatatacccgaaagaataggaatcattctatcataaagacacatgcacgcatatgttaatca

SEQ ID NO: 789743 - DNA, 633 bp, Homo sapiens
ttttggtgggctctggagtcaggctaagttcaaatcctggctcaaacactgactagttgtataacattacgcaggtcatcccatcttgttaatccaaaattttctcacctgtaaactgagtattaatattaaataataaggttgtgaagagtaacacatgtcaatttcttaatgcactgcttagcatataattcatgttagctactactgttattacagtcattatttcaacactaaatgaaaacttcagaagtgatcaattcaaaggagagcaaggtataatttacaaaagaaaaaaagtcaagaggcacatacatttgtgaagaartgcttaaattaactaaaagtgagataatgcaaattaaacattgataggtattttacttatagaattggaaaaaacttttgaaaatgatcatcttctattttggcaaaagtatatgtagttaaacaggtgggtactctgagacctaggagtgaactctagattggtataggcttttggtaatgcaattcaatatgtatcgtgttttaaaagacttcacactcttcgaccttgtaactggatgagtcctttaaggagacagtgaggctgtcaaagatttttattaaaccataatatattaataataa

SEQ ID NO: 789744 - DNA, 580 bp, Homo sapiens
tgattagaatttctgttccatttcctggaaaggcaatttccagtgctttctgtgacacccacgccttctccacaagcccgcaccctttactctttcagcaggtggctctgcctttcatctcaatgacagccatccagaactttcagaatgaattcacttgttttggcagacccaaggtccagccccagtatgagcctggagaccctgacactcacaaggttgttaamagcttttctcataagaaaaaatgtgttcaccaacctcagatattgtcgttattctcaagtcagtcacacacaagtctgtgtgtgccatttgaagagataaatacatagacacacacacacacgcacacacacacaccccaaaacacagtgcagcattgagagagaatctgtaattgtttgcagttccagagggggagaccagtctttctaggcagaatgcttgcttgctctttcagtgctctcctagtgccttgagtgacatgacaaagctgtagttagatgtcactataaaccagccccaaattatacaggagtcatgattaactatgattgcaggcctaaggcaggtaata

SEQ ID NO: 789745 - DNA, 625 bp, Homo sapiens
tcttacagcactgacttgagctattctagttgtaattcttttttgactgccttctagtgcagcacttcaggatactattcaggaaaaaaagtatctaacaacacattcgtagaatcatttaagtgcaaagtacctaagagagagtttagtacggtgatttttcaaagttgtccaaaatatttgtagatgcttgagagagagacatgagcaagagcaaaggtggatctctgctcacctttcaaatcagaacacttcgtccatcagtttctcagctcaccaggggaaaaaaaatgtggcaaaaaaaaaaaaaaggaagggagagagtggggagggagaagccactgacttataacttaattctttaattttgccagagattaaaacacttcccatcttgcaaggacagcaggagaaatgttagttcttctgcctcattcattcataaaggcttgttgctgactgatctcagccggccacgttgctcatwctatagagcaaagaccatgctgtatttaagtccaaaagcataccccacaacctatcaagaagtgacccaagacacctgggtgagcagaatttacctttttggtgtccaaataaaagatgacttttgtccatttcaagt

SEQ ID NO: 789746 - DNA, 524 bp, Homo sapiens
tgttcattgctagcacagcagtctgagattaaactgcaaggcggcagcgaggctgggggaggggcgcctcccattgccgaggcttgagtagataaacaaagcagctgggaagctcaaactgggtggagcccaccgcagctcaaggaggcgtgcctgcctctgtggactccacctctgggggcagggaatagccaaacaaaatgcagcagaaacctctgcagacttaaatgtccctgtctgacagctttgaagagagtagtgsttctcccagcacacagctggagatctgtgaacggacagactgcctcctcaagtgggtccctgacccctgagtagcctaactgggaggcaccccccaataggggcagactgacacctcatatggccaggtactcctctgagacaaaacttccagaggaacgttcaggcagcaacatttcctgttcaccaatatccgcttttctgcagccaccactgctgatacccaggcaaacagggtctggagtggacctccagcaaactcc

SEQ ID NO: 789747 - DNA, 515 bp, Homo sapiens
atatttttcttcagcttatagaaaagccagatgctaatggtttaaaaaacagctggagttcgtaaagttaattctctccataacaacactagttcaggggataaataattttcaaatatcaacttgaagcattttattctttaagaaaaagcatatatagggcagggtgtggtggctcacgcctgttatcccagcactttgggaggccaaggcagacggatcacaaggtcaacagatcaaggccatcctggccaacatggtaaaatctcatctatactaaaaataaaaaaataactgggagtggtggtgcacgcctgtagtcacagctactcgggaggctgaggcagggaattgcttgaacccaygaggcagagcttgcaggagccaagtcaccactgcattccagcctggcgacagagcgagactctgtctccaaaaaaaaagaaaaagctattcatgattaagaaccaatcatcaagaaatttggttaaggtagtaatcataaaaagtaaaac

SEQ ID NO: 789748 - DNA, 574 bp, Homo sapiens
aaaatccagttagagcttccctggatccacctgagggatggattacctgggctcctggctcctcctcctccctgcagcagcctgcgcgtggccaccccactagcgcctccagcaaagcagatggaagaagccagccagtcaaggttgctgcatgtctgcctctctaataaaatccaggaagatttagtaggagaaaacctccaaaagttaggtttccaaaaaamagaaaaaaaaattttttttttctttgagacagaatcttgctctgtcaccaggctggagggcagtggcgcgatctcagttcactgcaacctctgtctcctgggttcaagtgattctcctgcctcagtctcctgagcagctgggactacaggcgcacaccaccacgcccagctaatttttatatttttagtagagacagggtttcaccatattggccaggatggtctcgatctctcaacctcatgatccacccacctcggcctcccaaagtgctgggattataggcgtgagccactgcacccagccaaaaaagaaaaatttttaacttatcaagctgctcctatctctgact

SEQ ID NO: 789749 - DNA, 580 bp, Homo sapiens
ggccttgcagggacgcaagacagtttgatacagtttatatataaagcatttaaatattaagaacaataaaccttattcccagcagttccttgccttgaatactgttaaggctgtttatgtttccactgacatttctgaccctttattttccaatacccatgaagagaaagaaaacaatctgtcacgcacatatgtctcttgtcaaagagttctttcctgggagaacaaagggatagcatttatctacaggcaagcacttcggtcttgaaggacatcacaacatggtgcagaggtcttgatggacttacttagctaaagaaggaaagcacctatagggcagcacaaggtagatcctccctcactccaaacctccagtattattcagagcagctttatattctgttcatgcctattttaaatgttattaaaatgtacctatatgygtagatttttctctccataatccttctggaatattacattataaatcaactcaaaagttaaattaatgacatccaattaaaaaagtagattaagagactcatagaggaagcactgcgctaagattaatgaaaatgtt

SEQ ID NO: 789750 - DNA, 448 bp, Homo sapiens
ctatgtcatttttccttgatataccacttttctccaaatcctgtattttaaatgaaagagaaaaagatgaatctcagtacataacaaagccagcagtacactgagtaaacatgcatggtgcatggtatgtatcagcacatgggaggaagatttgaaaaasggagcttggaaacgcttccctaaagaaatgagaccgaaacctaagggaccacggagcaatgatgtacttctgtatcatgacagacttcttagttggggctgtgcccttctcatgtgatcttgggcaagtcaattgattgagctgaagctctttcctattgtgtaagatgcagtgaatgtttaactggttcatgatattctcaggagggtccatttttaaagccctgtaaaccataaagcattaggaacatatcagaggatagtctcgaacctggcagggtgctcctca

SEQ ID NO: 789751 - DNA, 539 bp, Homo sapiens
ccccaccgctactaaaaatacaaaagttagccgggcatgatggcaggcgcctgtagtcccagctaatcaggaggctgaggcaggacaatcgcttgaacccaggaggcggaggttgcagtgagctgagatcgtgtcactgcattccagcctgggcaacagagcaagactccatatcaaaaaaaaaaaaaaaaaaaaaatcaggagcacagaaggggcaccttaagagctggagagctccagacacagaaatctggatgtgggcacagaaatacctgacctcgactctgtgtaaatcaacggaggaactctcaaaagatttatctggcaaagtgcaaagtgtcagcagctaaatgtgccattttcattgtcttctctgcagactaagaaggaattttctccctaattgccctttctgctttcaacagtcatatgctataattatgacaacgggayggtggcaaatatccttcaattttcttcacagactgcaacaagaaatgtggtcgtgagcccttaccaacaaaattgggagcggctta

SEQ ID NO: 789752 - DNA, 618 bp, Homo sapiens
ttccaccccagctccatgcagcagccaaagtaatccatttataatacatcagagcaagcagatcagtttttggctcaaaactctgctatccagtggctatccatcacactcaaagtaaagtcaaagtccttacaatgaccagcaaggacttgcttgatctgggctccatcacctccctggtgtcatttctcactcttcttgctcttccctcattccattccagcctctgtgcttttctcgtaatgtaccaggaatgctagagcytttgcactggatctaccctctgcctagattgctaatctctcatatctggtttggctcacctcttcacttccttgatgtctttgcccaaatatcaccttttcagtgtagcccaccctcgctgctctacacaactcccaccctctatctccagtttatgttttctttcccttgtagctctttattatgctcttggctactacatgattagctttttattatgcccttgcttattatctgtcttcattgctagactgtaagctccgtgacagcattttttgttttcttcattgatttatttcaagcatatagaagaatgcccagtatatagtatgcactcaacaaaaagtttgttgg

SEQ ID NO: 789753 - DNA, 618 bp, Homo sapiens
ttccaccccagctccatgcagcagccaaagtaatccatttataatacatcagagcaagcagatcagtttttggctcaaaactctgctatccagtggctatccatcacactcaaagtaaagtcaaagtccttacaatgaccagcaaggacttgcttgatctgggctccatcacctccctggtgtcatttctcactcttcttgctcttccctcattccattccagcctctgtgcttttctcgtaatgtaccaggaatgctagagcttttgcactggayctaccctctgcctagattgctaatctctcatatctggtttggctcacctcttcacttccttgatgtctttgcccaaatatcaccttttcagtgtagcccaccctcgctgctctacacaactcccaccctctatctccagtttatgttttctttcccttgtagctctttattatgctcttggctactacatgattagctttttattatgcccttgcttattatctgtcttcattgctagactgtaagctccgtgacagcattttttgttttcttcattgatttatttcaagcatatagaagaatgcccagtatatagtatgcactcaacaaaaagtttgttgg

SEQ ID NO: 789754 - DNA, 669 bp, Homo sapiens
ttctcacttcatatatataaaaacttcaaagcaatataattccattcttccattcatcatttgtgttatcatatctttgatttctatacctacattatacactcaccttataatgctagtttttgttttcacaatcagttttcatttaaggaaattwcaggaagagggatgcagccttgtatatttacctacctacttaacatttctggtggcttgctttcttttctacagatttgcatctctatctgtatactttcccttcagcttaaaggacagtgtagtgcagaactactagtggcagattctcccagctttttgttatctgaaaatgttttatttatttatttatttatttattttttggagaaagagtctcactctgtcacccaggctagagggcagtggcacggtctctgctcacggcaacctccgtctcccaggttcaagcaattctcctgcttcagcctcccaagtagttgggattactggctaattttttgtatttttagtagagactcggtttcaccatgttggccaggctggtcagaaactcctaacctcagatgatccacccacctcggcctcccaaagtgctgggattacaggcatgagccaccacacccggcctgaaaatgttttatttcttcttcatttttgaaagagtttttg

SEQ ID NO: 789755 - DNA, 669 bp, Homo sapiens
ttctcacttcatatatataaaaacttcaaagcaatataattccattcttccattcatcatttgtgttatcatatctttgatttctatacctacattatacactcaccttataatgctagtttttgttttcacaatcagttttcatttaaggaaatttcaggaagagggatgcagccttgtatatttacctacctacttaacatttcyggtggcttgctttcttttctacagatttgcatctctatctgtatactttcccttcagcttaaaggacagtgtagtgcagaactactagtggcagattctcccagctttttgttatctgaaaatgttttatttatttatttatttatttattttttggagaaagagtctcactctgtcacccaggctagagggcagtggcacggtctctgctcacggcaacctccgtctcccaggttcaagcaattctcctgcttcagcctcccaagtagttgggattactggctaattttttgtatttttagtagagactcggtttcaccatgttggccaggctggtcagaaactcctaacctcagatgatccacccacctcggcctcccaaagtgctgggattacaggcatgagccaccacacccggcctgaaaatgttttatttcttcttcatttttgaaagagtttttg

SEQ ID NO: 789756 - DNA, 585 bp, Homo sapiens
gatgtgtgctttgtgtcctccatgtcctatttttcctcttcttccctacccagccgtttatccaatcccattcacagatccttgcttcatagtcaggtgtaagtggccaacagcataaaatattactactctcagtgggatttgcattttccaagcgactaaaatcctaaattgaaaggaggaaactctagcggggcaaatccagccctgatttagagcagagtttctcagtctcagcactgtggacattttgggctggatagttaatttgggggacttgtgcattgtaggatgtttagcacsacctctggcctcaacttactaaatgccagtagtgcaacaatgctttccccagttaagacaaaaatgtctaagcactgctaaatatcccctggggagagaaatcacgcataattatgatccattggtttagaggattctgcagggaagtggggccttccaggatatcttaaatgacacaggggttataagtgcaaatgccttcagggaccaggcagaaatggaaatgcagaaagcagaagagtataatatgataaggagtggtggggcttgtggcaaaatgga

SEQ ID NO: 789757 - DNA, 585 bp, Homo sapiens
gaatgatttaaataatggtaagttatactgtggaataccattgagttattaaataaaaaaagaagaaaagcctcttggttagacatatatatacactgacataggagttccaaagtatgctgttaagcaggggaagagagggggagggagtcaaagaacagttgtataccataattccacttatctaaaaataaacccttatcatgtgtatgggtaatacaaaacaatctgattgatacacatcaagagtaattatccctagaggaaaagagagtggtgttagaggagggcagtatagttttactttttctctgtacaattctatattatatattataatttacaattacaattttgatagtaggtatgcagattactattatagcaaaatacaattactattttgatagtaggtatgcagattactaatatkaaacatttgcacactggaggatgcttataataggattccttcattctacaacaacactctactgtaaatgtaattaatgccttgtactgaacactcaggtttttaaaaaaatgatgttttctgctatcgatgaagtattggtattttctaaa

SEQ ID NO: 789758 - DNA, 588 bp, Homo sapiens
  misc_feature 550, 552, 556, 561: n = A,T,C or G
cgggactatatgaaaagaccaaacctgtgtttgactggtgtacctgaaagggacagagagaatggaaccacattggaaaaagcactttaggatattgtataggagaacttccccaacctagcaagacaggccaacattcaaattcaggaaatacagagaacaccacaaagatattcctcargaagaggaaccccaggacacacaatcatcagattcaccaaggttgaaatgaaggaaaaaatgttaagggcagccagagagaaaggtcaggttacccacaaagggaagcccatcagactaacaacggatctctctgcagaaactctacaagccagaagagagtggggtccaatatttgacattcttaaagaaaagaattttcaacccagaatttaatatccagccaaactaagcttcataagtgaaggagaaataaaatcattatagacaacaaatgctgagggattttgtcaccaccaggtctgccttacaagagctcctgaaggaagcactaaatatggaaaggaacaaccagttccagccactgcananacanaccanaatgtgaagatcatcaacactatgaag

SEQ ID NO: 789759 - DNA, 636 bp, Homo sapiens
tcacatggtgaaaacaggagcaagcaagtgagagagcgtagggctgaggtgccacacacttttaaatgaccagatctcacaagaactcattatcacaaaaacagcaccaagtcacgagggacccacctccgtgatcaaaacacctctcaccaggcccctcctctagcattgaggattacaattcaacaygagatttggaaggggacaaatattcaaagcatatcgttccaccctggcccctcccaaatctcatgtctttcttacattgcaaaaaacaatcatgccatccaaataggttcctaaagccttaactcattcaagcattaactcaaaagtccatagtctttgggtaaaaatatctgttccaaaaagataaatcagccaaacatacagggctactgtccacatgcaagtttgaaattgagcagggtagtcattcaatcttaaagctccaaaataatctccagtgaatccatgtcccacatccaaggcatactggtgtaaggggtgggctcacaaggccttgggcagccccacccctctggctttacagaattcagccgccaaggctgctctcacaggttgttgaatgactgtggcttttccaagggcaaggggcaagctgctgattgatct

SEQ ID NO: 789760 - DNA, 636 bp, Homo sapiens
tcacatggtgaaaacaggagcaagcaagtgagagagcgtagggctgaggtgccacacacttttaaatgaccagatctcacaagaactcattatcacaaaaacagcaccaagtcacgagggacccacctccgtgatcaaaacacctctcaccaggcccctcctctagcattgaggattacaattcaacatgagatttggaaggggacaaatattcaaagmatatcgttccaccctggcccctcccaaatctcatgtctttcttacattgcaaaaaacaatcatgccatccaaataggttcctaaagccttaactcattcaagcattaactcaaaagtccatagtctttgggtaaaaatatctgttccaaaaagataaatcagccaaacatacagggctactgtccacatgcaagtttgaaattgagcagggtagtcattcaatcttaaagctccaaaataatctccagtgaatccatgtcccacatccaaggcatactggtgtaaggggtgggctcacaaggccttgggcagccccacccctctggctttacagaattcagccgccaaggctgctctcacaggttgttgaatgactgtggcttttccaagggcaaggggcaagctgctgattgatct

SEQ ID NO: 789761 - DNA, 619 bp, Homo sapiens
aatcaatcagaaaacaattaacaatatgacagaaacaatgcctcacataacaatggcctcgaaattaattagattaaattaccctcttaaagtatatagattgactgaatggataaaaagaacaaagcccagctatatactacttacaagaaactgaccttaccatcgacacacatataaactgaaataaaagggctgggaaaaatattccagggaaaagaaaactaaaagcatgcaggaatagctacacttagataaaacagcctttaagtcaaaaacagggaaaagagacaaagaaggtcattatgtaattaagaagggagaatatattagcaaaaatactaacaattctaaatgtaaatgtacccarcactggagcatccagattcattaagcaagtattactagaactgaagaaagagacttcaatacaataacagtggtggacttcaacacccttctatcagcattaaacagataatgctggcagaaaatcagcaagaaagcactggatttaaattggactttgaccaaaagtacctaacagacatttacagaaggtgacacaaacaaatggaaaagcatttcatgctcatggatcagaataattaataccatt

SEQ ID NO: 789762 - DNA, 547 bp, Homo sapiens
catgacatctcttctttctcccccaactatctttcttgcttttgttcttgccacgtgaaatgcctgctctccctttgccttctgccatgaatgaaagcttcctgaggcctcatgagaagttgagcatatgctggtaccaggcttcttgtatagcatgcagaaacatgaggcaataaaacctagttttgtataaactgcccagtgtcrggtatttccttatagcaatacaagaacagcttaacacagaaagttggtgccaggaatgggttattttcataaagatacctgaaaatgtggatgcggccttggaactggataatgggcaaaggttggaagactttggaggactcagaagaagacaggaagttgaaggaaaacgtgaaacttcttagagactggttaaatgtttgtgaccaaaatattgatagtgatatggacggtaaagtccaggctgataaggtcgagccactgcttcagacattttaagccataagcattgacagtttccatgtgatgttaatcttgcaggtgcacagagtaaaagagt

SEQ ID NO: 789763 - DNA, 547 bp, Homo sapiens
catgacatctcttctttctcccccaactatctttcttgcttttgttcttgccacgtgaaatgcctgctctccctttgccttctgccatgaatgaaagcttcctgaggcctcatgagaagttgagcatatgctggtaccaggcttcttgtatagcatgcagaaacatgaggcaataaaacctagttttgtataaactgcccagtgtcgggtatttccttatagcaatacaagaacagcttaacacagaaagttggtgccaggaatgggttattttcataaagatacctgaaaatgtggaygcggccttggaactggataatgggcaaaggttggaagactttggaggactcagaagaagacaggaagttgaaggaaaacgtgaaacttcttagagactggttaaatgtttgtgaccaaaatattgatagtgatatggacggtaaagtccaggctgataaggtcgagccactgcttcagacattttaagccataagcattgacagtttccatgtgatgttaatcttgcaggtgcacagagtaaaagagt

SEQ ID NO: 789764 - DNA, 547 bp, Homo sapiens
catgacatctcttctttctcccccaactatctttcttgcttttgttcttgccacgtgaaatgcctgctctccctttgccttctgccatgaatgaaagcttcctgaggcctcatgagaagttgagcatatgctggtaccaggcttcttgtatagcatgcagaaacatgaggcaataaaacctagttttgtataaactgcccagtgtcgggtatttccttatagcaatacaagaacagcttaacacagaaagttggtgccaggaatgggttattttcataaagatacctgaaaatgtggatgcgrccttggaactggataatgggcaaaggttggaagactttggaggactcagaagaagacaggaagttgaaggaaaacgtgaaacttcttagagactggttaaatgtttgtgaccaaaatattgatagtgatatggacggtaaagtccaggctgataaggtcgagccactgcttcagacattttaagccataagcattgacagtttccatgtgatgttaatcttgcaggtgcacagagtaaaagagt

SEQ ID NO: 789765 - DNA, 566 bp, Homo sapiens
caagaagaccccttgtcaactgggcacatgtacacatctcctcaagccatacttaatctccaaattaagacaggaaaatggtcataattcctcctgacatgatgcagctattctgcatacaacaaaaaatccattgatctccacacaagagaaagtaaagtaaatgagtgatgtttactcctctcctgacatcccgtaactcaaatactatgatgtaacattgacaatatttaaatactaatataaagtcaatatgttttattttaaattattatagaataacagagaaaataaatcaaaggcatttgctttacatatatacatatatatatatatatacacacacacacacacacatgtatttgtgtataaacrcaactgtattcataacaaaataagaagggaatactcatgatgatgacagtcctccttttggaaaccggtcacatcatcaaggctggtatttctaactaccttcctctacaactcattctgtattccatttgccttcagcaagcatcttagctggttgtcattttttacctggcagggtaaccaaaccttaa

SEQ ID NO: 789766 - DNA, 600 bp, Homo sapiens
gaattctaagggctggtaagaagaagcagaattaagagaagccatacttttttcttgggtgtaaaaccaagatccctatgagataaacagacacgcacggatgtgtctatgcatacacagacacacacacacaaacacactttgcacatcacacattamacatatattacatggaattagagtttgtctcaaatgaaactattgtggcctgttgaagctttcaaaaccttccagtagaaaaattgccctaatttggagggtctgcttccacagcagtggggtctctgattctctactcataacatctacatccattagatggaaaaccccttttgaatgagggaatgattcaacatatttatgtcagttgctatggtctgaatgtttgcattccaccaaaaaactgtatgttgaaatttaatccccaatgtcagggtatttggttgtggggccttttggagataattacatcaagagtagagtcttcatgaatgggatcagtgcccttaaaaaagaagctccagagatatttacctgccctttctgtcatgtgggtacacaacaaaaaatgctgtctatgaagcaggaagtggccagcac

SEQ ID NO: 789767 - DNA, 330 bp, Homo sapiens
caggcacgcaccaccatgcctgtctgagtacgtatgactcaatcatagattatgtcaatttatatgtacacatggaaatacatatatatgtgtatacatatgtgtgtgtgtgtgtgtctatattgcagttaacgtaatgcttcatggagtatatattttagtatgtcaaaatggttatatttcagaactcytttcccttagaaatatattgtttgaagtatatttttattgaactacatacagtatctactcagaaagtacaagactcataagtgtaaagctagaataactttcttaaagtgaatgtacatatgcaaccagaacataaac

SEQ ID NO: 789768 - DNA, 606 bp, Homo sapiens
aatgtaaatgagatcacattactaggactaccctcaaaaccctccagacttcccatttattggacagaaaagtttaaaattcttacagtggcttgcaaagccttttgcctctgaccttatcttctattgctctgtgttccagagattttggcctctatgctattgattgtgtatactaaacatgctcccatctcaaggttgtcacatttgctgtttctactgcgcagaatgttcttctagatatatttgcataactcartctcttaatttcttcaagtctctgatggcatgtcaccttattatgggcgttttccctaactattttatttaaaaacagcaaattctccagcacttcctatttgttattgttttattttctccataatagtcatagccatctgacatattacgtattacaaattttttacatttattgtctgattccctcatctagaatatcagctacataaagccagaaatatttttgtctgttttgttcactgctgtatcacaagcacccagaaataggcctgcccttagtaggcacttagtaaatactggttgagttaatgacctgcttggtaagtggtgattcattcaatctaa

SEQ ID NO: 789769 - DNA, 396 bp, Homo sapiens
ctgcacatcttccagttctgactgtctggtattccagagctgtgttaggaggattggcttccacctcaactgtcagtagcactttcagactggcttctttcacttaacaatatgcatttaagattgttccatattttttcatggcttgatagcacatccctttttatcactaaagtattctaccgtatgaatgcaccacagtttgtttattcacctattgaaggacatgttkgttgtttccaagttttacaaatataaataaagctgttgtaaaaattcctgtgcagttatttcccagctttattgagatattaattgacaaataaaaattgtacgtattcaagttgtatgtgatgatttgatatacatatgcattgtgtcatgatcactacaatc

SEQ ID NO: 789770 - DNA, 568 bp, Homo sapiens
aaatacagagaaggccctcaccacaacttgaccatgctggcaccctgattttggacttccaacctccagagctgtgaaaaataacatttctgttgtttaagctacaaactctgtggtatctgtcatggcagctcaaatttcttaagacatgtggttatcctagctactgcattagaactccatccacccctacacaaagaacagcttggccacccctcaagagtatacacattggttgtacagtctgtcactgggaggacagacgcagagaaaaggctcatgcagggccattagtaggytcaggaccatctggtagagaattctgggatttcatatacccaaaacatggtccagtggagaagtaggctcccccatggaaagcaatccccttgctctcatgtacaccttgttccatggaatgtagttggagggtgccaaaggagaccttttaaaagagaagcaaaaggctgggcacggtggctcatgcctgtaatcccagcactttgggaagccaaggcgggcagataacaaggtcaagagatcaagaccatcctggccaacatggtga

SEQ ID NO: 789771 - DNA, 631 bp, Homo sapiens
aattatggaagaaaaaattttatccttctccattagatttatttattttaaatgtattaaaataaaatcaacttagtacggattccgttgtttgttaaatctaaagattattagcatcacattaaggcaactgtgaaaattcctatccagtgataaaggaagccaggtagawgcctcaagtttccatgtgacactttgggcaccatcagagccctgctcttcaggtgaagccacggatccattttcctctcctctccctgacccccaactcagcatgttgggaagggttaatataagtggcttggggacgagagagcaactgccaaaggggagccacccagcccagggcagtgcattctaggaatggggttctgctccccaagtgatgcgtactctctgaggtcataatcaccatggagaattcatggctcaagaggcagtaaagcaaaggaagtgagggaggagatgtcagtttagagaaaaagctcttcaaaggccaaactagttctcaagaagaaatggtaggagtggtttagaaagcttgagtagtgtgtgtgttgtggggcgggcagtgagtaggcggtggagagaataaaagctgtttaatacagcgattaagagcccacgcata

SEQ ID NO: 789772 - DNA, 622 bp, Homo sapiens
agaagcagatggtgaggaaactagaactcaaactgagttcaggcagtatgtttctagaacctcgatctggcctgtaagaatatagtcaatgaattttactcaatgaatgttgaaagaacgaagtcaagagccggacatggtggcacatgcctatcgcgggaggatcgcttgagcctaggaatttgagaccaacctgggcaacatagctagacctaccttgwctctaaaaaaattaaaatgaacaaaaaagaaagaatgaagtcagtaaactgtactagagatcaggatgacctttgggggtatattagaaaatggaaatttgaacaacccaaagtgtattcacatttgattctggattaccttagagggggaatataaacatattcaaaataagaaccattagttcttatagggcaccccaaggggagacttcttaatctaatctattcctgcttcatgaggaggggactacaggctcaactcagacatcccagccagggacacacagtgagtggcccgtgggctagaacacacagccagcatgcgggccagagaagcctgtcgtgttttttttatttatttttaattttttttgagacagagtttgttgcccaggctggag

SEQ ID NO: 789773 - DNA, 623 bp, Homo sapiens
attgtatagtggtcatcagttgttatgatacactgctgcctcactgtgggtgacccaacccatttgttacaatttgtccccagaggttattccctcccagccccccrcaaaaaaagactgtgggtcttttgactgggaaaattaccattattgtgagtactatttttttttctaaagcgaccgagtagatccttttctccgataacttgatagaatacttagatttttaaaacagactaccaaatgaatttaaaaccaaattaattcaacattctcatctggccataaattgagttctttaacatgtagtgaagcaaagggtgatgtccccattttggcactttgctttcttaagttagtgttcattaacaccagccccaaacagactattgtgattatttggagccttgaagtaattgtgtccgtggggacagtagcatgtgactagggttctcattgaaacatgaggtttctggcatattttgagaggtactgggaagggatgtaaggcaaagtacctcatttataactaccaaaacaggttatgttacaagcaagattacagccttacagcatcagttttgaaagtaatagagtgaaatgatatagcatagtttgagatt

SEQ ID NO: 789774 - DNA, 623 bp, Homo sapiens
attgtatagtggtcatcagttgttatgatacactgctgcctcactgtgggtgacccaacccatttgttacaatttgtccccagaggttattccctcccagccccccacaaaaaaagactgtgggtcttttgactgggaaaattaccattattgtgagtactatttttttttctaaagcgaccgagtagatccttttctccgataacttgatagaatacttagatttttaaaacagactaccaaatgaatttaaaaccaaattaattcaacattctcatctggccataaattgagttctttaacatgtagtgaagcaaagggtgatgtycccattttggcactttgctttcttaagttagtgttcattaacaccagccccaaacagactattgtgattatttggagccttgaagtaattgtgtccgtggggacagtagcatgtgactagggttctcattgaaacatgaggtttctggcatattttgagaggtactgggaagggatgtaaggcaaagtacctcatttataactaccaaaacaggttatgttacaagcaagattacagccttacagcatcagttttgaaagtaatagagtgaaatgatatagcatagtttgagatt

SEQ ID NO: 789775 - DNA, 634 bp, Homo sapiens
aagacggctgcgatggaaccaggctcagagagagcacctgagagcaggcagcgcctctgcccacccggcccggggatgacggcgcaggacagacacctggggggctccagctgtgatccagatccagacctggacggcccaggaggatggaggcagagcccrggcccacagatctgcagactcaggcacctgcagggcaagtcctcagaagatgaacagtcccctgtcccagacacacattgtcctggacaccaaagcgggacccccagatacaggagtggaccaggaagcgtcccaggaactgccctgtgctcgggccctggactgagaccacaggggtccaggcggtgcgaggtgggagagactgaggagtcccgggtccttgagcgaggagacgggcgccgtgtcaagaaaacagccccccaaacccctggccctggcccaggcgtgggaagcatccgagagtcatcagggagagtttccgaccgcccaggataccaggatgcagttggctcaggtgggagcagacagggcttcttgcctcagccaggtgaggctcaggtgggccaaaggagagggcccaggaagtagggggacagcaggggctctcccaacacagagccgcgatctcacc

SEQ ID NO: 789776 - DNA, 639 bp, Homo sapiens
gggaacataaggccaattcacacttcagctataacaggaaatatcctctccatatggcatcactttacgtcatcctcttcatttacacagggtgtaccccaagtagagggtatttaaactcacataaactcacaaaaactctgtaacagggcctttgagcccctatgctcaggcccactaccacactgtggagtgtactttcattttcaataaaacccttcattcggctgggtgcagtggctcacgcctgtaatcctagcactttgggagacgaggcaggtggatcacctaaggtcaggagttcgagaccagcctggtcaccatggggaaaccccatctctactaaaaatacaaaaattagctgggcgtggtggcggatgcctgtagtcccagctactcgggaggctgcgcacgacaatcgcttgaacccgggcggcagaggttggcagtgagccgagtttgcaccactgcactccagcctgggygacagagcaagactccgtcccaagaaaaacaaagtaagacaaagcccttcattctttccttgctttgtttgtgcgttttgtccacttctttgttcaagacaccgaggacctggacaccctccactcttaacaccgtctatgtgttccgccaggc

SEQ ID NO: 789777 - DNA, 574 bp, Homo sapiens
actcctgacggcatcacaccctcccactcccatccagttgctcagcggtgagctggctgccagctgctggacaggccgaaggacagggcagtcaccttctgctcatgtgggcatctaagccacacccacccctttccccaacttacaccatctttccctctctctgtctctctctgtctctctgcctttgtctctgtctccccgcccagacacctccctgcctatgggtgcacgcacacaccagtggcaggccctgaaagtgcttcctyattgagtcaagatagtagatgggaagccatgccgggtgagagggcagagaatcgggccatcctcaaagacatgaagatgcatttctatttattcatctcccacagtataaaagaggctcatggcaatgagagtggacggccataaacttaaccaagtggtagcctcagtcacagccgctgcagcagaggtggcatctactggaagaggtccaccctggctggcgcttggcggacggccaaccgagctaaagaatgcaggccgggcgtggtggctcacgcctgtaatcccagcattttgggaggcc

SEQ ID NO: 789778 - DNA, 588 bp, Homo sapiens
gaagcaatgtagaaacaaaggagaaagcaggacagaaacagcagggtcctgggatccgcctggtaccagagacttctttttttctctcacttgggctagacccagagacaggcttctggtttagaagaggaatgtgggactggctggccatggattagataactgtggaatcaatgcccttttacttgggacatctttccaagtctggattatttccttaggattaactgggaaatcactgtacaaagaagaagcatatcaatagactgcttccttattttcaacccagaataatgsatttttccattgctagaggactgctttaaaatacacacacacacacacacacacacacacacacacacacacacacacacacacgaaacaccaggatagcacagacagtggctttcagggatgaagatacttcctttcctgtctgttctagtctcttctggttgcgtggaacagaaactagtacaagctagcttaaggagatgaagctttattgcaagaatataaaatgttcttgtgggaatgacatgagtagccccatggacagaaaccttctcagccctgttggggcta

SEQ ID NO: 789779 - DNA, 600 bp, Homo sapiens
tatttaaaaatgctttactccattattttaatacgtatagggaccctcccctcccccccgatagaagacagatttaattataaaatagaagtgagtgggaaaaattctcttatcagaaatttcctatgtaaaaataaaagtttgctgtattccatcccctttcaggtaaaatttacttgtatttataagtagctatctaatatrtggtgtatcccatgtgactctataaaatcacacactatttctagagaagataactgcaggcaaatagcttcctctatttaagtttcatctcaagaatggaaacataaaccttcccataggaaagattataaattgccttgctccctctgctcatgcacattttatacctgtctttattgttctctttaaaactattcagcgttaaccccacactttcttatattctagggggaaatacctttctataactattgaattatgggacaatgcctattttttttctttttgattctttagaagttcttaaaactttcaaaaacagacacatctgcagaaaagatcacatactaatacactactcttatttgcctttttcattgcattagaagcctattc

SEQ ID NO: 789780 - DNA, 626 bp, Homo sapiens
gtgattatttgactgggtaagtgggagagccaagccaaggactggagtcttctgactcttgcttcagggtttttctcccaattacatcttatttctctgacctgttcatccatataatcttattctgtaattctaagcaattgctatttccttaamaattcggaaaaattacataactataactcaactaactcattacctttttacatccaacccccagactctggaattaaattttccttcagtacttaccctaccctagctcaagctcagaaaaactgtcttggaaaaagaggtaaaaaggacagaaagtaaagagaatcagattgaggggtgcttctgactttttttttaaagaaattttgtcatacaactcccctaagatgtgagtcctaaggttaaccagagtagtttttcaaagacgcagcttgtccgttacatttgctgctccgtggctgatcctgtcctggactagcctaccagaacgttctttagcccattcattagatgatctagctcctgaatatctagcacacagacagtcttaatccctgatttgtgtttgtgtatgtgtttgactctgatttgcctttcagatagattccttagaagctctaccagaatgt

SEQ ID NO: 789781 - DNA, 658 bp, Homo sapiens
atatgtgtatattttataataaatataatgtaactacatatttataattacatagctatatttattacacatataataaatcttgtattttatatgtgtgtgtgtgtgtgtgtgtgtgtgtgtgtgtgtgtgtgtgtgtgtgatgagaaatcggctcacatgtgtatgaaggctgacaagagctgcaggcagagccagcaggctggaggtccaggagagctgatggtgtagttccagtccaagggctgatgggctcaaaacatgggaaaagctgatgtttccatttgagtccaaagcaggaaaaggctaatgtcccagttcaagggcagccaagcaggaggaattctcccttactcaagggaggatcagcctttctgttctgttcaggccttcagctgattgggtaaggcccacccacattatggatggcaccctgctttactcaggccactgatataaatgttaatctcatcccaaaacacccatataaaaacgttcagaataacatatggccaaatatctgggcacctcrtagctcagtaaagttgacacataaaactaacaatcacacagcactaacaaatgatgctgtcctcctctgcctctgctaattagtttgaagatgaagaacattctcagggtcttcattttcctatag

SEQ ID NO: 789782 - DNA, 697 bp, Homo sapiens
atgctgtcctcctctgcctctgctaattagtttgaagatgaagaacattctcagggtcttcattttcctataggttttgtggctcaagtctgttattgagctcattccttttcatgtgaaggtataacaagacaaagcaactttggagggctccaggtggtcatttctagggcagatgtttcccttagaatgatgyggcctcaaagaaggagttttccttttactgaatcaataataatttttataatcccaaattacttaaataataactgaaactttgtacatgtccatgtagcttctctaaatctctcctgctttttaaggcttgagctgttttctttttctttcataacctcactgcttcttgcccactatcagcatttttctgaccctgtataagcctaagtgaaatcccttgggacatacatagcttctttatactaagaaacttaagtgttggtctaaagtattaacaatttttgtgcatttttggtaaagaaagttcctacagttttactctctgtctcacccctagatttttgggcactaccgttcattcattcagagttactatacaccaggtagggtgctaaatgctgggggtatggcactgaactgtacacacagagtccctgccctcctggagcttacattctagtggggtctagtgagcttacaaagctagtacaataaacat

SEQ ID NO: 789783 - DNA, 553 bp, Homo sapiens
ttcaggactgtttcttctgtctcttctagagcctctttcagtgataatgaagttaaaaccaggtattatcagtgcttacttgatttttggttctcatgaaggtgttttttctgtgtagatagttgttaacttggtgtccttgtgaggtgggacaatgggtggagcctttaattctgccatattgctccgcctcctcctatatgcagcatttcttaagcaaagagaaataaacgttgttgcgtttctgggctttatagtccattgggtcaggggaagtccatgcatatatgataggttaaataataagagggttgggactataatttcataaaaccaatgttaggcgcttattggcrtatgggcatttccttaaacgcggttggaatagtgcatttatacagtgagttagggtgagctacctcaagactggtgccagattgcagggttttctcagagactgtgtgccctgcctttgagtctgtctgtctctagtgtcacgtcctgttcatctgcagtgtacagtctactttgatcatagtagttgcttgtgatt

SEQ ID NO: 789784 - DNA, 651 bp, Homo sapiens
tgtttttactggactcttgctcatctttcaagtcccaacataaaattggatcccctctcattacccaccctcaaccatagaactatctaggctccaacatcttgtgatccaaaccttaataataatacttacattgtgttatagttagccatttattaataaatgttttggatgaatggaatgaatgggtggatggatgaatgaatgaataaatgaatgaattctggatgagtaatgaayaggaaaggcaaatggataatacccaccaagctctgcagtcctggaggtttctgttcagtgatcaaaacccctgttctcccttataagcagtaaaagttttatttaagtgttaaaaattaaaaaaaaaaaacagtaaattatctacgcagagtcttgacagttaggaccataagctcatcaaataattgggtgaaagatgctgaaagttcaagaagaacacatttccttttgaaaaagcatctgcatttacaccttatgttcagataaacacatttttctccatttcacttataatcaatatgttttaatattaaagaattatttttgagatataccttctgcatccgtctgctaggaggtacagtgctccatgatgtaacaataaaacctttttgtagtaaagctgggatc

SEQ ID NO: 789785 - DNA, 651 bp, Homo sapiens
tgtttttactggactcttgctcatctttcaagtcccaacataaaattggatcccctctcattacccaccctcaaccatagaactatctaggctccaacatcttgtgatccaaaccttaataataatacttacattgtgttatagttagccatttattaataaatgttttggatgaatggaatgaatgggtggatggatgaatgaatgaataaatgaatgaattctggatgagtaatgaacaggaaaggcaaatggataatacccaccaagctctgcagtcctggaggtttctgttcagtgatcaaaacccctgttctcccttataagcagtaaaagttttatttaagtgttaaaaattaaaaaaaaaaaacagtaaattatctacgcagagtcttgacagttaggaccataagctcatcaaataattgggtgaaagatgctgamagttcaagaagaacacatttccttttgaaaaagcatctgcatttacaccttatgttcagataaacacatttttctccatttcacttataatcaatatgttttaatattaaagaattatttttgagatataccttctgcatccgtctgctaggaggtacagtgctccatgatgtaacaataaaacctttttgtagtaaagctgggatc

SEQ ID NO: 789786 - DNA, 581 bp, Homo sapiens
acaggggccatcaccatctgtagtggatcctaatttcagggctgaacaagttacctgtggactaattgcctagggttcttctgtggaaattggaactactatatgagaagtagccataatgggagaaaagagtcacctagatctgttttaaattgaatatccatgaacaacctcttaacaaggcttataccactttaatacaataggttcccaacccctgtgactttctcccctagggtcaaaagaatagctcattcacctcttgcctattgcatttatcttgattctccctgggcaagaaaggggaatcaatctggcaattatgtggacaatgaaactcataggattttcttcctatgtactgaaaatgagaaattagaaggattatrtcatatctgtactgaaaatgagaaattagaaggattttgcctcagtattggaacttgtacatatcttgcttcttcatggtatcataatatagcacacttgtttcaaatctgattaaaatccagaagtaaaaaatgtgtattaattgatccatgcatttaggtgaatagtaaattgaatccctagattgattt

SEQ ID NO: 789787 - DNA, 612 bp, Homo sapiens
gaaggaattctaagtaagggttaaggttgagtggaaaaaagaagaagaatcagaaggaagtggtttcatagtaggataaatcaagtgctgagatgaagtcagttcactaacagactcagagttctattggatacggcatgaggttcttggtgtcaccatcttagkatctgctcatttttggggttttaagaacctgtctgaactccacttagccaactgaagcttgccttcaaagttaacacaatgtgctttctcccatataaaccttttaagctgtttctgatgactgttccccttcctgttagagctccacctcttttaatttagcctccatacctttagagtaaggtctgcaactttcttccttaattgacagtggagatcaatatgtaacccagattgcaaaaatggtttgggaacactgcatgttctcactcataggtgggagttgaacacatggacacagggtgggaaacatcacacactggggcctggcaggggatggggggctgggggagggatagcattaggagaaatacctaatgtaaatgacgagttgatgggtacagcaaaccaacatggcacatatatacctatgtaacaaacctgcac

SEQ ID NO: 789788 - DNA, 612 bp, Homo sapiens
gaaggaattctaagtaagggttaaggttgagtggaaaaaagaagaagaatcagaaggaagtggtttcatagtaggataaatcaagtgctgagatgaagtcagttcactaacagactcagagttctattggatacggcatgaggttcttggtgtcaccatcttaggatctgctcatttttggggttttaagaacctgtctgaactccacttagccaactgaagcttgccttcaaagttaacacaatgtgctttctcccatataaaccttttaagctgtttctgatgactgttccycttcctgttagagctccacctcttttaatttagcctccatacctttagagtaaggtctgcaactttcttccttaattgacagtggagatcaatatgtaacccagattgcaaaaatggtttgggaacactgcatgttctcactcataggtgggagttgaacacatggacacagggtgggaaacatcacacactggggcctggcaggggatggggggctgggggagggatagcattaggagaaatacctaatgtaaatgacgagttgatgggtacagcaaaccaacatggcacatatatacctatgtaacaaacctgcac

SEQ ID NO: 789789 - DNA, 525 bp, Homo sapiens
taacttgatgtggtttctgatgaagcagtgccagcccccatcttgacaaattttatttcaattcatggtgtctgtggttcagttctgagaattgattttaatttactcttggacttgaatcccatgttcaggctctaactgatatggttgactttgaagggaacacagttaattaggatagattcaaatgctatttttatcccttggatttatttcacaggataatttaattccattcagtatacaggctgggaacagagtcttaaggataagactttgaaagccaagtccttggaattcacacacagtaaagggcacatttgggtcacagagggtgtggttttgawacaagagcccagtgagaaacttgggagtatcaggcagcctcttttatcatacatgtcccagaacgccctttatcagagctaaaataatcccccagaagatgcctctgacctatccaaacagagctgttgtttgtctgtttggattctttgagggaggggagggagagaggtgtttatt

SEQ ID NO: 789790 - DNA, 601 bp, Homo sapiens
gaaatcatagcaaatttacctgcataaggctgtgatttcatttgaggaaaacaagaatctgtgcagaaatttaaaaggaaatcctgatgacaatagggaaccctgaaaatctctgacatatttctggggatcccaggttaagtttttttttttttttttccagacagagtctcgctctgttgcccaggctggagtgcagtggcccgatcttggctcaccgcaagctccgcctcccaggttcacgccattctcctgcctcagcytcctgaatagctgggactacaggcgcccgccactacgcccggctaattttttgtatttttagtagagatggggtatcaccatgttaaccaggatggcctcgatctcctgacctcttgaatccacctgcctcagcctcccaaagttctgggattacaggcgtgagccaccatgcctggccgttaagttgtattctcacccatataagacctgggaaaggaaaaggcaccactcactcacctctagttggcttgaaagtgttgcgaaaactgcaagtaaaagctaagactattttgtaaactgcctgaagtttgaagaggtatctttgcacatagatctc

SEQ ID NO: 789791 - DNA, 548 bp, Homo sapiens
cagtatgacttttatatgttttctttatagcattttaaatagcacattaaaattatttgttcatatatccatgcctcaaaagcctatgaactccttgagatttatacttcttttaaactcagcataatataatgctgcattttgcagatttctaataaattaattttatttttctacttccatattcaggtagtattgaaatgttatataaaataagaatattagataagaatcagccacatatctcctacaagttttgtataaatgtacatctttagtagcctaatagaaataaattttagcttaagctactatctaccaactctcagtctgttagacacattttactgaaatgaatttttggaaagtttgtatcaaaagggcawgaataaatatcttcagagttaggaagaaaaagaaggaagactaataaagacaaaaattacctgagcctattctctggatacatataattatcctgcaagtcctttagagaaagggttactaataagttttttatactgcagccaattatatattttaagcac

SEQ ID NO: 789792 - DNA, 617 bp, Homo sapiens
gggaagaagctgctaattagccagaggtgcaatgatgtatcatgactgtcaaagcaaaggagcgatttttgctgtagagatagccagccttcaggaagggccatgtttcccagtaatttaatctgaaagacataaatcatgacgaaaatctycctgcattagtaatggagagaaatacctgcattctagcaaggtttgcatgataaaagacaggttttcatacatcttagatcaggaaaaataattatcaatcaaagataaccccctgcatcctcgtttgaagtgaaattggaggtcagcggaggccaagaaaaagagaggactggattgtctctgcaattttaaggagctcattactagaaatgctgttttacaaagtttcagctgtatgtgattttgaaacattaatgatttaatgcctgccagacaaagaaagggaagggatgtcaaaaaccaaaaacaggtataactgtatcattggcatgaaaatggaggctgacatcataatgatgagaaatcaccccagggccaaagtatgccaactgaaatcatggccaaacacaaatctcctggtgctttggaagaatgcaactggaaattgataagagcagaggaat

SEQ ID NO: 789793 - DNA, 502 bp, Homo sapiens
acagcctgaggctctgttttcctgctggagaaatttctaccactgacatagatttgtaaatacttctagttcttgtttcttgtctgttctgcctcaagaagaacttacttgtgagaaagatactcaattctacttcctcacaaacatttaaatgaggtgcattgttctggattttgtaggggtggtggttgtttcagtttagttttaattatttcttgtcattttttgacaagcatactagccacttaataccaaaaccatttttttcytaggccctttgatgtctcccgctgaaagattctttccatttaaaataaaaaaccattaaaagttgtatgctaggtagcttagtacatgaaagtacgtccctgctgctcctctaagttttctatctgtaggctgttaaggagtggaaggcctgataaagcatgtgcatgcatgcatggatatagatatgcatgggtgtacagctgtcatctatatgtgcatatctctacatgca

SEQ ID NO: 789794 - DNA, 504 bp, Homo sapiens
tctccagccaaacaagccctttttcagcatttttacatattatgaaatataaatctaaggcaacttttaggttgtttacagagaataaaaagttatctttaaatctagggcttaaaatgaataattagaggtaaatctagttggcttaatcaaaataactgctataggaattacatataattagcgtccaaataaaatccttagcctactctatacaggaaagtaatataaatattagataggaaaatatcaattctctctcttatgtcttctcaagwtcacatttaaacccttgatctttcttgtcatttcaagcacaagccaaaatacaagccaaaacacaagcaaatcatgaattttaaatcttgattccaaaagccactctcctagtctggttggaaaaataacaaagctatgttctgtattttatcactgcacatttaggccacaatcattcaagtgttttgccaacaatgagcacagcacaaggtaccagaaggcaat

SEQ ID NO: 789795 - DNA, 474 bp, Homo sapiens
ggtgttaagcttctaaaaaacaggcactgtgttgggctttgaacatatagaatagcatgaattctcaccatgactacctgcagtagccagtattattcccacttcatggatgaaagattcaatcttagagagtttacgtamcttataacagcagaaaagcaagattttaattacaaatcctatgttctcttctctatactaaatgtatgaactcaagcaagttatttatcctctttattcttcatgttttaatgggcataataatggtttattcactagaatattttaagaattaaaaaagttaataattgtaaaaattctcacagaattttttttatgtttgttgaatatgaaagtatgataattacttttgttgagcaactatcagcatagcagatgtttaaactgtttctgcagagggatttgggcaagacaccttttattcttatacctgggttttattgtgaagttata

SEQ ID NO: 789796 - DNA, 591 bp, Homo sapiens
ctctatacattttctatgctgtttcctctatactgaatgatccatactatccgtttaactttgtatctttaaaggcttgtgtgtgtgcccatctattttggtgaggttgttaccaaaacgccatgggtttggtctaggtcctgcttgctgctyactgcacagaaagccaatcactgagatggtgagtgtttccggggaagaagctttcatccggtgctgcagctgaggagatgggagctcagcctcaaatccatcgccctgactgactaaaaatggggttttatacaacaggcaagaaatgtaacaatgtgtaggaaacacgaactagggaggaacaaggagtcatctggtggcctcatctggtgagtttcagttctttaatgctttttttttttttttttttgagaggcctgaaggtcctttcctgagggaagaactcagatgaaacaaatacaagtttcaagctttaagagcggaagagtcaatgtctatgtttatacgaaagaacacgctataggagtattgggccggcttcagggtcagtaggatctattccagaattacaaacatcgtatataaacccctaagtct

SEQ ID NO: 789797 - DNA, 591 bp, Homo sapiens
ctctatacattttctatgctgtttcctctatactgaatgatccatactatccgtttaactttgtatctttaaaggcttgtgtgtgtgcccatctattttggtgaggttgttaccaaaacgccatgggtttggtctaggtcctgcttgctgctcactgcacagaaagccaatcactgagatggtgagtgtttccggggaagaagctttcatccggtgctgcagctgaggagatgggagctcagcctcaaatccatcgccctgactgactaaaaatggggttttatacaacaggcaagaaatgtaacaatgtgtaggaaacacgaactagggaggaacaaggagtcatctggtggcctcatctggtgagtttcagttctttaatgctttttttttttttttttttgagaggcctgaaggtcctttcctgaggraagaactcagatgaaacaaatacaagtttcaagctttaagagcggaagagtcaatgtctatgtttatacgaaagaacacgctataggagtattgggccggcttcagggtcagtaggatctattccagaattacaaacatcgtatataaacccctaagtct

SEQ ID NO: 789798 - DNA, 613 bp, Homo sapiens
gataagtattgcaaatataatagcaaacaagcctgacccagccctgtcctctcattgcttatattctaatggaaaagtaaaacaggacaaacagaaaaaaaaagtgctgaatagacaaataataaataaaaactgatgaacgcactatgtaaaaacaaaaatgggactgacggagaggggcaggaaatgcctctctgatggtcaggtctaaacggagagggcttccctgaaacttcaggaaggggaaaaattgaagctgaggaaacagcacaaacagccctgaaatggaaaagtgtttcaatgcttcacagacctggaagatcagtgtgtgggggacgtgcaatatgagacgaagccttaagcagattgggaatttggctccagagatggtggtggtatggacaatacagtggtgagaccccaactcctgccctttgtttccactcaccaayggcagattccccctgaagatgggctgggagataaacgtcccgttcaaatggaccctaagtgaagaggctcatggggaaaaccttcctcccattgcacacccactgcaggcagagccttcccaagctctgtccaggcctcctgcctagttatctacggggtg

SEQ ID NO: 789799 - DNA, 582 bp, Homo sapiens
acatgtctccttcaaatctccatggatccttgcctcaggtgagtgacattttaggtggaaatcaaggaagaggtggaattttatatctgggcagacgtcatgtgggccaggttcagcctacataaaaaagtgatgcggaccataaactcggcatctacggcaagtggcctgcttgctaggcctctcttatctagatcacaggagcaggaaatgccagttgatatctggattacatatagagaattcatttggcaatcaccctcacaacttccaaccagcagccagamcaggaaatatattaccacgtacttccttcctggggcagagataaaactgccctggaggagataagccttgaggacctgtgactcccgctcccacttagtgatcatgctcagaaccacttctgttgactgatatgaaatctcttcattacaatttactagaaataatccctcacaccaaaaaggggagtcatttccccaaagccaaatcacttggtattttccaacccaagactagaaaccagctgtcctgccacccaaacacccaatgcacgctccaccatccttgctgctgggc

SEQ ID NO: 789800 - DNA, 582 bp, Homo sapiens
acatgtctccttcaaatctccatggatccttgcctcaggtgagtgacattttaggtggaaatcaaggaagaggtggaattttatatctgggcagacgtcatgtgggccaggttcagcctacataaaaaagtgatgcggaccataaactcggcatctacggcaagtggcctgcttgctaggcctctcttatctagatcacaggagcaggaaatgccagttgatatctggattacatatagagaattcatttggcaatcaccctcacaacttccaaccagcagccagaacaggaaatatattaccacgtacttccttcctggggcagagataaaactgccctggaggagataagccttgaggmcctgtgactcccgctcccacttagtgatcatgctcagaaccacttctgttgactgatatgaaatctcttcattacaatttactagaaataatccctcacaccaaaaaggggagtcatttccccaaagccaaatcacttggtattttccaacccaagactagaaaccagctgtcctgccacccaaacacccaatgcacgctccaccatccttgctgctgggc

SEQ ID NO: 789801 - DNA, 570 bp, Homo sapiens
gggcattctcagaacactgtgggaactaagggtctgagccatcaggactgtccacagatattccactccttctgctcatataatatgcttgcattccccatgttttatgatttgagttcaggatttgtttaattcaggtatggtaaagtgatagacacagacaggaacaactgcctttgaaataagagcttgtttcttacagttcctaagaaaaaggagcattggcatgccacacagggctgcccaggcagcgccaggattgggcaggaggcaggagtacaggaagcatggatcgaagcctccatgaacmcagaggggagaagtcacaaagtagggacagcccttattcggcaggaaacaagtcacagatttgtttgtggctggagggtttgtgatatgacttttatgctacctcaaaagtgggactgaagggtgatgtagacacctttggccattagtttggccctgtgattagtgcatgtcaaatcatcaattacaagatctgtagaagttggttggaacaccccaccttgtgcagacagtctgttcacgcaagtcgggcaggaatca

SEQ ID NO: 789802 - DNA, 630 bp, Homo sapiens
tgagggctcctccacggggctgagggttcctccgctgagcttgcgccttcatcctccgtgagcttccgcagggctgagagttcctctgctgagcttgcgccctcaccctccctgagcttctgaagggctgaggcttcctctgctgagcttgcgccctcaccctccctgagcttctgaagggctgaggcttcctctgctgagctcgccccctcaccctccctgagcttccgcttccccagggctgcggcttcctctgctgagctcgcaccctcaccctccctgagcttccgcagggctgaagcctcctctgctgagctcgcgccctcaccctccctgagcttcggcggggctgaggccacctctgctgagctcgcgccctcatcctccctgagctttggcggggctgaggcctcctctgctgagctcgygcccttaccctccctgagctttggcggggctgaggcttcctctgctgagctcgcgccctcaccctccctgagcttcggcggggctgagggcctcctctgctgagctcgcgccctcaccctccctgagcttccgcagggttgaggcctcctctgctgagctcgcgccctcaccctccctgagcttcgggggggctgagggcct

SEQ ID NO: 789803 - DNA, 630 bp, Homo sapiens
tgagggctcctccacggggctgagggttcctccgctgagcttgcgccttcatcctccgtgagcttccgcagggctgagagttcctctgctgagcttgcgccctcaccctccctgagcttctgaagggctgaggcttcctctgctgagcttgcgccctcaccctccctgagcttctgaagggctgaggcttcctctgctgagctcgccccctcaccctccctgagcttccgcttccccagggctgcggcttcctctgctgagctcgcaccctcaccctccctgagcttccgcagggctgaagcctcctctgctgagctcgcgccctcaccctccctgagcttcggcggggctgaggccacctctgctgagctcgcgccctcatcctccctgagctttggcggggctgaggcctcctctgctgagctcgtgcccttaccctccctgagctttggcggggctgargcttcctctgctgagctcgcgccctcaccctccctgagcttcggcggggctgagggcctcctctgctgagctcgcgccctcaccctccctgagcttccgcagggttgaggcctcctctgctgagctcgcgccctcaccctccctgagcttcgggggggctgagggcct

SEQ ID NO: 789804 - DNA, 528 bp, Homo sapiens
agacggacagggggtcagaaatcaaagaaaaagagaaaatcaagtatcatcatctctcaagggtcggggtaccagaaagaaagccaacttgaagcaatgagtatttattgccagttataactacagatagctgagtggggagagaagcgttggaagcaaaatagaagaagaaacccagaaatgtccaggtgtgcgaaaacaagtgccggcagtcgcattaagaggttactggggccttgaccgtggtcagggagagaaatggcatcaaggcagcttagagacgcgctgctgggaatttcagtttggctttcmtggtaatattagtacctggattttaacgaatacgtgtgcacttggcactgggctgatatttattcaagggccttaattgatgctaagaaacataattttaaaaaccactgttttctttatatttaatgattttagtagtagttatgataccagtaaaatattaatgtttattcagctctcctttgtgctggcatatccaggttttcatccactgtg

SEQ ID NO: 789805 - DNA, 588 bp, Homo sapiens
acaaacagtatttaagctaatgatggcattcaatggaatcaagaagcatgtaaacatcacagtcacaagctaatcttgggatagttcctccattcacaaaagaatctatctagctctgacttttgaagtgtaccataattcttggaagacaatggaagccgactcttgacataagacatataaaagttggtgatttcaaaaaagtttcccaatttcttcatcaatagctcatccagtcagtgcagtaaaggaaaatagatgagttctcagataagactaaactatagaagagatrgacgaaacctgttttattactgaaataagtcatttttaaattaccttgtcatttatagtgggtttagcttctcttaatttgtaacatgaattatcatattttactgttcaaaatattgaacagagaatcaatgccaaggcaatattacccttaaaacactactattttttaaaaatcttcaactattagacttgtctcaaataaataacttttctatcatgttcatttataactacgaaagtgtgtataggtcttgaagtattataaaagctattggacttgctctcagctaa

SEQ ID NO: 789806 - DNA, 473 bp, Homo sapiens
cataattcttggaagacaatggaagccgactcttgacataagacatataaaagttggtgatttcaaaaaagtttcccaatttcttcatcaatagctcatccagtcagtgcagtaaaggaaaatagatgagttctcagataagactaaactatagaagagatagacgaaacctgttttattactgaaataagtcatttttaaattaccttgtcatttatagtgggtttagcttctcttaatttgtaacatgaattatcatattttactgttcaaaatattgaacagagaatcaaygccaaggcaatattacccttaaaacactactattttttaaaaatcttcaactattagacttgtctcaaataaataacttttctatcatgttcatttataactacgaaagtgtgtataggtcttgaagtattataaaagctattggacttgctctcagctaaagaaaccacggtttaggc

SEQ ID NO: 789807 - DNA, 475 bp, Homo sapiens
gatggcaaagcaagaagactctcaccagatgctaatgtcttgatcttgcccagatcaagtttccagtgtccagaattttgagaaataaatttctattcattataagttacccagttccatgtattcttttctagaagcacagcatggactaagacagtaaccttctgttctttcttctccatatgagtatttctcaccaacagagtgagagcagaaagtgacatggcaacttccttgctaaggccttctctgccttctccttcrtgttccactggctagatccatgggacaacagggccctagatgaaggtagcaccattagaaaaaaggaacttaccttcctgaatattgcacaaaagtgagccactactaactaacaacatatacctcaaactattgtagttgtgttattgtatatttgggggacctacttgttgccacagctagcctaccataatatacatgcttactatgc

SEQ ID NO: 789808 - DNA, 628 bp, Homo sapiens
ctttatataaagccaattatgcagagacagatatggcatctatatatgtgaattcatttattaatataaaataaaagcctggtgagtgaaattatgtagtatactcccyttgcctttcatcaaattttcaaacagatggtgcctttcttttctatgtatgatctgctcaagtgtcaagttaaccatttaaaaaatttgcttttcataacaagtcttttttatttagaactttgtcatcagtttataattatttttctttttaaaaatctttttatttttaatttttgaggttacctagtgggtttatatatttctggggtacatgagatgctttgatataggcatgcagtgcatttgtttcttctttcttgtttattcttttaattttttaatttttaatttttgagggtacatcataggttttataattattttttcaaaattcaatcataaaagaaatacatatactggggtttctcagtgttaacactattgacatttggggctgaaaatttatcatagtggtggagggggctgtctcatcatgcattgtggtatgattagcaacattagagagctctaccgactaggttccagtagtaccctcccctcagttgcgagttgtcac

SEQ ID NO: 789809 - DNA, 366 bp, Homo sapiens
taaaaaaaaaaaaaagaatgcacctttagtaaggaaggttataaaacatagtcagaaaggtaaggcatgttgaagattgtctgtgaaagtcatgaaaaatgttttataaaaaggaatttatgcaggaaatgtatgatttttgttttgaaggtctaaacatgttytaaaatgttaaaaaaaaaaaaacaactgaagagttcatgaatatccaggtatattttaaatcaagcacagagttctagttactatctaggatgtggaaagatggaaagactagagactatcactcccatctttacaaacaaagcaataaaagttgagtgaaacaaaaagccacagttttgttgaatctgagaaaaaacaggg

SEQ ID NO: 789810 - DNA, 783 bp, Homo sapiens
aatttgatacatgcttttctattaatttttattaaaaattaattccatctctgggttattttttctgtaacccattacctccttatcaaaattaattacatgtcaaataattttatttgtaataatattaagcattaataaccattattatttaaataatatttgttatgaatagcaactttattcatttcaccctccaatttataaattctaaatcccattttgaaaacttattaaactttattgcttattatattttcatattaaataatttaaatatgctcttatattggttgctttattactcacagcttagctccattttggaactattaacccacatgcagatgtcacattgcaacattgctgtcaccatacacaaaccctgcctttgtttttcttgtcttaggaaaggttcgacttatgtggtacatttcaaacagacatatgaaaatcccagtgggcaaatggaaatgtaaataccttcaacgtggccacttggttaaacttggtatattcagcaaatggcatccacagaagctgacatttaagcataatgaattatgcataagtgaacaaggcccttctgggttgatgatagcakaggtttcacttgtggctcagttttggaattgaaattacaaagtaattataaccctgctcagacatttgcacattgtcttttcagaccagatttcagtctattcaacaggcactataccaaagatctatcactactatgctaatgaaataggagaaatgttccttttttattatattttt

SEQ ID NO: 789811 - DNA, 694 bp, Homo sapiens
acatctgcccctatgtatagcataaacctgtttccttttctaaatccacttttccaagttcaccatgctaaatcatcatccctttgaagctcatgcaaaatcaaaccactatcagcatttgtactcagtcttctggtttttgtttgtttttttcattcttatccattcctttgctttctctttgttgttaatttctttctccctctttttccaatttcaaacttaaacttgtttgtaamctctttgtatcagcaatgatgagggaaaaaccagttattttattagagaaaattcagcacacccctacttgatctgtagaatattctctagctcatatcctcgctaataatttgagtataaaataaggggaagtctttcgagtgtgggcccaacataaagctcttggtccattcttagtagggcacaatgtttttaagataatgcttcccaagccagggtcatagcttgcacctgtaatcccagctactccagaggctaaggcaggaagattgtttgaggccaggagttcaagaccagacagagcatcatagcaaaacctcatttctaaaattattttttaaaattagtcaggcatagtgacatgcacctgtagtcccagccactccaaaggatgtggaagaaggatcccttgagcctaggagtttgaggctgcagtgaaatgtgatcactatac

SEQ ID NO: 789812 - DNA, 496 bp, Homo sapiens
tttctaaagataagaagtagatgtaaaacttccaagtaatttcctacaaagtcattaaaattatccaaacaagtaactccatcatcttgaaatttagttaatttgcaaattttcatctggactgcatagattcatatttacagttacattttatggcagtgagaaraaaagaaggctggattgatcaaacgtaagaccaccttgatgtgaaaacctaattctcctttcaaatacatagctagaaagttcagagatgttaaaaatctttaagttagtgctgtagacagtgtaaggggatcaaagttatagcttaaagtattttctttgattaggaagatactggattccaaatgctttacatatactcttttacaataatcgataatattaataccatttctccacaactgccaccaccaacaacaaaagtgtgtgatattgtatatttccaaactaatacaagtatataacacagatacagtttgagtctatctct

SEQ ID NO: 789813 - DNA, 656 bp, Homo sapiens
agccactgctcactctctgactcacctgagcaacttccagtttttcaaattccattaatggtaagttccctatagaggaatagcatttttaatcttttataccatattttactgtaccttttccatgtttagatatgtttagatacacaaatacttaccattggattataattgcctacagtaatcagtatggtaacacactgtgcaggtttgtactctggagtaaaaggttattccagaaagtctaggtgagtagtaggctataccatgtaccatctaggctagcagtaggtctagtgaaagtatactctatgattttcactcaaagatgaaattgcctagtgaggcattttttagaatgtatatccattaagtgatacatgactgtagttgcaaaggaaaatttggccataattatttttgtttccttatttaaacttactggagttttaacattgtttacaaagattgttgtggtcctttgcaacacagtagraattaaataaaaatatgaatgaatgaaaatagatcttacatcttgttcatctgaacaaaaaacttgtaacactgatttaaatttcaccttaaaataatttataaattaggtagaaacatcttattaattattaattatatctttattagaaagtactaat

SEQ ID NO: 789814 - DNA, 612 bp, Homo sapiens
tgaaagtaatgggttcatattactgattcatacctgtaattcatattacagtgttcatacctgattgccttgttgatcttgcatcaccaggcaggctaagagctccccttctaatgctgcttgcctaagacagggtcccatagctgtagtgtatcccttgtctttcttccaatttattggaggaggaggctcaggggaaatctccattttctcttttgtgtctttacccagtaatggcagtgctgagggagaaggaggaggtggtaaggtaggtgatggttcctcctcccttcccttcttaggctcttctgtgtagagcaggaccaaagcagccctaactaagtcccagaacattagagatgttactggtacctgttgctcttgtgcatgatgttgtttaagatttattcacacttgttcccagagctccaggtctaacatcccttcttccatgaaccatggagtatgggaaacaacagttgcattaggtcccttaattgagcctgcaaaaccatgattccactagctttaagcagctgtttcaatacttyaatatactgtttctgttgatctgataactgttgtccgctagcctgaaaattccctcaaact

SEQ ID NO: 789815 - DNA, 625 bp, Homo sapiens
tggttcctcctcccttcccttcttaggctcttctgtgtagagcaggaccaaagcagccctaactaagtcccagaacattagagatgttactggtacctgttgctcttgtgcatgatgttgtttaagatttattcacacttgttcccagagctccaggtctaacatcccttcttccatgaaccatggagtatgggaaacaacagttgcattaggtcccttaattgagcctgcaaaaccatgattccactagctttaagcagctgtttcaatacttcaatatactgtttctgttgatctgataactgttgtccsctagcctgaaaattccctcaaacttggaaatcccgagcgggcaccaatgacttactgactatgcattctcttcaccttcattttcgagggtgctgtcacaatccgttgcagcattcctcacacggggaaccagctgccaagtctgtcccacagactctggctgagcgacagctgaaagaagtgtgcagacacaggtattttgtctgagagcatggctaggggactgcacagcttagcaccacagatgagagtgcagcctcgataagctggagccatttttatttatttagtacagattaaatgacaaaggcct

SEQ ID NO: 789816 - DNA, 601 bp, Homo sapiens
gagaagagacaaccatttagccaaagcaatgaatgcctaatggtagaatttccagagatgtaggggaaaatccttagtgtctttcaaatcatttcatatatgactgcttagttcacttacttttaaggctactaccacattctgagcccttcaactgttgctccagggtttgattatggtgcttaaatctgaaaaccratgtaagttgtgaaaataaaaatacagtagaaggatggggagatgtcctacctacttctgtaattctgagaggtcataactaagccaaattaagcaaaaacaaattgctgacttttgatttttatttttgttaccaattaacatttatcattgaattgtaactcagtatcagtacatcatttgtattgcaggatggttctcagagtcaattattgagcttaaggaggaatgatctttaaggaaaattgcaattagtaggattaaaatatactttcttcaaactcccagaaatgaacatagtccataacaaaaacttgaagaaaaaagaaaacatacatttaaatgaatagaatgatcacctctagacacaattaaacaattattaattccatcaaaataatac

SEQ ID NO: 789817 - DNA, 697 bp, Homo sapiens
cacatgctcttgcctctgcctagaatgctcttcgcatggcttactgtcttatttcagtcaagtctctcctcaaatgctgtctcttcagggtgaccttactgagaagcttatcaagaaaacacctcaaatcccaccctcactcaatatgatcacagcctctgtttaacaccattttaagtatgtatgtgttttttgtctgcctccctcactatagtgtaaactccatgagagcaggagtgctcagaatggtgtctggcacatagtgaatgctcaataaatattcattgaatgaatgaatgaacaagcagaattaatgagtcagttgattaacccagaagtcacaagatagaggctatgatggctcacagatgtattttgataatacaatgttatatgagagttttttaaaaatatatatgaattggactttaataaattgtgagattcatataaaaattccaatctgggttctttagaaaaatcaagagatttttgtatttggagccccttagcaaaaagtakgtgatgtctactagcagctgctcctttcagacaaagtttaccccagaccccaccccactccctgtcatcttcctgacaccaatgactttctgagacctggcaccctccacttctctgtgttacctgcctggccctgtaggtcttcaggatcctacattaagcatatatatgataa

SEQ ID NO: 789818 - DNA, 670 bp, Homo sapiens
cttctccttcatggagaagaatgacaaagaaaaacctaccaaagtaatacatgacggctggttacagagccctgtcagctgctttacattttagcaaggagaggaattgcatttgttcttcaatttcttgaggaaatagaacgaagtccattaagtagaaaatacaatgattatttcagaaaaaaatagatttaggagagttcgagccatccaagacaaaaaggactgctttgggcaaagggcgttccccacctccacaatatgggctgaatggggcttgagtgaagatgctgggaaggggatgtatgtattcaataggatattgaactgcttcccccataaggtccctcatcagtgtaagattctgtggtgttgagacatgttcctgcagtccataaattgtaggagaacagagcctcaggtcttatgaacccttagtatcycctccaggatgtctaaatgtactgcctaagaacgtttataaccctcaccccagtaaagaggggatcgtcagaagccccgcccaggctcctgccatcggaagatctcacattccagtccacaagagctttccacatatgaagggcttttgatcacctggagacctggagctattcctcaccattagctttactgttatacatcaatattaacagaattccttacctag

SEQ ID NO: 789819 - DNA, 592 bp, Homo sapiens
ctgactttccttggcccctttaacgaaagatgtacctcatttgcccttcagaaaatcttgaaaaccctctatcagtcacttacttgggttaagactttgtaagtttctgtttaaaggagttgtgctatcagctctggtcactttaagctctcatatacaarttattaatccaattttttgctgttatagagagactcagagagattgggcactgcagaaattaaatttaggttcggaagtttctggttcatgagttctagaatgccttgtggcgggatgcagatttggagagctctgaagtattcaacttcctctacttcccaatttgcccaaggccagtcttggatggaaggaagacacggtaattaaaaaatgagatagaactgattctatttctcactcaattcatgcacacaatagcaaaaagagatgtgaacattgacatagattttagttaattttcttagagtttaagtatgtgaaagactttgaaactcacactcttgtagaatactatctgtacatataatgtacaaaatatatctaaaaataaaaaattcctgaaaaattgataaacctcaaattcacagat

SEQ ID NO: 789820 - DNA, 592 bp, Homo sapiens
ctgactttccttggcccctttaacgaaagatgtacctcatttgcccttcagaaaatcttgaaaaccctctatcagtcacttacttgggttaagactttgtaagtttctgtttaaaggagttgtgctatcagctctggtcactttaagctctcatatacaaattattaatccaattttttgctgttatagagagactcagagagattgggcactgcagaaattaaatttaggttcggaagtttctggttcatgagytctagaatgccttgtggcgggatgcagatttggagagctctgaagtattcaacttcctctacttcccaatttgcccaaggccagtcttggatggaaggaagacacggtaattaaaaaatgagatagaactgattctatttctcactcaattcatgcacacaatagcaaaaagagatgtgaacattgacatagattttagttaattttcttagagtttaagtatgtgaaagactttgaaactcacactcttgtagaatactatctgtacatataatgtacaaaatatatctaaaaataaaaaattcctgaaaaattgataaacctcaaattcacagat

SEQ ID NO: 789821 - DNA, 592 bp, Homo sapiens
ctgactttccttggcccctttaacgaaagatgtacctcatttgcccttcagaaaatcttgaaaaccctctatcagtcacttacttgggttaagactttgtaagtttctgtttaaaggagttgtgctatcagctctggtcactttaagctctcatatacaaattattaatccaattttttgctgttatagagagactcagagagattgggcactgcagaaattaaatttaggttcggaagtttctggttcatgagttctagaatgccttgtggcgggatgcagatttggagagctctgaagtattcaacttcctctacttcccaatttgcccaaggccagtcttggatggaaggaagacacggtaattaaaaaatgagatagaactgattctatttctcactcaattcatgcacacaatagcaaaaagagatgtraacattgacatagattttagttaattttcttagagtttaagtatgtgaaagactttgaaactcacactcttgtagaatactatctgtacatataatgtacaaaatatatctaaaaataaaaaattcctgaaaaattgataaacctcaaattcacagat

SEQ ID NO: 789822 - DNA, 576 bp, Homo sapiens
tctatattcaactactcaccagttctgctttattcttcttgcacttttttttcagagtcttgctctgttgcccaggctggagtgcagtggcacgatctcggctcactgcaacctctgcctcctgggttcacgtgtttcctttgtctcatcctcctaagtagctgggactacaggtgcgtgccaccacacctgggctaatttttgtatttttagtagagacggagtttcaccatgttggccawgatggtctcaatctcctaacctcgtgatctgcccacctcctaaagtgttgggattacaggcgtaagccactgcacccagaccacagtttttaactttatcctgaaaagatgcaaactgagattctcatgaatagtggacatactttccatttaatgattaggtcctttctgaaaagattaaactgtttatatctaaatgagaaagtctattgtgttctctactacaatgccttgcacacaaaaggcattaaataaatatttgttgaatgatttgggttcactttgaatattgagtgttagcatacaagtctgtagtagtttgtttaatttcatc

SEQ ID NO: 789823 - DNA, 623 bp, Homo sapiens
gataggaaggcattagtgaaatagccctccgtgaaactccatatctccaaaatggaaatatatccatagtaaacatcaaaatcaaaattaaagggggttcagtaaaacaatggagtaaggaggggggatgagagagaactatgtcaatagtttataatgacaaatgagaagaaatataattgaaaatatggaaattacttctctggaagtcagtatgtcaattacaataaaaataaggagggtgaaaaattaaaacttttaaagcaagaacaattttttttcataaatttatgaacatttttgaacataagyttaggtaaacagaagacaaaattaaaataaatgtaaattaatatatttgtttgggttttcacaaaaacactctaacttaaaagaacttttggtaaaccaaatgccaattttcagtactatttctatttatgagagaagaggagaaaaaaaaatgaatgaacccagtgaaagccattctccctaaacagactgctgatggatgtgcagatggtaagaaccttctgctcttgctgaaacttgcagaaaaacactgtagatcttgcagcttttagaactgccagccaaatgaaatattattacctccatctgat

SEQ ID NO: 789824 - DNA, 526 bp, Homo sapiens
tgtagtcctagctactcaagaggctgaggcgggaagatcacttgagcccaggaggtggaggctgcagtgagccgagatcacgtcactgcactccatcctgggtaacagagcaagactgtgtctcaaaaaaacaaaaaacaaaaatctgtgtgttagagcccagatagctgagactgactcaagttctgattccgcaggccagagtgargcccgagaatctgcctttaacaggttcccaggtgatgctgatgttgctggtcctaaaatgaccttgggagccactgatcttatctacctcatccgtttgctttctatcactggcatctttactcacaggctacttggcttcctttgtgccaatcttacaaacacactgcttgattccccaacaacttcccctcaaatggcagtttagttcaatctaaggagggtgaacacttagacccatgtggtcacattattactctaattttagagtaactacatcaggagagtaacagaaaggactgtattgtaaaatcataac

SEQ ID NO: 789825 - DNA, 655 bp, Homo sapiens
aacaccacataggtaaatgcttaataacttagctataaagaaaataaaaataggaaccccaggctatacagcctctatcagccaccatcttctattatatttggctctagatggtctttaagtaccaatttttgttttcctcatcctacgtgttcaagtacttttttcatactcacaagggctgatttgtcaataaggtagcaatcagtgatcatcttatrtaattttcaatgatgatgacaaggcaaatggaacattaaagacctaagaaattggaataacatgcacccatgtaatgttttttaaaagggtgagtgaaaacccaagactttgattttcaggcatggagggtagagtttctgagatacagtgcgcatactgcaggctgaaggagtgccacaggtagaagaccaccaataataagtctgtgaaagtccatcagcctggaaggagggacaaagtgggcttctggccaatagatagcagaacatccaggcactagccaggtagtgactgcctgcctcaaccattcagcctctactgaaaaaatttcacatcaggtccaaaattacctttccaattttggtttttattttttctcaaccaaatctgatgaaccaaccacattcatctctggcaagttcttttcaacttt

SEQ ID NO: 789826 - DNA, 630 bp, Homo sapiens
aattggaataacatgcacccatgtaatgttttttaaaagggtgagtgaaaacccaagactttgattttcaggcatggagggtagagtttctgagatacagtgcgcatactgcaggctgaaggagtgccacaggtagaagaccaccaataataagtctgtgaaagtccatcagcctggaaggagggacaaagtgggcttctggccaatagatagcagaacatccaggcactagccaggtagtgactgcctgcctcaaccattcagcctctactgaaaaaatttcacatcaggtccaaaattacctttccaattttggtttttattttttctcaaccaaatctgatgaaccaaccacattcatctctggcaagttcttttcaactttccaacccgtttgtatgcctgtgtyactgcatcacatctttgtccctctccccttccatttaactttccaagatctacccatcctcttcagggcccggatcccacctcctccttggtgcggcctctaaactgcaacattcaccatctaccacccatggtcggctcgtttggccagattataagcacctcccatggagactcaatacagtgttatggtggaaataatagtaaacaggaaatcagaga

SEQ ID NO: 789827 - DNA, 550 bp, Homo sapiens
gcttacatttggaaaacagtttcgacctcagtttcaattctctaatgctaagaatcatccaaaacataaaatttacaacatcataaaatatcagattggcacctcttagatgtaaatatctatggcatattgaggttttacgtgaaaagatggtatttgttcagtagcctatttccaaatgctaaccagtcgacttcagaatatgcaagtattttgcggggaggaactaggaagaaggcaacgtacttcagtttttttccccctgaaacttacattgcttaaatattttaactctgagaattcaaacccctttaaaacagaacatcatctttattctttcacarggagatgattttaaagagccccctgaaagtctgaaactactctaccacaaatttatactttcagaaaaagtgagagggtagcattccccaaatacctttagtaatggttttgtctcccaaataatccttgttctaaaatattatgttcacttttctgctcgctcatacagaaacaatttattagcatctctgtttaacaccttctt

SEQ ID NO: 789828 - DNA, 585 bp, Homo sapiens
gcatcctgttgatgactgagccttgtttgctttttcctctttttgtttagtctagagggatgatactaaggatagtttatgggagctaatttgaagaacaggaatagacttgataggtgcaacaataagatattattgaaactgcccaaggattatcattatgccaaactattttccttattacttttaactccacttgcagagtgttcaggaggattgttattcaaaaaaaaaaaaaaaaaaagattgayaggaaaagtaaacaaagcataatcctaacataaacagatagaagtggctatttgattttctagattcttcccacaattccaactcgttttgcttagggtgtattactctcagagtggaaagttactggtgagctatggaattcctgggaagtagctgttttccacacatctgatttctcatttgactgtcattttctaagaatagaaatagagaagacttacaaatcttaaatatcttctttaccactgtgaatgtttaacacataagacagtgagatctactgaaattctatactattttgcaaatttggggtatgcatcaatatttatcgac

SEQ ID NO: 789829 - DNA, 608 bp, Homo sapiens
tttgtacttacttagttcttttattgtctgtgttttcacaggcaataggtaggtagtagctgctgttttacacctgatacttctgtattccttttgcccatgttcacagataaccatcttcaactaataatgttttatattgaacttttgcttttagataactgctgtgattctgtctcctgcctagaccctgactcataaaccctatgaaaaggaaatcatgtatggtttttttttccaagcaaattgtcttttgctcattggatttattaggttagaaatacaggtcctaaatcagactgcattttgttttatagtgtatagtgtttttttctctaagctcctgtccccaagaagaagaagaggatgtgytatggaacctgactttatctattatgaaatacacaataggaacctagatagttgaattaacattaagattttatgaaatattattgcaaataattgccaaaagtcataatacaatagctggagtgaaaactgatggtggttcataaattgtattggttggtcaataaagtttgatgcagcaagttcactaaattttcatacaaatgaatcagcagcaagttcactaagttttctct

SEQ ID NO: 789830 - DNA, 529 bp, Homo sapiens
ttactgcatttcctctctctaccagctggaaagtctttgtgttcttcagtataacttttggggggattttctaattagcttcacgcatactgttgccctgtattcatcagctattgccaaaaaaaaaaaaaaaaagcataatgaaacattcaacaactcagtggcttacaataagcttccawtctgcacatctgcaggttaactgcagttcagctgatctaccctagggtcaactgagaagatttgctccaagcctgtggggcttgctttacttctgtcccacgtgtgttcacactggggctcaggcaggaggagcagcagagtcttgggcattctcctttcctgcatgtagttgtagaatgagaggatgactagacacatgtcatatctcaggaggcctcagtctggcacatgtcacatccacccataatccatcagccaagccacatacactctgcctactctcataaagcaatgtcaactggcaaaagccatggatgcagaattctaaggcaggaaattttgaaga

SEQ ID NO: 789831 - DNA, 642 bp, Homo sapiens
gttttttatgtgtgtgtgatggagtctctctgtgtcacacaggctagagtgcggtggcataatctcagctcactacaacctctgcctcctgggctcaagtgatcctctcacctcagcctcctgagtaactgggaccacaggcacatgccacccacgcctggctaattttctttttgtatttttggtagacggggtttcaccatgttgcccaggctgatctcttgagctcaagtgatctgcctgcyttggcctctcaaagtgctgggattacaggcatgagtcaccacacctagctaaaaagctttgagaggcaatcaccaactcttcagtgggcactgtttatacccatgattaattatgactccatctccataggtgctgtggaactgtttatggatgtggttatggtgggtaataacattaaaaaggtatatatacatatattgcatgttcatacgcacacacatgcagacactcacaaagtctcccatacaaactgtcaaatgaggacaggtaagtgtcctcagaggaaaaacatgtatgtaatattattaaaaatcatattagtgatatgatgtgatacttgtgctatcaaaatgatttgaaatggaataaggagagagagtagagtatcaatgaaat

SEQ ID NO: 789832 - DNA, 618 bp, Homo sapiens
tacccattctagttcaagaaggaagagccttctacaactggcttacatgagtaaggaaaggctataattagatttgtgtggagaatgtatggggctgaggtgggggtagccaagaaagatacaatggggagtggtagaagaaggaaacaattaggagaatattgtaatggtccatgtgagatgttggaagtttgaactagagtgttaatggtgttgatcttttcaaagttgttaaaaaaacaactattcagctctatcatttgaagatctgctttcagccaccattctttccttttctctttataggcaagcaagagttgtttgtactcattgtcccaggttcctctcttccatcactccagttcagtatgaactagcttctgtctctatcattttaccaaaacacttcttgccaaggttatcagtgacttgcttttcgctgacaytgaccaaatgtagtatccacatttagtcttgtgttatttgatcaaatataacatttgacaacattgttcacatgtttttttcttgaaacacttttttccctgctatttttattgcatcacaatcttcttgggtttttccccctgatttttctgaatactgtaatgtatcctt

SEQ ID NO: 789833 - DNA, 536 bp, Homo sapiens
gtacattttttcattctgacaaggaatgacaaaatgaaaattatataaaattcaaatttcagtgtccggagataaagttttatttaactaagcagtactcattggtttatgtattctctatggctgccgagttgagtacgtgaaacaaagaccttatctggtactctcattacttttcactgctattcarttcacaaatcacagtgacatagttataacttgacagctcttcaaataacatgtatatctccatattgcaactttattttttattatcactgcatacccattctgtgaaaacaagaaaagtgggctttgcacttaaaggcagaatcaagtgtggatattgttatcttagttaacaagaattgtattcgttatatgataacaatatagctgtgctaaaagattataatgtatgttgatattaccagattcagcatttatcacaatattgatcgctacagaaaaggaaatatgttcagagaaagtaatcttgtttaggactattagcctttctgcaagaacagttgttc

SEQ ID NO: 789834 - DNA, 655 bp, Homo sapiens
accaattctctgtattagtcaatttccacactgctataaagatactacctgagcctgggtaatttataaagaagaggctttattgacttacagttctgcatggctgaggaggccacaggaaacttacaattatggcagaaggcaaaggggaagcaagacatatcttacatggcaacaggcaagaaagagagctcaggggacacaccagacacttaccaaacaaccagatctcgtgaaaactcactgactatcatgagaacaacatgagagaaaccacccccatgacccaatcccctcccaccatgtccctcccttgacacttgggggttacaattcagattacaattcyagatgagatatgggtagggacacagtgccaaaccatatcaccatgtgacacattgttgctcaatgagatataagccatattctactcagggttcctggaaacgttttgtattactaaaacaaaattttcatgctctttcttgtttcttcagttttctttatgcctgcaatgtggtctggaattgtagcaactatcataaaatcatcagaataaaagccacataccaagaggataaagctataggaagactaaaatatggatgttctcattggactgccatcttagacctggactacttgcctcaaa

SEQ ID NO: 789835 - DNA, 623 bp, Homo sapiens
ttgttacatgaatatattgagtagcagtgaggtctgatttattgatgcaaccatcacccaatagtgtacattgtatctattaagtaatttcccattcctcacccacttcccacctgcccacattccaagtctccagtatctattattccactctgcatgtttgtgtgtacacactatttagctcccatttataaagtgagaacatgtggtatttgactgtatgtttctgagttatttcacttaagataatggcttccagttccatctgtattgctgcgaagatgtgatttcattcttttttatggttgagtagcattctatcatatatataaaatatttatatatttatattatatatatattcagcactaaatactgaaatatgtagtattccatgatatacrtagtgtatcactatacatatagtgtgtgtatacacactcatccccgacattttctctatctagtcatctgttaatggacatttaggttaatttcatatctttgatattgtaaatagggctgtgataagcatatcagtgtatgagtgtagatatctttttaatataatgatttctttcctttgggtagatacccagtagtgggattgctggattgaatgg

SEQ ID NO: 789836 - DNA, 607 bp, Homo sapiens
taaaacattaaacagcatcactggagagctattcctgaaatcccaaaaaatggttcttactggtggtgttagaatcactaatgataagctaatgaagtttcacagagttcaaagaccttaaaatctcatttcataaatacactcctcctattagcctaaacatgaacttggatctgtttgcaaaaaattttcaataaccttaaaagggtttgcacagtctcccacttcrctattctgtgcctcaggatgtgacaatgcttataaatcccacaatttgtcctcagagggtgtcttgatcaacatctctctgctgccactggcacactcctggctcagtcatgaccccattcccctattccagcttgttgactaaatcctcatctgatgtctctccacaaaaattcagaagcattttctcagataaatatttattcaatcattttaaattaatttccaagaaaaatgtgggatttaatttaaaatgtaagagtacatttctcttgcatttcccctgtaatcaaagagtgagatcatccacttgcatagcacacttggagacaggctgaatgttgagtaacattatcctgtcacaaatagagtaacgtgt

SEQ ID NO: 789837 - DNA, 541 bp, Homo sapiens
acctcgcagatacataaaactataaatgagggtcacatggcaaattacaagttaaaacgtacctttaaaaagtatttatttggcttaggttccaagatggctgaataggaacagctccagtctacagctcccagcatgagcaatgaggaagacgggtgatttctgcatttccaactgaggtaccaggttcatctcactggggcttgttagacagtgggggccraagcagggcaaggcatcgcctcacccgggaagcacaaggagtcagggaattccctttcctagctaagagaagcggtaacagacagcacctggaaaatcgggtcactcccaccctaatactgcacttttccaatggtgttagcaaatggcacaccaggagattatatcccgtgcctggctcagagggtcccacgcccacagagcctcgctcattgctagcacagcagtctgagatcgaactgcaaggcggcagcaagtcttggggaggggtgccagccattgctgaggcttgagtaggtaaacaaagcggccaggaagc

SEQ ID NO: 789838 - DNA, 630 bp, Homo sapiens
taaacacaccaatcagcactctgtatctagctaatctagtgaggacttggaacacttttgtgtctagctcggggattgtaaacgcaccaatcagcaccctgtcaaaacaggccaatcagctctctgtaaaagggaccaatcagcaggatgtggatggggccagataagggaataaaagcaggctgccccagccagcagtggcaacccactagggtccccttccacactatggaaggtgtgttcttttgctctttgyaataaaccttgctgctgctcactctttgggtccgcactgcctttatgagcagtaacactcactgcaaaggtctgcagcttcactcctgagccagcaagaccacgaacccaccagaaggaagaaactccgaacttatccgaacaacagaaggaacaaactccggacatgccgcctttaagaactgtaccagtcaccacgagggtccgtggcttcattcttgaagtcggtgagaccaagaacccaccaattctggacacaccagcaggggcagactgacacctcacatgccccagtacccctctgagataaagtttccagaggagcgatcaggcagcagcatttgctcttcagcaataatcgctgctctgcagcct

SEQ ID NO: 789839 - DNA, 630 bp, Homo sapiens
taaacacaccaatcagcactctgtatctagctaatctagtgaggacttggaacacttttgtgtctagctcggggattgtaaacgcaccaatcagcaccctgtcaaaacaggccaatcagctctctgtaaaagggaccaatcagcaggatgtggatggggccagataagggaataaaagcaggctgccccagccagcagtggcaacccactagggtccccttccacactatggaaggtgtgttcttttgctctttgcaataaaccttgctgctgctcactctttgggtccgcactgcctttatgagcagtaacactcactgcaaaggtctgcagcttcactcctgagccagcaagaccacgaacccaccagaaggaagaaactccgaacttatccgaacaacagaaggaacaaactccggacatgccgcctttaagaactgtaccagtcaccacgagggtccgtggcttcattcttgaagtcrgtgagaccaagaacccaccaattctggacacaccagcaggggcagactgacacctcacatgccccagtacccctctgagataaagtttccagaggagcgatcaggcagcagcatttgctcttcagcaataatcgctgctctgcagcct

SEQ ID NO: 789840 - DNA, 605 bp, Homo sapiens
atacaaagtaacctcatattagaaaaaaaattgccttttttgaattgattttgttctatgtaaattttacaataattatattattccaaacacagaaagctttagatgtctttgatatattatgtcttccttcatttaatatttggsttcaaattccaggtctgtcctagaacacaggacctagcaatagagttcactgtttttgcctctacatataacttaaaatatctgagtcagctagataaaaataataatttatttttaaagttttattttatttttgatttatacataataattgtacatatttatgggttacattgtgatgttttgatatatgtatacattttgtaatgattaatcagggtatttagcttatctatcatctccaacatttattattctttgtgatgaaaacattcaaaaatactttcttctagttattttgaaatatacaatacaatattatatatttcagaatgccgaaagttatttatcctatctaaatgtaactttgcactttttgaccaatctctctccatctttctctttctagactctaataaacactattctactctgaatttctgtgaaatcaactattt

SEQ ID NO: 789841 - DNA, 673 bp, Homo sapiens
ggaacaattaagacaatggcaatagtgggtctttacctatcaagaattactttaaatgtaaatggattagaatgtccaatcagaagacatagagtagctgaatggataaataaaacaagacctaactctatgttgccaataagagacttactttatcttcaaggacttacataggttgaaygtgaaggaatggaaaaagatattccatacaaatgaaaaccaaaaaagtgctatacttacaggagacaaaatagactttaagtaaaaaactgtaacaagagacaaaaagggtcattatataatgataaatgatgtcagttcatcaagatgatataataactgtaaatatagatacactcaatatcaaagcccataaatatataaaacaaatattaatagatctgaagacagaaatagcaatacagttgttataatcagagacttcagtatcccacttttaacaatggacagatcatttagatagaaaatcagcatgtaaacttcgtacttgaacaagattttaagcctaatgtacctaaaagacatatacagaatatccatcaacaagcatcagaatactcatccttctcaagagcacacaaagaattctccagggcagatcatgtgttaggccacaaaacaagtcttaataacttaaaaagagtgaaatctg

SEQ ID NO: 789842 - DNA, 548 bp, Homo sapiens
tatgagaattggtggggttggatccacattattatgggctaaatatttgatggtcatataaaagtaaaaaacttaaaatgcagatagttttggctatactctcaatcacacactgtgtatttgtttccacaatattgtttatcagttgtaatctcttctaatagtggtcttgttcatgctagtttgaagtctttcaaaaagcttacatataatgagccaactataacacaatatgaatcataaaatatgtaaagtgaaagtgctacagaaacacaaaagatagaactatcgtatgactatgtcttttgcttrggactgtaagaaatcatcccatattttttatgagttttttgcaagtctctgcactaggaggtgaattgatagattttatttcatccttcactcattttaaccaactcacctgagttgatatgttttgcagtgcctagaccagcttgctctgcctaatgagcatgattttaggtggccctatctggttatcagagggactttcattttcagctccaacatgtaaacagtttcaaagt

SEQ ID NO: 789843 - DNA, 580 bp, Homo sapiens
gtatcatatgtgttatgcagttacttcctctccccagccttaccctgtaggaattctagtgactatgttgccaccatcttggagctccatgccctcatagtgtaatggcaccagcagatctgcctgtgcatggacttcctgtactacctcactcctgaggggagatgtttctgcagggcctatgacctggtgcacaactttagacaccatcatcctggagcagcactgcaccctcactagccagagtgttgacatcctcaaggccagggccacattcaagactttggacttcattgatgcacttgtgctgagcaaggtgggcatctctggtawcttaattcaggaggcagaatacagcttgagatcaggtgtctgatcaaagaacttgaacttgatctggagggctctggggagccatggaaggttctggataaaggagggtcagtcagccacgttttagaaatgactgtggaagtcttcctggaaggagtgaacaagagccaggagaccagggagggagcttgtggggcaggtctggagatggcaagggagggatcctgcttggatgaaaagtcttcag

SEQ ID NO: 789844 - DNA, 533 bp, Homo sapiens
gtgactatgttgccaccatcttggagctccatgccctcatagtgtaatggcaccagcagatctgcctgtgcatggacttcctgtactacctcactcctgaggggagatgtttctgcagggcctatgacctggtgcacaactttagacaccatcatcctggagcagcactgcaccctcactagccagagtgttgacatcctcaaggccagggccacattcaagactttggacttcattgatgcacttgtgctgagcaaggtgggcatctctggtatcttaattcagsaggcagaatacagcttgagatcaggtgtctgatcaaagaacttgaacttgatctggagggctctggggagccatggaaggttctggataaaggagggtcagtcagccacgttttagaaatgactgtggaagtcttcctggaaggagtgaacaagagccaggagaccagggagggagcttgtggggcaggtctggagatggcaagggagggatcctgcttggatgaaaagtcttcagggaccatctca

SEQ ID NO: 789845 - DNA, 482 bp, Homo sapiens
ttacactacctgacttccagatttaagataaagtcacagtcttcaagattataatgtactggtgaagacaacacaataaatcaatgaaaaagattccaggaataaacccacacatatatggtcaaataatttgttccacaaaaacccaaaagcaattcaataggaaaagaaaacaatttttttcaaaaaataatgtggaaacaactagatatccatatgagggggaaacaaacctcaacccttacttyacaccctatataaaaattattccaaagggatcataggcctactcataaataaagtaaaactagaaagcttttagaagaaaaactaggagaatatctttatgactttgggtgtggacataaatttgttaaggaattgacagaaagcactggccacattgtttcaaaaaaattgagttcattaaaatttaagtcttctaaccatcaaaagacactattaagaaacagggaaatctc

SEQ ID NO: 789846 - DNA, 587 bp, Homo sapiens
ataaaaataagatgcttaaaaatcatcttcgaaatgacaatcaaggtaagacttctgatagtaaatttctcatttcccttggtgatcttactgattttaaaaagcaaaattacaggccaggcatggtggctcacacctgtaatcccagcactttgggaggccgaggcaggtggatcacctgaggtcaggattttgagaccagcctggctaacatggtgaaaccccatgtctactaaaaatacaaaaattagctgggcatcatggtgggcgcctgtaatcccagctactcgggaggctgaggcagragaatcacttgaacctgggaagtggaggttgcagtgagctgagattgcaccactgcactccagcctggatggaagagcaagactctatctccaaagaaaacaaaaagagtaagattacatatttttaatcataaaagagcagtttaaaaaaatatgtttatatataaattaattttttaaatttaatttctttagaattcagagttatttaagaagttgtagctaattctcaatctcaaaccgtattgtctgaaaaaattcatttacctacttatgatccct

SEQ ID NO: 789847 - DNA, 587 bp, Homo sapiens
ataaaaataagatgcttaaaaatcatcttcgaaatgacaatcaaggtaagacttctgatagtaaatttctcatttcccttggtgatcttactgattttaaaaagcaaaattacaggccaggcatggtggctcacacctgtaatcccagcactttgggaggccgaggcaggtggatcacctgaggtcaggattttgagaccagcctggctaacatggtgaaaccccatgtctactaaaaatacaaaaattagctgggcatcatggtgggcgcctgtaatcccagctactcgggaggctgaggcaggagaatcacttgaaccygggaagtggaggttgcagtgagctgagattgcaccactgcactccagcctggatggaagagcaagactctatctccaaagaaaacaaaaagagtaagattacatatttttaatcataaaagagcagtttaaaaaaatatgtttatatataaattaattttttaaatttaatttctttagaattcagagttatttaagaagttgtagctaattctcaatctcaaaccgtattgtctgaaaaaattcatttacctacttatgatccct

SEQ ID NO: 789848 - DNA, 584 bp, Homo sapiens
cactgactctgggccctcttgacccaagcaggctcctgttgtggtgggttgtgtcatcccacgatgtcactcttgctgagtccccatcgcctctgtgttttggagcagttagagacacacagcagtctctgtgagtggctctgcgtgaaggattgttttctaggtgagatgcacatctcaacacagctgactgctcagactcaggtgagtgggacctgctctcttctcttcctcctggcttggggacagtcactatcaagtgggtggttttggcctctgggcagctactgagggtaatacctgagcactcacygggtgcctgttctgtgctgacagtcatctcattcatccttgcagcaattccattctgcatctcctctggacacccccaggaccaccaggacaaccccatcatggccctgtcaccaggcccagtctggctccatgataaccaagatgcaggtccagagacaaccgccctacttggtgcctgcatctgaccccccttggtgggtagtgaccagcccaacatggaagaagccagggcagcatgcagccagctgccctgcagccccagatggcac

SEQ ID NO: 789849 - DNA, 629 bp, Homo sapiens
tcccagtgaggatccatactggggatggcttgctgactggtagagaacttgtccctttattcagctgttattctatcattttcttgactaagataccaggtatctccaaactctcaggctgcagctaaagccacattcttttcattaaaggccagggtttgatctaatagcatgacatctctccaagtgagatcaaagatttgccctagaccctgtaggacatctatatwcctatcaggatcatctgaaaacttccccaggtgtgccttgatctgctttaaatcagagggagaaggggacatgtacccaggttgggccaaattcccctccccctacagcttaaaggggacataacccatagcccgggggtttttgtggtcccttggagatttctttccttgtttccttctaggcagggataatagaggaggcttatcattaataggaaggggagttatagggaggctaggatatgggggtaagctgagaggtcctcttgtgggatgtaaattagaagctttgaatagttgtggattctccttcaatgaaaagaaagcttggacataaggtatttcactccatttgccttcctcttacagaaaaggtcaagctcgctgacttcaagaatg

SEQ ID NO: 789850 - DNA, 553 bp, Homo sapiens
ccaccaccatgcccaactaatttttgtatttttagtagagatagcgtttcaccatgttggccaggctggtctcgaattcctgaccacaggcgatccacccacctcggcctctcaaagtgctgggattacaggagtgaaccactgcgcccagacacctttatgggaatttttacttgagccacaccataacggagaaaatcaggacaatccaaaccaacatccacccccctacctgtaaaaagcataataaaattaggtggttgcacagagatagtttcctttatcacttccctagagtttttactgagattaacaggctttgtacttcttttttccatcccaagatgaaaatgacccacastgagggactatgttttctggcagcagtgaacgacggcctcttctttgccactgaaagtgagcaagtaaccacaagttcgtgtatgtcattaccgtgattgctacacccaactggaaaaagaatattcctactgtgactccattaaagtcttttcaaagcaaaatatagcatagaacagaaaaatggacctta

SEQ ID NO: 789851 - DNA, 606 bp, Homo sapiens
gctaagaagttatagtctatgggcagtttcatttccacccctttctccaaacagaggtccctaacagttaaagtagatgatgacatttgtaatagcttaccaacagcataattaaccataaactctcagaggagaagtgcaagaaagctttcactatgaactactaatactgacgaaaaatcagaaggaaagcttccttatcttggcagcgtcaggttaaggactgacaacatgaggctagatcctggggaagccacatccccttctctcttytaagggataacttttcaggtccttagaaatgagagaattatttgtacatcaagggaagtaccataagtcatttttctactccccatctctcctcaggtatcatctcccatttgtcagggaagacagtcttacgaccttttttttttttttttttgagacggagtcttgctctgtcaccctggctggagagcagtggcatgagcttggctcactgcaagctccacctcccaggttcacgccattctcctgcctcagcctctcaagtagctgggattacaagcgcccgccatcacgcccggctaatttttttgtatttttagtagagacggggtt

SEQ ID NO: 789852 - DNA, 603 bp, Homo sapiens
taggccgggtgtggtggctcatgcctgtaatcccagcactttgggaggccagggcgggtgaatcacctgaggtcaggagttcaagaccagcctgaccaacatggtgaaaccccgtcccttctaaaaatgcaataattagccaggcatggtggtgcatgcctgtaatcccagctacttgggaggctgaggcaggagaatcgcctgaacctgggaggtggaggttgcagtgagccgagatcgcaccattgtactccagcctgggcaacaaaaacaaaactccatctcgaaaaaaaaaaaagaaaaaaaaagtatgtatagacaagagcaaagaaatccaagttcaaaaaagtctgtatatagatatagatgcatyaaaatatatatacataaaaaaatccaaaacaacaacaaagtaaaataaaaattcttttcctgctggaagccaaaaaaaataaaaataaaaatatatacatgtacattttttatatgaatttaaagtccagtagaatatattccaaattttaacagtggttatttgatagtaatgggatcatagagaatttttatttattttctacaacaaacatttctgtaataaaggaa

SEQ ID NO: 789853 - DNA, 603 bp, Homo sapiens
taggccgggtgtggtggctcatgcctgtaatcccagcactttgggaggccagggcgggtgaatcacctgaggtcaggagttcaagaccagcctgaccaacatggtgaaaccccgtcccttctaaaaatgcaataattagccaggcatggtggtgcatgcctgtaatcccagctacttgggaggctgaggcaggagaatcgcctgaacctgggaggtggaggttgcagtgagccgagatcgcaccattgtactccagcctgggcaacaaaaacaaaactccatctcgaaaaaaaaaaaagaaaaaaaaagtatgtatagacaagagcaaagaaatccaagttcaaaaaagtctgtatatagatatagatgcattaaaatatatatacataaaaawatccaaaacaacaacaaagtaaaataaaaattcttttcctgctggaagccaaaaaaaataaaaataaaaatatatacatgtacattttttatatgaatttaaagtccagtagaatatattccaaattttaacagtggttatttgatagtaatgggatcatagagaatttttatttattttctacaacaaacatttctgtaataaaggaa

SEQ ID NO: 789854 - DNA, 652 bp, Homo sapiens
gaaaaacaaagtgactgtaactttagctgggattctgagaaggctaatacaaaggaagaacatgtaagctgaatctcaaagagtaagttcacaaagcctggaaggtgggaacgagtattccaggcaggagagctgtgtgtgtgtgtgtgtgtgtgtgtgtgtgtgtatcattagaacacgtatactcggatatttgatcaattctttgtttgtgttctgtgggtcttcttttccctattgccattacccctgccttgggttaggcacctaaccactctcagttgagccactctgaatgtgttctgatggtccagttaaggacccgacccaaactatcatctatatggtgcctgtagttgcacctagccttcacacctgacgatcacacttyttgacttaacaatctctcaatggctctgcatcgtctttccagcatggacaagatctaagctccttgacatgacacacaaggcccaacatgatgggtccttttccaacctttgcaaatgtatctacccatcttccttatgcatgctgtattccagctataaatattgcttgccagttctcccctatattatgcctttctgcatccccacatatattcacatgtgaaggttgcccttctctgacttttctccctggaaaagcc

SEQ ID NO: 789855 - DNA, 438 bp, Homo sapiens
tctaattcaggccctactggttacaaagatatcacgagcccaacttgaactaatcaaggtaggaaagtggaaaaggaaggatgaggagcagtgagtagtagagtggaaagagctctggattctagctctccctctctacctgtcacttctttggttgcaggcaaattacttatcctctctgttctctgagctataatatttaatacaagcagtcagcaactgatgatttytaagttctcttctaacatgccctgattctgtaccaattgatactgattaacaaggattagcacatgcctcttacattttaagagaatggttctgctcaccctgttgtgtgggaaacttacagtgtcaagagtggcacttcacctcttttaatatcatctgccaaaacaacatatatgaatgtgccatcctttgagactggagaagttt

SEQ ID NO: 789856 - DNA, 593 bp, Homo sapiens
tgacctacaaatactctttaagttgatcagctagcaaacatttgccagacttctttctttcctacagcaaattattgcattttcctgtcctgatgaggcaacaatagaaagaacagagaaagaacagtgtagtcagtagaaaatgcagtgatacaaagttgtaactgtggttttctggcacctttgctaactgtacacccagtcagcctgtcttgagccatttccccaactgtaagaattgtgatgtttgttgctctttatgccgtagaaactagtgagactatatgaggtaatgagactgtgtggtaaaaatgctatgggttatgacctygcatttaaaaaaaaaaatgctgtgggcatctgcatagacgtggtcagtcagtttcattatgcagtaacatgagttacgtgtctctggatgtaagagctctgtctctgatacccagttgccaaggaggttgagctaatttgacttttagctgatctgacaatgagagagaactcttgcctctcttcctctcttcattgctccctaaacctccctgcagaagctgtaatctcccagatggggaaggagaccctttttggtttca

SEQ ID NO: 789857 - DNA, 593 bp, Homo sapiens
tgacctacaaatactctttaagttgatcagctagcaaacatttgccagacttctttctttcctacagcaaattattgcattttcctgtcctgatgaggcaacaatagaaagaacagagaaagaacagtgtagtcagtagaaaatgcagtgatacaaagttgtaactgtggttttctggcacctttgctaactgtacacccagtcagcctgtcttgagccatttccccaactgtaagaattgtgatgtttgttgctctttatgccgtagaaactagtgagactatatgaggtaatgagactgtgtggtaaaaatgctatgggttatgaccttgcatttaaaaaaaaaaatgctgtgggcatctgcatagacgtggtcagtcagtttcattatgcagtaacatgagttacgtgtctctggatgtaagagctctgtctctgatayccagttgccaaggaggttgagctaatttgacttttagctgatctgacaatgagagagaactcttgcctctcttcctctcttcattgctccctaaacctccctgcagaagctgtaatctcccagatggggaaggagaccctttttggtttca

SEQ ID NO: 789858 - DNA, 597 bp, Homo sapiens
actgtcctccttctcacacagccccagccacgggaccacttccactgcaggaccttttcccttgctggtgcctctgcctggaatgtgctttctctagatatctacatgggtccagtcttcaattaaatgccattttcttaaagaggctttctctaccatcttgtataaatttgtaagctcaccctacccccaaacatgttctctctcccttcccagctttatttttcttcatagaactttctcccctggctgggcgcggtggctcactccggtaatcccagcattttggggggccaaggtgggcsgatcacgaggtcaggagatcgagaccatcctggctaacacggtgaaaccccgtctctactaaaaatacaaaaattagccaggcatggtggcgggttcctgtagtcccagctactcaggaggctgaggcaggagaatcacttgaacctgggagacagaggttgcagtcggctgggattgcgccactgcactccagcctgagcgacagagcaagactcagtctcaaaaaaaaaaaaaaaaaaaaaaaagagtttagatctttcaactcaatgaaatagcattgtttttgggtgg

SEQ ID NO: 789859 - DNA, 485 bp, Homo sapiens
ccaagagctaggacccccaaaggactacactgtgttaataaaggtgaactgtacataaaccaattgtcctagactataggtaaggtttgagaattctggtgggtccagaaaatcttaaatcttcaacttggatgattctaatactctcaaatcctccaaatcttctttgaagaaagctaacatcctcctaaggcctcagattatatctgtgaataattttaaaattcagtatctcgcaaatgatcagaggtaactggatacacgaagagacaagatagaaacagcagaaaaaactcaatrgaaatcggctggttgtggttgctcacatctgtaatcccaggaacttgggaggctgaggtgcgtagatcgcttgagctcaggagttcgaaaacagcttgggtaatgtgatgaaacatgtctctacaaaaaatacataaactattagctgggcgtgctggcatgcacctgtaatcccagctactcgg

SEQ ID NO: 789860 - DNA, 646 bp, Homo sapiens
taaattctggtttaggaactaggcagaatgaactaatatggacaatccattatactcttctttcctgcccagcttccactttttaaattgtgttaaaatatatataacataaaacttcccattttaattatgttttaagtttacagttcagtggtattaaatacactcccattgttgtgcaaccatcaccaccacccatttacagaaactttttcatctttctaaacrgaatctctatacccatcaaaccataactccccagtcccctttcctcccagccccagaaacccccattctactttctgtctctatgaatttgggaccagatgagccacatttttaatctctaggaccattgcctcccagagctgggtcacattttccatttttttatttgacaatttgctttttcataggcaatcgactatgttttagacccagtgtaagttttttcactcctagggatgtgggcctatactaatttcatagtcatactaaagacctttggcattttagacctttggcatttgatctgatgtttccaaggacttgccagaagactctgtgacctatctacctcgtatttccaatccacatttagttatctgttccaggacatctttgatcattggactctaatgaattt

SEQ ID NO: 789861 - DNA, 613 bp, Homo sapiens
aagactgaagccttggttcgtctgggactgtcaaccagagcccctgagcgtgatttcttcatgtggcttgggcttcctcacagcatgttggcttcaggattgtcagacctttttttttttttttttttttttttttttttttttatgttttgagacagagtctcacgctgtcacccaggttggagtgcagtggcgcggatcttggctcactgcaacctctgcctcctgggctcaagcggttcttctgcttcagccacctaagtagctaggattacaggtatgtgccatcatgsccagcttctgtatttttagtagagattgggttttgccatgttggcaagctggtcttgaactcctggcctcaagtgatccacccaccttgccctcccaaagtgctgggattacaggcgtgagccgctgtgcccagccagactccttacattggcaatccaacagcaaatgtccacagggaacaaggaggaagcttcatggccttttataattgttggatatggtttggctgtgtccccacccaaaatctcatcttgaattttaatccccataacccccacttatcaagggcagggacaggtggaggtaatcagatcatgag

SEQ ID NO: 789862 - DNA, 610 bp, Homo sapiens
agtggctgtccatatatgtagaggaaatacttaagatagttacattataatgggagagtaaaaggacacagaaaaaggtttctttctttatttgtaatctggtagaactttccagaggtatagaggtaatgtttctacctttcactcaaactggtaaaatgtcaacaccagtagactgtgataagttactgcactccagcctgggcgacagagcgagaccttgcctcaaaaaggaaagaaaaaaaagaaaaaaagaaaagaaaaaggaacacataccaaacttaaatgtgtacgtaccaaacaacagacttgaaaaataagtgaacctggccaggcgcggtggctcatgcctgtaatcacagaagtttgggaggccaaggcaggtggatcacctgagatcaggagttcgagaccagcctggccaacatggtgaaaccmcgtctctactaaaaatacaaaaattaggctgggcgtggtggctcacggctgtaaacccagcactatgggaggccgaggtgggtggatcataaggtcaagagattgagaccatcctggccaacatggtgaaaccccgcctctactaaaaaaatacaaaaattagctgggtgtg

SEQ ID NO: 789863 - DNA, 454 bp, Homo sapiens
catcaactcttccctgggtctttagcttgctggccagttctgcagattcagatttgccagcccccacaataagacaattcctttaattgccttagttctgatgaatacagagatctaggctgggtgcagcggctcatgcttgtaatcctagcactttgggaggctgagacaggcggatcacttgaggccaggagtccaagaccagcctgaccaacatgacaataccccatctctgctaaaaatamaaaaaaattagccagatatggtggcatgcaactgtaatcccagctattcttgaggctgaggtacaagaatcatttgaacccaggaggcagaggttgcatgaatgctgctgaaaaaaaaaaaaagtaaaataaaaatgtaaaagtgaccattaaaaaaaaaagcaaccaacctaaacctcatgccttatacaaaaattaacttaaaatgg

SEQ ID NO: 789864 - DNA, 596 bp, Homo sapiens
cttgacactaagagggaaccttaacattaactatgaagtttggatggaaatgatctgtcattgacggtaacaaatgtaccactgtagtgtgggatgctgacagtaggaagcttgggtgtttatgagggcaggatatgtataagaactctcagcatattcagtcctcacaacaaccctatgtgtccaacatatccaagatattatcatctcaaaatgtaaccaatattttaaaaatttaaatagttttggctgggcacagtggctcacgcytgtaatcccagcactttgggagtctgaggagggcggatcatgaggtcaggagacggagaccatgctggctaatggtgaaaccccatctctactaaaaatacaaaaaattagctgggcgtggtggtgggcacctgtagtcccagctactcggggggctgaggcaggagaatggcatggaccccggaggcggagctggcagtgagccgagatcaagccactgcactcccgcctgggcgacagagcgagactctgtctcaaaaaaaaaaaaaaaaattaagtactttttcatgaacaaaattctcaaaatctggtgtgcattttggaca

SEQ ID NO: 789865 - DNA, 556 bp, Homo sapiens
atacaaaaattacgccaggctcagtggcttatgcctgtaatcccagcactttgggaggctgaggcggatggattacaaggtcaggagtttgagaccagcctgcccaatatggtgaaaccccatctctactaaaaatacaaaaattagctgggcgtgatagsgggcgcctgtaatcacagttactcaggaggctgaggcaggagaatcacttgaacccaagaggcagaggttgcagtgagccaagatcacgccactgcactccagcctgggtgacagagcaagagtctgtctcaaaaaaaaataagaataaaaataaataaataaataaattcaaaaattagctgggcttggtggcgcatgcctgtaatcccagctacttgggacgctgaggctcgagaatctctggaacccaggaggcagaggttgcagtgagccgagacctcaccactgcactcccgcctggacgccagagtgagaccctgtctcaaaacaaacaaacaatgctgcaacaaatcttctaaatgcgcttttttgttgttgttgttttgttttttta

SEQ ID NO: 789866 - DNA, 638 bp, Homo sapiens
tggttcctttaatggaggagggaagtggggtgacatagattctcttaaacctacctatttaaaggcattaattagcgtttgcatgcactactttaaaattttcctctcaattgcttgagtccaggagttcgaggttacggtgaactatgatttcaccattgcagtccagctgaggcaacagagagagaccctcttaaagaaaaaaaaaactttttcctctcagactctgtccctagcattgactcaccccatcattttttttttttttcttgagatggagtttcaagaaaaaactccaggctggaggcagtggtatggtctcggctcactgcaacctccgcctcccgggttcaagcgattctccctgcctcagcctcccaaatagctgggattacaggcacccgccaccacacccagctaattttttgtatttttagcagagacggggcttytccatattagccaagctggtctggaactcctgacttcaagtgatccacccaccttggcctcccaaagtactgggattacaggcacgagccaccgcgcccggccttcacctattatatctattcttgtcttttaaatagtgagtgacttcacagctcagtctctttgttctgaacttccattctgag

SEQ ID NO: 789867 - DNA, 626 bp, Homo sapiens
actgtctagccaatcagtagatttgtgaaaaacaattgaagactgtcattttaagtttctaagttttgatgtggcttgttattcagcaatagctaactgatacacctactttaaactcttcaatgcctttaattgcctctgcaaaaagcctaaactccttaacttaataacatagaaggtctttcatcatcttgctgagctccatacctttaggtaaccagccctttccagtgatgtgcagctatcattgtaagaacaggttcccaacacccttgcctggttctctctttactgaacaggtcctggtttcccctgcttagattgcccctcaaacttagttgatcttagattccctttttgactataacttacactcascctataaatcaaggtgttttccaaactttgagttgatccactgggttataagtttagagagttaggactagcatttttttttagatgacattgaaaaaaaaagtaacaggcaggataaaatagaaaaatatcagagtgaattctaggtagtaaattttcaatgtgtgtgcattggtttgctatgcaatatgtgtgtattttttctgctggacatgataaaaaaaaatgtttgaaaacacactgcttta

SEQ ID NO: 789868 - DNA, 591 bp, Homo sapiens
acctcaaaacctcacccgccctcacatatctggtacagtggtgggtacatggataaacatctaatttagttttgctaaattcaatgaaaatctcgatctatgtcctaaaagttgccgttactacatgtgcatatgaattaatatgtaatgacagatgtgctcaatctatttcccccaaaagtttatcgttctttataayagaagaatgaaatcatggaattataaagttaaaaggggtgtttagagcttattaacttcaccttctacattttacctgtgaaaaactgaggccaagaaaggtgaagtggatacacagtcaagcaatgtaacagagccaggaccagaaatcggtctcttgactctgagcctagtgttctttctaccatacttcatgtctcctgtatcctacctgcattcagagagaaacaaggtcgtaagtctgtcccttaaacaaacatcttaacccctccatatgtgtgcattgtttctaggtaacaatagagtaccctcacttgctttggagaagttgaggtttccaggtgccacttcattaaaaatgtaattttaatgtgtttttatttctacggcttc

SEQ ID NO: 789869 - DNA, 593 bp, Homo sapiens
cccagattcatgtcctacagataataagttagcattttttaagccactaagtttgtggcaatttgttatggagcaatagctaactaatacattgattattgataaaagtggggtcacattcctaagaaaggaaatgtacgaaatggaaacgagtatagacttggataacagagttcctgctatgccatttagtatctggttaagtttcatatcttttctaaaccttggtttctctgtttctaatatgaarataatagttcctgcctcatggtactgtttgcaggggtaaatcagatacagtatttagtagcatgtctggcagatatgaagtatttaatagatgctattcattgctactatatgatgtagatttcatccactggaacaattatagtcttcacccggggaccttagcatgatacagctatccaggttggttttgctagcttttttgtttcctcttgtcaggactttatgtttcagggagactgagtaaccttccattcagccctgaaaggttttactctcatgggtattataaatgttctcctcttggtatgtgacatgattatctaattctttttgtctgaagt

SEQ ID NO: 789870 - DNA, 593 bp, Homo sapiens
cccagattcatgtcctacagataataagttagcattttttaagccactaagtttgtggcaatttgttatggagcaatagctaactaatacattgattattgataaaagtggggtcacattcctaagaaaggaaatgtacgaaatggaaacgagtatagacttggataacagagttcctgctatgccatttagtatctggttaagtttcatatcttttctaaaccttggtttctctgtttctaatatgaagataatagttcctgcctcatggtactgtttgcaggggtaaatcagatacagtatttagtagcatgtctggcagatatgaagtatttaatagatgctattcattgctactatatgatgtaratttcatccactggaacaattatagtcttcacccggggaccttagcatgatacagctatccaggttggttttgctagcttttttgtttcctcttgtcaggactttatgtttcagggagactgagtaaccttccattcagccctgaaaggttttactctcatgggtattataaatgttctcctcttggtatgtgacatgattatctaattctttttgtctgaagt

SEQ ID NO: 789871 - DNA, 591 bp, Homo sapiens
aacaacagaaattaatttttttttttcacaattcgtgagtccagaagcctgagattaaggtgtcagcagggttggtttcttgtgaggcctctctccttggcttacagacggctgccttctctctgtgtcttcccatgatctttctcgatgtgtgtccgtgtcctagtctcctcttcctataaggacaccagtcatatggaattagggcccacccaaatgacctcattttaacttcattacctcttagaagaccctatctccaaatacagacatattttatctgttttattgtacttggctttattatgcttcacagaaactgcttttttcacaaattgagggtttgtggcaacccagcattgagcaagtctattggcatcatttttccaaatacatgtgctmacttcatggctttgtgtcacattttggtaattctcataatatttcagacttgttcattattttttctgttatgataatctgtgataagtgatactcgatgttactattatgattgttttggggtgccatggactgtacctatataaaacagcaaacttagttgatgaatttgtgtgttctgattgctcc

SEQ ID NO: 789872 - DNA, 618 bp, Homo sapiens
ctctgtgttgccctgaaggctccagcctgactcagccaaccctcactaagaccagcagtcacaggcctgtaccagctcaccagacgaccactcttaccctagtaccatgatacattttcagacaatttagccaagtcggcagctaaagaagcggcatcattgcaaagaggtgaagatcagaaacaaagggaaaaataatggctccatgcaaatcttgcaaggaatttaaaaggatacaggaaaaggtttcaggaaagactgcytcagtagctcagaaccaggcccaggattctcatccagaggctgcctttaaaaaaaatagcataatttcactcttggcaactctattagcccattcttgcattgctataaagaagtacctgagactgggtaatggataaagaaaaaggggtataattggctcacagttctgctggctttgcaagaagcatggtgctgatatctgctcagcttttagggaggcctcagggagcttacaatcatgatagaagatgaaggtgagcaagacgccacatagtgaaagcaggggcaagcaaggggtctgatcttaaatgaccagatcttataagaactcactaccacaaagacagcatcaag

SEQ ID NO: 789873 - DNA, 617 bp, Homo sapiens
ggaagtaatgttgaaggtgagaaccaaaggataaatcagagttagctaagtgaggatggggttgcactgggatgtgggaggcagctctggtctctccctccaaatgctcccactagagcagggagccagaaatataaatgagttgttctgatcctagctagatggggatgtgctrtaatggagacaacgtgttgtggaactgtggatggattccagcagggtgagccttctcaagcctgaccctgagcccctggctgcggtatagggaaaagcaaaactgagcaaggcaatgtcatggagcaagagagaatcattcttcttgacttgtctgcagagaggggtgtcactgctcagtaaacagaaaataatatgatcatccttgttattatttcctctcttaaacaagattttagtttttcatctctcttttgaaaggtgaaaatgaggacttgggagagatgcaacatattttagatctgaaaatttaaaaattcttctttagctcaagtgcagcaaaatatgccaaagtgaattttatgagcaaagcatgatggttttaggaggtgatgccatgtgtgactgaaagtaggccaaatgtgtgaactgattctgtgaac

SEQ ID NO: 789874 - DNA, 498 bp, Homo sapiens
catgtcaggccttgttcctcaggcctcatcttagcagtcacctccttcctgctaacaccaggggtgattgtttctctgtgacttccctgtggaggcatttctgcatgtagctgccgcccttctaagacggagctcctgaggcaggaactgggtctagctatactcccacaactttctggagcactccatgacacagcatggatgctggatkgattgattattgaatgagtaggtagaaagggtgagcactctcctggggtcagatctggcaggctttgtatcaggaatttccaggagtctgagccattagggagtcgctgggagcaacaggatttgcaagtctagggatagatctcagtcagagaggccaagagaccacaccaagtctgaagcctgcactgcctagagtcacagaaagatgggtggggccagccaggactgtgctacagaacaggttatggctgttcccttaatttttgttgccctggccatgagtgg

SEQ ID NO: 789875 - DNA, 612 bp, Homo sapiens
tgaaagttttcatagatcatattacatttgagtgggtaacaagttacgtggtgcaagaaccaggggcatggagtacatgggtgtttgagcagtgacttgaagaaatagtagggatttatcaagtagaaacagagggcaagggcattccagccagaggaaacagcatttgtaaaagcacagatgtgtgaagaagctagatgtatgtagaaaactgcaaatagttcaatgttttagtcaggtctttttccattgcaagtgacagaaactcagtttgaacagttttaagttaaaaaaatcagaattggcaaataaaatcaggaagtccaggagtgtatgtgtctagagacttggctaggtacaggaacttgatgaatataaccaagacactctgtaaatcttatcctggcatttytctgttggctacattcacaggaacacactgtagaaaaagtggtcattggcaactctaggcttctgttgccctcagatttagcaatctaagcaaaaagaaagcactctttttttccttatatctctagcaaaagttcttaggagactccagccaatcaggctttgaccacataatcatctttttttttttttttctgtagc

SEQ ID NO: 789876 - DNA, 600 bp, Homo sapiens
atgctgagatcaatatactactgtattttacttcctattacctctctattggtaaaactagctacaatgaagttttgaagactctactttttcttttttttttttttttttggagacggggtctcattttgtcacccaggctgaagtgcagtggtgccaccccaggctcaagtgatcatcctacctcagcctcccgagtagctgggactacaggtgtgagccaccatgcctggctaacttttaaaacattttttcttttttttttttagcaacagggtctcactatgttgctagggctggtctaraactcctggactcaaggcgatcctctcacatcagcctcccaaagtgctgggattgcaccatgcccagcctgctttttagatttttgaactgtcaatacccaatgtgttttgaaatcatacagtaagtaagaataggcattttctaaagaaatcagccaaccttgaaggacagctgtgaagtaagaagtagatcttatggtttacaaagagagggagacagcatcagtacagcagtagtcttagaaactctgcctactactctgacactatgacattattgctctaacttatttat

SEQ ID NO: 789877 - DNA, 642 bp, Homo sapiens
gacatataattttggtttattaaataatttacaagaaataagctcatgtcaaaggatcagaaaaggattgttatcacgaacagcagagtaattaacaacgtaaactggaaccattgggtcaagaagtagcagatcaattctctgcgtgatcrgtgagatacatcctccgttagtttgctgtagtacatgaaggttaggtggcttagttgtggaattatgcttaagatgttttttgctattgaacaaaacaacttgctatgttcaccaggggaaaatctttacctcatctcaccaaagatggctagacattttgattgtcattacagcatatttaaactctttgattatttcttctctgcaggggcattcacaagtaattacaagaaaatataatttaactcactcactgaaaactatttatttgaaaaattcatttagcaatgaatctggttcactttcatttgcaaaaatcacttgccagaaatgaaaattttggcctgaactacattcttataatgataggggtgaaggctgaatgactctctaatttcaaattctatgacaatctactaatattgttcaattctactgttttcaattaatactggcaatgtaaatgaaggaatacaaagataaattact

SEQ ID NO: 789878 - DNA, 620 bp, Homo sapiens
tgggggttgggggtagatgccacatctctcacaggtttccaggcgatagtgacgcgtagcgacactgctggaccggggcccctgctgagtagggaggaactcggctgtggagctcgttctgaccaaaaccacatggtgctcttgggcaagcgaccttccctcgctgaggcttactctcccacctgtaaaacaaaacaaagaaatgcaaaataaaaacaagaactatttattttccaagagcatagatttgtttcttggtgtgatacgactggtccactctgggagccagaaaggcaactgcaaggtccactgcctctaggggtttctcagggggtgactcagtttcctgcttaactcccctactgcttaaggtttataaagatcatagtgcggacctctaaaagacttaagggaaaacaaaaaccaaaacaagaaaaacttctaattttacggataaaamtaaatggaacaaactgcattattttcatctgaattcctttcctcgtggctcattttgacacggagaaaataaattgccatctaccccccaaaccagctgcttccagtcagagcgaatggatcatgatttaatgaagacagccatctgttacagggtaaaa

SEQ ID NO: 789879 - DNA, 673 bp, Homo sapiens
gcttggggcttggcctcatgaaggatcctttgagactccttgctgaatggcatggctggtaacactaggtgagggacagggttcatagcaaggtctgaggacagatcctttgatagctgcactggaagcaggacactgatgggggcagatggctgctcagaaacagggggatggggtagagctggtactcactgaaggtcagggaaagccgagttgagaatgaaggatgacaagcctcactgcttcagattggcccagggctgcccccagtgcttggattcagactggaaattctgcmtgccacagaaacggggccaagactgtgtgcatgcgtggccagagccagccaactgtcacctccacttaggggccagcccccttcacagagtaaaactctggaaggcagacgatctggagaggttgacctggtgccaggctccctcctccaggcttggtttcatttgtgcatcaaagggaggagttgctgtctggctgttgcatcttgcaggttggtttcttttgaagcttcaggtgagagctccagaaatttccactgctccttgtcctagttaagcagaagccctgcaatttggcttaatgtagtgctcattcgctcatcctgttttatgctgggtgtggcattgggcacgtgaagatgtgaatgaagggtgag

SEQ ID NO: 789880 - DNA, 504 bp, Homo sapiens
tggcaagatagcaggcatctgtgaccctaaaagggtctattgtattgtaggggtgggaatagcagctcaactcaaatagcattagggaaaaaaaaaagggtgaagaaatagagacagtgggagcagatatatctcgagtaattttgctgtaaatgggagcatagaaatgggggtgtggctagaaagggatgtgggggtctagagaattgttcttaatttgggagacattttggcatagttgagaattggtggraatggagggagaaattggtgacacaggagagacaaagaatgttggaagaaacaaagttcttggctagaaagcagtgttcagaacccacacttgggctggataggacggccttagatgggatcagtgctatggtttcaacatttgtgtctacttcaaaattcatgttgaaacttaatccccagtgcaatggtattaaaaagtgaggccttttagaaggtgattaagtcatgatggctcttccctcaatggtg

SEQ ID NO: 789881 - DNA, 569 bp, Homo sapiens
tattctttagggtactgaactatggtttccagagcagttagagttcttaatttccacatggggaaactgaggctcagagacattgtgtgactgttcatggtctgcacagctgggagaacacatctgacaccagactgctagatccatggctcctggtgatgtgatccatgtcctccagttccccccgctttcagggggccccaggggagaatgtgaagctcctagcgggtgggggatggctgcagcagcaggcagggaagtcacaggayggccctttcttgttttggccccacagtgggtctaccaaggaggcgctgacatcctctctcagcagctcagcgcatatgagccccaggagtcccaggctgcccagacctgcttactcagataggcttcccaacccttccaacgcctgaccaagaaagaaaacctccacataagcatctcgctattgccttcatgttctgctcaggaagtggccctcggggagcaaactccaataaaccaccttcagaaaatggagctggtgactggagaggccagcccttgcctctggagaatatgctgac

SEQ ID NO: 789882 - DNA, 603 bp, Homo sapiens
ataaaaatcacacgaggcagatactattcattcccctactttacaaaaaagaaaatgggggcatagatggattaacttgcccaaggtcacctgtatcagttagctatagccacataataaaccagccccaaaagttagtgccttaaaataaccatgtattggttctcacaagttgttggctgggtatcagctctgatccaggctgggctcagttaggcggttctcctgttctcatccatgtgcctgtggccmgtaggggcttgactctgctccacatgcctctcctcctcttctgaaaacatcaggccagtccaggcatgtcctttttatagggatggcagaagtacaagagagtgagcagtagattcagagctggtatcctgtcatttcccccctaattccactggttaaagcaaagcaagtggccaaacacaggggcaggcagcaagccctgcccacaggggagggtactgcaaactggcatgttaagggtaagcagagatgagtgaggaaccagggtaatgatgcagccctgcacatcacctgcccggtaggtggtggggccaggtgtgcactggcagtcttgatccagtgtcctgctct

SEQ ID NO: 789883 - DNA, 613 bp, Homo sapiens
tttcctccagtttcctttccagagaattttgttcacagtgctgagacaaagacctaccagactcttgattgagggtcatactctaagagcagggcaaactagaagcagataggcaatttttttttttttaatatarggtctcactctgtcacccaggctggagtgcagtggctcaatcttgactcactgcagccttgacctcctgggttcaagtgatcctcccacctcagcctcagctggagctacaggcatgcaccactgtacccagctctttttatatttttttgtagagatgggggtctcactgtgttgcccaggctggtctcaaactcctgagctcaagcgatccacccaccttggcttcccaaagtgtggggattacaaagtgagccactgtgcctggctggatagactgattcttatccaaactgcatcttaaccttgactcagtttagtccctattgggattaaactgtttaatacttcactctatctgcctagcagagaatagggttaactctacttggggggaaaacgctagagcctttccagtgcttttatacaaaatatttggcattcctttaaatattactcaagagaaaagaccatttaa

SEQ ID NO: 789884 - DNA, 605 bp, Homo sapiens
atggatcacattatatgagactgtgatgtcccttgtcttcctggcccactccactcccaccccaagtgttggttccttggaaaaacactggggatggaggtggaattgctgtgaaaacaagactcagtcctccacagaagctgcccagggagttcttcaraagtggttatcctacctgccatttacactggatcaggactgtccagaaatcattttcacatctccccagaagaatggcatcatctcaatactaatcttcacttgaactagaagaatcatgcttgtggttttcaaaaggaaaaggttcctattcatggtgcatttagaagcagcccagggtgcttatagaacggacctgcttcttgctatgttcttgagcttctgaggcctcttgacaaagtcgagcaagtaagacgaccaggccaagtgggcactctgggccccatggccaaggatgggctggccaggtggccacgtggcctccggtggccttgtttctgtgggctttatctgatcctgagctcagatgctgatagtgcactggcttattttctaaggagagggagcttgatttgtgcaggatgcgccttcaccagatacctcca

SEQ ID NO: 789885 - DNA, 605 bp, Homo sapiens
atggatcacattatatgagactgtgatgtcccttgtcttcctggcccactccactcccaccccaagtgttggttccttggaaaaacactggggatggaggtggaattgctgtgaaaacaagactcagtcctccacagaagctgcccagggagttcttcagaagtggttatcctacctgccatttacactggatcaggactgtccagaaatcattttcacatctccccagmagaatggcatcatctcaatactaatcttcacttgaactagaagaatcatgcttgtggttttcaaaaggaaaaggttcctattcatggtgcatttagaagcagcccagggtgcttatagaacggacctgcttcttgctatgttcttgagcttctgaggcctcttgacaaagtcgagcaagtaagacgaccaggccaagtgggcactctgggccccatggccaaggatgggctggccaggtggccacgtggcctccggtggccttgtttctgtgggctttatctgatcctgagctcagatgctgatagtgcactggcttattttctaaggagagggagcttgatttgtgcaggatgcgccttcaccagatacctcca

SEQ ID NO: 789886 - DNA, 471 bp, Homo sapiens
gccttcaaggtgctcctacagtgattcccttaaactgttactcagagcataccatttttctgctcaacaacagaagttcgaacccttaaccaagcattctatgcccttcagtatctgcttccaacctcatttccagcytcattgtctgtatcttctattcacacatcttcaagttccagccgaaggagtctatctcctgtccatggcttctgagtgttctaactctttttctttcttcaggctgttacttctgcctagaaagtcttctacctcccccagtatgccctttaaaatcccacccccttttttaggaccagttcaaatgtcaccccttccattaatctaatctccgtttgcctctctccaactaaaagtaatatgctccttttgtacattcgcaaaggattttaatgaaacttcatacagttacagcattttgtctgggcttctggtcaatgccatgcacatctc

SEQ ID NO: 789887 - DNA, 628 bp, Homo sapiens
gaatcaggcagtaggttcgtgcccctggaagggcaggaacaagccctgatattgcacatcccccatccctagtggccaactagatgccaggcacaagggggttcccagaaaggatggaagggagagatggctgtggcagctgtttcagctgagggaacagcataaatagaggggtacgggcaggaatgctctatgcatgtttggaggaacagactcccctgtggtctgaaggagtctggatgtccaggagttcctaagggattgtgtcattttcagaaacaggatcttccacatcccagccactgtgaggcctgtaaggtgccctttcacagcaagtgtccagtgttcagcaatttgatccaagrtgcagtttgaagtggttgcaatgcatgcttcttgctaattgtctagctctgttacaccatggaatctcagtcagtaagacaccagagctaacgaaactgcctatctgaacacttaggaaaaaataacgtagcatttccaatcattactacatttcaggcattgttctaagccttttattatatattagtctatcatcacacccattttacagataaggtcatggtggcatacagagattaagtgaattgtctaaaatcacgct

SEQ ID NO: 789888 - DNA, 535 bp, Homo sapiens
tccctgcatgactaaaattgagcacgcagcaaattatctagtgagagaccaggaatgagtctataaactattagtttatagataactttacttctttaagcctcaatttctttacctagaaaatattttctgttgttcaggataaaatgagatgacacatttgaaaagcacattgattccttaaggagtggctcctacttagtcctaagtacttacctgccatcatccatccttccataactaaatctgtaacttaatgactttctaattttggaagaatgaaatctgctaatttagatgtcttacttataaagcttataattacagagagagttgaagttttgkttacatactggatatattagttgttcagtaaatgcttaatgaaatgaaattagttgagtctgtttcatctgttttatgtagagggatctcaacacacttttagaaattctgtaaaactataaatttttttaggtttttcttggcctggcataaaactctattttgattattactcattgcatgcctgtat

SEQ ID NO: 789889 - DNA, 525 bp, Homo sapiens
tcattgcatgcctgtatcaaagtatttcatgtgctccataaatatatacacctactgtgtactcacaaaaattaaaacaaaacaataaaaccctcttttttgaaaccagttttattagttaagatacttgctcatttcagatattttattttattttattttattttattttattttrttttattttattttgtttttgagatagagtcctgctctgtcacccaggctggagtgtagtggcaccatttcggctcactgccacctccgtgtcccgggttcaagtgattctcctgcctcagcctcctgagtagctgggattacaggctcccaccaccacacccagctaatttttgtatttttaggagagacggggtttcaccatgttggccagactggcctcgaactcctgacctcaggtgatccatttgccttggcctcccaaagtgctgggattacaggcttgagccactgcaccgggccccatttcaggtattttaataaatagtgctgaaaactatgttgtca

SEQ ID NO: 789890 - DNA, 592 bp, Homo sapiens
ccacacaaaagagttgagggttgctaataatttatataatggaatctggaacatcatttttctgagccaagagaagactgaatggcttttttcagctaactactgtgtgtagacaggttttatattataaagtgtgcattcttatcacatactatatagttagtttataaaggtttatcccccagtttcttgaatgtggtatcttcacatcttggaccttggtcagttgtactattaattattaaaaactaaaactttggcagttcctgcatttaaaaaaaaaaaagcacccacatgttaaaagtaaaaatgtaatgtcaggaaattattaagaaaatattttagcctcttcctttgcccgcttactttattctttacttttttgtgtgtgtgttccatagacatttattcacttctccaaagagacataaartcaaatttttaatattttaagatttaggatataatggctatatgtgtatgtatacatcataggaacagaaaaaaatgtacagcagtccccccttattcatgggggatgtgtcccaataccctcaatggatgcctgaaactgtggatagtaccaagccct

SEQ ID NO: 789891 - DNA, 656 bp, Homo sapiens
ctgactgtagattttaactaattactccatttaaagccttttatcataatgataacttataataatttagattttgaagaaaagattgaaaacaattttttttttttcagtcagagtcttgctctgtcgcccaggctggagtgcagtggtgtgatctcagctcactgcaacctccgcctcccgggttcaaccarttctcctgcctcagcctcctgagtagctgggattacaggtgcctgccaccacgcccggctaatttttgtatttttagtagagatggggtttcaccatgctggccaggctgatcttgaactcctgactccaagtgatccctctacctcggcctcccaagttcgggaattacaggcgtgagccaccacgccagcccaaaacaaattttgaattgtttatgaacttgaaagtttgtttcagatccttacatttataactatttggaaagtgataatctttagtgtaactttttggtaatttaagttgtgaaactctcatgtgaagaaagaatttctgtcactttggtgatgaatctttgatttacatgggaattatagatatcctaaatgaattttatagtgacagttgggagtttatattttggaatgttaccttgttatcccactgttgacatgatacaaaaa

SEQ ID NO: 789892 - DNA, 656 bp, Homo sapiens
ctgactgtagattttaactaattactccatttaaagccttttatcataatgataacttataataatttagattttgaagaaaagattgaaaacaattttttttttttcagtcagagtcttgctctgtcgcccaggctggagtgcagtggtgtgatctcagctcactgcaacctccgcctcccgggttcaaccaattctcctgcctcagcctcctgagtagctgggattacaggtgcctgccaccacgcccggctaatttttgtatttttagtagagatggggtttcaccatgctggccaggctgatcttgaactcctgactccaagtgatccctctacctcrgcctcccaagttcgggaattacaggcgtgagccaccacgccagcccaaaacaaattttgaattgtttatgaacttgaaagtttgtttcagatccttacatttataactatttggaaagtgataatctttagtgtaactttttggtaatttaagttgtgaaactctcatgtgaagaaagaatttctgtcactttggtgatgaatctttgatttacatgggaattatagatatcctaaatgaattttatagtgacagttgggagtttatattttggaatgttaccttgttatcccactgttgacatgatacaaaaa

SEQ ID NO: 789893 - DNA, 656 bp, Homo sapiens
ctgactgtagattttaactaattactccatttaaagccttttatcataatgataacttataataatttagattttgaagaaaagattgaaaacaattttttttttttcagtcagagtcttgctctgtcgcccaggctggagtgcagtggtgtgatctcagctcactgcaacctccgcctcccgggttcaaccaattctcctgcctcagcctcctgagtagctgggattacaggtgcctgccaccacgcccggctaatttttgtatttttagtagagatggggtttcaccatgctggccaggctgatcttgaactcctgactccaagtgatccctctacctcggcctcccaagtycgggaattacaggcgtgagccaccacgccagcccaaaacaaattttgaattgtttatgaacttgaaagtttgtttcagatccttacatttataactatttggaaagtgataatctttagtgtaactttttggtaatttaagttgtgaaactctcatgtgaagaaagaatttctgtcactttggtgatgaatctttgatttacatgggaattatagatatcctaaatgaattttatagtgacagttgggagtttatattttggaatgttaccttgttatcccactgttgacatgatacaaaaa

SEQ ID NO: 789894 - DNA, 656 bp, Homo sapiens
ctgactgtagattttaactaattactccatttaaagccttttatcataatgataacttataataatttagattttgaagaaaagattgaaaacaattttttttttttcagtcagagtcttgctctgtcgcccaggctggagtgcagtggtgtgatctcagctcactgcaacctccgcctcccgggttcaaccaattctcctgcctcagcctcctgagtagctgggattacaggtgcctgccaccacgcccggctaatttttgtatttttagtagagatggggtttcaccatgctggccaggctgatcttgaactcctgactccaagtgatccctctacctcggcctcccaagttcgggaattacaggcrtgagccaccacgccagcccaaaacaaattttgaattgtttatgaacttgaaagtttgtttcagatccttacatttataactatttggaaagtgataatctttagtgtaactttttggtaatttaagttgtgaaactctcatgtgaagaaagaatttctgtcactttggtgatgaatctttgatttacatgggaattatagatatcctaaatgaattttatagtgacagttgggagtttatattttggaatgttaccttgttatcccactgttgacatgatacaaaaa

SEQ ID NO: 789895 - DNA, 569 bp, Homo sapiens
cggataaatgcaattcatgttatttatgtaacagatacagtacaaggacactatttgtttacttttaaacacatatgatttttttgtaataaaaactttaacaattccagaaataactctattggttatgatgtggtaatgcaaataatttgtaagataactgaccttattgcatatttaaatgtaaattataagttgtataagagcaaaaagtgattttggaagtgtattagtgtattttgcattgttataaaggaattactgggtaatttataaagaaaagagayttaaggccaggtacagtggctcatgcctgtaatcccagcactttgggaggctgaggcaggtggattacctgaggtcaggagttcaggaccagcctggccaagatggtgaaaccccatctctaccaaaaatacaaaaattagctaggcatagtggtgggcgcctgtaatgccagcatctcgggaggctgagacaggagaattgcttgaacccaggaggtggaggttgcagtgagctgagatcgcaccattggactccagcctgggtgacaagagtgaaactct

SEQ ID NO: 789896 - DNA, 512 bp, Homo sapiens
ggatgcttcaacaaatgaaacatatttgccggtatggggaatttttgagacatttattgaagaatagtaaaatagatgaattttaagctgcataccataagatcattgtttgtggtagaagtattattatcatttttagagacatggtctttatttattgccctggctggtcttgaagttctgggcttaagtgatcctcctgcctcagcctcctgagtagctgggattacaggcaccagccaccatgcccagcttgtggtagaattttattccttgttgctatgattaaagtaacgyttcccccagcattttattttaaaaacttaaatctatagaatagttgaaagtgtgataaaatgaacatctgtacaccctttacctatacagttgtccattggtgtacgtggagaattggccaatccttgcatactcgactctcacagttggccctgtaaaaccaaagaatatgaaaagtcagccctctatatatatatggatttcttatctcatga

SEQ ID NO: 789897 - DNA, 537 bp, Homo sapiens
agaaccctaactcacctcaagaagaacttcatccaagagctatgtaaatgagaacatactcactagtaactgtacatttcaacttatgtttgacttatgtgatccattgaaaacatagaaatattatacaaagctttataaaccacagactaccttatactttgaaagaaagaactttcataagtgttgagttttgaaaaattatcaaattataccttcaccttttttcttaaaaggtttgaaayagctagaaataaaggtatctattatattgttaataaaatagaaaacaatttctccctattgtggatcattatttactatgatcagttaacttttatattattttatatctctctgtatggaagagctttcaagatggcctatgattaaagcatgaaaacaacttttaaaaatcttgttaattatagtagtgcagatttaaaaaaatattttgctaaaggagacatagtcttcgagtctgttttttatatcaaaatgaatacaggccttcagtgacctaacaagctccaaata

SEQ ID NO: 789898 - DNA, 628 bp, Homo sapiens
tataacctaatctccaaagtgacatgccatcacttctgtcatattccattgataacacagaccaatcatggaacaacttaagaggtgacttttaaaaggtgtagataccaggagggcagggatcactgggggctatcttggaggtaatagtgtctatctcattayggttattaggtacatgtatttgacaatgcatgtaaagtactaagctcagtgcttggcacatggtgttgttctctttaataatgcttggagtatgaaaagtactatcttatatgtacttaatagaatcagaaactatcaacagttgactaaaaggactttgcctatagaaaactaatttgttcctcttgtttcaagattttctcctggtgaccacagactataactgtggtccatagatgagaatcaactatatatgctagtgattggtattgcttttcgtcttgatttttaataactttgcttacagagggtcatctcttcttactttgcccctccccacccctgctaattttcaggaagtgtcctattttctgtagtcctctatcactgtctccattcctgaggctctcaggttgggttgagtaactgaaagttgcaaaattggctttgaggagttgtcttg

SEQ ID NO: 789899 - DNA, 644 bp, Homo sapiens
ggccttatagtacattttgaagtcaggcaatgtgatgcctccagatttgttctttttgcttagtcttgctttgactatgccagctcttttttggttccacatgaattttaggattgtttcttctagttctgtaaagaatgatggtatttttatgggaattrcattgaatatgtagattgctttggcaggatggtcaatttcacaatattgattctacccatctaagagcatgggatgtgtttccatttgtgttgtctatgatttctttcagcagtgttttgtagttttccttatagaggtctttcacctccttggttaggtttattcctaagtattttattttattttatttgcagctattgtaaaatgggttgagttcttgatttgattctcagcttggtcgctgtttgtgtatagcagagctactgatgtgtgtacattaattttatatcctgaaattttgctgaattcatttattctaggagcttctggagagtttttagggtttctagtatacgatcattttatcagcaaacagcgacagtctgacttcctctttaacaatttggattcccccatcagtgttttctttcaattaaccatttccttgatgtagtcattttctccaggattggccctatatg

SEQ ID NO: 789900 - DNA, 644 bp, Homo sapiens
ggccttatagtacattttgaagtcaggcaatgtgatgcctccagatttgttctttttgcttagtcttgctttgactatgccagctcttttttggttccacatgaattttaggattgtttcttctagttctgtaaagaatgatggtatttttatgggaattgcattgaatatgtagattgctttggcaggatggtcartttcacaatattgattctacccatctaagagcatgggatgtgtttccatttgtgttgtctatgatttctttcagcagtgttttgtagttttccttatagaggtctttcacctccttggttaggtttattcctaagtattttattttattttatttgcagctattgtaaaatgggttgagttcttgatttgattctcagcttggtcgctgtttgtgtatagcagagctactgatgtgtgtacattaattttatatcctgaaattttgctgaattcatttattctaggagcttctggagagtttttagggtttctagtatacgatcattttatcagcaaacagcgacagtctgacttcctctttaacaatttggattcccccatcagtgttttctttcaattaaccatttccttgatgtagtcattttctccaggattggccctatatg

SEQ ID NO: 789901 - DNA, 644 bp, Homo sapiens
ggccttatagtacattttgaagtcaggcaatgtgatgcctccagatttgttctttttgcttagtcttgctttgactatgccagctcttttttggttccacatgaattttaggattgtttcttctagttctgtaaagaatgatggtatttttatgggaattgcattgaatatgtagattgctttggcaggatggtcaatttcacartattgattctacccatctaagagcatgggatgtgtttccatttgtgttgtctatgatttctttcagcagtgttttgtagttttccttatagaggtctttcacctccttggttaggtttattcctaagtattttattttattttatttgcagctattgtaaaatgggttgagttcttgatttgattctcagcttggtcgctgtttgtgtatagcagagctactgatgtgtgtacattaattttatatcctgaaattttgctgaattcatttattctaggagcttctggagagtttttagggtttctagtatacgatcattttatcagcaaacagcgacagtctgacttcctctttaacaatttggattcccccatcagtgttttctttcaattaaccatttccttgatgtagtcattttctccaggattggccctatatg

SEQ ID NO: 789902 - DNA, 573 bp, Homo sapiens
agccaccgcgctcagactttaaagtccattttaagtctagacttctatgaaggtagactgccgagatgtaaaagaaataaaattagttatttagcttttagatcggattacattttctgctttgattattctaaagcctccagtaaggcgtaaagggaaagctctaagtagcgcatcctgggaaatgagcagatcagggaaggggtgttagacctggtattatgtctaaagacgattttcatttaaaggaggatcttcccmcgggcagctcaaggtcacatcgtaaataccttatagtctaattcagtgtcccaaaacaggaccccgactccccagatccgggttgggggtggctcagggcctaaagttcctaccctcgcccaggtgacaccatctccaggaaggtctgcacccgacccggcgaagcgctgtcccgcttcgcaccccccactgctccaggtacgtgcggcggcctcctcgggagaccccgccactttcctggagcgtagcctgccaccccccgtccgggaaccccggattctcacggcagagaacagacaccatacttaagca

SEQ ID NO: 789903 - DNA, 576 bp, Homo sapiens
tatccaaatgtgaagggaattgaaaaaattctctcggctgttaaaagctctagcctgatatttatatcctatggacaaatatgtagttcacacaaaataagtaactcaacctgaaggcttgaaaacaggcagtgagggacagagataggtttcagtttgtccctggctctccccsactgcccagcttttctttctgaccgtcagacctgtgtatcttcagcaactacaggcctatatcaaccttccagagaattcttcacatactctcacaattgtgtaaggattaatccttatgataaatctcttaatctccagcttcacagtggttctgtgtttctcctccaaccatggtacacacagcttgtaattttacttaacaatactataatgtcttaccacaaatgagactgcagagttgttcaactctacatgtcaacttgggaaaacaaagaaaacctccttatcacagtttccatgctgggcaagtatggtggcagttgacaggacaccacttaaaagcccacaactgtgcaatcacgtaactgggcagaaaaaaagcagcacaatggtaatctc

SEQ ID NO: 789904 - DNA, 603 bp, Homo sapiens
aacctccttatcacagtttccatgctgggcaagtatggtggcagttgacaggacaccacttaaaagcccacaactgtgcaatcacgtaactgggcagaaaaaaagcagcacaatggtaatctcataagaagctagaatgtgctactattctttataaacaaaaatgacagggctgagatatcatttgtaaactacacattttgatttgtgattctcgtgaagacaggtttacacaaatccacccacatctaaagtctgtctctcaacttgcacagatataagmaaggcatggggctgggcacagtggctcatgcctgtaattccaacactttggaggccgaggtgggaggactgcttgagcccaggagttcaataccagcctgggcaacatagcaagacaccatctcaaaaaaaaaaaaaaaaaaaggcatagtctcctttaatatatgctaacgctttgcacttcacttatgaaaaccgtatttagattctcaagagcacttttattattcccctaacctccccatatttatatttatacccatatttatatttacctgaaattcatccatgatactgaatgtatactcatgtctggctatt

SEQ ID NO: 789905 - DNA, 603 bp, Homo sapiens
aacctccttatcacagtttccatgctgggcaagtatggtggcagttgacaggacaccacttaaaagcccacaactgtgcaatcacgtaactgggcagaaaaaaagcagcacaatggtaatctcataagaagctagaatgtgctactattctttataaacaaaaatgacagggctgagatatcatttgtaaactacacattttgatttgtgattctcgtgaagacaggtttacacaaatccacccacatctaaagtctgtctctcaacttgcacagatataagaaaggcatggggctgggcacagtggctcatgcctgtaattccaacactttggaggccgaggtgggaggactgcttgagcccaggagttcaataccagcctgggcaacatagcaagayaccatctcaaaaaaaaaaaaaaaaaaaggcatagtctcctttaatatatgctaacgctttgcacttcacttatgaaaaccgtatttagattctcaagagcacttttattattcccctaacctccccatatttatatttatacccatatttatatttacctgaaattcatccatgatactgaatgtatactcatgtctggctatt

SEQ ID NO: 789906 - DNA, 603 bp, Homo sapiens
aacctccttatcacagtttccatgctgggcaagtatggtggcagttgacaggacaccacttaaaagcccacaactgtgcaatcacgtaactgggcagaaaaaaagcagcacaatggtaatctcataagaagctagaatgtgctactattctttataaacaaaaatgacagggctgagatatcatttgtaaactacacattttgatttgtgattctcgtgaagacaggtttacacaaatccacccacatctaaagtctgtctctcaacttgcacagatataagaaaggcatggggctgggcacagtggctcatgcctgtaattccaacactttggaggccgaggtgggaggactgcttgagcccaggagttcaataccagcctgggcaacatagcaagacaccatctcaaaaaaaaaaaaaaaaaaaggcatagtctcytttaatatatgctaacgctttgcacttcacttatgaaaaccgtatttagattctcaagagcacttttattattcccctaacctccccatatttatatttatacccatatttatatttacctgaaattcatccatgatactgaatgtatactcatgtctggctatt

SEQ ID NO: 789907 - DNA, 617 bp, Homo sapiens
aagaaccaggagacaagcaaaaagggaatgtgaacagttaaatacttctcacaatattgggcactgaagtatacatatacttaacttacagaaatccttagtgctaacctcagaattgatttttttatacatagtttatttggtttcccagtattgaggacgagaagaaggataggaaggcagcttattatttagcagcaaaagtaaggaacaacagactgacagttagattggagaagaaaaaaaaagctagacattctgagcagaaacaagactgaaaaaaacactgcattcctgaagtcatttagtatagggacaagcagccctaaacactttaatagctgttggaggatatcatggtattatactgtagcagaaaagtgaaaactcacatggatgaccctaaggtcacaataataacaataataaaaagtatatcttgttaaggcagcataaagcttttaaaaatatgtccstgaaaaataatttgataaacaaaaaaaattcagttcctgaatcgtaagctttagttatctgcaaaagtcatttacatagactatttgatatcccagataaatgaggtgttaatgacattttcctcttaaagacctaactag

SEQ ID NO: 789908 - DNA, 635 bp, Homo sapiens
cctgggagcttcctctcagtgagaaccaatgctgttacaggagttcccagcgagtcttatcctgtgaggtgccatggaagcaggtcctgcagaccgttgttgctcagcccctttcccaggagtatgtatggaggtctaaccttccactttgctggagttgcagccrcttttgctgggaagcccgggtttctaagtttcctggggctccatgtgtgcccgagcagctgctctgacgagactccacagagctctgaacgtcagtcggaaggccctggtggagtgggttcactgggggatcttctgaccccaggcttgcaaagatgcatgggagaagcataggttcccgaggtcactcactcattcactgcttccctgagctggggagggtcccctgcctctgtgtcactcccttatcacatctagtgatttcctacactagatgtacatacactgtatgtacatacacaatttacatacagtgaaatacacaaatcttaatatgcagttcaattaattttgacaaatccacacctctgtgtaaacgatgcccaattaagacattaaattttgccatctcctctgtaattttgttcatgccttttcccatggattacgctcatgtaagttaaggtctg

SEQ ID NO: 789909 - DNA, 559 bp, Homo sapiens
ccaagcaggagtcctcaatgctggaagcaccccaatagtcgtaggaggtctcttctacctgatttggggagcaaaggtgtctgccggtagccctttcatttgctcctctgcagcaccctgtaactcccggcgtgcttcgatccctggtacagaccaaagcctgctgcacctgaaagaaccctggccccgtctcacccctgaatgcactggatatgatcttgtggtgaaagaatccaccttgttttccaaagccaaaaatgaaacaaaccaattttactagcaattcatactcaatattttccatctctgagtctgtaaactagaacagagggatttaagacctacaagaaaagaaaagaaagttgctcagagagaaatgtaagaaaaggtgagtgatgccatccaaacagccatgaagagatgacagtcattacccarggactccaatgatggagttcgggaggcagcctggggtggagaagaaagtgaatggctcaggtttcaggccaaggtgggtgtgcatcttggctctgtcacttactagcagcataaggagatc

SEQ ID NO: 789910 - DNA, 646 bp, Homo sapiens
tattttccatctctgagtctgtaaactagaacagagggatttaagacctacaagaaaagaaaagaaagttgctcagagagaaatgtaagaaaaggtgagtgatgccatccaaacagccatgaagagatgacagtcattacccagggactccaatgatggagttcgggaggcagcctggggtggagaagaaagtgaatggctcaggtttcaggccaaggtgggtgtgcatcttggctckgtcacttactagcagcataaggagatcaaagtgacccagcctctcccagcctcagttttctcatttgtgcaacagtggtagcagtgcctaccccaacattcttgtcagaatcccatgccagcatgtagcacatggagtgtgctagaacacacatggcacttctagcagggtgctggcacggctagaagcagccctacaggagtggctttcattaccctcaagtggtttaggccacaataacccagtgtgctcaaacttcctcatcttttgcagacagccttcccataccacgaccctaaacgtggtacaagaacatgtgctgatattttaaacaacatttgccataaaaccaaacctccatgcatttccacacgagtggctagataatatgataaatcatctacagaa

SEQ ID NO: 789911 - DNA, 646 bp, Homo sapiens
tattttccatctctgagtctgtaaactagaacagagggatttaagacctacaagaaaagaaaagaaagttgctcagagagaaatgtaagaaaaggtgagtgatgccatccaaacagccatgaagagatgacagtcattacccagggactccaatgatggagttcgggaggcagcctggggtggagaagaaagtgaatggctcaggtttcaggccaaggtgggtgtgcatcttggctctgtcacttactagcagcataaggagatcaaagtgacccagcctctcccagcctcagttttctcatttgtgcaacagtggtagcagtgcctaccccaacattcttgtcagaatcccatgccagcatgtagcacatggagtgtgctagaacacacatggcacttctagcagggtgctggcacggctagaagcagccctacaggagtggctttcattaccctcaagtkgtttaggccacaataacccagtgtgctcaaacttcctcatcttttgcagacagccttcccataccacgaccctaaacgtggtacaagaacatgtgctgatattttaaacaacatttgccataaaaccaaacctccatgcatttccacacgagtggctagataatatgataaatcatctacagaa

SEQ ID NO: 789912 - DNA, 598 bp, Homo sapiens
agctttttatttcgaagttgtctcacacatttatttttgctttttttgcctccgctttcaatgtcatatccaaaaaatcattgccaagaccaatatcaaagaggtttttccctatgttttttcctagtactttcacagtttcargtctatgtctttcttttgagttggtttttgtgtatagtgtaagataagggtccaatctcatttctttgcatgtagatattcagttttctccacactgtgaactggagagactatcctttccctcttgtatattcttggcacccttgttgaacattagttgactgaatacacatgagtttatttctgggctctctatttcgttccattggtctatatgtctatttttatgccagtaccatactatttaaattattatagctttgaagtgtaatttgaagtcagaaagtgtgatacctccaacttgttcttctttctcgagattgctttggctatttggggtctttcgttgttccatatgaattttagaattgttttttctatttctgtgaaaaatgccactggaattttcacagggattgtgttgaatctatagattgctttgtgttatatgtac

SEQ ID NO: 789913 - DNA, 598 bp, Homo sapiens
agctttttatttcgaagttgtctcacacatttatttttgctttttttgcctccgctttcaatgtcatatccaaaaaatcattgccaagaccaatatcaaagaggtttttccctatgttttttcctagtactttcacagtttcaggtctatgtctttcttttgagttggtttttgtgtatagtgtaagataarggtccaatctcatttctttgcatgtagatattcagttttctccacactgtgaactggagagactatcctttccctcttgtatattcttggcacccttgttgaacattagttgactgaatacacatgagtttatttctgggctctctatttcgttccattggtctatatgtctatttttatgccagtaccatactatttaaattattatagctttgaagtgtaatttgaagtcagaaagtgtgatacctccaacttgttcttctttctcgagattgctttggctatttggggtctttcgttgttccatatgaattttagaattgttttttctatttctgtgaaaaatgccactggaattttcacagggattgtgttgaatctatagattgctttgtgttatatgtac

SEQ ID NO: 789914 - DNA, 544 bp, Homo sapiens
tcaccactgaccattttagaaattgaagttgagaaaaatttaaaccacaagaatatctacaagcacatatgtcatgaccatcggaaggaagatggcagcacatgccgcgtggcctctgggaaatgccactgtacgttcgtgacagaataagagcgggagaggcacgcgaggatagttttgaccgcctagatgccctgacagggtttcaaggacttgaagggctaccagatcacactktgagaactgccagtttacattatttgatgtcattattgaacatttaccaataccttgcagaaactcaagcaattggtgatgagttgtctgcaaacatagttttgagtgtgggctgtaggatcagccaaactcgatttgatcccccattctactgcttgctagctgtaaggttttgggcaagcctctcaggcactcactgcttggttttctaagtcaaattggggcttgtggggttattgaaggatatgcacacaactagcgttgcacctggcctgtgataggtattcagcaaatgatagctataata

SEQ ID NO: 789915 - DNA, 644 bp, Homo sapiens
gtgaaaatgaccatactgccaaaagcgatctacaaattcaatgcaattcgcatcaaaataccatcatcattcttcacagaactaggaaaaataatcctaaaattcacatgaaaccaaaaaagagcccacatagccaaagcaagactaagcaaaaagaacaaatctggaggtatctcattacctgacttcaaactatactataagactatagtcaccaaagcagcatggtactggcataaaaataggcacatagatcaatggaacagaatagagaacccagaaataaaaccaaatacttgcagccaactgatctttgacaaagcaaaccaaaacataaagtggggaaaggacaccctaatcaacaaatggacctgggataattggcaagtcacatgtagargaatgaaactggatcctcatctcttaccttatacaaaaatcaactcaagatggataaaagacttaaatctaatacctgaaaccataaaaattctagaagataaagttggaaacatccttctagacattggcttaggcaaagacttcatgacgaagaacccaaaagcaaatgtaataaaaacaaagataagtagataggacttatactacaaagcttctgcacagcaaaacaaataattagcaaa

SEQ ID NO: 789916 - DNA, 620 bp, Homo sapiens
agaaggttactgggaacttgtgcaaaggtcacacgtgttacgtctcagcaaagagcttgacttgcattctattcatgccctagggatctgtggaactctgcactaaagagtgacaacctagtatatatggtagaagaaatttttaagcagcaaagtattcaagaggtaacctggctgcttctaacagcctatcttagctgaagggtsaaataaatgatttaaagctggaatttatatttaaacaggaagcagagcacaaacattcagaaaatttgcagcctaaccatgtggcaaagaaaaaaaaagttttttctggagagaaattcaagcaggctgtggggcaaccgcatgctacagatatctgcataactaaaagggagccaagtgctaatatccaagactacggggaaaaggcttcaaaggtatttcagagacctttgcagcagcccctcccaccacaggcccagaggcccaggaggactgaatgggtttataggtcagacccagggccccactgccctgtgcagccttgggatcccagcattcaggccactccagctccagccatggctcaaagaggctgaggtacagcttgggctgccatttacagaatgcaagcc

SEQ ID NO: 789917 - DNA, 606 bp, Homo sapiens
atatctgattaccttctttggaaaaaataaccagaaacccaaaagaatggaaccatttgtctcttatctacctatgacctggacgccccctccccactttgagttgtcccgtctttctggactgaaccaacgttcaccttacatacgttgattgatgtctcatgtctccctaaaatgtataaaagcatactgtgctctgagcattttggccacatgtcatcaggacctcctgaggctgtgtcacaagtgtgtgtcctcaatgttggcaaaataaactttctaatttaactgagacctgtctcaaattttctgggttcaarttttggtaaccatgaagggattctgagcggaggtgcccctgacctttgacaaatctattggtgcttggaaccagcatgagctaattttatggctcaagccaataggacaatttgctgaggtctgggagaaccccctccagagaatccctgatctcccaaaatttggtcaagatctaaagtttattttgctgtacaactccctttttcttttgagttttacttgcttccaacaaggaaggcaagtttttcctgcttccatgacaacggaaggcaggtaactccttta

SEQ ID NO: 789918 - DNA, 680 bp, Homo sapiens
gctcacttccaacaagaaggatgagggttttttcctgcttttagggtgatagagagcagtcttcagcctgagacccatccctaggtaagtaactgaattggggtttgtcttggctaaagttaagattaacaaccagcttgtcttaatttctcctcaccactagagcgctcaatagttgtataagttgtgcgatcatttgttttgcttaactgcgttttttgttgttgtcgtttgtttctgttcttgttgttgtttcagtctttttcccactgggtttgatcaactctatccggcttgatcaaatccaaaggaaagttccaaattatggggaacaaggcctctgaagtggctaaattccaccccgccaccccccccccacacacacacaaaaggtggtatggtgggggagaaaaacggccggaaaaggaaaccaaaaaaaaagaggaaagatttttcattttgactactaagggactttatttacataacaaggccacctttttgctagcsaggcccaaccaagagagcaatggctgtacttctgaaatagcagcaatttgtcctagctgaaatatggtgatgagatcttaaaagattttttttaaaggagctcaatgatgaaaagtcagcttaattaaaagctaacattcaagaagtgtgtgtgtatgtgtgcgtgtgtg

SEQ ID NO: 789919 - DNA, 497 bp, Homo sapiens
gggcattggtggctcacacctgtaattccagcactttgagaggctgaagtggaccgatcacttgaggtcagaagttcaagaccagcctggccagcatggtgaaaccccgtctctactaaaaatacaaaaattagcctggtgtggttgcgcatgcctgtagtcccagctactcaggagrctgaggcaggagaattgcttgaacccaggaggtggaggttgcagtgagccaagatcatgccactgcactccagcctgggtgacagagcgcgactccgtctcaataataataataatagtaataataataatataataaaggaatgaaagtttccttagaaagtaaggtttctattttaatagaatacttgagtgagcaagtctgtcttaactgtttctcctcactgtgtctaaatgagaaggaagaatgaccctggtgtctgtatttgcaggacacttttcagtattaatattcagaaccccaaatattgaaaagtgta

SEQ ID NO: 789920 - DNA, 581 bp, Homo sapiens
gtaaacatcagaaggcttgggtcagcttactgcccatagccctcttaaggacccataatacccctacagcaaaaattaatataaacccatatgaaatattatgtggaaggccattcttaactaatgatttaattactgatccagaaacagttggtttagtaaaatacctagtcaatctaggacagtttcaacaggctttacaaamgtttggaatgcaaagtctccccacactgggaacaatcagcaacttaaaatcaggtcaggaaataaggtacttcttaaaacatggaaagagggatcacctgctcaacaattacaacccaaacggaagggactgttttcagtggcactggccatgccttctgcagtgaaagtactaggattagatagctggatacatctttcaaggatcaagagagtgataccagaagccctggaccaggaacccgaagttgccatctgcctctacacctgtgaacctgtggaagacttcatgaagtacctgtttagaagacagtcaaaagaaaagtaaatgcctaccaattttccttggtgtctttgttgcatagttactataggct

SEQ ID NO: 789921 - DNA, 594 bp, Homo sapiens
agacaaaaaaaaaaaagggaatttaactttcacttcacaaatcaactgcattctttgataacgtctttaaaataaaagccaattatgaaaatacatttcaaaaaagtatttctaacctgtgcttgaggctgttaccctraacaactataaattacataatttgaaaaagtaatttatgcatagttttggcaaaatatttccctcaactcttagattctttgctgattctgaaggtactgctatgaacataatattaaacaatctcaataaggtaaccaaataataaagagcctacatctcattttaaaagctaagcaaataaacttcaacgctgtcaaatagttaacttcctaaaatgattgaaatatagaaaaataaatataaaggaactataaaatctctataatcatatgtactaattctcctttacataattatacataaataaatatccctgcctatcagtgaggattcaaaggtgaaaaaagacatcgtataacatatatttcaaaatttaaaaaggctggcagcggtatgctgcactttggggaagcaccaataaatcaaatctgtgaacagtaggcaccaggtgtg

SEQ ID NO: 789922 - DNA, 548 bp, Homo sapiens
tcaacttgttattttttcatgggtctatctaaatatacacttatatttgataaaatggcctaggaatgaagagtcaccaccatcattattttgaagatatttggtccttttagggttaaaaagagaacacagtaatacctgttttaaaaatggaatgaatctactatattcatgaacctgagcctgtgtgtctttgattctccacctttttttgtagggggcgggtggaagttttccttgactctgtgtgcatgtgtttataggactcatttaccccatcatttacttgaaaagcaatgaatatcatatagtgttaataaagtaaaataaacttcatggaggttaagcttggatttgtatttagggttttactactttttttgataattackcatcagaattctagaaataattgtcacagagatagcagaattgtctagaggtactaatttactacacaggcgttttattttttaagagcttgcatataaagtggtttacagtacaatccagaaaattaaatcttattgtcttgaaacatcctgtta

SEQ ID NO: 789923 - DNA, 639 bp, Homo sapiens
aaatttaaccttgtatggaaggcaaggcaggaatttttaaaaataaactttattttttggagttgtggatttgcaggaaaattgagaagatggcaaagaaagttcctgtatacctgatgcccagtttcccgtgttgctaatatcgtaggttggtatgggatctttgtttcgattagtgaaccaatattgatacattaaataaaagttcatatagtaagtcctcatttaagtcacagatagttcttagaaacccagagtttaagtgaaacaacgtctaaacatgccaaatttactatagactgattgataggaacaagagttaagttcctatggcaaatttctggttacagaaatatcacccagcttctaaataargaacaaaacacttctaatattaaccactgaaataaataggagctatacatacatttcagaaagattaataaaaatcaataagataattactcagttattccagttcagggcggtggccagagcccatcctggcagcttggagcgcagggcaggaacagccctggacaggatgccctcccattgcaggtgacacacacgcacactcaatctgggaccatgcagacatgccagcttccctaatgggcacagctttggagtgtggga

SEQ ID NO: 789924 - DNA, 658 bp, Homo sapiens
ctcaatctgggaccatgcagacatgccagcttccctaatgggcacagctttggagtgtgggagctcgctggactacctggagaaacccatgcaaatacgtgggagaacatgcaaactccacacagacagtggcttgggctggggatctatttttttttttttttcattytcgtcaatgctgtaatcaaatgatgctgaacaaaatgatgttatctgagaacctactgtactttattcagatctcctcagttttcatctgcagtcccttttgagttccaggatcctgtctagcataccacattaggttttgtgatcacatctgactcctcttggctgtgacaattgttcagactttccttgtgttcgatgaccttggcagtttgaggtgtgctcgtcgggtattttgtagagtgtctctcagtcgagattcgtctgatgccctctcatgttaagtctagggtgatgagttttgggaggaggaccacataggtaaagtgccgttctcattacatcacatcaagggtacatactgtcaaaatgacttatcatctccatactgacattgattacctggctgaaataggggttgtcagctttctccactgtaaagttgttcttttccgtaataaaggattatggtctttattactgttctctt

SEQ ID NO: 789925 - DNA, 598 bp, Homo sapiens
atacttgaagctgaagaagacacaaatatcagtggcctaactaatttgtacctatggaattactattttggtgaaaaatattttcactccacgtgttcattgtgtgtgcatgcctgccctctctcggcagtggtccagctgattgctgctgttactgttaagggctcttagtgtatcaaaaataagttcttgagcatgacaraatgatgcgtatactcattttttaaattggaaacaaatgttctgtattaactatatagtgagtacaatcaaatacataaaccattagatgggcaactaagctggtaagccatggagaatttactattttgttggatatttgttagagcatgaagttggaattgagaatgtattttctcctgaaatatagttgatgattatgtatctgtctgtgaggtgtggttaattccacaaagcttatttcttctacagtatcccccaaattagaatatggtactgccattatgtgataaccctgtatatgacagtgtatctattggaaaatgttttgagttttcgtatgaatttttaggggcattgctgtagctctgacagtataaatatggatttgaaagtt

SEQ ID NO: 789926 - DNA, 601 bp, Homo sapiens
catgaaaattgtgatgacatatgtgttcatttttggacatatgtaaatacccataaagttatctctacaattatggtaatagacatatacaaaacctcccagagttttcctgtggccctttttgttgatgtagttgattgttgaattttgcttttttttgttttgctctaagaatacttaacataaaatctatcctcttaacaaatttagaagcatataatatagtattgttaactaaagggactgtacagcaggtctttggaacttattcacttagcataactkaaacattatcttttttgaagaattctttatttctcccatttttcaggccctagcagcccccattttctctgttattaagagtttgactattaaagatacctcaaataagtggaatcatgcacaatttgtccttctctggctgacttatttcactttccataatgtcctccagtttcatccacgttgttgcaaatggcagggattttttttttttttttaaggctcaataatatataattgtttatttatactatgttttctagatccaggcacctgtttatatacaacttagattgtttccatatcttagctattg

SEQ ID NO: 789927 - DNA, 588 bp, Homo sapiens
ggttctaaggggtgctttgcctcttcagacagtgttttatgtgcattttagcaagccttgtaattttttattgaaagccagacatgaagtgtctggaaatataaactatggtaaatttgtttttaccataaggtatctattttatctgactaggaattgggctgaatttaatgtttgtagctgtgggtgcctgatgccctcaaatttttctratgtctggtttttgtctcccctgtatcttatgttttccctaaaatctcctcttcaggtaggatgtgtatctcgcaactctttcagcttcaacacactgctatactggagctccatttgtgcggtactaaggtgtgggggagggaagacagtctgtaatcttatgtctcttatcattctcttaatggtcctgtcttcccgaggctgtgacattcacagtgcttctcagccttcccttattccttaggtgaaacaggaaaatattatggagaagactctaggaatacttcctttacaatggttatcctttgctaaccctgttagaaccatgatgggatcctccttggctcttcacctgtagaacatcatgattttcaa

SEQ ID NO: 789928 - DNA, 455 bp, Homo sapiens
ttgagatgatcattttttttgcttttaattctgtttatgtgtgataaatcacatttatttatttgcatatgttgtaccaagcttgcgtcccaggaataaagcctgtttgatactggtgaattcactttttgatgtgctgctaaatttagtttctagtattttgattaggatttttgcatctgtgttcatcaaaaatattggccgaaattttctttttttcactgtgtttctgccaggttttggtrgtaggctgatgaattagaatgaattactgaggagtattttctccttgattttctgaaatagtttcagtaagatttgtaccagtccttcatggtatatctggtagaattctgctgtgactccactgggtccaggaatttatttggttggtaggctttttattactgattcaatatcagaacttagtattagtctatgcagaattgcaatct

SEQ ID NO: 789929 - DNA, 466 bp, Homo sapiens
tacaagtagccatgtctgagtaggccctgaacgcacaaattgcataaagtggctcaaatgcccatggtccccactcctgctatgctgtcttttcttttgcaaaacagaaaggcctgcatcactggccttgtggagaattctttacattcaattgacaaacaaagagaagactacagcctgatttacaaataactgtgcataatattcaggctgccctcaaagtggacagcaagagcaggacaacccctttytgagaaatccctgaaggacaatggtgaatatgtgattatatattaaatcacaggctgtagtcagtgttttagctggatgggcaagtagttgaaaggaacaccactggaaaattggtgacaaagaaaaacaaggaagaggtaggtggatagacccctgtaaatgggcaaaaaacatgaagatgtttgtgtgtcatgtgaatgttcaccaaagtgtg

SEQ ID NO: 789930 - DNA, 628 bp, Homo sapiens
tttattcaagactattgcagcaggactcacaactattgcagaggagtgaaggatgttactcaactctaaaggcatcaaggacagttgaaaatgtgtagctaaagagtagagctagagggtcagtggatagaaaaattgttaacaggaacttgattagataccaagactcttgctaaactggcttaacaagattcttgatgaaggcaggatgctacattactggtgggattttaagtggattctatttctgaaggttgtcaatactgtgtactctacaactcagcagttctatcccccagtatataacaaagaaaaattttgtcatatgtactctatgatacatttccaagaattttcacagcaatgcttttcacagtaacacatttcagaaaataaacataattttcttctttctcccatcctctttctcccccyctccgtctcaccttctctcattcattttttctttttattttatttgataatgcttttgaaacctcagagccattattgttgtactaatattggcttcaacagggagactttaacacacacacacacacacacacacacacacacacacacacacacacaatgtatattgacaaggactctctccttgaccaaa

SEQ ID NO: 789931 - DNA, 594 bp, Homo sapiens
caactcactatatgaaactttcctcaaatggatgatgttgtcacatcttgtaatgagttcttcattcctggaaaagtccaagcagaatcaggatgacatcctcagaagtatatgtgacagagaaagaaatggatggaatacagactgataaataaaattcatcctgactcctaaggataatatattgagagtggttgcctggagaactgttaagaagcattgggaagcgaagctcaagatattcatggtaaaagtactgccaccaataaccaagttttattgggcaagaaaaatgtactgagtgataacacatttaaaagacctttagacacaattcaaactctatcattgtaataggtagcctgttttatatgccctaaaaacattcagaatgctaattaaccataaaattcaactttcttgttgaatttttaaattsatttgaatattgtattgtaaagctttggttattacattgagagaaaagaatgagaattatacttaaaacacgtaatgatgtattgtcctttgaaacaaatacagataactttagttttaaattcataccatttttaagtatgtaagtgtattgtg

SEQ ID NO: 789932 - DNA, 625 bp, Homo sapiens
gagcactgtaacccttggtggtgaggtttgcaggcagtaaatttcaaaccactgggatcagcacctcccctctggctagggctggattaaattctccctgcatgggcaggagccagctgagtttggtctggttttcccttctgctctaacaagatagcactgagttaaatgtctcacaattgctgtgatctcactcctccrtaccgagaggtgctctttgtaccaggctgccactgccaggtgtgggggatggttggcattggagattcaggtcatttttttctatctctttagtgtctttttcagtgatatgaagttaaaaccaggtactatgagtgctcacttaatttttggttcttataaagctgtttttttttttaatgtgtaaatagctgttaacttggtgtccttgtggggggaacaattggtggagccttccatcctgccttcttactctaaataaattattcttttgaaatgggttatatataccttggtccttataatggattatgaataccaatatttctatgaagatccttttttacaaaatatagcttcattggaatataatttaaagagactttgttataaaaataaaacaattctaaaaaattaatgagaa

SEQ ID NO: 789933 - DNA, 625 bp, Homo sapiens
gagcactgtaacccttggtggtgaggtttgcaggcagtaaatttcaaaccactgggatcagcacctcccctctggctagggctggattaaattctccctgcatgggcaggagccagctgagtttggtctggttttcccttctgctctaacaagatagcactgagttaaatgtctcacaattgctgtgatctcactcctccgtaccgagaggtgctctttgtaccaggctgccactgccaggtgtgggggatggttggcattggagattcaggtcatttttttctatctctttagtgtctttttcagtgatatgaagttaaaaccaggtactatgagtgctcacttaatttttggttcttataaagctgtttttttttttaatgtgtaaatagctgttaacttggtgtccttgtggggggarcaattggtggagccttccatcctgccttcttactctaaataaattattcttttgaaatgggttatatataccttggtccttataatggattatgaataccaatatttctatgaagatccttttttacaaaatatagcttcattggaatataatttaaagagactttgttataaaaataaaacaattctaaaaaattaatgagaa

SEQ ID NO: 789934 - DNA, 533 bp, Homo sapiens
tgcaggggcttgggaatgggaaatgttaatttgttggggatgaaattttaggggtgtggaaaatggtcctcatgtgctgcatcaacctctgggcagggtcaacaggattggttgagtcacaggtcataggtctaggtggagtcagccagttgccagaaatgcaaaattctgaaaagacatctcagaagtccaatcttatgttctaaaatagtgatgttatctacaggaataattagagaagttagaaatcttgcgacttcccgaatgggttggctgattattgttttactacgcctacataggcagaatgattttcattacttttacaaaggcagtttasttttgggaaggactattatcatcactgctttaaagttaaactagaaactaaattcctcccaaagtaagcttggcatatgcccaggaatgaccaaagacagcctagaggttaggagcaagatggagtcaactctgtcagatttctcttaatgtcataattttgtaaaggcagtttcattagcacaggctagaaa

SEQ ID NO: 789935 - DNA, 533 bp, Homo sapiens
tgcaggggcttgggaatgggaaatgttaatttgttggggatgaaattttaggggtgtggaaaatggtcctcatgtgctgcatcaacctctgggcagggtcaacaggattggttgagtcacaggtcataggtctaggtggagtcagccagttgccagaaatgcaaaattctgaaaagacatctcagaagtccaatcttatgttctaaaatagtgatgttatctacaggaataattagagaagttagaaatcttgcgacttcccgaatgggttggctgattattgttttactacgcctacataggcagaatgattttcattacttttacaaaggcagtttagttttgggaaggactattatcatcactgctttaaagttaaactakaaactaaattcctcccaaagtaagcttggcatatgcccaggaatgaccaaagacagcctagaggttaggagcaagatggagtcaactctgtcagatttctcttaatgtcataattttgtaaaggcagtttcattagcacaggctagaaa

SEQ ID NO: 789936 - DNA, 647 bp, Homo sapiens
tctttttggaagtatgcttgtatatctttgtatatgtgtgtatttccctatttgtttattttatatattctacattgttcttaatgatttaggatgtttttcaaattaccattagatacggttaaattttctcttactaacaattcaacatcaggaatgagttgaaatttaatctttatttaggtcttttatttacattgataactttgacctttatcttgattgaataatttaaatgaaatcagtcttttcttaacagcttttcaatctggtagtaaattcttatcattttaaattgcctcaacatccattttgagtacacgtttaactttctcataccagaagcagggcttagccacccttgacacaatttctagttctacaccaaacccaaatggcacaagcctatggcctgagataaaaactagagctctctctcctgcctagcagactgtgctcctactttycctctgcaccagagcaacggtcaggcaggcatgggtcagcaatgggtaagacaagagccataagagtgtttgccaatataaacaagttccccatgtgagtgagccctggtcgtggctgggagagctaggcattaggctgctgccagataaaagaagtatcttgttgaggtaggaggtaga

SEQ ID NO: 789937 - DNA, 587 bp, Homo sapiens
  misc_feature 367, 368, 369, 370, 371, 372, 373, 374, 375, 376, 377, 378,379, 380, 381, 382, 383, 384, 385, 386, 387, 388, 389, 390,391, 392, 393, 394, 395, 396, 397, 398, 399, 400, 401, 402,403, 404, 405, 406, 407, 408, 409, 410, 411, 412, 413: n = A,T,C or G
  misc_feature 414, 415, 416, 417, 418, 419, 420, 421, 422, 423, 424, 425,426, 427, 428, 429, 430, 431, 432, 433, 434, 435, 436, 437,438, 439, 440, 441, 442, 443, 444, 445, 446, 447, 448, 449,450, 451, 452, 453, 454, 455, 456, 457, 458, 459, 460: n = A,T,C or G
  misc_feature 461, 462, 463, 464, 465, 466, 490: n = A,T,C or G
cagtagggtgaggacctcaaaaggagagccaaattgattatagaaaaaaaagtgttacattttattttttgtatttttaaatgtactgtaattgaatttacaatgttggcatatagtacattcttaacatgcatgtctgtaaccaaatctgtatctatctatctatctatctatctatctatctgttaatccatccattcatcyatccatccatccatccattcatctatctatatttctcttatgactatatatcacttgggaagaattgaacattttatatgtaatgtgaatgattttttttagattaaaataaaagatagggtaccgagctgcgaattgcgtaataacatgtgggtagcttttnnnnnnnnnnnnnnnnnnnnnnnnnnnnnnnnnnnnnnnnnnnnnnnnnnnnnnnnnnnnnnnnnnnnnnnnnnnnnnnnnnnnnnnnnnnnnnnnnnnncttacagtatatcattatttaganaattattttaataattaaaaaatacatttataacaattttatttagaaaaaatggctcttttgcagaacactctggatggtttataaaaaattcttt

SEQ ID NO: 789938 - DNA, 574 bp, Homo sapiens
ttgggaagtgattctaaattaaatgtactctccattagtaggtttgcagtcaggatttaataaaagaaaccactttaggtgttccccacgaaaggaatttaatacaggggacttagaaatattgcaagtatggatgagagaaactcagggttcactgcaactgttactgcacttcagagatgaggatcctactttagtttccacagtccccacagccaagtctgcctacagattcttgcacatatgttgttagagcctgaaatgctgagtctagatgcctttaagcatcctaaagcacccactttttgtggcttctttctagctgaaacaacaaggtggcttttgctttacttctgccttctataactcaaagaagtaaattaatttattcatacctatcatcccagttgcaacaragattacagaatgtagtttgaacttcttatcttctttaaattgcaaaaattggaatggtaaaaccgaatgtgtttactacacagttacagctaacaagactgtaaaataaatacctgtaatgggtagagctgggtttttctcattgcatattgctaat

SEQ ID NO: 789939 - DNA, 576 bp, Homo sapiens
agagtcttccaaaatgggaaagtatcatattaagtaattctcatctccaatgggtaagtaataaatcaaataatggtaaggatgtggagcaagaggaacttttattcattgctggtgagaaagaaaaatgctatagccactttggaagacaatatggaagctccttacacaactagatgtgctcatgccatatgatccagcaatttcactccatggtatttactcaaaggagttgaaaacttatgttcacacaacaacctgtacttaaatgtttatacccatatttattcataaatgtcaaaacctggaagcagccaagatgtcyattactaggtgaatagataaataaactatggcacataaaagaaaacagaatatttttcaacaataaaaaaatgagctatagatttctgggaagacatggagaaaacttaaatgcatagtactcagtgaaagaagtcaatcagaaaaggctatatactgtagtattccaaacatatgtcattctggaaaagtcaaatcttcttagataggaaaataatcagtaattgccagaatttaggtcagaagagggaa

SEQ ID NO: 789940 - DNA, 494 bp, Homo sapiens
ccatagcaatgtcaggaagttgccctctatggtctaaacgggggtaataatccactccttgtttagtgtatcttcaagaaataaccataaaaatgggcaaccagcagccctcggggttgctctgtctatggagtggccattcttttattcctttactttcttaataaacttgctttcactttgcactgmagactcaccctgaattcattcttttgcaagatccaagaaccctctcttggggtctggatcgggatccctttcctgtaacaggcaggtagatctcttgaatccaggagtttcagaccagcctgggcaacatacagaaatcccatctctatgaaaatacaaaaattagctgggtgttgtgatgtgcgcctggggccccaggtgttcgggagactgaggtggaaggatcatctgagcatgggaggtcaaggctgcagtgagccaaaatcaggccactgcactttagcctgggtaacacagtgagatcc

SEQ ID NO: 789941 - DNA, 616 bp, Homo sapiens
tcttagatcactatatcacacatattgataagacaacagtcagcaatacactgttgctacaagcaaccaaactaatagttttctaagtatttaaatttatttcataataatttcaaatgagtcagttctctaggcgagcagaatgttagcaaactcaatctatcaatcagaatggaaattagtacctacctgaaaccctattaagtgtcacccagaaatgctcatcaggactataggtatcttttgaccattgtagtagatcaatggccctttggtcacgtagaacaaagtcgacaaastctctggtaagcgccacataggcagtgccaaagtagatggtcagctgatgtggaggtgaagttttcaaaatattagtatttttcacaaaaaagccacctttatctgtatgctcttggtggacatatttagttcgcttaattgcatggtcaggaggcagcacccctggggtgatatttttccctttaaatcctttcagatgctgaactatctcccggttggttttcagggggaagtcttgtccacaggtgttgatgacgtacttccagggaacctcagaggcgacaaggtctttcagacagttcaggtcagcctggag

SEQ ID NO: 789942 - DNA, 597 bp, Homo sapiens
tggagacaatttttgcatttgatgctctcactgggtaacgtagttttaagttcacattttatatttagccatctatccttttattttttatttttatttttatttttttttgagacggagtctcgctctgtcatccaggctggagtgcagtggcacaatctcagctcactgcaagctccgcctcctgggttcacgccattctcctgactcagcctcctgagtagctgggactacaggcgcccgccactaggtccggctaattttttttgtatttttagtagagatgggatttcaccatgttggccaggatggtctcgatctcctgacttcrtgatccgcctgccttggcctccttgacctcccaaagtgctgggattacaggcgtgagccacagcgcccggcctgccatctatccttttagatgacatccttaaactctatactctctcctcaaaaacaatgggaaaagcgttataaatggaataggtccagtccaggttcactttggttggggtcttcagggctaatattgtagctttgatttttacccttcaatatgttgtaacctacataaatgagtggtttcaaggatcattt

SEQ ID NO: 789943 - DNA, 663 bp, Homo sapiens
tcaaaagggaactatgtcacttgaagtttcacaactttcactttgctttggtgaatttcaccatcctgtgcagctggagtttgggctttgtggctgcagcgcttcccaaagctggcttctctctcctaactcaagcacttcactgagccctgatggyggccagggagccgacaggcccaaagccaggtcaaacccccgacctgccaaatgtatcccaaccacaagtgaggccttttatgtttggtgtgctggggcccatgaaccaaactgtctccaagccatggctcacccctgggagtccacttccaccaatcgaggaggtttatacccaagcctcgtggacaaggagctgacccagaatgatgccaatgagaaagacaggcctgagggagctggacaccttcagggtactcagccatcttctccacagaccacgtggagatggttgtagaacacaggagtcagggaagagacatggccaaggcaagtgaatttgaatgtgcctgacacgggaactagacatgggtgaaaccaggatgagctggagagagagataactagacactctggaaatttaaaagcaaggaatttttctgttaagatggggaaagaggccttcttcaaagcacataagcttctggaagagggaaaaaaaaaatactg

SEQ ID NO: 789944 - DNA, 597 bp, Homo sapiens
gatattctcaagtataaaactatacatactttaaaaaattgctttattgagctatgattgatataactgtacacagttaatatacacaacttgatgtgtttggaggtaagtatatatacctgtgaaaccattaagccatcatgccatcaatcccataaattcatctatcacttccaaaagtttccacccctttgggcttcccccaccttttgtggtaagaacacttaatgtgagatctaccctctttacttatttttaagtatataatacactattgtgaatcataggctctttatggtaagaagacatccagatcttatttattgtgtataaataaatactgaaactttgtactctttgaccaaaacctgccyatttctccctcaccagccccttcaccattttactttctgtttctatgtatttccctatttttgattccacatataagtgagatcatgcaatatttgtctttctgtgcctaacttctttcacttagcataatatcctccagtttcatccatggtgtcataaatgacaggatttcattgttaataaggctgaataatattccattatatgtatataccacatttt

SEQ ID NO: 789945 - DNA, 560 bp, Homo sapiens
aaaacttcattttgacccccatgagtccatcttcaacctgaccaatcacagctccttacttcctgagcccctacccaccaaattatctttaaaaacctcgatctccaaatgtgaatgctcagggagactgatttgagtaataataaaacaccagtctcctgcacagctgactctgcgtgaactactctctatccattgcaattcccctgtytcgataaatcagctctgtctaggcagcgggcaaggtgaactcactgggctataacatgctctggggatcaacacccaggaggatgagggaagtggcatctgtcagagggaggtgttgacttgtgatgtagttgcaacaaaggcctccacgaatttgggagctgacaggatccttcaatgttgccccaccttgaggccagggggccacgcctttatactccccaccatacaacattgatcagccattaggttcaggctgccctggagagagaggggcatgattttgggctaggcagctctcttctgctgaatccagttcccagagagtgactcagctgagatctttcagc

SEQ ID NO: 789946 - DNA, 560 bp, Homo sapiens
aaaacttcattttgacccccatgagtccatcttcaacctgaccaatcacagctccttacttcctgagcccctacccaccaaattatctttaaaaacctcgatctccaaatgtgaatgctcagggagactgatttgagtaataataaaacaccagtctcctgcacagctgactctgcgtgaactactctctatccattgcaattcccctgtctcgataaatcagctctgtctaggcagcgggcaaggtgaactcactgggctataacatgctctggggatcaacacccaggaggatgagggaagtggsatctgtcagagggaggtgttgacttgtgatgtagttgcaacaaaggcctccacgaatttgggagctgacaggatccttcaatgttgccccaccttgaggccagggggccacgcctttatactccccaccatacaacattgatcagccattaggttcaggctgccctggagagagaggggcatgattttgggctaggcagctctcttctgctgaatccagttcccagagagtgactcagctgagatctttcagc

SEQ ID NO: 789947 - DNA, 593 bp, Homo sapiens
agtagtttggtaagaggatgagacacttataataagtaatgtttgttgaacatatacaaatgccaggcacggttttacatgcagtagtccttccaatgaattaggtgctctcatcccattttacagagaaaacagaggcagaagaggattggtcattgttctagatcacacagcctgacactgacaaggctgggattccagtgtagggaacttggctccaagcccatgaccttgaccaccatgctagactttttccttcatgttgaagctgaatgaactagaaagagcaaagtttraaaggacctggctctttggaaactgaaatatataaatccctggtaaagttgattcagatagcaggagagtgaaaatatgattgagaacgagaaaggcaaaccaataacataattagaagagattacaaaatacacaagaacattgggtgtaactcattggcaatgcgaaaacctaaagaatttcacttccctagcaaaacatgagtgtccaagattgacttcatgtacttggcaggacaggctgtgttatattgtaacaaccttgaaatttcagcggcttgacaccacgaagatttc

SEQ ID NO: 789948 - DNA, 498 bp, Homo sapiens
agaagctttcagtctgataagagtgatagcctccagctccatccatgtccctgcaaagaacatgatttaatcttttttatggctgcatagtattccttggtgtatatgtaccacattttctttatccagtctatcattgaygggcatttatgttgactccatgtctttgctactgtgaaaagtgctgcaatgaacatacatgtgcgtatctttataatagaaccatttatattcctttgggtatatacctagtaatgggattgctgggtcgaatggtatttctctttaggtctttgaggaatcaccataagtgggagctgaatgatgagaacacattgacacatagaggggagcaacacacactagagcctatcagagggtggagggtgggaggagggagaggaccaggaaaaataactaaggggtactaggcttaatacctgggtgataaaatctgtacaacaaacccccatgacacaagtttacctatgtaacaaa

SEQ ID NO: 789949 - DNA, 498 bp, Homo sapiens
agaagctttcagtctgataagagtgatagcctccagctccatccatgtccctgcaaagaacatgatttaatcttttttatggctgcatagtattccttggtgtatatgtaccacattttctttatccagtctatcattgatgggcatttatgttgactccatgtctttgctactgtgaaaagtgctgcaatgaacatacatgtgcgtatctttataatagaaccatttatattcctttgggtatatacctagtaatgggattgctgggtcgaayggtatttctctttaggtctttgaggaatcaccataagtgggagctgaatgatgagaacacattgacacatagaggggagcaacacacactagagcctatcagagggtggagggtgggaggagggagaggaccaggaaaaataactaaggggtactaggcttaatacctgggtgataaaatctgtacaacaaacccccatgacacaagtttacctatgtaacaaa

SEQ ID NO: 789950 - DNA, 498 bp, Homo sapiens
agaagctttcagtctgataagagtgatagcctccagctccatccatgtccctgcaaagaacatgatttaatcttttttatggctgcatagtattccttggtgtatatgtaccacattttctttatccagtctatcattgatgggcatttatgttgactccatgtctttgctactgtgaaaagtgctgcaatgaacatacatgtgcgtatctttataatagaaccatttatattcctttgggtatatacctagtaatgggattgctgggtcgaatggtatttctctttaggtctttgaggaatcaccataagtgggagctgaatgatgagaacacattgacacatagaggggagcawcacacactagagcctatcagagggtggagggtgggaggagggagaggaccaggaaaaataactaaggggtactaggcttaatacctgggtgataaaatctgtacaacaaacccccatgacacaagtttacctatgtaacaaa

SEQ ID NO: 789951 - DNA, 553 bp, Homo sapiens
aaaaactactttaaatttcatatggaatcaaaaaagagcccatatagccaagacaatcctaagcaaaaacaacaaagctggaggcatcacactacctgacttcaaactatactacaagcctacagtaaccaaaacagcatggttctggtaccaaaacagatatatagaccaatggaacagaacagaggygtcagaaataacaccacacatctacaaccatctgatcttcaacaaaccttaacaaaaacaagctatggggaaagaataccctatttaataaatggtgttgggaaaactggctagccatatgcagaaaactgaaactggaccccttccttacaccttatacaaaaattaactcaagatggattaaagatttaaacataagacctaaaaccataaataccctagaagaaaacctaggcaataccattcaggacacaggcatgggcaaaaacttcatgactaaaacacaagaagcaattgcaacaaaagccaaaaatgacaaataggatccaattaaagagcttctgcacagcaaaagaaactatca

SEQ ID NO: 789952 - DNA, 553 bp, Homo sapiens
aaaaactactttaaatttcatatggaatcaaaaaagagcccatatagccaagacaatcctaagcaaaaacaacaaagctggaggcatcacactacctgacttcaaactatactacaagcctacagtaaccaaaacagcatggttctggtaccaaaacagatatatagaccaatggaacagaacagaggcgtcagaaataacaccacacatctacaaccatctgatcttcaacaaaccttaacaaaaacaagctatggggaaagaatwccctatttaataaatggtgttgggaaaactggctagccatatgcagaaaactgaaactggaccccttccttacaccttatacaaaaattaactcaagatggattaaagatttaaacataagacctaaaaccataaataccctagaagaaaacctaggcaataccattcaggacacaggcatgggcaaaaacttcatgactaaaacacaagaagcaattgcaacaaaagccaaaaatgacaaataggatccaattaaagagcttctgcacagcaaaagaaactatca

SEQ ID NO: 789953 - DNA, 649 bp, Homo sapiens
agcctaactttacattccatgttctaacctatgaacaatcatccaggatttttgacctcaagatttgcctcaccttttatacctaacattcagaatggcttcatctgtttgcattctgcctcaattgtgattcatatttccctctagttttaaatactatagtgagttgaaacatgccctcccccctccaaatattggtctaaatcccttgaatctgcgaatgtcaggttcttacttggaaaaaaagggtctttgtaaatataattaagggtctagagatgagatcatcctggattacccctgtgtgccctaaattcaatcacaagtgtctttaagagacactttaagagaaagaagagaagacagacactggaggtcaygtaaaaatggaagtggagattggagtgatgcagccaaaaggaaggctgagagccaggagaatctggaacaggcgagaaagcattttcccctacagcctccaaagggagtatggcttggctgacaccctgatttcagacttcaggcctccaaaactgcgagagaataaatttctgtttaagctaccaggttcatggtaactggttacagcagtcctctggaataaacatacattcttttaggttcctctgtccatattctgcccagtctt

SEQ ID NO: 789954 - DNA, 607 bp, Homo sapiens
caatcacattagaactcaggattaagaagctcactcaaaaccacacaactacatggaaactgaacaacttgctcctgaatgactactgggcaaataataaaatgaaggcagaaataaagatgttctttgaaaccaatgagaacaaagacacactgtaccacaatctctgggacatatttaaagcagtgtgtagagggaaatttatagcactaaatgcccacaagagaaagcaggaaagatctgaaatcgacaccctaacatcacaattaaaagaactagagaagcaagagcaaacacattcaaaagctagcagaaggcaagaaaaactaagatcagagcagaactgaaagagatagagacacacaaaaaaaaaaacttcaaaaaatcaatgaatcyaggaggtggttttttgaaaagatcaacaaaattgatagaccactaggaagactaataaaaaagaaaagagagaagaatcaaatagactcaataaaaaatgataaagcgtatgtcaccactgatcccacagaaatacaaactaccatcagagaatactatgaacacctctacacaaataaactagaaaatctagaagaaatggataaattcc

SEQ ID NO: 789955 - DNA, 562 bp, Homo sapiens
ggtttgggttagggccttctttagggcctggaaagccacttctgtttcaggtgtccatcttactatatgggtattggctttctgagtttccttaattaatgtacataatggcctggctatttcactgtatctgggaatccatattcggcagaaggctgttatgccaaggaaccctcttagttgctttagggttttgggatgaggataagccagtatacgctggatacrttcctctctgagggccctggtgactttggataattttagccctaagtatttaacctgctgtgagcagagctgagccttttgtttggagccacaggtagcgaggaaatttaagagcgcttgggtggcttgatgccacaaggtttctgaatgggtggctataattaaatcatccccatactgaagaacaagaatgtccagctatgacaattggctcaagtcttgggctaatgcctggccaaatagacgggggctatccttgaacccttggggtaaaacagtccaggtgagttgagacattggatcttcaaaggcaaacaagaattgagagtcagga

SEQ ID NO: 789956 - DNA, 614 bp, Homo sapiens
ctataaaaaagtatttacagcagatttaataggctaaaaatgacatcaacaaaaatacaacataaataaaaatagtggcatgaaatgaaatcactgttgagattaatccaaaagggcacaccatcggtctgataaacttgctatgagtaagctcttgtctttccagtatgggacaaaagaacagggtgataacatatcaattcagtgtgcataaaatgaggtaattcaattgcttagataagaatcaggcaaaaatatgtccacaggtccattaaatgaaaggaaaacatcaaattaatattgatgtttacaagtaaggcaccatgcctagaatataacacatgcttaataaatggccattattaacatgatcatccttgaaaaaaaaaacagttgctgtggtttctggtttacaatggcatctcttcaccagtgacaaaacatatctatgatgcaaaagcaaaaattccttatcratactgaaaactaaaactgacatatactctattgcaaataatgagagaacagacaatgaaatataagccccgtggtctaagttgaataaaacaatttgtattcaatgcatgtcatattgccagaaacagagcaaatct

SEQ ID NO: 789957 - DNA, 617 bp, Homo sapiens
aattgagggtgtgcagttataaggcgacctgaagattcttatttaacaatagtgaatgtgaaggacacacttgtgcggcagacctagagacaagcagtggacaaaacagacaagtctgtccttcatggggcttcaagtctcagcagaaggaagctacagcttgttctctctccatggcaatattaactgacaaaatacccattaaaagcacaggctattttccataagtggcatgaaaaggcttaagcaggaataggccgaggcaatttgtcctttaaacttcacaatttgacaaaatgtcataattgaaacaatacttgtctgaaatatgatgccttcgagaaaagtttctgtttttctttttgcaccctccaggagaaagagtcagagctgsgcagagctctggaaatgacgccacttttgttaaatgttagaaatggcacttgccacttcattgaccctgttggcattcatttacatagtctcataaaaaaactgaaggcactattagggctaaagtctgacaactcctcagagttgtacgtgtgtaattgatgctacgtagtcagttcccagctacttagcgatgaagagctggggtgagagatggggagggg

SEQ ID NO: 789958 - DNA, 640 bp, Homo sapiens
tcccaccctgcgtttcctacctgggtcctgttgctcccgttggcttacggaaaggaaactcggtctcatttccatttctgtaggaaactcagagatgcctgggactcctcccgccctgggactccccactctccgtagttcacacaatttaaagttccccatttttaattttccctgcgggactgtctagctgtgcgttagttcaatccttctttcgatggttttctcactgggattcctgttgctagtcctctccctggccctcaacccgcaaaccggcgatgttcttcctgacgccggagtggcctctacctcgcaggctgtggaggtctgccacctgccaagtaacaccacgtgtttcttaacctgcgcctcagtttgatcatctatgcaaagggggagtgatcacatctagctaatacgagtgttgtgaggattcagtasgttatcataaatcatgccccaagggcatcccggagctaaacaaggctaggtaggagttagtgctgtcccacttgtcagatcccagcaggacacaccaggccgcccactggctggctctaatcctcctctacaggcttctgtccctctgggaccttaccttcctgctccctcgcctgtgctcacactggaccactcc

SEQ ID NO: 789959 - DNA, 625 bp, Homo sapiens
tacaaaaaaatcagtaaacatatagaaaaattggacattatctatcaattgatctaaatgatattgtcaacttattgacctaaattgacatttatagaacactataacccacagtatcacacatgtatcttctttacacccagaacatttacgaaaatagaacatattcgtgttcataagactcaataaatgtaaaagaattttggataccccatttaccctgatgtgattattacacattgtatgcccrtatcaaaatatctcatgtaacccatatatatacatatatatatatatgggatatatatatatatatgggtttatatatatgtatgttttatattatatataatatattatatataataatatataatatatatgggttttgtttctatatattatatattatatatataaacaaaacccatatatagttatatatatgttatacatagttatatatgttatatataacatatataatgtatataacatataaatgttatacacagaacatgtataactgttatgaacaatgttatacacataacatgtataactgttatacatgttatatatatacatgttatatatataacacgtataactacgttgtatatat

SEQ ID NO: 789960 - DNA, 562 bp, Homo sapiens
caccctagattctatgtttgctgtgccgctttgaacatttctcatgagcacacgccaggttggctgtacaccagtatcccatgcctgtgggtacgctgggagggtgaggggcctgagcatgctgagtgcagaccggatcccagcttgctactaactagctgtgtgatctcaggccacctgactcttttaactgtcccagagcattagaaaactgattgcccagagacactgtaaggagtaatgagattatacaaatagaacatttagcatggtgcccsatcaagaataaattatttttatatccttggttttccttcatggtcatgtctctgcagacttctaaattggggtcatcaaaaaaaattgatagatttggattctataacattcatccaagttacagtaaaaactttagatggaaactggactcgatcaaatatagatacatgaggtatcccactcagggctgtacaggctggtaccaaatcattagtacgtattacttggatacaattgttcacagagttaaaaaaaaaaaaaagaaagaaagaaaaagcctact

SEQ ID NO: 789961 - DNA, 560 bp, Homo sapiens
gacttaaaattttaattcagatgcaggcacattaaaacatatggggaatgaggatgcctgaagtttgcaaaattttaggatgtttgtaccaggtctttgacctgtaatttaaacggcttctaagaaatagaagtaattattttatgttgatcatcttttaaaacaacttctaaggagaacctaggccttgtaagtcaacctgattcaaaccctccttgataaccctccttgatattcgtgtgaattctctgggaccaattctcatgctcttttcaaacgttgatgaacttctgggaatggattaccaaacaacaacagcagcaacaaaacyttcagtttttctgtcccaaagttgatgtatgtaaatgttatttctcctcacagagatttacatttaattttggaattcaggttaatcccccatggaattctgaacaattctgcgttcatgatttacattttagaaatttacttcgaagtccctttgaaatggttaaatgtgttaaatttgaaccatgagattatcctaaattccttgaggaaattattagaactactgc

SEQ ID NO: 789962 - DNA, 560 bp, Homo sapiens
gacttaaaattttaattcagatgcaggcacattaaaacatatggggaatgaggatgcctgaagtttgcaaaattttaggatgtttgtaccaggtctttgacctgtaatttaaacggcttctaagaaatagaagtaattattttatgttgatcatcttttaaaacaacttctaaggagaacctaggccttgtaagtcaacctgattcaaaccctccttgataaccctccttgatattcgtgtgaattctctgggaccaattctcatgctcttttcaaacgttgatgaacttctgggaatggattaccaaacaacaacagcagcaacaaaactttcagtttttctgtcccaaagttgatgtatgtaaatgttatttctcctcacagagatttacatttaattttggaattcaggttmatcccccatggaattctgaacaattctgcgttcatgatttacattttagaaatttacttcgaagtccctttgaaatggttaaatgtgttaaatttgaaccatgagattatcctaaattccttgaggaaattattagaactactgc

SEQ ID NO: 789963 - DNA, 672 bp, Homo sapiens
tcacatctgcatcctctttagctaattgccttggctgatggaaaccatcttgcacacagatgcctgggaaatgacatacccctcttcccaggggcagcccctatccagtgactgacacaggcatagaacagcccagcctctggaggggacagtccgaggarcagctcacaatcctgagctccccgaggggtcaggctgaggcgcatcttccactgaaaccacacccttgctcagcttcttctcctgccctatacaaagaggaagaggctccctcactgtgttctcctgagaacttcctcaagaattcacccatcttaggctctgcttctaggaatctgacctaagacaaggcaaatccaaattccagaaacatgttctctagtacaatttttattttggcaagtagataaaacaagtgtcattcccataagcctaagctgcaggaagggtgtccaatttttctgcttatccaaaggaggcaggagttggaaaagcctgttcgaaagcttggtaggaggggagggaggattctgggtgctggtgaggggctggtgtgggtgactgggcctgtgtgacaatagcctgggctgggctgggaagcagtgagctccccatcacaggagggatccacagcctgggcacggagcaggactcagtggccctgagatccct

SEQ ID NO: 789964 - DNA, 618 bp, Homo sapiens
tagacaaggtcttgctatgtggcccatgctggtctcaaactcctgggctcaagtgatcctcccaccttggcctcccaaagtgctgggattacaggtgtgagccaccacacctggccttaaccttttatttatttatttatttattttgagatggagtcttgctctgtggctctgtcgcccaggctggtgttcagtgaatggcgcaacctccgcctcccrggttcaagtgattctcctgcctcagcctcccaagtagctgggactacaggcgcccgccatcatgcctggctatgttttgtatttttagtagggacagggttttaccatgttggccaggctgatctcgaactcctgacctcaggcgatccacctgcctcggcctcccaaaatgctgggattacaggcgtgagccacggtgcccagccagccatttttaagtgtacagttcatgggtatgaaatagcactgaataatgttgtgcagccatcgcaccatctccgtaactcttgtaaaactgaaactccatactcattaaacaataaatccccatttccccctctccccccagcccctggcaacgaccattctattttgtctgtatgattttgactactctag

SEQ ID NO: 789965 - DNA, 618 bp, Homo sapiens
tagacaaggtcttgctatgtggcccatgctggtctcaaactcctgggctcaagtgatcctcccaccttggcctcccaaagtgctgggattacaggtgtgagccaccacacctggccttaaccttttatttatttatttatttattttgagatggagtcttgctctgtggctctgtcgcccaggctggtgttcagtgaatggcgcaacctccgcctcccgggttcaagtgattctcctgcctcagcctcccragtagctgggactacaggcgcccgccatcatgcctggctatgttttgtatttttagtagggacagggttttaccatgttggccaggctgatctcgaactcctgacctcaggcgatccacctgcctcggcctcccaaaatgctgggattacaggcgtgagccacggtgcccagccagccatttttaagtgtacagttcatgggtatgaaatagcactgaataatgttgtgcagccatcgcaccatctccgtaactcttgtaaaactgaaactccatactcattaaacaataaatccccatttccccctctccccccagcccctggcaacgaccattctattttgtctgtatgattttgactactctag

SEQ ID NO: 789966 - DNA, 561 bp, Homo sapiens
tgcccttgtactcgtcacacgtcaggaacttctcctgctccgcatggaacagccgcaccacgtctccctgcaggcagcagggtgtggctcaggatggctgcggcccctccaggctcaaggacccacccagggcccagccccacctgcctcagacagggttggctgctggcagggcccctcttccagagccagcacacagagagggggatgcaagctgagccccctagagaacagccaaagccyaggcactctgccctcagcccgcatcccagaccccaaatccagagctctcccaggccttcccatgttcaaacccaccctggaccacctctctccctatgtgtacctctagacaccctgcctaacctctaacggcccatctccagtcaccccctccatgaaggagggggaccttaccccctcagtgtccccggggccatggctgcccctctctcagggtcctttctgcctaaatattggtagctcatgcccacttcttttgctcccctgttggatgggggcagcatggagggcatctccatagctttggacagagatacc

SEQ ID NO: 789967 - DNA, 630 bp, Homo sapiens
taatggtttttggtattttctgtggatagttttaaaactatgagaatgtcattttaatatttacttctgtatttgaagaacaggccacaattagattttagcaaattcagtgtgaattacaatttgacatttctcatgcttccagtctgtcttttcttttttgtcattaaagatgttatcctgttgtacagcccacatagtatctgtgggcgcaaagtactgtttgagttgtttttgtctttgtagtgaaattcaggttgcttttccttggcattcattccctctacggtcattcttccaggattgtctgtgttttccgctattgaaggagaggcaaacaagtaygtatcaagagcttctgcaaacataggtgcttcccacctatgttccacagctgccaccttcaaattctgcctcaggtgccccgatcacttttgccctggatcttccgtattctctcctgtgtctgttcctccactcactctgccctctgcggattccagcttgtctttgatgtctctctggaagcagtacctttcccgccagccttgctctgtaccttaagtgctcctttccccatttccattgtctccagtgtgcacctatattaataaaagcgcctgacacagt

SEQ ID NO: 789968 - DNA, 558 bp, Homo sapiens
tgggttgctcccttctgttggcaaataatattccattgttctatggtatgaatgatcttcactttgttgatccagcttccagctgatggatatctgggctgtgtctaatttttattatttatttatttattttattttatcattattattattattattatttttatttttgagacagagtctcgatctgtcacccaggctggagtgcagtggtacaatctcagctcactgcaacctctccctccccggttcaagtgattctcatttctcagcctcctgagtagctgggattacaggcgcacgccaccatgactggccagcttttgtatttttagtagagatgggttttgccattttggccaggctagtctccaactcctgacctcagatgatccasccaccttggcctcctaaagtgctgaaattatgggcatgagccactgcgcccagccctaatttttatttttgtaaataaaattgccatgagcattcttacacaaggctttttgtggctataggctttaacttctgatggataaatacctaagagtgaaattt

SEQ ID NO: 789969 - DNA, 576 bp, Homo sapiens; identical to SEQ ID NO: 788236

SEQ ID NO: 789970 - DNA, 579 bp, Homo sapiens
cttgaggccaggagttcaagaccagcctggccaatatggcgaaaccacatctctaccaaaaatacaaaaattatcagggcggtggtgcatgcctgtaatcccagctactggggaggctgaggcatgagaattgcttgaaccggggaggcagaggttgcagtaagctggcatcgttccactgcactacagctttggcaacagagcgagactccrtctcaaaaaaaaaccaaacaaacaaaaattgactatcaagggaatgagagaacaggaaagaaaagaaactctagtagtaataatatattaaagcattaacaccaaaattgtgcataacaatgccattttctcatggtaggttttaaatttttcttctttttgggactactaaaaaaaaaaaacaaaaaaactccacgtagtaaatgtaacagtactctcaaaatctctctgcactcttccattatattgatttcatctccctattctcatctttccacatggttaagaggcatgtttgaaagttaatccggatgagcacactatgtaaacaacagggttcaccactagctgcactccatctccaag

SEQ ID NO: 789971 - DNA, 621 bp, Homo sapiens
tggaagagactctgggagaggaacatgagaggtcccagggctctgaaccagggcaaccaacagaaaaggaaggacagactgggctggaatccaggaggagcagggtggtgtggagacacaacccttgtcaagtttgaggtggaaggggacactccatgtggagacagtgaggacacagagctcagggacagcttggggactagaggtgcagatgtgatcatcccaccagaaagcacatggggtgggaaatagaccaaggactatctagatggtggacatgaaaatacttggtccaaacacatacttgaaagcccttaactagaccaggggtagttgagaacaataccaatattgttacagtttcaactgtagactaaaatattttcactgkctatctaatgtctatctaaattctaacagctctatcttaggtactatgtgaggaataatgggctgttactagttactagaagagaatgtcattgctgtgtctatttgtgcaattaaagttcaaaacacagtgttcttttttacagtaaaataatctgcatgcatgaatgcaggccttgcctctggcccagctgtgtcactaaggatagaaacgctgggtatgtgatgatg

SEQ ID NO: 789972 - DNA, 587 bp, Homo sapiens
aactgtactttgggtgcctgacaaccattttgtttttcactttcagtgcagtattcaataaattacatgagatattcaacactttattatgaaatagactttgtgttagatgagtttgcccaactgtaggctaacataagcattctgagcacatttaaggtaggctaggctaagctatgacattcagcagtgtaggggtattaaatgtatttttgacttatgatagtttcaacttacaatgggttattgggacttgaccgcatcrtaagttgagaagcatctgtataaaatataagatactcagagtgggtataaaaaacactatcatggccaggcgcggtggctcatgcctgtaatcctcagccttgggaggccaagacaggtggattatctgaggttgggagttcgagaccagcctggccaacatggtgaaaccccgtctctactaaaaaaacaaaagttagccaggagtggtggcgcacacctgtaatcccagctactcaggaggctgaggaaggagaattgcttgaacccaggaggcagaggttgcagtgagccaatactgcgccactgcactccagactagg

SEQ ID NO: 789973 - DNA, 642 bp, Homo sapiens
ctctccctcctgctcaccaccctctcttccccctccctctcagcaccctctcttctcctcccacttgccaccctctttcttgccctccatctacccacaatgtttttccccactgcctttcttttcttcccacagtgtttttccccaccatctttgcaaaccttctccccctcctgtttgtctccctgtttttccgcctccatctacccacttttttccaccatcttttccccaccatctttttgcaactccttcttctgctcgccccgccatccacttttccctttggcactcaccaccctctttactcctccatctaccccaaaactatttccttcctcctaccactccagctggctgcagtctccgttgctgccaccaaccacagcgatgtragccacagtggcacaggctgcagcatccagcgtgtagcaggtggcttctccctctggtcctctaagctgggaacagagcagctggtcaggaagacacagaagagccttaaatgggctgatttcagcatcatttatatacagatgttatgcaaatgaggtttctggactacatgttctgattggatgagagcaagcctgaggacaaccaattagatcatgaaaataaagtccaatcagagtaggtcta

SEQ ID NO: 789974 - DNA, 553 bp, Homo sapiens
ttttaccaatgctttgactggaatggcatgctttcctttaaggaatcaaacctgacttgtaaagccaataaaagccacttggggaaatgccttataccttgcctatgcagtccctgtgcagggtttctgacctgtggtaagyaaagaatgtcactttctaacaggtccaggagccccaagttatcttggaacctcaagaggagaggaattcacccagctcataggtatttgagggtacaaaccgatggcagggctcagctctaaaaaaagtcttatctaaaactccttctgtggaacagagttccatcaaagccaatttaaaaaaagcttatgtgaaaaataagtattcttgctgcactttacacaaatagtcatgcaaagtataataaaacaaatcagtcttaccgtgatttgtttttagtaaaaataggaaactggagagagaaatattatgtttcaagaactacggaacatctgttattagattctaatctcatcagttgtttttaaagtttgtttctgcaatttaggctaatcctgtttattcctatga

SEQ ID NO: 789975 - DNA, 598 bp, Homo sapiens
aaacatcttatgatgtttccattcagcactcaaagcactgagagaacgttacctacattccttttagaaggtagtatacactgacatcatctaaaaatggaatcattagtatattttttggaatgaatctactacaagatatttacttgaggaaraaaaacctctcagacctcaaagtcaacctctggacgtatctcaaaatggaagagggacccatcaaatttatacagaaagtagatgatagcttactattagagaaaactgtcaaaacaagcactacccaccaaaagtaacggtgacaaaacagaagttgaagaagacagtaatcaagagtctatggctaagaggtgtcgaggagtgctgtggggcagcaggggctctggaggcaaaagagtgtgaccgactcctgactatgccagagaatggctctgaaacaagacctttgcttccatacatgggaagtggagatgacacgacccaccagagcagtgtttggtggattaaagatgctgcccatgacccacctggcacattttcactctgtcattgtccctttgcctttcctgcatggagaatctccttcctgcatgctgcttaa

SEQ ID NO: 789976 - DNA, 598 bp, Homo sapiens
aaacatcttatgatgtttccattcagcactcaaagcactgagagaacgttacctacattccttttagaaggtagtatacactgacatcatctaaaaatggaatcattagtatattttttggaatgaatctactacaagatatttacttgaggaagaaaaacctctcagacctcaaagtcaacctctggacgtatctcaaaatggaaragggacccatcaaatttatacagaaagtagatgatagcttactattagagaaaactgtcaaaacaagcactacccaccaaaagtaacggtgacaaaacagaagttgaagaagacagtaatcaagagtctatggctaagaggtgtcgaggagtgctgtggggcagcaggggctctggaggcaaaagagtgtgaccgactcctgactatgccagagaatggctctgaaacaagacctttgcttccatacatgggaagtggagatgacacgacccaccagagcagtgtttggtggattaaagatgctgcccatgacccacctggcacattttcactctgtcattgtccctttgcctttcctgcatggagaatctccttcctgcatgctgcttaa

SEQ ID NO: 789977 - DNA, 601 bp, Homo sapiens
  misc_feature 130: n = A,T,C or G
agggagaattatttaaaatagattaaatgatgtggaataaaacttccaaaagctgtaattgaaagtgtcagaaacattagctttgcaacaagtaacatttaatcacatagattatacagaagcataaatntttgtaggttgctttcttcaatcaaatttacattttaatctgccaagactgttcatcacttttgactgtctggtaccaagcagcttgtcagaacttataaatgcaaactgcctgcattaggaataggacttctcctttaaacactargttaatgaaagtttaattagaatacttcaagatcgcaagtgtctgagtgcagtgagattaatataaagggcattttgtctatctgcatttctttagttactgaaattataatcatttaaaaattatgatcatttatgctcataaaatgatttaattaaggttcactaaaatgtaaaacttttcaaagttggacacttgccaaatgagagtgtgacaggcaatacaccgttgctgtcagaggaagctgtgagatgcacatgagttctcttcaaaggccggattgggagaggatgcttatggccactttggtggatctgctaaaat

SEQ ID NO: 789978 - DNA, 601 bp, Homo sapiens
  misc_feature 130: n = A,T,C or G
agggagaattatttaaaatagattaaatgatgtggaataaaacttccaaaagctgtaattgaaagtgtcagaaacattagctttgcaacaagtaacatttaatcacatagattatacagaagcataaatntttgtaggttgctttcttcaatcaaatttacattttaatctgccaagactgttcatcacttttgactgtctggtaccaagcagcttgtcagaacttataaatgcaaactgcctgcattaggaataggacttctcctttaaacactaggwtaatgaaagtttaattagaatacttcaagatcgcaagtgtctgagtgcagtgagattaatataaagggcattttgtctatctgcatttctttagttactgaaattataatcatttaaaaattatgatcatttatgctcataaaatgatttaattaaggttcactaaaatgtaaaacttttcaaagttggacacttgccaaatgagagtgtgacaggcaatacaccgttgctgtcagaggaagctgtgagatgcacatgagttctcttcaaaggccggattgggagaggatgcttatggccactttggtggatctgctaaaat

SEQ ID NO: 789979 - DNA, 651 bp, Homo sapiens
taagaccttgcaatcaaatggcaggacttagggttcttaataatacataaaataaaagcataaattaaataaggaattaatattatgtacaatgagtaaagtgcattttgagaggcactatttgaagagaacttcaaaagttgcatatcaacttcatatgcagaatatttttctgaggggttcagatgcttctacacattttaattggagggctttcaaatattctagacttagaatgcatattaacctcgtgtcttctcccctacagaccacatttgggtagtttttccatgctcttgattcttttgtttctaatccaataagaatattgaggaatagaggtaacaaaggatagtgaagatcagacattttcaagcgattcatccaatgaagctttactgggtacctgccaagtgagtgaaaccctgagatgtatatattctagtgccgaggacagagttccacacctagcagatatttagtaaatttttgttgaatgaatkaagtgaatgaaagaatgaataaatgaaaggaacggtcttctctgaggtatctggatgtgacgccaaaagggtcagaaccacattttcaattccgcttgataatttctagaatataatagacggtgcgaacaaagagaaaaaaaataaa

SEQ ID NO: 789980 - DNA, 505 bp, Homo sapiens
gaatcgtatcagtaatttaagaacacctacagacctggatgcaaagcattaatatgtgaacaaaccaaagcgtatagttgtaaataccagatgccaatatatagaaagtgtttttccctttaaaccatctttactttgaacaagtaggtattacgaattctactaaactaggtaagggctagttatttactgtcttctttctcaagctgatttagttggctataagaggaggctggaayattgaggaaacagattttgcaaagagatgatgtgggaatacctagtccctaggaagggaattaaagttagtatgaaataacattaatatgaatatatatacatagatatatttttttctccattcttaacagccatcagcaaaaattatgattcctcacattaaatatctttccagcttttaatagattttgggagatttcatgcaaagtagggataatatgcaacattgtgttagatgcagagtggtaagttacttttagtgtaa

SEQ ID NO: 789981 - DNA, 557 bp, Homo sapiens
gatccttgtgctgatggaattattgtgtaacttggctagctacacaatctatccttgtgctaaattgcatggagcttgatatggtttgtctgtgtgtccccacacaaatctcatctggaattgttatccccacttgttaaagaaggaacctgtaattcctactttttaaggtagcgaggtgagtgaattatgaggttccttcccccatgctgttctcatgatagtgagtgagttctcatgagatgtggtggttttataaggcagtttcccctgctcttgttggctctctcttgcctgccacaatgtaagccatgcctgcttccccttccaccatgattgtaagtttcctgaggcctcccctgccatgtggaactgtgmgtccattaaacctctttcctttataaattacccagtctcaggaagttatttatagcagtgtgagaatgtactaacacagagctcagtacatacacgtatacccacatgggtgcatataagtgggtacaatctgaataatgtcaatatcactgtcactatctcatttgtgatattgcact

SEQ ID NO: 789982 - DNA, 641 bp, Homo sapiens
atgatattccctcttccttcacttcctttctgctctccacccatcccatactgtagttcctctatgacacctgccttgatgcccccaagcaggctcagatggtttttctttatggtttttgcatcttctacaaacacctaatattgctatttccacattgatttgtaaccagttattttttccgtttagcttctttagaatatatatgtctctatgccttgcttaatatcaagagctttttagagacacagattcccaggccttacttctgaggattttaattcaktatgtctagaatgaagtgtaggtatctgtcttttttaaaacaccacaggctttctgacctgtcacacagttggagaatcactgcattatgttttcaggttccttgaggatcatctttacaaccttaacatctattacggtgcctagaactgtcagggcttaattcatattgaacaaacagatgaataaatgtggggtttgattgaaataataataatagagataatagaataatagaaataataattttttgattaacaagaatagggcaaaccagaagaggaatttattggatcatggagaaagtaatgaatctggtgttagacttgttgcatggaaatattcagcaggaagct

SEQ ID NO: 789983 - DNA, 641 bp, Homo sapiens
atgatattccctcttccttcacttcctttctgctctccacccatcccatactgtagttcctctatgacacctgccttgatgcccccaagcaggctcagatggtttttctttatggtttttgcatcttctacaaacacctaatattgctatttccacattgatttgtaaccagttattttttccgtttagcttctttagaatatatatgtctctatgccttgcttaatatcaagagctttttagagacacagattcccaggccttacttctgaggattttaattcattatgtctagaatgaagtgtaggtatctgtcttttttaaaacaccacagsctttctgacctgtcacacagttggagaatcactgcattatgttttcaggttccttgaggatcatctttacaaccttaacatctattacggtgcctagaactgtcagggcttaattcatattgaacaaacagatgaataaatgtggggtttgattgaaataataataatagagataatagaataatagaaataataattttttgattaacaagaatagggcaaaccagaagaggaatttattggatcatggagaaagtaatgaatctggtgttagacttgttgcatggaaatattcagcaggaagct

SEQ ID NO: 789984 - DNA, 580 bp, Homo sapiens
gcaggcagccaacctctgccacatcaaatatttgtgattgttcatggaaagcatgatctctgcaaagatttaagtgctccatgagaaataaaacacctaatagaatactagatttatcatcagaaaattcaagaatgtgcttgttttttgtttgtttgtttgtttatttgtttgttttgagacagattctcactctatcacccaggctggagtgcagtggtgcgatctcggctgaccrcaacttctgcctcctgggtttaagcaattctcctgcctcagcctcccaagtagctgggattacaggtgcccaccaccacgtccggcaaatttttgtgtttttattagagacggtgtttcaccatgttgaccaggcttgtctttaactccttacctcaagtgatctgcctgcctcagcctccaaaagtgctgggattacaggcataagccactgcgccccaccgaatgtgctcgttttaatacataagcactgaattttagttaacattagaatgaacttaatagatcattagtaagtagcccctagtcatatataaagctatgtctgtatgcccagtgacca

SEQ ID NO: 789985 - DNA, 631 bp, Homo sapiens
agggcttttaggcctgagaaactaagttttctaatatcctaagcaaatatgcctgctagtaacgcttaccagagataaaggagaaaagattataacttggaaaagacctcggtccttactccttggccaggccaccccctcttcctgccctctcagcctgttcccactgcactagcactgggagtcrgggaggggagtggcttttggaccaaaaatgtactcaggtcttcctaaagagcttgcctcaccctgttacttcttcaaattcttctcacccacagccagctctgcaagccactgccagcgtggctctcttggggacattggtgacctggttggttcatgccctttgtactggttcgactcttccttgaccacttggcagtgcctgaagcagctgcctgcccacttcttctgaagctcctcctgcctctcccaatacccactttctctgttgattatctacctcctctttccaccttgggtaaggtacttattccccagaatgccattctcagtttcctttcattatttgtgtttttctgtgtgatactttatttttaatacactttttgcatatcagctttatttcaatgtaacttacctaccataaaattcatttttttaaagt

SEQ ID NO: 789986 - DNA, 631 bp, Homo sapiens
agggcttttaggcctgagaaactaagttttctaatatcctaagcaaatatgcctgctagtaacgcttaccagagataaaggagaaaagattataacttggaaaagacctcggtccttactccttggccaggccaccccctcttcctgccctctcagcctgttcccactgcactagcactgggagtcggggaggggagtggcttttggaccaaaaatgtactcaggtcttcctaaagagcttgcctcaccctgttacttcttcaaattcttctcacccacagccagctctgcaagccactgccagcgtggctctcttggggacattggtgacctggttggttcatgccctttgtactggttcractcttccttgaccacttggcagtgcctgaagcagctgcctgcccacttcttctgaagctcctcctgcctctcccaatacccactttctctgttgattatctacctcctctttccaccttgggtaaggtacttattccccagaatgccattctcagtttcctttcattatttgtgtttttctgtgtgatactttatttttaatacactttttgcatatcagctttatttcaatgtaacttacctaccataaaattcatttttttaaagt

SEQ ID NO: 789987 - DNA, 618 bp, Homo sapiens
tagctctgggatcagtgtgcttcctccatagttaaacttttcttgctctgggaactgaccctttttagctatcaaattgatccatgtttttgtaagagctcaccttggtccatctatacatttcatctccacctgagtccagcgccagcacgccaagccctgccggggtctcacagcccycctgagaaacacaaacatgcccatgttcataaataaacactgttgtccttcttgtttttttttttttcctaggaattgctacacacgagttcccttttctgcacctcagtctgtggaggcagggctgtatttatttatttattttgctcgtccattctccttgaaggctatttccctctcgtcatcttttggagctgtcaccctttgtagatcattcttattaagcattaacttggtgaatggatgagcatcacttgggaacagctctgggatattacaaaacataaagcagtcagtgcaaacatctgcaaaatttggcaatccactgtggtttcaatgagctaggggccaagtccttgacaggccttgaggtccttagagaacactgcacaggaaagatttatttgcggaaagggtgagaaatgtcactttgcactt

SEQ ID NO: 789988 - DNA, 618 bp, Homo sapiens
tagctctgggatcagtgtgcttcctccatagttaaacttttcttgctctgggaactgaccctttttagctatcaaattgatccatgtttttgtaagagctcaccttggtccatctatacatttcatctccacctgagtccagcgccagcacgccaagccctgccggggtctcacagcccccctgagaaacacaaacatgcccrtgttcataaataaacactgttgtccttcttgtttttttttttttcctaggaattgctacacacgagttcccttttctgcacctcagtctgtggaggcagggctgtatttatttatttattttgctcgtccattctccttgaaggctatttccctctcgtcatcttttggagctgtcaccctttgtagatcattcttattaagcattaacttggtgaatggatgagcatcacttgggaacagctctgggatattacaaaacataaagcagtcagtgcaaacatctgcaaaatttggcaatccactgtggtttcaatgagctaggggccaagtccttgacaggccttgaggtccttagagaacactgcacaggaaagatttatttgcggaaagggtgagaaatgtcactttgcactt

SEQ ID NO: 789989 - DNA, 643 bp, Homo sapiens
ctggcggccggacttcaagatgtaatcacaaaatcaatccacatagactaaccgggcataggcttactaagaagacattccacaatgtcaggcacttaattaaggcgctctggctcctctgcccctgattgattcttttctttccctaacaggtgatgctggtcctctgggtggacaggccactccccagccagagacccccgtgcattcagagcctgcagtttggtgagaagaccaccagagggcacccgtgcatcatcccagtccccagggactggaccggaagaccaacgggatccctcttccagccccccagcgaacttgaaggagcagccaactcagcctgcattatctgctaggctgcattttgtttgctgagctccaggattcttctccgaccctcaggcatctcttgagcataatcagagactcctcccatctcctcaccatcccactttttgcaccttaktgcgttgtggagcagaggactgccccgcgccggggaaccagcctgtgctctggcctgagcacctgggagtcctagccacgctggcttgcttgacatagagtttcccactggaaattcaaaaacttcagaaatgggagtttttaaaaatgtaagcaccttgtgaaaagtagccca

SEQ ID NO: 789990 - DNA, 627 bp, Homo sapiens
ggtttggagtcactcactggaggcggaggacacctcctgggggcagtgaataggcaatgagagggactggaaggtcacatttgcagccagagcccaggctgccctggcatgtccggcaggaccatggcccgtcctcctattggayggctgcgtatcccctttccctcggtgaccacatttcaggacccttgatttctttgcaaatcccaccctgcctggccagtcccctcactctcatgccgaccgcagaaccaaggctgcgccccttcaaaggcagagttggggtaattttacttgacaagactgctgcctgccctcctcctctttcctcatctgccttcctctctcctgaccctgtttattattatcaggaaaaaacaataggtccacatttaaacttcaaagaaaagcacgggctcaggtttcaaacaactgcagaggcctgggcttgggacagctccatcccgctctctcacctgaactacggggaacctggggatggatttcaactctctgcagcccagcactcagggtcaaggtgaggcccagtctgtgaccacggaggaattctggaatgtggtgatgaccaacaggaattttatgagtgtccctctgtggaggagcctg

SEQ ID NO: 789991 - DNA, 627 bp, Homo sapiens
ggtttggagtcactcactggaggcggaggacacctcctgggggcagtgaataggcaatgagagggactggaaggtcacatttgcagccagagcccaggctgccctggcatgtccggcaggaccatggcccgtcctcctattggacggctgcgtatcccctttccctcggtgaccacatttcaggacccttgatttctttgcaaatcccaccctgcctggccagtcccctcactctcatgccgaccgcagaaccaaggctgcgccccttcaaaggcagagttggggtaattttacttgacaagactgctgcctgccctcctcctctttcctcatctgccttcctctctcctgaccctgtttattattatcaggaaaaaacaataggtccacatttaaacttcaaagaaaagcacgggctcaggtttcaaacaactgcagaggcctgggcttgggacagctccatcccgctctctcacctgaactacrgggaacctggggatggatttcaactctctgcagcccagcactcagggtcaaggtgaggcccagtctgtgaccacggaggaattctggaatgtggtgatgaccaacaggaattttatgagtgtccctctgtggaggagcctg

SEQ ID NO: 789992 - DNA, 636 bp, Homo sapiens
aactgtacctattaaacactaactgcccagttttttccctgtgtgcccaccaagcctagtggttttaaaggcctatattttctttatttccatgctgctgtctgctagtcttccataaaatctttcagaaaacagcctatctcagctrtgctaggagaaaggccttttttttccccacatttgaaccagagctacaaaataggcctttgggaggccagtgtggtgactgcagtagaaatagtgagacaactcaggggacaggagaaactcaggagggagagtgaggcccaccaggctcacctgcccttcattacccagaaatagctcaaagatatgctccagcctagctgtgaaccccagggagtctgcacttactttcactggacttggaagctaatattcaagctctgaacttgagaggaatctcagccaatacccatagcagcttttggctgtcccataattctaggtttgaacacaataaagactcggcggtatgacagtttcttagtcccttgattctatgccttagaaataaaaaaaatgtaaaattggaaggtgcaaacaactgagataaaggggcagagtggaaagaagtgggagtgtcataaaccaaagctgcaggtaatgccatgg

SEQ ID NO: 789993 - DNA, 593 bp, Homo sapiens
catagctcaatgtaacctcaaatccctgagatcaacaatcctcctgcctcagcctccccagtagctaggactacaggtgtgcactaccatgcccagctaattaaaaaaaatttttttttgtaggccgggcatggtggctaacacctacaataccagtactttgggaggccaagccgggtggatcacatgaggtcaggagtttgagacmagcctggccaacatggtgaaaccctgtctctactaaaaatacaaaaattagctgggcatggtggtgcacacctgtaattccagctactcaggaggctgaggcatgagaatctctcgaacctgggaggcagaagttgcagtgagccgagatcatgccactgcactccagcctgggcaacagagtgagactctcatctctaaaaaaaaaactttagaatgggggtctcactctgttgcccaggatggtcttgaattcctggcctcagacaatcctcctgccttggcctcccaaagcatttggattacaggagtgagccactatccccagcctcatttcattattgaatcattctttcatccatttcctgtgcaatgctacatgctga

SEQ ID NO: 789994 - DNA, 593 bp, Homo sapiens
catagctcaatgtaacctcaaatccctgagatcaacaatcctcctgcctcagcctccccagtagctaggactacaggtgtgcactaccatgcccagctaattaaaaaaaatttttttttgtaggccgggcatggtggctaacacctacaataccagtactttgggaggccaagccgggtggatcacatgaggtcaggagtttgagacaagcctggccaacatggtgaaaccctgtctctactaaaaatacaaaaattagctgggcatggtggtgcacacctgtaattccagctactcaggaggctgaggcatgagaatctctcraacctgggaggcagaagttgcagtgagccgagatcatgccactgcactccagcctgggcaacagagtgagactctcatctctaaaaaaaaaactttagaatgggggtctcactctgttgcccaggatggtcttgaattcctggcctcagacaatcctcctgccttggcctcccaaagcatttggattacaggagtgagccactatccccagcctcatttcattattgaatcattctttcatccatttcctgtgcaatgctacatgctga

SEQ ID NO: 789995 - DNA, 504 bp, Homo sapiens
gtgactaggactggccaatgatacataagtgaaagtctggtccggggattctagaaataattttgccctctacaaagagagaaagacatcatccaaaacaaataaaaacatacatgcacacaaagacttgtccccgagtgttcagggcagctttactcayaccagcccgtattagtccactttcgtactgtgtccggaattggcgggtttttggtctcactgacttcaagaatgaagccacggaccctcgcgatgagtattacagttcttaaagatagtgtgtccagagtttgttccttctaatattcggacgtgttgagtttcttccttctggtagcttcatgatctcgctggcttcacgactgaagctgcagactttcccggcgaatgtcacagctcttacagcggcacatccgcagctgtttatttctcttggagagctcatggtcttgctggtctcaggaatgaagctgcagactttccccttgagtgttacagctcaaa

SEQ ID NO: 789996 - DNA, 504 bp, Homo sapiens
gtgactaggactggccaatgatacataagtgaaagtctggtccggggattctagaaataattttgccctctacaaagagagaaagacatcatccaaaacaaataaaaacatacatgcacacaaagacttgtccccgagtgttcagggcagctttactcacaccagcccgtattagtccactttcgtactgtgtccggaattggcgggtttttggtctcactgacttcaagaatgaagccacggaccctcgcgatgagtattacagttcttaaagatagtgtgtccrgagtttgttccttctaatattcggacgtgttgagtttcttccttctggtagcttcatgatctcgctggcttcacgactgaagctgcagactttcccggcgaatgtcacagctcttacagcggcacatccgcagctgtttatttctcttggagagctcatggtcttgctggtctcaggaatgaagctgcagactttccccttgagtgttacagctcaaa

SEQ ID NO: 789997 - DNA, 504 bp, Homo sapiens
gtgactaggactggccaatgatacataagtgaaagtctggtccggggattctagaaataattttgccctctacaaagagagaaagacatcatccaaaacaaataaaaacatacatgcacacaaagacttgtccccgagtgttcagggcagctttactcacaccagcccgtattagtccactttcgtactgtgtccggaattggcgggtttttggtctcactgacttcaagaatgaagccacggaccctcgcgatgagtattacagttcttaaagatagtgtgtccagagtttgttccttctaatattcggamgtgttgagtttcttccttctggtagcttcatgatctcgctggcttcacgactgaagctgcagactttcccggcgaatgtcacagctcttacagcggcacatccgcagctgtttatttctcttggagagctcatggtcttgctggtctcaggaatgaagctgcagactttccccttgagtgttacagctcaaa

SEQ ID NO: 789998 - DNA, 504 bp, Homo sapiens
gtgactaggactggccaatgatacataagtgaaagtctggtccggggattctagaaataattttgccctctacaaagagagaaagacatcatccaaaacaaataaaaacatacatgcacacaaagacttgtccccgagtgttcagggcagctttactcacaccagcccgtattagtccactttcgtactgtgtccggaattggcgggtttttggtctcactgacttcaagaatgaagccacggaccctcgcgatgagtattacagttcttaaagatagtgtgtccagagtttgttccttctaatattcggacgtgttgagtttcttccttctggtagcttcatgatctcgctggcttcasgactgaagctgcagactttcccggcgaatgtcacagctcttacagcggcacatccgcagctgtttatttctcttggagagctcatggtcttgctggtctcaggaatgaagctgcagactttccccttgagtgttacagctcaaa

SEQ ID NO: 789999 - DNA, 486 bp, Homo sapiens
gcttcccctagtggatcccgcaccagggctgtgggtggagctgcctgccactcccgcacctcccgcctgcactcctcagctcttgggcagtccatgggaccgggcgacgtggagcagggggtggcgcccatcagggaggctcaggctgcrtaggagcccactgcgggggtgctcgggcatggcaggctgcaggtcctgaaccctgccccatagggtggcagctgaggccccacaagaattcgagcctggtgtggtcccgccagcagtgctgggggacccggcaccccctctgcagctgctggtccgggtgctaagccctccactgcccggggccagcggcaccggccagccactctgagtgaggggccgcagagcccaggcccacccggaactcgagcgccgaatgcagcccaggttcccgccggcacctcttcctccacacctcccagcaagcagagggagccggctctagcctcagccagccca

SEQ ID NO: 790000 - DNA, 613 bp, Homo sapiens
caagtccacacccaactcaggagcccagctggcttcccctagtggatcccgcaccagggctgtgggtggagctgcctgccactcccgcacctcccgcctgcactcctcagctcttgggcagtccatgggaccgggcgacgtggagcagggggtggcgcccatcagggaggctcaggctgcgtrggagcccactgcgggggtgctcgggcatggcaggctgcaggtcctgaaccctgccccatagggtggcagctgaggccccacaagaattcgagcctggtgtggtcccgccagcagtgctgggggacccggcaccccctctgcagctgctggtccgggtgctaagccctccactgcccggggccagcggcaccggccagccactctgagtgaggggccgcagagcccaggcccacccggaactcgagcgccgaatgcagcccaggttcccgccggcacctcttcctccacacctcccagcaagcagagggagccggctctagcctcagccagcccagagagaggctcccacagtgcagcggcaggctgaagggctcctcaagcgtggccagagcggacgccgaggccgaggaggtgctgagagtgagcaagg

SEQ ID NO: 790001 - DNA, 405 bp, Homo sapiens
tcaggagcccagctggcttcccctagtggatcccgcaccagggctgtgggtggagctgcctgccactcccgcacctcccgcctgcactcctcagctcttgggcagtccatgggaccgggcgacgtggagcagggggtggcgcccatcagggaggctcaggctgcgtaggagcccactgsgggggtgctcgggcatggcaggctgcaggtcctgaaccctgccccatagggtggcagctgaggccccacaagaattcgagcctggtgtggtcccgccagcagtgctgggggacccggcaccccctctgcagctgctggtccgggtgctaagccctccactgcccggggccagcggcaccggccagccactctgagtgaggggccgcagagcccaggcccacccgga

SEQ ID NO: 790002 - DNA, 595 bp, Homo sapiens
ggaggactgacacctttccatgcagtcctctaaccattaacatggagaactgacgcctttccatgcagtcctctaaccattaacacggagaactgacgcctttccatgcagtcttccaaccatcaacacagaggagaactgacacctttccatgcagtcctctaaccatcaacacagagaactgatgcctttctacactctaaccataaacacagaggagaactgatgcctttccatgcagtcctccaaccatcaacacggagaactgacacctttccatgcagtcctctaaccatcmacacggagaactgatgtctttccatgcagtcctttaaccatcaacacggagaactgacacctttccatgcagtcctctaaccatcaacacggagaactgatgcctttccatgcagtcctttaaccatcaacacagagaactaatgcctttccatgcagtcctccaaccatcaacatggagaactgaggcctttccacgcagtcctttaaccatcaacacggagaactgacgcctttccatgcagtcctccaacaatcaacaaggagaactgatgcctttccatgcagtcctttaacc

SEQ ID NO: 790003 - DNA, 594 bp, Homo sapiens
tcagtttgcaagaaataacgaaatctatccttactctacaatcccaaatagactctttggcagcagtgactctccaaaaccaccgaggcctagacctcctcactgctgagaaaggaggactctgcaccttcttaggggaagagtgttgtttttacactaaccagtcagggatagtacgagatgctgcccggtgtttacgggaaaaggcttctgaagtcagacaatgcctttcaaactcttatacgaacctctggagttgggcaacatggcttctcccctttctaggtyccgtggcagccatcttgctattactcgccttcgggccctgtatttttaacctcctcaaatgtgtttcctctagaatcaaggctatcaagctacagatggtcttacaaatggaaccccaaatgagctcaactaacaacttctaccaagggcccctggacaaacccactggccctttcactagcctaaatagttctcctctggaggacactacaacttcagggccccttcttcatccctatccagcaggaagtagctagagcggtcactgcccaattcccaacagcagttggagtctcctatttagag

SEQ ID NO: 790004 - DNA, 615 bp, Homo sapiens
atcttgattgttttcagggaagggggcagggttgagggcttcagcaaaggggcccacaaaggtggacgtgttccaccagtaacttgctctctagtgactgaggagtcaccaaaggagccacaggcagcaaagacccagctgcccagaaagcgtggctgccgggaggccgctctrtgtgccgcttcctcctgaggatgaaagctaagaagtaggcgtgcctccggccaaacctggcttttagtgttattttgtggggtcatccattctgcctcacctctgcaagggatggtccgggccacgctggaaacatcgtgcaaagagactctgccagttagggccgctgagccccatctgcacagctctaggttcttgccaaaacccattcccagtcattggccaaggctttatttgaagacagtctaaggagtgctcagatcccaggtgactgacctccaaaacacatttttttctttttctttctttctttttttttttctttctttctctcttttttttttttttttttttctgatggactctcgcccaggctggagtgaagtggcatgatctcagctcactgcaacctctgccccccaggttcaagcaattcacctg

SEQ ID NO: 790005 - DNA, 574 bp, Homo sapiens
atgtcaaagagacccttagaaatacgcaaaagactagatctgcaacctgcaaaacatacacagaaaactaaacaaagaaacgagaattactaattctcgaaaacaaaatattagaaaggtaagaacagtcatagcatacaacgtggctctgctccraatattattcgcctcgtcatgttaccctgaacaccgatctcagtgaaaccagggtggaactcagccatggggacgacaggcctaggcatttatgcaggtcaaggggccaggggaggaaaacagcaccagccccctctttctctgtgggagtcccacattgatatcacccccaattaaggaaaaacaaaaaaaaagggcacttatttagagacacacaggcaaatacctacaaagcaccaacggaggagcaggacagccaaatacaatcctccagcaagatcgccccctcagccccgcaggacaccaaacttaacaactatccgcattagaaagcactccttaagaaccagcactcagaagtcatggatgctagaggggacggatgcccccagttactctgatatgattatgacgcatt

SEQ ID NO: 790006 - DNA, 617 bp, Homo sapiens
ggtcaaggggccaggggaggaaaacagcaccagccccctctttctctgtgggagtcccacattgatatcacccccaattaaggaaaaacaaaaaaaaagggcacttatttagagacacacaggcaaatacctacaaagcaccaacggaggagcaggacagccaaatacaatcctccagcaagatcgccccctcagccccgcaggacaccaaacttaacaactatccgcattagaaagcactccttaagaaccagcactcagaagtcatggatgctagaggggacggatgcccccagttactytgatatgattatgacgcattgtatgtctgtatcaagacagctcgtgtaccccataaatatagatgaactatgcaccataaaaatcaaaacaaaaaaagaactagtggaaaaaaattaaaagtggccgtccctactgttttttcctaatagcaggtctcagcgaatcacctgactttaagtgaatgtataaatcactgaaaaaaaaaacatttttaaaaggtaaagcatcaaagcaaagaggtcacaacagatcctcaataaggagtagctgtaatattattccaaaaatatttaatacttatctatttaaatgtg

SEQ ID NO: 790007 - DNA, 617 bp, Homo sapiens
ggtcaaggggccaggggaggaaaacagcaccagccccctctttctctgtgggagtcccacattgatatcacccccaattaaggaaaaacaaaaaaaaagggcacttatttagagacacacaggcaaatacctacaaagcaccaacggaggagcaggacagccaaatacaatcctccagcaagatcgccccctcagccccgcaggacaccaaacttaacaactatccgcattagaaagcactccttaagaaccagcactcagaagtcatggatgctagaggggacggatgcccccagttactctgatatgattatkacgcattgtatgtctgtatcaagacagctcgtgtaccccataaatatagatgaactatgcaccataaaaatcaaaacaaaaaaagaactagtggaaaaaaattaaaagtggccgtccctactgttttttcctaatagcaggtctcagcgaatcacctgactttaagtgaatgtataaatcactgaaaaaaaaaacatttttaaaaggtaaagcatcaaagcaaagaggtcacaacagatcctcaataaggagtagctgtaatattattccaaaaatatttaatacttatctatttaaatgtg

SEQ ID NO: 790008 - DNA, 531 bp, Homo sapiens
tgttgattatcaccattcaattagacagtacctattgaacactctctatgcctatgcgctatgcttagcatgaaaccaagcagatgctaaagtaaatgccaccccctccttcttcaaaaatgtatggctaagtgagaaaaacaaataataaaaaccagaaggtggtaaacactaagagtagatgcaagtaccatgggatcccggtacayaacctataacaatattagaataaaatttgaggaaaataaatatttgcaaactatgccaagtgtgtatttgatctcaaattcacttagaaaatatttaaaattgtttttccacagttgaagtctatgtaaatattttgtacaaatatagaggaaatatgccaaatataatttctctccttaacgctagacaaaggttaattttcctaatcttcccaggaagtttcttgatttcctatcggtaaaactctcttcagtcaacatgtgtatgcaattttcccattataacagactatatcatgcgtaccactagacagcaaattgt

SEQ ID NO: 790009 - DNA, 562 bp, Homo sapiens
aaataaataaataacagtccttataaagtatttttgattcatgaatattatacttgtgacaattgtaacaaataaaactataagaaactgagaaaggacagtgctaccaagattggggcacattcagatgctgtctgcctatagaggcaagacagatgggcatarctctgagacagttatctgtctgctaaggtccatttcaggacctgacacagctgacattttgaatggtgtcttggatgatgagaaaacaaataatgtgtattaagtttgtattgacatcaacttgaagggtgtagagggctggacacagtttcaaatgtcccctatgagtcagagttaaaaatagaatgatgttcaatagtaacaaagattggtcttttcaattaggggggaaaagcagtaaggtacaaaaggcaaggaaactcttctgttaagactcccaatagaaggaaggtccagcctccttctgcaccctcccagtctccacatcattttaattactttgatgtcttccctatgcagctgaaaataaacattgaataatcaacgtattttaaat

SEQ ID NO: 790010 - DNA, 617 bp, Homo sapiens
tgaaatacacactaatttggatgtgaccaaaagtgtatgtttaaataccttgacatttattttccagaaatcaaaccacagatgaatctatggaaktccaggcaaaccagagggtagttgacagtttaaaggccatcaaagttggccaaatcgttgttttatatcagaattggtggtaaatccactgctgaggctctagggccctaagactcagaggcgaaacctacaccagatggctggcaatcaaggaacctggcacagtcacctgcaaatggcccctgaagcacaaagtagcagaaaagagagaatttacagaaccccctgtaagatcatcatgcaaatcttctggaccttggtgaatcccaaataaataaataaagggataaggaaataagcaaataatgataaatgaaagttttgattctgcatggggaagatgatatttgcagccttggggtaattggagcaatttagttggtccatgactgtaaacacattttcccccagtatagaataatgaagtacaaagcaaaatttaaaagctctttataaaacaccagcctctccactggattctgttccatctctatatttggctgtattataattctctgcat

SEQ ID NO: 790011 - DNA, 616 bp, Homo sapiens
caacgccggtgaggctgcctcttctttcaagggtggttcttcgtccttcctgagccactcaagctttgcctctgagtcccgcagctgcagcctggacccggtgttccacgtattaaatgtcccccactgaaggctgtgcatcatcatcaggagatataaacgccatcactcactggattcttcctggcagtgctcagctccccgtgcagcgcctgctgccatccatccagtgcataccttcgccactccagggatgcttgcagtgcggcctccccttggaggctgtcctctgtgcccctcctcactctactctttaattagaatccaatattttggccaggctcgatggctcaggtccttcttatagactcactgaatattgaaatcggtaggacacacctttttgcttatttattgttctcattkagtgcttatctctggtctttcctgtccttttggagtcaccaaaatttgataacagaaactttgacttccatttctgatcccatgtgatcttcccagtaagtctaaccctaggatgtgatttgtatatctgttaccctctcacccacatactccctactaagataacctgaagcataactgagttgtccat

SEQ ID NO: 790012 - DNA, 576 bp, Homo sapiens
aatccttattgcactttattggttctatactcttcacactttcctaagcaaaattgcttttccaattggttccttaaaagatttaaattttcatttatatattggcatttgcacaatgctacctagaaaaatgtttactgattataacatagtttacttgtttagctccaacagayttaaagtgctgctttttatgagaactgaattgtccttcaaattcagtatttatatcattgaacttcagaaaaattgcaatgagtaaagtgaagaactgaaaaaacagaaaacaagtcagtaataagatggaaagctgaatttttttctttgatgaagagtatcgcagctcagttctgctccttttattctcagtcattatttttctattccacacccttcagtggtttcaacatttgtacatattaaagttatattaaagtccaagtatctcactatatatatagtcaagtatttgagaaacagatgctgagacaaagattcatgtgcaagtaacttggtgagaaagtaatatcaaaagaaattgatagggaaatggaggaagcaaaggagagaaagaga

SEQ ID NO: 790013 - DNA, 569 bp, Homo sapiens
agcttacttaaaacattttatagttacaatttaaaattaagttgataactatttaactttaatcacatacagtaactctccactttcatatccctcctacacttcatggtatcaatatcacaagttacatctttttatatcatttatctatggaaatattttttattttttatattttggttatttttatatgttttaattaaacttttaaaacagaattggaagttatttatacaatatcattacaatgttacaatattttgtatttttacatatatttattttcatcaatgagttttawactttcatatacttctgtgttgctatttattacttctgcccccccccccactcttctgattggataatatgaaatgttactcttggagtattctcttgtatatgaaacgttgtttttgtcttgctactttcaaaattccctttgtctttgactttgacaatttgattataatgtgtcttggtggacttctttgggtttatcctgtttggcaatttattagatcttttgaatctagatgttcatttctctcccaaatttgagcaatttt

SEQ ID NO: 790014 - DNA, 584 bp, Homo sapiens
catagctcaatgtaacctcaaatccctgagatcaacaatcctcctgcctcagcctccccagtagctaggactacaggtgtgcactaccatgcccagctaattaaaaaaaatttttttttgtaggccgggcatggtggctaacacctacaataccagtactttgggaggccaagccgggtggatcacatgaggtcaggagtttgagacmagcctggccaacatggtgaaaccctgtctctactaaaaatacaaaaattagctgggcatggtggtgcacacctgtaattccagctactcaggaggctgaggcatgagaatctctcgaacctgggaggcagaagttgcagtgagccgagatcatgccactgcactccagcctgggcaacagagtgagactctcatctctaaaaaaaaaactttagaatgggggtctcactctgttgcccaggatggtcttgaattcctggcctcagacaatcctcctgccttggcctcccaaagcatttggattacaggagtgagccactatccccagcctcatttcattattgaatcattctttcatccatttcctgtgcaatgct

SEQ ID NO: 790015 - DNA, 584 bp, Homo sapiens
catagctcaatgtaacctcaaatccctgagatcaacaatcctcctgcctcagcctccccagtagctaggactacaggtgtgcactaccatgcccagctaattaaaaaaaatttttttttgtaggccgggcatggtggctaacacctacaataccagtactttgggaggccaagccgggtggatcacatgaggtcaggagtttgagacaagcctggccaacatggtgaaaccctgtctctactaaaaatacaaaaattagctgggcatggtggtgcacacctgtaattccagctactcaggaggctgaggcatgagaatctctcraacctgggaggcagaagttgcagtgagccgagatcatgccactgcactccagcctgggcaacagagtgagactctcatctctaaaaaaaaaactttagaatgggggtctcactctgttgcccaggatggtcttgaattcctggcctcagacaatcctcctgccttggcctcccaaagcatttggattacaggagtgagccactatccccagcctcatttcattattgaatcattctttcatccatttcctgtgcaatgct

SEQ ID NO: 790016 - DNA, 637 bp, Homo sapiens
aactgtacctattaaacactaactgcccagttttttccctgtgtgcccaccaagcctagtggttttaaaggcctatattttctttatttccatgctgctgtctgctagtcttccataaaatctttcagaaaacagcctatctcagctrtgctaggagaaaggccttttttttccccacatttgaaccagagctacaaaataggcctttgggaggccagtgtggtgactgcagtagaaatagtgagacaactcaggggacaggagaaactcaggagggagagtgaggcccaccaggctcacctgcccttcattacccagaaatagctcaaagatatgctccagcctagctgtgaaccccagggagtctgcacttactttcactggacttggaagctaatattcaagctctgaacttgagaggaatctcagccaatacccatagcagcttttggctgtcccataattctaggtttgaacacaataaagactcggcggtatgacagtttcttagtcccttgattctatgccttagaaataaaaaaaatgtaaaattggaaggtgcaaacaactgagataaaggggcagagtggaaagaagtgggagtgtcataaaccaaagctgcaggtaatgccatggc

SEQ ID NO: 790017 - DNA, 523 bp, Homo sapiens
atttaaaatgttaccttttggataggttggtttaagccagaaaataggaaggtcaccgcagagttctaacaccttagaactcaagaagctgttgtccttcacaggctgatctacagccacccagataagagaattttcttcatatttgactggcatgatcttgccttcctgaaagtaaaaacgattscatttgagcaaagaggacagtgaaacaaattgtattaagagtcatgtgttgctaaaaggttattttgccttataaaaaattaatgagaattccgagcatgcgtgtgtacatgtgtgcactttaaggttctaatctcttctctttgtagctcttttcacaatattcagcacgcctcctcctgttgccctgcctctggatagctgtaccatgtgaatataagtgccctgagttgaagtgaaaattacttgataccaactttgagatttaggttaatctgatgtttttgatcaaagatgtttttgaggaaaagcaattgaacgaaccctggaatcctac

SEQ ID NO: 790018 - DNA, 562 bp, Homo sapiens
tcactgcaaacaccaaaataagcacaccttccactggcatctttgctactctcaccctccattaggaccacaaagaatccagtcggctgcctcctggactcatggagatccctctgcccttccctaataatttaccccrgagctgttaactccagaatgacccatccctgttctttaagctggtaatgaaaaataatcaaacaaacagcgaatactggattctcatgtaggtgagggcatgtcacagactctctgacccttacttgatgctcctgtgttgaccacctgtttcccggatcagaggccctggcagagtgggaggagccacgatctggcacagtgctaggagttgcctccatggtttatctttgatttcagtctattgtgacaaaggttttgctattcttgccaagcatgcagaacaaatataaaagtaatttgcactttccactttaggtagctggtttcatgtacgaccaaatgtcaagtgctgatatgtttctgttgcgatctgcttttcccctgggatgtcaagacttcaaaagcaggacgcgcactatgt

SEQ ID NO: 790019 - DNA, 608 bp, Homo sapiens
gcaatcacattagaactcaggattaagaagctcactcaaaaccacacaactacatggaaactgaacaacttgctcctgaatgactactgggcaaataataaaatgaaggcagaaataaagatgttctttgaaaccaatgagaacaaagacacactgtaccacaatctctgggacatatttaaagcagtgtgtagagggaaatttatagcactaaatgcccacaagagaaagcaggaaagatctgaaatcgacaccctaacatcacaattaaaagaactagagaagcaagagcaaacacattcaaaagctagcagaaggcaagaaaaactaagatcagagcagaactgaaagagatagagacacacaaaaaaaaaaacttcaaaaaatcaatgaatcyaggaggtggttttttgaaaagatcaacaaaattgatagaccactaggaagactaataaaaaagaaaagagagaagaatcaaatagactcaataaaaaatgataaagcgtatgtcaccactgatcccacagaaatacaaactaccatcagagaatactatgaacacctctacacaaataaactagaaaatctagaagaaatggataaattcc

SEQ ID NO: 790020 - DNA, 565 bp, Homo sapiens
tggggtttgggttagggccttctttagggcctggaaagccacttctgtttcaggtgtccatcttactatatgggtattggctttctgagtttccttaattaatgtacataatggcctggctatttcactgtatctgggaatccatattcggcagaaggctgttatgccaaggaaccctcttagttgctttagggttttgggatgaggataagccagtatacgctggatacrttcctctctgagggccctggtgactttggataattttagccctaagtatttaacctgctgtgagcagagctgagccttttgtttggagccacaggtagcgaggaaatttaagagcgcttgggtggcttgatgccacaaggtttctgaatgggtggctataattaaatcatccccatactgaagaacaagaatgtccagctatgacaattggctcaagtcttgggctaatgcctggccaaatagacgggggctatccttgaacccttggggtaaaacagtccaggtgagttgagacattggatcttcaaaggcaaacaagaattgagagtcagga

SEQ ID NO: 790021 - DNA, 646 bp, Homo sapiens
cctgccttgggccacaggggatcccactgccctaaagagtgagtcccaggccaggcagcattcaccataagctgacttatgagaccttggggctcaaagaaacgtcagtggtcatctggcagtactcctcatggctaggggtggtggtggatatgaggtgaggctcctctgcctttgaaaggagagaaaaaagtgagaaggactgcgtcttgtggtttaagtgccagctctgctgcaacacaacagtataccaggtagacatctaaggcttttgactctagtccytaactccaagatggaacttctggacccatttgggggttggtggacctcaccatcctgaagggaaagacataggcctggctggctttgccacctgctgattgtagggtcatagggccttgaacgaacataggcagcagccagagagtggtcagagcagacactgggtgagacccagtgctgtgctggcttcagatctgacccagagcatagtggtggtggttacaggggtgcttgtatcactccatccccagctttaggtgtatcagaacagagacaatgtgtttgctcttgcttttctagttcttttaattgtgatgttagggtgtcaattttggatctttcctgctttctcttgtgggca

SEQ ID NO: 790022 - DNA, 633 bp, Homo sapiens
tgacctccctgaatctcttgatttcctgtaagtttgtagcttgtcacaaagctgcagccagctctgtatcccagtccctattctagtataaaatatactagtatattttatattctagtataactttgatgaataaaatacaattttagatctacagaggaaaaacagacccaaatctaattaaaatacattctccttctttcctgacacattgctgtcttcttgccctcctgattcctggggattgtccactttctacagggctagtattatgcttttggcttaggytctgttttctagggagctcatactaagataccatgtcattggcttattgtgagggttaaatataaatataaagtgctcagaacagtgcctgccatggagtagatacttacagtatttactagctagctactgttattgtgggaatagtaaatgaaagtacagaggatggtctaagttgagagaagaaggattatttaagaatttcaaagaaatgctatttaagccaaaaaccttaaggttgggtaggattttgcagatgtgggatttagggtgggacacatttatggtgactatgtcaggcaaaggaaacatatttgaaagcctagggataagaaagacaccagg

SEQ ID NO: 790023 - DNA, 548 bp, Homo sapiens
gaggatggtctaagttgagagaagaaggattatttaagaatttcaaagaaatgctatttaagccaaaaaccttaaggttgggtaggattttgcagatgtgggatttagggtgggacacatttatggtgactatgtcaggcaaaggaaacatatttgaaagcctagggataagaaagacaccaggtttgagaaatcgaatgcattaataagtaaaatttctatctgttctattcagttgttatttatatatgagttttgcagagacagtaagcttatcaagattccattttcttttccawatttcctaatcctcttgcagttttggataataaaatgtggagaaagtgacatgtgtcacttcagagctgaggcaggtaaggtccatattcttccactgatgcagtgatcagagaccacatcttccacatgaatggcagacaacatggtaaagctcccaccacccaattccccaggtagagcagaggttcccactgaactatgtgtagtgagaacaagaaataatcccttgttgatttaagcccaccata

SEQ ID NO: 790024 - DNA, 565 bp, Homo sapiens
atatatgtttatacttcttaatattacaataataaaatctcttaatgaggaaggggaagaggacagggctgaatcctggaggcaccccaacatttagagaatgtgtggaggaggaagagaaagagccaacgagaaaacatgaaaaggtaactagtggcagcaaggagaaatctaggagcatgtggtatcccagaagccaagagaagaaattgtcccaagaaggagggaatagtcaacagtgtcaaacactgtagagacatacagcaagacaagaagaaataattgaaaaatastgactactggatttcaaagatggaagactggtgatctaaatatgcagcagaaggttgggatggaagtcctactagagtgggtcagagagagaaatggcagtgaaaatgtgcaggaaataaaggcaaaccttttggagcacttgtactacaatgagaaacagggaaatggcctggtagctaaaggaagatatgtggtagaggaagtggggaggtttgggtggtttcaaatggatcatcctttaggctattgggaaaatttaactagaaaagaa

SEQ ID NO: 790025 - DNA, 611 bp, Homo sapiens
tttcaataaaagatacatatatcttttattgttatatatcttacatattatatgtcatgtatacttataacatttttgttatttatattatcaaaaatatgtatttcatatatacatatgtaatatatatgtaatatatatgtcctgataaaagaaaaaatattataaattactgtgacttcatttcatagttgttaargccctggtatacaataacagtaagtgatgttacactgttgattaagaaaactgagctactccagaatatttttcgtctttagaatcttggctctaaatttttcagccaaataatcttttatttcttaggagatctgataacatgaataacaataatattaccaatgataaccataaaggctattatttattaagtttctctaatgcatcaaccatttttatctcattgtttacccctcaacaaccccataaggtaaatgttgttatcctcacttaacaaataggaagcactgagtttcgggaagactgagcagctcttgagtcaacacagctagtagagcttgaactcaagcctaggctgtgtgtctccaatgcccatgactttcccactaggctgggaaatttattttggc

SEQ ID NO: 790026 - DNA, 611 bp, Homo sapiens
tttcaataaaagatacatatatcttttattgttatatatcttacatattatatgtcatgtatacttataacatttttgttatttatattatcaaaaatatgtatttcatatatacatatgtaatatatatgtaatatatatgtcctgataaaagaaaaaatattataaattactgtgacttcatttcatagttgttaaggccctggtatacaataacagtaagtgatgttacactgttgattaagaaaactgagctactccagaatatttttcgtctttagaatcttggctctaaatttttcagccaaataatcttttatttcttargagatctgataacatgaataacaataatattaccaatgataaccataaaggctattatttattaagtttctctaatgcatcaaccatttttatctcattgtttacccctcaacaaccccataaggtaaatgttgttatcctcacttaacaaataggaagcactgagtttcgggaagactgagcagctcttgagtcaacacagctagtagagcttgaactcaagcctaggctgtgtgtctccaatgcccatgactttcccactaggctgggaaatttattttggc

SEQ ID NO: 790027 - DNA, 611 bp, Homo sapiens
tttcaataaaagatacatatatcttttattgttatatatcttacatattatatgtcatgtatacttataacatttttgttatttatattatcaaaaatatgtatttcatatatacatatgtaatatatatgtaatatatatgtcctgataaaagaaaaaatattataaattactgtgacttcatttcatagttgttaaggccctggtatacaataacagtaagtgatgttacactgttgattaagaaaactgagctactccagaatatttttcgtctttagaatcttggctctaaatttttcagccaaataatcttttatttcttaggagatctgataacatgaataacaataatattaccaatgataaccataaaggctattatttattaagtttctctaatgcatcaaccatttttatctcattgtttacccctcaacaaccccataargtaaatgttgttatcctcacttaacaaataggaagcactgagtttcgggaagactgagcagctcttgagtcaacacagctagtagagcttgaactcaagcctaggctgtgtgtctccaatgcccatgactttcccactaggctgggaaatttattttggc

SEQ ID NO: 790028 - DNA, 549 bp, Homo sapiens
gagggggttacatatgtggtatagggaaagggcggaaataatcctatggtgttggtttggaaatagaaatatatcagtatgagtgtgaactcatgattttttagaaagaattatatttcctctctctgtcctctgaagtgtctacagtgacacccccgtagcaaaaaacactcctggtgcccagggcttgatttctaaataccattctgcctaagaggaaggagggctccttgaagaaatggcagaattcagaaacagggtgaaaacagtactgaaagtaaggaagtactcaaaaaataataatgacatatcaaaagtacataggagccagcttgaaggcacttccgttggccaatatgggacaatttgagcttcaaaataaaraatatagggagtgtatgtccatttttaaaaggccataagctcatcctgatactaaagagagtgaggttcaggatggggatggaaagctcttctttataaaagaataccaattaataagtatagaagaaatggcagaattagaaaatcatttcacagtctctgtgg

SEQ ID NO: 790029 - DNA, 543 bp, Homo sapiens
gcgtgagggtggcttgttttgtgaactgactccagggaataggtgtgggggctggaggagtatgaaacagggaaggaaagaagccccaacaaggttgagttgccaaactggctacttcagacaggatgacctcagagccacctgcccataggactgaagcaggcaattggcactgattccccgggcgccatctccaccatygggggtcttgtggagtgactatccccctggcattttcagttgcatatgcataaatgccagttcccaagaaggtcccgcagcaatgccagagaaccctgggaagaaggcgtaatgcagtggcctgaggtgaagcactttcagactagacctctatggagctggttgccacagtactggctggagcagaggtgggggagagcatgcgcggaggacaaggagaggtgcacctattctgatgcctttaaagtctcactgtcagccatgaggtaggtactatttcctccactttacagtggagacccaggaaggctcactgacctgcccaaaacccacatgcaaaag

SEQ ID NO: 790030 - DNA, 577 bp, Homo sapiens
ttttcatatttgggttttgaaaattgacttctgtagagagaaagatgaggattaggtctcttctattttccacctccaacacacacacacacacacacacacacacacacacacacacacactccttttatgtcctacttcctgctctcattctctcaacatagttatattataatttttggttaaataaaaagtgcttcaatgattgtgattttgaaaatgttattattcatggctgaaagctatgtaaagcactactataaatttttatttcttgctcagctttttcttttccctggagttattggttgccttgatttttaaaaacttgcttatttttgaaagacgcatctcatactctaaaccacactrtatactaattgtcaaaatcctttctacatgccttcagatttattaaatattctatcaattttatcttcttgaagaaatttctccaagagacttctaaccaatctgggctttattctgttccacagtagttgccgtctaagtctgaagcacagctggtatctgaggatttcaactctccaacagtctggaaagaccctgtctcttt

SEQ ID NO: 790031 - DNA, 669 bp, Homo sapiens
ctcttcctcctaaaccaattctagtccatgcacataacaaaagatcaaaatacatcgagcaaaaactgaaagaactgaaagaagagacagataaacccactattatagtaagagattgtagtacatgtctctcaataaatgaaagaacaaacagacagaaaatcagtaaagatacagaagacttgaacaacactaccaaccaaattgacctcattgacatgtatagaacactctgtctatccaacaacagcagaatacacatttttctcaaggtacatgggacactgagcaagatacaccatattttggaccacaaaacgagtcttaatacatttaaaatyatacaaatcataaaaagttttttctgaccacaatagaattacaatagaaatcagtaacagaaagatatctagaaaaatcctctatgtaaaaaccaaacaatgcactctaaagtaacccacaggagaggaaatgaaaataaatcaaaaagcactttgaagtgaatttaatttttaaagtgaaaaaaatgacatatcaaaattcatggtatgcagctaaagtaatgcttagagggaaattaaagtatcaaatgtctatgatagaaaaaagaaaggtctcaaattgatgatctaagcttctatgcttagaagttagaaaagaaaaataatc

SEQ ID NO: 790032 - DNA, 608 bp, Homo sapiens
tacaatagaaatcagtaacagaaagatatctagaaaaatcctctatgtaaaaaccaaacaatgcactctaaagtaacccacaggagaggaaatgaaaataaatcaaaaagcactttgaagtgaatttaatttttaaagtgaaaaaaatgacatatcaaaattcatggtatgcagctaaagtaatgcttagagggaaattaaagtatcaaatgtctatgatagaaaaaagaaaggtctcaaattgatgatctaagcttctatgcttagaagttagaaaagaaaaataatcccaaagtaaggagaagaaggaaataataaatataagagctgaagtcaatcaaatagaaagcagactaaaaaaatagagaaaatcaacaaagctagaagctggttctctaagaatakaaataaaattgataaatctctagccagattgaacaggaaaaaaagacgcaaatttcacatatcagaaatgaaacaaaggacatcacaagatattctacagacaataagaaaatataattacaaactttgtactaacactaattcaacaactttgatgaatgagtacatttattgaaatataactatcaaagctcactaaaaat

SEQ ID NO: 790033 - DNA, 489 bp, Homo sapiens
tgtgagtaatgcagcaataaacatggggctgcagagatcttttatatcctttgcatatatacacagaagaaggattgctggattatatggaatttatttcttttcttttcttttttattttaagagacgacctgtcactcaggttggagtgccatggtgcaatcatagttcactgcagcctcgacctctcaggctcaagcaatcatcttgcctcagcatcctgagtagctgggactacaggtatgtgccaccatgtccagctaatatttttactttttgtagaggtaggktctcactatgttgcccaggctggtcttgaactcctggcctcaagcaatcccttctgcctcagcctcccaaagtgctgggattacaggcgtgggccactgtgcccagcctctcataaggcagtttcatttttagttttatttttgcagagccttcatactgtcttccatagtggctgtgccagtttacattcccgtcaac

SEQ ID NO: 790034 - DNA, 636 bp, Homo sapiens
cctcgagaagagcaactccaagacacacaattgtcagattcaccaaagttgaaatgaaggaaaaaatgttaagggcagccagagagaaaggttgggttaccctcaaagggaagtccatcagactaacagcagatctctcggcagaaaccctacaagccagaagagagtgggggccaatattcaacattcttaaagaaaagaattttcaacccagaatttcatatccagccaaactaagcttcataagtgaaggagaaataaaatactttacagacaaacaaatgctgagagatttcctcaccaccaggcctgccctaaaagagctcctgaaggaagcactaaacatgtaaaggaacaaccagtaccagctgctgcaaaatcatgccaaaatgtaaagaccatcaagactaggaagaaactgcatcaactaacgagcaaaataaccagctaacatcatcatgacaggatcaaattcrcacataacaatatcaactttaaatgtaaatggactaaatgctccaattaaaagacacagactggcaaattggataaagagtcaagacccatcagggtgctgtattcaggaaacccatctcacctgcagagacacacataggctcaaaataaaaggatgga

SEQ ID NO: 790035 - DNA, 531 bp, Homo sapiens
tcatcccagctacttgggaagatgaggcaagagaaccgcttgaacccgggaggcgtaggttgcagtgagccaagaatgcaccactgcattccagtctgggcaaaagagcaagactccatctcaaaaaaaaaaaaaaaaaaaaaaaaaaaaaagagttaaagagagattttagcttatgcctaagtcagaaaagacagtgtttggagcctgtgtccagctgataactgtaacaaattctgagtttctacataaacccagagtataayccaaaatcactagccctatgaagatacagaaaaatgtgacccctagtcaagatatggcaatcagtaggaactgatccaaagatgacacagataaaataatttttaaaagaggtttttaagaagctatttcaactatatccaaaaatgtaaatgaaaatgtttataaaaagtacacaaatacaaaacctcagcagagaaacagaagctatgaaaattttagagctaagaaaatctgaagtaaaataatctctgaatgagcttaaca

SEQ ID NO: 790036 - DNA, 547 bp, Homo sapiens
ggaaaagacaaagatggatcctcttatagagaccccaaagactgagtacactgcttgaagttcttcccactgggaggttatcccttcaccagtgtccctccaggttgttctaatgtggaaatatagtattgtagctgcccactttcaagtaatgcctgcttatcacgcagaaccatctgaaaacratgctggagccttcttattctcagtcagttgctcataggatgctccccgtgagaacacaggtttgaactgggagaaagaagataatgaagcaagagtaggtgtcaccagaatctgggccacttcttcattcaacttacttatggctccctgccccttttctggtctccccagcttgaacttgatctcacatataccatttctatttgttgatggagtgttgcatgcatactattttgtcttggtggatcagatgacatccagttttttatctataactgaggtgcctggtaacttggtaatccataatcaaatatcaagtctctgccaaagcaatgctgtaaaccagaaattagttctcaaa

SEQ ID NO: 790037 - DNA, 621 bp, Homo sapiens
aaaataagaacacatagcagacttcaaaatttaatgagatggtgagttttttattcaagaaatgtaggcaagttcaattaaattttcgatttgatgaaagtccttgagcctgtgatactctgctgttttggtcctctcatcacccacattcaaattctcacctatttctaattattgcatggcttatttattaatatttgctacaaagtctcagcttctatcctaaagttttaggcagatattttcttaaactataycttcataccaaaaagaaagaaaaaatcttagcgaaattaagttaaattttgaaaattgttattaatttctttaccatttaatatcctcaaaaacagtttcatgtcttaaaaaaaaattctactcactcattggaagacaatatctcacatccagtgtgtgctcaaatattcattacaagtagtgaagcagtaaactgttgagaagaagcttttacagaccccttaaatcagaccacgtaagcaagtgactgcttccagtcagggaccaactggccaacctttatgccttcagaaagatgcccatgagctttctcttctcattgttatttttttttgtgtgtctttttaatcagaacacattttc

SEQ ID NO: 790038 - DNA, 584 bp, Homo sapiens
gtgagcctaattctggatgagattcatatttgaaccagcagactgcctaaagcacgttgctctcctggtgtgggtgggtcttatccaatcagtagcaggcctgaacagaatgaaaaggcttatcttctcctaagagagaatttcctcctgcctaaccaactttgaactggatcatcatatttttttctggcttcaaaactgaactgaaatactggctcttcctgaatctcacatcagcctgccttcaaatcagaactgtatcactggctctcctcaggccttgggagtcaaactggaactacatcattggctctcctgggtctctagcttgccaaaccctgaagatcttgggacttttaagcttccataatcatgggctacttttaattccttattgtaaatctctttccrtgtatatgttcatcctattggttctgtttctttggagaaccctatttcctgaaaaccactgttctactccccatcactatattaatatcattttgagaaagtcatataaattgaatattagtgcacataattttttgagtttatcataatgtgaacttcttccacataaaata

SEQ ID NO: 790039 - DNA, 623 bp, Homo sapiens
ctgtttctcgtaaactagctcctaaattatgccacattttttgaaaaaaataatatacacaggctatgtctgcaagtcaaactgatgagcccattctgaaggccaagttcagtaaaaataagtcaagccgaaagagaaaacttgactattgtaaaggttgaaccagatgtttgtatagagccagtccaatcatacggcataatttagaacttggcttatgtgaaacagatggccaaaggcctgtccttgcgtgctctgtgttctctgcttctattactaaatctgactaagttttatattttctgctttgttttgtttgggatcgttgtttgttgttgttgtttaactgacaatcattttagaagccaaacaagttgtgtttatcaatgtagcctttggaaaagatgacaaataactyggtgtggaagaaattggctttagatttctttttggctttagtttctagaaacctaaagcttataagtgaccggagagaaaataaaatgtttggaaacacctcctgaagcagataagagagttctgtggcaaccccctgtaaatatgcccacaattagaaaatatttacctgggaggaaaaaaagagagaccaggaaatcatccta

SEQ ID NO: 790040 - DNA, 632 bp, Homo sapiens
tggaacttgatggagaaagcaatggcttacgattcagcaggctttcttggagagtttacctaaagtctatgtggacggtggctcagctcacctctgagaacaatacgatcttcacttttcaatctttctgcagctctwattagtgccgcagggaaccatggatgaaaatggcttctcgtgttgatatccatttggggaataggatggatgcagctgcttttgctcaagggcagagttttgacttcaaagaccctgaagagaacccagaaggaaaactctcagaggttaatggactatattctttacctgggggatcgttgacaccacagcagtaaaagcgaagtcagtgtcgtgctgtcttgaaattagatgacaagaatgactgacaccaatagagctggaactgcacttggagcctgagtagccggtctcaggctaaccacacctgtgctgaccacagcgtggcccgtgttgttcatgaggcattctggctgtacctccacagggatgcaagacttccagtgagaggctgcttctgcaagaaaatacctgcctagaaatggtccgctttctcttcctaataaagtgataagctttcttagtccaatggtactaaatagaaacctttttct

SEQ ID NO: 790041 - DNA, 632 bp, Homo sapiens
tggaacttgatggagaaagcaatggcttacgattcagcaggctttcttggagagtttacctaaagtctatgtggacggtggctcagctcacctctgagaacaatacgatcttcacttttcaatctttctgcagctcttattagtgccrcagggaaccatggatgaaaatggcttctcgtgttgatatccatttggggaataggatggatgcagctgcttttgctcaagggcagagttttgacttcaaagaccctgaagagaacccagaaggaaaactctcagaggttaatggactatattctttacctgggggatcgttgacaccacagcagtaaaagcgaagtcagtgtcgtgctgtcttgaaattagatgacaagaatgactgacaccaatagagctggaactgcacttggagcctgagtagccggtctcaggctaaccacacctgtgctgaccacagcgtggcccgtgttgttcatgaggcattctggctgtacctccacagggatgcaagacttccagtgagaggctgcttctgcaagaaaatacctgcctagaaatggtccgctttctcttcctaataaagtgataagctttcttagtccaatggtactaaatagaaacctttttct

SEQ ID NO: 790042 - DNA, 632 bp, Homo sapiens
tggaacttgatggagaaagcaatggcttacgattcagcaggctttcttggagagtttacctaaagtctatgtggacggtggctcagctcacctctgagaacaatacgatcttcacttttcaatctttctgcagctcttattagtgccgcagggaaccatggatgaaaatggcttctcgtgttgatatccatttggggaataggatggatgcagctgcttttgctcaagggcagagttttgacttcaaagaccctgaagagaacccagaaggaaaactctcagaggtyaatggactatattctttacctgggggatcgttgacaccacagcagtaaaagcgaagtcagtgtcgtgctgtcttgaaattagatgacaagaatgactgacaccaatagagctggaactgcacttggagcctgagtagccggtctcaggctaaccacacctgtgctgaccacagcgtggcccgtgttgttcatgaggcattctggctgtacctccacagggatgcaagacttccagtgagaggctgcttctgcaagaaaatacctgcctagaaatggtccgctttctcttcctaataaagtgataagctttcttagtccaatggtactaaatagaaacctttttct

SEQ ID NO: 790043 - DNA, 423 bp, Homo sapiens
caaaaatatgcggaaattaaaccacattcctaaataacaaatgggtcaaacaagaaaccacaagagaaattagaaaatactttgagatgaatgaagatgaagacacaacataaccaaatttatgtaataaattatataataaaacatctatatgagaaaagtagatgccaaatcaataacctaatcttctaccttaagaaactagaaataaagaaccgcaaactaaacccatagcaagtagaaggaaagaaatgaagattagrgcaggagtaagtaaaatgaagtacagaaaaacagtagagaaaaatctatgaaacctaaagtcatttctttgaaaagatcaacaaaattgacaaattttagttagactgaccaaggacataagagactattcaaatcaccgaaatcagaaatgaaaagggg

SEQ ID NO: 790044 - DNA, 472 bp, Homo sapiens
cctcagcctccataactgcatgatcaatttccctaataaatctcctctcatccatccatccatccatccatccatcctattggtcctttctctctggagaaccctgactaatacattttggctactaccattcctctgaggaattaagtcctgtgtctctgacccagggcttatgtgtcttctgccagcatccctgagactgtagcaggctacctagttagcctgcaagtatgaggaaatctcagaactttcacagtcctgacaaatccttaaaayagttaggagctttaggaatagggagctatccagaatccaacgtctggatgatctgcatagaagacttcacgcaactgaaacttcaataagcctttttgccctcttttctatctaccatatatggaaggagaggcaccgaaggccagacctaggactcatgggagcaacttggagcacccagtgaccagacacttcc

SEQ ID NO: 790045 - DNA, 492 bp, Homo sapiens
ggttatggctacaaaatctaagcagaagacactggaccccaacaagcactttgctctgtgaacagtagctgtggctgtatcgggagaccaaccctctgagacagctgctgtgggactgctgacagcatagtgtctttgcagccacatcttcaacagcagtgcatctgaacacagattgcaagtctctcctctccattaatcctcattttaaggggacggatactgtcatgttacaacatccccatccaacacttgtggccaattgcaatcrgaaaccaccacctaaagagggtacaagaaagaacaggatgagaatgcgggggagaacgcgtgtgcacctgaccacacagactataccacaggccctgtttgaaacaaaacaacagccctagcatcgtgatgtggtctccctacccttcctcatccagccttgttcacagccatttcaggtttttcttacctttctttataaaggtactgatgaattcaggt

SEQ ID NO: 790046 - DNA, 432 bp, Homo sapiens
gaagggaaagcagctaaatttgtggattcgtgagatgatgtctgatacagtttggatgtttgtcccatccaagtctcatgttgaaatgtgatccccagtgtgggagatggggcctggtgggcggtgtttgggttatggaatctggtccctcatgaatggcttggagtcatccttgcagtaatgaatgagttcttgctcttctgagttcccatgagaactgattgttaaaaagagcctggcatctcctcctctctctcttgcttcctctctcaccatgtgactcgcyggctcccctgcgccttctgccatgagcggaagcagcctgaaccccttagcagaagcagatgctggcaccatgcttcctgtacagcctgcagaaccaagagccaaataaacgtttctttataaattacccagcctaggtgttccttt

SEQ ID NO: 790047 - DNA, 641 bp, Homo sapiens
tgagctcagacacaccaagccctgcccctacctgatgggccttccctatccacccctggtagctgaagacaaagggcatatattcttgggagttctagggccctgctcaccaccggttccttttctctccatactacacagctgatgctctctggaaagtgccacctccycacaggaggccaaccagtacaaaaataaaacattaaaccacccaagttaagaacgctcacagagtccatttcacccccctgccacgtccacgggaacaggtgctgatagccacagctgatatccatagacagttcacatcacaggactctgtgcagacaacccccagtaccagcctggtgccaggtagacttgctgggtggctagaccccaaagaaaggtaacaatcactgcagctcggcccataggaagccacatccccaggaaaagaggaagagcaccccatcaagggaacaccccatgggacaaaagaatctaaacaacagccttggaccttccctctgacaaagcctacccaaatgaaaaggaaccagaaaaccaactctggtaatatgacaaaacaaggctctttaacatcccccaaaatcacactagctcaccagctatggatccaaaccaagaggaaatccctg

SEQ ID NO: 790048 - DNA, 644 bp, Homo sapiens
attttatttttctttatatcatatatgtatacatatacaattttgtgtatataaaatagttcataatttaaaaaattttttgaacagctgtcttgagatatagttaacagaccttacattttgcttatttagactgtacaattcagtggtttttaatatattcacggatatgtgcagccaacaccacagtcagttttataacttttttttttttgagacagagtatcattctgtcacccaggctagagtgmagtcttggctcactgcagccttgaactcctgggctcaagcaatcctgcctcagcctcctgagtagctgggactacaggtacgccccactctgcccagctaattttttttttttttttttttttttttgtagagatggggtttcgccatgttgctcacgctggtctcgagctcctgagctcaagggaccacccgcctcggccccgtgaagtgctgggattacaggcgtgagccacaacgcgtaaaccccgtatcctttagctgtcaccctcctatcccttcctccagccctaagcaaccactaatatacttcctgtaaatttgtcttttctggacatttcatataaaaggaatcatatactatgtggacttttgtgactgccttctttcacata

SEQ ID NO: 790049 - DNA, 648 bp, Homo sapiens
cctggattctctctgtcctccttttctgcctctgagcctccgccagctccatgtgactcagcttcaggcatccctcggggggaacccatgggcacccagtgtccaacctaccccctcctcagaggactcttggctgtgtctgcctccccttgctatgttttgccttctgccttctttattcccctgttatttttcctgttttagccatgcttgattcggttttacagccctgtgtctccccactatttttatatatatataatgcttgaatgcttgctgctttgttttccattttctctttctagtttaatgttctttatattcctttaaggtaaaaatgtcttgcttccaacttgttttccctgatttatcattaactgcttttaattgaaaaagtaataaaagcacatgacgaaaatkgaaagagatgaaaagcatacacaatgaaaagcaagcaagacctctgctctcctaatctctgtctccagaggcgacactgctactggcttcttgtgtttccttttagaagtcctctatatggccaggcatggtggctcatgtctgtaatcctagcactttgggaggctgaggccggaggatcccttgagccccggagttcaagactagcatgggcaatattgagagacc

SEQ ID NO: 790050 - DNA, 648 bp, Homo sapiens
cctggattctctctgtcctccttttctgcctctgagcctccgccagctccatgtgactcagcttcaggcatccctcggggggaacccatgggcacccagtgtccaacctaccccctcctcagaggactcttggctgtgtctgcctccccttgctatgttttgccttctgccttctttattcccctgttatttttcctgttttagccatgcttgattcggttttacagccctgtgtctccccactatttttatatatatataatgcttgaatgcttgctgctttgttttccattttctctttctagtttaatgttctttatattcctttaaggtaaaaatgtcttgcttccaacttgttttccctgatttatcattaactgcttttaattgaaaaagtaataaaagcacatgacgaaaattgaaagagatgaaaagcatacacaatgaaaagcaagcaagacctctgctctcctaatctctgtctccagaggygacactgctactggcttcttgtgtttccttttagaagtcctctatatggccaggcatggtggctcatgtctgtaatcctagcactttgggaggctgaggccggaggatcccttgagccccggagttcaagactagcatgggcaatattgagagacc

SEQ ID NO: 790051 - DNA, 644 bp, Homo sapiens
attttatttttctttatatcatatatgtatacatatacaattttgtgtatataaaatagttcataatttaaaaaattttttgaacagctgtcttgagatatagttaacagaccttacattttgcttatttagactgtacaattcagtggtttttaatatattcacggatatgtgcagccaacaccacagtcagttttataacttttttttttttgagacagagtatcattctgtcacccaggctagagtgaagtcttggctcactgcagccttgaactcctgggctcaagcaatcctgcctcagcctcctgagtagctgggactacaggtacgccccactctgcccagctaattttttttttttttttttttttttttgkagagatggggtttcgccatgttgctcacgctggtctcgagctcctgagctcaagggaccacccgcctcggccccgtgaagtgctgggattacaggcgtgagccacaacgcgtaaaccccgtatcctttagctgtcaccctcctatcccttcctccagccctaagcaaccactaatatacttcctgtaaatttgtcttttctggacatttcatataaaaggaatcatatactatgtggacttttgtgactgccttctttcacata

SEQ ID NO: 790052 - DNA, 572 bp, Homo sapiens
ggggctggccccaaggacagtgaggtggggcacagggctgggctctgcagcagcctgttctggcgcccagcctctgctgggaaggagttgtgggccagtctgtggggaggaatgcctagactggttgaagagggctgtggtggagcaggatgtggagggcactcgtggtgagcttccaaaaacctaggatcaatccccaggactcccctcccatgtctcctttatgcccccaaccccagccattggccatccccctgctctagctggggcaacctccttcagtaatgttgaccacaaaattttgtatctatttttagcaaagctactctgtatatgacttgttgagcatcacaytacctgccaagtggatatcttctctgggacgagatgctctctttgcccatctgttatggactgaatgtttctgtcccctgaaaatcataatgctgaggccctaaccccagtgtgatggtcttagcaggcaggcctttgggaggtggctgggcttagataaggtcgtcagggtggagcccccacagtgggattagtgtcctcacaggaaggagatgaga

SEQ ID NO: 790053 - DNA, 603 bp, Homo sapiens
gctgcacccactgtcctgtgcccactgtctggcactccctagtgagatgaacctggtacctcagatggaaatgcagaaatcaccggtcttctgcgtcactcacgctgggagctgtagaccggagctgttcctattcagccatcttggctgccctctcctagtcrtgatatttctacccaagtgttccactcaggacttataagcactagattgaattatctgagagctaattatgaggttggaactcaatgaaaccactcaatggtgtgcgggcaaatgtttaataatcagctttttttttgagccagggtctcactttgtcacccacgctgaagtgcagtggctcgatctcgatctcggctcactgcaacctccgcctcccaggttcaagcaattctcctgtctcagcctcccaagtagctgggattacaggcgtgagccactgtgaccagcaataacccgctgttttttgaggagccctaatttgtagtacttgctgatttccattgggtgaaaactcaattgactgccatagtcaatttcaagataaactttcacagaatgtaaagatggcaaaagatgtgctcagtatgttcttgcaag

SEQ ID NO: 790054 - DNA, 661 bp, Homo sapiens
cgtatatatttatgcatcaagaattatacatacttggtacctgggtgctcatctccagaggatgccagtttgcttgaatgccaaaattaaagtctcagggtggtctttagtctcctgggataaactgagcgatcagaagataaactacagacaatgttttgattcttgaccaaatccagacatttcagctttggaaatgcgcccatctacccagcatgtgtcagaacaaagaaacagcaaatagaaatgagaagggcatttgaaacagattcccacacctgcaaccttatggcacctagagagatagtttattttactgactaattaaaatccaccaattgagtatgaatacagattttctctctattgtcataccagaaagtctgcargcacagaccaagggctgtgctaaaggctctggcctgcatttttatatttattctctgtaacagccctgtaggtggtcctcccagttggcaaacataacaatactaatttacctttattcatcatttacttggtacttttttcatttacttggaagactgacgtaggtgctatatgtgtgattacttaatcctcacaaatgccctattagattgttacactcatggcccccatttgaagtatcaggcaactgaagctcagagagtgtaagtaa

SEQ ID NO: 790055 - DNA, 680 bp, Homo sapiens
agaaagagaaggttctcggctaggtgcagtggctcacacctgtaatcccaggactctgggaggctgaggcaggtggatcacgaggtcaggagttcgcaagcagcctggccaacatggtgaaaccctgtctctactaaaaatacaaaaaattagccaggcktggtggtgaatgcctgtaattccagctacttgggaggctgaggcaggagaatcacttgaacccaggaggcggaggttgcagtgagctgagatcgcgcgattgcgctccagcctgagtgacagagcaagactccatcctgaaaaacaagaagaaagcgaaggctctcattttttactatatggtttagctcttacttttatttaaatgatcaaagtaatataaataattaatatttgctctaacaaagattagactcacttttcataacccaaaccctacaaaatgatagaccagatcatagaaattctcctatagagcaaaaagatactcctatttataataggtaagtcttgcagctctgttgagaaaaggacaatatgatgtacaggaaattaaagaaaagctcttcctttctagtgggaggggtagaggaaggatggtagagagaagaaagaaaagggagaaaggaagtatgggacatataacatgtggatcctgatatagttttctccagtcttct

SEQ ID NO: 790056 - DNA, 532 bp, Homo sapiens
acacagaatacaagttaatgcaatcgtgtttagcttctcttctattggattctttttttactcatatgaaattattgtcttatgatatttaaagcaaaagaaagcaaaaagttcaacacaaagtagagagaggacaatagtaagctctcaactgccaagattaataatgtgctttgggtatgcagaaaatcaaacagcaagrtactgacttaatagggggcagaatcctgtttgtcattcactgtttacccacaggtctctgaaattgtctgctctgttatgaaatgtatagtgaagtagctgatagcagtgtattttctccaataggattctgatccttactttaggtctatctagtgctgtcaaaaaataaattactagtcttgaaagtttgccctaggaaagctccatcttgatataaaaaagtaggagcagacatctggtagatataagctacctagcaagtgacagaagaatgtatataatatgcttatttcattggtttactaagttggaaagtaatatatttcta

SEQ ID NO: 790057 - DNA, 532 bp, Homo sapiens
acacagaatacaagttaatgcaatcgtgtttagcttctcttctattggattctttttttactcatatgaaattattgtcttatgatatttaaagcaaaagaaagcaaaaagttcaacacaaagtagagagaggacaatagtaagctctcaactgccaagattaataatgtgctttgggtatgcagaaaatcaaacagcaaggtactgacttamtagggggcagaatcctgtttgtcattcactgtttacccacaggtctctgaaattgtctgctctgttatgaaatgtatagtgaagtagctgatagcagtgtattttctccaataggattctgatccttactttaggtctatctagtgctgtcaaaaaataaattactagtcttgaaagtttgccctaggaaagctccatcttgatataaaaaagtaggagcagacatctggtagatataagctacctagcaagtgacagaagaatgtatataatatgcttatttcattggtttactaagttggaaagtaatatatttcta

SEQ ID NO: 790058 - DNA, 578 bp, Homo sapiens
aactggaattataagtacatgtgtggggggtagaatttcaaaactgtttctcagtctcactaagtaggacatatttaagcttgaaatagagcttagaggggaaagaactttactaaccaatattaatctaaacaattacgatacaaattcaccagataaaatgtagtayttttcatcagctctatattttgtcacacaaactatatatatttttgttacataaagtatatataatagatttagttatttagtaatgattttcaaaattcaattttgaagtatttcttagaagttattgaaatattaaaacatcttgtggttttatagaaatttaagagtaaaactggaatttttaaaatctggcaatttgctctgataggaaaattgccttcattacattattacacagaaaaacaaaaaaaagccagtgtttcctaatcactttctttttttttaagagatgggtcttgctatgttgtccagactggattcaaactcttaggctcaagtgatcctctcatctcagcctcctgcataatcaatttcctttataacacctaaaatgtgaggcaaagaga

SEQ ID NO: 790059 - DNA, 595 bp, Homo sapiens
gacctgtatgattgcagccacttacacaatgcctggacttgacctccaaagtctagaagctctccttgttgtaatagaaatgaacacctctggggtcagctgatgaatacaagtggcacatcttttgaagtgtcctcgagagagctttaggtccacagaagaacacgccaatactgctgctgcagtaggggtaagaaaaggaaataaaatgtcaccaggaggcaaggccagccagaagccaagacaatgataagattaatgaagtggttgtggctttacttatttatttttctccctccatgtcgttttttcttarattctttttttctacctactttcagcaccatgctctctcctaggttcccagcatcctcccctaaattaatcagggaggtggagccaagaagactgaggctggaaaggggccatgaaactgttgaggggttttgatacaacaccctgcaatgttggcactttacaatggcagagttcagtagttgagagtgggaccatacagtccatagagcctaaaatgattactatttggccccttatgggaagagtttcccaatccttgacctatatgattgcagcc

SEQ ID NO: 790060 - DNA, 570 bp, Homo sapiens
gtacagtttgaaaagtctaccctagtggtctgcaaatggaaaataacattttcttcatttcttttaaaaaagcaatttctctaatgttttgtcttttacttacttcagtctgtccattttagtagtttttttctgcttagaattgatatctgaattataaatgctagctttatttttggcattaasaaataatcacaactgggtgcaatggcacaagcctacaataccagcactttgggaggctgaggcaggaagattgcttgagtccaggaattttgagaccagcatggacaacatggtgaaatcccaactttacaaaaaatactagcctggtgtgatggtgagcacctctagtcccagctacttgggaggctgaggtgggagggttgcttgagcctgggagagggaggttgcattgagccaagattgtaccactgcactctagcctgggcaacagaatgaggccctgccttaaaataaattaaaaattaaataaataaatgaatgaaggtaggttgagtataaagtatagtgtataaatgatgagttaaagcattttaatattttttt

SEQ ID NO: 790061 - DNA, 608 bp, Homo sapiens
acatggatatgctaagtgatgctgaagtttgggcttctcatgaccctgtcaaccaagaatgtggtatccaataggatgttttcaagcctttctttctttctctttttctccctccctctttggaatttccagtatctattgttcccatcttgtttccatgtgtaccaatgtttagctcccacttataagtgagaacatacagtatttggttttctgtttctgtgttagattgctgagtcacatggcaattctatttttaattctttgagaaatytccaaattgctttctacaggggctgaactaattagcattcccaccaacaatgtaagcattaccttttttcccccacctcaccagcatctgtgggtttttttttttacttttttaataatagccattctgactggtgtgagatggcatctcactgtggttttgatttgcatttctctgatgattagtaatgctgagcatttgttcatatgcttgttggcttcttgtatgtcttcttttgagaagtgccagttcatattctttgcccactttttaatggggatatttccttttctttttaagttcctttttagattctggatattaatcttttgtt

SEQ ID NO: 790062 - DNA, 581 bp, Homo sapiens
tttggctataattatatttgaatgtagcataaggtattcttcatataacatgaaatgtttttcaaacaactatatggcgaaagcatttctttcttttattaatcctctgatgaagtagtgaaaaaatgttttgtttgcttttccaatatgagattactcaaagtagttaaaataaattcatgctttttgtttgtttgtttttttaatcaattactatgtagaactaaagctaagagagctcagaatataaaatttataggattcaagttaaraatattcattccaggttaggcacctaattaatgtcactatatataaacacctaataagaaatatgcctaataaaataattgactgataaatggataaaccaaggactcatctgttattgtggatttttatgttaaagcactgattccagtgatgccagcaagacaaaatatgtgtgttttctatgagaggaagaagtctgtaactttctttttgagtcactgtagtggggttaattggagtcaggatatagtctgtcattaagagtatccaataaatctcaaatgaagagaagtaattagaaatcaatg

SEQ ID NO: 790063 - DNA, 613 bp, Homo sapiens
aagttgtagttgaaaacacagagatcaggacctgggaatccgataagtatcaggaaatgaagttaggttgcaggtatctgacatattcaggatttactggttttgaatgtctcatggctgtcatcttacaatcatcatttcccaatatgcttaaagaacttgtgagccagactcaaaggacattttattcttttaatcccagatgctttttwccttctttggaagcccataatttataattgtttgtcaaaccaaacagaatacagtaagttttaggacagaatcactgaaatagtgtcaggagaagaaagaaatgtccaatagtgtaaatgtactgaaacacgtatgtgctcctgagtgaactatcacaccattattcatgagaccaaccatcatcttaactccaaaagttatctccaagccagaacattctcttgagctctggaattacatatctaactgccaactagatcaatatattacaagaaaataaaatgcaatatgttcaaaattaaattcatcctgtattatttcaattctgcttttttacctcaatcccatttccagtcatatttatcagaaagatgtcttcctaaattctgacttcataaag

SEQ ID NO: 790064 - DNA, 609 bp, Homo sapiens
aatttattatttgtcttctatgttgaaacaatttatcaaaatatcaaaataatatttgaagtagtatatcaaagtcttgcattttagtcttgcatttgaagtcttcttctatttctatctagcttaagttctacttttaaaaaagaatttatattttagatatgttgagtttctgctgctacttgaagtttcatgcttgttataccttcrttatatattctctttttctgcataaaatgacaatttgtatctaatttaatgctttctgccttggactctatcttgtctaagactaaaataatgatcaatatctgctttcaacttttcaaatacccacatatccttatttcccattgagtggggtagaaaaagacaaatagaatctggttagtctctatggcaaagtcatacatatgagatctagaaacatttttcttttgccaagggcattaaaatggcaggtggagaatcagtactacaaacaggcatatctgcttttagttttcttttattaattgtttatgtaacttatactagactgctcatgatcaataaaacatgcaggaagttacaagacctttttccatgactatcactaattcagtcagg

SEQ ID NO: 790065 - DNA, 603 bp, Homo sapiens
aatgcatactaatatatatttgctactaatatgtatatgtatatactaatatgtatttgctgaaaagaagctatgcaatataaagtggacataagaagtccacccagagattttcttcagtatgccatgattaaatagaaaataccacctaaagtagaatcatctctgtggttgagacagccagctgtccaccaaacagataacacacaagcaaataaacagatattggttgcctcttcttgagaacacagctagactagagttagcctcccttgcaattgagtgtagacacayggttgttttaatgaaggtactgtaaagagaagtcatgtgtacaacttccaaaagtggctcaaataaacctcccatgagcaacctctatgctgtccattctccatttctggctgatggttatgcccctggtgaccttggaatccacatattgaagatggcaaagtagccatcagtctgccttggatgtctgcaaaacgaaaatgcagctatcaacccaaataacagccaggagaattagctgagaaagaaataggctgggcatggtggctcactcctgtaatctcagaattcgcgaaggccaaggcagga

SEQ ID NO: 790066 - DNA, 603 bp, Homo sapiens
aatgcatactaatatatatttgctactaatatgtatatgtatatactaatatgtatttgctgaaaagaagctatgcaatataaagtggacataagaagtccacccagagattttcttcagtatgccatgattaaatagaaaataccacctaaagtagaatcatctctgtggttgagacagccagctgtccaccaaacagataacacacaagcaaataaacagatattggttgcctcttcttgagaacacagctagactagagttagcctcccttgcaattgagtgtagacacacggttgttttaatgaaggtactgtaaagagaagtsatgtgtacaacttccaaaagtggctcaaataaacctcccatgagcaacctctatgctgtccattctccatttctggctgatggttatgcccctggtgaccttggaatccacatattgaagatggcaaagtagccatcagtctgccttggatgtctgcaaaacgaaaatgcagctatcaacccaaataacagccaggagaattagctgagaaagaaataggctgggcatggtggctcactcctgtaatctcagaattcgcgaaggccaaggcagga

SEQ ID NO: 790067 - DNA, 442 bp, Homo sapiens
ctcccacacttgttggtgcccaaagtctggacgggccgatgcagcagggggccctgctgcaccccaggccaagctgtgacagctccagggcttggcactaactccactcccatctcagagtgccggcagcagggtgagggcaggcactgggagcaggcacccctgarcgtgtggtgacatgggggcccttctgggccctgagagagcttctggaagcctgggcccacagccacaacctggatggctgcagctgttcctggggagctcccgccctgccaacttgggaggggcagggctcccaactgtccctgtcccaggctatgcccctactctgtgtcttgccacagtggcagcaggcaaggtgcaggtggcacggtgaccctggccaactccacccaaatgaaccccatgcttcctgggcttgtcctgtgagtccaagctg

SEQ ID NO: 790068 - DNA, 626 bp, Homo sapiens
aaaaaaaatgaaaatagtatttttaacaactggtgctggaacaactagacatccacatgtaaaaaagtagagctagacacagaccataaacctctcacaaaaattaactgaaaatggattataacctaaatataaaaacccaaactataaaacttttagaagataacataggagaaattttaggtgaactttggcaatgactttttagacacaacaccaaaaccatatctataaaaraaaaaactggtaagttaaacttcattaaaattaaaaactgctctgtgaaagacagcattaagagaataatgataaaagccacatattgggaaaaaatatttgccaaacacatatgtaatgaaggactggtattcaacatgtatgaagaattcttcaaattcaacaataagaaaataaacaacccaagtataaaatgggcaaaagacctgaagaaacacttcactaaataaaatatgcagatggcaaataagtatatgaaaagatgcttaacatcttatgtcattagggttttgcaaattaaaacagcaatgagatatcactatgcatctattagaataactaaaattcaaaacactttaacgacatataatgctggcaaggatgtggtg

SEQ ID NO: 790069 - DNA, 574 bp, Homo sapiens
aaaaagagtacacgagatctctctgtgttatttcttacaaatgcgtgtaaatctacaattatttcaaaataaaattttgatttaaaaaaacttgaacaatcgacttcttcttaaaaattatctagaatatgaacctacataggttgataggtttgtctgcttaagcctgggagtcatctccctgctttttcattaccactagcttctaaatatcaacttgagcttctcctttaaactaaaatttcctagcaaaaactggtaaagaagccacgcacctccagtggaaacagccctgtagttgatgtgcaacggactgaatgtttgtgtcccytcaaaattagtatgttaaaatcctaacctccaaggtgatgatattaggaggtggggctgttgggaggtgataaggtcataagaggagtgctctcatgaataggattagtgcccttataaaagagaccctagagagatcctttaccccttctgccatgtgagcttacagtcagaaaggaccgtctatggggaagcagaccctcactggacactgaatctgccagtgtcttgattttggactttc

SEQ ID NO: 790070 - DNA, 606 bp, Homo sapiens
gaggtggcgaggaaggtatctaaggaccggattatctatggccttgtagattatggtaaggacttgggattttattttaaatccatttaaatgggaagtgcaaggagactgacatgaactgacttatgttaaaatactctggctgctgtgtggctattgaatttattaggagggcaagaagtgcagcagagaggacacttgggaagctattgcagtggtccaagtgagacatgagatagcttggaactaggtgatactagtggyctaatttgttattgagaatgggcacatcacaaatcacactactttcagcctactgtggtttgaatgtgtcccctccaaaattcagatgttgaaacttaatggccaatgtgataggataagaggtggaacctttaatagcttattagacccagagggctcctccctcatgaacagggttacagatagcccttatggcccttaaaaaagaggcttccacacagcactaacttttcttgcccttccactttcctccctgtgaagacacagtgtttctcccctctggaggatgcagcaacaaggtatcatcttgcaatcagaaagcagccctcaccagaaaactga

SEQ ID NO: 790071 - DNA, 578 bp, Homo sapiens
tgacaagaacgccctagtaagggtagtcaggctcaccgaggcagtacctgaagggcatagtaagcttagacatgaggtaggcagtgggcactgacaagagtgctgagctgacttttgggtccagtagaagcagtaataactaagtcttgcagaatgcagtcccaggcagtaacaccctcatccctcggggtgggagtgggagtagtaaaaggaggggcctggggaatatgctcgtggtggtggtcaggcaaagggtgagagatacaaggaaaaaggcccgtactagagagaacccagcaagtggggatcaggtagaarcagagcatgggaggagagcctgggcccccactccaacaccccacatacctggtctgctgtcaggagcattgaactgcaggctggtggggcttaggtttgggggactaggctgcctggggttggtttcccatttactagccatgtgactttgggcatgccactggcctctctgtgcctcagtctcctcatctgtaaagtagcaatcatattctctaccccaaagggttgtgccttactatgtgtaaagcacttagaactgg

SEQ ID NO: 790072 - DNA, 630 bp, Homo sapiens
ttaggctgaaactcggcaaagctatcccttctggaaggctgttctgcaccccttccccctttctcctctctttcaaggggtgggagcagcctccatttggctccactgtggactatccatactctgtggggaaaaagttagtccaaccctgaaaacaggcccagcttttcaggcctgggacacagaaaaaggaggctytgggccaggcagtacagcagtgtgtgacacccctgcagctgctgggcctgccgtggcctgttccagacttgctgcttctaaaggatatttgggaccatgagcccctgactgagactcagtcttcaattggagtccctggggagctggctagagtcctgaatgtcagagaaagactcttgactctattcattaacatacctggaactgaatccttgcaccactgtttactggctatgtgattttaggcaactcacttctctgagattcagcttccttacctgtaaaatggggaaaagaatatttattcaaagtgtcaagtggaatgagaccattgagacacctaagtatatcagaccgggttaatgtggctataacgaaaaaaaaaaaaaaaagcctagtgtaacaccagggacaaaataggcatttgatgca

SEQ ID NO: 790073 - DNA, 622 bp, Homo sapiens
aatttacaggctaacttttatagcagatagctacatgatttaataggagttgttttaccattaatattaagtgctcctagtagtgactagaatttaatcatcatgctatattgctttgatttttggcatgctgggaaatatatctgtctattggtcaaattttgttggaaataacttaagagcttgtcagttctcctgtgtgtgctgtgagcttgcatttaaaattgcttgatattagtgtaatatcagtggaagtttggacatttgttttggtatacagtaatattataatcatatttgctgtattcgtacttgatttgaagtcacttttaaaagggggaaaacaaaagtagagattatttctatttgtttatttttaattactgtcttttttctgacatttcatatcccagtgtgtataaatacaaaatattaccccrttagaaaaagtgatacgtcttatatacattttattcttactgttggctattacacatgactcgtccttatatattttttactccaatttcacgagagatcgaagcatggaagattattgtgacctaaggatttttggtttaataaacgctcatgtactgaatcatagaattatggtgctggg

SEQ ID NO: 790074 - DNA, 666 bp, Homo sapiens
ccagacactgataacatctacaggcatcaaggccatccaggaaaacatgacatcattaaacgaactaaataaggtgccaaggatcaatcctggagaaagagagatatgtgagctttcaggcagagatttcaaaagaattgttctgagaaaactcaaagaaatttgagctaacacagagaagaaattaataattctatcagataaatttaacagagattggaataatttaaaggattcaatcagaaattctggagccaaaaatgcaattggcatattgaagaatgcatcagagtcttacaatagcagaatcgattaagtggaagaaagaattaatgagcttaaagacagattatttgaaaatacaaagtcagagcagayaaaagaaaaaaagagtttaaaaaatgaaacatgactacacaatcaagaaaattgcctcaaaagaacaaatctaagagctactggccttggagaggaggtagagaaaaagacaggggaagaaaatttattcaagggaatagtaacagataaattaccaaacctagaggattacatcaaaatccaagtacaaaaaggttatagaataccaaagagatttaaccctaacaagactacctcatggcatttaatgatcaaacttgaaaatgttgagaggatcctaaagcagca

SEQ ID NO: 790075 - DNA, 604 bp, Homo sapiens
tcaatagtgccatattttcaaatattttgtaactgttttcataaaagatattaatctgcaattatcttttctcataatatctttgttagattttggtatcagaataatgctggcctcatkgaataatctggaaagccatccctccttttctttcttcctttttttttttttttttttaaataaacggcatctcactctgtcacctaggctggagtgcagtggcacgatcatggcttactgctgcctagacctcctgggctcaagcagtcctccccctccagcctcccaggcagctgggattataggcatgtgccaccatacccagctaattatatatatatattcacacacacacatatatatacacatattggatcctgtctccctaggaaactgcatagtagagacaaggtatcactatgtttcccaggctggtccgaaactcctgggctcaaatgatcctcctgcctcagcctcccaaagtgctgggaatacaggcttgagtcacagcacacagactatcactccttttctactttctgaaagtgtttgtatgactttatttcttcagtgtttgagagattcaccagtgaagccatctgga

SEQ ID NO: 790076 - DNA, 604 bp, Homo sapiens
tcaatagtgccatattttcaaatattttgtaactgttttcataaaagatattaatctgcaattatcttttctcataatatctttgttagattttggtatcagaataatgctggcctcattgaataatytggaaagccatccctccttttctttcttcctttttttttttttttttttaaataaacggcatctcactctgtcacctaggctggagtgcagtggcacgatcatggcttactgctgcctagacctcctgggctcaagcagtcctccccctccagcctcccaggcagctgggattataggcatgtgccaccatacccagctaattatatatatatattcacacacacacatatatatacacatattggatcctgtctccctaggaaactgcatagtagagacaaggtatcactatgtttcccaggctggtccgaaactcctgggctcaaatgatcctcctgcctcagcctcccaaagtgctgggaatacaggcttgagtcacagcacacagactatcactccttttctactttctgaaagtgtttgtatgactttatttcttcagtgtttgagagattcaccagtgaagccatctgga

SEQ ID NO: 790077 - DNA, 604 bp, Homo sapiens
tcaatagtgccatattttcaaatattttgtaactgttttcataaaagatattaatctgcaattatcttttctcataatatctttgttagattttggtatcagaataatgctggcctcattgaataatctggaaagccatccctccttttctttcttcctttttttttttttttttttaaataaacrgcatctcactctgtcacctaggctggagtgcagtggcacgatcatggcttactgctgcctagacctcctgggctcaagcagtcctccccctccagcctcccaggcagctgggattataggcatgtgccaccatacccagctaattatatatatatattcacacacacacatatatatacacatattggatcctgtctccctaggaaactgcatagtagagacaaggtatcactatgtttcccaggctggtccgaaactcctgggctcaaatgatcctcctgcctcagcctcccaaagtgctgggaatacaggcttgagtcacagcacacagactatcactccttttctactttctgaaagtgtttgtatgactttatttcttcagtgtttgagagattcaccagtgaagccatctgga

SEQ ID NO: 790078 - DNA, 604 bp, Homo sapiens
tggccctttattggtcctaatgcattacgctttttagtattgctggattcaatagtgccatattttcaaatattttgtaactgttttcataaaagatattaatctgcaattatcttttctcataatatctttgttagattttggtatcagaataatgctggcctcattgaataatctggaaagccatccctccttttctttcttcctttttttttttttttttttaaataaacggcatctcactctgtcacctaggctggagtgcagtggcacgatcatggcttactgctgcctaracctcctgggctcaagcagtcctccccctccagcctcccaggcagctgggattataggcatgtgccaccatacccagctaattatatatatatattcacacacacacatatatatacacatattggatcctgtctccctaggaaactgcatagtagagacaaggtatcactatgtttcccaggctggtccgaaactcctgggctcaaatgatcctcctgcctcagcctcccaaagtgctgggaatacaggcttgagtcacagcacacagactatcactccttttctactttctgaaagtgtttgtatg

SEQ ID NO: 790079 - DNA, 602 bp, Homo sapiens
taaatcactaaaagattcaaggttcattgataagaatatatagtttttttttcaaaaattctatttcaagtgtttacttttatttttccaaactttaaaatgattttatttgtgtcaatttgtctgactcaccctgccttctgtgttatgaagacattggaaactgttttccaaaagcctagtttctttgtgagggtagcacacatgataccctttcataaaataataaaacctagaagaataatcatattgtccttgtcccttcttagaaygtacatttttaaaacaattatccagttatcagggtgaactgttactagtaattatagtcacttccccaccaaaattaacattgatcctgggcaaatagccaagatataaatactgccaagtccagaatgatctttttttggttcattttgataagactcaattcctgactataatagttatgtgaatagtaaagaaatcctgatcttacacagtgttgattactgaaacagattctgggtttcattctaatggcttcaaatggcatactctctcaaggaggtcatgccttcttgctagaattccagcttggtttatagaaaacttgctag

SEQ ID NO: 790080 - DNA, 628 bp, Homo sapiens
taatgttgaacatcttttgcatactggttggccatttgtaggtgtaattcagagagatttcttttcaagttctttgtcaatttttaattgggttattagttttttttgctatttagttataggtgtttcttatatttttttaaatgaactatttatcagatatatggtttgccaatattttctcccgttctgtaagttgcctcttcattctattaattgttttctgtgctgtgaagaagaaactttttagtttgatgtagtcatacgttatttttgcttttgttgcctgtgcttgttgcttgtctcatatacaagaaatcattcccaagaccatatacagaagagttaccccttcattttcttacaggagtttcacagtttcaggttttaagtttgtcttaagtttgtcttcttcttgcatrtgtatatctagttttctttttttcatgtgtatgtccagtttttccaacaccatatgccaaaaagactatctttttcccactgtgtgtttttggcatccttgttgtagatcagttgactgtgtaagtgttgctttatttctaggttctctattctatcttatagtcttataatttgaaatcagaaagtgtgatgccttcagctttat

SEQ ID NO: 790081 - DNA, 611 bp, Homo sapiens
gttcttttatggttccagatgaatcttaggattgtttttcctatttctgtgaaaaatgccattgagattttgatagggattgctttgaacttgtagattgctttgagtagtttgggtgtttaaacaatgctgagttttctgatccataaacatgagatgtctttttatgtacttgtgtcttctttaatttattttattaatattttgtagttttcaatgtacaaatctttcacattctgggttagctttactactaataattttttatttttgatggtattataaatgtgatcattttcttaattttcttttcatggttcattgactcttctaggtagtggagattataaaagatattttctttttaagattatcatgataatgttataagaaaatatacatcaagtgtctamcaagaacagaagtctatttctttaaaattctttttcttcctcttccctatacaagtagagtaagtgaaatgctagaggtaaaaggttgtgaacattccttttttgttgttgttttttttaacagtttcagttctccttagaaactaagtgattctgaagacaccaacaattggattgccaggatatttacagtggaag

SEQ ID NO: 790082 - DNA, 636 bp, Homo sapiens
gattgtattgaagtggccttgttttctggggtgacgctcagaattcttggtctcatagccaaggaaatcaaggacatggatacaccaagggtgaagtttagagcagaaatttaataggagaaagaaaaagaacagctctctgctgcagaaaggggtcccagaaaaagrgttgccatcctgtagtgaaatacaggaatttttacagacaagctagtggggaggcagtatctgaacatagggtgtgaaaaaccagttaggatcaggtgtgtcatctgcatagggtgcaaatctctggaagcccctaccccaatcttttatcatacaggcaggtcctcagcctgagctactccatgttgcttatttctttcttactgtgcatgtgctcaaaaaggggaggtagaatccccatggtggacatgcctggccccagctagccctttctgtccatgcaactgctggcatcccccagtgcaagcttccaggttccttatctatgtttgcagtctgatcttccaggctactctttgttagaaaataagtaatttcttgggctgctttttgttagaagggaagttctgcgaaggatgctgtgccctcactatctgcctcaatagttttttctacctcctgtatcat

SEQ ID NO: 790083 - DNA, 587 bp, Homo sapiens
tagctttatgaaattgtaaatttgttgaaaattgattttttttttactggagacgagagttccataattgaaaaaatatcctatgccagtgctttgtagattgcaagtaacgtagataatcttgcctgtagttccttgatgaaaatgatctgttgcatttacaatatcacaagtaattaattattaaagtatatgcctgtgattggtatgttttatcttaattctacttattctcttagtcatgcaaagaagaaataactgccagtggtagctgttgaaattatattcagatctattgaggagcatgttttgaacatcttttatgcttatttaaaaagaggcggagcttgtagtgagccgagttagtgccactgcactgcaagcctgggcgacagagtgagactacatctcaaaaaaaaaaaaaaaaamaaaaaaggcttttctatgggattctcatttgtttaaattatacatgtgattacttgacacgttaaagtgtacacaatttaggaaaatgggattaaaaatccagaaacacttaagaagttcttatagtgaagattaaaaaagtgatttcatttaatgac

SEQ ID NO: 790084 - DNA, 515 bp, Homo sapiens
tgctgtggacataggacttggcaaagatttcatgacgaaaatgccaaaagtaattgcaacaaaaacaaaaattgacaaaatagagatcttctgcacagcaaacagacaatctacagaatgggagaaaatatttgcaaactatgcatgcaacaaaggtctratatccagaatttataaggaacttaaatttacaaacaaaaaaaaaccccattaaaaaatgcacaaaagacataagcagacacttttcaaaagaaagcatacatgtggccaacaagcatataaaaacatgctcaacatcactgatcattagaaaaatgcagatcaaaatgacaatgagatactatctcacaccagtcagaatgactgttatcaaaaagtcagacaataacagatgttggcaagattgcagagaaaagagaatgcttatacactgctgctggaaatgtaaattagtttagccattgtggaaagcagtgtggcaatttcttaaagaacttcaaacggaattaccactc

SEQ ID NO: 790085 - DNA, 515 bp, Homo sapiens
tgctgtggacataggacttggcaaagatttcatgacgaaaatgccaaaagtaattgcaacaaaaacaaaaattgacaaaatagagatcttctgcacagcaaacagacaatctacagaatgggagaaaatatttgcaaactatgcatgcaacaaaggtctaatatccagaatttataaggaacttaaatttacaaacaaaaaaaaamcccattaaaaaatgcacaaaagacataagcagacacttttcaaaagaaagcatacatgtggccaacaagcatataaaaacatgctcaacatcactgatcattagaaaaatgcagatcaaaatgacaatgagatactatctcacaccagtcagaatgactgttatcaaaaagtcagacaataacagatgttggcaagattgcagagaaaagagaatgcttatacactgctgctggaaatgtaaattagtttagccattgtggaaagcagtgtggcaatttcttaaagaacttcaaacggaattaccactc

SEQ ID NO: 790086 - DNA, 642 bp, Homo sapiens
tattaaccagtggattatttagaagtgcattattaactttataaatatttggagattttccagagatctgcttttttatttctgatgtaattccattgtggttagagaaaatacgttatagaacttgaatccttttaaatgtattgagaattattttatggtcaagaatattgcctgtcttgtatacgtttcatgtacacttcagaataatttatattttgtcatcgttggatggagtcttttataaatgttaataaagtcagtgtggttgataggatagttctagtctactatgtatctgrcaattttctgtccatttgttttaattattgagaaaagggtactgaaatcctcaactttaatttaggattttgtctgttttacttgtatttctgtgtttttgcttcatgtattggaagaaataatattgggacataaatactaaggattgttatatcatcttgattaattgagccctttattagtatgaaatgatggttttgatccctagaaatagtccttactatggtgtattttttacttgtgttgacttgtgttactgtgtgtgtctttttccattctattaccttttttcctaacctattagtatctttgtgtttaaagtgtttgtaggtttgtagt

SEQ ID NO: 790087 - DNA, 619 bp, Homo sapiens
ttgtactgaatgtgtatcacctttgcactgttgtaaatttgaaaaatcttaagttgaactatcataaattgaggactgtctatgtttgtacgtgtgtatgtatatattctacatctctatttaactttttgaacaaatggaaagtaattataattattttaatatccttgtcaaacaattgtatcatctgtggcattctgagttggacttaattggttgctttttgtcatttggatcttttattttttgcttctttgcaatgcctaataatctttagttgtacgatattgtgaattttacttgacttagggggctggatgttttaatttttctataacagttcttggtctttgttctgggacacagckaaattacatggaaacagttttattcttttgggtcttgcttttaatatttgctaggagggaccagagcatcatttggtttatagctaaagcgccttgctttgcgctactgagatgagacctctgaattctctactcaattccaggtcaattataaggttttccagtatgtgcagtgggaataggcactcttcctggccccatggcagtgtgctgagtactgttccctctactgtttttggatggttcttttc

SEQ ID NO: 790088 - DNA, 623 bp, Homo sapiens
tccagggacatattttattttcctgcctccttagaatgtctggcaaaaagctttatttcatctgaattctgctgggtcatcacattggacttgtggaagaaaatggatttataatagcaattaataaaaaatagtaacaaataatattgcttaatagtaaatgtgtactgtatgtgccagccacagtgctaagcattttaatacaaaagcataaaataacattgtgagatttcctctagcaattttaaacttaaactagatgtttattcgagggcagctttaagctgcatttgcatagcaggcttttkgctgtgtatttattgggaggagagctgttagaaattacagagctgttggaaataaaccctagctaattctcagggtttcttccagtattgaacttgtctgaaaagctgttggaaattagtgtgcactgactcccccaagatgcccctggaaatcaccactgcttgctctaccaaggtaccagaaaatctgccctggaaaatgagtcctttggattaaatctttccatcttcaggacctgcttgaagtgcaggtgtccctggagagggagctaattaaatcatttaacacttaaatagggattcagttatgaaatt

SEQ ID NO: 790089 - DNA, 623 bp, Homo sapiens
tccagggacatattttattttcctgcctccttagaatgtctggcaaaaagctttatttcatctgaattctgctgggtcatcacattggacttgtggaagaaaatggatttataatagcaattaataaaaaatagtaacaaataatattgcttaatagtaaatgtgtactgtatgtgccagccacagtgctaagcattttaatacaaaagcataaaataacattgtgagatttcctctagcaattttaaacttaaactagatgtttattcgagggcagctttaagctgcatttgcatagcaggctttttgctgtgtatttattgggaggagagctgttrgaaattacagagctgttggaaataaaccctagctaattctcagggtttcttccagtattgaacttgtctgaaaagctgttggaaattagtgtgcactgactcccccaagatgcccctggaaatcaccactgcttgctctaccaaggtaccagaaaatctgccctggaaaatgagtcctttggattaaatctttccatcttcaggacctgcttgaagtgcaggtgtccctggagagggagctaattaaatcatttaacacttaaatagggattcagttatgaaatt

SEQ ID NO: 790090 - DNA, 544 bp, Homo sapiens
caaagtaatagtttcataagctgttggtcatgtagcctttggtctctttaacctctttgccaagttcccaggttcataaaatgaggaggttgaatggaatggttcccaagagaattccttttaatcttacagaaattattgttttcctaaatcctgtagttgaatatataatgstatttacatttcagtatagttttgatgtatctaaagaacacattgaattctccttcctgtgttccagtttgatactaacctgaaagtccattaagcattaccagttttaaaaggcttttgcccaatagtaaggaaaaataatatcttttaaaagaataattttttactatgtttgcaggcttacttccttttttctcacattatgaaactcttaaaatcaggagaatcttttaaacaacatcataatgtttaatttgaaaagtgcaagtcattcttttcctttttgaaactatgcagatgttacattgactgttttctgtgaagttatctttttttcactgcagaataaaggttgttttgattttatttt

SEQ ID NO: 790091 - DNA, 656 bp, Homo sapiens
aagatgttatttaaataagtacactatgtttcaaaaatattttgagtcatttcaggcaaataaacaacctccctttctcaaaaaaaaaaaaaaaacttacttgttataggttaatgcttgaattaaaatgtttgttgtttgacgtatggaatgctgcactcttaattgttaatatacaggctcttccccattaataagtcaaaaggaaaaatcatttagacactttagaaagaccagacactacaaaaagcacctaataaaacagattaggactcaattcttaattctatcattttataaatgttaaaatatatataaaaaatatattacactctatcatagagtatatgttatatattttacatatcatatataacrtatactctacataacataatagggttttaagtttataacttttttttaatatataaacatatatatatcctacaatgctggtaatatgtatatatgctcgtactatatatatatacacacacaaacatatatatatacttgtactacatatatagtacaagcattgcaggatatatatatgtatatattatatctgtaaaagctaagtcagatttcactttgatacatgtaaaccaggaattctatgtttcaaaaaacagtagttgtggtcaacttta

SEQ ID NO: 790092 - DNA, 615 bp, Homo sapiens
aagaaccatgaatttaaattctaaaccacctgaccaatttatctgaatcagctcctaaaatcattttgggtctattttcctcctttaattaaaataagaataatctactaaagttttacaatttaaatattgacaattatatttatttttgcatctcagagccactgctgatgtatttcttttatgtatgaagagactgaggaacaaggamaaatcacagaaaagccagaggatgaagctggaatgcaagagtcctgtctctttatgattcaacaatcaaataaaaaccttctctaaaaaatgaccaagaaagcaagcttattaggttcatgaacagagtcatcacgtaaacaaattacttctataatagtcccagtaaaatgatctcaggttcttatttaaaactcatggaaaggaaatatgtcaggttaagacatctttatctgtttttaacaactggaatattaatcatatctaattcaatgtatatttcaaaatgagtaactcacatattcacagcactgtccaaattaatgaacaggtcccattacctaggactcatactttaacatttactaattcgctttccacactgccatttctcgttagaatggc

SEQ ID NO: 790093 - DNA, 616 bp, Homo sapiens
gcctgtagttttatttttctgttggatccctgtctgattttgctatcagggtgatattggtttcatagaatgagctaggaaagaatcccatcgccttgattttttggaatactttcattatgattggcaccagctcttcgttgtgtatatggcaaatttcgactgtgaatccatctgttcttgggcttttttgccggaagatttttagtactgattctttttggttacttgttattggtctgtttagggtttctattttttgcctgtgcgatcttaggaagttgtatgtgtctaggaattcatccatttctctaggttttctagtttaygtgcataaaggtgttcatagtagtctctgatggtcatttgtatttctgtggcgttggttgtaatgtcaactttatcatttctgattgtgcttatttaaatcttctcctttttttggttagtgtagtcagccatctctcaattttatttatactttcaaaaaaccaacgttttctttcattgattctttgtaatgtttttgtctcaatctcattctttatctgtcctttcagagtttccattgttttcagcatccatcactagcaagccagtgcgatcctttggtggt

SEQ ID NO: 790094 - DNA, 604 bp, Homo sapiens
ccgctcacacttccctcctgaagtgtcactcggttttgctctggggacacgtgaaagtgccaggcctccccacaccctccctgggcctggggcagcaggggcagaggcagaggtggcagtgactgcaaagggcttgtcaggggcctctgagcattgggctttcagagggcactgagccagggccaccgtgttcgggtgggggcaggacgggtgactggggccctgcagctggcaagccccattagcaggaaggaagccccatttcgcaggaagcaacagaggtgggcagctgtgtggtgctcagcttggctgctcctgtgccccagctgtcatacttattctggggcccacagaggtgcctggcctcctccctccctgctaaggcagtgkcagctggacccaggctgctcagggatcagaagcctgtgggattccacgtgggctccagaggcgcctctgcaccatctctgggaactccctgtgcctctgtaggccaaggggggtcaggggctctcctgtgaccaggattgtaaagggccaagacaggggtgtggatcccaggggcctcacacccactcaatctttccctttgttaaggagcctc

SEQ ID NO: 790095 - DNA, 636 bp, Homo sapiens
gtctatatagagaaaagaaaacagcactctggattacacggatcccacaggagcttgtgaagaagggccagttccccatcccatccatcacctgggaacatgcagggcggtatcgctgttactatggtagcgacactgcaggccgctcagagagcagtgaccccctggagctggtggtgacaggtgagctgacactcaggggtcccagccccagactctgccctcaggaagggggacggctctcaggggcttctccctctcacagcccagccctggggatgacgcgggtggtctgagccacatttaacacggtgcctccttctctcctaggagcctacatcaaacccaccctctcagcccagcccagccccgtggtgaactcaggagggaatgtaatcctccagtgtgactcacaggtggcatttgatggcttcaktctgtgtaaggaaggagaagatgaacacccacaatgcctgaactcccagccccatgcccgtgggtcgtcccgcgccatcttctccgtgggccccgtgagcccgagtcgcaggtggtggtacaggtgctatgcttatgactcgaactctccctatgagtggtctctacccagtgatctcctggagctcctggtcctaggtg

SEQ ID NO: 790096 - DNA, 670 bp, Homo sapiens
gaccctgccccaggagagctctgggctgggatggagtgagcgggggtctgagaggggctcagccagtgggagactcaccctcagagggaaggaggagaacagggccctcccaggcctgcccaccctcagtggcatcgccagcatcatggacaggagaggcgggtggagggaggggcctggggaggccacaggtcccatgtagagaaatttggtttgaggtggagacttcaggaaagccccagstcctcagcctcctctcattcttttacccaggaccgtctgggggccccagctccccgacaacaggccccacctccacatctggtgagtccctgaggcttctgaactcaagggagtgcggcctcccccagggcagccctgggtctcccagagaatcccattcccctcaaagactcgagcttccctccagggagccgggcagagccagaggaggggccacagggtccccagggctctgaggctgggctggtgaggggtggggggtcaaggcagagagaaatgttggggcccagcctgggggaggagcagccgggctgatgtggggagcagggcagccccagccctcacctccccgtcctgacccagcaggccctgaggaccagcccctcacccccaccgggtcggatccccagagtggtgagtgacgggc

SEQ ID NO: 790097 - DNA, 670 bp, Homo sapiens
gaccctgccccaggagagctctgggctgggatggagtgagcgggggtctgagaggggctcagccagtgggagactcaccctcagagggaaggaggagaacagggccctcccaggcctgcccaccctcagtggcatcgccagcatcatggacaggagaggcgggtggagggaggggcctggggaggccacaggtcccatgtagagaaatttggtttgaggtggagacttcaggaaagccccagctcctcagcctcctctcattcttttacccaggaccstctgggggccccagctccccgacaacaggccccacctccacatctggtgagtccctgaggcttctgaactcaagggagtgcggcctcccccagggcagccctgggtctcccagagaatcccattcccctcaaagactcgagcttccctccagggagccgggcagagccagaggaggggccacagggtccccagggctctgaggctgggctggtgaggggtggggggtcaaggcagagagaaatgttggggcccagcctgggggaggagcagccgggctgatgtggggagcagggcagccccagccctcacctccccgtcctgacccagcaggccctgaggaccagcccctcacccccaccgggtcggatccccagagtggtgagtgacgggc

SEQ ID NO: 790098 - DNA, 613 bp, Homo sapiens
gtggagctgggggtcccaaaatttcaatagcaatgggggcaggagcacaggctaggattggtcagggactcagggagaagtggtctgaacccacattgtgggacctcggggacatcgcagcccctccctgcgttgcagtggcactaatgggaacagggcagggaccagcaggaatgagaggtcccagggaaccttcccaggagatgaaccccttgctctactccagcaggtgctgccgtgaagaacacacagcctgaggacggggtggaaatggacactcgggtgagaacccgcccctgtccccrgcaccaaaggcctcctggtgccagatctaatcctgcaggacttctctgtcctccttcccccggctctcagcatcgtcacggtggacccctccttgtccagcacgctgcctcctgcctgctgggacctcactctctcctgctgtcctgggacctcatgggcctcctcccgggtccccttcctgctcctcatcctctgtttggccatctggttgttagagagctccccaggcctcaggaggatgacgaataaatgaaccactccagtcccctgggctccccttcattcattcatctagtgagtgttccca

SEQ ID NO: 790099 - DNA, 657 bp, Homo sapiens
gggcggctcctcacccatccttcttctctccaggacagatccgtgagacagcctccctcttggtgcaaccaggccccactgtggtctcaggagagaacatggccctgctgtgtcagatgcaaagctgggtggacagacactttccttctatctgaggaggatgcagctgacaagaccccaccctcgtatctaatatcaaagtaccctactcygtggtagaggttgaattctccatgagtcctgcgacctcagcccatgcggggacctacaggtgctatgcctcatagagtgtttaccccaagctgttgttcccccagtgacctcctggtaatacaggagttactaagaaattgttttaggcagatagtaagggtaaaggttcttggtggaaattttccagtaataaggaacaatccctgaaccatctcttttctaacagaaatgacagcttaaatggcccggccagcaagctttaatgtgcaaatgccaaccattaaaaactgggttcactcaatatggtgattcctactgtcttctctttgttaccacctgtgccaagtgtgatggccacctccagacaacaccatgtattcaaaacatcatggtgacccaaatgaatgaaaaagccctttttaatatgcatttttaaaggcctac

SEQ ID NO: 790100 - DNA, 632 bp, Homo sapiens
cccaaatgaatgaaaaagccctttttaatatgcatttttaaaggcctacagaaaaccagggccaaacctctcaattactctaaactgtctataatggaacaaaagccaaataaaaatcttgtagcctttataaaaaggctaaaagaggcactaaaaaagtatatctttttattctctaatccrgttaagtaacagctcatcctgagggacaaatttattacacaggcagctcccaatattaaaaaaaaaaaaaaaaactacaaaagaaagctacaggaccaaatagcaccttaaaaaacctcctgaaggtggccactttggtcttttataatatggaccaggaggagtcccaaaagaaagaaaaaaagctcaggagaaggacaaagtctctagcagcagctttgaaggctcgcaaagtcccagatcaccaagatgcatcctctagttgctattagtgtagcaggccagaatgtccagtcagcaaaatgaagcaacctccactctgtccagcctgtggcaaaaaccactgaaaacagaactgcccccagacatggaggtcactgagttcaaaaccagtctcacagatggtccagcaaaactgatggatcctggtgcttgaacctaggctccag

SEQ ID NO: 790101 - DNA, 583 bp, Homo sapiens
cctgacttatttaaaggaaacaaaaactctggcttttaacaaggaatgaatgagatgatcagatttgcattatgaagaggtctttctggctcctgggttcaggatgtttgggggcagcaagagtaaaggcagagcttttaatggtgctttctgaaccaggaatcctggttaaatatgtagattccagggcccacctccaaaaactctgattcagtcagctagaaacagggtacccaaatctctatatttaaataagaagtccttgtgattatgacagagtctcatggttgtccgggtcactaaccagtatgttaggaagatccagcagagatcaagaagaaggagagaatatctgaggtaacaggktctggtcctagaggacctgagggttggggaggaaaatcagaagcagagataggggttttgttttgaagaggccaagggacaccttttcctttaagggtgaacaaagaaagcaaagtgagtgtaaaaaggaagttgaaggaattcacactttgtaacctcaattccccctggaaataggagacaaagtcatatatggagacagaacaggaaggcaaac

SEQ ID NO: 790102 - DNA, 489 bp, Homo sapiens
tcctctgaattttattcctttctggatcttaagaaaccacctaggagtgtcagctgcctggattaaatcttagttatttcacttactagctaagtaaccttgatgaggtacataatttctcaggaaatcagtttgcttagcaataraagtgttaattatcatatcaaaatcctaaggtagttaagatgattgtacaacatggaatatgtaaattatttagcccaatatctggcatttgttgaatgctcaataaatgttagctaccctgattgatgactcaaatggttgggctgtgtccctacccaaatctcacctcaaattgtaataatctccatgtgtcaagggcagggccaggtggagataattgaatcatgggggcggtttcccctatagttttctcatggtagtgaataagtctcataagatatgatggttttatacatgggtgttcccctgcacatgatttcttgcctgccaccatataagaca

SEQ ID NO: 790103 - DNA, 501 bp, Homo sapiens
taacttgtcctttatgatgatttctatttcatctgattcatttaaaaacatcattctgaatccataggtttcatcactttgccaaaggaatccagggcataaaaaagtttaagagggaaggaagtggggccattagttggaaaatgaaaaaaaacagaattaagttctgttaggtctggagacctaaaaacaataatgaactacaccatagaacaggacccaggcatttatctcaaaagaacacaaacagataagcaacaaatggagccatttttccactaccaggaaatctccctaattcctccactcccaataacattattttytgacacacttttatgttgttgcagtatcaactcaatcttgatagctatcaattggagtatctgttttcaataaccacaaatgcttaacctaagaatcataatttgacagatcttaaaatttctcatcaattatgacaatggaaatttggacttttttttgaaaaaaaaagcaagt

SEQ ID NO: 790104 - DNA, 365 bp, Homo sapiens
ttccctctaatgtatggaatgtggtagaaggaacagtacatgactgctgagaatcagtcatgaaagtcattggagcttcctccttgctactcctctctcgcatgctctgggggtaatctgctgccatattgtaagaagagatccctgtggaaagtatggaggactcttgacaacacccatgtgagtgygccatcttggaagcggatcctccagctatagtcaaggctttagatgattgtatctgcaacctatatcttgactgcaaccacatgacagaccctcagacagataagcctcgtcccaaattcctgaccacagaaactgtgagatgataaatgtttattgctttgagccactacattttg

SEQ ID NO: 790105 - DNA, 532 bp, Homo sapiens
gtaacagacctgaagttaggagatttcctcaattaaccagtgggcctaatccaatcatgttagccctttaaagcagaaaactttctgtgttggaggcagaagagattcagcagaaagggtagatgcagagatttgaacgtgagaaggaccaaatatgtcgtctctggtctaaaagtaaagggacaatgtgacgtggaaggtagacagtgtaaggggccaagagagttcgctggctgacaagcagcagggaaaccaagaccccagtcctacaatcacaaggaacaagttcagccagtaaccagaaggagtttggaaatggatacatccccacaaccwctggaaatgaacacagcctgggcaacaccttgatcttggccttgtgagacccagagcagaggaagcagcagtgcccaccagacttctcacctaaagaactgtgagatcataaatatgtactgttttaagccaccgagcttttggtcatctgttacagcaacaacaagaaatgaagacatggatccaaaatgccctt

SEQ ID NO: 790106 - DNA, 645 bp, Homo sapiens
aaacccaaatgaagttggacattgctaactgggagcttgttgacaatgtgttgagataagagcctgttcccttcaagaaagacttgtcccatagaagtcttttgatcctgagggtgtggggctgcccttgaccattgatatatagcagaggtaggaagggttttgtttagtttttcaataacattcattgccttttttttcctgagtagaaaagtcattatttaatttaatwttgttttatgttttgtttgtttggtttttaaccatttcagtagtaatagtaatagtgatttccttagttgtcatgatttttcccagtaggtttttttccctcataggaactaaatactgttttacttcaaactgagtgcttcacactttggatctcaaaatatatcctaggaatttccaaaatttcttccccttgtatggtatgctcacagatttcttagatagtcaaaaggggcattacatcccaagaccagctcaatgaatgacaagaaagaatagctttccatcatccaccttagcaacccactccctcccaatgccttccccatcccccaccccacccaagcgtacaaggcctggctgtgtgcctggttacctgtaaaggagaagagcagttactcttggtagatgaca

SEQ ID NO: 790107 - DNA, 613 bp, Homo sapiens
taagatgcagcattctgatgcactatgtctgacctttcttggtcaggaaaataacatcttcaacatctcttgtttcttattctactctttccatattgcttgaaactgatgttaaatgatcaggatgctttttcacttctttagtatcttaattagcatgtgtctgttcctgtagctatcatgagaygtagcagcttttgcagtgacaatatcttcagtcaaatatttgtactttaaaaatattttaacaaaatgtatactagtaaaaatgaagttggaaatcgaaatctatagaaataattatcattggaaaatggttttttggtgggatatatggttatgataaagatttggtgaatcttattttatttctatatcagtacgttttaagaagttcctcttatactgtgctgcttaatcctaccaaaaagctgggcatatgctttgggaaaggattaagtgatgaggtgtatttttgctctttgaaggagaattcattaaaataagaactcattctaagaaaaggaagcaagtaatattgaacaaacatttaacatggttaaattaatgaaggtagtcttagctttggaacaagatcattaaaaatatgaaa

SEQ ID NO: 790108 - DNA, 568 bp, Homo sapiens
gtgatttaggaatgaatgcttatttaacgcagaagttattttaaaatgaggctatacagcagcagtttagtaattaaacatttttaacttgctctccagttctcaaaagtggcttaagcagtattgagctaagcttgctaagtttcaagtgactgcagttagtaagtttgcttgtttgttttaactggataattcctcagtcaatttgagggttttgatgcacataaatccactgtgcttccagcctcatatgagccaaatctcctaaacatgccatatgccattcataagtctttctgtggagtacagtggacaactttgtgactactggatttttttaaacgaagatgatttttcagtatttaaaaaaaatayggttttatagtattaaaactgagagtagagttgagagggactctagtatgttaaagaaacacattaattgtgcctaaaggtgtttgtttttttctcgaaatgcccacttcgttcccaattgatcaaaagatgaaggttccagagactctttcttctgacagacttgattattaggggttcctttctagagaag

SEQ ID NO: 790109 - DNA, 656 bp, Homo sapiens
aaaaatatgcagaaactacccaatttatcagaaacaatcgcagtcagtttttgaatctgactaaaatcttattttgcccatagcttgcctcctctcccactcctcctgctcccacctctcatggaggaagagtggaccagctcacatggggatcaggcattccacagcctggaggtgggtaaggaggatctcaacaatctggraaaaaaaacaaacaacaacaacaacaaaaaaaaaccccactagcttctatagataaatattgatgtggatcaggttgttgtactttgtaagtaatttatgtgcctttattaactgctgaaatgatatagacttgtaccatataaaagggttccaatgttgattcccaatagaaaaatacagctaaagcattttaatattggcctatcatttggcagctgttgaattaggcagttgttttatttaaagtgaatcagtattcttttgtgtataagagaggagtagccctgagggtagtcgaatgcaaaatacagggctcagtccagaaacagatcttggcgtcattcattgtctgggctccagaaagacgttgatggatgctgtggtttagtatccaaattactctatttatatctcagtttctagccaacaatggaccatcaggcatattcaga

SEQ ID NO: 790110 - DNA, 614 bp, Homo sapiens
cgagatgggagagttttcctgccatcagccatcatttccatttgtcaacacaagtggaagacagcttttggagggtagctttatttctccactttgcccacagagctcagcagcatttaaaattcagtcactgtcatcggcaaacccctttgagcagaaacaattccakcattctcttcctacttgcaaaggtgtttaagattaagttctaaatattttaaaggtatctatgaggattggattcttttcttagtgatgacttgatgaataaatgatgccctaatttcagtttaattattgtctaatgctctctaattcatttcagattggcgtttaacttctttttcaacttgacaacctttcaggcaaaactgatcaaaaaaagccaagactccttttacacaggcacggattagttgtctctagatatcaaataaagaaaaatagctgttcaaatccctaatatttttggcactctgtaaatttaaactcatccaaaacacatctttaaaaaatattttaaagtaagggaaggattttgagctcagagtctgagattttgttctgccaagtttgagcatggagcagatttttacggttgaattataagcccc

SEQ ID NO: 790111 - DNA, 578 bp, Homo sapiens
ggaatatagtagtgattattaaaacacacacacacacacactgtggcttagcaacttcacttcttgataactcttccagtgtacaaggtgagatacacattgaatcaccatatgaaatagcaaaaccactggaaataagttaaatatcaatagaggcatgtttacacgaataacagaatattcatacaatggaatactaggcagccattacaatgaattaacagatcaatatgtgctgaaaaagaragatttccaaggcatattgttgagcaaaacaatagtatcccctgtgatattatgtggcagccaagagaatgagccttgtacacccctagggatcataactgatggagggtcctaattgccgcactttgagatccatcgctgcgtctgagtctaggccatgcctcccatgggctgctggctggcagtgactggatgtgggaaggatgatactaaagcaaccctgtcactagaagaaatgggactcctttatcggccaactttgagcccagaactctcgggtgcagtctagaatgattccacctaccttccattaccctttcttcactccggga

SEQ ID NO: 790112 - DNA, 563 bp, Homo sapiens
aatgcctcttgagacctaggctcagaattggtgcaatattgcttctgctacatttcacttgctaaagcaagtcacaaggccaacctagattcagaaatacattctgcaaaaaatatactccacctctttagggagggagctgcatagtcacattgcaaagaggcatggatattggggagagttggaaaattggggctattttgcaaactactacagataagatgactaattaaaggctgttgttagaggagtgacatagataaggaaactgtgcactgagaatgattattgctgaggagttggaaattccacttagcttcctgcttgccctttcggagaagagacaagcctgtgtatgtgtgagtgggttgggagtggggtgtagtkaggggatggtgaatggcatgaggtttatatcctgatccaccactgattagctatgtggctttgagaaagtcagtgaatccatcttagccttgatttttcccatctgtgaaatgggatctcagtttctacctcatagggttgttgtgaggaagaaagaggcaacaggtctggcatat

SEQ ID NO: 790113 - DNA, 608 bp, Homo sapiens
caggccccggtgtgtgatgttccccttcgtatgtccatgtgttctcattaagaaccgaatctttgagttatttatacaagcacatgtggctagtggttagcatattggacagcacagttccagacagctgagcctctgaagaaaaggggccctggaaggttctgagtgatgtggccatcaccccttagtggtttggagatcctgtctcaagggtgcatgagarccagacaagggtttggatatgggtcagctaagcagcagggccttggtagtcttcaaggttattgcctggactctcccttcctatgtctaacagtgccgaatcaagaggaaagctcataattctgaagaaatcgaaaatccagtatagacctagcttctctgccaccttgcccttttctgagtggcacagccacttgtagctcccagaaaggccaaggctttgcatgctacctcactctttattgtgcaaaaaaccgacccatctgtcctgtcagggagaaaggagaggacccttatgagaaggaaaggagtccttcccatttggatggttgcttttgaataaaaggggccacaggatccaatgtggattttgaagacgttaagat

SEQ ID NO: 790114 - DNA, 587 bp, Homo sapiens
agctgggtacccagcagacactctgtaaattaaagtgctgccagcctgaacaatctcagtggaagagctaagtgggtccatttccttgctttacaaatgaagtcgctgaggctcagaggggttaagttcttttcctgagctaggtaatatctggttaagtaagatctgataagtgtgtgtgtgtgtgtgtgtgtgtgtgtgtgtstgtgtgtgtgtgtgtctgtgtgcttggacagggggtgcttccgcctttcactgccccaataggagtcagtcctgttccttttcacttctctacttgatgctctacccaccggcctcaggccatatgccctggtccaccctgctcacagaacttcccgcctggcccctgttacctgaccgatgccacaggcatcactgggtcccaggagccagcctctttacttttggaccccaggccaggatctaaaaatatctctgagtatttccaacacctacaacagatgcgcctgcaaattacctggtcccagtggtggggagcaggggaggaaagggcatcgttgttctaaaagcattacacatttaatttgcaaagttacatcatg

SEQ ID NO: 790115 - DNA, 574 bp, Homo sapiens
aagtggaactacagcagcttgaaggcggccacgggatccctcagccttgggctgctgaacagatgtggccatggcaagtgttactttcccaggcctcctaaataactatccccagggaatatgccaactgaaacatacttagaaatgacagggactctcagggtatatctgtcagsgttgctttgctttcatctggaagtggcaacgacctcaacttgcaataatctcactcccttggcatgcctccaacacatttggtctcgaccatgcatttggtccaaagtgtgggctgctcagcttccaaaggcagacagggtctgtggcatccccacaccctgcctggtgctagcttggtgatgctggcttggcagagtccagtagatgtttgtttcatcgccacattgttttgaccttataagtctatccattggcccccagacatgcctgtggagcagcggaactaccaactatccatcactgtatctccagtgcctggcagagaacccatgcccagaaaagtttttccaacttcagaatgagtgaatgcattggcctttgaatggaattgctgcag

SEQ ID NO: 790116 - DNA, 565 bp, Homo sapiens
ttataggcatgacctgccaggcctggcctcttttcttttttctggaaatgctattgttataattttaaggtactgaggattaattatttgttactttgttctgtgttctgtgaaattttttagactttggctttcaatccatcgcttaattttttttaaatggaaatctttttttatttttcttaactattttatatgatatatattttttcatagcttactawtttttttatggttgtaccactttctttaatttctccagggctaaaaattagagttttgtttggttttgtttaatttctcctgtgctttaaattttgtgttctccagaacagtttgctttaattatttttttagtctgctgaggttttctttttctttttcctttttttttttttttgcctgtgtttattaaattgcttttatcttcaaaaaggtaagtttacctaggaagtgttgtttatgatttctttgttgtggtctatctaggtagttccctttcttggaaggcctttcttctaaatgaaatggctaagtgactcccctatccacatgagatgagctc

SEQ ID NO: 790117 - DNA, 658 bp, Homo sapiens
taattttaaggtactgaggattaattatttgttactttgttctgtgttctgtgaaattttttagactttggctttcaatccatcgcttaattttttttaaatggaaatctttttttatttttcttaactattttatatgatatatattttttcatagcttactaatttttttatggttgwaccactttctttaatttctccagggctaaaaattagagttttgtttggttttgtttaatttctcctgtgctttaaattttgtgttctccagaacagtttgctttaattatttttttagtctgctgaggttttctttttctttttcctttttttttttttttgcctgtgtttattaaattgcttttatcttcaaaaaggtaagtttacctaggaagtgttgtttatgatttctttgttgtggtctatctaggtagttccctttcttggaaggcctttcttctaaatgaaatggctaagtgactcccctatccacatgagatgagctccttggaaatgaggcctactgtactggggataggaagccagctggaaggatgtcgcctatcatctcaggaacaacatacagagtactttactttgtgatgtcaacatccaccatcttttagtttcccccaaggcattattttcatatttaata

SEQ ID NO: 790118 - DNA, 657 bp, Homo sapiens
acacaatggaaatctcagaaggagaagaaagaaagagacagagggaatatttaaagaaaatacagttgaaaacttctcaaatttgattaatgatatgaatataaaatccaagaggaggctcaacaaaacccaagtaggatgtcctaaaaaatagtcacactgagacacattataatcaaacagtcaaaagccaaagaaagaattktaaaagaacaagagagaaatgacttgtcacatacaagagattctaagtaagactgacatcagattcctcatcaaaaacttcggaggccagaagggagtgggctaaaatattcaaagtgttaaaaggaaaaacagaaacaaaaaaattgtcaaccaagaatcttgtaaccaccaaaactcttttaaaaatacatacaaaaaaataagatattcccagacaaagctgagggtctattttgtttccactagaccttccttgcaagaaatcttgagtcatgtagtatcttgagtcatgtagaaaacataaagttatgtaccattcttacaataataccaactcaattttacaaatacctatctatgtatttgtaaaatttgtaaaatttgtaaaagatattacttttactaatatctttaattcttcatgtagcttcaagttctatctagtgtcct

SEQ ID NO: 790119 - DNA, 677 bp, Homo sapiens
aacaatattactttatgttttttataaacagaataacagagatgtaattttgtgatagcaataactgaaaggagtggcaacatagctttaaatgagctgagttgttgtatgtaattgtagttaagttggtataaatacaaattaaagtgttggggctgggcgcgatggctcacacctgtaatcccagcactttgggaggccgaggcaggcatatcacaaggtcaggagatygagaccatccatctaacacagtgaaaccctgtctctactaaaaatacaaaaaattagctggatgttgtggagggcacctgtagtcccagctactcaggaggctgaggcagaagaacggcatgatcccgggaggtggagcttgcagtgagccaagatagcaccactgcactccagcctgggcaacagagcaagactccatctcaaaaaaaaaaaaaaaaaaagcattataactttacaatattatatgcaatatccatggcaatcacaaaaacatatttacagaacatacaaaaaataaattaagaaaggaattaaaatatttcactataaaaaattaactaagtatgcaaaagacagaaatgcaaaaaatgagggaaaagaaaagctgtaagacacatagaaaacaaatagcaaaatgacagacatcttttttttgacattgtaag

SEQ ID NO: 790120 - DNA, 677 bp, Homo sapiens
aacaatattactttatgttttttataaacagaataacagagatgtaattttgtgatagcaataactgaaaggagtggcaacatagctttaaatgagctgagttgttgtatgtaattgtagttaagttggtataaatacaaattaaagtgttggggctgggcgcgatggctcacacctgtaatcccagcactttgggaggccgaggcaggcatatcacaaggtcaggagatcgagaccatccatctaacacagtgaaaccctgtctctactaaaaatacaaaaaattagctggatgttgtggagggcacctgtagtcccagctactcaggaggctgaggcagaagaayggcatgatcccgggaggtggagcttgcagtgagccaagatagcaccactgcactccagcctgggcaacagagcaagactccatctcaaaaaaaaaaaaaaaaaaagcattataactttacaatattatatgcaatatccatggcaatcacaaaaacatatttacagaacatacaaaaaataaattaagaaaggaattaaaatatttcactataaaaaattaactaagtatgcaaaagacagaaatgcaaaaaatgagggaaaagaaaagctgtaagacacatagaaaacaaatagcaaaatgacagacatcttttttttgacattgtaag

SEQ ID NO: 790121 - DNA, 677 bp, Homo sapiens
aacaatattactttatgttttttataaacagaataacagagatgtaattttgtgatagcaataactgaaaggagtggcaacatagctttaaatgagctgagttgttgtatgtaattgtagttaagttggtataaatacaaattaaagtgttggggctgggcgcgatggctcacacctgtaatcccagcactttgggaggccgaggcaggcatatcacaaggtcaggagatcgagaccatccatctaacacagtgaaaccctgtctctactaaaaatacaaaaaattagctggatgttgtggagggcacctgtagtcccagctactcaggaggctgaggcagaagaacggcatgatcccgggaggtggagcttgcagtgagccaagatagcaccactgcactccagcctgggcaacagagcaagactccatctcaaaaaaaaaaaaaaawaaagcattataactttacaatattatatgcaatatccatggcaatcacaaaaacatatttacagaacatacaaaaaataaattaagaaaggaattaaaatatttcactataaaaaattaactaagtatgcaaaagacagaaatgcaaaaaatgagggaaaagaaaagctgtaagacacatagaaaacaaatagcaaaatgacagacatcttttttttgacattgtaag

SEQ ID NO: 790122 - DNA, 677 bp, Homo sapiens
aacaatattactttatgttttttataaacagaataacagagatgtaattttgtgatagcaataactgaaaggagtggcaacatagctttaaatgagctgagttgttgtatgtaattgtagttaagttggtataaatacaaattaaagtgttggggctgggcgcgatggctcacacctgtaatcccagcactttgggaggccgaggcaggcatatcacaaggtcaggagatcgagaccatccatctaacacagtgaaaccctgtctctactaaaaatacaaaaaattagctggatgttgtggagggcacctgtagtcccagctactcaggaggctgaggcagaagaacggcatgatcccgggaggtggagcttgcagtgagccaagatagcaccactgcactccagcctgggcaacagagcaagactccatctcaaaaaaaaaaaaaaaaaaagcattataactttacaatattatatgcaatatccatggcaatcacaaaaacatatttacagaayatacaaaaaataaattaagaaaggaattaaaatatttcactataaaaaattaactaagtatgcaaaagacagaaatgcaaaaaatgagggaaaagaaaagctgtaagacacatagaaaacaaatagcaaaatgacagacatcttttttttgacattgtaag

SEQ ID NO: 790123 - DNA, 623 bp, Homo sapiens
tctttattactatggtttgtctgctcataactgttatacccgtgtgtctctcacttgcatacctgattgttttatgtttgcaaaaaatatgtgtgttattattactgattttattgggtaaagtggcctatgaattgttccattgtgtttttacatgtttcttaaataaattcactttttaaatgtaagtaaatatatttttaaaaattattattattgttttcacaattatattttggagattttgatccyttggaatttttttggaaggataaagtccccccgtaatcacataattaggaaagggaaaccagagttcactatgaatgaatcacctagtgttcagattatattgctgtgaattccaaatcttgggtaaagttctaccacgtataatttctcaaaaagtacatctgttttctcagtggttataatattatgtattttattgctgtattgcttcaaaatttccagataatctgaggactgctgcactgtgattttgagtaaaatagaagtatgtgggcagtagcatttttacacatgccctgaaaaagtggtttggatgaatcttttgggctgcataattagataaatgtaccaatagaaatgagaaagtaagt

SEQ ID NO: 790124 - DNA, 619 bp, Homo sapiens
atgcattgttaggtgactttttcttcgttgtgtgaatattgtagtgtacttgcacaaacctagatggtatagctcactacacatctaggctatatggggtagtctattgctcctcagctacacaccagtacagcatggtactgtattgaatactacaggctactgtaacaaaatgggagttattcgggtatcaaaacatagataagtacaataaaaataaagaataaaagattaaaaaaattgtaaaactgtgtagaacacttacaatgaatggaggttccagaactgaagttgctctggtgtcagccagtgagtagtgagtgaatgtgaaagcctaggacatcacttcacactgctgtagactttataaacactgtacacttacgctatactaatttttaawaaatcttttctttctttgataataaattaatattagcttactgtaacttttttactttgtaaatgtttcattttttaaacttttgattctcataatacttagtttaaaatacacattgtacagctgtgcaaaatatttcatatctttattttatatgtctttttctatttaaaaattttttaggcattttaacgtttttctttaaaaactaagaca

SEQ ID NO: 790125 - DNA, 594 bp, Homo sapiens
attttaaaattaattctattctgcaatgtaagattttttctcttttctaatttttatgaataaacaacaattatacatatgtatgggatccatgtgatattttgatacatgcatccaatgtttaatgatcaaatgtttataataacccaaaaatagmaaattctgaggacaatatactagaaaaaaaatgaacctaaatcagtgcctctgcaggaataattcattaaccacttacacttattattagctcttatggcaagttgtaaactagaacactgaaaaataaaagattgacatggaaaggactggtaaagtaaaaagaaccatttttctggtaacttgcctcctcacaccgagaaaccaaaattgtaggaactgcaacagtttgtaactgttctgaattccatctctgatgctggaatcatagaagtaggttctaagagttttttttcaatatccctcctagtatctttccccaacatctatgttttcaaaaaataacattcatagcattgtttctccactgtagaactggctcatgatctttttttcactgaagttgtctgggtaagaagtctggggacaatgtgctgt

SEQ ID NO: 790126 - DNA, 557 bp, Homo sapiens
tgttgagtggctttattcaacctgagaaaccacagctgagaattcacacaaaccgatgctgtatttgtggaggctccaccgactcacccaaaacacgtgcttttcccctgacctgcaaacttttaacaccttcttctcttcccgtttcactaggctatttgagatcctgcaagatttatcaagactgtactagccatatgaaagcatgttaacacagggagggagagaggaaaagccctccacatgttatgactggcatacatgcttccaaagcatcgttactaacygaaggcccagttcctgaggcgatcaccccagacacactgaatgcaatttgttggtcactgagtgggtatacctaatcaccacagatgtttacatgcagctgcattttctctccgtttgagtcacaatgttttatatgtaaatagtattgtgtgcatgtgtgtgcatatgtgtatttatcctccaagtccagatggagttaattttctgctgttatttgtagttcatgtttcatatctaagaaactaaggacccagatgagctttccttgg

SEQ ID NO: 790127 - DNA, 654 bp, Homo sapiens
tcaggaccaggttgttcagtttccatgtagttgtgcggttttgagtgaatttcttaatcctgaattctaatttgattgcactgtggtctgagagactgttttgatttccgttcttttgcgtttgctgaggaatgttttacttccaattatgtggtcaattttagaataagtgcaatgtggtgctgagaagaatgtrtattctgctgatttggggtagagagttctatagatgtctattaggtctgcttagtcgagagctgagttcaaatcctgaatatctttgttaattttctgtctcgttgatctatctaatattgacaatggggtgttacaatctcccactattattgtgtgggagtctaaatctctttgtaggtctcttagaacttgctttatgaatctgggtgctcctctattgggtgcatatatacttaggatagttagctcttcttgttgcattcatccctttaccattatgtaatgcccttctttgtcttttttttgatcttcattggtttaaagtctgttttatcagagactaggattgtaaccctgctttttttgctttccgtttgcttggtaaatattcctccatccctttattttgagcctatgtgtgtctttgcaggtgagatgggtctcctgaatacagca

SEQ ID NO: 790128 - DNA, 654 bp, Homo sapiens
tcaggaccaggttgttcagtttccatgtagttgtgcggttttgagtgaatttcttaatcctgaattctaatttgattgcactgtggtctgagagactgttttgatttccgttcttttgcgtttgctgaggaatgttttacttccaattatgtggtcaattttagaataagtgcaatgtggtgctgagaagaatgtgtattctgctgatttggggtagagagttctatagatgtctattaggtctgcttagtcgagagctgagttcaaatcctgaatatctttgttaattttctgtctcgttgatctatctaatattgacaatggggtgttacaatctcccactattattgtgtgggagtctaaatctctttgtaggtctcttagaacttgctttatgaatctgggtgctcctctattgggtgcatatatacttaggatagttagctcttcttgttgcattcatccctttaccattatgtaatgcccttctttgtcttttttttkatcttcattggtttaaagtctgttttatcagagactaggattgtaaccctgctttttttgctttccgtttgcttggtaaatattcctccatccctttattttgagcctatgtgtgtctttgcaggtgagatgggtctcctgaatacagca

SEQ ID NO: 790129 - DNA, 471 bp, Homo sapiens
gcagcgcttccctctgggcaggatcccaaagaccaccagtggcttgctagggtcggtaagggttaattgcacatttactaaatacacggtgatgttttcagccctaaatcaggacaaacaagatttcctttctgacatctaaatttacttactttaaattgcatttactcatttattcagtgaccattattaaaaagagtaaagttatttaaaaagttaacaaycatcagccaccaatgcatttttcagttaaaatgatctatttcatcactcttctgataaggcccatttttcttttctttctttttttttttttttttttttttttttacttttggagacggagtcttgctctgttatccaggctggagtacagtgatgcgatctcagctcactgcaacctctgcctcctgggttcaagcaattcccctgcctcagcctcccaagtagctgggaccacaggcccgcacc

SEQ ID NO: 790130 - DNA, 549 bp, Homo sapiens
aaccttctctctgttttttttctgggagttttttgttttctgtttgtttgctaggcattagcccacttggggaaatctaggagttttatagttttaggacttacattgaagtctttaatccattttgagttgatttttttttgtatggtgtaagataatcgttcaatttcattcttttgtatttgcatatccagttttctcaataccatttgttggagactgtatttcccccattttatattcttggcacccttattgaagagcagttgaccatatatggttggatttatttcttgactctattccattggtctatagatttgtctttatgtcagtactataccatttttattactgtagctwtgtaatatatttcaaaattagaaagtgtgatgcctttaacagatagatgaaaagatatgcaatgttactactcatcagggcattgcaaatcaaaatcacaatgagataccacctcacacccatttaaaaaacaaaagacaagtgttggtgagaatgtgaagaaattggcagccatacccactgttg

SEQ ID NO: 790131 - DNA, 566 bp, Homo sapiens
acacccgaggatgatcaaggaaaagtgtacatttggccaggcgtggtggctcacgcctaatcacagtactttgggaggccaaggtgagcagatcacgaggtcaagagaccaagactatcctggctaagatggtgaaaccccatctctactaaaaatacaaaaaattagctgggtgtggtggcatgtgcctgtagtcccagctactcgggaggcttaggcaggaaaatcgcttaaaccggggaggcagaggttgcagtgagctggagctgcactccagcctgggcgacagaacaagactctgtctcaaaraaaaaaaaaatgcaaaattattttaagatttttaagaatgatgtgcaaaaataacagatcccacaccaattatacatatttggaattccataccactccatctttatattagttaataaaatctaattttttattttatttatttatttatttagagacagcgtctcgctctgtcacccaggctggagtgcagtggcacaatctcggctcactgcaatctctgcctcccgggttcaaaagattctcctgcctcagcc

SEQ ID NO: 790132 - DNA, 504 bp, Homo sapiens
tttaaggactttttaaaacatgaagcatttaaaacaaacatgtaaaacagacaaaacagcctttcaggtgatggtaaattcaaaacgtttacttagggcaggtccacacaagacctgctcatttcaagaggccacttctggtgactcctgtgattgtgctgatctgtactggatgagtcagagcccagcttccatcagtgagtaaatgtcacatgtccctccccaacccctgcttttttccgtaacaatttcccaggtaaacctgaaatgcctaaagagctgtttaaataacactttaatttcatcacccccataaagcatttctaaccattagtcagtaactcgcaccyctccccatttccaaaggcaacaccccatctcacctgcactctccattgcaaaatcagagtactacttgcctctaattcaaattcagtcggcaaaatttcactcaatttagatcaacagggcaggtcacgggggctcaagcctgtaatcccgata

SEQ ID NO: 790133 - DNA, 541 bp, Homo sapiens
gcgcagcgcgggccaagagtgggaggctcaaggcaggggatccgcactcggggccattcctgccgcggcgcgccctgcgcttcaagcagtgcacagggtggggacccctcgaggacagtggtgcgccgacgggtctctcggcccctccctttccacaggccccgctggtgtggtgaaggagccagaagaggcgacttgggtgttgagacccggggccaaaccgtggagagtgtctggagcccacactccagattcctggacgccgcagtcagtccagcaggttctacctggagccgcctcggggctcaaccggraggcagcggggtgcaggcgagagggttaatgcgcccggttcggttggtttgaggagtctctgctttcagcgacccacagggcagagagcccagggctccggcttgatgtccccaacagctggggactggagagctggaggggtcgcagactcaggctagagtttaaagtgcgccgcgcggcgagtcgctggactcttctgggtctcacgtggctcctgtgtcacatg

SEQ ID NO: 790134 - DNA, 683 bp, Homo sapiens
accctacaagctaaaagggattgggatcctatttttagcctccttaaacaaaaccattattagccaagaattttgtatccagtgaaactagcatcataaaggaaggaaagatacagcctttttcagacaaacaaatgctgagagaatttgccactatcaagctagcactacaagaactgataaaaggagctctaagtcttgaaataaatgcttaaaatacacaaaaatagaacctccttaaagcatacatttcacgggaactataaaacaatgatacaattwaaaaaacccaccaaagtattgaggcaacaaatagcatgatgaatagaatagtacctcacagctcaatactaatgttgaatgtaaatggcctgaatgctgcacttaaaagatacaggatggcagaataagaaattgtgtccggaattgtttcttccagtgggttcttggtcttgctgacttcaagaatgaagctgcagatgctcacagtgagtgttacagttcttaaagatggagtgtccagagtttgttccttcagatgttcagatgtgtccagagtttcttccttctggtgggtttgtggtcttgctgacttcaggagtgaagctgcaggctttctcagtgagtgttacagctcttaaaggtggcgtgtccagggttgtttgttcctcctggtgggtgtg

SEQ ID NO: 790135 - DNA, 582 bp, Homo sapiens
caaaaaggcaaggtgggagaggtctctctttctccctcctcacattccccctctgcctttttgtttgtcttccttgtgctcaaacgcagtgacttttagcgtcttatactccatttggccaacctccttgaacaacttcttcaaaggaaggggacttttcattctggacttatccttccgtgattgggtgaccacttcagggatatgagatgcccaaggcgtgggttctagtagggagctaataggcctccatttgtctttgttttatagggtaaaccttagaatagaaatttactaaggacctctgtgctttaggagttatgagataaaactgctatttttttttttcctatttagctcctctgtctattccctattagctagaacttggggatatatagamaaaggctgattaatttaaacttaattccacaaaggtgtggatttcaactaatcattgctgtgaagaatctgatgctcacatttttatcttttctaaattttctataaaatatatttctttaataatcacaagatttaaaaaatccccaaacttaattttgtgttggtgtagaaaacctg

SEQ ID NO: 790136 - DNA, 494 bp, Homo sapiens
ggcagtctgccggttctcagatctccagctgcgtgctgggaaatccactgctctcttcaaagctggcagacagggacatttaagtctgcagaggttactgctgtctttttgtttgtctgtgccctgcccccagaggtggagcctacagaggcaggcaggcctccttgagctgtggtgggctccacccagttcgagtttcctggctgctttgtttacctaagcaagcctaggcaattgtgggcgcccctcccccagcctcgctgctgtcttgcagtttgatctcagactgctgtgctagcaatcagtgagactccttgggtgtaggaccctccgagccatgtgygggatataatctcctggtgcgccgttttttaagcccattggaaaagcgcagtattagggtgggagtgacctgattttccaggtgccatctgtcacccctttctttgactaggaaagggaactccctgaccccttgtgcttcctgagtgagg

SEQ ID NO: 790137 - DNA, 502 bp, Homo sapiens
attttgatccaaacaagagctgtttagcctcactgaggccaagtttagagacccatcctaccaattcaatagaacagagacttctcagatatcctgcaagtgcaacatgtccagaactgtgtatccaaagtagctcagcaccctcatttgcagaagctctgctaaaattaataaccattctggatatatgtaccataatacctgtgtctgtattcagaccatgtttttttagtgacttatatttaacgtgcctaaatagcaggcacgttaaaagtagcttatattttaacatttctcaaattaaactttccayatcgtttttactctgcctagaatacttactgcagcactctgttactgtgcatcaaagccctctagcaacactccaactactacccaaagtggatcttgacgtcaaacttcaagttcatcactgtttttttgtttttgtttttgtttttgtttttgtttttgttttgagatggagtttcactcttaccgc

SEQ ID NO: 790138 - DNA, 517 bp, Homo sapiens
aattgaatttccctctgttccatgtttgcagctccctctactgacagtaagaaacctaacttctgttacccttaatgtgtttatgtgtttaattcatcccactcagcatactttcttgagctatcaggatgaaatttgtcctacaatctattatttgaaaaaaaaaaaaccctgcaaccctgcttattagaaaagcagagtaattatagaatgtaaaattagtgaaaaaatttacgaaattttgcctttataatgatatttaaaataaatamcatcatgcctcttttgcaggtaaagaaaatgaaaaactagaatatttaggctcagggtggggtaactttaaaaaagaaggactggtcatgtctatacaatacaatatccttcctgccctaataaactaactcctaaaatactatggtatctgagattattttaattaactagttttgaaacatagtaccatttctaaaattcactggcttttgaggaagtgaaaaaaattagcagaaacacaatc

SEQ ID NO: 790139 - DNA, 540 bp, Homo sapiens
tttgctcatagttcagtagactcacagacatgtaagcaaacaatttcagttcaaggtgatgactgctctgctggaccgtatcaaatgcgtgggcaccatgtacgctcacagacctatgcctgattaaagaggcaggaaagactttatagaagaagtgcagcagaaccaagacttattacaaggagtttgccaggaagatgaatggggaaaggtattcraataggccttatctactctattacttcagctatcgttgatatgcacatatctctgaaaagtttatcttcagccaaaatttatctcccaccttaatgccttaatatcacatttctagcagcatatttccatttggatattccagtggcaattcaaatttatcccatccagtgtcatctctacctagcccctctagaaccagttttgttctcacatattccctgtattggttaatggtataaacttctgcccagtagaacaagcaaaactctcgggtgttagcttggaatcttcattttctctcatgtcccatgttcaatgagt

SEQ ID NO: 790140 - DNA, 587 bp, Homo sapiens
ttcttttacaccttgaactaacttttaaaataggtgtcatttatatctagccccagatagattcagaacaaataggaatatggttaaagcaatttttctttttgaccaaaaccaactaaaaagtgaagaatggaatataaatgggagcgccttgtttggccatgtatagatttttgacctgtgtttgaaacccagtttggcaaattccagccaattctaaataccctgaataatcagtcatttctgttgacaaaggtgtctatgatgagaagctaggagggcaaccaatgtagacagtgccataagaccttttatggtaacaaatgggggaaaaaaatagaccataccgagatactgatgctgtatggcctcctttttcattgaggaaagaaaagccaaatttatgcccagtttcaagtaaaaaatatgtttcyggttttggaaagagagtgttgggtttggccacatacgaaaaaaagtcaaggaagaaatcacctgcaggagctattttgaataatgtcaattacattgtggcttccattatcactgcacaccagaaagaggtctttgccaagtcattgacctcc

SEQ ID NO: 790141 - DNA, 644 bp, Homo sapiens
cggtattgaaaaactgaatattcacatgcaaaagaatgaaattggatccttatctcacactatacacacaaatcaactcaaaatcaattgaagactaaaacttgaaacctgaaatgaaaatattaagaagaaaacatagaaaaamgttttttgacactgatgttggcaatgatttcttgcatgcgaccccaaaagcatagttgacaaaagcaagcatagttgacaaaagcaaacatacacacatgagactccatcaaactaaaaagcttctgcacagcaaaggaaacaatcagcagaatgaagaaacaaactatggaatgagagaaaatatttacaaaccttatatttaataagtaattaatatttaaaatacataaggagctcctacaactgaacggcaaaaaaccaaatagcccaattaagaaatgcgaaaaggacttcaatagatatttctccaaacatacaaatggccaacaggtatacgaagagatcgtcaacatcactaatcatccagggaatgcaaaccaaaaccacaatgaggtatcacctcatacccattataatggctattatgaaaaacaaacaataacaaaagacagcaagtgttgacaaggatttagagaaaagtggactcttgtacatca

SEQ ID NO: 790142 - DNA, 644 bp, Homo sapiens
cggtattgaaaaactgaatattcacatgcaaaagaatgaaattggatccttatctcacactatacacacaaatcaactcaaaatcaattgaagactaaaacttgaaacctgaaatgaaaatattaagaagaaaacatagaaaaaagttttttgacactgatgttggcaatgatttcttgcatgcgaccccaaaagcatagttgacaaaagcaagcatagttgacaaaagcaaacatacacacatgagactccatcaaactaaaaagcttctgcacagcaaaggaaacaatcagcagaatgaagaaacaaactatggaatgagagaaaatatttacaaaccttatatttaataagtaattaatatttaaaatacataaggarctcctacaactgaacggcaaaaaaccaaatagcccaattaagaaatgcgaaaaggacttcaatagatatttctccaaacatacaaatggccaacaggtatacgaagagatcgtcaacatcactaatcatccagggaatgcaaaccaaaaccacaatgaggtatcacctcatacccattataatggctattatgaaaaacaaacaataacaaaagacagcaagtgttgacaaggatttagagaaaagtggactcttgtacatca

SEQ ID NO: 790143 - DNA, 589 bp, Homo sapiens
tggatccttatctcacactatacacacaaatcaactcaaaatcaattgaagactaaaacttgaaacctgaaatgaaaatattaagaagaaaacatagaaaaaagttttttgacactgatgttggcaatgatttcttgcatgcgaccccaaaagcatagttgacaaaagcaagcatagttgacaaaagcaaacatacacacatgagactccatcaaactaaaaagcttctgcacagcaaaggaaacaatcagcagaatgaagaaacaaactatggaatgagagaaaatatttacaaaccttatatttaataagtaattaatatttaaaatacataaggagctcctacaactgaacggcaaaaaaccaaatagcccaattaagaaatgcgaaaaggacttcartagatatttctccaaacatacaaatggccaacaggtatacgaagagatcgtcaacatcactaatcatccagggaatgcaaaccaaaaccacaatgaggtatcacctcatacccattataatggctattatgaaaaacaaacaataacaaaagacagcaagtgttgacaaggatttagagaaaagtgga

SEQ ID NO: 790144 - DNA, 534 bp, Homo sapiens
atttttttcaacatgccgtcattctcgctctctgatacacacacccctacacatgtaagaaaaaaatatataaaatacatacacaaatatgtaagaataaacacccacacgcatattattttacaatttattatttatcttcactagaatataagtctcatgaggacaaaaatttatgtctgttttgttcacggctgtaccctcagcacttaaaacacatagcaggcactatgtgttggatgaacaaataactaaacagaaataggccgggtgtggcggctcacgcctgttatcccagcactttgggaggctgaggcaggcagattacctgargtcaggagttcaaaaccagcctggccaacatggcgaaaccctgtctctgctaaaataaaatacaaaaattagccaggtgtggtgacacacacctgtaatcccagctactcaggaggctgaggcaggagaatcacttgaagccgggaggtggaggttatagtgagctgagatcgtgccactgcactccagcctgggcaaaag

SEQ ID NO: 790145 - DNA, 634 bp, Homo sapiens
gatcaacacaaaaatagataatctgtagtatatatacacaacgaaattctactcaacaatataagggaacaaactaacgacccatgcaacacaaatgaatctcaaaaatattatgctgagtgaaagaagccttacacacaaagcacatcctatatgattccatttatgtgaggttctaaaactggcaaacataacctgtgattaagaaaaaaaaagccgggcgcagtggctcacgcctgtaatcccagcactttgggagtccagggcaggtggatcacaaggtcaggagatcgagatcgccctggctaacacggtgaaaccccgtctctactaaaaatacaaaaaattagccgggcatggtagcaggcacctgtagtcccagctactcgggagtctgaggcaggagaatggcgtgaaccyggtaggcggagcttgcagtgagccgcaccactgcactccagcctgggtgacagagcgagactccgtctcggaaaaaaaaaaaaaaaaaaatcagaacagtggttgcctctgaagggatggtgtggggattgacttggaaggggcatgaggaaacttcctggggtgaggattctatatcctgacagggatttgtgtcacataggtacacacatgt

SEQ ID NO: 790146 - DNA, 574 bp, Homo sapiens
tgcacactttttgtgctctgccctgcaccctctgccaggattctcacctgccattttttcctcacagaagtgcatcagcagaggggagctccaggtgtctctgtcatatcagcctgtggcacagagaatgacagtggtggtcctcaaagccagacacttgccgaagatggatatcaccggtctctcaggtagcagctatttacttcaacctatttcttactgtctgaaccatccccgactccttgcctgtggcccagatagacctccacacttcaagatccttgcctctttcacttttaatctgctcctctttctgtagacattctcttcctgaygagtatctacgtccaatagatttccctggctaggaagattcttcagttgaacaaatggggtctttacatttggcaaggtatcctaaataatattcatgccaggtgctaagagagacttctcaaaaaggctgcaggcatttgtctctgtgccctttaatatacttcttggtatcatgggatttcttcagacctaacctgagaaagttgttctgttctattcctgcttggtttccttggcc

SEQ ID NO: 790147 - DNA, 525 bp, Homo sapiens
aacttctgttcttcaaaagacacaattaagaaaacaaaaagataagccataggctgatagaaaatatttgcaattcatatatttgataatggacttgtacccacaatatataaataactctaaactcaataataagaaaacaacatttcagtttaaaaataggacaatgatttgtatagacagttcataaaaaaagatatatcaatggaaaataagcctatgaaaacataatcaatctcaataggtattagataagtgcaaattggacccacaatgagacaccataacacatttattagaatggcmatattaacaaacaaacaaacaaaaactggcaataccgtgtgctggcaaagatgtttagagcaattggaactctttttacattgctgataggaatacacaatggtacacccaccttagaaaactctttgtcagtttctgataaaattaacatacacttattatatgatccaatgatcctactcctaaatatttacgctacagaaataacacattcacaca

SEQ ID NO: 790148 - DNA, 552 bp, Homo sapiens
tgagagacctagcttttttttttcctcacaagtgaagcaagaaaccagttatctgctttaatgcctaaaacagctgattactccaagttctcctagcgatcctgtttcattcactgacacataagcttatgctgatgctaaatgtaaggtgacaatttcaaatrtgtcattcttaaagatttatattagaagtataataaaatataatcttcaatgcagatgcatgagaaaactctcatttcttaagtcagcattcaaaacagagaagagagaaaaatggagcaacttttagagtacatgttccatgccaggcactgtaattggtattatatttactatacaccataaagatgtggataaacatgggtaacatgataaaaaggaaagagagtccagagacctagatgctagactttcctttgttattaggctgtgttactccaagctattcataattaatatttgacagtgatttcttagaaaaggcacttgtctcaactaatatacaacttcatttccaaattgttgagatgtgcctaatcaacattcaaa

SEQ ID NO: 790149 - DNA, 576 bp, Homo sapiens
atttactgccatagtcaccttttcaggaccattttctgctaattccttatcctccaacctaaggggctcacttgctgtcctttccctgccctcatggttgtgatcacattgattcttcctccaggaaatccacctcactcccacctgtaaaaatgttatacagctctcagtgctgcttgttcatgaagcctttcatagccttcccaacaactgcacatgctttccttggcttctgagacccagcactttatttgtaactgtcttgcggtggggtgtattgaagtctttggggatctgtctgaccccgttcccygggttgtattgacatctgcgtcttctgtagcactaacactgcacatggcccatggtagccatgcaatgcttgaaaggaaggtttgagaacatgtactacagagcagggaattgagccccagagacttatttcttggttccttcatcattgtaagcattttccttaaactgtttcagaatttccaagtctctgccaatttgtcaagccctaggactccaataacagtccagcaatcccaagttagaaggaggatattgtctcaa

SEQ ID NO: 790150 - DNA, 576 bp, Homo sapiens
ttcccagctttctagaggttgcccatgtaccttggcttatggccccttcctcgctttctcacagccagaaatgttgggccatgtctttccactctgccatctcttgggctttccctcttctgtttccctctcctgattttctttctttctttttgagatagagtcttgctctgttgccaagggtggaggacagcggtgtgatcttggctcactgcaacctctgccttccaagctcaaacgattctcctccctcagtctcccaagtagctgggattacaggcaggcaccatcacgcccagctaatttttgtatttttagtagagatggggtttcaccatgttggccaggctggtctcgaactccttccctcagtgatcctgcctgccttggcctcccaaagtgctgggattacaggtgtgagccaccatgyctggccccctctcccacttataaggacccttgtgataggatccaccaaaataacccaagccaccatccctattttaagggcagctgattagcaactttaattctctctgcattccttaattctatctacatcctctttgctatgta

SEQ ID NO: 790151 - DNA, 603 bp, Homo sapiens
gaattgaagggaaaaaaactggccttcccctgtaggatgagtttcccaaggccagatgtgcctggctcactagtatgtctggcctgtgctggcacactagagttgctcagtagttattcgctgatgaatggtctttatgttaattagggtccactctcagagactgagaacctttcactaaggttctttctgaatccttcagaaagtcagtgttcccctttgtcaaaataaatatgtttttcttgctagaatacatatacgactatatacattacatatacttttactcatgtttcctgaagctcaaactcacaggatgaggcatataagatagcttactgatgatgctgttttaccatcattgaggtgtggycatttactggtcaaagaatacacgggtgatcgagaagaaaggctgaagaaatatggcggatgggaagggaagggaaggcaaaagcattttttttttttagaaaaaaaagatcgatttctttggaagataatgctggcttcagatgacattgaaaaattgccacgtataggactcatctttcccaaaataatatgcaattaatgtacctgaattcttccatttccttctta

SEQ ID NO: 790152 - DNA, 625 bp, Homo sapiens
caccatcactaaatgacctcactccctatgtcacagacaacacaaagtatacaggaaaatttcaatttcctgccatctcctttagattcattttcccaaataacctgagagctggttgtctgatttgcttttgtattccactgagttcttcaattcctaaaagtcatgagccagcttgctcaacaatgccccattttaacttattaatcattcccctatataaatgtcctctacaatcttcttacctacagttaggaaggtgctcaacagctgctctgtggcgacaggtttgatctctgtccgaagattaacaaatctgccaactaccaagggggctcggtggaaacccagaatcctggtttggaagattgaagaacagaagagaaaaatcttaggggatgttttttaagtaacagtmttaaaaattacagttcatcatgtcaaatgtgtaaagggtttttagctagtagctaaacctaattttttagaggtacatatatttaggaatttaatgtgaaggtgtgtataatttattttaatatacatttcagcaaaaaaaataagacaaatttgataaaatgtgaacactttttaaatctacagagtgggtatatgggctcattat

SEQ ID NO: 790153 - DNA, 599 bp, Homo sapiens
aatagtaccatatattggactctgattcagaatatacacagctttctggagaacttcaccccagccctgcaaagtattgtcacctagttggcattgtaattgtgacgtcaaaaggccattccactgttctatcaatccagctgcttcaggatggtcaggaacatggtaagactagtgaagtccatgagcatgagaccactgcygcacttctttagccataaagtgagtgccttggtcagagacaatgctgtgtggaataccatgatggtggataaggcattccatgagtccatggatggtggtcttggcagaagcattgtgtgcaagataggcaaatgcatatctggagtaagtgtctattccttgaagacaaatctctgcccttcccatgacagaagaggtccaatataatcaacctgccaccaggtagctggttgatcacctcgagaaatgatatcatattgagggctcagtgttagtctctgctgctggaaaattgggcattcagcagaggccatagccaggtcagccttggtaagtggaagtccatttgctgagcccatgcataaccttcatccctgccaccatggccactttgt

SEQ ID NO: 790154 - DNA, 629 bp, Homo sapiens
atgactgagttcttttcagaaacctagacttaaagcttttcagaaaggaaaatggtaaaagacttgcagcttggagccgttactcaattggtgatgatgttacagcctagacttttgtccttgatctatttcctggaaagatttttgattttgctttttgttgtttagattttttaattaaagatgatgatgatgatgatgatgatgacttggtttaatatagcgaagataaaaaaatttcaactcacttcccaattctaattgattattagtagcttcctgaaaagctgccttgcactgtgtccaagcttatcagaaagaccatgctggattcatcagaagtgcctaggggaggggagaagcagtatacaccacattgcyccctccttggcctaattgcttgatacaatagaacttccctaagtgttttagaataaaggcatcatccagaggtagaaacaggtaattacaaccataaaatttccaaattaatgcttaggcagtttaggttggtggagtccacatttttgttggtgggtgggaggagcagggaagaattgtatttttgtaactaatataaattgttagtccctgagatttaaaaaatcatcattatataacatcctaga

SEQ ID NO: 790155 - DNA, 637 bp, Homo sapiens
tatagttttcggatattctagtttatgttttttattctttgttttctttcttttacagcttgggaggtttctattgatggctcttaagcacagggattctttacttacctgtatccagtctattaataagcccataaaagggattcttaatttttgttacagtgtttttgatccctaacgctttgtcgttgttgctgttgttgttctaagatttccatctctctgctcacattacccatatgttattactatctgttattaggagctatctattttatcyattaaagcctttttcgttttaatcatagtagttattctaaattctaggcgtggtaattcaaacaaccttgcttgtcttcttctgatggtttctctgtctctgcaaatggtatttatttttatttatttattttttgcctttcaatatacctcataatttttttcttgatggccaaacatgatatactgggtactgagctattgtacattggtctttagtaatgtggtggtaaggtgtggggtgagaagaggcatcctatgattaagtctcaggcttttagtaagactttgcctctggattgtgatcgttatatgtttctaatgtttttcttccccctcagttggtacagagtggcta

SEQ ID NO: 790156 - DNA, 601 bp, Homo sapiens
tttcagaataaaggacattaatttagatttatttttgtaattattattgtttgaatatgtgggttaccaaaaaatatgcatttattgagattagattttaataataaaaatccctcttaaatgaatcctgatttatgcactttgtgggctaaatgaattaggctctcaatttttatctgaatctatggagcttggatataaattgaaaagatcacagctatggggagaagacctacactgcaaaggcctttytgcatagattatgaacataactcaataattttttcgaaactgtggttataattggacccaatgggggtctgtttctttgatcagatcacagtaactgtgactttacactggaaaatgtcactattgtgaagttttatcacctgtagagctggtctttcctctgatgctgtgttcatttctcattagcattattcaaagtttagttgttaattaggttgacagttcaattacaatcatatacaagcaaagtcagggctacttgcataaagaaataaaaataacccttcttgcatagatatatgtgtgcatgtgtatttgtgtatatgtgtgcatgtgttgtgtgtgtgta

SEQ ID NO: 790157 - DNA, 509 bp, Homo sapiens
gtagactaaggtggttagcaccttagttctggtgcttagtacttcaaagagttcttagtctagagcctctctccttccagtcatttctacaaaagactgtcagatgaaagttacttaagctatataaagtcccctgctgaaaacctttcgtagctccccattttctatagaatttgwtaaaacgttggccaggctttcaggaccatccatttcttagattcaatccaacttttaattttcctcctctattctggtcacattgttttgttcagcttcttgaatgaacatcatgctttccttttggactaaagcctctttgttgactatgtgttgttagtctagaacttgctcagtcttcaactttgtgaaacctcttgtcatacaacttaatgcagtgttttttctttcctgtgaccctctctgctgctttatgtttgcatcttcttttgttgcacactgtcaaagtggaaaggtttaatagtcatttgtagactgggtgataaaaaact

SEQ ID NO: 790158 - DNA, 607 bp, Homo sapiens
taatcatattagaattacaggattatattatatgattatagttgttatggtgatctgtgatcagtgatctttgatgtaactatcataattgttttagggtgccaggaaccacccccacataagtcagcaagcttaattgataaatgttgtgtgtgtcctgactgctccactgactggctattctcccatctctctccctctcctcaggctttcctattccctaattaataaccttacaatgacctccacgcatccaagggaaaaagctaaaaatgatgaagcttgttgaggaaggcatgtcaaaaactgagacagcctgaaagccaggcctcttgcaccaagcaattagccaagttgtggatgcaaaggaaaagttcttgaaggaaatggaaagtgctactgcagtgcccacacgaatgacaagaaggtgaaacagccttattgctgagatggagaacgtttgagtggtctrgatagaaaaagtcaaacgagccatgacattcccctaagccaaagactaatccagagcaaggtcctaactctcttcaattatatgaagggtgagacatgtgagaaagctgtaggagaaaattatgaaggtaggaga

SEQ ID NO: 790159 - DNA, 627 bp, Homo sapiens; identical to SEQ ID NO: 735838

SEQ ID NO: 790160 - DNA, 588 bp, Homo sapiens
cagaacccggaaaaaagataatcaaactgaagcaaaccaaattcttccgcctctggtgttgctgtagtagaactctctactgacaaaaataaacctcacgttgccagctggcaacagtgtttaaagggcccaactcaggtccattttcacagaacaagccaagataactattggatagcaaaggaagagttgattgtttcgtttgttgtgcagaagctctatgtttgatgtagtcttgtctgtttttgcttttgtggcttatgcttttcatgtcacagccaagaaattattgcttaaactaatgtcatgaaggttttcctctatgtttacttttaggggttttatagacktaagtcttgggtttaattctttaattcatttttgagttgatttgagtgtatggtgtaatacaaaggcctaatttcattcttttgtatttgggtatcttgttttcctatcactctttgtgaaagactatcctttccctattgtgtattcttggaactcttattgaaatcagtttgtcatatatgtgtgggtttatttcctttacggagagaaatggtccacaacaatgtctctgtcctt

SEQ ID NO: 790161 - DNA, 599 bp, Homo sapiens
acccctgctgcctccctcagcatgaacctcggtatgaagacagagacaatgttatgtgttcatcccataggttcttcccaggcatttcccggccccgtagggttagcattggttggcaaaaaccatgtgacagagatttgctgatggcaatgtgatgcagtaaagagatggtgtaaattctccatgtattcttacattgtgtggttggaagctagaaacctctgagaggacagactggcaagaaagaaccagctgacatccccaagtgatcactataggacagctgccaagaaaagctcgctgactcctctgagccccaaatagaagcaaaaaacaaagcttggttgtgttaagccactgatatgcaggggttatctgctaccatggtagagcttgtcctctrctgactgatgaaatggatcataagaatagtagcaaatattcattgagtgcttcctgatttgaatgcctagtcattgggctaaatactttacatataataccttagttagtcttaataattattctgtctgataggtactattattttaccctttttagataagaggtttagagatgttaagtcatatacttgagtt

SEQ ID NO: 790162 - DNA, 599 bp, Homo sapiens
acccctgctgcctccctcagcatgaacctcggtatgaagacagagacaatgttatgtgttcatcccataggttcttcccaggcatttcccggccccgtagggttagcattggttggcaaaaaccatgtgacagagatttgctgatggcaatgtgatgcagtaaagagatggtgtaaattctccatgtattcttacattgtgtggttggaagctagaaacctctgagaggacagactggcaagaaagaaccagctgacatccccaagtgatcactataggacagctgccaagaaaagctcgctgactcctctgagccccaaatagaagcaaaaaacaaagcttggttgtgttaagccactgatatgcaggggttatctgctaccatggtagagcttgtcctctgctgactgatgaaatggatcataasaatagtagcaaatattcattgagtgcttcctgatttgaatgcctagtcattgggctaaatactttacatataataccttagttagtcttaataattattctgtctgataggtactattattttaccctttttagataagaggtttagagatgttaagtcatatacttgagtt

SEQ ID NO: 790163 - DNA, 510 bp, Homo sapiens
aaggcaatgataacctcaactttaacagtcagatattagttgtgctaagagatagtctgggttaattttaaattatttggatcagtttgaagttacgtggagaaattggcaatggtttaatctacttgaaccagtctataccagataagtacagttagaattaatttgagctggattctgctagtatagacattctggaacacccttggatttttgctaatcctttaacagagatattattggcagttagatagtaattattatgttaagaaaatgtaattatattcttaggttactgaagagtttaatcagaaataattaaatgtttcaaaaatcatgtgggcatctctaacactgctagygtagcaaaacctcctgtccaaaacctccttccagtcactacctcctccatcttttccaaagaaaagccttaccctgacttaacatgccatagtgtgggcgaaggattacccaggtgctgaggcaagagactgaaggcacaactgttgc

SEQ ID NO: 790164 - DNA, 590 bp, Homo sapiens
tatctggaggaaaatcagtattgaaggagcaattgttttgcagtgacgcatggggtggctcatagcactggaaacagcagacagtggaagaacagttgggagcctgtcaaaataatcccacatcgaatcgactagtatatccttttagtttatcctctcatatacctccaggttgcaccaacatctctccgtcactactcccaacctagctttgttagtcttctctcacccgcaaactgcaaacrtttcctaaccagaccattggcatccacccttgcccttcccccatccatctttcagacactgcagttggaatatcatttgcaaaattaacatctgatcatgtcacccttctgcttctcattgttcttatgataaaaacaaagcagcttgatgttgaatcacgttaccccttgcttttgtagtttcaattgtaatgaccgtctctgagtcttctaaatgtgccacgcttccacccacctcagggcctttgcacacactgttcattctgcgtggcagactctccctccacctcattctttgaaactttcctaacagtcatttcctcagggaaacattcactgacttct

SEQ ID NO: 790165 - DNA, 625 bp, Homo sapiens
ggatcctggcgttccagtaaatggcaaacggtttggggacagcctccagctgggcagctccatctccttcctctgtgatgaaggcttccttgggactcagggctcagagaccatcacctgcgtcctgaaggagggcagcgtggtctggaacagcgctgtgctgcggtgtgaaggtacgagcctgcaggctgggagcagtggccattgtcagccagagaggctggggagggggagcaagcagcccaggccatggtggttcctttctgcgttggtccttcctcttctcccagaacgaagggccactctctcaccctcatgctggaatagcaggggcttcataaggccactgtgcgtaggaatttaaattataaccagagattaaagtagagaaacggctctggattgtcaggyatcaaaagcacctcttctttcaaatgagaactctcttcggtatcacagccattaagatccctgtttccagctcctgcccaggggagctccggcagcccaaagtagcattggcagcgctgcgagttttcgggtctttcaagctgcctgtcactctttccttctccacatgtttattttccccaattccctgggatgtctcccagtctcggccttt

SEQ ID NO: 790166 - DNA, 613 bp, Homo sapiens
acattgcttcaagtatcagttctttccttttgattgctgagtagtattctactgtatgcatgtatgcagtcatctgggctgcttccaatttttggcattatgaacagggatcttacgaacagttgggtaaaggtctttgtgttgtcctgttttatgttttcacagcttgtgggtaaatatctagaagtagaaytgctgagtcatatggcaagtgaatgtttaactttccaggaaactaccaaacttttctaaagttttcactcacaccaataagtataaattccagttcctttgcacccttaccagcactttactattattaaaaatattttttagccattctagttaggtctatggtggcttttcattgtgatttctaatctgtacttccctaatgtctaacaatgaacatttctcatgtgcttatctgccaactatctatctttggtgatttatctgttcaaatcttttgttcatttgttaataaggttgtcattttcttataagaggtctttatatgttgtggacacaaaatttttttttccaaatatatgttttataaatattttctcccagtatatgacttctcattttttttaagagtatcttgaag

SEQ ID NO: 790167 - DNA, 538 bp, Homo sapiens
ataaatacagacagagcgtttgttaacacattctgattaacactatgcttggttcagggggggatctacctattttgaatttgctaaatctaccttctttttttttttagaaatgattgcaagtagcttgggaaaattagctgtgacaaaaggattgacaacctgtaggaactcaggataagagagcagttaaaattctagcaatctcattttagaaaagcagacacagggccaggcacagtggctcacgcytataatcccagcactttgggaggccgaggtgagtagatcacttgaggtcaggagttcaacaccagcctggccaacatggtgaaatcctgtctctactaataataaaaaaaattagccagaggtgggggcaggcgcctataatcccagttacttgggaggctgaggcaggagaattgcttcaacctgggagacagaggttgtagtgagctgagactgcaccattgcactccagcctgggcaacagagtgagcctctgtctcaaaaaaaaaaaaaatcaaacacaaat

SEQ ID NO: 790168 - DNA, 631 bp, Homo sapiens
ggatactgacatgtgtattttcttgatttgactctgcagttcctcatcagaaggaagtacttcatcaattacgtcctcttcatattcatcaatttcttccccatcatactcatcttcgcttcccacatcacttcctgacacctctgcctcatcctccaggtatttcctcaacctcctagaaagcaattttgaggattagaaaatgcaacartgaatatactcacagaatatggaagcaaagaaaagcagaacagagtcacttctaataataataaacataatacatttgataatatttaaatttttttgtaatagtctccacttatgatggtttgacttaatgatttttcaactttacgatgacatgaatgtgatacgcacttagtatgcttctcgatttacgatggagttatatctggataatatgaaagtgcattttcaacttatgatggattgatcaggatatagtcccattgtaagatgtggagcatctgtatttaaaagttgatcacttaatatgtcttgtgtgctaataactgtgctttacaggcattaacatattatcataggaatgggtactattattctcttcattttacagttgagggaattgagcctcagaaagattaca

SEQ ID NO: 790169 - DNA, 532 bp, Homo sapiens
cttccccttggtaaaccttatggagcttgaatcaaagtcacccaggatggggttagaattcttctctccactcatcctcttcccctcgaccgtggagtgaagaaggccctcctgcttcccactttccacagagggcctcttgggkgaaggcctgataaagagcttatggtgatgtgtcttccctgatttgcagggcctcatcattcttgtcattcctagctttataatttcactgtctggctctgaaattatgcaagagaacaaatgcatgccacacttagtgccataaacacacaatctccaggttcttgttgaagggtcctcttgggtgctggtgaccctctccatactttcaagttgctccagccaaggccacggggtaagtgtgatggtgaaggatgcccttgtgcctcggcttgatgctgggtgctatcaggaagtgctccataactggggtccttgccttctgggattctcatctaatgctacattgatattagacatctaggcacaacaaccctctaaaaatact

SEQ ID NO: 790170 - DNA, 404 bp, Homo sapiens
ccagatcccaggcctggccgtgccagaatccagccctgctaggatcctcccctgcccacactatctgccttaggatgtgctgggcctattgcccagcacgctggcatgtccccaagctgtgttgacagcaggaagaacactcaatgccagtaagcagactcrgaggaggaggcagtgcagacagctgagaggggacattgctacccactagggaggccaaggggcttcctgcacaggagatggggtctgaaatggaatgggagaagggtcagcatagaagctaaagctgggttccattattcactcattcattcagatattcattgaccccatgcactgccccaggctttgcagaccctgagggggtcctgggttgaatcagaaaagcttcctgccccagggga

SEQ ID NO: 790171 - DNA, 658 bp, Homo sapiens
catattgtacaccttaaatatagacaataaaaaagatttttttaatgggggctttttccatggtatgtagaccctcttctttctccatggttatggcatttttactgctttattaactcccaaaactaactctccaactctgccttctctcactgacagacctataacctcaacttcaacagggccacctacaaatgcttcatcttcctcccctctaggacatagggtatagtctgaaacacctgggatcaaaacctagatctgacatttgttgggtgtgtttccttgagaaatggcgtctgatttctcttattttcccccttgataaatgggataattcttttcacatatgcttgttatgtggctcagtgaggtaaaatatgggtcacaatgcttaccatataataagaatccaaatatgatcaytctaatcccaacaatgcaaactgcctttttatgttttcagcttctttccaaaaaatgttagttgtctgctgttagaattagttcaactgggagtaccagcactctcccacaatttgagggtagaaatcttggattcctctttaaccttccctctgctttttctcctatggctgactgatctgttaccaagaaccagcaatccatcctttcaaacatccttgattcatcccat

SEQ ID NO: 790172 - DNA, 649 bp, Homo sapiens
atgctcatcatctctctgaagacctggcaggactaagcccacattctcacgtggcgcacatggggtgcactgaacagtggcaagttttccagaatctcacaatgtgtatgtgcctgactcccagcaccccctccccatcccccacccactttttactcctgcaagcatttgggtttgcaactctggacatagatctctcagcttatagaatatatcaagaccagatactaaatcagttttcttctgcctttgaagaaaattctgtatattggtaaacaaaaaatagaacactaaaggctttgacattcttgggaaatgatgggagaaagggtaaagtaaaattgtgaacaggaaaagacccttccctcctggctgataataatttttctgtccttgtccagcatagcctaagccagtttttgctcttcggtggtggtaactgacatatataaagcccttccatttgctcctggaattattttcctwttgaagctttcagatagctcttaattatagaccttgaggctttctgggtctgtactttgcacagcttctagctgtgtcttttgggttctgtttaatcagcctgtgactacatgaatttgaacagctattccctgctgaaggcttttgcaaatggagtttccaa

SEQ ID NO: 790173 - DNA, 602 bp, Homo sapiens
gtatttgtgtttttgttttccattcgtttatgtttctttggttcgtagtgtcagaagacgatgttttttatgacaaactgccctcgtttgaaaggcgctgtgaaacgcctgcaggtatggtgctagccaagtgatctctagagacctagattccaaaaatccaagccattatccatctgaatgctataaacttcatggacatgccctcacctcatgagtgtccagtgcctctcagatgcaccctgtatatttactgttcatcrtggaactcgtgccactgaaaatttttaagtgactatattcaaaaacagcaggttgcatgacagtttctcagtgaagaggttcaaaaaaggtgagatgctattgctttgtgaatttacaaaggaaagaataatttaactgctcagaattacatgtccggtcactgctttttaatttaaaaaataatagagcatcattagtaatcttgttttctctttgatacataggtaaagggtgttttgtgtctggatgcctaaggtgattccaagggaggggatggaagatatgtgacatcttccctgaaatttatattgatatgcaatgctttgtcatttaaaacc

SEQ ID NO: 790174 - DNA, 479 bp, Homo sapiens; identical to SEQ ID NO: 788771

SEQ ID NO: 790175 - DNA, 439 bp, Homo sapiens
tttgccctaggtcctttggagaattgcccttcagccccagagcccttgccttttatagagagcttgaggatcttgattgcttaggttcctctccagcccctacccagcccatcacagcgaagaactgactgaggtaaggctataaaaatcaggaacattacctccaggaaaattcttagttgagctttaatctctaaatttctagggatcaggctgaggcggagacttctgaaactgcacccccatttggcttcygcccttttcctatcccgctcccccaattcctctctaaccttatccataagcgctaccataataggtcactggtacctgaatacatgcctaggagtttgcttctgaggaactcacctgggagaggagtggatatgcccataattacatttacacccaacagaaccaggccagtttatgtcttcta

SEQ ID NO: 790176 - DNA, 563 bp, Homo sapiens
ttgggagagataaatatggacattcgaattctgaaagtttaaaagtccccaacctgtaaaagtcctctcagcagggcgcggtggctcacgcctgtaatcccagcgatttgggaggctgagtcaggcggatcacgaggtcaggagatcgagaccatcctggctaacacagtgaaaccctaactttattaaaaatacaaaaaaattagacaggcatggtggcgggtgcctgcagtcccagctactcaggaggctgagacatgagaatggcatgaacccaggaggtggagcttgtagtgagccaagatgatgccactgtactccggcctgtgcaacagagcgagactccgtctcagaaaacamaaaagagagagagagagagaaaagaaaaaaaaaaagtcctctctgaggcacattatagtcaaactgtcaaaaatcaaagacaaatagagaattctaaagacagcaagagaaatgcaacaagccacatataagtttatcctcatcaacctaacagcagatttctcaacagaaaccttaaaggccagaaaagaataagatgatat

SEQ ID NO: 790177 - DNA, 574 bp, Homo sapiens
cagacaagcaaaaacagaaaattcaacatcactaggctggccttagaaaaatgtttaagacagtattatatgtagatgcaacagaacaataactaccatcatggtggcacataaaaataaaaaactcactgatagagcagatacacatatgaggaagatgaaagagtcaaacttgtcattacagaaaaccaccaaaccacaaaaataaacagtaagagaggaacaaaagataaacaaaacaattatcaaaatgrcaagaataagtcttcacctatcagtcataaccttgaatgtaaatggcttaaattccttaattaaaagatatagcctgggtgaatggattagaaaaaataaaaataaaaaagaccaaactatatgctgtctgtaagaagcacacttcacctgaaaagatacaaatagactgaaagtgaaggaattgaaaaagatattccatgcaaacaaaaaccaaaaagcagaagtagctgcacttatatcaggtaaaatagatttcaagtcaaaactacaaaaagagaccaagaagattattataaaatgacaaagggatcaattcagc

SEQ ID NO: 790178 - DNA, 677 bp, Homo sapiens
gaaacaaggagctctaaagacaagcacctttcagggtcacagaaacctagtgacagaactggtatgaaaccagcatgggtgacccttgcccaggctgttgctgccccttccatgctgactttgaaatggaaaagttggggccttgtgcagtgcctggcacctagtaggtgttcatgaatcttggaaarctcactggctgattcttcaaaagtgttattccacaactgcaactcttcatttgcttatttatccttccaactagagtataaggtctttgagatcaagagcacaactttattgcaccttgctaaacgcccattgcctagcatgtagctggcactcaaaatatgtcctgatacacgggatacacttacgtttaatgaaaattagatgtcctgagccagaaacagggcccagagctaaacagacaactcaatagacacaatatttttaaaagatagttgcagagagtgtgtctccctgtgtttggcagatggagtattacacaactcaatactggttttcctgactagaccttaattagtacagtgagggaagttggtcaaaagaaacttgtttctggcaggaaaagactgatgatagaaatagcaaaaacatattggcacttaactccataccagacactgtgctggactttatatattctctcaattaat

SEQ ID NO: 790179 - DNA, 653 bp, Homo sapiens
cacctttcagggtcacagaaacctagtgacagaactggtatgaaaccagcatgggtgacccttgcccaggctgttgctgccccttccatgctgactttgaaatggaaaagttggggccttgtgcagtgcctggcacctagtaggtgttcatgaatcttggaaaactcactggctgattcttcaaaagtgttattccacaactgcaactcttcatttgcttatttatccttccaactagagtataaggtctttgagatcaagagcacaactttattgcaccttgctaaacgcccattgcctagcatgtagctggcactcaaaatatgtcctgatacacgggatacacttacgtttaatgaaaattagatgtcctgagccagaaacagggcccagagctaaacagacaactcaatagacacaatatttttaaaagayagttgcagagagtgtgtctccctgtgtttggcagatggagtattacacaactcaatactggttttcctgactagaccttaattagtacagtgagggaagttggtcaaaagaaacttgtttctggcaggaaaagactgatgatagaaatagcaaaaacatattggcacttaactccataccagacactgtgctggactttatatattctctcaattaat

SEQ ID NO: 790180 - DNA, 443 bp, Homo sapiens
cagcttgtaaatagattttttaaaattcatagcagaaaaactaatcttaaacaccaaggtttgtgattttgcaaaagatgggttttctggagcttcaaagggctaagtgcagaaagaagtgaaacatgaatgttttgtccataaacagtcaattagaagagaacagatgaagaaccagaccaccctccctggaggttagatagggtttcctgacctggggaggagaatttgaattgaagaagagatagcactgaaagccatgagcatggtatttytgacctctcaccactcctcaggctaagttattagggacacttaggtctccgctcaagtttaggaacccaggaataaagtggtagattgcattattatttaaaaatatattggctcggtgcggtggctcatgcctgtaatcccagcactttgggaggcaggggtgggtg

SEQ ID NO: 790181 - DNA, 536 bp, Homo sapiens
caggcagcagtctctcttagtactgcttttgctgaatcccacaggttttggcatgttgtgttcccatttctatttgtttcaagaatttttttgatttccatcttaatttcttcattgacccaatggagcatgttgtttaatttccatgtatttgtatagtttccaaagttcctatttacattgatttygatattctgtagttggatcaaatgttctgtaaatatctgttaggtctatttggtctgaattccagtataaatccagtgattctctgttgatttttttgtttcaatggtctgtctaatgctgagcgtgggatattgaagtcccccactgtgattgtattggagtgtatctctcgctttagatctaggaatatttgctttatgaatcagagtgctttttcatgtttcccatatccttacattaatacacatatctgttcatctggtggaacagttgctttttccaattttttgaatttacttttgtaggggaggactttttcctgaagctgtatatatgttgtatatgtt

SEQ ID NO: 790182 - DNA, 618 bp, Homo sapiens
ctcctatcattgagcttagtttggctggatatgaaattctgtccgttctcagatctcaaactccatgctgggagaaccactactctcttcaaagctgtcagacagggacatttaagtctgcagaggtttctgctgccttttgtttggctatgccctgcccccagaggtggagtctacagaggcaggcaggcctccttgagctccagtgggctccacctagtttgagcttcccggccactttgtttacctactcaagcctcagcaatggcggattctcctccccgagcctcactgccaccttgcagttcgatctcagactgctgtgctagcaatgagcaaggctccgtgggcatgggaccctccgagccatgcgtgggatataatctcctggtgtgccatttgctaasaccattggaaaagcgcagtattagggagggagtgacccgaatttccaggtgccatctgtcacagctttgcttggctatgaaagggaattccctgaccccttgcgcttcctgggtgaggcgatgcctcaccttgctttggctcacacttggtgggctgcactcactgtcctgcacccactgtccaacaagcccagtgagatgaacccggtac

SEQ ID NO: 790183 - DNA, 618 bp, Homo sapiens
ctcctatcattgagcttagtttggctggatatgaaattctgtccgttctcagatctcaaactccatgctgggagaaccactactctcttcaaagctgtcagacagggacatttaagtctgcagaggtttctgctgccttttgtttggctatgccctgcccccagaggtggagtctacagaggcaggcaggcctccttgagctccagtgggctccacctagtttgagcttcccggccactttgtttacctactcaagcctcagcaatggcggattctcctccccgagcctcactgccaccttgcagttcgatctcagactgctgtgctagcaatgagcaaggctccgtgggcatgggaccctccgagccatgcgtgggatataatctcctggtgtgccatttgctaacaccattggaaaagygcagtattagggagggagtgacccgaatttccaggtgccatctgtcacagctttgcttggctatgaaagggaattccctgaccccttgcgcttcctgggtgaggcgatgcctcaccttgctttggctcacacttggtgggctgcactcactgtcctgcacccactgtccaacaagcccagtgagatgaacccggtac

SEQ ID NO: 790184 - DNA, 580 bp, Homo sapiens
caggctgtagtgcagtagcaggatcttggctcactgcaacttctacccccacctaccaggttcaagtgattctcatgcttcagcctcccaagtagctgggattacaggtgtgcaccaccaaccccagcaaatttttgtatttttagtagagacagcgtttggtagtgttggccaggctggtctcaaaatcctggcytcaggtgatctacccaccttggccgcccaaaatgctgggattacaggcatgagccaccacaccgggccctcttttcagctattttaaaagagcataaccacatatttccaagattggtttctactgattactgattaggtcactttcaccactaaaatcttcaaaccagtgcaatatttgtacatgttttgttttcaagtacacacatgaaggcctaacagtgatacaaggcttgggttcaaaaatcactagaaagtctcacatcatttttttcatcaccacttaatccaagtgaatgtcgcttaattttaataatggtaaaaacaactaggttgagagaaatcccaattcatataatttcctaaaggacaaggccaatctgtc

SEQ ID NO: 790185 - DNA, 727 bp, Homo sapiens
gaatatatgcttctcaacagatcagcccttaattcaaataagagcagttggaacgacaaaaggtgttcagttgtacccttggaatccacagaaatcctgggtagggaagctcgagtaccaccaactggaaagacagggatgcctagtagctgattcggggcccattgtcgtaggctttgtccactttgcaaactggagacagggactcgactcaccttctccagccactggaggamcgggaggaccttcagaggaggtgaggtcgacttcatggtaactttagatcctgaaacctcacaggatttttcttctcttccctttgatctctcttccgctaacccaacgggacaggactcgccgcctttctttccggtcagaaaggggtcccttccggacaggaccgaaatgagcagcttgttttccctacctgtccttttgggcctgggcttcttgggagcttaggctgaccggagacctacctcggggcgagtgggaccagcaggagccgggaagggcgcgcgcaccggggtggaggttgggcgccgggggtcgggaaccacagtcacaccctcctcttccccgcgcgcctcccacctgccccctacgatgccgaacgaagtggcccctaaggcttctctacaggccaaaccgaaagaggcctgatgctccaggaggggcgagaggatcctcggtgagcgaacccagccttctacctggctggccctgg

SEQ ID NO: 790186 - DNA, 727 bp, Homo sapiens
gaatatatgcttctcaacagatcagcccttaattcaaataagagcagttggaacgacaaaaggtgttcagttgtacccttggaatccacagaaatcctgggtagggaagctcgagtaccaccaactggaaagacagggatgcctagtagctgattcggggcccattgtcgtaggctttgtccactttgcaaactggagacagggactcgactcaccttctccagccactggaggaacgggaggaccttcagaggaggtgaggtcgacttcatggtaactttagatcctgaaacctcacaggatttttcttctcttccctttgatctctcttccgctaacccaacgggacaggactcgccgcctttctttccggtcagaaaggrgtcccttccggacaggaccgaaatgagcagcttgttttccctacctgtccttttgggcctgggcttcttgggagcttaggctgaccggagacctacctcggggcgagtgggaccagcaggagccgggaagggcgcgcgcaccggggtggaggttgggcgccgggggtcgggaaccacagtcacaccctcctcttccccgcgcgcctcccacctgccccctacgatgccgaacgaagtggcccctaaggcttctctacaggccaaaccgaaagaggcctgatgctccaggaggggcgagaggatcctcggtgagcgaacccagccttctacctggctggccctgg

SEQ ID NO: 790187 - DNA, 646 bp, Homo sapiens
actttttcaatttaatattttacctaccaacttaaaaagatgaacaaatcccatttattaagggaaattgttaatttatttactaatatctgcatgatttaggtaaaaattgatatgtgttttgctcattttcactaatttaatatctgctattagatgattttctatgattcatgccattaatattgacatactatttttttaaaaaaacrtcagtaatgtgatgtgtatcttattttgatatatctttaattgcattagtttcataggtactggagtatattgctaggttgtgcaagcacactatcaacttttggttgttttctgtgagcaaacattatcctttgttctaaattgttattatttttaaaatccggacatcataaaaagattatattgaaaatgtggtctgtaaaataaatttcaacaggaaaaattccaattatttttattacaaaagcattttagatggataaacaattaaaaaatctttttttgtcaaaaatacaaagtttgcattgtttggttatctataccatttattacctctgatttttgctttttgaccttatctattatctattttagattctcaaaataactgcattatccttttaaattcaatgcaccaaaattattactgcca

SEQ ID NO: 790188 - DNA, 591 bp, Homo sapiens
tttttatatctttttgtggcttctctgccctataggatacacttattaattaaacatcaggttattcattacaaaagcattttctaaaaaaagcagtattgtgtagtcgctaaagtcatgtgctctgtttccaaagagcagttcaaacaaagactgagtgatcctgaagaattacccaggttctctgtgcctcattctaaaagtgaagaatgatgaaaaatataaagaaaatgttgagaattgaacaaaaagggaaaagaaacttcatgttattaatttaggaggtcaagtatcttaactaattgcaattccataaagaacacacaaaatgaaggaaacattacagaaagacaaggtagttttccagaactgaaggcctgagcctytatatggtgaaggcccaccatataagtaagtattttatagttattgatgctacagttaatgcagttttaaatttttcagaaatacaattgattattttatattgaacttgcatatttagaatttgtcagtcttaattagttcaggtagttggctttatagattcctttgggttttgtataaaattaattatgtcatctgtgaata

SEQ ID NO: 790189 - DNA, 548 bp, Homo sapiens
agtttatagaattaaaagcaaaaatagatcatttacaatcatagtgagaaattttcattgaacaagcaataacaaaattagtaagaatataggacatttgaacaatacgatttttaaaaaattatcttatttacatctatagaacaccagaccaatggcaaaacacacattgtattcaaatacacatggaacatacgagtttcttcaaatttcaaatatttggaatttagcaagaaataattggcataaagktaactagaaaattccagatgtttagaaattcagaaaaaagtattctaaacagcccccggatcaaagaagaactcaaaatacaaattaaaacatatttttgaaacaacaataatggaaatgctacatgccacatttgtgggaattttgtagctatatttgtttatagctaaaatctatttatagccaaacttgtgaggtgtttatagctataaatgaatatattaattaaaaataaagtctggatataagtaatcaagcattcatttacagttcttaagaataacagtaaattaaac

SEQ ID NO: 790190 - DNA, 590 bp, Homo sapiens
tcaatccatttaaagtcattaaatgttaatttaaaaaacagtttaatcaaagtggctacggtttctaaaagaaaaaaatagtgagaagaatgttgcaaatttctttaatattggcttcatgtaagatagctggcttatcatatctacttctgcatatgaagaatccaggttcacacagataaatcgttgggaaaggaaggagtgtcttcagaatattttggatattcttctttgatatgacacaaaagttcattgtttcttgaagtctctttgmaagatagaatctgcaatcaaagcaatgaactttttatattgttatattaaaatccatgactctatctttcatttttaatggactgtttactaatacataggtttgcaatttcattcattggtcatttggaaactactggttcactgagttatacatattctctaaatgttgacacatttcattatacagtatcaatctcaccaccaatcttatcagagaagtttttaaatattgagaatttttcaagcttctgatggccgataaaagttttccaaaattccaattttcacttgaacccatttgccacaaatacctt

SEQ ID NO: 790191 - DNA, 674 bp, Homo sapiens
agtgattaagcagagagacactggaatgaagatgaaagaactttgggtatagttgctgaaacagaattgactgaaataaaatagatcaaaagcttactaagttctcaaggaaactgtatggccaaagaaactaggaacctgaaactttggtatttatataactctctggcctcaatacttgcatgagccagatgcgggctrtgaatattaggtagccctcaagaaaggcacagccccagtgcttcgatcagatctggtaatggagagtaatggaaaaagaagaaattcccagagcttggagccagagttcctgcgggggaaaaaaatgagataagtgtgttcttacatagcagaatggaactctaattaagggacaccactcccttaaaccaccaccaccgtagtagggatcttcccattttgtctagtcagatttcataattgttatgggccagtgtcttccattatttctctatcttagagagagttcctattatgtccctctgattatgccccaacgctgtttattgtcatcatgtatggggctttggattacttctctttttagtttgtgggctgcaggcccacgttctgccagttctccataaggagaactgcttgttatccaagtagctatatgttgacctggatccagtggctaaatgcaatcttgg

SEQ ID NO: 790192 - DNA, 646 bp, Homo sapiens
caaacatagtgctgaagtactgtctagtgttgctaagagcaaaaagggttccatgtgccttatggagacaatgtgtgtgttaggtaagcttgattcaggcatgagttatagcattgttggccatgagttcgacattaattaatcagcaaaatgtatgaagtgaagtgtctttaaacagaaacacataaaacaagattaggttttgatcagttaatgaacatgttgtggctaaaggcttgcaggaaactaaacttgtatttcctctaagagcaatgactcggtactcactaattcagtatttcctgtagcaacatttcakaatacaactatcacttcatgaaacacaacttgatagaacacgaattagaatttattgtactgacctatactatctcacatattaaaaaaatttatataaaaccaaaataaggtaaataaggtaaaaggcaaatgacaacctaggaaaaatacttataatacttaggaaaacaaaggtttaatattgacgatatatgaaaaaaagataaaggtgggaaaataaagtatattaaagtggagtgactttaacttagcttttgataaattatagttaaaatcattggtcaaaagtttcaaaagtattagtgggaaacttaaagtttaaaag

SEQ ID NO: 790193 - DNA, 626 bp, Homo sapiens
aaccactgttctgtcaaatagcttcttattcccaccctttttatgaagtggcaacccaaaaaaattctcagacactttagatactgatatgaacaaattgaactaaaatgtatattctgtggaagctcttccacagtaactgaacatctcatgtttgtttggcattgattgtcacgtttttgtttctgcctgcttattgtcaggaaatctttgaaaagtttcaagagatacagcaagcaaactcctataattggcttggcacagggtattcctctgatatgtaatccaaaatcartgatcaatgttttaataggattttttagaattaatttttccaatttcaattcatcatcatctttatcgaaaattaaactttatgtgtagctaaggtattctatatttaaaaaacagttatagtttctaacaattgcttctcaataatagtaataataatacttgtctctgacattttatagcatgttttatattttttaaacttttttcaacattaattatttctcaatccttacctctctgtgagattaaagaactcagagaggctacatttctacaaagattacttcctgtatgaattttttatgtctaaagctcatatttgatatcaa

SEQ ID NO: 790194 - DNA, 505 bp, Homo sapiens
gaagcttccgaggccccagactctaggatgggatccagcagcctttatagctcaagtctagtagtgactctatgtcatacccgcgagcatgctgtggtacaggtagaagagttggaaaggacgctaaaaagaattgagaacaagtaagtttattctgataagtgaggagtggagagaagagtaaggcaaggagaagggagrgggaataaaggagacgttggtgcctgtatagataatctactttgttaattatgctcaggacaaactgttcagtccttctcatggattacctagctaggaggctccagattcctgagcctaccagttcttagaccttggtaagacatttgtgttcctttcagcgttagggcaaaaaggaggcttgagtgtaattgacaatcctggccacttgtcttgttaagggcttcctagtttcttcccttattatggagagttttctcagcctccaagaatgccggaccttgagtgtggtgactcaagtcag

SEQ ID NO: 790195 - DNA, 578 bp, Homo sapiens
tacgttaggagcacctgcaggaaggtaagtggtttcattcatcttgtactccagctttcccagatcaccactgttttctcctgtgcctccctagttgtgttttagaatgcttaaagccttccttgttcttaaaagtaaaataggccaggcgcagtggctcatgcctataatcccagcactttgggaggccgaggcgggtggatcacctgaggtcaggagttcaagaccagcctggccaacatggtgaaatcccatctctaccgaaaatacaaaaattagctgggtgtgatggctcatgcctgtagtcccaactacttgggaggctgaggcatgagaatcacttgaacccaggaggcagaggttgcagtgagctgagataacgccactgcactccaktctgggtgacagagtgagactcggtctcaaaaaaaaaaaaaaaaaaaagtaaaataggtgagctagggagtgctagcaatatagcataggtagttctttgctggtggctgtgggtcctagattcagtcctaccttagatatgttttgggttctcaacctgtagtatggcatcaaggtcctga

SEQ ID NO: 790196 - DNA, 644 bp, Homo sapiens
gcttatagctatttagtgccaaaagcaggctagcactcatctttttttctttacagtaagagaatagaatactgcaacagtaaaatacaaatggaattgactgaatttttaattcccatttcaagtggaattccgtaagagctatcatttaccaaatacgaaaatatatcattgctcgactatagaaaatttggctactatgaagctaagtgtattcgtggttattggtctctcatttgatctaaagtgatctcgtcaccagttatttaatattatataaacattactttaaaacagttttaatcagtacctttgtgatacagttgtgtgaaagaattcctcaaaatgtaagaaattagcttkgatttctctccttgatttgaaatattaatttttttttttttttaagacagagtctcgctttgtcactcaggctggaatgcagtggtgcgatctcggctcactgcaaccttcgcctcctggggtcaagcaattctcctgcctcagcctcctcagtagctgggattacagatgcctgccaccacgcccatctaatttttatatttttagtagagacggggtttcaccgtgttggccaggctggtctcgaactcctgacctcaggtgatccgcccgcctcagcc

SEQ ID NO: 790197 - DNA, 598 bp, Homo sapiens
tgtctttataagagaatgatttatgttccttggggtataatacctggtaatgggattgctgggtcaaatattatttctgtctttaggtcttaggaatcaccatgctgtcttccacaatgattaaactaatttacactcccaccaacagtgtgtaactgttccttattctccacaacctcactaacatctgtcattttttgactttttaataatagacattctgactggtatgagatggtatctyattgtgatttttattcgcatttctctaatgatcagtgatgttgagcttttttcatatgattgttggctgcatgttatgtcttcttttgagaaatttctattcatgtccattacccactttttaatggttttttaatagggttgtgtgtttctttcttgtaaattagtttaagttccttatagatgctggatattacacctttgtcagatgtatagcttgcaaaacttttctcccattctgtaggttgtctgtttactctgtcgacagtttattttgctgtgcagaagctctttagttttcttagattccatttgtcaatttttgcttttgctgcaattgctttggcatcttcgt

SEQ ID NO: 790198 - DNA, 645 bp, Homo sapiens
ttaaaactaattctataatccataaagtgaaaaacattcatgtaaataattcagaattttctgaatattgttcatggcccactttctctcaagccttgagtgtctgggcttgtattaagctccagaagaattccttcaaagaccccaggaaacctaatgctgttcctctgcttatgacaaatctcagatcagttttgccacctggccacagggaaaacctcttaaagcctagtttaatatctcttcttagaaggaggaaaaatgatgatgatcaaaaattacatggggaaatgaacaaaaaataaagatgtagtcttaccctttggaaccaaacaggtaccctccaatggacaagagaattttcagtttgggattcctgaagtagaagaataagatgattatttawtttctggctgccagggaagcctttgtctaaagaacagagttcttaagtgtagagaaaatggacaattagggcctggctgtttgaactaaagtgaagttcagtgaagggatgaagcactggtgagaacagttaggatcagaaatacacccagagaaatatataggaatgaatgaatgaatgagatagtatgtcttagtgtcagcttaagaccagcttccctcctctaaaatccatgcagg

SEQ ID NO: 790199 - DNA, 531 bp, Homo sapiens
ggatcagaactttagagttgaaagggagagtttaaaaaacattaaattcaataaaccattctgcagatgagaaatgtggggctctccaaaagttgtaaaatataaccacagcagagcccaagaaagatgtgactcgcaatacaacgctcatacaccaagagactaagaaagcttggcctctttcctgtcttagctccagttctaatgtggacaagaaggacctctgcacaaactgagaacatcctgccagtgcaaagggttcyggctactgctgcatttttgtccattcaggaaagatcaggtggttcccctacaacagttgcattggcttgaaattttttgacactaaggtcaacggaaagactgaagtcccaggaaaggaggaagattacttcttctacagacctgttacctcttccttcctcaccaactttcctgctgaattatcaaccccatgctcacctgcccagagagacttctggtccatggtggttgctcccatatccttggccagcttcttctgggatacac

SEQ ID NO: 790200 - DNA, 632 bp, Homo sapiens
attgcctttctcctgcacccaacttgaatataagctctatgagaacaggagtttttgtttatagttttcactgctgaattctaacccctggaactgtgcctgacacatcgcaggtgctctatgactgctgtgagtgcctaccattgataggaacaatggtctgttacagttgtatgatgactaactggttgatttttatgcagtatcttacctctcagtgtagttattttaattcaattgctttcacttcctaacttaaccaaytgagcctttaatgtattccagggactgacgggggaatggagttaaaatgaaaaagataggcattgttctgacatagtttactgtctagtggacagacataattaaacaataaagtccaacacaatacataaaacaaggatagtacccagtcgagagaggctactcaccaacaggcacaataaaaattcaagatcgaatgtcagatgcaaaatgtggaatctcatagaagggagatgagaaagatgtatatcaaaaaagcacattgcttctttattactgttttaaaagaaagggtgactatgtgggagagaagcagcaaaagcaatctatttggttgttttaggagaactgaaagcaaggaataacgg

SEQ ID NO: 790201 - DNA, 626 bp, Homo sapiens
ctgaaaatgtttataaaaataacggatcaaagcatcaagattaaaaaggtgaaagataaagaaaagagcatagcagacacccagtgaaaaatggtgcttctcaaagtatggtcctgagaccacttctggtgctggtccctgacaacatagagtgttcataaatgtttatagcaattgattttgccacaacattttaatagcatattttatgacaaaattagactctaagggattataaataaaaaggaaaaatattaatcacgactagtttcagaaacattggtataacataagtatgttggagtcccagaaatggggaagagaaagaataaggcagaagtaacatttgaatctctattggctaagaatctttcaaaactgataaagcctcaacacacaacttcaaaaggctycatggaccctaagcagcataactacaaataaaaacttacctaggtacgttagaacgaaactgctgaaaacctaagaagaagaaaagaaaatcttaaagtctgtcagaaaacaaaacaaaaaaaaccaatcttcaaaggaactgtagttcctgaagctgctgccttttcaatggaaatggtctagaatccagaagtcgatgaagtggcatcttc

SEQ ID NO: 790202 - DNA, 579 bp, Homo sapiens
ccaaaatctccttaagctgacaagcaacttcagcaaagtctcaggatacaaaatcaatatgtgaaaatcacaagcattcctatacaccaataacagacagagatccaaatcatgagtgaactcccattcacaattgctacaaagagaacaaaatacctaggaatacaacttacaaggaatgtgaaggacctcttcaaggagaactacaaaccactgctcaaggaaataagacaggacacaaatggaaaaacattccaggctcatggataggaagaatcaatatcatgaaaatggccatactgcccaaagtaatttatagattcagtgctatccccatcaagctaccactgactttcttcacagaattagaaaaaaacgacttgaaatttcatatggaamcaaaaaagagcctgtatagccaagacaatcctaagcaaaaagaacaaagctggaggcatgacgctacctgacgtcaaactatactacaaggctacagtaactaaaactgcaaagtattggtaccaaaacagatacatagaccaatggaacagaacagaggcctcagaaataacgccacac

SEQ ID NO: 790203 - DNA, 509 bp, Homo sapiens
tgtcatcctttagaagactagcctaggattgctcacatggttggggaaagattcccagcagtaagagggagcaatgcacattttccaagcctctgtttgtgtcagtttgctgatgtcccattggccaaagcggtttacatggccaagctatgattcaaggatgaagaagtagacttgcatttatgtttgtatttatacacacacatacacacacctaaaaattaccaaacagaatgtctgttacataatagtggtagttaaaatttattaagcactttttgtaaataatgcctagtaagagtcaggtggactattattatttaatatgttctatctcactatgrtgtgaaaaagaagaaacgcttttaaataatttggtatatttgacatcttaaaatcatcttaatgataacacttttcacataaagtaaagctctctctctctttttttcctctgcagtaagaaaagtggaaaaccaccattacagaacaatgaggtaaaagtttaa

SEQ ID NO: 790204 - DNA, 576 bp, Homo sapiens
ggaagttaattttacttgaagtggttgaggtaggtggtaccttgtttttatgaaaaacgcaggtccatttcaaaatagaaatataaaacataaattgtttaggggaaaaaagagactttaaagaaatatttcaaccttgccttctagacttctctataaatatttttctctgccataagaggtactttgctgggaaagcttacatcattcctgtgtaatagaaagactataaatgttagggtcagataggagttatgatttcagctccctgacctgctggctctgcaacctttacaaatttacttaactacactgaacttctcttcatctataaaataccytttttttctagtcgtgatccctgtggcccttgtggacccatgcacatctgctcaggaaacgtggaattgttgtgaggatatgatggggttccagggtttcctcctgggagctggcactttgaagccggtgggacttagcctgcttttctgtctttaaaaggctgtatgtcaagtcatcactatccatctttttctagctgttgctttttcatctctttcttgtttgggcctgtac

SEQ ID NO: 790205 - DNA, 588 bp, Homo sapiens
ctatgataccgtttagatgaaactaaaccagtggtttgggatttaattaaggaaagatagaatctgaggttcaaatttcattattttgcattttgctttttattttgacttatatacttcatatattttttatatcctcatgtaaagaatgtgtgcattaagtagatgtctaatccaattattgtagtatcataaacagagaaataatatcttaaatgagctctgaaaaatcagaaaagtgtggtatggttgaaatatatgttttattaatactgataatatgcttattttattatgcaattcctaaccaatttaagaacctttttacagtgcagccaaacttattacacattagaagttttattttatatcactttggcaatcagaggtgtagatacaaaccgaggaacttsaatctcatggtaaaaatgatctagaatatacttataatgatcttttaaaaattatcatcaaaatgaaaataaaattaagaaaccatggtggaaatttcccagatgccctaagcatgcatttgccagccttgagtgatccacttggaggaacagtgacccagagtggggtttctca

SEQ ID NO: 790206 - DNA, 644 bp, Homo sapiens
agatatggaatcaacctaagtgcctatcaatggaggactggataagaaaaatgtacatatataccatggaatactactcagccataaaaaagaatgaaatcatgtctttcacagcaacatggacagaactggaggctattatcccawgaaataactttgaaacaaagtcaaatatcaaatgttctcacttataagtgggagcttaacgatgtgtacacatagacatacagagtggaataacagacactgcagattacaaaaggtgggagggtggcggggtgagggttgcaaaattacctattgggtagaacattcactattcaggtgatgggtacactaaaagcccagacttcactgctgtctaatatatgcatgtaagaaatctgcacttatacctcctaaatatatttaaaccatttttttaatgtaaagactattttaaaaattatatataataccaatgcaaaagttgataactaaagcacattgcataacttgtttataagattcactacactcataaaattgggttcctccacagcaactataaaatagtgttccataaaaatatggaagtcctttagaaaaaaggcagaagagccacataagtcatcttacagacggaattctgggaaaacggctta

SEQ ID NO: 790207 - DNA, 599 bp, Homo sapiens
caaccttcccaatttccccagaaaggaggagaggcacccagatgtatgttgcagagtcagggaaactgaaacacaagttgaagaaaatcaggtgaaaggagccagtgagaatttgaattcaaatagcagcccaccctcccttctgcacactgccttgctctagccgcactgctgtgttcctcagtgccctcactggggccattggaggtggtagctctgccgccgcaggctggtcagtgaccaacttgtgggtggaaaggagttggggagaggaggaaggagagatgcgtttccagcctgttcaggcatcctccatgcccatctctccttatctctttggaaaacctgtcttgacctattttcaccctttttttgggggccagccataaatggccccaatcacagcccttgggtagtrccagacctgtgactcaggagttgctgactctcttgatttcaggattttgtgactttgatgggataacctttgaggaattcttgggggggcagctggaatgagcctacttggaagctcagttaggccttggttacgagcaaagcatgtttatgggatattaaaaatagatttcaagcaaata

SEQ ID NO: 790208 - DNA, 555 bp, Homo sapiens
gagactgaacttggtcagtgtctttcaaactgtactcttttgggacccacaggaaccactgtacggtggggtggtagtcagggaggggctgagggacagttccctctcaggcagagcaattccgacttttatgttttatagattttgtttccaaaacggattttgtttgcagagaagttctattttaacaagtttgaaaggcaaggaactagccaacttattcagtgctttcctgctctgggagtgtctctaataacacatctccttgccggacccaccaatggggcaaagctggggtttttgcctttttatgcacatatggtcataawctctcaacactaggtggcaggatacctgtaaacacaggaacatacatggcttggccattaaacctgaggaccgcatgtcagatgattctggctttactctgcacaaccaaggagaagggtgcaagtgttctttagcatggaccaacgtgacagcaaagtgaaaatgtggcagagaccagaagacccactcaaactggcctcctctaaccctagcactgaggtactc

SEQ ID NO: 790209 - DNA, 647 bp, Homo sapiens
ccatccagtgctacttttggctcagtagagaaaatagaagaattctgtgaatctgcctctgccttttacaaactgccctggttggaagccaagacaaatgcgtacagaataatagagtgcagaaagcagtacctcacagcscattgttgtttcatacgcaatgtgtcccagggagttctgccgttagaagtatttggaggcaaaggaatttgaggtagacttcaaaggataatggaaatttgagtaaattaagagaggaagaggaggccagtaggaaagaaaataaagggcattatcaaaaagtgcagccaggaggaaaagcacagagggagaacttgctgtggagtttcttctctgggtcaccactgactatgtacaggtaacctccagcccgtgttgggggtactcagccccagggccagggactgtccctgtggcacacatacctcacccccgttcagcacccaaagtagacctcacaagtggagcaccatactcttttcactgagtatgaacttgatgtcagaatccttttaagtgaaattccccagataagcatgatcagatcatttgttagttgatgcacccgtatttgccgtctctcccctaggcctttccacaggtgctcaagcatggacaggacacag

SEQ ID NO: 790210 - DNA, 545 bp, Homo sapiens
ttcacttaaataatcctacacttcaattcctggccccctatcatccatgcagacaaagctcctcttttgttttattcattattttttccccgttcccctttcgaacttccattctcacttccgttaggtttacatgctaacttgttgatatacatgtccttagacatgtgtttacctgaactatgtatagcagcattttgcatacgtgtttttaagtttcataagtaatatgatgccattaattttattctatgcccttctttcaattgactatgtattttttttgcctttgccaaaataagactttattttgaaagtcatttgaaggacactgagaaagacaggagaccttasattcaatggatgtagattccaactttggattcttgcctgcctcactaatggtctctgttaggctggaaaggtgctttctttggtcattccaatttttagcttgctggagaaaacatcttttcccagaagccatcttcttcttttgtgtgtgtgtgtgtgtgtgtgtgtgtgtgtgtgtgtgtgtgtgtgtg

SEQ ID NO: 790211 - DNA, 573 bp, Homo sapiens
ggaatgtttttgactctcagttccattactttttttttttttttttttttaaattagagtctcactctgtcttgcacaggctggagtgaagtggcctgatctcagctcactgcaacctctgcctcctgggttcaagcagttctcctgtctcagcctcctgagtagctgagactacaggtgcccaccaccatgtctggctaattttgaatttttttggtagagacggggtttcactatgttggccaggctggtctcgaactcctgacctcaggtgatccacccacctcggcctcccaaagtgctgggattacaggtatgagccaccaygcctggcctcagttccattacttctggtgtcaccttgtacatgtcaatgatacagattaagctgtgcctcctgcagcagtggaacagggatggcagtaataacagatctcacaggactgtttgaggagtcagtgggaggtgacgagacaaggcacacagagacatttcgagctctgcacccagatgttcatttgcgactggatcctcgcaaagcagacacagtgacattccataagtgtgttgcca

SEQ ID NO: 790212 - DNA, 518 bp, Homo sapiens
gtccctctccttgaatctggatgggcctatgactatagcagaggggatgacatgtgggttctgaggctgggtcatacaaggtgaaacagcttccgtccagtcttcttgggattctctctctccggttctgtgataggaggaagctcaggccacatgaagaggccatgtgcctggggtggcagctccaactgtagcctcagcctacagcagacatcaatcactagacatgcaaacaaagagacckcccccgtgactccagcccaagccactgtctgaccgcagtctcacaagaatggtccaggagaccccagtcaatttcagaccatgagagagaaaacaggctgagcagccctaatccaaaatttataaaatctgaaatactccaaagttcaaaactcttcgagtgccgatatgatgctcaaaggtcatgctcaaaggaaatgaatattggcacattttggatttctcatttttggatcagggatgctcaactggtgagtataacgcaaatattccaa

SEQ ID NO: 790213 - DNA, 616 bp, Homo sapiens
ccatttataaatgaaaaaagttgtctgggcatggtggcttctgcctgtaatcccggcacgctgggaggctgaggcaagtggatcagttgaggccaggagttcgagactagtctggtcaacatggcagaaccctgtctccactaaaaatacaagaaactagctgggcatggtggcgtgtgcctgtaattccagctactggttggggggcaggcagaggcatgagaattgcttgaacccaggaggtagaggttgcagtgagccaagatcacgccactgcactccagcctgggtgacagygagactctgtctcaaaaataagaaaatgtagttatatgaaaaaagttatatgtaaaaaatgcaaaagaatcaataataaaaacaataaaacatatgttaatatagcaagccataaacttgatatacaaaaagtcaatatcttcataaatgtaaataataaccatttagaagttataacagaaaggaaaccaccatttacattagcaatgaagccaggcatggtggtgcatgcctgtagtcccagctacttgggagacttagctggaagtatcgcttgagcccaggaggttgagacaagcctaggcaacatagcgatact

SEQ ID NO: 790214 - DNA, 616 bp, Homo sapiens
ccatttataaatgaaaaaagttgtctgggcatggtggcttctgcctgtaatcccggcacgctgggaggctgaggcaagtggatcagttgaggccaggagttcgagactagtctggtcaacatggcagaaccctgtctccactaaaaatacaagaaactagctgggcatggtggcgtgtgcctgtaattccagctactggttggggggcaggcagaggcatgagaattgcttgaacccaggaggtagaggttgcagtgagccaagatcacgccactgcactccagcctgggtgacagcgagactctgtctcaaaaataagaaaatgtagttatatgaaaaaagttatatgtaaaaaatgcaaaagaatcaataataaaaacaataaaacatatgttaatatagcaagccataaacktgatatacaaaaagtcaatatcttcataaatgtaaataataaccatttagaagttataacagaaaggaaaccaccatttacattagcaatgaagccaggcatggtggtgcatgcctgtagtcccagctacttgggagacttagctggaagtatcgcttgagcccaggaggttgagacaagcctaggcaacatagcgatact

SEQ ID NO: 790215 - DNA, 723 bp, Homo sapiens
tttacaggaggagttaatcctcaaggattggaacctaactgtctttggcaaatggatgtcacacatgttccttcatttgggagactagcttatgtacatgtatgtgtggacaccttttctcactttgtctgggctacatgccaaacaggagagtcttctgccagtgttaaacatyaccttttgcagtgttttgcggtgaagggcattccagcttctattaaaacagatgatgccccaggttatgctagccaagccctagctacatttttctctatgtagaatattaaacacattactggtatcccatacaattctcaaggaccagccatagtagaaagaatgaatctctccctaaaacagcagttgcaacagcagaaaaggggagacagagagtatgggaccccacagatacaactgaacctagcattattaactttaaattttttgagcctgcccaaaggatagatgttatcagcagctgaacagcatctacagaaaccagctgcaaagacagaagcagaacaactgatttggtggagagatctgattacaaaaacttaggaaataggtaaaataataacttggggtagaggttatgcttgtatttctccaggcaaaaatcaacagctgatttggataccaccaagacacctgaaaccttattatgagccagatgccaaggaagagattccgggaggatcccgagtactccccggttgcagc

SEQ ID NO: 790216 - DNA, 630 bp, Homo sapiens
catgtatgtgtggacaccttttctcactttgtctgggctacatgccaaacaggagagtcttctgccagtgttaaacatcaccttttgcagtgttttgcggtgaagggcattccagcttctattaaaacagatgatgccccaggttatgctagccaagccctagctacatttttctctatgtagaatattaaacacattactggtatcccatacaattctcaaggaccagccatagtagaaagaatgaatctctccctaaaacagcagttgcaacagcagaaaaggggagacagagagtatgggaccccacagatrcaactgaacctagcattattaactttaaattttttgagcctgcccaaaggatagatgttatcagcagctgaacagcatctacagaaaccagctgcaaagacagaagcagaacaactgatttggtggagagatctgattacaaaaacttaggaaataggtaaaataataacttggggtagaggttatgcttgtatttctccaggcaaaaatcaacagctgatttggataccaccaagacacctgaaaccttattatgagccagatgccaaggaagagattccgggaggatcccgagtactccccggttgcagccat

SEQ ID NO: 790217 - DNA, 616 bp, Homo sapiens
gtctagttttcaattttcttacttgaagcagtgagttttatattttgaaatgttttcttgttacaccttagggtccatttcttccagatggaaggactccctgtagcatttttttggacaggtttggtgtttatgaattccttcatcttttgttatttggggaaagtctttatctctcctttgtgtttgaagagacactttaatgggtatagtagtctcagttgagaggttttttgtttttttttttcttcaacactctctcctagcctgcagggtttctgctgaataatctgctgaaagctgtactggggctctgttgaacgtcacatgtttctttattctttgtgcttcaaataktctttctctttgatttttgctaatttgattatgatgtaccttgggaaattcctcctgcatttaatctaattggtgacctttgaatttcctgtacttgagtgctgctggttatctccagatttgggaaaatttcagccattatttccttaaatatgttttctaggtcttttttttctaaatttagcttttaagttcagggatacacatgcaggtttattatataggaaaacttatgccatgggggtttcttgtacagatt

SEQ ID NO: 790218 - DNA, 620 bp, Homo sapiens
gtcatctactttttctgttgttcaagtgttaaaacagcaatctattccaatgtgaggaacagccttgctttgctggatttattaattctccatatgtttatctcccatgtggctgctgcttaagagctttttaaagggtaactttctagtaagtaatttttaatccgactttagaacttatatcccccagcactgagtgatgctcccaggaaggtgagagtccagtgctccttcttgtaacagagttttgtcaatactagcctcagaacagcttccctaccacaattctatctccatcttccatgccatcaccacagttaactttctaaaggcacaaacatagttagtcccctgttaaaastgcttctgggcagggcgcggtggctcacgcctgtaatcccagcactttggaaggctgaggtgggcggatcatgaggtcaggcgatcaagaccatcctggccaacatggtgaaacaccatctctactaaaaatacaaaattagccaggcgtggtggtgcacgcctgtagtcccagctactcaggagactgaggcaggaaaattgcttgaacccaggaggtgaaggctgcagtgagccgagatcaggccactgcactccag

SEQ ID NO: 790219 - DNA, 620 bp, Homo sapiens
gtcatctactttttctgttgttcaagtgttaaaacagcaatctattccaatgtgaggaacagccttgctttgctggatttattaattctccatatgtttatctcccatgtggctgctgcttaagagctttttaaagggtaactttctagtaagtaatttttaatccgactttagaacttatatcccccagcactgagtgatgctcccaggaaggtgagagtccagtgctccttcttgtaacagagttttgtcaatactagcctcagaacagcttccctaccacaattctatctccatcttccatgccatcaccacagttaactttctaaaggcacaaacatagttagtcccctgttaaaactgcttctgggcagggcgcggtggctcacgcctgtaatcccagcactttggaaggctgaggtgggcggatcatgaggtcaggcgatcaagaccatcctggccaacatggtgaaacaccrtctctactaaaaatacaaaattagccaggcgtggtggtgcacgcctgtagtcccagctactcaggagactgaggcaggaaaattgcttgaacccaggaggtgaaggctgcagtgagccgagatcaggccactgcactccag

SEQ ID NO: 790220 - DNA, 637 bp, Homo sapiens
acagtaatgtttgatcttatttttttttaattgcagcactttgaatatatcacctcattctcttttagcctgtgaaatttctgctaagaaatcccctgttaaggccaggcacagtggctcacgcctgtaatcccagtactttgggaggccgaggtgggtggatcacaaggtcagagttcgagaccacctgggccaacatggtgaaaccccgtctctactaaaaaaatacaaaaattagctgggcatggtggtgtgggcctgtaatcccagctacttgggaggctgaggcaggagaatcgcttgaacatgggaggtggaggttgcagtgagctgagattgtgccactgcactccagcctgggcaacagagcaagaccttgtctcaaaaacaaaaacaaaacaacaacaacaaaaaacaaaaaaamcccacagaaatccaaatccactgttagtctgatggggtttctttattggtgaccagatgcttttctcttgctttttaaagggtatgctttttatctttgactttaggcagtctcactataatgtgccatggggaagacatttttgcattgtgtttgcctagggattattgaagctcctatatctgaatgtgaatgtctaaaattcttgctaga

SEQ ID NO: 790221 - DNA, 637 bp, Homo sapiens
acagtaatgtttgatcttatttttttttaattgcagcactttgaatatatcacctcattctcttttagcctgtgaaatttctgctaagaaatcccctgttaaggccaggcacagtggctcacgcctgtaatcccagtactttgggaggccgaggtgggtggatcacaaggtcagagttcgagaccacctgggccaacatggtgaaaccccgtctctactaaaaaaatacaaaaattagctgggcatggtggtgtgggcctgtaatcccagctacttgggaggctgaggcaggagaatcgcttgaacatgggaggtggaggttgcagtgagctgagattgtgccactgcactccagcctgggcaacagagcaagaccttgtctcaaaaacaaaaacaaaacaacaacaacaaaaaacaaaaaaaccccacagaaatccaaatccactgttagtctgatgggrtttctttattggtgaccagatgcttttctcttgctttttaaagggtatgctttttatctttgactttaggcagtctcactataatgtgccatggggaagacatttttgcattgtgtttgcctagggattattgaagctcctatatctgaatgtgaatgtctaaaattcttgctaga

SEQ ID NO: 790222 - DNA, 608 bp, Homo sapiens
tttttttctaccatgacagaaagtcaataaatactacctaaaatagatagaacagaacatttatagtttaagcatatcagttggaaatatggaggtaaatgccagtagaaagagctagaaatgttgagagtggttactgctggaacaggacttggggagacagggcacatggctatggatttcactataagcctttggttttttgttttttgtttgtttgtttttgtgtgtgtgtgtgtgtttttgtttttgtttttgtttttgtttttgagacagagttttgcttttgttgcccaggctgggatacactggtgctatcttggctcactgcaacctctgccttctgggttcaggcgattctcctgcctcagcctcccaagtagctgggattacaggcgtgtgccaccaggccaagctaatktttgcatttttagtagagacagggtttcacaatgttggtcaggctggtctcgaactcctgacctcaggtgatccacccctctcaccctcccaaagtgctgggattacaggtgtgagacactatgcccatatattttttttaagttttaaaactatggatctatatatgttgaaaaaattaatattga

SEQ ID NO: 790223 - DNA, 628 bp, Homo sapiens
tattgattaggcagaataaagaattatagaactagaaaatcggtcaattgaaatgatcaagtatgaagaacagaaagaaaaaaaataaagaaaaatgaacacaacctaagggacctctggaacatcatcaagtataccaacatacatttaatggggtctctggagaaaagaagagagagagagaggaaagggcagaaaaagtatttgaaaaaataatggccaaaatattccaatttgattaaaagcacaaatctatacatccaggaagctcaatcaactccaagaaggataattgccaagaratccacaatgagacatataatctaattgtcaaaagccaaagtcaaagaaagaatcttgacagcagcaatcaagaagtgttttgtcatgtacaagggctctacaatgaaattcacagccagtttgttgccagaaactatggaggcaagaaaggaatgggatgacatctttatagtgctgaaagaaaagcaatctgtcaaccaaaagtctatacccagaaaatctatccttcaaaaacaaaggagtaattaagacattccccaataagcaaaagctgagggcatttgttgccagtacacctgccctataagaaatgctagagagttgt

SEQ ID NO: 790224 - DNA, 645 bp, Homo sapiens
aaaaatcccgtaaataagcaatttgtaagttttaaactgcccacctgggacaggaattatctctttgtccaatgtatccacattgtagacgctacccattgttgccctctgagttatcaaatcaactgttgtggtattgcagtacttgtttaggtaacccttattttacttaatattgccccaaagtgcaacagtagtgatactggcatactgttataattatctcattttattattagttattattattttattagttattagttattgttagttattattagttatctcttactgtgcctaatttataaacttttttctgtataaatgtgtattttatttaaaaacagggatattgaaatgtrtttatgtgttacagcccttacagaaaaatgacaagttttatagtccttttatttgaaattcagtgttaactgatcttaaactataaattcatagttgttggagttttttttttttttttagtttaaatgatgtgaaagcatttgctcctttcaaaggcttctacgcctttgaatgacatattctcagtaacttatttgctggtaactagagtatgtgagactgagtgactacaatatgcatatttcagtaattagcttcccactgcattataatacattt

SEQ ID NO: 790225 - DNA, 558 bp, Homo sapiens
cagcagggcacaccggctgccgtggggtaggcggctccaggcttcctgtgaggctgcgactggacaggcatactgaaagcagcttccactgctggcaccggggaatgcagtggtgtccggaagcttggagatgccaggaactgcagagccccaaacaggtgtcagagcccttgctcagggagctcctaggtctgggctccccaaagggctgcagcaattctctccttgttgcaatgtggcgagtgaggggcatgtttcagctctttttgtgttacagctctttcagtcccaccattaagcaggtcccaagttctcatcctgtgtccaggaagaatgaagtacacagacaaccggagcatgaataagrcaaagaggtgcttccctgagcagcagtacagctctcaagagatctggaatgggtagctcctaactgcaggcaggccatcccactgtctgctcagctcttggctgagaggagacccacagtgggtagattctctctgcaggcaggttgtctctacatctgctcagctctcagctgagaggagacccacagtt

SEQ ID NO: 790226 - DNA, 629 bp, Homo sapiens
atataacagcctctaacagctgcatggaaaatctggtagcagaggcccaggatttctggcttcgatcatcatttttagggagactataaaaatgaacagaagactttcttacttgaaaaacatagattccaagtctgaaacaatttaatcttcctacatgagtcaacccttggaaagaaacagactcaggtggtaaaccgcaggccatttacataccccatggtttgacttttactttaaggagaggaaagatgggttgatgagctcataaataaaagtaacatattacccataatattagaggagaatgtactagggttctttaaggctctgtttaagctagtaaattttctgcctaaagtgtgtggtataaaatcctcagatgtgaatacacagtttttccacttccacccatgtcgatttcagagatttcaaattaacagagtgtgttcctcratcaagttcatctaaaatgcaggttgtaacttttgctgctaagagaaatgctaatatttaatgtaaatgagaaaagcagttcatccagaagatatcaaaaagatctttagtacattccttcacaaagatgattcctttccttttcggaaaaataaaattactcccctctaatt

SEQ ID NO: 790227 - DNA, 620 bp, Homo sapiens
agcatagtgactaagagaataggtcttggaattaggccacccggccaccaattaatttttttttctttctttctttttttttttttttttttttttgagatggagtctctctctgttgcccaggctagagtgcagtggtgcaatctyggctcactgcaacctccgcctccccaggttcaagcgattctcctgcctcagcttcccaagtagctgggactacaggcacctgcccccacacctggctgatttttgtagttttagtagagatggagtttcaccatgttggccaggctggtctcaaactcctgacctcaggtgatccatctgcctcagcctcccaaaatgctgggattacaggagtgagccaccacacttggtcatcaccaattatgtttttaacctcttcatgcctcagttttcttatctgtgacatggagtttgtgagatgcttgaataacttttaactttgtgttaaaaatgagtgtgtaagcaaacagagcattcatggttaagagaataggttctagaatgacatttggggttaaatatgttggttctgccatttaactgtctgcaaggctgaaccagttaccttattctgtatagcaaatcacccccaa

SEQ ID NO: 790228 - DNA, 620 bp, Homo sapiens
agcatagtgactaagagaataggtcttggaattaggccacccggccaccaattaatttttttttctttctttctttttttttttttttttttttttgagatggagtctctctctgttgcccaggctagagtgcagtggtgcaatcttggctyactgcaacctccgcctccccaggttcaagcgattctcctgcctcagcttcccaagtagctgggactacaggcacctgcccccacacctggctgatttttgtagttttagtagagatggagtttcaccatgttggccaggctggtctcaaactcctgacctcaggtgatccatctgcctcagcctcccaaaatgctgggattacaggagtgagccaccacacttggtcatcaccaattatgtttttaacctcttcatgcctcagttttcttatctgtgacatggagtttgtgagatgcttgaataacttttaactttgtgttaaaaatgagtgtgtaagcaaacagagcattcatggttaagagaataggttctagaatgacatttggggttaaatatgttggttctgccatttaactgtctgcaaggctgaaccagttaccttattctgtatagcaaatcacccccaa

SEQ ID NO: 790229 - DNA, 620 bp, Homo sapiens
agcatagtgactaagagaataggtcttggaattaggccacccggccaccaattaatttttttttctttctttctttttttttttttttttttttttgagatggagtctctctctgttgcccaggctagagtgcagtggtgcaatcttggctcactgcaacctccgcctccccaggttcaagcgattctcytgcctcagcttcccaagtagctgggactacaggcacctgcccccacacctggctgatttttgtagttttagtagagatggagtttcaccatgttggccaggctggtctcaaactcctgacctcaggtgatccatctgcctcagcctcccaaaatgctgggattacaggagtgagccaccacacttggtcatcaccaattatgtttttaacctcttcatgcctcagttttcttatctgtgacatggagtttgtgagatgcttgaataacttttaactttgtgttaaaaatgagtgtgtaagcaaacagagcattcatggttaagagaataggttctagaatgacatttggggttaaatatgttggttctgccatttaactgtctgcaaggctgaaccagttaccttattctgtatagcaaatcacccccaa

SEQ ID NO: 790230 - DNA, 604 bp, Homo sapiens
tcttttcttgtttttaatatctttgtccacggtgtcagagtaatattagcctaatataatgagtttggaagtgttacctcctcttcaattctttagaagagtttgagaaggattgataagttttaaagaatgtatggtagaattcttcagtgaagccactagtcctgggtttgtttgtttgtttggaggtttggaggtttttgactagtgcttcaatctccttgctagttataagcctrtccagatattttatttcttcaggattcagtcttggtaggttgtgtctagcaatttatccatttctgctaggttatacaacttattgggtgtaattgttcatagtagtcttttgtaatccttttaacttttgcaatatcagttgtaatgccttctctttcatttctagttgtatctatttgagtcttttctcttagtcaactaatcatttgtcaattttgttgatcttaaaaaaactcagtttcattggtttctctattgttttgctattctctatctcatttatctctactgtaatcttattatctcctttcttctaacttaggtttagtttgttctttttctagtttcatgaggtggaagttta

SEQ ID NO: 790231 - DNA, 671 bp, Homo sapiens
ctggtctcatctcccattacaccatctccccaaaccccagttcttccacagttgtcttaacttatcctatcttctaatggtgctgaacttcttagagtccctgagatatgctaggtcttttcactagctgtttcctctccctggaaaagttctatgcatctttcagggtatagcatcaatgcttcctgctgtgaaagtgttccctgatgtccccaggcatttattcatagaacaagtatttcctttgcacccactatgaattasaccctgttctaggtcctggacatagcagtgaacaaatcagactaagtctcttccctcatggagtatttattctaatggaggggactaaaaatgaaagaaagacaatatatacgatgttagggaatggcaaaaatgaagaggatggaaatctggggaagaggatgagggagccatctcatttatgtaaactatgatgtattagcagaatagactaggttatgttgcaatagcaaacaattctctaaaatctaagtagtttataacaacaaagatttgcctctagctcatgcttcatgaccactgaaggtcagctgaggcttagccccactcgagaaataggcctgagcaaacatttctagttgccccagcagagactaaagaaaatgaagcaaagcatgcaccagctg

SEQ ID NO: 790232 - DNA, 601 bp, Homo sapiens
acatgtaatgatgcttcatgctcctggaattaattttggtataagacaagaggtgcgaattaaaatcgatctttttcttaaaagcaaaccaactgctccagcaccatttgtttaataacttttcccattcacactgacttgtggtcatctttaccacattttatttgctttcaatgaactgagtctgtttgggggttctccaaccctgttttattcctttgccggaaccaaaatgatttaattatagtagatacaacttatatgttaatataaaggctatgtgctcctaaattcttttcttaaagaaaaatgtasctagatgaacataaataatctttttaatagcaaaaaagaaaaatcacatttacaattttgattgggggctggagccaagatggccaaaaaggaacagctctggtctacagctcccagcgtcagcgatgcagaagatgggtgatttctgcatttccatctgaggtactgggttcatctcactagggagtgccagacagtgggtgcaggatagtgggtgcagcacaccctgcactagccaaagcagggcgaggcattgcctcactcgggaagcgcaaggggtcaggga

SEQ ID NO: 790233 - DNA, 509 bp, Homo sapiens
cttgaaggccgcggaggactttgacagacagagaggattgggagtcgcagagtgccaagagctctctactggggacacttttaattattctgatggaatttcttccttagggagggaacatccatggatttcaaagcaatgagcagctgaaatctgcatttcctccagctgtggctccgctggtgggcccagccctcattctctaacctgccagartcagtgattctctcaggagggcgtctgggtattgttttttctctttgtttggcacttaaaatttttttttttttttttttttgagacagggtgttaccctgtcacccaggctggagtacagtggtgcgatcttggctcactgcagccttgaccttctgggctcaatcaatgctgagtagctgggcatacaggcatgcaccaccacatctggctaattttttgatttttttttttttgtagagacaggggtctctctatgttgcccaggctggtctcgaactcctgagctcaag

SEQ ID NO: 790234 - DNA, 588 bp, Homo sapiens
ctagacacagggtgctgattggtgtgtttacaaactttgagctagatacggagtgccaattggtgtatttacaatccctgagctagacacaaaggttctccacgtccccaccagactcaggagcccagctggcttcacccagtggatcccgcaccgaggctgcaggtggagctgcctgccagtcccgcgccgtgtgccctcactcctcagcccttgggtggtcgatgggactgggcgccgtggagcagggggcagtgctcctcggggaggctcgggctgcacaggagcccacggagggggtgggaggctcaggcatggcgggctgcaggtcccgaggcctgccctgcgccaaggcagctraggcccggcgagaaatcgagcgcagcgtcggtgggctggcactgctgggggacccagtacaccctccgcagcctctggcccgggtgctaagcccctcattgcccggggcggcagggccggccggctgctccgagtgcggggtccgccgagcccacgcccacccggaactcacgctggcccgcaagcaccgcgcgcagccccggttcccgcccgcgcctctccctccat

SEQ ID NO: 790235 - DNA, 588 bp, Homo sapiens
ctagacacagggtgctgattggtgtgtttacaaactttgagctagatacggagtgccaattggtgtatttacaatccctgagctagacacaaaggttctccacgtccccaccagactcaggagcccagctggcttcacccagtggatcccgcaccgaggctgcaggtggagctgcctgccagtcccgcgccgtgtgccctcactcctcagcccttgggtggtcgatgggactgggcgccgtggagcagggggcagtgctcctcggggaggctcgggctgcacaggagcccacggagggggtgggaggctcaggcatggcgggctgcaggtcccgaggcctgccctgcgccaaggcagctgaggccsggcgagaaatcgagcgcagcgtcggtgggctggcactgctgggggacccagtacaccctccgcagcctctggcccgggtgctaagcccctcattgcccggggcggcagggccggccggctgctccgagtgcggggtccgccgagcccacgcccacccggaactcacgctggcccgcaagcaccgcgcgcagccccggttcccgcccgcgcctctccctccat

SEQ ID NO: 790236 - DNA, 588 bp, Homo sapiens
ctagacacagggtgctgattggtgtgtttacaaactttgagctagatacggagtgccaattggtgtatttacaatccctgagctagacacaaaggttctccacgtccccaccagactcaggagcccagctggcttcacccagtggatcccgcaccgaggctgcaggtggagctgcctgccagtcccgcgccgtgtgccctcactcctcagcccttgggtggtcgatgggactgggcgccgtggagcagggggcagtgctcctcggggaggctcgggctgcacaggagcccacggagggggtgggaggctcaggcatggcgggctgcaggtcccgaggcctgccctgcgccaaggcagctgaggcccggcgagaaatcgagcgcagcgtcggtgggctggcactgctgggggacccagtacaccctccgcagcckctggcccgggtgctaagcccctcattgcccggggcggcagggccggccggctgctccgagtgcggggtccgccgagcccacgcccacccggaactcacgctggcccgcaagcaccgcgcgcagccccggttcccgcccgcgcctctccctccat

SEQ ID NO: 790237 - DNA, 482 bp, Homo sapiens
aaacaggttgttcagttcccatgtagttgtccagttttgaatgagtttcttaatcttgagttctgatttgattgcactgtggtctgaaactgctatgatttccatattttgcatttgctgaggagtgttttacttccaattatgtggtcaattttagaataagtgtgatgagttgctgagaagaatgtatattctgttgatttggggtggagagttttgtagatgtctattaggtccacttggtccasagctgagttcaagtcctgaatatccttgttaatatcctgtctcgttgatctgtctaatattgacagtggggtgttaaagtctcccactattattgtgtgggagtctaagtctctttgtaggtctctaagagcttgctttaaccagatctcatgagaactcactcattatcatgagaacagcacagcagcaagggtaatagtgataaacagtcatgataaactgccttcaagatc

SEQ ID NO: 790238 - DNA, 656 bp, Homo sapiens
cttagagatagtcttgtccaactttcgctttttataaatgaggaaactgaggcctggagagttcaagcaactcacttgaggctagcctgtgtgtcagcggaaaggccaaaattaagacccagactcatgaatctcgtcagagagaaatttctggaaataccaaagagttcactccccaccccacgtaactcctagtgcagtattcattctaaacataaatagaaaaagtatccataaactgatcactaataaaatagtgtacacacatataagacacatgaacaatcaagattttttccatccgaaaatggagatataatgattcctcattgccagtagtcataatgcctactgcatttgtaactcagacccatattttttccttttggctcttccaaaatacattctgcacctakgccataagcatgcatttgtagattcatagcttcaaattttggcaatttgcaaaaccacatggccagatttgggccacttctacttagttgggaattccatcatagaaatgccagtcagggtgccgaatgaacctactgttcttttcttgccaacacagtggttgagagccggtatgtgctatctgtctcggttttatagtctggtacaataatgtcattgccccatgtggcaaatggtgt

SEQ ID NO: 790239 - DNA, 563 bp, Homo sapiens
atgttcatatgttgttgatgtgatcatttagcctatacttcaattaccggggggctctatgaactgttttgtaaattttgaggtagttgctttgatgcagctgtagaataaaacaagaacacctaactaaatagcytttcatctttccttcaaagcaagaaataaaaataatcattgcaaagtaatgcttttttgtgtttcttagattttgactttcctgatcacctggaagttactaacattagtttgtcttgcaaagccaacatttgtagaacctcttctatgtaagagagattgaactaaatgaaatgcatttttcaagtaaactttttggtagctctcattatactactttggttctcataatatttaactctagatttttgcttttatctttgtatatcacataattttagaaggcctttttaaactacagcatcttaaccaccaaatatttattaaacctccacatccctgcattatgccaaaggccaaaacgtgaaactctaagtcaagtcatcaaaagagtcatgttgacttctcgtttttcttaagcgtcaaca

SEQ ID NO: 790240 - DNA, 541 bp, Homo sapiens
gtgggacactgcaaacttggttcagtgtttggtttcctaaggccagttcctggagttctttaagtaaaagacagggtaaaactttataagagcacagaagaatggctatttttttttttttttgtatgactgaagcctcggggttagcaggtatagtgtcagcaaagtagtagcatgggttttgagaagagaagaagaaaaaaaatgaaaaaaacatgtgaaggaggagcctctcaccactcccattctatctcaattccagggtcctaggacaccatcttcagctagttgttgtcgactcctacatctctgactgcaccttccctgaacctggctcccttccttggcccatgccttaaccactgkaattctccagagttctggatttcccctggatgattgactttaattattatgtatcttctgtgtatatcatccatatgtggaccattcccaagtgggtctgaatgtgacagggcccctaaaatttaacatatccaaacatgagcatgatcatgatctcccccatatcttagctccc

SEQ ID NO: 790241 - DNA, 658 bp, Homo sapiens
cgtgcaggtttgcatgtggatgtaagttttccattcatttgagtaaatgcctagaagtgcaatttctcgagtatatgataaaagtgtatttggcagtaagaagctgcccactgtcttccaatgtggccataccatttttcattcccaccagcaatgaatgagagtttctgttgctccacattcycaccagcatttagtgttgtcagtgttttagatttttaccttagatatgtggttgtatctcatggatgttttagtttgcaattccctaatgacatgtgatgttgagtgcctttttaaaggcttgtttaccatatattcatctcctttagtgagttgtctgttcagatgttttgccctctttttaactgggctgtttgtttccttattgttgagttttaagggttctttatatattttagctaatagtcctttaacagagatatcttttgcaaatatgctctctctgtatatagcttgtcttctctttctcttgaaagtttttttctctgaaagaactaagtagaagtattgaattttaatgaagtctggtttatcagttatttctttcatggaccaggcctgtggtgttgaatctaaaaggtcatcactttattcaaagtcatgtagattttctcctatgttatctttttggagt

SEQ ID NO: 790242 - DNA, 658 bp, Homo sapiens
cgtgcaggtttgcatgtggatgtaagttttccattcatttgagtaaatgcctagaagtgcaatttctcgagtatatgataaaagtgtatttggcagtaagaagctgcccactgtcttccaatgtggccataccatttttcattcccaccagcaatgaatgagagtttctgttgctccacattcccaccagcatttagtgttgtcagtgttttagatttttaccttagatatgtggtkgtatctcatggatgttttagtttgcaattccctaatgacatgtgatgttgagtgcctttttaaaggcttgtttaccatatattcatctcctttagtgagttgtctgttcagatgttttgccctctttttaactgggctgtttgtttccttattgttgagttttaagggttctttatatattttagctaatagtcctttaacagagatatcttttgcaaatatgctctctctgtatatagcttgtcttctctttctcttgaaagtttttttctctgaaagaactaagtagaagtattgaattttaatgaagtctggtttatcagttatttctttcatggaccaggcctgtggtgttgaatctaaaaggtcatcactttattcaaagtcatgtagattttctcctatgttatctttttggagt

SEQ ID NO: 790243 - DNA, 658 bp, Homo sapiens
cgtgcaggtttgcatgtggatgtaagttttccattcatttgagtaaatgcctagaagtgcaatttctcgagtatatgataaaagtgtatttggcagtaagaagctgcccactgtcttccaatgtggccataccatttttcattcccaccagcaatgaatgagagtttctgttgctccacattcccaccagcatttagtgttgtcagtgttttagatttttaccttagatatgtggttgtatctcatggatgttttagtttgcaattccctaatgacatgtgatgttgagtgcctttttaaaggcttgtttaccatatattcatctcctttagtgagktgtctgttcagatgttttgccctctttttaactgggctgtttgtttccttattgttgagttttaagggttctttatatattttagctaatagtcctttaacagagatatcttttgcaaatatgctctctctgtatatagcttgtcttctctttctcttgaaagtttttttctctgaaagaactaagtagaagtattgaattttaatgaagtctggtttatcagttatttctttcatggaccaggcctgtggtgttgaatctaaaaggtcatcactttattcaaagtcatgtagattttctcctatgttatctttttggagt

SEQ ID NO: 790244 - DNA, 658 bp, Homo sapiens
cgtgcaggtttgcatgtggatgtaagttttccattcatttgagtaaatgcctagaagtgcaatttctcgagtatatgataaaagtgtatttggcagtaagaagctgcccactgtcttccaatgtggccataccatttttcattcccaccagcaatgaatgagagtttctgttgctccacattcccaccagcatttagtgttgtcagtgttttagatttttaccttagatatgtggttgtatctcatggatgttttagtttgcaattccctaatgacatgtgatgttgagtgcctttttaaaggcttgtttaccatatattcatctcctttagtgagttgtctgttcagatgttttgccctctttttaactgggctgtttgtttccttattgttgagttttaagggttctttatatattttagctaatagtcctttaacagagmtatcttttgcaaatatgctctctctgtatatagcttgtcttctctttctcttgaaagtttttttctctgaaagaactaagtagaagtattgaattttaatgaagtctggtttatcagttatttctttcatggaccaggcctgtggtgttgaatctaaaaggtcatcactttattcaaagtcatgtagattttctcctatgttatctttttggagt

SEQ ID NO: 790245 - DNA, 515 bp, Homo sapiens
tttgtgaaaaagaagactgcaggtgctttatatttagaccgtctagtctgatgtaattataccctctttataatcagtcagggaaaacttcttagagaggaaggaaggaggcattcaaaacctctttgaaaatgggaaggaagaaagyttggcaagttgagaagggtcctctggccactgggaggaagggtatgtacaagacagtgcaagtggtagaaggacagcttagaggtgcccaagaagctcacacctgtgcatgggaggacagaggggagggaggtggaggaccacacagggctgccctcagagcacccagagttcctgcttcagccacgctgtctgctaatgagcattttccttggtgctctgcagggtgacgactccgatgaggaagatctttgtatcagcaacaaatggactttccaaagaaccagtcgcaggtggtctcgtgtggacgacctctacacgctgctccctcgaggagacagaaatgggtcaccgggaggcacggggat

SEQ ID NO: 790246 - DNA, 610 bp, Homo sapiens
cattttatagagttgattcaatgctgaagctaaacaaaatattcagagatttgctgcctccgagacttttggggcccaccataatggtggactgtgattaaatccagagtgctgtccgtcctgtactttacaaaacaaaggctttgctcctccaaattaacacccattagcttcttagacattctgtccaaaataaaagttgtgttcttaattgataaattgcagccctgaatagtgggtatatttccaggcagctattctgtaatagtcyctgttcatcatactttttgatgccatgcagagaatctgtaccaacctaagattatttgtactttttattgatttaccctggtccttgggctcagtgggcaggaatgagctggctagtgatgcttgtagagaccccaatactgagaccacacttagaatcaggctggtctcttggtgaaccagaaatcaattttcagtgcagaaaaatagcagtaacttcttcatttgaagttgtctttgactgaactgaatgtgtgttcccctttgtccctcctcatttttaatttagagaatctgcacataacatttttccatatttgtatgtcatcgcagagggtgg

SEQ ID NO: 790247 - DNA, 588 bp, Homo sapiens
aacacaaacaaattgcctgatttaaaaacatgggcaaaagacttgaatagatatttcttcaaagaagatatacaaatggccaagaagtatatgaaaagatgcttggtatcactaattatcaggaaaatgcaaataaaaaccacaatgagatatcacctcatattcataggggtggtcattaccaaaaacaaacaaacaaacaacaaaayaagaagtcttggcaatgatgtggagaaattggaacacttgtgtattgttgatgggaataaaaaacagtgcagctgctatggaaaacagaatggaagttcctaaaaaagattataaatagaattgtcatataatccagcaattctacttcttagtatatctctaaaaggattaaagccaagagctcaaagagatttgcaccccaagttcattgttgtgtcagtcacactagccaagaggtaaaagcaacctaaatgtccattgatgatgagtgaaagcatgaagaaaacgtggtatatacataaagtagaatactatttagccttaaaaaagaaggaaatcttgttatatgctacaacgtgtgtgagccttgaggtcatt

SEQ ID NO: 790248 - DNA, 642 bp, Homo sapiens
ttgtcctttcttcagttgcatttttatttataatttataccctccttcttttaaaaagatgttttaaaagctttgccattttctcatccacttattcccatttagttatgaatgagggctagaatttgagcaaaagctgtggtwtgagttatagcatcccatttgtgaccttgggcacctcattgaacctccctgatcctagcttcttcctccataagatgggaatggtaataccttttttttttgagacagagtttcgctctttttgcccacgctggagtgcagtggtgcaatctcggctcactgcaacctctgcctcctgggttcaagcaatcgtcctgcctcagcctcccaagtagctgggattacaggcgtgcaccaccacacccagctaattttgtatttttagtagagatggcgtttctccattttagtcaggttggtcttgaactcccgacctcaggtgatccgcccaccttggcctcccaaattgctgagattacaggcatgagccactgcgtcccactgggaatggtaatacctttttaaaagctcttgtgaggattaagtgagccattgcacataaagcatttagcatcacatctgacacctgatatcaacaataacaatgcagataccttt

SEQ ID NO: 790249 - DNA, 642 bp, Homo sapiens
ttgtcctttcttcagttgcatttttatttataatttataccctccttcttttaaaaagatgttttaaaagctttgccattttctcatccacttattcccatttagttatgaatgagggctagaatttgagcaaaagctgtggtatgagttatagcatcccatwtgtgaccttgggcacctcattgaacctccctgatcctagcttcttcctccataagatgggaatggtaataccttttttttttgagacagagtttcgctctttttgcccacgctggagtgcagtggtgcaatctcggctcactgcaacctctgcctcctgggttcaagcaatcgtcctgcctcagcctcccaagtagctgggattacaggcgtgcaccaccacacccagctaattttgtatttttagtagagatggcgtttctccattttagtcaggttggtcttgaactcccgacctcaggtgatccgcccaccttggcctcccaaattgctgagattacaggcatgagccactgcgtcccactgggaatggtaatacctttttaaaagctcttgtgaggattaagtgagccattgcacataaagcatttagcatcacatctgacacctgatatcaacaataacaatgcagataccttt

SEQ ID NO: 790250 - DNA, 566 bp, Homo sapiens
ggggctttctggcagatttaacaggtagtttggtggtgtctggattgtgctaatagaagccattataccaaagataatttttaaaacctagaatttagtaaacaagggttttttttgtttcattttgttttgctattttgagattgttaatctcaaatactctcaatttgctgatttcattattgtgttaggacataagtgagataatgaagtggataattaatgacatactctttaggatgtaaataaaagccacactccacagaaaaaagaagtaccataaagcttaaaagagrtcacgaaccttagtacctgcattatacaatgaggatagttttcgtaccgaggaaaaggaaggaagtctcttagaatcatcatctttgctgcttttagtcaactgtggaatgttttaaaactgtatttatggtcttaaagggcatgtaagaaaatatttggaaatttcaagcaaaagattaaccactggaattatgatagaaatcgcactgtttctttacgagaggagagttctgttcgctactaaaagactctgttgagaatgtgaatga

SEQ ID NO: 790251 - DNA, 516 bp, Homo sapiens
agatttaataacatcttagtgtagtaacttatttgtgaaaaaatctgaaaatatctcaacagaatatcattataatatattgtatttaaatgatgtatttatttatttatgttgcagccaagatcatagttcatgatgcggctatattcattgtttatagttgcagtgtgacttaygttaaccactgtaggttttttgcaagaaaatatttactgcctgtgttagtaataaggcctaagactgggcaagcaatggtaattttgttttctggattggtaaagttatcaagaaatacattcttgtttttataagagtattgtatacaacatttaggctactatttagagctttggactaaaattatactttatctattacattgaaaactttaagagagaaattgacagtgtgagaataatggcaaagcaattttgtgattcaaaacattttagttgataaaacggtcaaagaaaagccccgtatctttaacaactgtaatgtaaaaattgtagcaga

SEQ ID NO: 790252 - DNA, 629 bp, Homo sapiens
tcaacaaaataagtactggctaaataagtagaagacaatgcacctctgaggatgtttagagttttacagtaaagcatcagagcaagggggtggggcacatctgtccagggctttttagggcaggagaggagagaaagaccagaataaacgtattgagtagttgcagtgtcatttttttkgtgatttatttgaggacaatatatagataaaaatccccacttgtgccatttctccaagtcatttgtgcccattcttcttttcttctgaacaaggtcatttgttccttcacagtcctggaagtagtgctatgagtcttggtcctggccctggggtgggagttggagaggctaccctctcacacacttccacaggaaaatccatctcttgtacctacaacttagagctaaccaaatgtctattcagtgcaagatcaatctgccctgtgattgcctctgccctccaaaatggactggaatatttaaagaagaaatgcctcaaatgaatgagtaaggttgacagaacagtcttaataaagtttccctcttcccgttatttccccaaggtgttgaagcctggatgtggtttgattttgtttctcttgctattgatttttttgctcagcagtgtct

SEQ ID NO: 790253 - DNA, 589 bp, Homo sapiens
cgtagtttcaggttttcttttaaaagccttttggctcttgagtcaggctagaatcctagatatgaatcccacctctgctcattactagctgggtgatttggggcaaggggctgaacctctctgtgcctcagttttctcatctgtaaaatgtgattaacagcagcacctacctcataaggttgttgtaggattaaatgagttaatacagtaaagtgcctggcacatagtgagcactcaraaaaatgctggctgttatgaggaaagcaggatatctgggcaggattgacaaaggagtgtggccgcacaaccacacagatttctgtcaattgtctacgtaataactgttgcttccaagcagctctctggccaagccttcccctggggacccgggcactaaggacacgaggaagcccagtggaaaggccaggccaagggagcgctgaggtctgggcctggctgagcatctccatgaggggccctccgacagcaggtgggagggcgagatcagggcaaagggggcctgtgaggaagaggggatcattacagagagaaccaagaggagtacagggtcagctcagcccacttagca

SEQ ID NO: 790254 - DNA, 643 bp, Homo sapiens
taatatatagtgacctaattcatctcttatggttttttgtcttgaaatctactctgtctgctatatgtatacccactcctggcctgtttggtttcactggaatagaatatcttttttcatccctttgttttcaacctgtttgtctttataggtgaagtgtatttcttataggcaatagattaytggatcttgctctttatcattcagctactctgcatcttttgattgaggaatttagctcatttactttcaaagttatttttaagtaaggacttacttctgtcattttgttatttgttttctggttgttttgtggtcttctcttacatttttcttccttcctgtcttccttccggtaagcgaagctgctgttctctggtggtatgatttaatttctaactgtattttttgtgtgtaagtgtttctgggtttgaccttaccatgaaacttgcaaatactgtctcataacccattatcttaagctgataacaacactgtttgtataaagatacaaacaagcaaaaagaaaagaaataaaaaactatgcaccttgacttcttctccttgttgttaaccttttgttgtttctatttataccttactgtatatgtcttgaacagttgttgtagttgttatttttgat

SEQ ID NO: 790255 - DNA, 643 bp, Homo sapiens
taatatatagtgacctaattcatctcttatggttttttgtcttgaaatctactctgtctgctatatgtatacccactcctggcctgtttggtttcactggaatagaatatcttttttcatccctttgttttcaacctgtttgtctttataggtgaagtgtatttcttataggcaatagattactggatcttgctctttatcattcagctactctgcatcttttgattgaggaatttagctcatttactttcaaagttatttttaagtaaggacttacttctgtcattttkttatttgttttctggttgttttgtggtcttctcttacatttttcttccttcctgtcttccttccggtaagcgaagctgctgttctctggtggtatgatttaatttctaactgtattttttgtgtgtaagtgtttctgggtttgaccttaccatgaaacttgcaaatactgtctcataacccattatcttaagctgataacaacactgtttgtataaagatacaaacaagcaaaaagaaaagaaataaaaaactatgcaccttgacttcttctccttgttgttaaccttttgttgtttctatttataccttactgtatatgtcttgaacagttgttgtagttgttatttttgat

SEQ ID NO: 790256 - DNA, 528 bp, Homo sapiens
atgaattttgtgagtaaagaatatattcatttgtatcagtgatccctgcacttttctatctgcaggaaaatagtgatgtattaaacttcctctgttaggtgaagatctttggcactaagaaagccaatcatgtcatgagctggaatattttcatttaaaaagcmcagtcggacattaaaaatgtgataatctttatatctttaaacacttttttgtaggtaaccttggtgtgtataatggcaatagaagagaatgagatagcgctggtctatactgaaattactcaggaacaatctattttgaggctcctaaattggtgactatctaatagtagttaccaccgtgaaggatctcagggttgcttattgaaaatataaaagggcataaatgtatataaaacagtagacaatagaaactaagaaagcaaaaaaaaaaaaaaactgttctccaatttttctctctaaatatccaagtctctatgaccagtgaaaactctggatcagaggatttcaaattcttcatgattaa

SEQ ID NO: 790257 - DNA, 561 bp, Homo sapiens
agattcatttctatctttgtcactataagaacattatttcttattgctatcaaaaataatttcagactttagtgatagaagttatgttttaatgcttgttagttgaaaacatgtaatgataacattgtactacaaattcaataatattttcaaacatttgtaactatagttacaatatcatttgtttccattagaaaagcacgtgtgtgtgtgtgtgtgtgtgcatacacatgtctgtgtctctaggtttgtgtctgtgtattatgggtatgtataaaagagatatttgtaagaattattttaaaccaatgctttaaatgtaataacaaagtagtcgatgygcttagggaaaacaaaaagtcgacaatgatttctaaaggaggaataaaattcaatgagaaaatttaaaaagcagtaaaatggataagcacatttgaaatgctcttgacaattgtggatgatgcatgctcttacagacactgctgagtaagtgccagggggtaggcaaagtgttttttttattcattatctcatttaacaggaagaaaagggtagaaaaag

SEQ ID NO: 790258 - DNA, 655 bp, Homo sapiens
gtactgaccttattgctgggcttctgaacaaaacatgcaaatctacttgggggggggacagtttcacaacaaatgcaacatccactgaaccaaactttgagccaaactcaacattttttgagtcacctgagagttttacctcagttcctaggasttcttcgatcagttcccattctcactcttaattacattttatatttacacctcatttacaatccctaaaaaacaaattttgaactatttatttaagagctaatgttatcttccccttcttcaaaagtttcctttaactctcccattgtaattatttattgattatctatggaaataaaaatcttactttaccaaaagtaagcctagagtttgcccatggctgggatttctgaccacattctcttaaacctccagttggatggcacagtgttatggaatgttcccaaatgatttctctgtgtctggagggttttatctagtgctgctttgccacttgagataggatcatcttctacctcaaatgtttgagtgtgtaacgcactgaatgaatggcatgtaggtatcttattactattgtcataagattaaaaaataggtactgaaaaagagagcatgcaagtattaaccaacgtaactcccctcttcatcgatcatcgagaaa

SEQ ID NO: 790259 - DNA, 466 bp, Homo sapiens
ttacattaagggcattcatattcttttcaatagcaaaaagccacattattcaaaccatagtaaaaacaacaatactggccaggcacagtggctaacgcctgtaatcccagcactttgggaggccaagccaggcagatcacaaggtcaagagatcaagaccagcctagccaacaaggtaaaacgccatctctactaaaaacacaaaaattagctgggcatggtagcgcatgcctgtagtccatgccagctacggccaacatggtaaaatgccgtctctactaaaaacacaaaaattagctgggtgtggtgrtgcatgcctgtactcccagctactctggaggctgaggcaggagaatcgcttgaacccgggaggcagaggttgcagtgagccgagatcatgccactgcactccagcctggcaacaaagccagactccctcacaaaaaaaaaaaaaaaaaaaaaaact

SEQ ID NO: 790260 - DNA, 569 bp, Homo sapiens
agaacaacggagactttcttcactattggaatcttcccagactctgtcctataaatctctatccttggttgattttaatgtatatgttttctgtaacaaatacaaccatgggtataataggttcccgtgagttctgagtcattctagtgcttatcaaaaccgtgagtatttgcaggaaaaccccaagcttgcagttggtgtcaggagtgaggatggccttctgtgcgctcttcyatctaactcatgcagttggaccctaactccttgcagttgggtgagaagtcttgggttcacttggccatctagagactgtgctcctaacttcacatttttactaactctgggtacagcactaagacctgtacttggcatccataaataaatgctggatgaataaatgagtggctgaatacaaaactataacccaagtttacattgggaaacactcaagataataactgttaagttcagcctctattcagcacattttctccctggtttctttgcctctcacttctaatggacttgcaggaattgtaaaacaaaaaactaacattcacccttgtgtg

SEQ ID NO: 790261 - DNA, 585 bp, Homo sapiens
accctacacactcctccagaagactcctctatttgaataaagactttagcaaagtttcaggattcaaaatccatgtgtaaaattcagcagcatttctatacaacaataatgttcaagctgagaaccaaatcaagaactcaatcctatttataatggcaataaaaatccaataaaatacctaggaatacatttaaccaaggacrctaaagatctctacaaagagaactacaaaacactggtgaaagacataatagataacacaaacaaatggaaaaatatcccatgctcatggatcagaagaatcaacatcgttaaaatggccataccgacaaaagtaatctacagagtcaatgtaactcctatcaaattaccaatatcattcttcacagaattagaaaaaacaaccctaaaattcatatggaaccaaaaaaaccacagcctcaatagccaaagcaattctgagcaaaaagaataaaagcatcaggtattatattacctgacttcaaattatacaactaaaggaatttgattgtgtctccttctctaaagaacatacatagtaaacaaatgtataggttctctaac

SEQ ID NO: 790262 - DNA, 602 bp, Homo sapiens
actggaagtcagcagattaggagtcagtaaactttttcttaaagggccaggtagtaaatattttggaattcgcaagccatgtggtctgtgttgcaactactcagctctgctgtcgtagcacaaaagtggtcgtagatartacacaggcaaatgagctgtgttcctataaactttatttacaaaagtgggtgggagccccatgaaccagagtttgctgatcccttatcaaatgcttcttagcatctcagatggactctaagatggcataatcctatttcctttggctgcctgaaatggaccagcaatggtggcagagtagaagctgtcctcaacaattggcatgaaaatcaaggaagctgaaccaacctcccactctgttagaagccagtagtatcttctaatttatacttacactaagttcctacattcctcaatgaacaatcctgtcttagtctattcaggctgctataacagaatgccatagctgggtggcttaaacaacagacatttatttctcacagtttgggaggctggaagtccaagagcaaggtgctgggtgattcagtttctcagtgaggatcctctttctgctcctatgtcct

SEQ ID NO: 790263 - DNA, 587 bp, Homo sapiens
tcttaaagggccaggtagtaaatattttggaattcgcaagccatgtggtctgtgttgcaactactcagctctgctgtcgtagcacaaaagtggtcgtagatagtacacaggcaaatgagctgtgttcctataaactttatttacaaaagtgggtgggagccccatgaaccagagtttgctgatcccttaycaaatgcttcttagcatctcagatggactctaagatggcataatcctatttcctttggctgcctgaaatggaccagcaatggtggcagagtagaagctgtcctcaacaattggcatgaaaatcaaggaagctgaaccaacctcccactctgttagaagccagtagtatcttctaatttatacttacactaagttcctacattcctcaatgaacaatcctgtcttagtctattcaggctgctataacagaatgccatagctgggtggcttaaacaacagacatttatttctcacagtttgggaggctggaagtccaagagcaaggtgctgggtgattcagtttctcagtgaggatcctctttctgctcctatgtcctcacagagagaaagacagctct

SEQ ID NO: 790264 - DNA, 602 bp, Homo sapiens
actggaagtcagcagattaggagtcagtaaactttttcttaaagggccaggtagtaaatattttggaattcgcaagccatgtggtctgtgttgcaactactcagctctgctgtcgtagcacaaaagtggtcgtagatagtacacaggcaaatgagctgtgttcctataaactttatttacaaaagtgggtgggagccccatgaaccagagtttgctgatcccttatcaartgcttcttagcatctcagatggactctaagatggcataatcctatttcctttggctgcctgaaatggaccagcaatggtggcagagtagaagctgtcctcaacaattggcatgaaaatcaaggaagctgaaccaacctcccactctgttagaagccagtagtatcttctaatttatacttacactaagttcctacattcctcaatgaacaatcctgtcttagtctattcaggctgctataacagaatgccatagctgggtggcttaaacaacagacatttatttctcacagtttgggaggctggaagtccaagagcaaggtgctgggtgattcagtttctcagtgaggatcctctttctgctcctatgtcct

SEQ ID NO: 790265 - DNA, 602 bp, Homo sapiens
actggaagtcagcagattaggagtcagtaaactttttcttaaagggccaggtagtaaatattttggaattcgcaagccatgtggtctgtgttgcaactactcagctctgctgtcgtagcacaaaagtggtcgtagatagtacacaggcaaatgagctgtgttcctataaactttatttacaaaagtgggtgggagccccatgaaccagagtttgctgatcccttatcaaatgcttcttagcatctcagatggactctaagatggcataatcctatttcctttggctgcctgaaatggaccagcaatggtggcagagtagaagctgtcctcaacaattggcatgaaaatcaaggaagctgaaccaacctcccactctgttagaagccagtagtatcwtctaatttatacttacactaagttcctacattcctcaatgaacaatcctgtcttagtctattcaggctgctataacagaatgccatagctgggtggcttaaacaacagacatttatttctcacagtttgggaggctggaagtccaagagcaaggtgctgggtgattcagtttctcagtgaggatcctctttctgctcctatgtcct

SEQ ID NO: 790266 - DNA, 659 bp, Homo sapiens
tatgtagactttcctaaaaataattaatacatttaaatttagtatagtttttgatatatggaatagttcgacagataataacagagttccacctatccattccacccctactcccaccccacacagtttccacatcactaccatctagcatcagtataacactatttgatatggtttggctgtgtcgacacccaaatctcatcttaaattcccacgtgttgtgggagagacccagtgggaggtaattgaatcatggggacaggtcttttccatgctgttcgggtgatagtgaataagactcacaagctctgatggttttaaaacggggagtttccctgcacgagctctcttctcttgtctgccgccatgtgagacgtgcttttcaccttccgccttgattgtggggcctccccagccacgtggatctgtaagtccgttaaacttctttcttttttaaattgcccagtctcaggtatgcctttattagtagcatgaaaacagactaatacactmttgttacaatcaataaaccaatactgacacattgttattaaatattgtccactaagttttactctttgtttgctctatggattttgataaatgtatagtgacatgtacccacaacagaatagtttaatcactttaaaaaatctgtg

SEQ ID NO: 790267 - DNA, 594 bp, Homo sapiens
tttggccctcccgaaagtcaataagcaaaatgccttgagcatcccaaaactgttgccatgacctttgcttgtgactggtctgcttttgcttggactgggcaacttccgcctcttggtagccattgcttcgattgtgctttgtcttcaggattgtactggagaagccaagtttcatctcttgttataattctttgaagaaagcttctgtaacttgatstcacttgtttaaaatctctagtgaggccgggcgcagtggctcatgcctgtaatcccagcactttgggaggccgaggcaggcggatcacgaggtcaggagatcgagaccatcctggctaacacggtgaaaccctgtctctactaaaaatacaaaaaattagccaggcatggtggcgggcacctgtaatcccagctactcgggaggctgaggcaggagaatggcgtgaacccaggagacggagcttgcagtgatccaagatagtgccactgcactccagcctgggcgacagagcaagactccatcccaaaaaaaaaaaaaaatctctagtgaaagctctgcttttgtctgcagtttatttgggcacaatggttttggta

SEQ ID NO: 790268 - DNA, 530 bp, Homo sapiens
ctgcttttgtctgcagtttatttgggcacaatggttttggtatccattgagtggaatatttgctgaactttaattttttcagtcagaaatgggtaagctgaagcaactgagatgccaatggcattggctattgttcgcactgtcagttatggcrtaatcaagatgaattcttttccccacaaattgattagaatggcctactgctgtgggcttaacttttaacatcatctcttcccttcttaaaacaagatatatatttgtaaactgctgacttctttggggcatgatcctcatacattttttataaagcataaatgatttcatcattattctacccaagcttgaccgtaaaattgcttcaatttttgcagaatccatgttgttctgataggattttttgttttttttcttttcaaacttatgtctaatccttcttagtacttcaaactagattctgttcagacatggttacaatcaagtagtatgagtctattttactgcaaaaaaattgaaatccacgcatacttttt

SEQ ID NO: 790269 - DNA, 617 bp, Homo sapiens
atttatggcatacctactatatgtgagattctatgggaaatataaaactgtcaacagagtcttacaacatatacatgggcatagctacttatttggacttgagtcaaaaccataataatggagcagcataaatgttttaattgtagcttcaacaaagaggtagatgttgatggtgaagcatgggcggttttgacctgagactaggtaaagtgtggagtgaaggggattcaaaacaaagcaggacagacttgaaaacttgctaggactagggattctaagaggaagctaaagggcacagaggtgaaaacagatggaaatggaaaaaacaagamcttgtatgttaaggcaactgatacttctgtgtctactccagcatgtaaagcatttggaatttatcattcccatcctcataatgaggaaagaagaagaaatgaaaaatcagcaactcttctcagatgaatcagagagctgaggtcacagggaaaaccacgattccctaaattgagcacataggcagctaaagagaaccacagcttactgaagcagaagctcaggagcagaaattaccactggagccagtatcagggtagaaaaacaaactgtaattgaaaaattgc

SEQ ID NO: 790270 - DNA, 553 bp, Homo sapiens
ctacataaacctctatgtacacaagctagaaaatctagaagaaatgaataaattcctgggaacatacaactttccaagcttgaaccaagaagaaattgaatccctgaaaagaacaataatgagttccgaaattgaatcagtataaagtagcttaccaaccagaaaaagcccaatgctagagagattcacagctgaattctaccagatttataaagaagagcttgtagaatttctatcaaaactattcaaaataatggaagaggagggattcattcctaactcattctgtgaggccagcatcatcctgatactaaaacctagcagacacagacacacacacacacacacacacacacacacacacacacacacacacacasagagagaaaaattctggccaatatctctgatgaatgtatgtgcaaaaatcctcaacaaagtaatagcaggctgaatccatcaacgcatctaaaaggtaatccatcataatcaactaggctatccctgtgatccaagactgattcaacatatgcaaatcaataaatatgatttg

SEQ ID NO: 790271 - DNA, 486 bp, Homo sapiens
ctacaaattcaatgcaattcctattaaaatcccagctgcctattttttttttttttcaaaaatggacaagctaaaattcatatggaaatgcaagggcttgggagacaggaaggtgacagctaagaggtgctgggttcattttgggggtaataaaaatgttccaatcatggcgatggatgcacaactaggcaagtatattaaaagccactgaattgcacaccttcaatggatgaattgtataatatgtgaattatgtttcaataaaacaktttttttaaaagctgatcacgtgtatccatgtgaactgaaacttgtgactcagtagacagtgctactacgggaatgctccctttaatgactgcattttctggagctgtattttgcttctataattctccttgtacacatgggaaagctgacattagaaaagtgacaaaatctgagtggttcaggaaatggagaaatggccagcactgtgagcttctc

SEQ ID NO: 790272 - DNA, 577 bp, Homo sapiens
actggtcattcagaatgtttccagtgtcctaggaaacagagtaagctacttagacagttacagaagcacagaattttccagctataaatgatccaacagaatctggtccgttatgacacagaagtgaagggcctgctcaagctcacaggcccagtgagagagtgagctgggagctttctaccgtactctgttaccttcctgggtacacataagctctaaaacagaagtgtaactctagaggaaggaacaaaatatgaatccaagagttcaggtctatgttttgcatyattaatatgcaaattacttcatatatttataacataaattctgtgtgtcccagtgatgacagctaataagatactcattactggtccaaaactggaaagaaaatccgttggcccaggtgaagaagtccagtgaatgcgggtaatgccctgggctgccgaaagagatcaatgacgggtagagaaattcaattcccccgttaaggtgcaagacggtttctcccatgcaggaccgaggccctctggtggaggaacggaggaagtctccgccccgaaggaggccaggcaggatg

SEQ ID NO: 790273 - DNA, 574 bp, Homo sapiens
atctgaaccggtttctatgatgtactacaccaaactcttcttctcaattgtagctttatacatgaggaaacccaggcttagaaataacagggaacatgcccatgatcacacagcccacagcagaagagctgggatttgaactcaggccctatctgatgccagtgctaaggaaaggtgaagatgatccctgtcgtgcagaagcctgcagtcaaactggaaaatgtgactacctcctatgacgcaaaacaaaggcatcccagggacaggagagcagcctgggaaggctcccagcggcacaggccagctgaagtctctgaacctagacacatctggctgcaaagaaygggatgggatcccactgggagtgggtgacaaaggggtagcagagaatttatgctgaggcgtctgagcttcacagcagaaacaggactcagaagaaagatggtgtcggggaaaaagactaacattgataagatggcgacaacacagaagacgctctgaccagaagtcaaccctctgaagtcagttctttcatcgcacagcacctcatttatttggctttcccagtcagagt

SEQ ID NO: 790274 - DNA, 640 bp, Homo sapiens
aaataaaagggatcgagattgaacagaaaaaagtaaaattgtttatattcacagatgacatgatcctatatgtaaaaatcctaagcaatctattacaaaattataaaaattaattcaagagattagtcagtttgcaggatacaacatccatatataaaaatcaaaagttttcaataacaaaaaataatttgaaaatgaaattaagaaagcaattcacaatcacatgaagtgaatgaaatacttaggaatgratttaacagaaaatacaaaagctgaaaactacaaaacatttttgagagaaatcaaagaagatctaaataaatggagagaggttggattagaatatttgctactgtgaatctggcaattctgcccaaattgatctaaagattcagtaccacctttatcaaaacgctggcaggcttttttttttcttttttgacagaaattggcaagctgattctaaattttatgggggaatgtcaaagcctgaaaatagccaaaataatttttaaaaagaactaagttggaggacttatactacctaatttcaaaacttactataaagctactatattcaagacagtgtggtattggcttaaagacagacatacagatcaatgaaacaaaatagagactc

SEQ ID NO: 790275 - DNA, 681 bp, Homo sapiens
aaagccatcactgcagcctccttcagggcccagatggatcccgccatcccagggagctctctgaccacccgcctcagctgaaaggaaagcccagcctctgcagctcctgatagccaggtccctgtaagtatttttgtgaggtcttgggtatgccagggatagccctggcaggcgctggggcagatccatctttctggctcccagcttcaggcctgggggcggggaaayggctggtgtgtatctcatggctgtggttagtggcgatgctgctgacctttgacctcaatcagcctggccggtccctccctcgaacatctcactttcctggtgatatttgtaccaacgactgactccccaggccttctctccccaagagaaggccctggaagaagcgggcctcgcctggcccagatgcacacagtgccttctgtctgtacttgtgcctgccagtccctcctcgctagagataacggggcccaggggcttgtggaggggcatactgggtgactcctgcagacacagaaactcgagcaattccagcaccatgcactgagccctgaaggtgaccgcccagccatgcctgcctcctggtctcagaagactcaactcagaaggtaactcctgaacttctatactcacaggggactctatagggacaaagaagacatttctctgtccttt

SEQ ID NO: 790276 - DNA, 573 bp, Homo sapiens
agttcatcatccaaagggatcccagcaccaataattctgttaagaaaaggcacaggctgkgcgcggtggctcacgcctgtaatcccagcactttgggaggctgaggtgggtggatcacttgaggtcaggagtctgagaccaggctggccaacatggtgaaaccctgtctctactaaaaatacaaaaaaaattagccgggcctggtggcgggtgcctgtaatcccagctactcgggaggctgaggcaggagaatcggttgaacccaggaggtggaggttgcagtgagctgagatggcactccagcctgggtgacagagcgagattctgtctcaaacaaaaaaaagaaaagaaaaagacaaaggaaaaagcataactgataaattaagtggcttagttatgcttcatatccctgtatttgtcacacgcaagtgttgccgaataaataggatatattatattccagctctccttctaactgtctggtggcctcagttaagtggctgcagtctgaaggacccctcgccttccctctcccctcacagcacatagaagatgagctggatctctctcaga

SEQ ID NO: 790277 - DNA, 573 bp, Homo sapiens
agttcatcatccaaagggatcccagcaccaataattctgttaagaaaaggcacaggctgtgcgyggtggctcacgcctgtaatcccagcactttgggaggctgaggtgggtggatcacttgaggtcaggagtctgagaccaggctggccaacatggtgaaaccctgtctctactaaaaatacaaaaaaaattagccgggcctggtggcgggtgcctgtaatcccagctactcgggaggctgaggcaggagaatcggttgaacccaggaggtggaggttgcagtgagctgagatggcactccagcctgggtgacagagcgagattctgtctcaaacaaaaaaaagaaaagaaaaagacaaaggaaaaagcataactgataaattaagtggcttagttatgcttcatatccctgtatttgtcacacgcaagtgttgccgaataaataggatatattatattccagctctccttctaactgtctggtggcctcagttaagtggctgcagtctgaaggacccctcgccttccctctcccctcacagcacatagaagatgagctggatctctctcaga

SEQ ID NO: 790278 - DNA, 573 bp, Homo sapiens
agttcatcatccaaagggatcccagcaccaataattctgttaagaaaaggcacaggctgtgcgcggtggctcacgcctgtaatcccagcactttgggaggctgaggygggtggatcacttgaggtcaggagtctgagaccaggctggccaacatggtgaaaccctgtctctactaaaaatacaaaaaaaattagccgggcctggtggcgggtgcctgtaatcccagctactcgggaggctgaggcaggagaatcggttgaacccaggaggtggaggttgcagtgagctgagatggcactccagcctgggtgacagagcgagattctgtctcaaacaaaaaaaagaaaagaaaaagacaaaggaaaaagcataactgataaattaagtggcttagttatgcttcatatccctgtatttgtcacacgcaagtgttgccgaataaataggatatattatattccagctctccttctaactgtctggtggcctcagttaagtggctgcagtctgaaggacccctcgccttccctctcccctcacagcacatagaagatgagctggatctctctcaga

SEQ ID NO: 790279 - DNA, 519 bp, Homo sapiens
ccaggtggcagagtgggcaggcaggtggcagagggatgtccacgtcatctcagcattctcagcactcaacaaccacaatgcacattccgtggtggggggagtgtgattctggaggccctcggaaggattaatagattggtaaactacttactaactgaaaaaagggaaggaaaaccatgaaagtatgcttctggagagttgccttggaacaacagatcaaaccaaaaattaaaaccaagaaacaaaacatttgaaaaaycaaaattaagactaaaaaagcgaacagagttctaataaccttccaactgtaagtctggctgtctagaatcatatttccattcaagagtggcacacatttttccactaacattttttttttaaacaaaagaaaggccaactgggcattcccctatccattgaaatgttcacccagcacatgaaagctgaccaattcatgcaatgtattttgtttccagagcaggaaattccaaagggaagggaaaaataatcaaacaagtg

SEQ ID NO: 790280 - DNA, 603 bp, Homo sapiens
agccatcaaaagatatgcacattagagatagtggttctttctggcagcagttccccttaagagcttttgttcagcacataactgggcatttggaacaaagatgagcccttataaatcacagatatagagattaaattttctagcagtgctggcagtgaacattaaataaatgagcaaaagaaaacaaggatgggctccccgggtcagattcatatttaggtcctatttaagggttttaccaaccagtgttcattttcacacagggatctttcttgttgctgttcatggacaggttctggaactccctaaagccgactttcaaaattyccgtgttatttaaaagcaagattagactaaaatactattcaatttctctgcatagtttcacgacacaaaccctacattttccttcactgcaaatggaaaacagtttacagcactgtttctcaaaatgtggtctaaaacccactggcattggaatcataggggagcaatttataaatccagattcccaggccccacctcaggcctaatgaatataaagttgggggtggggaccaggggatccgctgctttaaaggttttctgtgtggttttaacgca

SEQ ID NO: 790281 - DNA, 603 bp, Homo sapiens
agccatcaaaagatatgcacattagagatagtggttctttctggcagcagttccccttaagagcttttgttcagcacataactgggcatttggaacaaagatgagcccttataaatcacagatatagagattaaattttctagcagtgctggcagtgaacattaaataaatgagcaaaagaaaacaaggatgggctccccgggtcagattcatatttaggtcctatttaagggttttaccaaccagtgttcattttcacacagggatctttcttgttgctgttcatggacaggttctggaactccctaaagccgactttcaaaatttccgtgttatttaaaagcaagattagactaaaatactattcaatttctctgcatagtttcacgacacaaaccctacattttccttcmctgcaaatggaaaacagtttacagcactgtttctcaaaatgtggtctaaaacccactggcattggaatcataggggagcaatttataaatccagattcccaggccccacctcaggcctaatgaatataaagttgggggtggggaccaggggatccgctgctttaaaggttttctgtgtggttttaacgca

SEQ ID NO: 790282 - DNA, 594 bp, Homo sapiens
agacctcattggaggcagggaaatcaacccgagatagatatttcactacagatatttggatcctaggattctctaccagttatttggaactatttgcaggtgttaataagtaattattcaccagaaagtgaggagagaaggggtttgtccatataaatgaatagtctggagaggtggggagtgagaaagggaatctggagaagacatagyaggtggtttatttggtttccaaggctgtatctcagtcattatcatccaaatctcactcaattcccccactgcaaaggccaccacagggctcctggccctgattacctatacttggcaagttgcatatccctctagaccgctgtctcctaccaccggggttatctcactaaacacaagtgtcacttgctcagtgcccagcccctgggctctgcactgccttgctggataatccttaaactctgtagcctggcatttgagaccatgtgaattccacctggtcacagccctgttgccaccattcctctcaccctccactccgggcatacaaagcccttcacagtctcacactcacttgaccagcttttctagccctgtcttccactc

SEQ ID NO: 790283 - DNA, 608 bp, Homo sapiens
cggaatcaaatttaaaatcagtaacagaaagacatctaataaattcctaaatatttggaaactaaataacatatttctaaatcacgtttgggccagaacaaatcaaaagcaacattaaaaggatttgaactgaataaaaataaaacacaacatacaaaaattctggggatgcagctaaagtagtatttacagggaaatttgtaaracaaaacacccgcattagattaggaaagaagaaagttctcaaatcaatgacctcagcttccaccttagaaaactaaaaaaacagggggtttggggtgaggggtggggataaaacccaagtaagcagaataacagaagtaataaagagtagaaattgatgaatacaaaacagaaaaacaacagggaaaaattaatgaaaccaaaagctggttcttcggggggaaataaatcagtaaaatgaataaatctctagccagattgatcagaaaaaaaaataacacaaattactaatattaggaaagtggtgacatcactgtacgcattctacagctattaaaaggataagaaaatatcatgaatataattttattccaacaaattcaacaacttatgtgaactacaca

SEQ ID NO: 790284 - DNA, 608 bp, Homo sapiens
cggaatcaaatttaaaatcagtaacagaaagacatctaataaattcctaaatatttggaaactaaataacatatttctaaatcacgtttgggccagaacaaatcaaaagcaacattaaaaggatttgaactgaataaaaataaaacacaacatacaaaaattctggggatgcagctaaagtagtatttacagggaaatttgtaagacaaaacacccgcattagattaggaaagaagaaagttctcaaatcaatgacctcagcttccaccttaraaaactaaaaaaacagggggtttggggtgaggggtggggataaaacccaagtaagcagaataacagaagtaataaagagtagaaattgatgaatacaaaacagaaaaacaacagggaaaaattaatgaaaccaaaagctggttcttcggggggaaataaatcagtaaaatgaataaatctctagccagattgatcagaaaaaaaaataacacaaattactaatattaggaaagtggtgacatcactgtacgcattctacagctattaaaaggataagaaaatatcatgaatataattttattccaacaaattcaacaacttatgtgaactacaca

SEQ ID NO: 790285 - DNA, 518 bp, Homo sapiens
taggcagctcacatggtgagaaagagaatagaggaggtgccaaagtcttttaaacaaccagctcgaggtaactagaagtgagaactcactcactcgagaatagtattgagacattcatgagatctgttcccacctcttaccaggttccatctccaacaatggggatcaaattttaacatgagacttggtgacttggcagggccaaacaaaccatacccaaatcataccattctcaatactcaactatataacattatacttaaataatatctcaatctggccaagcacagtggctcatgcctgtaattccagcactttgggaggctgaggtgggcagatcacgaggtctggagattgagaccaccctggctaawacggtgaaaccccatctctactaaaaatacaaaaatattagccgggcgtggtggcgggtgcccgtagtcccagctacttgggaggttgaggcaggagaatctctggaacccaggaggcgggaggttgcagtgaaccgagattgc

SEQ ID NO: 790286 - DNA, 569 bp, Homo sapiens
gtgaaaaaaatatattttgtccaatatattgactaactactcattttttttttctgtaagtataagaatttatatcctaattgggaaaagagtaaaccctttttccgattaatcttcttgactagaaaagcaagtcayggtatttgagatttttgacatagttttttagtcttgattatttaagaaaaaaaaaatcaacaacccaagcaagtcaagttactttgaataatcgatggagaaaatgtggcaaatggtatcaaggaagttaaaggaagcaaaatgtattttaatgacagaagcataaaataagaaactctaatagcctttaatattcactttgaaaggtggttttctgcctttagacctattattccacacatattctctttaatcataagattaagagagagaatcagtccttgctttggctaaaataatagaatgatgcttgagtgataaaataaaattatagttatgagaatatttttttcccacaaatgaaagtccacaggggcctaacttattgagggcgaatttctctgtctttggaagacaaaattcactgtgat

SEQ ID NO: 790287 - DNA, 569 bp, Homo sapiens
gtgaaaaaaatatattttgtccaatatattgactaactactcattttttttttctgtaagtataagaatttatatcctaattgggaaaagagtaaaccctttttccgattaatcttcttgactagaaaagcaagtcacggtatttgagatttttgacatagttktttagtcttgattatttaagaaaaaaaaaatcaacaacccaagcaagtcaagttactttgaataatcgatggagaaaatgtggcaaatggtatcaaggaagttaaaggaagcaaaatgtattttaatgacagaagcataaaataagaaactctaatagcctttaatattcactttgaaaggtggttttctgcctttagacctattattccacacatattctctttaatcataagattaagagagagaatcagtccttgctttggctaaaataatagaatgatgcttgagtgataaaataaaattatagttatgagaatatttttttcccacaaatgaaagtccacaggggcctaacttattgagggcgaatttctctgtctttggaagacaaaattcactgtgat

SEQ ID NO: 790288 - DNA, 609 bp, Homo sapiens
gagaagaggaccaccatcctccagaccccagaatggtagatccactgacagcttgcaccatgtgccaggaaaagccatagacactcactgccaacccatgaaagcagccaggagggaggctataccctgaaaagccacaggggtggagctgtccaagaccatgggaacccacctcttgcatcagtgtgacccggatgcaagatacggagtgaaaagagatcatttttgagttttaaaatttgactgccctgctggattttggacttgcatggggcctgtagcccctttgttttggccaatttctcccatttggawcaactgtatttacccaatgcctgtacccccattgtatctaggaagtaactaacttgcttttgattttacaggctcataggcagaagggacttgccttgtctcagatgagacattggactgtggacttttgagttaatgctgaaatgacttaagacttgtggggattgttgggaaggcataattggttttgaaatgtgaggacatgagatttagaagagaccaggggtggaatgatatagtttggctgtgtctccacccaaatctcatcttgaattgtaactcccacaattccat

SEQ ID NO: 790289 - DNA, 609 bp, Homo sapiens
gagaagaggaccaccatcctccagaccccagaatggtagatccactgacagcttgcaccatgtgccaggaaaagccatagacactcactgccaacccatgaaagcagccaggagggaggctataccctgaaaagccacaggggtggagctgtccaagaccatgggaacccacctcttgcatcagtgtgacccggatgcaagatacggagtgaaaagagatcatttttgagttttaaaatttgactgccctgctggattttggacttgcatggggcctgtagcccctttgttttggccaatttctcccatttggatcaactgtatttacccaatgcctgtacccccattgtatctaggaagtaactaacttgcttttgattttacaggctcataggcagaagggacttgccttgtctcagatgagacattggactgtggacttttgagttaatgctgaaatgacttaagacttgyggggattgttgggaaggcataattggttttgaaatgtgaggacatgagatttagaagagaccaggggtggaatgatatagtttggctgtgtctccacccaaatctcatcttgaattgtaactcccacaattccat

SEQ ID NO: 790290 - DNA, 583 bp, Homo sapiens
aaggagtgttttaagctggatattctttgcctcccctaccaaggccactagcttatcctcagctcagatctttagctcagatcctcagctcagatcctcactgaaagaatccactggattcctagaatgaaggccatgtaagtgtgggccctctctttcccatgattgtgctcccccatgaattttttactcttatactagtaaaatactcagcctccagcaattcatgaaaataatcattcatgtgttcctccagtttatggtaagtaactcttgggaactgtatttctctggattgtctatctctctagatcttaaggtggcagtttgcccttgkcaccacagttctctgataagcccaataaaagttgttaattttccatttgtccaactttttcttgttataagacaggagtaatgacttttaaactctctacatgtaagaacagaaactggaagtccaccacagaattttttattcagtaggtctgggaggggggaagttataaacatattttaaatatatttttatctagaagtatattagaacaggctaatttcaggaattttgtgagtcagttgt

SEQ ID NO: 790291 - DNA, 624 bp, Homo sapiens
cactttcacacctatccatttctctttaaaatggactccttgcttagtattttttgagtgtatttggatttttttaacgaaggattatgttaaatgttacttatgaaaacattaatttctactctaagcaaaatgtgtttcactgcagtgaatttaagcttcaaataattctcgacactaataatgaattttttttcatgtttatacttcagagctattaagattttaaaagtagtcaagatcaccagtgcgtgagagtcctaaaaatcttaattcattggcagttaagagtyagggtactttaataggtgggaaaggtttggtgggagaaacaagtgaattactttaagataattctggtaagtgagactaaccagttttctaaataattcagaaataaaacactgccattgaagcttaagcatgtctttatgaaaagtaatcagctatctagaaatgcctgcctggcttgatgttcattcaaaattcattgcagtgattaaattgttcaagtaccagtcattgcttggggcttgttctgtttgtcttattctgtggcttagaacaataacttattatgtaggtatgaaattcatgaagtagcaccccaaaaaattgtttttg

SEQ ID NO: 790292 - DNA, 616 bp, Homo sapiens; identical to SEQ ID NO: 788303

SEQ ID NO: 790293 - DNA, 616 bp, Homo sapiens; identical to SEQ ID NO: 788304

SEQ ID NO: 790294 - DNA, 623 bp, Homo sapiens
caaaccttctgtctttgtgaaggccagtgggttggatttggaggtagctatattataaagtttggctaggaaagccttctttgatcatgggaacaaagatctgaaaaagacagaggggagggtcaaggaggaagaagccacttggaccacatgaggaaaaggtatttcaggaagagggaagggcaaggacaaaatcacaaatatggaagtatggttggtatgttcaaagaagagctgggaaatgcaggaactgarggggaaggtggtgatgtacttggatgaagtgctgattgggcatctgccaagttccaaatggttcaaaggaatgttaaatgaaaagctggatctccatatttgtctttagccagtgtgactcaatccattcaaaagagatgactgtccatctccttaaaactctccacgggggcatttggagcaccccaatttgtttgatagctgtgtagcaacacctctgaaaaagattaaatggtctatcttccatatagacttcttggcctacaggagcacagccagttcaaactgacacttagatactgataaccgctctctggatacagccctccagccagtacttgctccctactgatgctcaatattgttga

SEQ ID NO: 790295 - DNA, 421 bp, Homo sapiens
atttgcatttttatatatgtaattatatactacctcaatgactttctttttaaattcaaaattattctttgaaaaccattcctgttaatgtatatttctgttgttcattcatttttacagctgtgtattattccatattttgaatacatcacaatttatcctttctactgtaaatgcagagtgtattatttctaggttttgttactataaatattcttgtatrtgcctcctcatacacaggtacaaatttcctttggctatatctaggaggagaggaaatactgggtaataaataatgggaatgttcaaattcactatgtaatgcgttttccaaagaggctgtaccaatttataacccaacaaagtgtttataagagttctcattgtatccataattaccaacatatttttctactgttca

SEQ ID NO: 790296 - DNA, 377 bp, Homo sapiens
gcccagttatgttttgtgatggcatttgtctgacactctatatgaagtaagggacataactgtaatacatatgcagctytttgacagccagaagcccaggaaggactataaattttgcttttgatgtttatttgaaacacaaatactttggaggcagtctattttgttccctaaaaattaatgtaaaccttgttttctatgcatcatggtctaagaataatagaaagaaagtaagtgggtgaaagaacatgtcttgggagactgctgtgtggaaaaagaaaaaagaggtcgcagagcccagtatgtactagaattcaaatgctttttcagtggaaactgacaagttatatttttgccttaaatttaacctttccact

SEQ ID NO: 790297 - DNA, 610 bp, Homo sapiens
ctgggtccagcccttactagctaaatgattttatgtgaggtactccccctccgattcctttgttgcccttccaaaacaccctgccttgcacttagaactttacactgctattgctagtttgtaattatcctcaagtagactaagagctccttaactggcaggcaccatatcaggcttactcacaggcttattctcagtgcctaatatagtgtatggaacacaacagtggctcaacaagcatatgtgggtgaaaaccgaatcactacctcaaaggactgttgtggttatgtgtaaagaacctggtacagtaggccatgatttgagcccttaattaatctcattttccttaatctcacccaatgtctcccctgatcaccacctgagttctgatggaattatggccatccttgactgtagcccaccagatacaacgcatsaacccctctgtctagagaataggatcagcctatctctcatcccacttttagcattggtagaaggctttcttcaagaggaagaaccatcctgactgagccaagatgctgctctctaaccagtctgttctttcccatgccccatccaacagccaaggctactttgagtcaatgcc

SEQ ID NO: 790298 - DNA, 541 bp, Homo sapiens
ttctaactatatgaaattcaaaaacaggcaaaactctatgtggttagaagttaagctagtggtcaccttggggagggcagagggctgggattgggaggtagcacaagagaggcatctttactggatggttattattatgaactaaatgttgtgtgccccccaaattcatgcactgagtccctaatcccaaatgtggtgggattaggagacggggtcgttgggaagaaattaggtttagatgcggtgatgagggtagggtcctsatgatgggattagtgcccttataagaagagaccagagagcttgctcatgctctctctacactgtgaagacacagtgagaaggcagtcatctacaagccaggaagagagccctcaccagaacccaaccccgccagcaccttgatcttggacttcccaggctccagaattgtgagaaataaatgtctgttgtttaagccacccagtctgtggcattttgctatagcagccccagcagactaagacagttatgtttacacaaatgtgttcaagttgtggtg

SEQ ID NO: 790299 - DNA, 482 bp, Homo sapiens
ggtcactgagacttcttttctgcacaaacttcatcttggcctctaatgagatggaatcccccagggcctgttgcctcctgttattgcaatttaagcacagccagtgctgactgggctgttagactccaaaggttccctggtagaaaatttgaggggtgtgggatggcaagggattgagagagaggggtggggacttcagatagccagtattccttagscttccaattccttaacagccaaattaccctagagcctctttatgaagctaaagaaatacaaatactattttcaaatcagcaggcattcccaatgttggcttttgctgagggtagctaagaggcaaagcatacctagatcctaggccagacctcaacagccttagttctggctccttctgtttccatatttctcaagaacctggttttctctgctggaagaagcattttcagaggtcatctgaagtctacagccctcccctctgc

SEQ ID NO: 790300 - DNA, 650 bp, Homo sapiens
ttgattgtgaagcatatgggcctcaccagtggtggggagggggtcaacctgagggagctccagctccagctgattcatccaagtagatcctgagagttcatggctggcttgctttaggttctttcagaagcagaatctgagtctgagtcaagggatatcaatgaggattcaatcagagaagtgcaaccaccactcagaagcagcaaagctaccataggattctcctactgggggtttgcctgaaccctgatggctatactttgtctctgatgtttctyctgggagaatgtatatccacatatgagggatttattaccaggatttgactttacaccttgtggagtctctgtaaggctgtggtcattgtgccatcatgcctgatattggagttgagatccggaaggcagaagattgtgaaggaaagatggatggaaagtgagggagagcaaggacaagctggaacccagaggcatgagctgggaccccataaaaaccctctgaaacttgtgtctgttattgtttcctctgatagtatggggtgttctgcagaagccgaggcccttggccacagagctaaacacatatgcttgaagtggaagtcagagaaactgaagagaggtccacgagaaagtagagcagtcttggacctc

SEQ ID NO: 790301 - DNA, 650 bp, Homo sapiens
ttgattgtgaagcatatgggcctcaccagtggtggggagggggtcaacctgagggagctccagctccagctgattcatccaagtagatcctgagagttcatggctggcttgctttaggttctttcagaagcagaatctgagtctgagtcaagggatatcaatgaggattcaatcagagaagtgcaaccaccactcagaagcagcaaagctaccataggattctcctactgggggtttgcctgaaccctgatggctatactttgtctctgatgtttctcctgggagaatgtatatccacatatgagggatttattaccaggatttgactttacaccttgtggagtctctgtaaggctgtggtcattgtgccatcatgcctgatattggagttgagatccggaaggcagaagattgtgaaggaaagatggatggaaagtgagggagagcaaggacaagctggaacccakaggcatgagctgggaccccataaaaaccctctgaaacttgtgtctgttattgtttcctctgatagtatggggtgttctgcagaagccgaggcccttggccacagagctaaacacatatgcttgaagtggaagtcagagaaactgaagagaggtccacgagaaagtagagcagtcttggacctc

SEQ ID NO: 790302 - DNA, 659 bp, Homo sapiens
atattagaatgccaggaagctgggatccagcatcagaaaaccaccaggcttgtgccctgagcatcctctccatcagcctggcacctcgtagagagcagaaaacatcctgggccgatttttttcttttaattctgaaagaccagcaatgaagccacgctgcaggtggtaaaagtgtatgcagagtatgctcctgaagaaagctgaaaacaccgggaacggccatcaacttaatctggggctgacaggggcttcaagcagaactaatggctcagttacatacctcattagccgagtgggattttacccttttccttattgtgattgttaatttcccccctctgctattgagaggaaggaattttgtaacaatgttaaattatttgccatttccaagagggaaaaaatcaattaaaaagagrgtctgggagaagataaaaatgaatttctttatcacttgtgctgatcatttaagatgggattttcccctgcgggaatactgcacagaataacagtagttctagggcatttgataaagaaaaagttctctctcagtggtgattaacgttaccatctcccatctctttcctgcaaaaggagcttggaattccattcgatccccagctttgtgtggctttccctacttccctatcaactcaaaa

SEQ ID NO: 790303 - DNA, 611 bp, Homo sapiens
agactgatctgaagattaaacgaaataatagagataaagtacacagtatctgacacatactaggtgcccaagaaaaatgtaaactgctgcacattattattttcatcatcgttattgttggtgaggtcatttttaagcaccttggcccccagaagcagaagcatccacaagtcctgcactgaagtcacagctgagacttggttttcatcaaraactaaactcaatgatcccctgacatgaggcaaactgcaaaatcaaggccccttctggtgggggcaggggggttctcctccccaaccctcactccccacacccaggttttgattgcagaattcccagctacggaacacttactgagaacattttggagtagaaagaaaagaaagacaaaatagaaccttattcccgtacttaacggattaactacagccctcaattaatggaattctaaaatgtaacatcttttaaagaagaaatgacccaatacctaccctctgatctctgtcttcgtcatgagtaaattgttccctaacccaagtgccaccctcagaagactcgggtgaatcctggtacctcctaagcctcagggagacacgcttgggtttgcggta

SEQ ID NO: 790304 - DNA, 621 bp, Homo sapiens
ctcatgcctgtaatcccagcactttgggaggccgaggcaggtggatcacctgaggtcgggagttcaagaccagcctggccaaaatggagaaaccccatctctaccgaaaaaatacaaaattagccgggtgtggtggcgcatgcctgtaatcccagctactcaggagcctgaggcaggagaatcgcttgaatccgggaggtggatgttgcggtgagccaagattgcgccattgcactccagccgcctgggtgacaagagcgaaattttgtctcaaaaaaaaaaaaacaaaamaaaaaaaaaacctctccagttatgcccagctgctgtccacattccccttacagactatgttcctttgggacccccaagagggacagggggagcatttaaactaactagcttacttactagcttagatggaaaacagtggtactaataatctcttttgaataactggaagggctttcagcatttgcaaaacaaaggatagagatccttaccaaagtccaaaattcacacacagtgctttctccaacaatgcttgattttatcttttaaatcatttctccacacagaactcaagatgtagaaggtaaattaactcccaaatacctccagcat

SEQ ID NO: 790305 - DNA, 600 bp, Homo sapiens
taaaaaaaatatcattcgacttatggcagttgatactcacccagtatctacacacactcttatgtttcccagtatctcttgtggttgggttggggtaacattactagttcaggccaatagactttgagaggagccaaatattcaagacagaggggrccagcctgactcacatctgactttttctaagaagtaaacctttattgtgttaagcctctgagatttcatggtttagtttttcctgcagcctagtgtagcctgtcctgactaattcatggccccagtgaatgtcatcagcactaggaaaatgactatgttagatttgcactcagagacactctgggcaaagctaatgtcagacagagaaactttcttcctcaacttactgttttcatctgcaccttggagatatcagttctggatcaacacgtggttgtgtctggagccattgggacagtctgccagcttgggtcatgtgcccatgccttggccaatcactctgagtccagtaccattggggtattttgattggccaacttgggctggggaggtagggccatatgatcgacagtccccaccagtggggatggatttgctttggaa

SEQ ID NO: 790306 - DNA, 642 bp, Homo sapiens
attcatgctcacagttactttaggatgaagaataatagcacaaaatgacttgctctataaccttgggcagatcctcttccatttctgagcctcaaattcctcatctgtaggataaggagttagatgagtaaatgctcacgtgctgattaaaacagatcacacatttaagagggcttgtatatggcatgtcataaatattttgtcactaccattttttaatctaactccatcactctacaaaacagaaatggaagtacatggaggttcattcactcattcattcattcattcaatcagtcgttctataatgatttgttagatgtcttttatgggtcctgcaggcactatggcagcatctaagtgacttacccaaggttgcacagcaatctcatggcagatgtgggatatcaacaataacaatggctattatttgttgagggctcactataaaactagcacttgctaagtattttatatagtctaatytaattctcagaaattgttccctgtattttttatgataacaaaattgagccccaaaaacttaagtgccatctcaatgatttttactcaaatatttctccaaatggttgcataggtaccaaaagatgacactgagatgtagaaactaatatatggtga

SEQ ID NO: 790307 - DNA, 534 bp, Homo sapiens
aggtttcaggactggcctatttatgattattctccagtgaccaagaccatgcggaacatatagtgccactttaataaatataattcagcagcttcagtctgggcaaggtggcacatacctgtaatgccagcactttgagagkccgagacaggtggattacttgaggtcgggagtttgagacctcaagtctggccaacagggtgaaaccctgtctctactaaaaaaaaaaaaaaaaaaaaaaagtagccaggtatggtagcacctgcctgtaatcccagctactcaggaggctgaggaaggagaactggttgaacctgggaggtggagggcacagtgagctgagatcacaccactgcactccagccttggtgacagagcaagactctgtcacaaaaaataataataaataataataataatagttcagtagcttcacatttatttaaacccagccttgtaaccctgagtatctctctgctctagaatagagaagactatggtagaaattaaacataaatatattaactaataata

SEQ ID NO: 790308 - DNA, 633 bp, Homo sapiens
agaggaaagttgataagaatttatattatctatgatataaaagtatattcaatttaaaaataatttaataagcagttagacctaactgaatttcatttagaaaaaatatatataaaattataatcatttgtgtaactagcatatgctagaatcctttactttcatttttagtggtttaccctttgatctcaaaaatatacatttgacataatggctacaacctttgatggcaaagtagcttgcaatgattagctaatactttcttattaaggtaatgaattaacttattcattaacttcattaattttaatgaatttgtttataaaaattcaaaaaaaggatctctccataacaaaactttaaaatatctagaagagcatgagttcaaccattgtagaagacagtgtggtgtttcctcaaggatctagaaccagaaataccatttgayccagcaatcccattactgggtatatacccaaaggattataaatcattctactacaaagacacatgcacacgtatggcactattcacaatagcaaagacttggaaccaacccaaatgtccatcagtgatagtctggataaagaaaatatggcaatatataccatggaatactgtgcagctatataa

SEQ ID NO: 790309 - DNA, 522 bp, Homo sapiens
tggtctaggcctaattaactcagtaattaggccagaaagcaaaggtttcacacctcgggtccaaaatcccaagattcaaggttgggtcagagtagggaactgggggacggaagtgagggctggaggcaggggcggaggtgagggccggaggcaggggctgagggtggggaaggctaagcattgtaataccaaggaagtcattggcagagatgcggtcatagtcccagacctgcaggaccagcactgcaggctgccggaactccgcctcctccagggcaaagggtccagacctgcgccggaygctcacctcccgctccgtgggcaggtagtcaaagcggaacacaaagcgccaattgaagttcccctccccagtcagggagttgaagtgaacgtctgtctcctgcttgtcatgctccaaccccttcacccagctggggccggggtgggtgagcgtcagggctggagctacatggagaacccactcctcaccccgctctcagcaccacggagggcctggggtcg

SEQ ID NO: 790310 - DNA, 663 bp, Homo sapiens
tcttgaggaaagatgtcaatccacatgtgaagagatccctggggggacaggaccaggctggagggtcttgccaggctcccaaccttccctgacagccctatggccacaggctgtgccttgtccccaagtggagaaaagagctagggtcaaaatgacagggtcgggtagatcctgggggatgaggatgaaggtggagtctgaagtgtgggttccaggatcaaggttagattaggggttcaaggatgaggtccaggctgggcgcggtggctcacgcctgtaatcccagcactttgggagtccatggagggtagatcacttgagctcaggagtttgagaccagcctgggcaatatgacggaaccctgtctctacaaaaaatataagaactagccgagtgtggtggcagacgcctgtaatcccagctactcccgaggatgaggtgggaggatcacttgagcctgggaggtggaggctgcagtragccgagatcatgcacctgcactccagcttgggcaacagagtgagaccccatgtcaaaaaggaaaaaaaaaaaaaatgaggttccagaaggggaagttgagattaaaagtaatatctggtgttccaaggtccagatcttagggatctggggggaggtcaggttaggaaccccacatctgagtct

SEQ ID NO: 790311 - DNA, 449 bp, Homo sapiens
gggaggccagcccacagtttgctctgtggtggctatagaatcggttttccagatcaatgtgggtctccccgatgaggtcgtcagaacccacgaggtcatgatcaaatacggcgaccgtcagctccgtctcagctgggagagagatgcttagctccaggatcctggcaaggagggagagggactgaggtcacttccatgctccaggaggtggtctggggaggaggcgggtgtgtcagcatcccctgtccattcccttgccattcytaggccagctgccacaaggccacagggctggatgctcctgcagctaccccgtttccaccccacagggcccagcctcactctccaaagatggggttgagctgcttggggatgtagcgttccttggtgtcctgccgctcccggccagcgctcaccaccacgtaagggtctgctttgccattggggtc

SEQ ID NO: 790312 - DNA, 565 bp, Homo sapiens
aacctctccctcccgggttcaagcaattctcctgcctcagcctcccaagtagcctggactacaggcatgtgccaccacacccagctaatttttatttttagtagagatggggtttctccatgttggtcaggctggtcttgagctcccgacctcaggtgatctgcccaccttggcttcccaaagtgttgggattacaggtgtgagccaccgcacctggccagcatttccttcttcttttaggctgaatagcattccattatatatataaatcacttttttttttttttgagacagagtcttgctctgccgcccagggtggagtgcagtgacacaatcccagctcactgcagcctgtwcctcctgggttcaagcaattcttgtgcctcagtctcccaagtagctgggactacaggcacgtgccaccatgtccggctaatttttgtatttttagtagagacagggtttcaccatgctggccaggctggtctcgaactcctggcctcaagtcatctgcccacctctgcctcccaaagtactgggattacaggcatgagtcactgtacct

SEQ ID NO: 790313 - DNA, 514 bp, Homo sapiens
tgtaatcctagctattagggaggctgaggcaggagaatcgcttgaacctgggaggtggaggttgcgatgagctgagatcgcgccattacactccagcctgggcaacaagaacgaaactccgtctcaaaaaaaaaaaaaawtttttttttttaaatttattttattttattttttagagacagggtcttgctctgttacccaggctggagtataatgatacaatcatagctcactgcagcctcaaactcctgagctcaagtgagtcctcctgccgcagcctccgacgaactgcaactacaggcacatgccaccatgcccagctaattttttaattttaattttaattttttttttttttagagatgggtcttgctatgttatccaggctggtctcgaactcctgggctcaagctgtcctcttgcctcagcctcccacataagctgggactacaggtgcacgccaccatacctggctcttttcctactttcttctctctttctgtactctggttag

SEQ ID NO: 790314 - DNA, 620 bp, Homo sapiens
ccagctggcttcacccagtggatcccgcaccggggctgcagttggagctgcctgccagttccgcgccgtggtcccacgctcctcagcccttgaacggtggatgggactgggcgccgtggagccaggagcggcgctcgtcttggaggctcgggctgcgcaggagccyggggcggggggaggttcaggcatggcgggctgcaggtcccaagcctgctcggcggggaggcagctaaggttgggcgagaaaccgagcacagcagctgctggcccaggtgctaagcccctcactgcccagggcttgcgggctggccaggcgatcccagtgcagggcccgcggagcccacacccacccggaactcgcgctggcccgcaagcgctgtgcgcagccccggttcccgcctgcgcctctccctccacacctccccgcaagctgagggagccagctccggccttggccagcccagaaaggggctcccacagtgcagcggtgggctgaagggctcctcaagcgcggccagagtgggtgccaaggccgaggaggcgctgagagccagcgagggttgcgagggctgccagcatgctgtcacctctcactaccccagccagcatcccttctctca

SEQ ID NO: 790315 - DNA, 634 bp, Homo sapiens
tggaaaacagtttggcagttcctcaacgtgttaaatgtagaattaccacatgacctagcaattcaatgcctaggtatatacctgaaagaaccaaaaggattcaaacagatacttatgcattcatttttacagcagtgttattcataatagtcaaaaggtagaaacaacccaagtgtccatcaagagatgaatctttttttttttctgagatggagtctcactctcttgcccaggctatggtacrgtggctcaccgcaacctccacctcctaggttcaagcgattctcatgcctcagcctcccgagtagctgggcctacaggtgtgcaccaccatgcccagctaattttagtatttttagtagagatggggtttcaccatgttggccaggctggtctcgaactcctggcctcaagcaatccacccgcctggcctcccaaagtgctgggattacaggagtgagccactgcacccggcctctatacgaattttttgaaaatcatctgggcatggtggtatgcacctgttccagcaacttgggaggctgaagtgggaggatcatttgagcccatgagtttgaagctgcagtgagccatgactgcgccactgtactccagcaagacccttttctctaag

SEQ ID NO: 790316 - DNA, 642 bp, Homo sapiens
gtgagactccatctcaaaaaaaaaaaaaaaaattaagaacaaataaatctctacccagaaagttctcaagacatttggccgggagcagtgactcacgcctgtaatccctgcactttgggaggccgaggtgggtggatcaygaggtcaggagatcgagaccatcctggctaacatggcgaaacctcgtctctactaaaaatacaaaaattgcccgtctctattaaaaatacaaaaaattagccgggcgtggttgcgggcgcctgtagtcccagctacttgggaggatgaggcaggagaatggcatgaacctgggaggcggagcttgcagtgagccgagatcaggccactgcactccagcctaggcgacagagcgagactccgtctcaaaaaaaaaaaaaaaagaaagaaaagaaaagaaaagaaattcagggccctttccagattccctttctacttttgaggaaagaagcaagcatcaggataaggacaaagaaagggaagcttttctcccccaagacaaaggatgaggccaagcacataataaaaacttgctgccggccgggcgcgatggctcaagcctgtaatcccagcactttgggaggccgaggtaggcggatcacctgaggtcgggagtttgagacc

SEQ ID NO: 790317 - DNA, 612 bp, Homo sapiens
agaataaattggaaagctgcgcggctaacatttaagttcttgagcagtctgaaaactctattgtcacaaaacctatttgaggtgtaaagggaaacagaaagttaaaacaaacatttatttattgcatgctttcaggctagagttccacgccagccaagcctgtgagataaaccacaagttgtgaaatactgtttatttgtatgagggtactaatgtggagtgactaaacatttccctcactatacactttaccattgagtgaaacctcacatttatgctgttcagaattatgtggacttatattgatattattgactgttttctctttarcctaataaaaacctttataactaaaagcaggattaatgccacagtaaaatcttccccccataagaatacttcttgtttaattgctatttctaatgggctctaaaaaaaaacataaaaataaatctatcttaaatttgtcatggatgaattattccaagtctttattgctgtttttaaaatatgtcattcaagctattaataatagaaattaaaatgaacatgcatagatgtagtacttttttaatcaggcattgttttctttttctttctttctttcttttt

SEQ ID NO: 790318 - DNA, 590 bp, Homo sapiens
aaatatattatcaaaaatcatgttaaagggggataaatactcttctaactcttctaatagatatatttctgaaattacagcaggaaatgaatgagaaccacacagtagtgtaaaggtttataacaatttacattcttccacagagggaggctgaagtgggcatcacacattaactgtggtctcccagtcacctccatctggtacatatgtggaactcacaaatgtattaaatcaaaaaatcttcgctgagtgcttaccatgtgcctgattccacactacatgctatgagaatayaaaaatagattatatgatatggtgtctctcatcaggggtgataggacgtgcacaaataaccacagtagaatgccaaatatgacaagcactggaagaacggtgtgctactagcaaaaaaagtttctggaaggatcagaagtcctcgcgcaggaagcggcactggagctagattttaaaggaagagcaggatgtcactgggcagaaatgagaagaacactgcgtgaacaaacacaaaggaagaggagagggaggaacatatcagaagaagggcaagtaccacattttggcagagacag

SEQ ID NO: 790319 - DNA, 556 bp, Homo sapiens
tttctttgcatttaaaaaatggatcctatttcataaacaactatagttagctaaataaaatattttgatgtttaaaaatggcagcaattatgagctaaactccaaaactggagtgtgaattttctactatacaactcagcaggaaaaaaaaaaaaaaagacaagttttagaagtatacaaaaccccttttgctatgtaacctttaatacaacatggggagctgccaacctgcccaaaaagtgcaatctgttgcacacggtacaagcaagaccttgttaggtcgcaaaatttatgtcatttggcatcactctgggaaacaaaagctacagtatcyaccttgatcaaaacagattggctgtgcccttgctgaaaatgtcattacagcaattgaaggcatgcaaaaaagacttcaaagttggcactgcaagtattatgcaggatgccaaggtactaaatggagataaaggaacaccctaaataccctttgccattttgtaaatgacagaggttttgagcttactactgaatataccacctcctatctatgatgtgatat

SEQ ID NO: 790320 - DNA, 613 bp, Homo sapiens
gagacgattccgtagcttttagaacattcgtaatgttgtgcaagcatcacctctatctagttccagaacactttcatcactgtgttgtacttttaaatttatttatggagtttatttgtgctgtgcttctttctaaaaaaagcttgggagtggcttctcattaaggctattaataaaatagaaatggaagatcagaaccaaggaaaggagaaagaagctaacatgaaatcaacatgtgttaaygtagtttttattcaacattaggtttgacacttaagctttccagcaacagagcataaaggtacatctgataaattatccaaaagcagagaataattccagcacctcagtggaaacagtttttcttgacactgaattctaaatgaaatttctcaattgggacttgatgtgacattgaacaaccgcagtttcacagtgtatactgaagcatttgtaatatggctttttctgtaataaccttcaataaaagcagattttagaggtagcaaaactataaatatttgacctctactactaggttgatctcaaattagtccatataatttttttttttaacaaacaggtgaagtaagagattgcaaggaagccctta

SEQ ID NO: 790321 - DNA, 613 bp, Homo sapiens
gagacgattccgtagcttttagaacattcgtaatgttgtgcaagcatcacctctatctagttccagaacactttcatcactgtgttgtacttttaaatttatttatggagtttatttgtgctgtgcttctttctaaaaaaagcttgggagtggcttctcattaaggctattaataaaatagaaatggaagatcagaaccaaggaaaggagaaagaagctaacatgaaatcaacatgtgttaacgtagtttttattcaacattaggtttgacacttaagctttccagcaacagagcataaaggtacatctgataaattatccaaaagcagagaataattccagcacctcagtggaaacagtttttcttgacactgaattmtaaatgaaatttctcaattgggacttgatgtgacattgaacaaccgcagtttcacagtgtatactgaagcatttgtaatatggctttttctgtaataaccttcaataaaagcagattttagaggtagcaaaactataaatatttgacctctactactaggttgatctcaaattagtccatataatttttttttttaacaaacaggtgaagtaagagattgcaaggaagccctta

SEQ ID NO: 790322 - DNA, 503 bp, Homo sapiens
ttcctttacaatttgaattccttatctatacagtatgtctaagcatctgtgtttgtctctaaaaatttcttaacaatttgaggacaaaaagtatttgttttcacatgcaaaagacacttcaagggaaaaaagcaggaaagcacaaataattacaggaaacaagttccagaaggaaggactgattatcactagttcaaagactttgactattttaaagatataaacccttctaaatatttaagaacaacatgtttggttgttggaagttatcataatgcctttggcttaacaaacatwaatgtccgtgttctttcctgaggacagtggaattgtgccactatggtttaatcgaaagcccaaaatctagaagattctttgcatagcaagctttcacaatgacacagagagcatctttttatagtgatagaaattgtttgaacttatacattataaaatgtggaaaacagagggaaggattgagatatttatagtctaaaatgatt

SEQ ID NO: 790323 - DNA, 595 bp, Homo sapiens
caccaggggtcatgaaaggctgtgtgtctggagctgaaggggacagaggggtgctgttacaaagtcctctctgaatgttaattccatgttccaaatttgttcacagaacacctgacagaaaaaccattcttacatttctatgatagcaggttgagattcacacgcgccttcacttcctgcccttcgttgcagtatccatgtgcttcattaaactactgtcatattttctccagagatgactgcttttcagttctgggtgaagtgacagytaaatataatggagcataaatcaatctgcaaacatctgctcctggggcctttggaaggaaaggtgagggaagtgtacatacatatgtaagctctctgtagcaagactgaatttaccactatgctcctgtatcctttggagatcccaggacatgaaaaatccattgtaacaggacacaggaaaccctgcctcttcagggtcagccttcaaatcactgcatcaggaaacatttcattaaaattttctagtagaagaggtaaccttgtgttttaagtaaaagaacataacctaaagcatatgtagggaataatacctaatggaagaata

SEQ ID NO: 790324 - DNA, 595 bp, Homo sapiens
caccaggggtcatgaaaggctgtgtgtctggagctgaaggggacagaggggtgctgttacaaagtcctctctgaatgttaattccatgttccaaatttgttcacagaacacctgacagaaaaaccattcttacatttctatgatagcaggttgagattcacacgcgccttcacttcctgcccttcgttgcagtatccatgtgcttcattaaactactgtcatattttctccagagatgactgcttttcagttctgggtgaagtgacagctaaatataayggagcataaatcaatctgcaaacatctgctcctggggcctttggaaggaaaggtgagggaagtgtacatacatatgtaagctctctgtagcaagactgaatttaccactatgctcctgtatcctttggagatcccaggacatgaaaaatccattgtaacaggacacaggaaaccctgcctcttcagggtcagccttcaaatcactgcatcaggaaacatttcattaaaattttctagtagaagaggtaaccttgtgttttaagtaaaagaacataacctaaagcatatgtagggaataatacctaatggaagaata

SEQ ID NO: 790325 - DNA, 595 bp, Homo sapiens
caccaggggtcatgaaaggctgtgtgtctggagctgaaggggacagaggggtgctgttacaaagtcctctctgaatgttaattccatgttccaaatttgttcacagaacacctgacagaaaaaccattcttacatttctatgatagcaggttgagattcacacgcgccttcacttcctgcccttcgttgcagtatccatgtgcttcattaaactactgtcatattttctccagagatgactgcttttcagttctgggtgaagtgacagctaaatataatggagcataaatcaatctgcaaacatctgctcctggggcctttggaaggaaaggtgagggaagtgtacatacatatktaagctctctgtagcaagactgaatttaccactatgctcctgtatcctttggagatcccaggacatgaaaaatccattgtaacaggacacaggaaaccctgcctcttcagggtcagccttcaaatcactgcatcaggaaacatttcattaaaattttctagtagaagaggtaaccttgtgttttaagtaaaagaacataacctaaagcatatgtagggaataatacctaatggaagaata

SEQ ID NO: 790326 - DNA, 605 bp, Homo sapiens
tgctatattctttaattgagtcttcccaaagcaatctttgaactaattgttggtttctcagatttctattttgttatctttaagacactctttaaatctcatcaaaaatcttcatggaaattaattacattgtacccaaacgttataaaatcttaccatttaaagatactttagagttcatttgaacyattcttcaaagaattagcaatgaagttcttttggattgattgatattcatgtacccaagaaagataggtagaatattaattcattttattatttccaaagagaaggtgtgaaaataaactagaacacagttgagttggcagaactgagtttgtgtttacaaaactgaaaaggctggaccacaatgtggtttactggtgatatattaatttagataacaattaaatctcggagacttaccatattgaaagtttattttttggtttacacaaatctgatatactggataggggcttttctcctttcatttactcaaggatccaggttccagtccaatatgcaccattcagcctggttgcagcatgttaagcagccctggaggcagcaggtgagctcttcattgccttggaccaaaatta

SEQ ID NO: 790327 - DNA, 605 bp, Homo sapiens
tgctatattctttaattgagtcttcccaaagcaatctttgaactaattgttggtttctcagatttctattttgttatctttaagacactctttaaatctcatcaaaaatcttcatggaaattaattacattgtacccaaacgttataaaatcttaccatttaaagatactttagagttcatttgaactattcttcaaagaattagcaatgaagttcttttggattgattgatattcatgtacccaagaaagataggtagaatattaattcattttattatttccaaagagaaggtgtgaaaataaactagaacacagttgagttggcagaactgagtttgtgtttacaaaactgaaaaggctggaccacaatgtggtttactggtgatatattaatttagataacaattaaatctcggagacttaccrtattgaaagtttattttttggtttacacaaatctgatatactggataggggcttttctcctttcatttactcaaggatccaggttccagtccaatatgcaccattcagcctggttgcagcatgttaagcagccctggaggcagcaggtgagctcttcattgccttggaccaaaatta

SEQ ID NO: 790328 - DNA, 625 bp, Homo sapiens
ttttattttatattcaggggtacaagtgcaggtttgttacatgggcatactgcatgatgctgaggtttgagatatgagtgatcctgctacttagatagtgagcgtagtttccattagtttgtttttcaaaccttgccctgctccctccctccctcctctattagtccacagtgtctactgttgccatctctatgtctacgagtatccagagtttagctcccacttataaatgagaacatgtggcatttggatttctgtccctgcattaatttgcttaggataatggcctccagctgcatccacgttgctgcaaagaatatactttcattcttttttatggttgtgttatattccatgttgtatatgtactacattttmtttaatccaccactgatgggcacctaggttgattacatgtctttgctattgtaaatagtgctgtgttgaacatacaagtgcataagtctttttggtagaaacatttattttctttgggatacatacccagtgaagggattgctcgatcaaatggtagttccgttttaagttctttgagcaatcttcaaactgctttccgcagtggctgaactaatttacattcccaccaacagtgtttaagcatttc

SEQ ID NO: 790329 - DNA, 603 bp, Homo sapiens
caaataaggcaagactaatagttgaagcatggatcatgaaaaatcagtggtagtggcgatcctgtttgaaattcatcttgatgtgatttagctttaaaatggcactttaaaatatttggttaaatatagcccctattggatttctagataattttaaaatatggctgttctaagtgccctattcttatttagtaggtgactaacctaacatttctagatgttgatgaaaaaagtcaaactctgtaaaatctttgaagagatttattctgagccaaatatagtgaccgtggcctgtgacacagccctcaggaggtcctgagaacatgtgcccaaggtggtcggggcatagcttggtttgatacattttagggaggcatgagacatcaatcaaatacatttaagaaatacattagtttggtccagaaaggcaggacaactcaaagctggattgkggggggcacgggtttccaggctctaggtaagtttaaacatttaaacattttctggttgacaattggttgagtttgtctaaagacctgagatccacagaaagggaatgttcaggttaagataaaagattgtggagaccaaggttcttttgaa

SEQ ID NO: 790330 - DNA, 653 bp, Homo sapiens
gcacataatataaacatgaccaggggtttatctctttgatgctagccaaaaagagctatgttttttctttacttttatatcattttagtctaagtttatcgtatttttctggttatagatagaatatataaacattgttgaaaaaaataaaaagtgtaaaaaatacattgcagaaattgcaaccccaattgtaacaaattttaatggtttggtctatttttctagtttcttgtctatgtttgcatgaatgcatatgtgtaatatctagatatttacttgaaaagttgaatttacaccttaaatactttttgtctccagtttcactgaacattataaaatgagatattaacatgtcactaaacactttttgagcataagattttaaatgactacataatattctttaacaaattcaacagtattgagcatgtaggttgtttttaattttttgttcttgtaagtgataacagtgataagaattttgatacatmaattttggaacctatctctgattattttctttgatagattctggaattggaattgatgagtaaaatataaaccttttaaaagttcatgatatgtttttcccttactattttgaataaatattccagtgtaaattgcattaactcccaccactggtggaaaag

SEQ ID NO: 790331 - DNA, 585 bp, Homo sapiens
gccctctttttttgcctgctgccatccatgtaagatgtgagttgctcctccttgccttccaccattattgtagggcctctccagccatgtggaactgtaagtccaataagcctctttctgttgttgtaaattgcccagtctcaggtaggtctttatcagcagcataaaaatggactaatacagtaaattggtaccagtagagtggggcaccgctgaaaagayacccaaaaatatggaagaaactttggaactgggtaacaggcagaggctggaacagtttggatggagatgaggaacttgttgggaactggagcaaaggtgactcttgttatgttttagcaaagagactggcagcattttgcccctgccctagagatttgtagaactttgaacttgagagagatgatttagggcatctggcagaagaaatttccaagctgaaaagcattcaagaggtgacttgggtgctgttaaatgcattcggtttcaaaagggaaacaaggcataaaagtttggaaaatttgcagcctgactatgcaatagaaaagaaaatcctattttcagaggagaaattcaagccagttg

SEQ ID NO: 790332 - DNA, 609 bp, Homo sapiens
acctagattaaaatcaaaagtcactttaccaactatgaaattataggaggattcgaaatcacaaaagcatacatttttttgtgtgtctgaatttgtctttttacatgtgttaatgtgtagaatcaaggggaatgaatgttaaaaaattcctgttctctcttttagtccattgtccctgccagtcaggtgctgtagaactgtttcttataacaccagagcaaatgtgtttattatttattttttttcctgacttctmtccttctttagtaagcctacacactgctgctgccacaatgtagtacccagacttacttgctcttgaagatgtgtgttccactgctgacatcctgctcctctggctgaatcccttctgcaatggtagtcacagatgctctgtcaaaagtggaattgtaaaactactataaatggatattaagtggactctaaatgattatcagtgttttttctctaaatgtttcccttcgtttttagggtttactgtttttcttgaaaatctggatatgcttaaatgaggattaactcattacacctgtaggtcaccttcactgactctggccttgtgttttgagcattttgtcttaatctcaa

SEQ ID NO: 790333 - DNA, 534 bp, Homo sapiens
actccagcctcgtgacagagcaagactctgtctcaaaaacaaacaaacaaacaaacaaacaaacaaaaaaaagccacaaagtatccaatttaaagaaaataccgcttggtttagcttgaaaagccaaactttattcatagtttacttcttgcctagggataagagaaaaataaatgcttcagaatggcttgtaatctttgattttacatagaacagaaagaaaaaaatgcaatggcttttgttcctaggtctcatataaatgtccgacttgttaacaacaatccataaatacaaattaataggcaggcatggtgttcaactattcctatcaaagcctacacacacacacacacacacacacacacacacacacacasacacacaaagttaagataagtttaatactgttgtagaattaacagtgaaaaaatggaggcattttctaaactataggattaatatatagaagaatatcatcatggaagaaagtaaaataaataaaatttttaaatagtttcactattttgaataatg

SEQ ID NO: 790334 - DNA, 537 bp, Homo sapiens
taagagtgaactcctgaaattcaaatccccattcctctgctaattagttatataaacttgggcaagtcaccatttctttatctacaaatggactcccattgtagtcatacttagcacatcagcttgctggaacgtttaaatgagaagtcataggagctctttaggctctagggtctggcccaagtaaatgcctgatgaaaatgagctttttactcaacgtcatcattaatagaggcagaagtgacaaaaaagaaacttgtgtaatatcacagcattggaaagtaacaaagctgagatactgatgtctagagaaacascatatgatctctgaagtgtcatatacaaacattaaaatgtgtttttatcccgttctgattatcattcaaaaatcttctcaacatcagtaactactttaataaatgaatagtcaatctagtagattaatattaagcagtttttaaaataaacattaaggatcaaatcaagccaatttaccccttcctcaaaatacttttctcgtttacgtagtctataaaa

SEQ ID NO: 790335 - DNA, 646 bp, Homo sapiens
agaaaggatgtctccagaacccaaatgtgaatcttgattgtttttagctcatcagggtgttttaattattccagttataatgcaacatatgaatgtgaaaagaagaaataaaactgagctcttgataatgttattggatcaataaattaagtaactaaaaaatccctacctcaagatttcctgttatctgagatgataataattcctcttggttgcctatattatttacattcattctagatttagcctctgaaagaaagaaatattgaagtttttatacttcaatatatattaaagaaaactaaaacactctaacttatttctatgrttttttgacatttcattcctgtttttaatatttcagatggaaaatatcaatgttcttataatttttcttaactttgtcttcagatttgtccattgtacctatcctgcaacttatctgcaatttagctactctttttctatttaactgacaatttcatgttgaattacagcatacatatagtgcaaaaatcttaactatataactcaatgaaattttctgtgactatacctatttaagcagctcccaggtaaaaatacagaacattaccagcaatcccctaatctaccttccagttaccgcttcaaactcccaccctag

SEQ ID NO: 790336 - DNA, 604 bp, Homo sapiens
tgactttatttgtttcatacagaaggacaaactttctcactcttgcaaaaaactccagtgagattcctttctagtgctattacagtaacacacttgaatgacagcaactgagaatccatatatagtcatataccttataacatttcagtcaatgacagactgaatatacaatgrctgtgtttctataagattgaaataccgtattttttactgtaccttttctatgtttagacaaataccattatttacaattgcctatagtattcagtacagtaacatgctgtacggttttgtagcctagaagcaatgggttatatcacacagcctacatgtgtagtagcttataccatctaggtttgtgtaagtatgctctgtgatgtttgcacaatgatgaaatcacctaaggacacgttgcttaggacatattctcatcattaagtgacacatgactgtaagtctatgtatctttaaataacttgctccttcaatatatataaatttgtattttcaaagaactcttaagacaaagtgtactaacctctctttgattatagtgtaaaatatcagtgttattctgggaaaaattatccaaaaaataaattgc

SEQ ID NO: 790337 - DNA, 609 bp, Homo sapiens
cctctgtgcatcacgtcctcatctggatccactgcttcaccgtctacctggtgccctgctccatcttcttcatcttgaactcaatcattgtgtacaagctcaggaggaagagcaattttcgtctccgtggctactccacggggaagaccaccgccatcttgttcaccattacctccatctttgccacactttgggccccccgcatcatcatgattctttaccacctctatggggcgcccatccagaaccgctggctggtrcacatcatgtccgacattgccaacatgctagcccttctgaacacagccatcaacttcttcctctactgcttcatcagcaagcggttccgcaccatggcagccgccacgctcaaggctttcttcaagtgccagaagcaacctgtacagttctacaccaatcataacttttccataacaagtagcccctggatctcgccggcaaactcacactgcatcaagatgctggtgtaccagtatgacaaaaatggaaaacctataaaagtatccccgtgattccataggtgtggcaactactgcctctgtctaatccatttccagatgggaaggtgtcccatcctatggctgagca

SEQ ID NO: 790338 - DNA, 607 bp, Homo sapiens
tggaaaacccaaattggatcatgtcaacccttcaaagggctcctgtgccttcttgcagcatgtaagaagtcaaatctcaattccccaccatcacccacctagcccagcctgtgcctatctcttccccatcatctcctgccccttctcccactttttcattgtactctaacctcactggtctttcgtgccagctgattctcacctctgggttaccctggctgttccctctacgcctaccctggctgattccacctcattatttaggtctstgctcaaacatcaccactttggaacaccctttcttgaccacccaacctaatggagctccctgtcaccttacctcgtatggtctccatggcacatgtcagtatctgaaatgattttgtgtgtgcattggcttccctgcctgctgcttgtctccttgctcatgcagggacttcttcgtatttttctttgctttctcccactgcctagaagagtgcttggcacatgacaggggctcatggatatgagctaagtgaacacagttgatcttatcaccctcattcccagatgaggaaactgaggctcgaagaaggggaaattacctgctcacagtcttgcagct

SEQ ID NO: 790339 - DNA, 615 bp, Homo sapiens
agaatcagaaaaactaggatcaaatcccagctttgctaaccctagtatttgggctatgcctcagttttctcattgccttaagaccggaatagcgttacaaaattttgttgaaaaaaaatatggaaatccctagcaccacaggtgctccttccttttcctggaggtgtctgttcctcttagagatgctacagctttaaagcagggtagcatcctaaactcagatgtayatggaaaacggaattgggttgattctattaattacaagcaagtcagtaaggccagtgcagattcaaggatataggatgagattccacctgttaatgggatgtggccagttcacattccgaaaaacatgtgagatgagacatagtactgtggtcttgggaaatacgatctgccatccatggtttgccatataacccacttttgaaggtcagaagctgaaaacaggctgttggtgttttctttgtaataaattccaatttctccttagccagatgcttaaatgaaactagcacaaatgatttttttattcaaaaagacaaaagagaaaagtatattaaacattatagaacatgatcacaaatgcacctctaattaaattaaattgacaat

SEQ ID NO: 790340 - DNA, 619 bp, Homo sapiens
catgttcaaagagttcattggtggaatataccaataaatgatatatatgattaaaacattttggttcttgtcagcacattatagagcaacatagactttgttttgcttaggcttttatcaaaaaaggaatgctattgtgaataaacaaaaataaatgtatattggaaactttttcattgytaagtgtgggtttttcattttgttgttgttagtagagttggtattgtttttgcactcataaaattctgtaacattaacttgttatgttatatttttctcaactctaagatctataaaaacagtgtcataaaatatacatacatatgtgtatgcatatacatatatgtatgtgtatatatatatatatatatatatatatatatatatatatatatatatttatatattcccagctaggtattgtcttatacttaatacttgcttgatagatgtgcataggttgattgattcaaatttatatgtctgtgtaataaatcttactttttagaatactgatctatgatttgtttcaaattataaataggctagataaaaacaacaagctcctaaattttactgcagaataacaaactctgctttaaattacttgagattaaaa

SEQ ID NO: 790341 - DNA, 582 bp, Homo sapiens
ttgaatcattttaagttttatttcatgtaaagaaaaagaagagatagacttagactttggtaagaagatttatggttaaatatgtatgttaaaacggccactaaaataacaggaatatattctatcaaaatcatttgatagaaacaaaaaaggaatgtagaaaaattaaagatccaacaacagtcaaaacatgcagaaaacaaagaaaataaaaagggtattgtatatacacaataaggtaatagaaaaagtccaaatattgcagagtaaaactattaatttaaaaactatcagataggttgtttttttttttaagtatatgctgcttataaagaaatacaactaaaatatggccaggcacagtgactcacacctgtaatcccagcactttggcaggccgaagtgagcggatcatttgaggtcaggatttcgagacyaacctgaccaacatggtgaaacctcgtctctactaaaaataaaaaaaaaaatagctgggtgtaatggcacatgcctgtaatttcatctactcgggaggctgaggcaggagaatcacttgaacccaggaagcggaggttgcagcag

SEQ ID NO: 790342 - DNA, 621 bp, Homo sapiens
acgattgagctttcttccctaaggactaaaaagagagcagctctttcaaaagactctactgctgatattaaacaactgcctgacatggccccatctttttggcctgataaaggagcagaccagagtggttctgccagtctacaaaggatgcacagtgagggttttggcatcctctgattcaccttttgacaccagagggtagaaaactccaccctccaatcacgctaatgttttttgtactgggacccatgaagggccatgaagctccatcacacatgtgcgtatttctcgtttcataaacattcatgactcctattgcttcatgaatatgtatatttggccaccctgctcagcatacatgccarttccccttgcacctcccttaaagtatctgtttctggcttctggctgcaggctttgctccccagcctgtcagaatggccaccctgcaggctgcaaccccttatgagaaatataggtcttttctccaaatttcggaaccctgccattcttcagctgacactccattgaaaggttttaaggaagaaagcacgatctggaagtgacaaaaggattaaaactcccaaatccaggcccactgagaagagggctgtgggaaag

SEQ ID NO: 790343 - DNA, 633 bp, Homo sapiens
attatttttgctcaacagtacatttggctgcacgcctacttattcaccctgcttgctcagctaaagtatgtcatctgggaagatttaaactatcaaattcaggaaagtggttttaggacagtgttcgaaaagggagacacatttgttgacacatgttacagatccacagttaacgtcgtttccaggcatcttgtgccaggttctctccttcaccaaataccacaataaaaaaaggtgacacaygaaggcacaaaagcatctcgcataacccagaagccgacacgctcagcaagtactacagaaaaagtgccatcctgcctgacagatataaccttttcttcttggttctgttattttcggaaaggatagggaatgattgcttaaattacttaggtttgtatattagaaattctggagaatagcatgcaaaacattcagtcatgtaagtgggaaatttttaaatctccattaaataatatggctccaaactgcagtgatctttagttctctatagcagcccaagactccactgcttctccaactctccattcaagggggaatctctaagcccactttttaggataaactcaacagactcaacagtcaacagcctttgcctctacttacttacac

SEQ ID NO: 790344 - DNA, 615 bp, Homo sapiens
cacttgaatattccctatttgattctttttttttttcaatgctttgtttctacccacatgcaatacactgaatatttgtgttgccctgaaattcgtattttgaagcctgaatccccaatgggatggtgtctggaggtagaatccttgggagataattaggttatgaaggtagaatgcttatgatgggactactgccctttaaagagggacctgagagagacagagagagagaaagagagaggacagggggctgggggaaggaagctcccagccccttccaccatgtgagcacacagcaagaagatctcagtctatgaaggaagcaggcccttgccagacatggaatctgtcagcaccttggatcttgaactttccaggctcctgtacaatgagaaacaaatttctgttgttaataagccacccaggttagcactatttttatagcagcccaaagggactaaggcatcatggaacaracttctcaatccactaattggttactacctgcaacttgaaaagcaatggtctagaagaaatcagcaaaacaaacagaaatctaacctgctgtgaataaaggattgacaggaatttggcggtaaaaggaggaatggggaa

SEQ ID NO: 790345 - DNA, 561 bp, Homo sapiens
gggtttggatttcctataactggatcctgtgtctttattgctagtttagttcatagttttggtggagcatattctcaagaccatccatgtgtggagaactaatttgacaaagacttgatgtgaacatgtctctattttctaatgtaaatcattttcccttgggatatcaraagtttactgcattgacttcttccctctagtattgtttttgaggcatctaaagccaatctgattcctgatccttcagaagaacctcctgctgctttggggagaaggaggttcctctacctggtagcttttgggtactcctctttgcccccatggctgaaattcacaatgaagtgcttggtgtggttttatttttataggttatgctgtacactcaataggtccttatataggaaaaaaacaaaaaataaataacaaaaaaaacaacaacactgttttcttcttgatacgtcactttcaatgcatctgacaagagacaggggaggagtgttaccacaccaagcaattctccacttcttggcagacaccaactgggtgccccccagttcaatt

SEQ ID NO: 790346 - DNA, 468 bp, Homo sapiens
ttttatttctccttcatctatgaagcttagtttggctggaaatgaaattctgcgttgaaaattgttttctttaagaatgttgaatattggcccccactctcttctggcttgtggagtttctgccaaaagatctgctgttagtctgattggtttccctttgtgagtaactygacctttctctctggctgcccttaacattttttccttcatttcaaccttggttaatctgacaattatgtgtcttggggttactcttcacaagcagtatcttcgtggtgttctctgtatttcctgatttgaatgttggcctgccttgctaggttggggaagttctcctggataatatcctgaagagtgttttccaacttgattccattctccctgtcactttcaagtacaccaatcaaacctaggtttggtcttttcacatagttccatatttcttggaggctttgttcattccttctc

SEQ ID NO: 790347 - DNA, 613 bp, Homo sapiens
ttgaatccattaggaagtggaaactctagctcctcacagccatcgggatccaggcccttcaccagttccctcttgcctgttggttcactggcatctgtggcccaaaggtgaccgggtgagagtcacgaatttaagctgagtagaggccctgttgtgctcacttagtagaagcttttcccttgaccaccacctccaccccctttgccacccctaacccagggcctctgatcagcccaaacctaargctgctgtggcaggaagtgcacattccccaggggtcatgggggtggccagccctgccccttggctcctccaggagtctgtgtgggtacacacctcaggtgccttctccatacagattggtcaacttccagtgtggccacagctctgccaacagggaggaatttccttcactttcgtcctccagggatttgtgagtagcaggcatgggcagtctacttttgctggttggtgctgacgcacagggctgccctatgttgcccaggcccagttccgtcccatggcagctaattgcagggaaaccctggaactggccaatgccagctgagagcaaggtatcagtgcagcaggcaggggcgcgggagcctgggcc

SEQ ID NO: 790348 - DNA, 601 bp, Homo sapiens
acaattactttcacttctaaagtgtccctatttgatagtaaattatggggtcattctattctcagtgatatttaagatgcaggatcgccaggaattcatagtagttggtgaaatgagatggggaaggagggttcaacaaagaggtacaggtactggcaactgagtccccatccgggtggacaggggagraggaagcagcagttcagtagggctggggaagggtgtgagggaagtgattttccagccctcctgaattcatgtgctcaggttgccatgatgagtgtcacagactgggaggcttaaactgcagaaatggcagtttcctcaggctggaggccagaagtctgagatggaggtgtggcagggctggtttctcctgagcctctctcctgggcttatagatgtctgcattctccctgcgtcttcacatggtctcaccccagtgtgcatctcggtcctcatctcctcttcttatgtggacactgtatattggattagggcccaccctagtggcctccttttaacttaattatctaatctaaggccctatctccaaatacagctacattctgagatgctgggggctagggcttccatgtag

SEQ ID NO: 790349 - DNA, 601 bp, Homo sapiens
acaattactttcacttctaaagtgtccctatttgatagtaaattatggggtcattctattctcagtgatatttaagatgcaggatcgccaggaattcatagtagttggtgaaatgagatggggaaggagggttcaacaaagaggtacaggtactggcaactgagtccccatccgggtggacaggggaggaggaagcagcagttcagtrgggctggggaagggtgtgagggaagtgattttccagccctcctgaattcatgtgctcaggttgccatgatgagtgtcacagactgggaggcttaaactgcagaaatggcagtttcctcaggctggaggccagaagtctgagatggaggtgtggcagggctggtttctcctgagcctctctcctgggcttatagatgtctgcattctccctgcgtcttcacatggtctcaccccagtgtgcatctcggtcctcatctcctcttcttatgtggacactgtatattggattagggcccaccctagtggcctccttttaacttaattatctaatctaaggccctatctccaaatacagctacattctgagatgctgggggctagggcttccatgtag

SEQ ID NO: 790350 - DNA, 634 bp, Homo sapiens
caaggaaggagggatccttggcctgacccctccttgctggtcactgggatggaaagtgttgggggtgaaggtctcctggacactgaacttctaggctgccccttcccattccaggctcttggggactttcagaaggttcttggaccgtcaaggagctgccatcctggtagtgctgcagctacctgcctgccccagtactgcaccaggctgcagtctccgttccacactgtgaccacactccatacactattttgccccaatgcccttggcaatgcacacccttgcctgccagcccccttgcttgctgctccacatggacttgctggccatggcatgtggctattccccctgtgccaggttggtggtgtgtctccttcccatctgcagtttctcggtactcatggcaggraaacactgccagtttccagaaccgcagtgattcagcctgtgggtcactaatatcactcccaccctggtgagtcatgtggtggttgtcttggcatctggagtcccaggacaaacaacaccctcccctgtcctcctttctgccccttgcttgcaccctggaccttggcatgagtcaggcgggcattccccagggagattccggcctctaccccatgccctggtgact

SEQ ID NO: 790351 - DNA, 634 bp, Homo sapiens
caaggaaggagggatccttggcctgacccctccttgctggtcactgggatggaaagtgttgggggtgaaggtctcctggacactgaacttctaggctgccccttcccattccaggctcttggggactttcagaaggttcttggaccgtcaaggagctgccatcctggtagtgctgcagctacctgcctgccccagtactgcaccaggctgcagtctccgttccacactgtgaccacactccatacactattttgccccaatgcccttggcaatgcacacccttgcctgccagcccccttgcttgctgctccacatggacttgctggccatggcatgtggctattccccctgtgccaggttggtggtgtgtctccttcccatctgcagtttctcggtactcatggcaggaaaacactgccagtttccagaaccgcagtgattcagcctgtgggtcactaatatcactmccaccctggtgagtcatgtggtggttgtcttggcatctggagtcccaggacaaacaacaccctcccctgtcctcctttctgccccttgcttgcaccctggaccttggcatgagtcaggcgggcattccccagggagattccggcctctaccccatgccctggtgact

SEQ ID NO: 790352 - DNA, 594 bp, Homo sapiens
gggcatgtttcagccttctttgtattacagctctttcagccttgccattctccaggtcccaagttcttgtcctgcaaccccgaagaatgaggtagtcagacaagtgaatggtgagccagactaagaggagctttactgagtgataraacagctcagtctcccatagggcagctcctttctgcagccagggtgtcctgtcgagtgttcagctcctagcagagagggtaactcctctctgcagctggtcattccatcatctgggcagctctcagcagggaggaggccctagagtgggtggcttctctttgcagacagggcgtcagtcatctctgccgctctcagcagtgagggggccctggagtggatagctcctctttgcagctggtcgtcctgatgtatgctcaactctggctgagcccagggcttttatgggcctcagagaggaggaagtgcacgccaattggtccatggacagccatgggcaggcccagaaaaggcaccacaagttcccactcctgtccatggtactggcagcccaaacccagccgtcaggccctccctgccctaaaggtagggcctaaatgtggacctgcc

SEQ ID NO: 790353 - DNA, 525 bp, Homo sapiens
aggccccaaagtgtctggaacaatggcagcaaccttgggataaatatctggcatctctgatgactgctcagatgggggagggacactcatttggatggatggattccaatatatttattaaatagcccatctcattatctagaagtcacactccatgctggagacacgtttccaagcctgagagctagagtgttttaagagcctttggaaaattctctacatgcagtctgagaccctgccccacccctcagacatagccatgtagggattttcgccttcacatgggaagcagatgaggtttaacaagcagtggctgttgtctcttcctcttaagcaagatgtgtgtcctttgcccaaggatgggctgaaatctaaaatargagaacatgtaacatccattggcaaacctctggttaaagccccttgcataggcatcatgtttccttgcttcttaactttcttttagattagaaaaatatttgccattaggtttcccaaaataaaaaaatgtgtgtatgctgtgtg

SEQ ID NO: 790354 - DNA, 613 bp, Homo sapiens
acaaaaaaaaaaatgacaaacaagggaaaagtttttaaacttgtcctatagacaaagggctaattccctaatttataaagagctgttacaactcaataaggaaaagaccaataatcaatacaaaaataggcagaggctatgagcagayaagaaattcaaatatataaaaatattctcagtctccttcattttaacaaaagtgaaaattaaaactgcacttagatataatttttccccatcagattagcaaatactgtaaaaatagatgaaatatttgttgggagtgtcggaaagtgcttgcttgcatatttggtcgacacgaacttcctgagcagtggccctaggaaggacaatctggcagtggctatgaaaactacacatgtatattcatttgagacagtaattctatttctatgaactcacaaatatgcctgcaattgtgggaaatagcatgttgtacaaacttattcatttggtagcacgttttgtgagggcaaaaggcaaaagactgcaagtaatctttcatcaatagaggaccaattaaattaatggcacagtggagtactatacaaccataaaatgaatgagaaagctctctgtgtactgccatgaa

SEQ ID NO: 790355 - DNA, 613 bp, Homo sapiens
acaaaaaaaaaaatgacaaacaagggaaaagtttttaaacttgtcctatagacaaagggctaattccctaatttataaagagctgttacaactcaataaggaaaagaccaataatcaatacaaaaataggcagaggctatgagcagataagaaattcaaatatataaaaatattctcagtctccttcattttaacaaaagtgaaaattaaaactgyacttagatataatttttccccatcagattagcaaatactgtaaaaatagatgaaatatttgttgggagtgtcggaaagtgcttgcttgcatatttggtcgacacgaacttcctgagcagtggccctaggaaggacaatctggcagtggctatgaaaactacacatgtatattcatttgagacagtaattctatttctatgaactcacaaatatgcctgcaattgtgggaaatagcatgttgtacaaacttattcatttggtagcacgttttgtgagggcaaaaggcaaaagactgcaagtaatctttcatcaatagaggaccaattaaattaatggcacagtggagtactatacaaccataaaatgaatgagaaagctctctgtgtactgccatgaa

SEQ ID NO: 790356 - DNA, 613 bp, Homo sapiens
acaaaaaaaaaaatgacaaacaagggaaaagtttttaaacttgtcctatagacaaagggctaattccctaatttataaagagctgttacaactcaataaggaaaagaccaataatcaatacaaaaataggcagaggctatgagcagataagaaattcaaatatataaaaatattctcagtctccttcattttaacaaaagtgaaaattaaaactgcacttagatataatttttccccatcagattagcaaatactgtaaaaatagatgaaatatttgttgggagtgtcggaaagtgcttgcttgcatatttggtcgacacgaacttcctgagcagtggccctaggaaggacaatytggcagtggctatgaaaactacacatgtatattcatttgagacagtaattctatttctatgaactcacaaatatgcctgcaattgtgggaaatagcatgttgtacaaacttattcatttggtagcacgttttgtgagggcaaaaggcaaaagactgcaagtaatctttcatcaatagaggaccaattaaattaatggcacagtggagtactatacaaccataaaatgaatgagaaagctctctgtgtactgccatgaa

SEQ ID NO: 790357 - DNA, 613 bp, Homo sapiens
acaaaaaaaaaaatgacaaacaagggaaaagtttttaaacttgtcctatagacaaagggctaattccctaatttataaagagctgttacaactcaataaggaaaagaccaataatcaatacaaaaataggcagaggctatgagcagataagaaattcaaatatataaaaatattctcagtctccttcattttaacaaaagtgaaaattaaaactgcacttagatataatttttccccatcagattagcaaatactgtaaaaatagatgaaatatttgttgggagtgtcggaaagtgcttgcttgcatatttggtcgacacgaacttcctgagcagtggccctaggaaggacaatctggcagtggctatgaaaactacacatgtatattcatttgagrcagtaattctatttctatgaactcacaaatatgcctgcaattgtgggaaatagcatgttgtacaaacttattcatttggtagcacgttttgtgagggcaaaaggcaaaagactgcaagtaatctttcatcaatagaggaccaattaaattaatggcacagtggagtactatacaaccataaaatgaatgagaaagctctctgtgtactgccatgaa

SEQ ID NO: 790358 - DNA, 622 bp, Homo sapiens
acttattactattaattatatgtgaatacctttattagaaaatatgagagctgtatattttctaagtgttccctcttatcaaataaatcagttattgagctagctatcaattgcagaatcacatgataatttgcttagattgaagcaggmtttttgaaatgatgaaatgccgattttaaatgggactaaagaatgacccttttggtcagctacaaaatggcgagtcttaatggagtctaaaataccagattactcatctcctcttcatcaagagctacctttgattccaggcctattgtttcagaattgcatctgtggattttagacctattcttgactcagagcttgtgctgacctggactggaatacttttttctccttaaaaaaaatgtattattaagaatgcttagaattcaatatgaagaaaaaacaactcaactaaatatagatgaaagtcttcaacagacacttcagaaaaaaaaaaacaaatggttggtaagcacatgaaaagatgtgcaatgtcattagtcattagggaaattaaaaataaaaccacaatgagaatataacttcctgctcattaaaatgacaaaacaaaaacaaaaagtcacatattaagtgt

SEQ ID NO: 790359 - DNA, 639 bp, Homo sapiens
tcccagaaacagaattcaaactggatccatagtccaagttctttctggtatacaaagttgtctctccatgaaaaaaatttaaggagaaagactttgtataatggcgattcactgaaaaaaaaattctcaaatatagtttattgaatgaaacatggattatttaccctgccttggctcctttggaaaggcccaaactcatgtttgagaaaaatactgaggaatctatagaggatgatttcagagtgctttacaaaggtctttgcctaagaagaactttccccaaccctgctggctatgcctgctcttaatatataactttcttacctttagctgaagactttcatctctatttaaaggtgagtgcccttggaagggacagtaatcctgctctcrctctgggagcagatatttgataacgcataagaaaccaagaaagctctgggcaccactggatggaggaatttcaatatggatactacttccaaatagagaaaatacatggaaatgggatgctgagaagacacaaggcagacatctcagagttgactagattgcgctgtagagttcaatctagtccatctgtccgatgactccaaccatgaaactgaccctgtgactttctgacaggatcaacatttg

SEQ ID NO: 790360 - DNA, 641 bp, Homo sapiens
caatgcaatatatcttgcataagtattgcttacaagactgtggcactgggactatttaactacatgctgtggtagcactatgtgtactggggttaataaaaatggaaaaaaactcacatgaagtttagagactaaatcccatttcttctctgttttggtaaagcaaagtattctgtgttctgttgtatagttcaacaggtcaggctttttttttttttttttttaactgttgtcacctttgagggaagtccaatattttatgtaaatacgtactagaaaaataaatatcaatcacatttctctaatctgcatgaacttgaaatacttatacaaatagatttatgatatgtagtccaraaagtaccatgggatggaggtgaggcaacaacttttgagcaggagactggcagttggcgttttaaaatttacagtggtaaactagttattaaatctacaagaattatatatctgtgctcagaagatactgagaattacagaagattcattctcaaagagtgaggagaaagaaagaacttttttcccataatttcatgtcccaaatcaaaatgagttttaccacctaagggattttattttcgttcttatctattattatgtttattagtaaagttaggcattaa

SEQ ID NO: 790361 - DNA, 641 bp, Homo sapiens
caatgcaatatatcttgcataagtattgcttacaagactgtggcactgggactatttaactacatgctgtggtagcactatgtgtactggggttaataaaaatggaaaaaaactcacatgaagtttagagactaaatcccatttcttctctgttttggtaaagcaaagtattctgtgttctgttgtatagttcaacaggtcaggctttttttttttttttttttaactgttgtcacctttgagggaagtccaatattttatgtaaatacgtactagaaaaataaatatcaatcacatttctctaatctgcatgaacttgaaatacttatacaaatagatttatgatatgtagtccagaaagtaccatgggatggaggtgaggcaacaacttttgagcaggagactggcagttggcgttttaaaatttacagtggtaaactagttattaaatctacaaraattatatatctgtgctcagaagatactgagaattacagaagattcattctcaaagagtgaggagaaagaaagaacttttttcccataatttcatgtcccaaatcaaaatgagttttaccacctaagggattttattttcgttcttatctattattatgtttattagtaaagttaggcattaa

SEQ ID NO: 790362 - DNA, 631 bp, Homo sapiens
gtgattagcaaattcttgcttgttctattagaattgcctaaatttcttttggtctgaggttcctaaagaagtataaaaactaaggcagcgtagtttagtgattaacagcatagattttggcacctagattccaactcctggctacaatttaccagctatgtaaccttaagcrcgttacttaccttccctatgcctcagttttctcatctgcaaaacgggcataaaaacaaaaactcacttcatgttttgagaattaagtcattttaatatctgtatgttacttagaacagtgtgttgcatgcaataagcctgtgtaagatatttgaataatattaactttatttgtacttgctaggattacgtactgaatattgactatactgaccttcattaactcacaaagaacaactttagtgagcatttttaaatattgtacatggtggatttctgagatttactcagtcttgccttctttgatgagataacttcctttatgttcatcatctgaactttatctttaaaataaatcttctggttctgtggatcatgactaataatgttcgattcttttcatctccaaagtagaacataataacatctgccatgtagaggcattttatttaaaaataat

SEQ ID NO: 790363 - DNA, 608 bp, Homo sapiens
ttttaaagatgaggaaacagacttggggaggtaactttctcaaggtcatacagcaagcgagtgctagagctgagcttcagaagcgagtcattcttatgccgaaccactaaccactagatgatcctgttcaacaacattgttatcttcatttaaaaaagaagtcagtgaaaatgaagccgattaaaggattggggcaaggaagctgtgattagcaaattcttgcttgttctattagaattgcctaaatttcttttggtctgaggttcctaaagaagtataaaaactaaggcagcgtagtttagtgattaacagcatagattttggcacctagattccaactcctggctacaatttaccagctatgtaaccttaagcgcgttacttaccttccctatgcctcagttttytcatctgcaaaacgggcataaaaacaaaaactcacttcatgttttgagaattaagtcattttaatatctgtatgttacttagaacagtgtgttgcatgcaataagcctgtgtaagatatttgaataatattaactttatttgtacttgctaggattacgtactgaatattgactatactgaccttcattaactcacaaaga

SEQ ID NO: 790364 - DNA, 634 bp, Homo sapiens
tgtctttataacctctctctctctctctatttatctatctacacacatgcacatttcaggatgcattcctaacagccttttaatttaaccatctagcattattatacctaataaaattaacaagttcttcaagtaggtttgttcgtatcaagatcttagaaaaagcccacacattgcatttgtttttgatgtatttgaagtctctttcattttgtaatgccattgatgtgttggatgccacgtcatttggactttagctttttccatgttctgcatttggtggttttcccattgtaggctttaacttgcacatagtcagttttcatggcatatatgtttaacaagagtctattcattaatttgagcagaatatccagccccaaagtggatatttkgggcatctattcattcttggtagcagtttaagatttgaagaacttttgagtaatacaggacttagagcttagagtaaagttgtacttctactttgtggtatttatgccatcagagaattcaggaatgcgctaaatggcaagtttgagaactttattggttaacattcatatcaccaggatttctgttcttcacatcccatcacaattgcctttttacccttagcaacagcaattatttg

SEQ ID NO: 790365 - DNA, 672 bp, Homo sapiens
aatcactgtgtaaacaaagacactgatgaattaagtggtgtactagactgtgttgccattctcattcagcgttttgcttttcttgcagtttaaggattgttcctattttctttctctctctacctcttttacatttgcttttttgtctgtatctagggcttgttgtttgtcccaacatttaaaaatatatgtcaaggactgggcacagtagttcaaacctgtaatcccagcccactttgggaggccaaggtgagcrgatcaccaggtcaagagattgagaccatcctggccaacatggtgaaatcccatctctactaaaaatacaacaattatctgggcgtggtggcaggcgcctgtagtcccagctactcaggatgctgaggcaggagaatcgcttgaactcgggaggcagaggttgcagtgagctaagattgcaccacggcactccagcctggctacagagcgaggctccatctaaaaaaaaaaaaaaaatgtatatatgtatatatgtgtgtgtgtgtatatatatatattatatatatatatatgtcaaatgccgaagctttccaaacactcaggcatttcagataatcctatttgcctgcagcactccatttcttggctccaatatccaattctagctatgtacctagtacttcaccattttccaga

SEQ ID NO: 790366 - DNA, 534 bp, Homo sapiens
atttattacaaattttggccagatgtcagaagattatggcacaatcaaatccagcaatgataccactgggtcaagcaatataaataaaattaagtttttgtaaataaagaaacattcatgtgcattcttttatgcattgtctatggttgtcttcaagctacaatggcagagttgagagatggcaaatcctgcaacttagaatatttactacgtggccttttacagaaacagtttgctgatcccccaactcccatcctaatttaggtgatcatattggttagctccatgagctctttttaagttrtctttttgccccttcttcatagcatactgttactctcatggatgtgccattttttctcactgtgaggatattatttgcagttttttttttttttttggtggtatactgcttgctgcggtgccactacttcttctgaggtaatttagccagttcgtgttggcccatttcatgttggaggcgtttctctacggttaagattcttctgtgttcattcatattaatgagtgaat

SEQ ID NO: 790367 - DNA, 598 bp, Homo sapiens
tctaccatttttgacatcactaacatgatgtcaattcatttagctaattcaaatcaaggttctatgtatttatttttggaaaatggtgatctggctcattaatcttataatgtgaccaacttgagggcatttagaaagtggatgttatgttaccttgttactagaactctgaaattagactgcatggagaccaagataattatgactaaaggattagattctcaagactaagtggactcatttgtgtgtgcagatatttatcaatcctttgtgagaaatgtccttcttagaaggctgcattagcagaatttaaagactaaaggagggaaaacaaaatttttagtcatgataaaaataatttcttgcctttttttggtgatttatggcttacaatgtccttgacgcctgcctagaagataggcaggtgtagtcrtactaagtatcttcattttatgatcttagaaattgatatgtgtctaagaatcattagaaaacagcctagaactcagattttctggtttgtagatgctctgtgatgcagacattacaagtctagtcacgattccttagatacacaacaggtaacccttgcaaaaag

SEQ ID NO: 790368 - DNA, 613 bp, Homo sapiens
aactcatatgtgagaaataacattgtccagaatatacaaagtaaaattgagattagaaagagcaattgtcacagatcaacaataatgggagatttcaatgcacttttcttataactgatacatcaggcagcagaaggcattagtggattgtrggagatacaaataatgcaactaagaagtttgttccaatggctatatgtaaaaccatggaccctacaattagagaacacacattcacttaaatacataataagctttaaaactgaacatatacataaagcaaatctcaatcaacaccaaaaattcagtatcactcagaacttctgtgcatataagacaattaaattagaaatgtatttattactattttagttataaagaaaacggaagacagggcaaaagttaataaaattggaacactatagaaacacagaaaaccctcatatttcaaaattaaagatatttgtactacttttatttatcattttcaattgatggtttgcactcaaatatttcattaagacttcagttatttcaagaatttaaacatgattttatgcattaaaaggtatcagttaaaagacctgtgactgaataaaaatgtaaatcaatt

SEQ ID NO: 790369 - DNA, 613 bp, Homo sapiens
aactcatatgtgagaaataacattgtccagaatatacaaagtaaaattgagattagaaagagcaattgtcacagatcaacaataatgggagatttcaatgcacttttcttataactgatacatcaggcagcagaaggcattagtggattgtgggagatacaaataaygcaactaagaagtttgttccaatggctatatgtaaaaccatggaccctacaattagagaacacacattcacttaaatacataataagctttaaaactgaacatatacataaagcaaatctcaatcaacaccaaaaattcagtatcactcagaacttctgtgcatataagacaattaaattagaaatgtatttattactattttagttataaagaaaacggaagacagggcaaaagttaataaaattggaacactatagaaacacagaaaaccctcatatttcaaaattaaagatatttgtactacttttatttatcattttcaattgatggtttgcactcaaatatttcattaagacttcagttatttcaagaatttaaacatgattttatgcattaaaaggtatcagttaaaagacctgtgactgaataaaaatgtaaatcaatt

SEQ ID NO: 790370 - DNA, 613 bp, Homo sapiens
aactcatatgtgagaaataacattgtccagaatatacaaagtaaaattgagattagaaagagcaattgtcacagatcaacaataatgggagatttcaatgcacttttcttataactgatacatcaggcagcagaaggcattagtggattgtgggagatacaaataatgcaactaagaagtttgttccaatggctatatgtaaaaccatggaccctacaattagagaacacacattcacttaaatayataataagctttaaaactgaacatatacataaagcaaatctcaatcaacaccaaaaattcagtatcactcagaacttctgtgcatataagacaattaaattagaaatgtatttattactattttagttataaagaaaacggaagacagggcaaaagttaataaaattggaacactatagaaacacagaaaaccctcatatttcaaaattaaagatatttgtactacttttatttatcattttcaattgatggtttgcactcaaatatttcattaagacttcagttatttcaagaatttaaacatgattttatgcattaaaaggtatcagttaaaagacctgtgactgaataaaaatgtaaatcaatt

SEQ ID NO: 790371 - DNA, 613 bp, Homo sapiens
aactcatatgtgagaaataacattgtccagaatatacaaagtaaaattgagattagaaagagcaattgtcacagatcaacaataatgggagatttcaatgcacttttcttataactgatacatcaggcagcagaaggcattagtggattgtgggagatacaaataatgcaactaagaagtttgttccaatggctatatgtaaaaccatggaccctacaattagagaacacacattcacttaaatacataataagctttaaaactgaacatatacataaagcaaatctcaatcaacaccaaaaattcagtatcactcagaacttctgtgcatataagacaattaaattagaaatgtatttattactattttagttataaagaaaacggaagacagggcaaaagttaataaaattggaacacyatagaaacacagaaaaccctcatatttcaaaattaaagatatttgtactacttttatttatcattttcaattgatggtttgcactcaaatatttcattaagacttcagttatttcaagaatttaaacatgattttatgcattaaaaggtatcagttaaaagacctgtgactgaataaaaatgtaaatcaatt

SEQ ID NO: 790372 - DNA, 586 bp, Homo sapiens
ccttttcctatggattattttttttccaatggagagaaatgcttttttacctggataataaattaaaaagtggtttcttgacattttactgcttttatttattccatttaaagaaaatgatttccaaagccagacaatggtgctgttcaatagaaaatgatgacctttaattaaaactctgccccttactaattttcacatctttaccaacctcctcatcaatgtggaagaggcataattgaagggagaaaacacctgatctaaatacactttatctaaatcacttcccccaagcagacattctctatctcarttcctagttcatttccttcattgtatttcctaattcaaaattatttctttcttcacctgttcattgtgcctgtgatcacataggccataggttttatatgggagggagctttgtagactagtgacttcccagtgttattgctgaagaaaggaatagataagggaagaggaggcaaaggtgaatatatctgatgaatcggaaaaaaaggtatgtggtctcaaatcgcaattaatctctaaatgtaacaagcaaaagcaaaagtaatgcttttgt

SEQ ID NO: 790373 - DNA, 504 bp, Homo sapiens
ccagtgttattgctgaagaaaggaatagataagggaagaggaggcaaaggtgaatatatctgatgaatcggaaaaaaaggtatgtggtctcaaatcgcaattaatctctaaatgtaacaagcaaaagcaaaagtaatgcttttgtttattttactccatctttttttttttttttttttttgagacggagtcttgagctgttgcccaagctggagtgcaatggtatgatyttgactcactgcaacctccgcctcccaggttcaagtgattctcctgcctcagcctcccgagtaactgggattacaggtgcatgccactatgcctggctaatttttctatttttagtagaggcagggtatcaccatgttggctaggctggtctcaaactcctgttctcaggtgacctgcctgccttggcctcccaaaatgctgggattacaagcgtgagccatcgcacccaacctactccatgatttttttgattatttattttgaaattattca

SEQ ID NO: 790374 - DNA, 504 bp, Homo sapiens
ccagtgttattgctgaagaaaggaatagataagggaagaggaggcaaaggtgaatatatctgatgaatcggaaaaaaaggtatgtggtctcaaatcgcaattaatctctaaatgtaacaagcaaaagcaaaagtaatgcttttgtttattttactccatctttttttttttttttttttttgagacggagtcttgagctgttgcccaagctggagtgcaatggtatgatcttgactcactgcaacctccgcctcccaggttcaagtgattctcctgcctcagcctccygagtaactgggattacaggtgcatgccactatgcctggctaatttttctatttttagtagaggcagggtatcaccatgttggctaggctggtctcaaactcctgttctcaggtgacctgcctgccttggcctcccaaaatgctgggattacaagcgtgagccatcgcacccaacctactccatgatttttttgattatttattttgaaattattca

SEQ ID NO: 790375 - DNA, 601 bp, Homo sapiens
cataatatacatacatacatacataaataaattatgttatgttcataatattaagaatgtattttgtggttttatatacatgtctttagctggcataagacagaatctacacagatttctctttgaataatagaaatgtctattcttagaaggacattttctctagataaatttgtatgaaaagagttaaagtgggttgggcgcggtggctcacgcctgtaatcccagcactttgggarcccgaggtgggtggattacaaggtcaggagatcgagaccatcctggctaacatggtgaaaccccatctctactaaaaatacagaaaattagccgggcgtggtggtgggcgcctgtagtcccagctactcgggaggctgaggcaggagaatggcgtgaacccgggaggcggagcttgcagtgagccgagatcgtgccactgcacttcagcctgggcgacagagcgagactccgtctcaaaaaaaaaaaaaaaaaaaaaaaagagttaaagtggcagctgggcacggtggctcatgcctgtaatctcagcactttggggggccaaggcgggcagatcatgaggtcgagagatcaagaccatcct

SEQ ID NO: 790376 - DNA, 601 bp, Homo sapiens
cataatatacatacatacatacataaataaattatgttatgttcataatattaagaatgtattttgtggttttatatacatgtctttagctggcataagacagaatctacacagatttctctttgaataatagaaatgtctattcttagaaggacattttctctagataaatttgtatgaaaagagttaaagtgggttgggcgcggtggctcacgcctgtaatcccagcactttgggagcccgaggtgggtggattacaaggtcaggagatcgagaccatcctggctaacatggtgaaaccccatctctactaaaaatacagaaaattagccgggcgtggtggtgggcgcctgtagtcccagctactcgggaggctgaggcaggagaatggcgtgaacccgggaggyggagcttgcagtgagccgagatcgtgccactgcacttcagcctgggcgacagagcgagactccgtctcaaaaaaaaaaaaaaaaaaaaaaaagagttaaagtggcagctgggcacggtggctcatgcctgtaatctcagcactttggggggccaaggcgggcagatcatgaggtcgagagatcaagaccatcct

SEQ ID NO: 790377 - DNA, 572 bp, Homo sapiens
aagaacagtaaaagaaagtgtagttagcatgttactacaaataaataaatggatgtttgattaatgcagagaaaagttatgagaaaaaaagaatatagtaaacagggcaactaggtaggaaatagaggaaaacatagcagaaaaatctttgtaaccctggagtaggcaaggatttcttttttttcttttctttcttttttttttgagatggggtcttgctctgttgccaggctggagtgcagtggcgtgacctcagctccctgcaacctccgcctcccgggttcaagygattcccctgcctcagcctcccaagcagctgggaagacaggcacacgccaccatacccagctaattttctgtattttactagagatggggtttcaccatgttggccaagatggtctcgatctccggaccttgttatctgcctgccctggcctcccaaagtgctgagattacaggcacgagacactgctccccgccacaaggatttcttaatcgggacacaaacataaaaaatatatatatagagagagattggtttatattaaaactaagaacttttgttcatc

SEQ ID NO: 790378 - DNA, 572 bp, Homo sapiens
aagaacagtaaaagaaagtgtagttagcatgttactacaaataaataaatggatgtttgattaatgcagagaaaagttatgagaaaaaaagaatatagtaaacagggcaactaggtaggaaatagaggaaaacatagcagaaaaatctttgtaaccctggagtaggcaaggatttcttttttttcttttctttcttttttttttgagatggggtcttgctctgttgccaggctggagtgcagtggcgtgacctcagctccctgcaacctccgcctcccgggttcaagtgattcccctgcctcagcctcccaagcagctgggaagacaggcacacgccaccatrcccagctaattttctgtattttactagagatggggtttcaccatgttggccaagatggtctcgatctccggaccttgttatctgcctgccctggcctcccaaagtgctgagattacaggcacgagacactgctccccgccacaaggatttcttaatcgggacacaaacataaaaaatatatatatagagagagattggtttatattaaaactaagaacttttgttcatc

SEQ ID NO: 790379 - DNA, 575 bp, Homo sapiens
cccacccagaatcaaaaccaaagtgcctgacccaaccaaaagaatagatatatctataggaaaaagtattttccctatgaaagccaatccataaaatttgaagaagtgactattatactagatgcacagatatgaatgaaagaacacaagaaacataaaaaagcaaggaaacataacacctccaaaagaacacagtaattattcaccaacattccaatgaaaaataaatcttgcatcccagggatgaagcccacttgatcatggtggataagctttttgatgtgctgctgcattcgttttgccagtattttattgaggatttttscatcaatgttcatcaaggatattggtctaaaattctcttttttggttgtgtctctgcgtggctttggtatcaaaatgatgctggcctcataaaatgagttagggaggattccctcttattctattgattggaatagtttcagaaggaatggtaccagttcctccttgtacctctggtagaattcagctgtgaatccatctggtcctggactctttttggttggtaagctattgattattgccacaatttc

SEQ ID NO: 790380 - DNA, 565 bp, Homo sapiens
aacaattaaaaaaaaaagaaactagaggtagaaatgaaagaaagctgtcaggctaaaaaaagtatctgccagggcatcccatggagtcacagaactgcagggaccccaagggcaagtgaccactttgcagcaaagggcaccagcctcagctgggacatctgccctggccctggcacactgcctgtgctggctcaccagcccaccttcaggcagctctgcttatcagcacactctttcttaatactcactttcatcacttccactcggtgatggcagcttctgctccttaaggccataatgaacaagcataattcatagactttttagtsttggggactcaaatgcaagattaagaactcctagagtgcagggaccaaattaaacgtttgagattcttttaaaattatgaaagaaatacaagctgctggtataaaattcaaaccgcacagaagcaggcatagtaaaaacattctagtctcccttcgcccctgccccagagacactcactattaacagcttccagactttttattatgcatttatattaatgcgagctgtgattcag

SEQ ID NO: 790381 - DNA, 612 bp, Homo sapiens
agcgatcctgtaatgtcctttatagaatatttccctttccatacaggatccagttagggtcaggtagtgcctttaactgccaggtgtcttaagcctccgacattctagaacacctccacagtgaaagctgtcatttatgacactgacattttgggagaacagctcccctccccactctattttttttttttttcctgtgacggagtcttactctgtcacccaggctggagtgcagtggcacaatctcagctcactgtaacctccgcctcgcaggttcaagtgattctcctgcctcagtctcccaagtgagtagctgggactacaggcgactgccaccatgcctggctcatttttatawttttagtagagacagggtttcaccatattggccaggctggtctcaaactcctgaccttgtgttccgcccgcctcaggctcccaaagtgctgggattacaagcgtgagccaccgcgcccggcccccactctattttttaagagaatgctccttatgtaaggtttgtctgatgtcttcccgtgatgagactgaggttacacattttcagccagaacacttcatggtggtgatgtgtcctcagggcatcacatcttg

SEQ ID NO: 790382 - DNA, 420 bp, Homo sapiens
cataaatgagatgcctcaatatttaagatatcaattctccccaaaatgatctttagaattaaatcagaatccagaaggactttctacagaaattaagaagctgattttaaaatggatatgaagaggcataggaactggaatcgccaaagtaactttgaaaagggatraagatggagaactcacactacctgatttcaagtttactataaagctacaataatctcaggtaagtgtcacattggagaaagggtaaacatttagatgtatgaaacgcagtaagagtccagaagaagactcacacatatatgaacaactgattttcaagaaatgtataaaggaaattctatgaaaaaagagagtctttccaaaaaatggtgccgaaacaagtggaaattcatttgcaacaaaaactgtatccat

SEQ ID NO: 790383 - DNA, 631 bp, Homo sapiens
acaagcagcaggggaagcgcaaggagggcgagtgccatgaggggcaacaccaagtgtctgccagggcctggggcctgtctcagcagagaggtggttaagatggaggaggggcttgtgggccgtggtgagggggatgggttgtaacctgaaggatgtgggctgtcaattagcagcagtascagcagcagcagaatgcaggagccgcgctcgctgcagtgctaacagctggtatttcctaggcacttaatacgtgcagagccctgtgctaggtccctacattctcccgcatgttcaccacagaaggtagggccgggtattgtctgtatttggcagatgaggtgactttgtactgagcctgaggccacccagtgaatctgaagcagagtcagccgcagtcccatactcctctctgggaccctggataaagtgcagcctccctgctaggttcccccagatccccaggggccccagtgcaggcttctccactgacatctgcggtactcctccctctgggcctgcctgtcttcctcacccagagccagcaccacctggcctgcatttaccctccctccccagggcctagcctggagcctgccaggaagccctgtccccagatagtgcactttgaaat

SEQ ID NO: 790384 - DNA, 654 bp, Homo sapiens
atggagtggctttccccaagcagctcccatgcttgtcctggggccccgcccctggcctctaaggccttatgcactggttaatcctgatggacctcggttcaaatccccattccagcactgatggctctgtgggtttcctaaccacrccgagcctctggagaatgaattagacaaacctccccgtgggattcttgtgggggtaaaaaggtattaaaggagcatagtgcctgacacacacacagcagatgctcacgagactgtgacatttaaaaatattcatggcttctaagcatcctcacagcagctctgtcagcaatgtcagtataatcagcctcattttcagatgagaaagctggctctcacacaagggaagggactggcccaaggtcatgcagccaatcagcagacagctgggatttcctgcagcaggaacggagatggagcctggctctccaatgtcggagcttgactgaggctcgcctggccctgcccctaggcccctggaagcgctaagctccaggagggacgctgagggcagcaggggatgttaggagacagctccacaccagggcgaagactcccccctcccgggctgccccagcaccacgacgccttgggacaaagggctctgggccaagtaaggatttttgtgaa

SEQ ID NO: 790385 - DNA, 623 bp, Homo sapiens
tgcatgtgccaggcacagacccagctcttgcgctggagatgctcactgggcagtcaagggggtctgagtcacaagcacagtgagactgtgagtcttgactgaggatgaaggactgaagggtggacacccccagggttggttctggcatcctggagacctgggcccaagtctcagctccgcccctggctagctgtgagaactcacacaagccaattcacttctctagcctcagcttcctcctctgtcaaaagggaaagtgttgcccatttccaagatcaaagtgggtcacacgtggaaggtgctgagcatgggcctggctcagcagggaacctccggaccttgtgttccagcacgtgcctaagtgtctgagcagcagccctgcccaatggtcagccccctgcaatagatggggcctgcctgaccccggcctggmccttgcaccagcctcatctctgcattcctggctctggccacatgagtcacactcgaattcttgactgcgttccctcttgtcagctcacggtctcagatgggatacacagcttcccagcctaggtctgagccagccaccttttcctctggggtgagtgacagctgctccctgcccttgggccacgacacct

SEQ ID NO: 790386 - DNA, 521 bp, Homo sapiens
ggtcaggcgagctcctcacaggtgctctggaccacgctagcagccgctaagcccgtgcaggtggacaaccactgtggctgtagagcgacaatcgcccagaattggtgtcatctcagggcctccactgtgtcccaagtcatctcggatgccctaccctccgcmctgctgctctttagacctgccgtctcctccctgcccgcacaggcctgtgattgagctctgcatcccttcctcgctggaccccaccctggctccccctggctgccatgtagtctccctcttcactcagtacatgccctatacgctggctggaggcaaggcctgggacgagcaggagagagacgcttatgcagacagaggtaaagacagctgcacgttctgcctccagagccacagccgggcatgcgacccaactgggcctgctcctcctcactgccccattcaggattgacaactgcaggtgccattccaaagggaggaaatagtcaagggaacctcaagtcaacatagttgactgcagg

SEQ ID NO: 790387 - DNA, 521 bp, Homo sapiens
ggtcaggcgagctcctcacaggtgctctggaccacgctagcagccgctaagcccgtgcaggtggacaaccactgtggctgtagagcgacaatcgcccagaattggtgtcatctcagggcctccactgtgtcccaagtcatctcggatgccctaccctccgcactgctgctctttagacctgccgtctcctccctgcccgcacaggcctgtgattgagctctgcatcccttcctcgctggaccccaccctggctccccctggctgccatgtagtctccctcttcactcagtacaygccctatacgctggctggaggcaaggcctgggacgagcaggagagagacgcttatgcagacagaggtaaagacagctgcacgttctgcctccagagccacagccgggcatgcgacccaactgggcctgctcctcctcactgccccattcaggattgacaactgcaggtgccattccaaagggaggaaatagtcaagggaacctcaagtcaacatagttgactgcagg

SEQ ID NO: 790388 - DNA, 661 bp, Homo sapiens
agttgactgcaggggtcaggaactgggctaagaaagtcaagaagacacagttcctgccctccagttgctcacagtctagcaagggatggaggagactaattaagaaaccttttattacagcacagctgactgcacgaaccaaaggagamgcatgagccagagagacaaggaaggctttcaaaggaagggatggtcaagctgggtttccaaggatgactaggagctggccaggcagcaaagggcattccaagcaagagaaacagcttgatcaggccaggcgtgggggctcatgcctgtaattccagcacttcgggaggccgaggcaggcggatcacccgaggtcaggagttcaagaccagcctgaccaacatggtgaaaccccgtagctactaaaaacataaaaaaattagcagggtgtggtggcacatgcctgtaatcttagctgctcaggaggctgaggcaggagaatcgtttgaacccagaggcggaggttgcagtgagctgagattgcgccactgcactccagcctgggtgacagagtgagactccgtctcaaaaaaaaaaaaaaaaaaaaaaaaaacagcttgagaaaagtgaagaggtgaaaaaagctgcatatgcaaaaggagatcagcagcttcgtgtttaaggttggggtagg

SEQ ID NO: 790389 - DNA, 634 bp, Homo sapiens
actactacacccctctgtctgccaagcccaggtgctcagtggagggccatgaacagaggccagcgtggctccttctcatctccataatacagccatgttctctgcagcctcaatgcaaacagctcctcattcacctctgccacagacagaagacggatcctggctgtggaacctggatctgggaagctttagtggcagcacctgtttttggctggaggtgtttgtaacaccttgtaggtattgtcccctggggcagcatggacmcctctacctgctttgagactgtggatgacctgcatctcatcaaggaccgaggcagatggggacctgggcctggatttctactacagaagccagagactcatctgcacgctgcagaaactggagcagcccatatttggagttaggaagaagtttaataatagtacacaaacttccttggaaagggctagcctaaaggggaactggttattaggagaaaaaaaaaaccaccgctgtttttacagtaaccctcctcagtctataatgagcaaacctctcttctgtatagagcagcctcctaatgtgagtcactccaagacttggcttccaaccgctgccccttagcccaggaagcaggagcacaatggagcag

SEQ ID NO: 790390 - DNA, 564 bp, Homo sapiens
aacaattaaaaaaaaaagaaactagaggtagaaatgaaagaaagctgtcaggctaaaaaaagtatctgccagggcatcccatggagtcacagaactgcagggaccccaagggcaagtgaccactttgcagcaaagggcaccagcctcagctgggacatctgccctggccctggcacactgcctgtgctggctcaccagcccaccttcaggcagctctgcttatcagcacactctttcttaatactcactttcatcacttccactcggtgatggcagcttctgctccttaaggccataatgaacaagcataattcatagactttttagtsttggggactcaaatgcaagattaagaactcctagagtgcagggaccaaattaaacgtttgagattcttttaaaattatgaaagaaatacaagctgctggtataaaattcaaaccgcacagaagcaggcatagtaaaaacattctagtctcccttcgcccctgccccagagacactcactattaacagcttccagactttttattatgcatttatattaatgcgagctgtgattca

SEQ ID NO: 790391 - DNA, 685 bp, Homo sapiens
tttttcttttttttttttttttgtcttttttgagacggaatctcgttctgttgcccaggctggagtgcagtggcgcaatctcggctcactgcaagctccgcctcctgggttcacgccattctcctgcctcagcctcccgagtagctgggactacaggcgcccatcaccacgccctgctaattttttgtatttttagtagagaccgggtttcaccgtgttagccaggatggtctcgatctsctgacctcgtgatctgcccacctcggcctcccaaagtgcagggattataggcgtgagccaccgtaaacataatatctcttttttccaaatgtgagtggcttgcttacaaacatgtctcacattaagtgaaaattgctacgacacaaaggtaatggctatacccaaatgcaagtttgagagaaagcctgtttagctttttcaaattacctaaataaaaacaggggtgtttgtgataagacattggaatgaaggataagaaaaatgggaaagaactgtagtgagccggaattggagaaacagaagtgttttgtgcatttgctgttcttgtgttctaaatgctttgtgagtgtaaaaatcagaaattaaattttggcaacctctatacaaaaaactaaggatcccttccggattctatacccaccctttaggttgaattccttgtttt

SEQ ID NO: 790392 - DNA, 452 bp, Homo sapiens
actgcagctcctcctcttcctgcttcctccctgctccaccccgtgcctagggcagcacaaaagccaatcgctagcaaactccctgcctagcaaggcccagcctggggcagaaatggctgcaagtggccgaggtctctgcaaggctgtggccgcctctcccttcccggcgtggagacgagataacacggaagccaggggaggtctgaagcctgagtatgatgcggtggtgataggagcaggtaaagtggtaaagcaggccgggccagagctgaggggcgggaagrcagccctgctcagagcttggtggggagggggagggggagccaagccccactgctctctcctctggcataacccagccagaagtttatacgctagcaggggctgcaatggaaagcccttccatctggcaggcaggcacctgggattccggtgctggctctgctgtgtgg

SEQ ID NO: 790393 - DNA, 624 bp, Homo sapiens
cagagcagggagaaagcagtcctgttgtgtgatacgcaggactcaccccatctggagcaccttgttttaacaggacattgacagcctggagggcattgacaggaggacaactaaactccttccaggaatattgtctttccaaaactataatggagagcgtttattttaccagcatcacatcttgggctatgaccttaatgttctatctcaattgatccttacctgtaagtcaagagccatgttataatcagggaactaaagttcaggggttaaattcacacagctagaaagtgatggagaattcaagccaaggcctgactgtctcctactccttgttcttgagctatgatgcgctcaggcctcttggtaccaataccgcccagactcacacgtctctggctcttkgtactttgcggtgaacgtggtgatagagtgcccctggcagctccagcgcagtgtgcacagaggctgagactggagctgctggaaaccggccggctgcgtctgcctccctgctccacagctcaccagctgcgtgatttcaccacgtggtgccttcttttcctcatctgtaagagggaatagtaacagcagctgcctcctaaggccacatcagcacagtgc

SEQ ID NO: 790394 - DNA, 555 bp, Homo sapiens
cgtgagccaccgtgcccggcccccatcagctctaaaaaaaaaaaaaaaacaaaaaaaaaacaagcttttgtgtccctttgacatttgacatgtctttatcattcaggtgtctcaggttcatcctggactttccctgcttgagtcctggaatcgaccttttctccaaggagccttgttccttttagtggggaaaggtatttagaagctaagatcttggtgttggctgtgttcactacaattggtgtatctacttctccatcctccagcgtcctctggtgatcgagaatctgaagttccaggttttcataggccccagtgaccttgtcctcagaaggagaaagatcctctctcctttggtgttcccctcaactcccttaaataaaggactctattggtcctgcccagtaagttttcatycctggaccaatcgctgtggctggaggcatgggacactcttaggagtggagcttgggtcccaggcccacacctatctgaagagtgggtgctgggtgtgtcttgaggaatccagcttcacctagctacatggaatagggt

SEQ ID NO: 790395 - DNA, 570 bp, Homo sapiens
aaccagattccaggaatagagagccagttaattttacttttgattaatgttcaaggcctagactgacttgaggatgatatagaatcctggagctttagagtttaggtaaacttgaagctggccttggctctcagctgggaagtgggcctggagcaggaatgaacctgccacatgtcatctgactcgcaagacacccgaggacaggacaggcgccactcctctctggttggtcctgctgagtgaagagaagactggctggatcaacctttgagctgccaaagctgtgtaagttcrtgaaacaggtgcccattctctttattttacaatagggagagaaatacagggaggacatcaatttgcccaaggtcaggctgaatgaaacccaagtgtcctgatcaggaagccagtgtttcttctagtagccaggggcagtgtgatttggcgaaaagatcagagccttgaagagacataatcctagattcacttactggggatgtgacctcagacaaattacttgccctgtgtgcctctcagatttctccattggtggggacactcgtgctaatggta

SEQ ID NO: 790396 - DNA, 630 bp, Homo sapiens
cactctttcatttttgaagaatagatttgctagatatagaattcttacagtctttttcttttagctctttgaatatgtcatttacctgccttttggccttcatggcttctgatgagaaagctgttaattttccttaggattttttgtacataaagagtcatttttctcttgctgcttttaaggttctcttctttgtttttcaacagtttaattataatgtgtttaggtagagatcactttaagtttatcccacttatagtttgttaaactttttggatgtatacatcagtgtttttcaccaaatttgggaagtttatggccaatatttccccaagtattcttttgcccattctctctcttctctccttctaggacccccactatgcctttgttggtatgcttgatggcatcrtacaagtctctcttcatccttattcttttctcattctgttcttcagactggataatctcaactgatacatcttaagtgtgatgattctcattactgcctgctcaaatgcgctgttgagcccctctagtgaatttttcatttcagttattgtacttttcaactacagaacttctgttaagttctttttagtaacttctctttgttgatattctctattt

SEQ ID NO: 790397 - DNA, 530 bp, Homo sapiens
ggcagaattctcctttcccaagctctgccaacacccaaacccctccccagaagacagctggttcacacaacagaggaacagacccctcacgactctgcagggggaattcctttctgggagagaacacatgtccaatagggccagtccccactcaggctgctgctgtcactcagccagaaggcaggacaggcttttgaagctgtgatrtttctgagtttggttttggacaaaaacaccattcttcctcatagcctttcacaccctgattcaagcaattttaactgaattctatttcccttcaatagaaggctatttgaagatacaaaaaccatatttgtgaatgaattctaggattgtatttgcagagtcactcctgttggatttcgtgctctataccaagtgtatttctacctctgggcctcagaaccatttctcacaccccccaacaatatctcatgccctcatatcccaaatatgcaattacctatcagttgtgaaaggtaaaaataaaattcatatgggtttcatag

SEQ ID NO: 790398 - DNA, 555 bp, Homo sapiens
atgtttttgcatgtgtcggtagtttgttcctttttattactgaataatatctatttgggtggactgcaagttgcttatccattccccagttgatgggtatttgggctgcttttagtcttggactgttttgaataaagctcttatgaacatccacgtacaagtcttccaccaacatatgtgttcacttctcttgagtaaatacctaggagtaaaatcactgggtcatatgctgtgcatgtttaactttctaggaaaatgccagatttatcctgaataacagaaatgatcaaytgatttactattaaaggacttactggattttataaggaaaagaggaaacgagacgaaagaaaatgtagtgcatctgaaagcacatgggggctgctttgctgaaggggctggcaggcggcttcccaggcagggtctgctcaggactgctctagccagatgcctcccctggtgtttacttcacccacaggaaaatggccaccttcaccccaccttcagtggacgtgcagccccttcggtgctcctctcttcatctgccttcagagg

SEQ ID NO: 790399 - DNA, 555 bp, Homo sapiens
atgtttttgcatgtgtcggtagtttgttcctttttattactgaataatatctatttgggtggactgcaagttgcttatccattccccagttgatgggtatttgggctgcttttagtcttggactgttttgaataaagctcttatgaacatccacgtacaagtcttccaccaacatatgtgttcacttctcttgagtaaatacctaggagtaaaatcactgggtcatatgctgtgcatgtttaactttctaggaaaatgccagatttatcctgaataacagaaatgatcaactgatttactattaaaggacttactggattttataaggaaaagaggaaacgagaygaaagaaaatgtagtgcatctgaaagcacatgggggctgctttgctgaaggggctggcaggcggcttcccaggcagggtctgctcaggactgctctagccagatgcctcccctggtgtttacttcacccacaggaaaatggccaccttcaccccaccttcagtggacgtgcagccccttcggtgctcctctcttcatctgccttcagagg

SEQ ID NO: 790400 - DNA, 646 bp, Homo sapiens
ttgggctattgtaaatgaagctgccacgaacactcacatgcaggtctttgtgcctcctcagctctcctaggtgaactccttcaggtgcacattctgtctatccttgtgcctgctagcctgtcaccaggtgggtacttctgtttttcttcctatgagtgagcatcagataagaatgggattttggatgccaccacctgtgctagtccctagcagtcacttagactgtactrtattctaattgtctgttgacctgtttgacaccctcactaagctagagacaatttggcatagaaattaagagcacagggttcaaatcccaactctgtcatatactaactgtgtgatcttggacaagttacttaacctctatgtgcctcagtctcctcagctgcaaagtgaggataacagtacctatgtcatgggattgtgaaatcagatacatagacagacatgctgggcctatagggaatactatgttgttgaatgactggacaagaagtagtatcagggtctggaatgcacacgtcagatccccttttaacagctcataatggcactggaactgtctccatcaactgctctgttgcctggcaccctggcaccccagttcccactggatgataagcactgccttaacactgcatgg

SEQ ID NO: 790401 - DNA, 563 bp, Homo sapiens
ggagttccaaccgccagggggagagtcctggaggatcctgggctgttggcagccacccagcagggcccgtcctgggagtggggctggactcttcctgcaggaaaggctgggctggacctgctctgagaggcttcagaaccagccacacgaagaccaaagtgaagagcaaggagctgaactccacgcagaacacagcgcagcgtcctttaaaggaaggccaaaaacaacccaacaaaaatgccaggtgatcaaagcggtcacagcacaatgtccacatccaacgagaaattgctrctacgtccagacgcagggaaaggtggccgtgggaacgtgagtcagcagcaacaggcccagaagggcagccacggtggacttgtcagacgtggaccctgaaatgacaatcacagcatgatttcaggcaggagcctgaaatggtacagctttggacatcggtttggcaaattcttttagagagaaacacacaccttccctaggacccagcaactccactcctaataaccaagtgaaatggaaggagttgtcctcagcaaaacgtgtgtgcg

SEQ ID NO: 790402 - DNA, 599 bp, Homo sapiens
aatataggtacaatgtacctcagaataggagtctctggtgatgccatttctcattaattcccatatattacatatctttacttggaactcttgggttaaactaccctggctttgcatttaactgtaaagcactcagataattctatccacatgctcctctgttcacactgccttgatatcctgacttctgaaactttatacttacctatcccttaaattatccttttgagctaagaacccaagcaatratcctatttcgtggcaaaacccatgcttgcattctatttccacatcctgttctactagtgtgctaagaattaagaagtaaaatgcaagtatctcgtttccttttcaggaatggctagcttgttaagaatgatgatgacacctaacatttatgagttctgactccctcacatgtatatctcatttaatcctcacaatcaactctgtgaagtaatgggtattatccccattttatggatgaggaaattgaggcaaagcaagattaaccagcaaagatcacacagctagtgggtgacatcgtcagagcttgaacccaggcagtctgaatccagagcacacattcctgagtatta

SEQ ID NO: 790403 - DNA, 687 bp, Homo sapiens
ttgaaaaaaaggaaaaagttataggatccccacttcctgattttaaaatgtactacagaactatagtaattaagacagtgtggtgctggcataaagatagacttataaatcaatagttcagaatcgagaatccagatataamcccttataattatggtcaattgattttcaataagggagtcaagacaattcaatgagagaaagaataatcttttcaaaaattgatgctggaactgctgggtacctacgtgtaaaagaacaaagttggacccttcctcataccatttataaaaatttattaaaacggaccagagatctaaatttaagagctaaaactataaaactcttaggagaaaatataggagtaaatctttgtgactttggtgtaggcaaacccttcttacatacaacactcaagatataagcaacaacaacaataaaaataaattagacttctttaaataaaaaattttgtgtttcaaagaatatcatcaagaaagtaaaaagatagcttaggtaatgggagaaaatatttacaaatcatagtttgtaagggatggtagtgaattcttgtcattttatgttgtctcggcatccattttaaatactagttgggcttttttgtaccaggtggctctcaattcctattggtgtgctgccctcctccctctaggacctgtgagtaat

SEQ ID NO: 790404 - DNA, 535 bp, Homo sapiens
gaacactgacgccactaaatgctggggtggatgtggagcaacaagaactctcattccttgctagtggggatgcaaatgggacacacattttggaaggcagtttgggagtttcttacaaaactaaaattttttttgtaagaaaaaaattcattcggtcaccatagagatgtcaaaaattgccaatgctggccgggtgcggtggctcacacctgtaatcccagcactttgggaggccaaggtgggcagatcacttgaggccaggagttcaagaccagcctggccaacagggtgaaaccctgtctctactaaaaaaaaaaatacaaaaattaggccaggcgtggatggctcatgcctgtaatcccaggactttgggaggccgaggcagstggatcacctgaggtcaggagttcaagatcagcctggccaacatggtgaaaccccgtctctactaaaaatacaaaaaaaatagctggacgcagtggcacgcacccgtagtcccagctactcgggaggctgaggctggagaatcgcttga

SEQ ID NO: 790405 - DNA, 531 bp, Homo sapiens
gccaagcatggtggcggatgcctgtaatcccagctctttgggaggctgaggcacaagaattgcttgagcccgggaggtggaggttgcagtgagctgagatgatgccactgcactccagcctgggcaacagaatgagactccctttaaaaaaaaaaaaaaaaaaaaaaaaaaaaaaccttgccaatgctgactacattgcaagtcatcacagaagggtatcgagaaaagttttcaattggcaataatcacgcctcggataaacctcactgcctatgatactgccactgtgctaagctaaacatattcttaccatccaatcaagcrgttatactccttggtatttacctaaatgagctgaaaactcctatctacacaaaaacctacacatggatgtttatagcagctttattcatcattgccaaaacttagaagcagccaagtgccctttagtaggtgaatgaataaactgttgtacatccacacaatggaatattattcagtgctaaaaataaatgagctatcaagccataa

SEQ ID NO: 790406 - DNA, 531 bp, Homo sapiens
gccaagcatggtggcggatgcctgtaatcccagctctttgggaggctgaggcacaagaattgcttgagcccgggaggtggaggttgcagtgagctgagatgatgccactgcactccagcctgggcaacagaatgagactccctttaaaaaaaaaaaaaaaaaaaaaaaaaaaaaaccttgccaatgctgactacattgcaagtcatcacagaagggtatcgagaaaagttttcaattggcaataatcacgcctcggataaacctcactgcctatgatactgccactgtgctaagctaaacatattcttaccatccaatcaagcggttatactccttggtayttacctaaatgagctgaaaactcctatctacacaaaaacctacacatggatgtttatagcagctttattcatcattgccaaaacttagaagcagccaagtgccctttagtaggtgaatgaataaactgttgtacatccacacaatggaatattattcagtgctaaaaataaatgagctatcaagccataa

SEQ ID NO: 790407 - DNA, 474 bp, Homo sapiens
tgccccatccacgctttgctcatctattgacgaaagagctggctgagcactttctgtgttaggcgaggcctggggactgttacctgctctgtaccactgagcaatccctacgggcctgattctcagcgagcaccctgtcccacccagaccagacctgtggattagcctcaggcctcagggacaagcctcagctctcagccaagcagtgcccaactgcactttccccacctccactcccacccsacagggccattgcaagcagacagggttggcaggaattggggactttcaaataaccaatcagtgggacctaaggaaatatatgcaaatgaaaatgcaaatcaccactcagtctttttgcatctgctgccagccggaccacctgccctaggtgagcacttccttccttttgacagggaggatgcgagctcccgtccagcaggaagcgggctggaggtctgaggttcttgcagt

SEQ ID NO: 790408 - DNA, 668 bp, Homo sapiens
tatgagccaggctctgtgctgggtcacagagaagaagcaggcagtcccagcccttactggctcatagtgaaaatggggagacaggcttctaggcaaataatgagttactgggtccatcaaattggaaggccagacyctgccccagttgctcccttgcttatagaagctgcctggtggagggagggagaccctgatggctgctaagcactgtcacctggacctgtgagtctgagagacaaggcaggggctctgcagccagcaggccaccctttcctggccctgaggcccgtggtaggacccccggaggggagatatgggacccagcctggcacagtctaggaaagaaacctttttcttcccttcctgggcatcgtccctgttttagactacaaagaggagagctggctctctgtaaggttcagtgtcttctggaagccatgctgggccaactttagaggcagcggtacaggagcaaggataggggagctgaggcaccccctgcagctccctcctcccacctgtgcctgggaaggtccaggaccagagagaagtcagccagagccaggggttctccgcccaggataaagggactccagaaagacatccctcccaggcctcagagccttctaagactgtgggggatcctggaaccccagctctgtgtggat

SEQ ID NO: 790409 - DNA, 572 bp, Homo sapiens
ggcaggcccagaggcccccactctgacacctcacccacctggcaattgggagggccccaccccggggtcaggagcactcacgtgaccagggtgccagggcccctggggggcggggcctgagctctgcccctcaccccaaatgggccctgccccctcaccctcatctggcctccttccagctacccacacacgtatgccctctccctgccgcctcatcctcccatgcctaggggctccgctcctttccaggaccartgccacttccacacttgtgtgcccggaacttccggctctgcacacacgtctgtgccgctgccccccactccccagcgtgtgcccgggcctcacgtgtgtgcccaacttgctgccagcccagcactgagtcagggcgtgcctgcccgcctctggcacccggagtagacgagtagacgggtgggtttgtttttccctgtgtgttttgggttcaggaaaaaaaaatccacaaacgagctctccctaaggcgcttttcccttcatttttctgcccaggtgtctctaaagggaacttcattgtctgtttcaaattcatttgc

SEQ ID NO: 790410 - DNA, 659 bp, Homo sapiens
cataacaatacaacacttgactctcatacacctccaagtacttgccacctccatctgttcatttcgcccagcaccatcccttccagggagaaaagaattgttcttcccattttacagagcaagaaactgaggctcagggcccgcccaaagtcacaaccagcagatggtggcacgagggcccaaaccccggcctcctcattccaaggggagggctctctcttggacactttgggtttccggggcttcttagaccaagagagcaaatgcatgttcccccgccagagaggcatccccccttccagccctctcccsacttcccagttgcaatcttaggcactaacagccaggaaacataaattttgcctggcagttgagtaagagctctgaaaggagttacacgtcagggggatggggctttatttctcaatgaaatggcctttttatggttggaataaaagtgccagggggagcgtcatgccaggcagtagcaaattatttgataaactcctccagctaggggtggggctgcgtgggaggtggcggccagagagaagatccccccatttccagatgcatgtttctcttcaggttaaccctgtggaagaccccggggggcctcgtgggccacccagctggagaagggctggccctgggaccat

SEQ ID NO: 790411 - DNA, 659 bp, Homo sapiens
cataacaatacaacacttgactctcatacacctccaagtacttgccacctccatctgttcatttcgcccagcaccatcccttccagggagaaaagaattgttcttcccattttacagagcaagaaactgaggctcagggcccgcccaaagtcacaaccagcagatggtggcacgagggcccaaaccccggcctcctcattccaaggggagggctctctcttggacactttgggtttccggggcttcttagaccaagagagcaaatgcatgttcccccgccagagaggcatccccccttccagccctctcccgacttcccagttgcaatcttaggcactaacakccaggaaacataaattttgcctggcagttgagtaagagctctgaaaggagttacacgtcagggggatggggctttatttctcaatgaaatggcctttttatggttggaataaaagtgccagggggagcgtcatgccaggcagtagcaaattatttgataaactcctccagctaggggtggggctgcgtgggaggtggcggccagagagaagatccccccatttccagatgcatgtttctcttcaggttaaccctgtggaagaccccggggggcctcgtgggccacccagctggagaagggctggccctgggaccat

SEQ ID NO: 790412 - DNA, 619 bp, Homo sapiens
tagctgagagataggggatcccttcttcttcccagccctcaccagtgagatggccactctaacttgggtgtggcaagctgacaaatcctaggtccccaactactctcaccctggctcattcataaagcagaggttccacaccaggagaggcaagctgagaagaccagaggttacagccagcccccacttcagcaagcacccaactcctaaagtaagggtcttactgagakaaaagcatgccactgtccccatccctagctccagatatttcacccatggggagagacagaccatgaaacagagagttctgaagcttgtctaaaagaactgacttcatttgcaacagcatgtggggaagttaaagtctaagggcactctcaaaaacaatagaggttgtggtgaaaacaattcagaggagactggtagatccatccatttgagatataagctagaccactgactagtttgccagaaagaactagagaatgagagagctaacaagagccctcctggggtcagagcagatctcaaacaatgacctcaaaaactacacctgcaaaggaggtcagaattgctacaatatattattttaagtgtccaatttccaatgaataaatta

SEQ ID NO: 790413 - DNA, 548 bp, Homo sapiens
aaaaaaaaaaaaatgacaggctgggcacggtggctcatgtcatgcctgtaatcctagcactttgggaggccaaggcgggccgatcacctgaggtcggcagttcgagaccagcctgaccaacatggagaaaccctgtctstactaaaaatacaaaattaggccaggtaccgtggttcacacctgtaatcccagcactttgggaggccaaggtgggtggatcacaaggtcaggaattcaaaaccagcctgatcaacatggtgaaaccctgtctctactaaaaatacaaaaattagcagagtgtggtggtgcacacctataatcccagctattcaggaggctgaggcaggagaatcgcttcaacctgggaggcggaggctgcagtgagccgagatcgagatcacgccaccgcactccagcctgggcaacaacagcgaaacacctgaggtcgggagtttgagaccatcctggctaacacagtgaaaccccgtctctactaaaaatacaaaaattagccaggcgtggcggcgtgtacccgtagtcccagctgc

SEQ ID NO: 790414 - DNA, 600 bp, Homo sapiens
caggtggtaacggccaaagggtcaccgcctccgcggggcgctgcgtccacaacacgggtggggaaacggtcaaggtttgcggcgtttgggttcatgactgcaaaaacaccgtccactacgggccaagccgagtgccatgccctgcacctacgtctaagctcacagcagcccgcactggggcgaggaatcctgaggaggctcgccccggtctctgggactgggctctcgccgcgctgcctcagggcgcaagttccacgcgcttcgccgggcgcagaaaagcmccccccgctccgcggcgcccaggccgcctcccccgacaacgcacctccgcagcgacgcctgcgcctggaaggggctcggcatctagaccgcagccccgcgcgggccacactccccagcaagtgcctcggcagcgtcccaggagactcgccgcgctcgccggagctggacgtggcgccgaggtccgcgtcgccgcccgcaccccggtgctcacctgtaccacgcagcagcccagggcatccttctgagcgtcaggagggacgatgttccggggcgtgtggcccgggtgcaagaaatgaaccatggcaaccccggcggcgg

SEQ ID NO: 790415 - DNA, 600 bp, Homo sapiens
caggtggtaacggccaaagggtcaccgcctccgcggggcgctgcgtccacaacacgggtggggaaacggtcaaggtttgcggcgtttgggttcatgactgcaaaaacaccgtccactacgggccaagccgagtgccatgccctgcacctacgtctaagctcacagcagcccgcactggggcgaggaatcctgaggaggctcgccccggtctctgggactgggctctcgccgcgctgcctcagggcgcaagttccacgcgcttcgccgggcgcagaaaagcaccccccgctccgcggcgcccaggccgcctcccccgacaacgcacctccgcrgcgacgcctgcgcctggaaggggctcggcatctagaccgcagccccgcgcgggccacactccccagcaagtgcctcggcagcgtcccaggagactcgccgcgctcgccggagctggacgtggcgccgaggtccgcgtcgccgcccgcaccccggtgctcacctgtaccacgcagcagcccagggcatccttctgagcgtcaggagggacgatgttccggggcgtgtggcccgggtgcaagaaatgaaccatggcaaccccggcggcgg

SEQ ID NO: 790416 - DNA, 588 bp, Homo sapiens
gagtcttaaggatgaaactgtgggtaagataatcagatgtattccttgacctcatcttgatttttctccttgtatcccacattgagttctttggcaaatccagctctatcttcaaaatttatccagaattcatccatttctcttcacttccatttctatcacktggagtagactaaaagtgatttctctcctgaattactgcagtagcctcagaactgctctcctgcttctgtccttgccctcctggagttgattctaaacacagatgatcgagtagtcctgctcatgtcatattcctgctcagaagccttctatggctttccctctcattcagagtaaaagctagttccttaatgatatggtttggccctgtgacgccacccaaatctcatgttaaattgtaatcaccagtgctggaggtggggcctggtgggaggtgattggatcatgggggtgttttctaatggtttagcaccatcccccgagtgctgtcttgtgatagagttctcccgagatctggtcgtttaaaagtgtgtagcacctccggctttgcccttccatctccttcacccatgtaggatgtgccag

SEQ ID NO: 790417 - DNA, 611 bp, Homo sapiens
agctatattattatttaagagtaagaataggggtggggtgacaaagagattttgtcagtaatgcactatcaaaacctgaatccagaaaaggagtggtgggggttaaaaaaaagaaaaaaaaaaaaaaaacaagcagtgatgagcaaagaaaatggtattcagcaaattgaggccagrcgccgtggctcacgcctgtaatcccagcactttgggaggccaaggcgggtggatcatgaggtccggagatcgagaccatcctggctaacacagtgaaaccccgtctctactaaaaatacaaaaaaatttagccgggcatggtggcgggcgcctgtagtcccagctacttgggaggctgaggcaggagaatggcgtgaacccgggaggcagagcttgcagcgagccaagagtgcaccactgcactccagcctgggtgacagagcgagactccatctcaaaaaaaaaaaaaaaatggtatttagcaaattgaaataagccttgactgtaaaatagtaacacctaaactatctttaaggatatgaaaacaaggtagaactaaaatatatttattagtcatgttcttggatagaaatactcatttgtggctgaacatg

SEQ ID NO: 790418 - DNA, 534 bp, Homo sapiens
agcattgcaattctttttcccagttttttttttttttgagacttttcctgagaaagttttataaacacttcaaataatatgatataggaagtaattcctccttgcctggaagtggggctgagactggagtgctagggctggtgtggaaccaaggccagtgacaaagcagacactgttgcttctatgtggctgtattaaaatgcacccrcccctctgcactgccccacagaccaggatttcaacacagccctgtcgacttgaaagcccaagttcctaaccctgactttgtttcactctgctggggtaaaaccttaccgcagaggctggcatttgctgaaatgaggtcgaggaagtgggaaaggtggttgggagtccaatccaagtctcaccaatgattggataaacacagccaagtgcttcacctccctgcactgcaatctcacagctgtaaaatcacagctgggtcatcagtgatgacaccagcctagaagtgtgggtagcaccattagatgagtctgtgggggaggaaagcac

SEQ ID NO: 790419 - DNA, 534 bp, Homo sapiens
agcattgcaattctttttcccagttttttttttttttgagacttttcctgagaaagttttataaacacttcaaataatatgatataggaagtaattcctccttgcctggaagtggggctgagactggagtgctagggctggtgtggaaccaaggccagtgacaaagcagacactgttgcttctatgtggctgtattaaaatgcacccgcccctctgcacygccccacagaccaggatttcaacacagccctgtcgacttgaaagcccaagttcctaaccctgactttgtttcactctgctggggtaaaaccttaccgcagaggctggcatttgctgaaatgaggtcgaggaagtgggaaaggtggttgggagtccaatccaagtctcaccaatgattggataaacacagccaagtgcttcacctccctgcactgcaatctcacagctgtaaaatcacagctgggtcatcagtgatgacaccagcctagaagtgtgggtagcaccattagatgagtctgtgggggaggaaagcac

SEQ ID NO: 790420 - DNA, 684 bp, Homo sapiens
tggcatggagggagcagaaggatcctctgcccttgtgaggcatagagatgatagacggccctgccagacctcaggggctgttgggacaggaacaatgcctgtgggcactgctgccttaggaccagcgggatactgggagtctcatcagaagcctaggtggaccagtgaactaagaaccagctcccgtgcctctgccccgagtcctggcatgacatgactcactgagatttagccacaatcccaggaaagaggtgacagaaacctcaaattgatgacatttcagtttctgttaccctgggagtatagtggcttcaagtaaaaattaggtcaagttacagagtcataaactacagaaaatatttaccaagcccctaagactttaggcactggggttgggggtggggaaaagcagtaaactggggacctgtcagcggtccctctgtcwacgttcctgaattagaagttatgccagggcttggcttctatagacggtcgtctgtacgcacagtagtaccactgatgtgtgttaggcactgactttatgccagtccttgcaccagggataaccttcatcctgttttagacaggtccttggggctaaaagactaagcactttgtgcaataccacgtggctgtttgggttgaattgtgtcccccaaaaagatatgaaagtcctaaacctgg

SEQ ID NO: 790421 - DNA, 603 bp, Homo sapiens
gtaggggaacaacacacactgagcctgttggagggtgcagttgggggagggagagcattaagaaaaatagctaatgcatgctgggcttaatacttaggtggtgggttaataggtgcagcacaccaccatggcacatgtttacctatgtaacaagcctgcacgtcctgcatgtgtaccctagaacttaaaattaaataaataaatttttagcacaaaaaagagtaaaggaggaacataggagcaacaagaacaaaaagacgagaggaatagaaaaacagcaaaatggcctaacttttctagcacttgatggttatgtttagtgtgaatgtcctaaatattctaatcaaaagtcaggtattgtcagastggacaaaaaagcaagattcagtattcggtttttacttgagatgtgctttaaattcaaagacacaaatctcgtccagtgaatttcttactttggataatctctagaaggtcccatttgggtctttttcacactctcaaattctcttctcattatggctatattttcttctaccttttgaacatatggagtggctttaatattcttatgcactagtttcatcattgatatcatttttg

SEQ ID NO: 790422 - DNA, 641 bp, Homo sapiens
tctaaagaagcaaaatctaattaatcaagaaaaatgcaccgaagtgtaatgtgatgttttgaaactgaagactgtcctgctagtttatgataattaagtgctattaattgggtttgaaaaattatattaggaatagaaaatataatcttgtcaagctgttaactgctaatgaaatatagatatacatttcagatatagatttctgaaatatgaatatcaaaagctgatattgatgtaattttaaataccattcttatgaagctgtatcacatgaaactattttatcctaacagatgaggtaaactcaaccttttaattgattactttttggggagcagtgttgccatattgtggcacttatggactttcaattattttyacttcttaatcttaaacttacttagatgttgagcccatgattagaaagaaaaacatctgccttcaatatgtcactaaattaggaaaaatttcatgtttgcctactacactagccaacttatctttctttcaataaaatgtagactctgcccttcactggacctatgttcagtcttgaaatttatgtcgaatataaaatcttagtaactcttaaatgaacttttataaaaagaaaaatctcccatcctgcttgaaaggctagc

SEQ ID NO: 790423 - DNA, 550 bp, Homo sapiens
cttccttttactggatcaagctggaattctgcccatagccagtctgaagatgatccactgggaagaatctgttccattattgcaatccaattaaatggttcttgctaatgagcgacgagttacaagatattagggcagagctctctgaaggaaggtgaacaatagtacaytgtatccaattaatacatggacatgtctatcacaattgcctggtatgatagaaattacgttgttcatgcaaaggaaatgacagagggagagcaggaggcccaagaacaatgtcaaagtaggagagagtttgcatcttaagaatggcacaggggccccagggttttagttttaatgtgtccatttctaatttatttgggtactaataaaaatggcccttctaaagttttcaatgacagccctgtcaatctgcaattggtaaaaatttaccagtaacacttcactatcaaaatgatgtgtacatgggggaggttcatagtaaagaaagaatatgcttttaaaaatacacaaagtgttaacacaggtatgagaagcttactta

SEQ ID NO: 790424 - DNA, 655 bp, Homo sapiens
tgagttgatagggaagtagggaaagccacacaaagctggggatcgaatggaattccaagctccttttgcaggaaagagatgggagatggtaacgttaatcaccactgagagagaactttttctttatcaaatgccctagaactactgttattctgtgcagtattcccgcaggggaaaatcccatcttaaatgatcagcacaagtgataaagaaattcatttttatcttctcccagacyctctttttaattgattttttccctcttggaaatggcaaataatttaacattgttacaaaattccttcctctcaatagcagaggggggaaattaacaatcacaataaggaaaagggtaaaatcccactcggctaatgaggtatgtaactgagccattagttctgcttgaagcccctgtcagccccagattaagttgatggccgttcccggtgttttcagctttcttcaggagcatactctgcatacacttttaccacctgcagcgtggcttcattgctggtctttcagaattaaaagaaaaaaatcggcccaggatgttttctgctctctacgaggtgccaggctgatggagaggatgctcagggcacaagcctggtggttttctgatgctggatcccagcttcctggcattctaata

SEQ ID NO: 790425 - DNA, 636 bp, Homo sapiens
agaaccctaatgttagcctagtgttcttgcaaggaaccacacttagcataaaagaaaatgcagttattttaaattatccaagattccacaatgtgtagtgctagttaactctttggaaccttttaactcaaagacattagtagttgtttattggctggttaagttaagacatgtcacttaactctttatctacttttcagtgggtattttcagtaaacttttgctggagaggaagaaagttccttataagcaaatgaatctttgggaagatatagtttattgcatatcaagtatttgaacagtgcagtcatgaactggaatgaaattttagtttcaaagcaattttaaaggtttatatraaaagggctttcattagatttgattgtattaaatcttaaatcactgaatgatttaaaatggatagttatagaaactgatattaatacaatttactgacagtaactaagttgaatataacagttaccttgttttactattttttactcaatttagaataaaattcacctaaattcctctgtctttgccccatagcttgctcagtatgaaccacctcaggaggagaagcgtgctgaataggattcttctcagtttgaaagacaatgaaaaatggttttg

SEQ ID NO: 790426 - DNA, 510 bp, Homo sapiens
tgccttacccctagttctctagacctttaagactcttgtttaactgtgacggtatttgtgtttgaataagagagatgcaactgaaatacacaattagcattgtcttcacttatttccattttccctccttttctcccaaggtgtcttttgcagctcacattgcaggtggatttgctggaatgtccattggctacacggtgtttagctgctttgataaagcactgmtgaaagatccaaggttttggatagcaattgctgcatatttagcttgtgtcttatttgctgtgtttttcaacattttcctatctccagcaaactgacctgcccctattgtaagtcaattaataaaaagagccatctggaggaaataaaaaaaaaaggaagactctatgaagaaacagagaagtctcagaaaaggctaacaattttatatagaggacaaaacagcattaaactcatcagttgcaaagattgcctataaaaggaccttaggatttaaggaaggggctt

SEQ ID NO: 790427 - DNA, 602 bp, Homo sapiens
cccaagcgtgtctccctgaggcttaggaggtaccaggattcacccgagtcttctgagggtggcacttgggttagggaacaatttactcatgacgaagacagagatcagagggtaggtattgggtcatttcttctttaaaagatgttacattttagaattccattaattgagggctgtagttaatccgttaagtacgggaataaggttctattttgtctttcttttctttctactccaaaatgttctcagtaagtgttccgtagctgggaattctgcaatcaaaacctgggtgtggggagtgagggttggggaggagaacccccctgcccccaccagaaggggccttgattttgcagtttgcctcatgtcaggggatcattgagtttagttyttgatgaaaaccaagtctcagctgtgacttcagtgcaggacttgtggatgcttctgcttctgggggcacaaggtgcttaaaaatgacctcaccaacaataacgatgatgaaaataataatgtgcagcagtttacatttttcttgggcacctagtatgtgtcagatactgtgtactttatctctattatttcgtttaatcttcagatcagtc

SEQ ID NO: 790428 - DNA, 607 bp, Homo sapiens
ctcggacccacagggcagtcctagaagtgaaggtggtggttgggcacggtcacatagaaacaagggctgctacgactcaggagccctgctggttctggccatgggcctgtgctgagtagacaggatagcccctccccacaaactcctgctagaagccaggaattgtatccctacaaagctactgggtttgcttcttccatagtgggtgaatttccagatttttttttttttctgagaaagagtcttgctctgctgcccaggctgaagtgcrgtgatgcgaactcagctcactgcaacctctgcctcccaggttcaagcaattctctgcctcagccttctgagtagctgggactataggcatgcaccaccatgcccagctaatttttgtattttttgtagagaggggtttctccatgttggctaggctggtcttgaactcctggcctcaagtgatccacctgctttggcctactgggattacaggcatgagccactgcacctagcccagacttttttttttattttttttaaataaaacaaaaatgaatggccaggtgtggtggcttacagtgtaatcccaggacgttgggaagccgaagtggtaggc

SEQ ID NO: 790429 - DNA, 607 bp, Homo sapiens
ctcggacccacagggcagtcctagaagtgaaggtggtggttgggcacggtcacatagaaacaagggctgctacgactcaggagccctgctggttctggccatgggcctgtgctgagtagacaggatagcccctccccacaaactcctgctagaagccaggaattgtatccctacaaagctactgggtttgcttcttccatagtgggtgaatttccagatttttttttttttctgagaaagagtcttgctctgctgcccaggctgaagtgcagwgatgcgaactcagctcactgcaacctctgcctcccaggttcaagcaattctctgcctcagccttctgagtagctgggactataggcatgcaccaccatgcccagctaatttttgtattttttgtagagaggggtttctccatgttggctaggctggtcttgaactcctggcctcaagtgatccacctgctttggcctactgggattacaggcatgagccactgcacctagcccagacttttttttttattttttttaaataaaacaaaaatgaatggccaggtgtggtggcttacagtgtaatcccaggacgttgggaagccgaagtggtaggc

SEQ ID NO: 790430 - DNA, 568 bp, Homo sapiens
tggaacatgctttatgatttacttgcttattttattttatttactctctgttgttcccactaagatgtcagctccatgagggtatggcagggatttctgtctgttttatttactgatgtctccccaggaccaaatataggacctgacatataagaggcactcagtaaatatttgttgactggaaggataaatgagttatattcccactgacgcakaatgttggtgttgtgaacagaaaatcgtatctggcattttgaactattctaagatcaatctctttcacattcctaccaaatgtccattttttttctggtttcttaccaaaatggctaaccatggggaaagttttgggcatttgatctagtgaacaaatgtagacttcaataaatggccactgaggaagccaagacttcctaggagttcttatcccccatcaactaccaagctatggtaatgaaggcatttttactcacccaatccacgtcatcccttctccatggaggcagaacctaatcctaatgttcacacctttgagaccatgtgctcaggaaatcaccaggcctggtat

SEQ ID NO: 790431 - DNA, 621 bp, Homo sapiens
aggcaattcacctccaaagttgcataatttggaaagtgctttgggatccatttggttgaaaggttgttaattatgatgatttatgacactggaaacaaatctgagccttgacagtatggagaatatacataacgtataattcttttgcctgtcccattggaaagtccctaagtacaaatgtttttaaaaatcttgttgtgccttatgaataggttccacagttgtgtaagacagagtatcattgacttttgagttagggtgataacctaaaaagagaacatctagaggctgatgggtaatacttagcagcaccttatgattatcccaattcgtggtgtttttctccacctggttctctccaccctgacttttccctccccctcactgcacacatctgttggtcaccacgccattcggggtttcccaaatctgccttytcatccccactgcccttgcctctgttcagtgtgtatcacctcttccttagggccccccttccactgttggtctatattcaagcccagccttcataccgcttccagagttactttcctgaaattatcaatgaaacaaagtaaaaggctgagtgttcacttactcccatgcctagaaacatcctgt

SEQ ID NO: 790432 - DNA, 280 bp, Homo sapiens
aggccctgctggtaatgagattctcaatgtcccaactgactgtgtatgctcaacctcgagccccttaagccccagcaaccacagggagaactactttgccatccagtgggctgcagccataattccaataaggcctgaaycctagttatggggagtggggaccctcttctaagtttgttccttccgtggataccctcactcagcccttgagtacttgagtattcttcagaattttcattacacattgatagttattttcctattacaattaataattgta

SEQ ID NO: 790433 - DNA, 627 bp, Homo sapiens
tatattatgaattttgtattatgcatatggcactatgtattatttgcgaatatgagatacaaaatgtcttcccagtttgtagccttttatttgattttctatggggttttgttgaacagaagtttttaattctattgtatctgcagttattattatcttccattatgatgtgtattttctgtcttaagaaaaccttctttgccctaaggtcttaagatgttctcctatgttttcatcctaaagtttgttgttgttgttttatttttttstttgtaacggagttttgctcttgttgcccaggctggagtgcaatggcatgatctcggctcaccgcaacctccgcctcccgggttcaagcgattctcctgcctcagcttcccgagtggctgggattacaggcatgcaccaccacacccagctagtttttgtattttagtagagacgaggtttctccatgttggtcaggctggtcttgaacccccgacctcaagtgatccgcccacctcagcctcccaaagtactagggttacaggcatgagccaccacacccagcctcatcctaaagttttaaagtattgcttttcacattcagttacttgtccatataggatatagttttgttatatg

SEQ ID NO: 790434 - DNA, 627 bp, Homo sapiens
tatattatgaattttgtattatgcatatggcactatgtattatttgcgaatatgagatacaaaatgtcttcccagtttgtagccttttatttgattttctatggggttttgttgaacagaagtttttaattctattgtatctgcagttattattatcttccattatgatgtgtattttctgtcttaagaaaaccttctttgccctaaggtcttaagatgttctcctatgttttcatcctaaagtttgttgttgttgttttatttttttctttgtaacggagttttgctcttgttgcccaggctggagtgcaatggcatgatctcggctcaccgcaacctccgcctcccgggttcaagcgattctcctgcctcagcttcccgagtrgctgggattacaggcatgcaccaccacacccagctagtttttgtattttagtagagacgaggtttctccatgttggtcaggctggtcttgaacccccgacctcaagtgatccgcccacctcagcctcccaaagtactagggttacaggcatgagccaccacacccagcctcatcctaaagttttaaagtattgcttttcacattcagttacttgtccatataggatatagttttgttatatg

SEQ ID NO: 790435 - DNA, 610 bp, Homo sapiens
ctataacaaaatcacactgtcttaatttctatagctttgggataagtcttgctatctgattagggcagataatcttccaaattcaaaaacctggctcttcaaaattgatttggccttttgaatgatttttagaatcaacatgtcaarttctgtaaataatcctatggagaatttcattggcattgctttgactttttaaatatggctcatattgtcatctttaacttgtcttccactatctatgtatgtggtatttccatttatgcacccttccttttattctttaaataaagttttatacttttttttgaaaagatcttataaatactttgttagattcattcctaggtacttcacgagttttgttactgtgaatgttatctttttaaaaattatagtttctaactgcttttttaaaaaaatagaattgcagttgattttgtgtatggatcttatatctaactactatactgaattctcttgaagttcttacgtgtgcattgtctgcaatggtgacatttttattttatctttctggttcttactgcttttatttctttttcagattgtgctgattagccctacagttttgaatagaagcagtgatagg

SEQ ID NO: 790436 - DNA, 610 bp, Homo sapiens
ctataacaaaatcacactgtcttaatttctatagctttgggataagtcttgctatctgattagggcagataatcttccaaattcaaaaacctggctcttcaaaattgatttggccttttgaatgatttttagaatcaacatgtcaaattctgtaaataatcctatggagaatttcattggcattgctttgactttttaaatwtggctcatattgtcatctttaacttgtcttccactatctatgtatgtggtatttccatttatgcacccttccttttattctttaaataaagttttatacttttttttgaaaagatcttataaatactttgttagattcattcctaggtacttcacgagttttgttactgtgaatgttatctttttaaaaattatagtttctaactgcttttttaaaaaaatagaattgcagttgattttgtgtatggatcttatatctaactactatactgaattctcttgaagttcttacgtgtgcattgtctgcaatggtgacatttttattttatctttctggttcttactgcttttatttctttttcagattgtgctgattagccctacagttttgaatagaagcagtgatagg

SEQ ID NO: 790437 - DNA, 614 bp, Homo sapiens
gtcccaaaatggtgggacatcttacagcaaagggcttacaggttataggtggattcagacattctttaatttgcaactggttaaggaagcaaggttttgcctaaaaccttggggtcatcagaaaggaatgttatggtttggcctgtgagcgtgactgtctctaggctactcaggaagaaatttrtaaaaagattggcagtcgaaattcagtcctcacttcccccttatctgaaatctacaagacagtggtcagtatgttccaactggtgggggtccaggtttctgaagaacaactcagggacacaggtcaagaagttatctttagtttctatagggaaccaaatatcttgtggctctaacttacttgggtgacaattgttttaagctaccattgccttcttgcttttcaagttgttcatttacttctcaagtctagctaggtgcctgggattttccttgaaggaactcaagattttatttccatgcttggtggggtgggcagcaggcctctaagagggaaccctgctctgtctcaaaatgagagatgtcctcggggagcttacgctggtatagagacatcaggaaggtctgggccttgagggatagatgacatt

SEQ ID NO: 790438 - DNA, 614 bp, Homo sapiens
gtcccaaaatggtgggacatcttacagcaaagggcttacaggttataggtggattcagacattctttaatttgcaactggttaaggaagcaaggttttgcctaaaaccttggggtcatcagaaaggaatgttatggtttggcctgtgagcgtgactgtctctaggctactcaggaagaaatttgtaaaaagattggcagtcgaaattcagtcctcacttcccccttatctgaaatctacaagacagtggtcagyatgttccaactggtgggggtccaggtttctgaagaacaactcagggacacaggtcaagaagttatctttagtttctatagggaaccaaatatcttgtggctctaacttacttgggtgacaattgttttaagctaccattgccttcttgcttttcaagttgttcatttacttctcaagtctagctaggtgcctgggattttccttgaaggaactcaagattttatttccatgcttggtggggtgggcagcaggcctctaagagggaaccctgctctgtctcaaaatgagagatgtcctcggggagcttacgctggtatagagacatcaggaaggtctgggccttgagggatagatgacatt

SEQ ID NO: 790439 - DNA, 614 bp, Homo sapiens
gtcccaaaatggtgggacatcttacagcaaagggcttacaggttataggtggattcagacattctttaatttgcaactggttaaggaagcaaggttttgcctaaaaccttggggtcatcagaaaggaatgttatggtttggcctgtgagcgtgactgtctctaggctactcaggaagaaatttgtaaaaagattggcagtcgaaattcagtcctcacttcccccttatctgaaatctacaagacagtggtcagtatgttccarctggtgggggtccaggtttctgaagaacaactcagggacacaggtcaagaagttatctttagtttctatagggaaccaaatatcttgtggctctaacttacttgggtgacaattgttttaagctaccattgccttcttgcttttcaagttgttcatttacttctcaagtctagctaggtgcctgggattttccttgaaggaactcaagattttatttccatgcttggtggggtgggcagcaggcctctaagagggaaccctgctctgtctcaaaatgagagatgtcctcggggagcttacgctggtatagagacatcaggaaggtctgggccttgagggatagatgacatt

SEQ ID NO: 790440 - DNA, 657 bp, Homo sapiens
tgtgtggctctcctcaccttcaggtgccctcatacttgtccttacaggggcctctaatatgcatatatcccaaacacttctagctcctccacatttctcaggctctatcccacccaagtccatcaatctgtctatctgtccattcatccatccatccacctcttcctccctccacccaccgactctactgcactctcttaacaaacattcagtgcttttcttctgagccaggaatagggttataaagataactgggaattggtgcctgccttccaayagcctttgcatgtagtaatggagaagatttaccaataggtaccttcaagaggtgttagaacagctaaaggagtagtcagtacaaggttcagaggaggaggtgagagcatgggctttgggcccaggctacctgagtttcaaattctgactctaccactaacagctgtgtgaccttgggtaaactacttaacatctctgtgtctaagtcttctcattggtaacatggtgccctgttgtgcctacctcagaaggtggttattctgcttatctattgctgcataaagccagccattttattatatttcacgctgtcctgggtcagtcgctcaggctaggtctgccactcagtgcatctgctccacattctgtcagctgttgtca

SEQ ID NO: 790441 - DNA, 586 bp, Homo sapiens
gttggatcctcctgtggaagaaggaagctctctggggtctttttcataaggacactaatcgcattcatgagggctttgccctcacaagctaattacctcccaaagaccctaccttctaatatcgttacactagtgattgggtactaacataggaattttggagcaacacaaatattcagatcatgtgatggggctctccattagaaacccatactattgcaggcatctatactttttttgttcaatagatacatgaagacaaactaggaagcttgaaaatagatcaagaaaattcctttgtgaatatatgagttgccrgaagaatcagagaaaggccaacacgtgagacccattttaaaacaaatcattaaacaaaagtatcattaaaggaaaaacaatctcagtgggtatattaagcaggttcaattctcaaagaaagctcctcccatacccaggaaaaccaaaccaacttgttaattttttagactttacaggtaaagataggaatttttaagtggccaagatgaaaaaagatactaaaagttggaagaattaaaacaaatctacccctttttctcagactgca

SEQ ID NO: 790442 - DNA, 607 bp, Homo sapiens
atagcattcttcttctagcctcccaaatctcatgtcctcacatacaaaatacaatcgttctatcccagtagtccccaaaagtcttgttccagcatcaattcaaaagtccgaagtctcatttgagactcaaggcaagtttcttacagctatgagactgtaaaataccaaacaagttatttacttccttccaagatataatggtgggacaggcattaggtaagcactcccatttcaaaagggagaaatcagccaaaaggaatgggtgcaaggtccyaggccagtgcaaaagccagcagggaagacattaaactttagaactccaaaataatcctcaactccatgtcctgcattctgggaacattggtttaaggggtgggttcccaaggccttgggcagccctgccctcatggctttgctgggcacagtacacgtagctgttctctcaagttggagtcaaatgcctgtggcttttccaggttgaagttatgcactacaggtgactataattctggggtctagagggtgatggccctgcttccatagctctattagacagtgccccagtgggtaccttctgtgagggatccagccccatatgtctgctcag

SEQ ID NO: 790443 - DNA, 625 bp, Homo sapiens
agacagtgccccagtgggtaccttctgtgagggatccagccccatatgtctgctcagcattgtcttactagagtctttccatgagggctctgcccctgcagcagggttccttctgggcacccaagctttctgatacatcctcttaaacctaggtggaggataccaagcctccaccactcttgcattctggacacctgcagacttaacaccatgtggaagccaccaaagcttactgcttgcactctccggagcaatggcccacgtcatacctgggatcattagaatcacagctggagctggagtggcctggatgcagggagcagcattccaaggcatcccagggaagatgtgccccaggcctgtacccccaaaccattctgtcttcttyggcttctgggactgtgatgggagggcaaatttaaagatttctgaaatgcctttgatggcagcagcggcctttctggagcagccactgtgggcatgccaggtgcagtgggggaggtgcagtgggggaggtgcagctggggctgggtgctccacaggtgggagccctgccccctttcaagttggcaggatgggagtcctgcactcctgggcgcagctgcccaggcgaagctgcagaccc

SEQ ID NO: 790444 - DNA, 575 bp, Homo sapiens
tatatttagaaaggcaggagaagaaaaagctaagccagattgtggagggtattgaaaataaggccaaaatgctagacttgatctaaagactctatgggagccgtagaagcttctatggtgaaacgggggcctgctgyggttgaaagcagcttcttaggaccaaatctgtttgcagaatatcaatggaataggatggggaaattggaagcagaaaactgagagactaattagactattggttgtataatgcagtggaaagagcatgggaatgggcattaggagacccgggttcattcacctctctaggcctcagtgttcccatctatactctaaaggtgtcatattcacccatggattttcaacctatgttctggggatccctaggagttctgtagcagggaagaggaagggaatagacagaaatttaggtgactggatttcaaccaatggtgtactagagacaacttaaattctaagagctgattgtgtgaatttattcctaactctgtgtttagtgacattgtgttggtagtttgaaagaagccatgatgaagatatttacaagaccctagacg

SEQ ID NO: 790445 - DNA, 729 bp, Homo sapiens
acagacaaagggcagatgacacctagctgggatgggaaggataggaattgaagtctacacagcctgctgtaagagggaggggagtgggaagctcctagccactgttcaactacatggtaagggggaattcttttttccgaaggaaaagggtttgttccctcagggtccctgctggagcaagcccatttcttacccagcctaggcaggggactctgccctgagggtgggccaagaaacaatggggaagtttatgtggacaaaccagttcccaaactacttcccacttctccctcctctaaccagaagggggaaaaagaggaaagaggagagaaaagggtgtattatggcctgagttgcagctgcctttcagaagggagagtaacccatagccttcctcccttcaccttcagcctactcccaagactgcatctggaaggaggctggagggctggtgagattctcctctatctctggcctccctsggaggtagaaggctatggggccaagaacagaggagcccaggccccaggatttattctaacttccgctaaaatctgttttttaaaaaataatcacaatttgtgggtaaaaaactgatttgtaaccaggcatcagacaccatcagaatcaccctagggggacagtggggttccaaacagggcgctgtagccccatctctgttgttcccttaaccctctaggatccctaacctgatcagtccaaccaatc

SEQ ID NO: 790446 - DNA, 627 bp, Homo sapiens
acagtttgcttttatacattttagggagacatgagactgtcaggcctctgagcccaagctaagccatcatatcccctgtgacctgcaggtacacatccagatagctggttcctgccttaactgatgacattccaccacaaaagaagtgaaaatggcctgttcctgccttaactgatgacattaccttgtgaaattccttctcctggctcatyctggctcaaaagttcccccactgagcaccttgtgaccctcgcccctgcccaccagagaacaaccccctttgactgtaattttcctttacctacccaaatcctataaaacggccccacccctgtctcccttccctgactctcttttcagactcagcctgcctactcccaggtgattaaaaagcttcattgctcacacaaagcctgtttggtggtctcttcacacggacgcgagtgagagacatcaatcaatatgtgtaagatgtacagtggttcagtctagttccagtaaggcaggacaacgggaagtgggggcttccaggttagaagtagataagagacaaaatgctgcattcttttgagtccttccacttaatacacaatttagtctggctcagtgagtctgcattttttacat

SEQ ID NO: 790447 - DNA, 627 bp, Homo sapiens
acagtttgcttttatacattttagggagacatgagactgtcaggcctctgagcccaagctaagccatcatatcccctgtgacctgcaggtacacatccagatagctggttcctgccttaactgatgacattccaccacaaaagaagtgaaaatggcctgttcctgccttaactgatgacattaccttgtgaaattccttctcctggctcatcctggctcaaaagttcccccactgagcaccttgtgaccctcgcccctgcccaccagagaacaaccccctttgactgtaattttcctttacctacccaaatcctataaaacggccccacccctgtctcccttccctgactctcttttcagactcagcctgcctactcccaggtgattaaaaagcttcattgctcacacaaagcctgtttggtggtctcttcacacggacrcgagtgagagacatcaatcaatatgtgtaagatgtacagtggttcagtctagttccagtaaggcaggacaacgggaagtgggggcttccaggttagaagtagataagagacaaaatgctgcattcttttgagtccttccacttaatacacaatttagtctggctcagtgagtctgcattttttacat

SEQ ID NO: 790448 - DNA, 647 bp, Homo sapiens
tgtagacttgaataacactacagaccaaatggacctatcagacaaaactctccacccaacagcagaagaatatacattgttctcagcacacataaaacattcttcaggatagataacacattgggcaatgaaacaagtcttaacaaaatgggtaagtttgaaattataccaagtaacttttctgaccacagtggaatcaaattcaaaatcaggaacagtaagaaaatgagaaaattcataaatacgtaaaaattaacaagatttgaaaaaccattcagtcaaagaggaaatcaaaaggraattaaaagagtgtctcaagacaaatgaaaacaaaattactacataccaaaaccatgtggaatgtagcaaaagcagtattaagaggaaaatttgtagcaataaatgcctacattaaaaggcaagagagatctcaaataaacaatctaatgttacacatcaagaaactagaaaaagaaatgaagactaagccccaaacttagcagaaaggaaatgaataataaaaatcagagcagaaataaaacaaattgaaaaaaatcaacaaaatcaaggtctagttttttcccccgagactgagtcttgctctgtcacccagtctggagggcagtggtgagatctcggctcactgt

SEQ ID NO: 790449 - DNA, 593 bp, Homo sapiens
ccctctccctctttccacggtctccctctccctctctttccacggtctccccctgatgccgagccgaagctggactgtactgctgccatctcggctcactgcaacctccctgcctgattctcctgcctcagcctgccgagtgcctgccattgcaggcgggcgccgccacacctgactggttttcgtatttttttggtggagacagggtttcgctgtgttggcggggctggtctccagctcctaaccccgagtgatccgccagcctcggcctccggaggtgccgggattgcagagggagtctcgttcactcaatgctcaatggtgcccaggctggagtgcagtggcgtgatctcggcttgctacaacctccacctcctagcygcctgccttggcctcccaaagagccgagattgcagcctctgcctgcccgccaccccgtctgggaagtgaggagcgtctctgcctggccacctatcctctgggatgtgaggagcccctctgcctggctgcccagtctggaaagtgaggagcgtctctgcccggccgccatcccatctaggaagtgaggagtgcctcttcccggccgccatccc

SEQ ID NO: 790450 - DNA, 649 bp, Homo sapiens
gacatcttcccttgtctaggaaagggaaatcccctgaccccttgcgcttcccggatgaaacgatgcccctctctgctttggcttgcccttcgtgggctgcacccactgtcctaccggtcccaatgagatgaaccaggtacctcagttggaaatgcagaaatcacccgtcttctgcattgatcacgctgggagctgcagaccrgagctgttcctattcggccaactgagcactcacttgtttttggaacactctgttcccttatctttcttaatagcatagttgtccccacctctttggctgctcttgtcagcatcctttgcaaaaaagtaaaggcctctctcagctatactatttacctagacaagtttatatgcttcaaattccattatatgctaagccttccaaatgcctatatgatctctacaactgcctatgtaatatgtgcaaatgcttacatgatatctccactaggattatcttcagcacacctcaaattttctaagtctggaaacaaatccatgagcattccctaaaatgttaatatcaagtgatcatacaggtttaccattatggaacagagtctagcaggggctttgttaatgtgcattaggaggctgaattaattaattaaaggtgtattatgccttt

SEQ ID NO: 790451 - DNA, 597 bp, Homo sapiens
actttgaaatgagtaattcttggttgtggatggctgcatggtgcattcctcttgcgtcactcttcacaagaggccagtagtacatcctttccttatttgtgacaacgaaaaaggtctccgtacattgtcaaacgtcctctggcaggacaaaatcacctctatttgtgaacacttacctagaatgatcttctaagagtcttatactctcccattttccatgcttttggctatttatactgctttatgagatatttcttcaaatttatctctacttttgaactgttaggtctgctcttcagtgttaatagacttgatttttaaagcaattttacatttatagcaaaatcgaggggaaagtacagagatttcccgtatactctctggcccccttcctcattacacacagcctaccccgctatcaacatcccacaccagagtggtacatttgttataaytgacttacatacattgatatatcattaacactcgaagtccatagtttacattagagtttgcttgtgatgttgtatcttctatgggtttggacaaatatataatgaaaggtatccaccattatagtatcacacagagtagttt

SEQ ID NO: 790452 - DNA, 552 bp, Homo sapiens
aaacatacttgcctggaatgttaaagatcagggtaattttctgtctcgttaatctaatattgacagtggagtataaaagtctctcactattactgtgtaggagtgtaagtctctttgtaggtctctaggaacttgctttacgaatctgggtgctcctgtattgggtgcatatatatttagaatagttagttcttcttgttgcgttgctccctttaccattatgtaatgtaatacccttctttgtctttcttgatctttgttggtttaaagtctgttttatcagagactaggattgtaacccctgttttttttttttattttttttaattttttatttttttgctttccatttgcttggaaaatattccgccatccctttgctttgagcctatgtgtgtgtttgcatgygagatgggtctcctgaatacaccacactgatggtcctgactctttatccaatttgccagtctgtgtcttttaattggggcatttagcccatttacatttaaagttaatattgtcatgtgtgaatgtgatcctgtaattatgatg

SEQ ID NO: 790453 - DNA, 566 bp, Homo sapiens
ctatattggtgatagtaaaagacaaattcaagtattttatgtcgttcaagaaattggcttgtgtaggattgtgcacgtgacctttaatttccacttctaattttgtcactaactgttatgaatcacacttaaaaaacaaaccatggctatgatctttttaaagctgtaaagcaagactcaataattcacagagctaaccaaaggtgagtacataggaatatcaaaggtatacattagcaaaagattaaacaagtaagtcaataaggaagaaatagaaagacacagccacacaagcctcagaatacaaaagctgatggtgaatcaggatccagaggaatgcaggagtcagaaaagtaacacaaatamgcagaagagtgaccagctggatagggaagtgcagtggcccttgctagggtaataatgcccctccctcacattgccacagatccaggtggagctcacccattatcttgggcctggacactccagggtactctggttgatgtcctacagccggaaactgcatgtcttagcctaaagtctatctttgacgcagaaaaagtagc

SEQ ID NO: 790454 - DNA, 625 bp, Homo sapiens
gcttaagacaattatttattctaaaactcaaaattattcgtctctaaaattaaggttctcttgagaatgaaatgatatatgtaaggctctgaacccatgcctggcacataggtgtgcctaaaaataagctcttttatcttatgcaaggtccatcttacgtgtccagaaaaagtaatgtcttgaaatttcagtacattgtcataatatcagctttaaacttaggtccttgttttatagtggttagtcagtgaattagtaagcaaaacttgctaattaaatttaggtaacttatataacttaggatscaactttagtaaaatttaggaaagcattagccctctaagtaggagcgctatgacaaccaaattctccatttctcacatttcctaagcagtagcttaaatctaagtcagacaaaagttgatgaatgagaaattactttgagaatatggagaaacagaagagtaggtacctagggaaatgatgaaaacttctactcttatattggcagaatttagtaagccagagtaagatgcgggctgaatcagagttcataaaattaggaaagaaaaaaaaagggaagggttaactaaagacaaagttgccctttttacactcttcttag

SEQ ID NO: 790455 - DNA, 587 bp, Homo sapiens
aatttcaaatgtataaaagcataagttaaaatataagataatatgaaattgttgtttcagggcattttcccctgaaaatgacttcagtatttcgatgatattctggtttgaaatatattgaactttattttttaaaagaagtgataaaattgctttctaatgrtttctcagttttcatttctctgaaggactaacattagcagacagctggaagcacttataattcacatttttaaccatatttatttcctgaaggaaattcctattcactcacttagtaatagcttccccatttcatctttccctccttggcaggattcagtacagttaggcacagttttcatcatacagacctagccacactagttttaactagtaatactatcttctaggtttctctctctgtgtctgacagctacatcgctgtattcattcattaactcaagaaatatttgttgaaaaaacctaccatgagacagtcatattttatttatttatttatttatttatttatttatttattatttatttatttattttggagacagagtctcactctgtcacccaggctggaatgcagtggcgca

SEQ ID NO: 790456 - DNA, 587 bp, Homo sapiens
aatttcaaatgtataaaagcataagttaaaatataagataatatgaaattgttgtttcagggcattttcccctgaaaatgacttcagtatttcgatgatattctggtttgaaatatattgaactttattttttaaaagaagtgataaaattgctttctaatggtttctcagttttcatttctctgaaggactaacattagcagacagctggaagcacttataattcacatttttaaccatayttatttcctgaaggaaattcctattcactcacttagtaatagcttccccatttcatctttccctccttggcaggattcagtacagttaggcacagttttcatcatacagacctagccacactagttttaactagtaatactatcttctaggtttctctctctgtgtctgacagctacatcgctgtattcattcattaactcaagaaatatttgttgaaaaaacctaccatgagacagtcatattttatttatttatttatttatttatttatttatttattatttatttatttattttggagacagagtctcactctgtcacccaggctggaatgcagtggcgca

SEQ ID NO: 790457 - DNA, 587 bp, Homo sapiens
aatttcaaatgtataaaagcataagttaaaatataagataatatgaaattgttgtttcagggcattttcccctgaaaatgacttcagtatttcgatgatattctggtttgaaatatattgaactttattttttaaaagaagtgataaaattgctttctaatggtttctcagttttcatttctctgaaggactaacattagcagacagctggaagcacttataattcacatttttaaccatatttatttcctgaaggaaattcctattcaytcacttagtaatagcttccccatttcatctttccctccttggcaggattcagtacagttaggcacagttttcatcatacagacctagccacactagttttaactagtaatactatcttctaggtttctctctctgtgtctgacagctacatcgctgtattcattcattaactcaagaaatatttgttgaaaaaacctaccatgagacagtcatattttatttatttatttatttatttatttatttatttattatttatttatttattttggagacagagtctcactctgtcacccaggctggaatgcagtggcgca

SEQ ID NO: 790458 - DNA, 589 bp, Homo sapiens
aatttctaattctaatttgcaactggcatttaaaattctaattttcctggaaatctagatatgggattgggtgagggggactcatatctgttttattcctaacacaggcaactttcctgtatctataggaaagttcactgagatacaacagatacgaagtagttaggctggtatgtaactttgtattaagccctcttctcctccaaattctagacattagctcctgtttttgttgctagtctcttgctaagttaagctgctaatgaagctgctatatgagcagaactgactgcggaatttatattttaaaaagaactccagaatgtcctgatatataagggagcactagcctcttctcttgcacctacacttttctgactgggatccaagtgctagacatgatgagaatttccagctccagagtccttttggagtttcccagtaatacmtctttccctattctttataagagcaaaaaataaatactacttggcaggcaaattcagaaagatggatgacctgtgctctcttctgtctacactataggcagcaaaattcttgtaattgaaattattctcccaataacttt

SEQ ID NO: 790459 - DNA, 459 bp, Homo sapiens
tccaaaatgcccctcactcggtggacgggtaggcaagctgtggccatccacacccgggaatattactcagcaaagacagcagcaagctacaggtagatctcaagggcattatgctgagtgaaagaagccaaccccgacaggtcccatgctgtagaattcaattmatataacattatcaaaatgacaaagtgatagtgataggaaacagattggtggctgtcgtgagctagagatggtggagttggggaggggaggagcgtgtgactgtaaacatgtaagtattcattttccagggttaccataacacatgatcacaaactgggtggcttaatacaattggaatttatcctcttaccattctgaaaactaggagtctgaaatcatggcgtgggcagggccacactccctctgaaggccctaggggggatccggatctctcttcccctctcccagcttcca

SEQ ID NO: 790460 - DNA, 632 bp, Homo sapiens
aactttgttattagatatttttactagtgaagcagatcccacagagtggaccccagccctgtggcttcaaacatagtagagtatgaatgttttttcctttgtcagcacctgcaaaactcatgtcactacccacatgcactgccattgtaatcatggtctcaccctcagtttttccaatgctaaagtcatcagaagggccagcacatyccaataaagtcccctgaaatgctggtatttttgaaaacttcctgtaggcgggattttactaaagcccttgttgggaaagagactacattagccatttgtgtagactgcacaagggaaccacatgatactctgtgagcagttgtatgtattcccagagtattctaagccaaccctaattctcaggtacagagccaggcagggcttggtacatagacagaccctagagatgagctgccagatgtttaggaaaataaatctgtgggcttctcaaacagatggtgcaatatactctctgcatttggccatttgacaaaatgagcatcattcattattttaactaatgttataaatccctttccatggatccatttccacgtttaactttttagagtattgcagaaatgtaagccttcattagctttgtt

SEQ ID NO: 790461 - DNA, 632 bp, Homo sapiens
aactttgttattagatatttttactagtgaagcagatcccacagagtggaccccagccctgtggcttcaaacatagtagagtatgaatgttttttcctttgtcagcacctgcaaaactcatgtcactacccacatgcactgccattgtaatcatggtctcaccctcagtttttccaatgctaaagtcatcagaagggccagcacattccaataaagtcccctgaaatgctggtatttttgaaaacttcctgtaggcgggattttactaaagcccttgttgggaaagagactacattagccatttgtgtagaytgcacaagggaaccacatgatactctgtgagcagttgtatgtattcccagagtattctaagccaaccctaattctcaggtacagagccaggcagggcttggtacatagacagaccctagagatgagctgccagatgtttaggaaaataaatctgtgggcttctcaaacagatggtgcaatatactctctgcatttggccatttgacaaaatgagcatcattcattattttaactaatgttataaatccctttccatggatccatttccacgtttaactttttagagtattgcagaaatgtaagccttcattagctttgtt

SEQ ID NO: 790462 - DNA, 601 bp, Homo sapiens
gaatgagatcatgtacttggcaggaaatggatacagttggaggccacctcccgaccttaacaaactaatgcaggaacagaaaaccaaatatcacatgttctcacttataagtgggagctaaataatgagaatacatggacacatagagaggaacaacagacactggggcctgttggagggcagagggtggaaggagggagaggatcaggaaaaataactaatgggcactaggcttaatagctgggtgacaaaataatctgtacaacaaactgccatgactcaagtttacctataaaacaaacctccatgtgtacctcagaacttaaaataaaagttaaaaaaataaaacactggtttaaggtcattttctttgtctgttttttttkttttgttttgtttttttcctttttagagacaaggtctctctatgctgtccaggctgagctcgaactcctggggctcaagtgatcctctcgcctcagcctgctgagtatcccaagtagctgggactacagacttgcgacttttaagtcattttcaatcatgtcctacagtcagctgattgtaaatgcatgcccgtgtgctagcgagaccactggca

SEQ ID NO: 790463 - DNA, 648 bp, Homo sapiens
gggcatgaatgcagcttgcccagtcaaaaacaaggaaggccagaacacatcccacagaaagttgctaacggatccataaaagatttttttattgatctttattttatagtcctaaggttctgattccatgtgagcatcacccctgggtacttttataactttttaaatcaactgcaccctgtgagacaaataactgagacctaggctgaaagccagagggttctgatggcttgttcctcttgcagatggcaaccagggtctaccttccgtgacctcactctgcatatttgcatgcagaccacgggactcagcccatacacctagctctggtcaccagaggctgagaccaccaagtggatgcatatcataataaccaaatttggatggagctttttaaacaaatatttttgaggcaataagaaatttacaagattctccaaatgttataacatctagatgaccacctcttttcatttttacttcacatstcccctcaataaccttgctgggacatggaagttttgttttgtttttgtcatttggaagacctgatcaaaccagacagatgaaagtggttttaaattataggcagtccactgatttggggtttgaggatgaccaactcctgaaagttccctaaatcagggg

SEQ ID NO: 790464 - DNA, 648 bp, Homo sapiens
gggcatgaatgcagcttgcccagtcaaaaacaaggaaggccagaacacatcccacagaaagttgctaacggatccataaaagatttttttattgatctttattttatagtcctaaggttctgattccatgtgagcatcacccctgggtacttttataactttttaaatcaactgcaccctgtgagacaaataactgagacctaggctgaaagccagagggttctgatggcttgttcctcttgcagatggcaaccagggtctaccttccgtgacctcactctgcatatttgcatgcagaccacgggactcagcccatacacctagctctggtcaccagaggctgagaccaccaagtggatgcatatcataataaccaaatttggatggagctttttaaacaaatatttttgaggcaataagaaatttacaagattctccaaatgttataacatctagatgaccacctcttttcatttttacttcacatgtcccctcaataacctkgctgggacatggaagttttgttttgtttttgtcatttggaagacctgatcaaaccagacagatgaaagtggttttaaattataggcagtccactgatttggggtttgaggatgaccaactcctgaaagttccctaaatcagggg

SEQ ID NO: 790465 - DNA, 631 bp, Homo sapiens
gtatgaccctatttctacagacagtgtatgagttcttaaagctctggtagctttaattccaaaaaaacactattattaataatttaatatgcatgaggcaatatattaggccattttaattttaattctttaattattatggaagcyaaacattttcccaagtgtttgttcactatttgtatttttccttgtgcaaaccatctgttcatattctttaaccatctgtccagtcagacctgaaattggccatatagataatattaatttccctaatatatataatgttaaatgtttactgttatgtgtattacaatactctcgtatttttatcattttaatttttctaatttgagagtaatcattttttgttcttcatcttgtggtatgtatgtatgtacttaaatttcattcacttgaacctgtcaaccttatcatttgttcagtgctaactccttttattgcttttattgtccaaaaattatttttatttcaaaatggatgtatgcagtattgttttatttcgtgtgtgtgtgtgtgtgtgtgtttgtgtatgtgtggtagggaagtttaaactttccctctgaagtgagactgctgaaataaactgacaatagagtagcagaagaaaaag

SEQ ID NO: 790466 - DNA, 600 bp, Homo sapiens
ggcagcatgagggatatggagtaggactctggaggcccggttcacccaacaaaaaccctggaaccaaagcaaaccacacctatgagccccattttcctcatctgtgaaatggaacaatggcctagctcagcgctccccagtagaaatataatgtgaaccataaatattctagcagccacataaacttgtaaaattaaacaggtgtcgttaatttaaatactgtgttatttaacccatccatccaaaatattatcaattyaacatgtagtcaatacaaaaatctatgaatgagactttacattgttttttgcgtatgaagtccagcgtgtatttcatacccgtagcacatctcaacttgagctacttacagacccagggctcaatagcatctgtggttagtggctaccagattgggcagtgctgatgtagataatgtctagggtctcctctaaaatgctgtggctggattccaaaggccaggctcgattgcccacacatttgtttcctgctaaaccctgagaccctggctggtcccagctgtagaaaaccattcaggtgacacgtttggggagttacttcaagtgacaataaaatggatcc

SEQ ID NO: 790467 - DNA, 608 bp, Homo sapiens
atccgaacccaactgcctggctccagagtccctgtgctgaaccccaggtccacactgccagcctggggtggccctaatgactgagtttaaggctgccctgaaagtgcatggcacggcgtcgggcaggcaggcagggaagaaattgttgttgctgctgccctcaaatggggcaagaaaggacgtgggaagagccccctgggtgacttccaaacacctgggacacagcacagttatagcggggaggggacagcccctgctgagccttccttgtcccgcccccagtcggaagccgagaggggaatttggctgagaaggcatcttcctcatagcttagatgcagagggctctggaggcgggtgattcagggtctgaagtgcctggggctcctggctctggggcagtggggtaggctgacaggggtggccctggygagaaaggtgggtgggccaggagccagatgggggtgcctcatctaggtcccaccgccagcatcttagagggcggaggatgaaagcaacctgggggaggggctcacctgggggccatcgcagtagccaggtcttggcaggaggaggagctcggccaccactaactcaaaatcagactca

SEQ ID NO: 790468 - DNA, 522 bp, Homo sapiens
gtgaccaggggggtactttgtgaccacataggggcttgtttgaggactttcagagttgaacatccacaaacaggagcagaatgttgggctagtagaggaccagcaggatccaaggccaatcccagggggtgggtatccccgaggggtcccagtagcaatgacagacacacaggcagcctcacacggccgccaggcaggatggagcaaggcaggcggcaggcggcaggyggcaggtggctggcggcagggtgctgttgcaatcgtgccctgctcctgcccagcctgcttcctgcagccatgcctgaggccagcacctccctcctgtcaactggactggttccttctgtcaaaccagtagaaggaattgggaaacgacagtggggcaggggtgggaagctgggggacaccccttccgtcttcttaatcactgcatctaactttcagtacatctttcgagccttactcatgcatgagattaccatgacgttcctagcacccaggacacctgaggcacacagccaa

SEQ ID NO: 790469 - DNA, 604 bp, Homo sapiens
gatgagaaatctgtgaatttttgtcataatttctccatatgtaacatgtctttttttcctgtgtactcttaagattttctagctgagtgtggtggctcacgcctgtaatcccagcactttgggaggccgaggcaggtggatcacgaggtcaggagatggagaacatcctggctaacacggtgaaaccctgtctctactaaaaatacaaaaaattagctgggcctggtggtgggcgcctgtagtcccagctacttgggaggctgaggcaggagaatggcatgaacccgggaggcagagcttgatatactttggtgtggagttttatgtttattctgattggggtttgttgagcttctgggatctgtgggtttattgtttttatcaaatttagaatatttccagccattatttcttcaaatatatttcctgttactttctcttcccctctccttcttgaayttcaattacatatatgttaaaccatttaatgtcttatttcaggtcactaagctctgctcatttttccctccaggcttttttattctctctgtgcctcactttagataaattctattgctataactacagggccaatgagcttttc

SEQ ID NO: 790470 - DNA, 594 bp, Homo sapiens
gcctgagcgcctccggccacctccttctacctccgggccctaggcgcccgatccacctgcctatctgaccacagacatcttcccacaaaacagtggagctttttgaatctttgaagagagtcttcagatcttttatctaagcatctttgtgaagcaaagaataaacgggtatctgaggccagctcgaaagttaggaaataaaatcaggtggggccccatcccgtagatgctgagggacagctctgacctagagttcctgctaagcaaatgttgaaccacggcagttgtaaaaaaatgtagatttaggaagccatttcgagataaagatttacagaagattgttgcagaaattaaagaatattygaggttcattgttcaccattttagagttgcgtgtcttgaaaacgggaaggcaatcatgtcttctcataaaatgaattgtatagaactggaagaagtcctaacacatgaattccttagacttttgtggtccctgcttctgtcacgctgggttcacacaggttcatttcagagcatggtgaagatcaggacaagtgtacagttttccctgtagaaaaaaagaaaagatagaac

SEQ ID NO: 790471 - DNA, 649 bp, Homo sapiens
tattcgaaatatatctaccattaaaaagtatcaaattaataagaatatagagtaattaaaatgtgaaactacatattgctaagcaagaaaaatgatctgagtttgttcttgttaatttgtttgttttcaatgtttttggctctgagagttttcactcaaatctgttttgggaaaggaattttctgagagagcattctatggcttttcaaagaaaaataaaaaatgaaaactcamgtaagtaacataagccgagaggcaggactaccaaacacaacctctgcacacccatactgactgagaggcccctttagctcggtaccacagtgcacttagagtcagcagacagaatgcaccacataatactgtgcaggtgtacagtaccgtatcgtcctccatactggagttctatgtttttgtctctttatgatcttacatttgttgatactattttccttaaataaacttgaaaaagaatccaaaatttaaaactcctcataattgtcaattaatatatatctaatggctttttatcaagctagcacaagcattcataaaaatctatctttaattcctaccctcctcatgatcctaaagattacttgagagagcaatgttacatcacaattaaaatatacttcattcacattat

SEQ ID NO: 790472 - DNA, 630 bp, Homo sapiens
gtgcctttctccaaagatgattttgagggattcaatatttaatgaggaaaggttggctggaggggaaagtggaagggtgtggaaatccacatattgcaagagagcaggagcaggtaggggagtagtcaatcatgtattcatgcggtgctcagtaaactggcactttacataagacgaacatacaaggtgaacataaggtagctacctgtggagatatttaacctcttatctgtagctatctgattaggaacaaaaagaaaggcagctccttgcttgactcagcttttagcttaaytttttccttttgacatagtgaattagattccccagttttattttcctttcacatttcttcccccttttcttttaaaaatcttttggagaaaaaattttagaagaaaatgagtctctggtcttgggttttgtctgatctcttgtggctaggacagtttatttccagacagataagtctcacattgttagtaaagctcatttttagcagattgtgaagtctcacatcccacaaagaaaaaaacaggaaaggaaaacagaaagaaaacaaacaacaacaacaaaaagtcccagaaaacagatataggccatattactctaaagtccatacatctgtag

SEQ ID NO: 790473 - DNA, 630 bp, Homo sapiens
gtgcctttctccaaagatgattttgagggattcaatatttaatgaggaaaggttggctggaggggaaagtggaagggtgtggaaatccacatattgcaagagagcaggagcaggtaggggagtagtcaatcatgtattcatgcggtgctcagtaaactggcactttacataagacgaacatacaaggtgaacataaggtagctacctgtggagatatttaacctcttatctgtagctatctgattaggaacaaaaagaaaggcagctccttgcttgactcagcttttagcttaactttttccttttgacatagtgaattagattccccagttttattttcctktcacatttcttcccccttttcttttaaaaatcttttggagaaaaaattttagaagaaaatgagtctctggtcttgggttttgtctgatctcttgtggctaggacagtttatttccagacagataagtctcacattgttagtaaagctcatttttagcagattgtgaagtctcacatcccacaaagaaaaaaacaggaaaggaaaacagaaagaaaacaaacaacaacaacaaaaagtcccagaaaacagatataggccatattactctaaagtccatacatctgtag

SEQ ID NO: 790474 - DNA, 641 bp, Homo sapiens
tatcatcttttttccaccaatcactagatttagctttctaaaaatgcaaatttgaacatagcacttctttgacttaaaattcccagtgtttttcttttgctcttaagataaaaacaaaacatcttaaaacaatcttcaaagccccttatgattatgtccctgcctgcctccccggcctccatctcaccacatgcagccygtcatccagagtcatcccaaccacaggaaactttcatatccccagcatgtgtcctctcacctccatgcctttgtgcacattagtctctttgtcagagacactcttctccacttttcattacagcaactccaatttatttttaggtcttagtctaaatataatttctttccaaaaatctttcttaattctccaatatcaagtgcaatttcctccttatcccaagttaccatttatcattgcatttatcacattttactcacagttttgtaattttctctacttcattagactttgctaattataaactaaatacttaaaaaaggtaaaaatgtccctgagattttagttcatggaccccagaaatagttacccactttagagggagaatattatttaataaaaagttgaaagtcttgcctaagagtatctttgttccaatatc

SEQ ID NO: 790475 - DNA, 604 bp, Homo sapiens
ggaagggtctttgtgactccagtccccactcctcgtctccacctggcgcatagacagggcagcaccatccccctagtgggggctgccaggccagcagaagcgggagctgtggattggggtctggagggccagtcagggtccccagggcttctgagtgaggcagggcctggacccctggtcagagaggagccggaccccaccctgcatgtgcgcgtgtgtgtgagacaggactacactggcctctccaccctgtctggatctgcgycgtgccatgtggccaacccacgggatgcacagcgcctggacacgcagtatctgcagtgttctcccggggtctgtccagcacacgctatgcacccccaatggtccagcacacactgtgcacccccagtggtccagcacacgctcggcaccccccgtggtccagcacacgctcggcaccccccgtggtccagcacacgctgtgcaccccccgtggtccagcacacgctcggcacccccagtggtccagcacacactatgtacccgcaatgggacacagccttcttcaggataaggaggcactcagggatgacctgccccattgccaccatgcaatcctgtt

SEQ ID NO: 790476 - DNA, 542 bp, Homo sapiens
tgtctctatcattagactgtctgaagttgcccaggtgtctcgctcattagaatgcctggggttggccaaatgtttctcccattggaatgcctaaggtcgcccaggtgtctctaccattaaaatgcctggggtagaccagtagtctctcccattagaatacctggggtctcccaggtgtctatttttagaatgcctggggtcttccagatgtctctataattagaatgcctggggttggccaggggtctcccctgttagaatgactgtagtygcagaagtgtctctatcattagaatggttggatttgtccaggagtctctcctattagaatgctgaggtcacccaggtgtctctatcattagaaagcctagtgtcgatgaggagtgtctcccattaaactgcctggggtcccccaggtgtctctatcattacaatgcctggggttggacaggagtctcttttattaaaatgcctgggcttgcccaggtgtctctatcattagaatgcctgcaggtggccaggaatctcccccattagagagc

SEQ ID NO: 790477 - DNA, 626 bp, Homo sapiens
ggccaggagtttctcccataataatgcctggggttgcccagttgtctctattattagaattgctggggtctgcaaaaagtccctatcattagaagactgggggtccccccaggtgtctctgtcattagaatgcctgtggttggctagtagtctctcccgttaaaatgcctggggtcgcccaggtgtctgtgtcaatagaacgactgaggttggtcaggagtctctcccattagaatgcctggggtcgcccaggtgtctctattattagaatgcctggggtctgtcaggagtctcttttattacaatgcctggagtcaccaaaatgtctttatcattagaatgcctggagtcggacaggagtctctttacagaatgccgggtgtcgcctatgtgtttctatcatttgaatgcctgggtyggccaggagtccctcccactagaatgcctggcttgcccaggtgtatctatcattaaaatgtctaaattcgggtaaaagtctctcctattagaatgcctgaaattgcccgggtgtctctatcattagactgcctggggtcagccaggatgctctctcattagaatgcctgtggtcacccaggtgcctctatcattacattgcctaaaac

SEQ ID NO: 790478 - DNA, 627 bp, Homo sapiens
gcccagggcccacgatcctgggacgccctccggtcctccgccctgtcgcggaggcagcgttttggatccctcgccgcacaggggctcctgcgaggccccctcttgccccacccacccagagccgtcagggctggccgaaggcgaacagccggcccagcckcgcggggcctttctctcacaacgcccccaccacggtcgcttgtcccgaccaagacccggccgggggggcaagagggcgtggggtgtagcgggtcggggggtggccctgttttgccccgggctggcactagaggcggcggcctgatctcgggtgagagggcctgagagaaacccagacacaccccaccgccaccaggagcaaatccactcccccacacacagacacacccgggcgcgctcgcacgcgcgcgcgcggacacacacacgcacacacgcacgcgcacacgcacgcacacacacgcggcttgaaggagagcaaggacgagatggatggagagatagaaaccgagggagggagagagacagcgatcgagagagacaggggagggcgagagggaaggagacagacagagaggctgagaaagagagaggcacagagaaagagagagagagagacagagagacaga

SEQ ID NO: 790479 - DNA, 571 bp, Homo sapiens
agaggcggcggcctgatctcgggtgagagggcctgagagaaacccagacacaccccaccgccaccaggagcaaatccactcccccacacacagacacacccgggcgcgctcgcacgcgcgcgcgcggacacacacacgcacacacgcacgcgcacacgcacgcacacacacgcggcttgaaggagagcaaggacgagatggatsgagagatagaaaccgagggagggagagagacagcgatcgagagagacaggggagggcgagagggaaggagacagacagagaggctgagaaagagagaggcacagagaaagagagagagagagacagagagacagagggaaaacgacagaagtaccgcgaggtccagggggaaacccataagagagaggcggagggagctagagagcgagagcgatagagccttatagaggaagcgcccggctccgttaggcagcgccctcttgagcaagccgggatagggtggagggggcttgggctgcgcccagaacacgggggccaggcggtccgtgcgagaggaccaacggagcgctgaggcgggcgtcttctt

SEQ ID NO: 790480 - DNA, 571 bp, Homo sapiens
agaggcggcggcctgatctcgggtgagagggcctgagagaaacccagacacaccccaccgccaccaggagcaaatccactcccccacacacagacacacccgggcgcgctcgcacgcgcgcgcgcggacacacacacgcacacacgcacgcgcacacgcacgcacacacacgcggcttgaaggagagcaaggacgagatggatggagagatagaraccgagggagggagagagacagcgatcgagagagacaggggagggcgagagggaaggagacagacagagaggctgagaaagagagaggcacagagaaagagagagagagagacagagagacagagggaaaacgacagaagtaccgcgaggtccagggggaaacccataagagagaggcggagggagctagagagcgagagcgatagagccttatagaggaagcgcccggctccgttaggcagcgccctcttgagcaagccgggatagggtggagggggcttgggctgcgcccagaacacgggggccaggcggtccgtgcgagaggaccaacggagcgctgaggcgggcgtcttctt

SEQ ID NO: 790481 - DNA, 552 bp, Homo sapiens
cgacggcgcccgatgggtgaattgaatcgcctgggcgttccgggagcgggaaggcaccgcgaacggcagggaacccagcggctgcgcctttggggtccggccccctgccctcccaggctggagccgggctcctggcggggcggcggcgaggcggaagcggtgggatgctgctgcccggccggcgtgcagtaggggcggacccccagcaggaggaccccggctgcggctgcagcgggggtgtaggtgggcggtaaagggggagcagagtcaggggaggttgggaagcatggcgactgtggggggaagggaggcagcsgggaagccacaaaagcctacagcaggccgggcgggcgcggtggctcgcgcctgtaatcccagcactctgggaggccgaggcgggtggatcacgaggtcaggagctccagaccatcccggctaacagggtgaaagcccgtctctaggaaaaatagaacaaagtagccgggcgtggtggcgggcgcctgtaggcccagctactcgggaggctgaggccggggaatggcgtgaacccgg

SEQ ID NO: 790482 - DNA, 576 bp, Homo sapiens
gatccccttaaattgattgctaaaattggagaacaaaataatttgtacactgtttttgaaaaggaaaactaaatttgcgagttaagcaaatttaaaatgagtattgttagaaccagatgaatgatgatacatgtggactttaggaaaataacggtttgtaactacatttttccttataaaawggagggtttaagagcgtcggagacctccaggcaaattaactgaaatggctgtgttaatagcccctaaatcctggaggagagaggttcattgatttaatccacgataatcccttaaaaaatgtttgccacaaaatcagagctcagaaagtgttattcttctgttgttatctgtacagttttcattaatctatttctcaaaatatggataattcctactttgtttttattttttctttaatccccaaagtgctagtatttagttaattgacacctaacaattgcatattatatggggtacatagtgatactttgaatacatttattatcagatcagggtaattagcaattattaagtatttattgtaataataaatacaggccagtaaaattattc

SEQ ID NO: 790483 - DNA, 611 bp, Homo sapiens
attaaacctagatttgccgtgattttagtcctagaagatgaggtgaccacgtgcccaactctgtccttatagtgctgacccacaaccatgtgctcttccccttttaaccctggccttacgtgggccaaaacgcttttccttggtttttccttgcatagctgaaacaggctggcatttgaaaacaaaaagtatttagtaccaaagaacaaaaggaaagtagtgttgacactagtgttaagrtgatctcatcttgagaaaagttgtactaattatgattagttttaaatgtccagtttgccgtgcttagaacatatagcgagaggggaagaggtggtggtggggagaaaaaaccatagcgaattcacttatttagagaaatgttattgaacatcctatgtgccaggcactgcactgggctctggagacagagtgataaacaaatgactgctgaattaggatagccttcctattctgataatgctctgagccccaaaccatcccttaacaaaaaaattcttttttaaaactccagtaagtctcttgtacatgcttttttagataagaactttggcagtatccagcatagtcaacacataatatcccacccacac

SEQ ID NO: 790484 - DNA, 639 bp, Homo sapiens
atttcatggtattaatgtaatcaatctaaaattataagccaaaacaatgattatatgcaaaacttatattacgatagtcatttaacaactgcaaacattgtttgaattctaagtactttcaagctgttttatgctgttgaaagttaacacattctttttctgacaaaagttaaagaagcaaaatctcctttcctgacaaacgggcagcagataaattttcaaattacatttccagccaaatatttttgacctcatgcaaactgaaaggaaatttccataagtctatttaactctacaactgaraactttccacttcttatcttcattaagtgattaatctgtaatgcaatgacacgctcaaaggcacgaaaacctaacagaattctaaaaatgtattccaaatgattaatatgccaagttaaatcaagataatggatcaagattagtatgtgccaataacaattttcatgaaaagacatttgcaaggataaaatactccatacagattagcattaacagatgaacatgtgcaactaattttgatgacagggaacacaaactataaaccctactaaacataaactctaaactgttatttccaccatctttcattcttcatattagtaaacacaaattata

SEQ ID NO: 790485 - DNA, 427 bp, Homo sapiens
gttttctagatacagaatcatgtcatctggaaacagggataggttgacttcctctcttcttatttgaatgccctttatttcattcttttgcctgattgctctggccagaaattccaatactatgttgaacaggagcggtgagagagggcgtccttgtcttgtgccggttttcaaggagaatgcttccagcttttacccattcagtatgatgttggctgtgagtttgtcttctatggctcttattagtttgaggtatattcatttcttcartatctagtttggtcagagtttttcaagtaaagggatgttgaattttatcaaaaatcttttctgaatctcttgagataatcaagtggttttggtctttagttctgtttatgtgataaatcacatttattgatttgcaatgatgaaccaagtttgcatc

SEQ ID NO: 790486 - DNA, 608 bp, Homo sapiens
ttgagtgatttcctccaaaaagccactaaaaggcacccaagtagcttacaacagattttaaagctgactcttttttctttttttaagagaaatgacaatttggatgaggctcccatctgtgtattgcaaataatggatacagaaacatgattgttgaagtactcgtgagggaccttggagtctcctaaaatatggagttctgttttctagaaaagacattttaaagtctataaaatagactttaatttacaaatcaaggatctatcatagagatttctccctagcagtgatgtgggccaaatcatcagatagatgcaggtcaccttcatagaattttccacatgtgtttttcttataaaccactgtacatggaaaccaaagtctctatcaaaacaaatccctgatggattgcatatatgacmaagattgggtgatgaccatcttatagaaaaacaatgaacaatttttgaagttatttttatatttaggtaacacatatggatgatttctatctaaatagtttgcatttctaggtactttctttactcaatgtctctagttaagatgaaacaccttctaggacacacacagtccttttcataatcaca

SEQ ID NO: 790487 - DNA, 516 bp, Homo sapiens
atcggctttttgggatgggtaggcatttttacacatgaagaatttctgggttaccaagttctttagagagctccctctaactgcatcactccctgttcctcagcgtcccttcacattttcagctgtcagtgaaccctggggcaggaatcaatccaccaccaaggacacagaacaggccacrgggctcagatcttctactaccagaagaaatggaagcccttttcttcttaagtgttgtcagggaagtgctaactccttaactctctcaaaacaaatttgaaattcttagagaaaaggtcttagtaaggaaatccagcaaggttttgcctcagacttcggttggccttgtgggaggccccagtttgggtccccccgaaacaccaagctgtagaagaagcagattccaaagaaatgagtccctcatatccattgtttcctaaaaccaaaatctggtaaatctattcgtattgtgggttaggtctctttgttgttttaaaaaaagggcgctggcagttc

SEQ ID NO: 790488 - DNA, 462 bp, Homo sapiens
aggagttcgagaccagcctggccaacatggtgaaaccccgtctctactgaaaatacaaaaattagccgggcatggtggtgggtgcctgtaatcccagctacttgggaggctgaggcaggagaatcgcttgaacccaggaggcagaggttgcagtgagstgagatcacgccactgcactccagcctgggcgacagagcgagactccatctcaaaaaaagaaaaataagtaaaataaaaataaaataaaataaaaagtgtcctgagtgaagggaggatttccagagctgtaggcaggttgaaaggaaccagcctgggatcatgaggccctcagaggctaatcacagtaggaagctcttcctctcagattcccttgggccccaagcttgcaggacagcccttccccaccttcccatccactcccccatccccaaaccagcacacaactgctatttggcttgtcac

SEQ ID NO: 790489 - DNA, 584 bp, Homo sapiens
tgtttctattgtatctgacttcctagtgagtaggcactcacactggctgaatacatcataaaccaattccactaaattgttgctaatcaaattgttagtcctttcaggaatctgtgttttagcagatgacaataatgaatgagcgatgcttattaatccaaatagaattgacccartagtggaattacaggcaatagggagctggggggagaaggactttgatgagcagggggctccttgctgcctcaccagtagtgccacatcacctgtgtcactcttccctgaggtcacagaatgttgggccataaagggatcattatctttttctgatggacctcttttgctctcctgactcttctctttcctattcaattttagtttgtttcctttggtccaacagcaaattggctgtagcaccttcttctaaagagccctgtagacaccagcatctcttgccaggatctcctagtgcaaaccctctaagctttctgcttttatcccctctagcaagactgtgcagatactagcgggcaggcaaccagggcctctgtagggctgggatcccctccacaacaggccagatt

SEQ ID NO: 790490 - DNA, 584 bp, Homo sapiens
tgtttctattgtatctgacttcctagtgagtaggcactcacactggctgaatacatcataaaccaattccactaaattgttgctaatcaaattgttagtcctttcaggaatctgtgttttagcagatgacaataatgaatgagcgatgcttattaatccaaatagaattgacccaatagtggaattacaggcaatagggagctggggggagaaggactttgatgagcagggggctccttgctgcctcaccagtmgtgccacatcacctgtgtcactcttccctgaggtcacagaatgttgggccataaagggatcattatctttttctgatggacctcttttgctctcctgactcttctctttcctattcaattttagtttgtttcctttggtccaacagcaaattggctgtagcaccttcttctaaagagccctgtagacaccagcatctcttgccaggatctcctagtgcaaaccctctaagctttctgcttttatcccctctagcaagactgtgcagatactagcgggcaggcaaccagggcctctgtagggctgggatcccctccacaacaggccagatt

SEQ ID NO: 790491 - DNA, 583 bp, Homo sapiens
gtatgtgtgcatgcgtgtgtgtgtgtgtgtgtgaatgtctacatatatgtgcgtgtgtgcgtgtgtgtatatgtgtgtacgtgtgtacgtgtgtgggtgtatgtgtgcacatgtgtgtatatgtgtgtgtatgtgtgttttttttatgtgtatgtgtggtgtgtagccatgaacagagacagccaatccctgaaggaatatgttgtacttttgtcctttaatattttcaagcctgctggtcctgcaaaaagsagtaagagctaatgagaagcaggtgtacttagggaaacaggaaatctggttccatttatgacttcaccgcggcctgccatggagttttgagcagctttagtttgctgctccgtttctcatctctgtcttctctggaggtgccatctgcaccattaggatgcaggagttggctttcttgcttttcctgaaaacagtactagtgccattggctgttaaaagtgggatatgggccaggtgcgatggctcacacctgtaatcccaacactttgggcggccgacatggaaggactgcttgagcccaggagttcaagaccagcctgggcaacatagt

SEQ ID NO: 790492 - DNA, 597 bp, Homo sapiens
tgttaaaagtgggatatgggccaggtgcgatggctcacacctgtaatcccaacactttgggcggccgacatggaaggactgcttgagcccaggagttcaagaccagcctgggcaacatagtgcgaccttgtgtctacaaaaaagtttacaacttagccaggtgtggtggcatgcacccgtagtcccagctattcaagagcacaggaggtcgagactgtagtgagttctgagctttgccatttgtgtgagatgtttsctgcatctggcctgcccacttagaaactgtcttcttccttactttctggacacacagaaagagcatatgtttgtagtattaaaggcagaggatgaacttcctgtgtggcagctctcctgaaatgtattcttgcactcaaaatgcaatggcagatgttgagctgctctcacaacccttcagaaagtcttcggggaatgctggtgtgctctctgtcagagcataagagtaaataagcctgctgcacctttaagcagggatgagctaagttttggtagtattaaagtcggctcatgtaaaagtaatttgtgtaaacaaatcaggatttaaaacaactttttatt

SEQ ID NO: 790493 - DNA, 597 bp, Homo sapiens
tgttaaaagtgggatatgggccaggtgcgatggctcacacctgtaatcccaacactttgggcggccgacatggaaggactgcttgagcccaggagttcaagaccagcctgggcaacatagtgcgaccttgtgtctacaaaaaagtttacaacttagccaggtgtggtggcatgcacccgtagtcccagctattcaagagcacaggaggtcgagactgtagtgagttctgagctttgccatttgtgtgagatgtttgctgcatmtggcctgcccacttagaaactgtcttcttccttactttctggacacacagaaagagcatatgtttgtagtattaaaggcagaggatgaacttcctgtgtggcagctctcctgaaatgtattcttgcactcaaaatgcaatggcagatgttgagctgctctcacaacccttcagaaagtcttcggggaatgctggtgtgctctctgtcagagcataagagtaaataagcctgctgcacctttaagcagggatgagctaagttttggtagtattaaagtcggctcatgtaaaagtaatttgtgtaaacaaatcaggatttaaaacaactttttatt

SEQ ID NO: 790494 - DNA, 540 bp, Homo sapiens
taaactgtaacactcttgtaggcccaatacctagaaaaatgcctttcagctcccatgataagctcacatctgatgtcaggtgccaactgcttcacatggatgacttcatttaattctcgtaaccctgtggagttaggcatgagtgtaatcctcattttattttattttttatttttttgtgtggagtttcatttttgttgcccaggctggagtgcaatggcgtgatcgtggctcactgcaacctccacctcctgggtttaagtgattctcccgcctcagcctcccgagtagctgggattacaggtgcccaccaccacgcctagctaatttttatattttttagcagagatggggttgaaaccccgttggccagactggtctcaaactcctaacctcaggtgatcygcccgcctcggcctcccaaagtgctgggattacaggcgtgagccaccacgcccggccctcattttatagctgaataagcaaaggcactacaaggttaagtaattcagccagtgtgatctatgtagtaagcagtgg

SEQ ID NO: 790495 - DNA, 630 bp, Homo sapiens
tgctactttgcgtatcaactttacagtgcaaattcttcagagaaactcgttttctaaatacaactaatcatattgtgcttcatttctctgctgtattaatacaacaaaatacagtaattaagaagatagaactaacagtcaagatatggatttgaatcctggcttaacctcaaaggagctacatactctgagatagagcctcttcagtttcaaaactgttttagggttaacttgaggcttaaatatgatatttcatgtagtacactttcacagagtgcctggtatataataatttctaataaatgttggctattaatactatcagggtaaaagagaacaacagaagtaacatcttaaattttcatttaaagaaatacatattttcataaatacaggaaacatttccaaacatgctattatctcagtaaamtaaggcaaatcacctatcaaaatctctttactacccccaaagccaagaatcacaaaaagcatctcttttatttatttatagacagagtctcactctgtcacccaggcaggagtgcaatggcacaatcatggctcactgcagcctgaaactcttggggtcaagggatcctcccaagtagctaggactacaggtgcacacca

SEQ ID NO: 790496 - DNA, 646 bp, Homo sapiens
ttcttttctttttttttttttgagacaggttcctacttttttgtccaggctagggtacagtggtgcgatcatagctcactgtaacctcaaactcctgggctccagttatgttcccacttcagcctcccaagtagtgggactagagatgtgcrccaccatgcccagctaatattgtattattattattattattatttggtagagatggggtcttgctatgttgccagtgctggacttgaactcctggcctcaactgattctcccatcttggcctcccaaagtgctgaaattacaggtatgagccaccattctcagtctctttttttttttttttttttttgagatggagtctcactctgtcacccaggccagagtggagtggtgcgatctcagctcactgcaacctccacctcctggattcaagcgattctcctgcctcagcctcctgagtagctgggactacaggcgcgcaccaccacacccggctaatttttgtatttttagcagagacggcatttcaccatattggccagggtgatcttgatctcttgacctcgtgatccccccgccttgacctcccaaagtgctgggattacaagcgcaagccacagtgcctggccagaagggtgaacattagagactgaca

SEQ ID NO: 790497 - DNA, 469 bp, Homo sapiens
aaccttggaaggtagaattcttgttgaattagatgagacatctcaagggcttgttccagaaaagaccaatgttaagccaagtaagtaaaggtctgttgtaattttaagtactttgaagagtgaataatagttggtttaatgcctgtgtgagtaaaaaactctggccagaagagttttgaaataccattctataaataactttcctttttggtctttttccttttttttttttttttttttttaaatyacaagagacagggtctcactgtgtcacccaggcgggagtgcagtggtgtgctcactgtaacctcaaattcctgggctcaaggaattatcttgcctcagcctcccaaagtgtggggattacaggtgtgagccaccgcgcctggccccttaataacctgttatctacaactaactactgtctttaaggcaaaagcctttacctgtggagtattataacacttta

SEQ ID NO: 790498 - DNA, 601 bp, Homo sapiens
gaagagctatgtttgagatcagttaccacaagtatcaagtacataagtttacaagccacttggcatttaaggtcaacacgagattctgaaggcatactacatgaacaaaggtcttggctgcagttaaggtttagagtctggctaatgagggttctatgtaaaaaggtacctaaattatacatgagaccagcattagcctcttgacctcactaagtgaaaagtctttgtaaagcacctatgcatatttgtagtrcagcgaactatcatagtttaaagaccgcttaacagagcgagacacctattctacttggacacagctagttttcggggtcaatccatcaggcggtactcgtcctcttctgcttcttacgtaacttagtgaggcatcctcctagcacttctaagtgctaaatattcaaggaccatcatcaaacttctccccagaatctggactaagtgctgattttaaacatcacctctaaatattatgaatttaggaagttgcttaagtcccccaaagatcaaggatggggtatgatcatctttagaatgagagaccctaccctaaggattgagagtcaatgtctaaaagggagactat

SEQ ID NO: 790499 - DNA, 620 bp, Homo sapiens
cttgccccaagacaaagcaaaagcctggccagtgtacagtatttcctttctcagcttttcttgttctacaaattagaaatcttatagtaatcattgacacatctttctatttcagtccccttttatatctaaattagaatggataactttgcttaaaaatatctattcttaaaggaatattatttgaatacaaatatttatttatttatttttgagacggcgtcttgctctattggcaggctggagtgcagtggtgcgatctcagctcactgcaacccccgcctcccagattcaagcaattctcctgcctcagcctccctagtagctgagactacaggtgcacaccaccacgcctggctaatttttgtatttttattagagatggggtttcaccatgttggccaggatggtctcgatttcttgaccttgtgatccacmtgcctcggcctcccaaggtgctggtattacaggggtgagccactgcacccagccagaatacaaatatttaattgaaaaaagattaaacatgtattgatggactttatgttttatatattgtttttattatttcgaattttgtcagaccattaatgttggaaataacttgtatttattgggtc

SEQ ID NO: 790500 - DNA, 674 bp, Homo sapiens
tacaactttatttatgaacatgggaatttgaatttttataattttcacagcataaaatattattttaacttttcttaaccattaaaaaaatataagagcctaattataattagttcttgagctacacaaaagcaggctgtgggctgggcacagtggctcacacctgtaatcccagcactttgggaggctgaggcgggcggatcacaaggtcaggagattgataccatcctggctaacatggtgaaaacccgtctctactaaataaacaaaaaattagctgggcgtggtggcgagcgcctrtagtcccagctactagggaggctgaggcaggagaatggcgtgaacccgggaggcagagcttgcagtgagccaagatcgcgccactgcagtccaacctgggtgacagagtgagattccatctcaaaataaaaaaaaaaaaaaagcaggctgcaggccagagtttgccaacacagtttaatcacttggcaaatcaaatacccttccctcttttctaacacacatatgaaaattttatagacttctgaggaatatttatagcaataacagtgttaaattatgtattaaatatgcatttattaaatatatattacattattatttaagaccaattagctgttttcttatttacttttgtagccaaacctcaattgtgt

SEQ ID NO: 790501 - DNA, 674 bp, Homo sapiens
tacaactttatttatgaacatgggaatttgaatttttataattttcacagcataaaatattattttaacttttcttaaccattaaaaaaatataagagcctaattataattagttcttgagctacacaaaagcaggctgtgggctgggcacagtggctcacacctgtaatcccagcactttgggaggctgaggcgggcggatcacaaggtcaggagattgataccatcctggctaacatggtgaaaacccgtctctactaaataaacaaaaaattagctgggcgtggtggcgagcgcctatagtcccagctactagggaggctgaggcaggagaatggcgygaacccgggaggcagagcttgcagtgagccaagatcgcgccactgcagtccaacctgggtgacagagtgagattccatctcaaaataaaaaaaaaaaaaaagcaggctgcaggccagagtttgccaacacagtttaatcacttggcaaatcaaatacccttccctcttttctaacacacatatgaaaattttatagacttctgaggaatatttatagcaataacagtgttaaattatgtattaaatatgcatttattaaatatatattacattattatttaagaccaattagctgttttcttatttacttttgtagccaaacctcaattgtgt

SEQ ID NO: 790502 - DNA, 674 bp, Homo sapiens
tacaactttatttatgaacatgggaatttgaatttttataattttcacagcataaaatattattttaacttttcttaaccattaaaaaaatataagagcctaattataattagttcttgagctacacaaaagcaggctgtgggctgggcacagtggctcacacctgtaatcccagcactttgggaggctgaggcgggcggatcacaaggtcaggagattgataccatcctggctaacatggtgaaaacccgtctctactaaataaacaaaaaattagctgggcgtggtggcgagcgcctatagtcccagctactagggaggctgaggcaggagaatggcgtgaacccgggaggcagagcttgcagtgagccaagatcgcgccactgcagtccaacctgggtgacagagtgagaytccatctcaaaataaaaaaaaaaaaaaagcaggctgcaggccagagtttgccaacacagtttaatcacttggcaaatcaaatacccttccctcttttctaacacacatatgaaaattttatagacttctgaggaatatttatagcaataacagtgttaaattatgtattaaatatgcatttattaaatatatattacattattatttaagaccaattagctgttttcttatttacttttgtagccaaacctcaattgtgt

SEQ ID NO: 790503 - DNA, 523 bp, Homo sapiens
tactcatataaacaggtttaatgcaacatggaatgcaaaagattagaaccattaaaatatttaattcttcaactttaaaaaattaaataaaatcaaaataggataatgaccagaatagtgccattataatcacatcaaaaagcttccattaacattttatgaatttggcaatctagtacaatacattaagtattgtgtttcactcaattttgtgatactccatttttgaaaaaacttagaggcttcagatacccatgaaaagaaaaaaatcagggtaraaacacataggctgaggtttgctaattcactgtttacagaggaccttagatgtcccactataattgctcttaggtatttttaacaaatgaatagtcataattcacagaaaagacaagtggtactttttatctacatagactatactatataaactttcagtaaaacatttaaattgttttacttttaatcttgtcaagtaattttcatttcttctacttcaaaaggttgaccaggttgtttgcct

SEQ ID NO: 790504 - DNA, 619 bp, Homo sapiens
caggctttgagaatcatcagctgatgtgaatttgggcagaacacccaggtgaggctcaggttttagttacaatttcttaggaacgtgttcttattctacctaagcctctaagcaccaagacatcttctcttgcaatctgctctgagttcccactttcgcatagattttggcctgtgattttaccctccggtgagttattttatgttttaaagcatatttttaatgtctattaagtatttttagttatcagtgggagatgctgtctgtataacaatataccrttgctgagtgtaacattgtcttctaagagtttttttaaaaattgtggtaaaatatacaaaacatagaatttatcattttaaccatgttaaagcgtgcacttcagtagccttaagtacattcactatgttgtgcaaccatcatcaccattctcctgtagagttttcatcattcccccaactgcaactctatacccagtaagcaatagctccccattttctccaaaacccaggcccctggcaccattctacttgctgtctctatgagtttgactacgggtaccacgtatgagtggaatcatacagtatttctccttttgtgactgacttctttcttttag

SEQ ID NO: 790505 - DNA, 619 bp, Homo sapiens
caggctttgagaatcatcagctgatgtgaatttgggcagaacacccaggtgaggctcaggttttagttacaatttcttaggaacgtgttcttattctacctaagcctctaagcaccaagacatcttctcttgcaatctgctctgagttcccactttcgcatagattttggcctgtgattttaccctccggtgagttattttatgttttaaagcatatttttaatgtctattaagtatttttagttatcagtgggagatgctgtctgtataacaatataccgttgctgagtgtaacattgtcttctaagagtttttttaaaaattgtggtaaaatatacaaaacatagaatttatcattttaaccatgttaaagcgtgcacttcagtagccttaagtacattcactatgttgtgcaaccatcatcaccattctcctgtagagttttcatcattcccccaactgcaactctayacccagtaagcaatagctccccattttctccaaaacccaggcccctggcaccattctacttgctgtctctatgagtttgactacgggtaccacgtatgagtggaatcatacagtatttctccttttgtgactgacttctttcttttag

SEQ ID NO: 790506 - DNA, 612 bp, Homo sapiens
caatatagagtaacagggattagatttacttttccatctgaaaccaaataaaccagacaaaatatttgaagcaacaaaagacagcaatgcctgagagaaagggaacaaatgagcactttgattgctctaactaactgcatggagagagtttccaggctgtggctcagaaaaaaaaaaaaagacccaggctgtaactggcaaaatccctgaactgaggagatagagctataggtctggggaaatcaaggcaactggagttcacaggacagagtacttgagaaagaaccccagagatttacagagggtcttccttgagtatttcactgatcattacataaatgcaaggaagctactcataagttgaggaaaaggccatctgaaaggattaaagagaagaatgcctyaaatccacacagggctagggctattgcctgttcccctcagccagattggaaaatattacaattcatggggcattaggtagataactcagaagggatttacctcagagtcaggaataattagccccattctaaacaaagctctgatcccaactaacaaatattaaagctagacctgaaaagatcagactgtttccagatgacttaacta

SEQ ID NO: 790507 - DNA, 512 bp, Homo sapiens
ccaaaaataaaacggcttttctaccagggacccttaaatcaaccccaggatgagccctagctgctgttcccataccacgcccctctccagcaggaagtagccagaagtcgtcgcccaattccccgaaaggcagttagtgattccattcctgaggcaggaaatacttataggagacagaaagaaattattaggtagacagggtaaagagagtccccggcagaaaactrtccttctaacaaaaagcagctaagaaattttctaacctcatgcagttcaaagaaatcacttttcttctaacaaagaacagcctgaaagagcaggctgtaaaaacacagataaacaggttgggcacaagagtcggggagtctcctgggtaatcaccaaacttcacactcatacaatgggccccagtaaaaacagtgggccttaataagcacattcctttccctttaggcacactaagatagggaagctaaaagcggactctgggatgaggtgggggcgatacctgc

SEQ ID NO: 790508 - DNA, 579 bp, Homo sapiens
ttatataatctcttggttaaatgtaaatgtaataattggttttattatttaaatatagtctagttttcagaatttgaagtagtccaaatgtgataattacagccctttcctccactgagtttgctgtgataagatatgtagatatgtaaatacaatatgatgtgttactgaaggtatttcttatggtgttatttgatatatttttttttcctcaagattagggtagagaaaaggcctagatgtaagccccaagtgtgtatgtaaggggaagggtagatgtgaagctgggaagctatataaamcaatatgaaaaaggatcattttcattcttcccgaatcagaatgaaaaattaggatttttttttttttccctacaggaggaacaagtgaaagtgaacctatgctaagccatacggtcaggaagcatcttcggaaaactagacttgaattactacacaaagaatatgaggtaaacagtaatcaaagtttaaaattatgttagcagtgaattcaaggtaaaaactgacctacctcagtccccagacttcttagagtaaatatccaatgaaattttatttt

SEQ ID NO: 790509 - DNA, 595 bp, Homo sapiens
atatagcacatagaattatatagactgggaacagcagctcacacctgtaatcccaacactttgagaggccaaggcaagaggatcatgtgaacccaggagttccagaccagcctgggtaacataaggagaccctatgttacaaaattaaaaattraaaaaaaaaacaaacctagcccagcattgtggcacgtacctgtggtcctagctacttgggaggcagaggtaagagatttgcttgggtcagggaggtcgaggctgcagtgagccatgatcgcaccacagtattccagcttgggtgacagagcaagaccctatctcaaaactatatatatttatacttgatgatgataataagagactatgttagtggtttatgtatgtactgtaatatacttttattgttattttagcatgtactctttctatttatattaaagaaaaaacagttaactataaaacagtctcgggccactacttcaggagatatttcagaagaaggcattgttatcttaggagatgatagctccatgtgttattgaacctgaaagaccttccagtgggacaagatgtggaggtggaagacagtgatattgat

SEQ ID NO: 790510 - DNA, 582 bp, Homo sapiens
catatgccatggttgttggctgcacccatcaacccatcatatgggttttaagccccacatgcactaggtatttgtcataatgctctccttccccttgcccccaacccttcaacaggcccagtgtgtgatgttcccctccctgtttccatgtgttctcattgttcggctcccacttatgagtgaaaacatgcagtgtttggttttctgttcctttgttactttgctgagaatgatggtttccagcttcatccatgtccctgcaaaggacatgaactcattcttttttayggctgcatagtattccgtggtgtatatgtgccacattttctttatccagtctatcattgatgggcatttgggttggatccaagtctttgctattgtaaatagcgctgcaataaacatacatgtgcatgtgtctttatagtagaatgatttataatcctttgggtatatccccagcaatgggattactgggtcatatggtatttctggttctagatccttgaggaatcaccacactgtctcccacaatggctgaactaatttacactcccaccaacagtgtaaaagcattcctag

SEQ ID NO: 790511 - DNA, 588 bp, Homo sapiens
acaagctgacactttgcaccccttcatctctgacccaggagtctcgtgtcttctaccagcatccatgaaactgtggcaggtcaccttttgagcttgttagtagtggggtaagatctgagcctcttcacagttataatcaatacctgacaratatgagcattatgtgatcagaaaacctgcacacgaatgtttacagcagcactaattcataatagccaaaatctaaaaatcacctaaatgttcttctaatgagtaaattgtgatatatctacataatggaatatcatgcaactataaaaaaagaatgagctactgctatacccaacaacatggatagatctcaaaaacatgttgaatttttaaaaaagctagacacagaagagtacatgtttaagaattttgtttgaagttcaaaaacatataaaattgatctatagtgacagaggcttgaacagtggttatctttgtgtgtggacatattgacttggtgggacccgagggagcccctgagggctggaaatataactcgtggtctggatgggtggtggctctatggatatgtgattttatatatatatatgtgtgtaa

SEQ ID NO: 790512 - DNA, 402 bp, Homo sapiens
ctctaactgtaaccagtctaatcatggctttgctcacttcggcactggccctatagaagctctcccctgcagtcacttccggcagatccctgaaccacttctggtttggagcttcctgattcaggaattgctgtttgcacaaatacattttgaaaaattatgatgtaccaaagtttatctttwaactggtccaagtgcaaattgtcttatcttcttccatgattctaatattggtgactaattcttctggaaaacaaattggtgatggcactaaagccttcctctgtaaaacacagaaatgacaagtcctccatcccagatctactaatgtaccagcctcacgacaagtagtccaaatgaaccagggcctcttcaattcctccccactgccagaactctgtg

SEQ ID NO: 790513 - DNA, 516 bp, Homo sapiens
ggggcaaggggagggagagcattaggacaaatacctaatacatgtggggcttaaaacctagatgacaggttgatggctgcagcaaaccaccatggcacatgtttacctatgtcacaaacctgcacattctgcacatgtattccagaacttaaaatttaaaaaaaattttttttaaaaagcactaccctccaggatgcagtaatgcctgaagtcagtcaccattatatagtgcagtatccycaagagaatacctgggagatgaatccatggtgtgggagcagcagtgtccccacttgctatcagtcccagtgacccagttaaagaatttatgttttcatcctcacaaatgtagcccacagggtcgaaggtcttggtttccaacagggaaacatttccaccagggaacacagcaagagtcttcattgaactttaagctacctcatcatgcaggcactttgggcctttcatgccaagggccagcaggcaaggaaaggatcccagttggggtgattgact

SEQ ID NO: 790514 - DNA, 559 bp, Homo sapiens
atgagaacacatggacacagggaggggaacatcacacaccagggcctgtcggggggtggggggcaaggggagggagagcattaggacaaatacctaatacatgtggggcttaaaacctagatgacaggttgatggctgcagcaaaccaccatggcacatgtttacctatgtcacaaacctgcacattctgcacatgtattccagaacttaaaatttaaaaaaaattttttttaaaaagcactaccctccaggatgcagtaatgcctgaagtcagtcaccattatatagtgcagtatccccaagagaatacctgggagatgaatccatggtgtgggagcagcagtgtccccacttgctatcagtcccagtgacccasttaaagaatttatgttttcatcctcacaaatgtagcccacagggtcgaaggtcttggtttccaacagggaaacatttccaccagggaacacagcaagagtcttcattgaactttaagctacctcatcatgcaggcactttgggcctttcatgccaagggccagcaggcaaggaaaggatccca

SEQ ID NO: 790515 - DNA, 516 bp, Homo sapiens
ggggcaaggggagggagagcattaggacaaatacctaatacatgtggggcttaaaacctagatgacaggttgatggctgcagcaaaccaccatggcacatgtttacctatgtcacaaacctgcacattctgcacatgtattccagaacttaaaatttaaaaaaaattttttttaaaaagcactaccctccaggatgcagtaatgcctgaagtcagtcaccattatatagtgcagtatccccaagagaatacctgggagatgaatccatggtgtgggagcagcagtgtccccacttgctatcagtcccagtgacccagttaaagaatttatgttttcatcctcacaaatgtagcccacagggtygaaggtcttggtttccaacagggaaacatttccaccagggaacacagcaagagtcttcattgaactttaagctacctcatcatgcaggcactttgggcctttcatgccaagggccagcaggcaaggaaaggatcccagttggggtgattgact

SEQ ID NO: 790516 - DNA, 557 bp, Homo sapiens
gagaacacatggacacagggaggggaacatcacacaccagggcctgtcggggggtggggggcaaggggagggagagcattaggacaaatacctaatacatgtggggcttaaaacctagatgacaggttgatggctgcagcaaaccaccatggcacatgtttacctatgtcacaaacctgcacattctgcacatgtattccagaacttaaaatttaaaaaaaattttttttaaaaagcactaccctccaggatgcagtaatgcctgaagtcagtcaccattatatagtgcagtatccccaagagaatacctgggagatgaatccatggtgtgggagcagcagtgtccccacttgctatcagtcccagtgacccasttaaagaatttatgttttcatcctcacaaatgtagcccacagggtcgaaggtcttggtttccaacagggaaacatttccaccagggaacacagcaagagtcttcattgaactttaagctacctcatcatgcaggcactttgggcctttcatgccaagggccagcaggcaaggaaaggatccca

SEQ ID NO: 790517 - DNA, 621 bp, Homo sapiens
gtattcttcaggacttgtggaatgtgaggatcaggatccacttaatcctgatagaagttttgatgtggaatcagtaaagaaagaaatccagagaggaaggaagttggtaagtgtaaatgatgttatttcttatactggatgaacagaccctcaaggaatgcattccaaaggagtctatttgactgatacaccagggatagagaagcatcttggagagctggaagaagtaggaactgtattggaaacctcaattcaacttaacatttaatttttttttttttttttttgagacggagttttgctcttgttgcccaggctagagtgcagtgacrcggtctcagctcactgcaacctccgcctcctgggttcaagcgattctcctgcctcagcctcccgagtagctaggattacaggcacgggccaccatgctcggcaaatttttgtatttttagtagagacagggtttcaccatgttggccaggctggtcgcgaactcctgacctcaggtgatctgcctgccttggcttcccaaagtgctgggattacaggtgtgagccaccacgcccggccaacatttaatattttaaaataaactaccatatacttcaccagtaaagtgat

SEQ ID NO: 790518 - DNA, 572 bp, Homo sapiens
ggaatctgttttatagaccttgtagtttaagttcttttttttttttttcgagacagagtctttctctgtcgcccaggctggagtgcagtggcatgcagtctctgctcactgcaagctctgtctcctgggttcacgccattctcctgcctcagcctcccgagtagctgggactacaggcgcctgccaccaccccyggctaattttttgtatttttagtagagatgggttttcaccgtgttagccaggatggtctcaatctcctgacctcatgatccacccgcttcagcctcccaaagtgttgggattacaggcgtgagccactgcacccagcctaagttctcctttttaaagccttcccctgttcgaattccagtacagaataattccataacttcattaatcataacatgttggtataattcccaattttgactgtaaatactaatttaacttaactaaatgaaatctaatattgacagaaggtcagaggcctttgtgaaatagagtactcacaaatatagagagcagctttctgtgtaatgccagacactaggaaaactgcttccttttta

SEQ ID NO: 790519 - DNA, 634 bp, Homo sapiens
gaggcatgtagtaggtgttccttagatttgctcaggccaagagctctttagaagtaaaatatgttttactcctttaagggataggcctgcctatctcggtagttaggaaaacttgctagtggttgttacattttcacaagaagctctgcacaacagagccttatctcctggcttggtagctgagtctcctcttgatagtttccaaacagcttaaaatgcagggctgtgttaactgctgacggtgtggagaaaagatgtttaaccaggccagggtgacaactatcactgtttatattctcagtaaagttttaattatgaaaaaggatttgtgaagttggtcaagccatagccaatctggtgtgctttgaaagacttttgtatgtatggttctatcagggaagaggggcatcttaggatgtgatgtaggyccaggactccataggcctgctattgaagccagcctggcaaactgggcaatggcaaacctttgctgcagccctccaccttgtttaaccaacctccttgggagtgtgacctgtaaccaggtggcaatgttctgttttagcctctgccattttacagtggtggcctgggtgcagtcctgacttagggaatgagtcctttctggtttgat

SEQ ID NO: 790520 - DNA, 593 bp, Homo sapiens
gtttttgtcttccagctatacctgtttattaggtccctagaaactgcatgctttcctagtcttgctcttaaagggctccacctaggggccagtaatccaattgggagattggcaaatgaaaaatcctatagctactggatcttctgtgtagttatacatgtgttgtgtgtgtgatgtctatgaaaagctccaattagttgaccctaagaagggtaatcactagcatcaaatatttttaaaggggaaaaaaagctatggtaccttttggttcatgtgactttaatctttgagaaataaaaacaaagattattggtraaatgcaaatgtcatcaaaatgtaaattcttttttcctggagttagattgctttgaactagataaaatggtttaaacaagttatggaagatttctaaaaaattaatcttgcaaaagaaaatctgtgtgtgaacgttgactaaattcaaaagggttataaaaggtttttgcttttttttttattttcttgagacagagtcttgctctgttgcggaggcgtggtctcagctcactgcagcctccacctcctgggttcaagcaattctcctgcttcagcct

SEQ ID NO: 790521 - DNA, 614 bp, Homo sapiens
cctccaaccttctctttctaaaattgttgagctgttgtgagtcctttttattttcatatcaagtttagaattacttgtcaatttctttctttcttttttttcagatggagttttgctctttgttgcccaggctggagtgcagtgacgcaatctcggctcaccrcaacctctaccttccgggttcaagtgattctcctgtctcagcctcccaagtaacagattacaggcacctgccaccacacctggctaatttgtgtatttttagtagagatggggattcatcatgttggccaggatggtctcaaactcctgacctcaggtgatctgccagcctcggcctcccaaagtgctgggattacaggcataagccaccactcccggccccagttacttgtcaatttctaaaacaatgtgcttgctatgatatttattaaaattgcatcaactctatcatagattcaggaaaaattaatatcttaacattattgagtcttccagttcataaatatgacctatgtctccatgtacttaggtcttttaaaatttctttatcagtgtatagatcttccacatctctggttaaatttattcctgaatatgtttgttattttgaa

SEQ ID NO: 790522 - DNA, 631 bp, Homo sapiens
attgattttactttggttcataatatttttgttttccagtgccagcctcagttttccacccctaatcgtaagtgaatgattgacatccaaacatttaaccacatacggatgtctattatttaaaggaatccaaaataaatacttttatgaattaagtaaacatatagcactaaatagattttttaagttaaaattttgtcatttccttacctaacagtacatccttaattgtgattgtcacctacagcattttagtttcaatttttgtaaaatatatctattgctagccaattactcaagtttttaaatagttaaatcaaacaatgatttgaattttaaaaataagttcccttatgtctttatatgttgccatcacttgaatgattgatgactaagacggcaaagttatcaagagtctttaaatagcaattacaacyaaacaatcaattacattatttctacccagaattccataaagccacacagtgtccgcatctcccccggagatgtaccaggaaccttccagtccagtcatgtgatttcactcatattaagaatcaatttctggggatctcaagatgaatctaacaacaacaaactacactaattgcagagttggtaagtaaaagaa

SEQ ID NO: 790523 - DNA, 631 bp, Homo sapiens
attgattttactttggttcataatatttttgttttccagtgccagcctcagttttccacccctaatcgtaagtgaatgattgacatccaaacatttaaccacatacggatgtctattatttaaaggaatccaaaataaatacttttatgaattaagtaaacatatagcactaaatagattttttaagttaaaattttgtcatttccttacctaacagtacatccttaattgtgattgtcacctacagcattttagtttcaatttttgtaaaatatatctattgctagccaattactcaagtttttaaatagttaaatcaaacaatgatttgaattttaaaaataagttcccttatgtctttatatgttgccatcacttgaatgattgatgactaagacggcaaagttatcaagagtctttaaatagcaattacaactaaacaatcaattacattatttctacccagaattccataaagccacacagtgtccscatctcccccggagatgtaccaggaaccttccagtccagtcatgtgatttcactcatattaagaatcaatttctggggatctcaagatgaatctaacaacaacaaactacactaattgcagagttggtaagtaaaagaa

SEQ ID NO: 790524 - DNA, 636 bp, Homo sapiens
catagtcagttcacagcaaaatcctggtcacctgtactgcaatagtccatgacggtggtgaataagttgtcagcttcaatacagatttgaggggatcagaattgccactgtgctgaagaggctctgagtcatgtgctgsggaggtcagtgtgtcagagttgggtttcattcagagcaatccatttctacacagacattggtagaaggatggctaagggaggtgaccagtcacactgtgaactggccccatccacatccacagtttcctgatccatggttgtatgcgctctaagattcttcagactataggactttgaatgaaagatgaagtatagagattcccagaccatggtgggtgcttaactatttattggatggatggatgaatggatggacggatggatggatggatggatggatggatagatggaatgaaggaatgatgaaccaggctgctgactaaagaagaagaaacacccctcattctcttgggttgtctagtgacaagaccaaccacatgcaagaagaaaggagagtgctatctggagtgttagaaaccctctccctctgagtcccatgccaccagggccctgctggtggccacacagcacggttctacagagcagctggcacgct

SEQ ID NO: 790525 - DNA, 606 bp, Homo sapiens
gtggacgctaatatcatagtcagttcacagcaaaatcctggtcacctgtactgcaatagtccatgacggtggtgaataagttgtcagcttcaatacagatttgaggggatcagaattgccactgtgctgaagaggctctgagtcatgtgctgcggaggtcagtgtgtcagagttgggtttcattcagagcaatccatttctacacagacattggtagaaggatggctaagggaggtgaccagtcacactgtgaactggccccatccacatccacagtttcctgatccatggttgtatgcgctctaagattcttcagactataggactttgaatgaaagatgaagtatagagattcccagaccatggtgggtgcttaactrtttattggatggatggatgaatggatggacggatggatggatggatggatggatggatagatggaatgaaggaatgatgaaccaggctgctgactaaagaagaagaaacacccctcattctcttgggttgtctagtgacaagaccaaccacatgcaagaagaaaggagagtgctatctggagtgttagaaaccctctccctctgagtcccatgccaccagggccct

SEQ ID NO: 790526 - DNA, 558 bp, Homo sapiens
tgggatgtggctgcccacctgcaaagctatgtcctcgccacccaggtctgagttgtgcagagctggctccagtggctgtaggtgctacagtcgcagggcctcaggtcttcacaccccccatctgtgctgccacagccaatggcactgaagacaactgtcctcagatggggctgctggcctgggggttgccactgccaagggtgagctgtcaccttccaggatgctcaggttgggggagcctggtgtggccccaaccacagccctctccagcccctgctacctgcagcccatcacaggaagcttccataggcagggcccttggtttgcccctcaccttcttggtcttcaatgtgggsggctgagagccatcctgagatggaagctggaaggagagcaggaccccaggcctcacttgaatcaaccaactgtggtgagccagccccgcccctcccgcagcctgccttcgggcaaggccgccaccactcccctaccatgtccagtggtgcgccccacaacagggggcccagcttgtcaggggaaggactctgaggaatggcc

SEQ ID NO: 790527 - DNA, 585 bp, Homo sapiens
ttttagctcctggcacctcaccccttcctgccatcatgttcttcagctccctgaggagcctctggggtcccacggtcctggaatcactgagtgccgtgggagtgcagggtccagtgcgggagtcagagcccagtgcacatmgggagcacagccctgcagggggagctgcatcaggccaggacacccccacacccaaacactcacatcatctgggccctcctgggggcctgatggcaatagaggtggcctgtctgccttgggcaacccctcccagtcacccttagttctggcaggagtcccctggcctcagccccactcatcccaggaggataaaatgaggtgacacccttctgggacactgcagaggtcaagcccagtaccatgagaattagtggctgctgggagtcatggcagctggatggtggctggacgaaatccccagggatggtcctcagatcctcttccagggacccccaccctatttatgacctgtgctaaagctcatgataccccgttttccagaggctgaggccagtggatcctggctggacaccaagtccatgcccctccaccctcaggcagagg

SEQ ID NO: 790528 - DNA, 643 bp, Homo sapiens
ttctgcatgtcctgttgccctttcctgagaatccttcttgggccgtcttctccaccacttcatagactggatcacattagcaaacatcttatgttgttgccgtgtacttggtttgtggcctgtcttccccctagaaggcaggtttggggatggcaagggctcyatctgccctgaaagtcattccttgtgtggtgtctggaaggttcctccccaccaagagctgcctggcttagacacctcaccgcccagcactgtctttcactgggctccccacgccttccatattctccatcactggactttgtcgcctgctgctccctttgaaaccttttctatctttgtatcagcctggttaaactcttactcatgcctcagctgccccaagacctacacttcctcagtgaaggcttcccagcccctaggccaggtcaagccctctgttgttctctttcagggcacaatgtccttctcctttctagaccaccacagctgacattctgtatttgattttgtgctcatttgatcaacatctaaccctcccactaggtttcttacctcaccatcctcggtgtgaaatgccatctttgtgtggttttaatatgcattttggtgataactaatgagggcaagcactatttttcat

SEQ ID NO: 790529 - DNA, 643 bp, Homo sapiens
ttctgcatgtcctgttgccctttcctgagaatccttcttgggccgtcttctccaccacttcatagactggatcacattagcaaacatcttatgttgttgccgtgtacttggtttgtggcctgtcttccccctagaaggcaggtttggggatggcaagggctccatctgccctgaaagtcattccttgtgtggtgtctggaaggttcctccccaccaagagctgyctggcttagacacctcaccgcccagcactgtctttcactgggctccccacgccttccatattctccatcactggactttgtcgcctgctgctccctttgaaaccttttctatctttgtatcagcctggttaaactcttactcatgcctcagctgccccaagacctacacttcctcagtgaaggcttcccagcccctaggccaggtcaagccctctgttgttctctttcagggcacaatgtccttctcctttctagaccaccacagctgacattctgtatttgattttgtgctcatttgatcaacatctaaccctcccactaggtttcttacctcaccatcctcggtgtgaaatgccatctttgtgtggttttaatatgcattttggtgataactaatgagggcaagcactatttttcat

SEQ ID NO: 790530 - DNA, 505 bp, Homo sapiens
tatatatatatattcacttaatcttaggacaactttatatggatttggcatgattacacccattttgcagacaaggaaagcaaggactagtgcatttaaatgatgtgcccagtatcacagtctttatgtagtagttcatcaagtcagtttttgttactccaaatatcaaattagttctctagtctccatttcttcagtcagaaaaagaattaaataggccaaataatcccaaaggtscattggaaacttgagaatgtgtaactattctataagttctattagacaccaagtttatctttctaaaattaatatagttgctagacactgcattaatcactattcagttattattttgcttctttttatagaatttatacttgattctggcatactgtctggatggctcaaaagtctattaagaaaactctaatgtgatacggtatttttcttacaaacacgtatctctatcaagcacctatgaaagtacatatattgatcattatgt

SEQ ID NO: 790531 - DNA, 565 bp, Homo sapiens
tttaaaggtagaaaccagtacagctaagcccagtgtcttgatgcataattaacgtattgctctttcccctttggaaagatcctctctctcaaaatagggactgtcattttctcaagtggaaccctaataggattcaaagtgttagatgtattgtgctcttaagcattactagaatttagaattgtcatagtaaagcaggagtagayaaaaggaaactggcaggagtagacaaaaggacagattgaagtaggacttgctgctttgtcatttaacccagttccttctttcttagtgaggagatcttagtgaatatagcaatgacagttcagtttatcttgtagttgtatcttctatcccatttaggcatagcagaggtgtggagttggtttttgtgaatctgtagtacttgaagcccacacttgaatgccaaagagagatttatggccccttggggtgggagcattgaggacaatctaggaactgtcttgggcctctctgctctaaaaactgagggttactggttcattcagacttggtcaagttctcagggatcatttcatgatca

SEQ ID NO: 790532 - DNA, 518 bp, Homo sapiens
tattgtttatatataccacattttctttatccattcatccactgattgacacttaggttgattccatatctttactattgcgaatagtgctgcaatcaacacaggtatccctttgatatactgatttccttgcctttggataaatacccagtagaggtattgctggatrgtatgacagctctatttttagttttttgagaaatctccatactgttttccataacagctgtactaatttacattcccatcaacagtgtataagaatttccttttgtctgcatcctcaccagcatttgttttatgtcttcttgataacagccattctaactggggtgagatgacatctcactgtggttttgatttacatttccctgctgattagtgatgttgaacattttttcatatacctgctggccatctgtatagtctccttttgagaaatgtctactcagtctctttgcctactttttaatgggattatttggggccttcttctgttaagttccttgtatattctg

SEQ ID NO: 790533 - DNA, 518 bp, Homo sapiens
tattgtttatatataccacattttctttatccattcatccactgattgacacttaggttgattccatatctttactattgcgaatagtgctgcaatcaacacaggtatccctttgatatactgatttccttgcctttggataaatacccagtagaggtattgctggatggtatgacagctctatttttagttttttgagaaatctccatactgttttccataacagctgtactaatttacattcccatcaacagtgtataagaatttccttttstctgcatcctcaccagcatttgttttatgtcttcttgataacagccattctaactggggtgagatgacatctcactgtggttttgatttacatttccctgctgattagtgatgttgaacattttttcatatacctgctggccatctgtatagtctccttttgagaaatgtctactcagtctctttgcctactttttaatgggattatttggggccttcttctgttaagttccttgtatattctg

SEQ ID NO: 790534 - DNA, 648 bp, Homo sapiens
tacaaaacactgccaaaagaaattataggtgacatcaaaaaatggaaacacatcccatgtccatggatggatataatcaatattgcaaaaataaccatactgccaaaaaccatcaataaattcaatgaaatttccatcaaaataccatcatcattcttcacagaactaaaaaaaaaaaatcttaaaaatcatacagaaccaaaaaagagcccacatagctaaagctagactaagcaaaaacaacaaatctgaaggcatcacattacccaacttcaaactatgctacaaggttatagttacaaaaacagcatggtactggtataaaaacaggtatgtagaccaaaggaatagaatagagaacccagaaataaagccaattacttacagccaactgatcttctacaaggcaaacaaaaatataaaatggggaagwgacaccctattcaacaaatggtgctgggataattggcaagccacatgtagaagaatgaaactagatcatcatctctcaccttatacaaaaatcaactcggggtgcatcaaatacttaaaactaagacctgaaaccataaaaattctagaagatgacactggaaaaattcttctagacattggcttaggcagagttcatgaccaagcatctgaaag

SEQ ID NO: 790535 - DNA, 604 bp, Homo sapiens
aaggataagaactaaaaccataaactctgagaagaaaacatgggagaaagcttcatgacactggatttggcaatgattaattagatatgatgcccaaagcacaggcaacaaaagaagaaaaatagacaagcaggcttcatcaaaatcactcttgagtgtcaaaagatactactgatagagtagaaaggcaaccagcagatgtggtggctgacgcctgtcatcccagcactttgagaggctgcggcargtagatcacttgaggccaggagttcaagatcagcgtggccaacatagtgaaaacctgtctctacaaaaaacacaaaaatgaacggggtgtggtaggacacacctattgtcccagctacttgggagtctgaggtgggaggatcacttgttcccagtagtttgagctgagattgtgccactgcaccctggcctgggcaacagagtgagaccctgtctcaagcaaaaaaagaaaaacagaagcaagtcaagtgtccactgtgagatgaacggatacacataatgtggtacatccacacaatggaacactattccgccttaaaaaggaaggacattctgacataatctgtaacacggatta

SEQ ID NO: 790536 - DNA, 534 bp, Homo sapiens
ggtgtgggtcacagagatcacatgcttcaagggcaataaaatatcacaaggcagatgggggcagagtgagatcacagtaccagagtgaaattagaattgctgatgaagtttcatgtcccactgggcacgcattgtcattgataacatcttatcaggagacagggtttgagagcagacaaccggtctgactaaaatttactaggcaggaatttcctaatcctaataagcctgggggcgctacaggagactggggcctatttcatcccttatctacaaccatataagatagacactcccagagyggacattttagcgacctccgcctaggaatgcattctctttctcagggctgttgcttgctgagaaaaagaatccagcgatatttctcctatttgcttttgtaagaagagaaatatgactgttctgtccagcccctcaggcagtcatgcccaatggttatctcccttgttccctgaaaatcacagccatcctgttcattttagatgcccagatttcatattgttcaaacacaca

SEQ ID NO: 790537 - DNA, 516 bp, Homo sapiens
attctaatctacaaagctcatgaataaagaaaaatacaaaaacctcaagttttacaaaaaaaaaaaacttttaagtctacatacattaacaataaaaccatttcttccagataacaggtaaaagtataaaggcataccactgactttttttttctrgatagccaggaatgaacgaatgtttaatatctacgacgcttattagggccttcaaagttgcccccttgacttcctctaccaaagccaccaggaccaccactcacaggacctacgccactcattggtgcttgaggggtttcagaacctgttctactccccataggtgaacccatctgagatggtggtccttgaggaaatctgtcattgtgctatgataccacacaataaggaatagaatatgaagtccatttggaacacgccaaatataagtgacaagaaaaattggcaaaatcccaagtggtggtgtcatgaagttcggcagaaagcccagcagaatcaggatcacacatagaaggaaga

SEQ ID NO: 790538 - DNA, 668 bp, Homo sapiens
aaggaggtgcaaacttatgtctacacaaaaacctacacatgaatgtttatagcagcttgattcataattgctaaaacctggaagcaactaagatgtcctttagtatatgaatgggtgaactgtggtacaaccaaaatattattcagtgctaaaaagaaatgagctatcaacccatgaaaagacatagaggaaatttaaatgcatattgccaggtgactagaagccartctgaagaggctgtatactatatgattccaactatatgacattctggaaaaaactaaactatggagacgatagaaggatcagtggttgccaagggttaggtggaagggataaagaagcagagcacagaagatttttaaggaggtgaaaatactctgtatgatactataatcataggttcatgtcatagatttgtcaaaaccctcagaatgtacacccagagcaaatctaaaggtaaactatagactttggttgataagcacgtgtcaatgtagcttcagcaattgttataagtgtatcattctggtaaaacattttgatagcaggagaagctgtaggcatgtggcacagggtagacgggaaatctctgtaccttccacacaatcttgctgtggacctaaagctcttttgaaaaaggctactaaaatattgaaactttaaaa

SEQ ID NO: 790539 - DNA, 668 bp, Homo sapiens
aaggaggtgcaaacttatgtctacacaaaaacctacacatgaatgtttatagcagcttgattcataattgctaaaacctggaagcaactaagatgtcctttagtatatgaatgggtgaactgtggtacaaccaaaatattattcagtgctaaaaagaaatgagctatcaacccatgaaaagacatagaggaaatttaaatgcatattgccaggtgactagaagccagtctgaagaggctgtatactatatgattccaactatatgacattctggaaaaaactaaactatggagacgatagaaggatcagtggttgccaagggttaggtggaagggataragaagcagagcacagaagatttttaaggaggtgaaaatactctgtatgatactataatcataggttcatgtcatagatttgtcaaaaccctcagaatgtacacccagagcaaatctaaaggtaaactatagactttggttgataagcacgtgtcaatgtagcttcagcaattgttataagtgtatcattctggtaaaacattttgatagcaggagaagctgtaggcatgtggcacagggtagacgggaaatctctgtaccttccacacaatcttgctgtggacctaaagctcttttgaaaaaggctactaaaatattgaaactttaaaa

SEQ ID NO: 790540 - DNA, 591 bp, Homo sapiens
tatggccatgaaaccactaccatagtcaagatactgaacatattcgccacactcaaaactttccttgcatccctttataatcactacctgtccccaggcaaccactggtctgctgccaacagttgcttcacatcctcaccaacattcagtcagtcactttaattttaggcattctaataggtacatagtatctcattgtggttttaatgtgcgtttccctaaagactactgactttgagcattttcctctgcttatttttcatgtgcacatctycactggtgaaatgtctgtttgaatctttagtccatttttaaaattgaactgttttcctatttttgcatcttaaatgccctttacatattctggatgcaagatatttatctaatatgtgatttgcaaatatttcttcccagtctgtgactttttttttccattgtattaatggcatcttttgaagagcagaggatcctgaatttgatgaagtcctatttatcaatttttttcttttatgaatcatgtcaaatctaaaacagctttgtctaacccaaagtcacaaagattatcttctatgggaaaacattatttgcaca

SEQ ID NO: 790541 - DNA, 604 bp, Homo sapiens
ttaaaattagtagcatttgtaccagagtagattatgggtattttcatctgttatattacatgttcatattattcattttaggataggccaaaactcacttctaaaatcttcaaaaattttgaatagtttcattttttcaatacttaagccaaaygacaattttatagatgtgaatatatgttttttaaagttaagtccttcatatcttttcttagtttaactccccaaagaggaaaatgtctctttaaaccagtagttaaaaagatggagtatgtgatgttcctttctctgtactgagttctgaatgtttaatccagagcatggatcactgactgcgttctctgactgtggaatggtattctttcatgcaaagtactttcaaaacttcccataaagaaactaaactagagattgtctttattaattaatggaactctgggtatgattaagggaattaaattagaaagtagaataacctagttaaaatcattatattagttatacatgagagtcagtgaacgatgacttgatttttacatgacatttgaattctgtcactatctgattcttgacctaaaggtttctttgctaaatctgatattta

SEQ ID NO: 790542 - DNA, 472 bp, Homo sapiens
tagttcacaattttgcatacagttttttaaaatttattcatagatatttcattttgatactattttaagtgcagttttccctcctcagatgccaggactgttgctccacaaaatcagagtgtcccactccagtagccacatcttcaccttttttccagtcagctcctctgggatttcacccaacttttccaaatatattataattagggttgtgatttattctttgatccatgggttatttggaagtgcattatttggyttccaaatatgtgagaattttccaaatacctttctggggtttgttttttttctaatttaatttttttgtaatctgagaatatatttgacatgatttcaaccatttaaaatgtagtaggcagagtaatgtccctccacaaagagaccatgtcctaatccccagaacctgggcatactttactttatgtggcaaagggggattaagtttccagat

SEQ ID NO: 790543 - DNA, 596 bp, Homo sapiens
actatggaaactccgttatgcttgcagtagaaatgctgccaacttcttccaaagctaaatttgttaatgtgtaccttttccggcttcctcaatgacttgcctcactgctttctttaaactatttgcccgcaacatgatttcccttggtttgacggctttctgggaggaaggttttgtaacgtcatccccaagctgctctttgctttcacccagggactcttcactggacgattccacagcatcttcttccacaatgagagggctgaggccagggagaacaggcgcagcctgggaatctgtgtgcaaagcctgcagcagttgttcgagcttctcgtttaggactgaacactgagaggaaaatatggcaatgagaaaaataytcaaaaagaatcaagatcagcagacaaagtacaagaaatttttatagagatgttttgaaagtttaatcactagagagaaaaacaccaaaattctcacctttaattttgtagatgttttggttctggaagcagctaattttaaaatctccatttagtagagatagacaactataatttaaattatggcttttgatttagagggacaatggctttatt

SEQ ID NO: 790544 - DNA, 587 bp, Homo sapiens
cactcaacttgtgagggattcacctatattacctctgcacctgtaataagactaagaagacggtggctgcacatgtagttaacaccgattgtaccgcgacttcgcctttccgcagcctttgtaccaacctgcagagcccttttgagccaagagctggacttgrggagtaaagaagctcattgtaaacgccaggaggaatttcttcagggtgaagttgacttccaatcggcttcattctaaaggaaacatgtggagcaaacaaacgggaactttctttctcatcttctgcatttcaagcctaataaaattagacgtttccactgtcctgctcagtctcgaagctgtcggcagattccgcttttaactctcaacacagacactcaggaaatcgggaaatccctgcagctccctcagaagctatcagtatcagcggttcccgaacccgcaaacaaaaaacgcaacatcacgtgctcctccaaagagcctagcctgtctatcgagcgatggaaagagcggcgaggcgctctcgcagccgtggcagtctggacgaaaagaaccaggtccctttcctggtctagcctacctcc

SEQ ID NO: 790545 - DNA, 587 bp, Homo sapiens
atattctctaaaaggcaagttttccagagggggtatagctcagcggtagagcgcgtgcttagcatgcacgaggtcctgggttcaatccccaatacctccaggttttgttttcttccccgggcactagtgagaagcggtccatgatattccccaactttaaatttttctgtctgtcaaggtgaattgtgttggcctctgcatttctctctcatacacagaggtgactcrtgtttattcctttgaatctatttgctgcttaggattatccacttatattttctaagcagtccaccaatcactaacatgaaccacgcacgagggaagcaagcagtattcctggccatgcaaccaatttctagttgtaaatgaaatcatcagaaaccatagaactgtgtggcccaagtctgatttcagatcagaagctaaaaaggctcacgtccttttctgtttcttcttctaactccctctaaccaggttgagaagccctacaagctttcactaaaagattacactgccggtggttgacgatttgatgtgctggtggtcactttttccattagagacccacatagtttgaaacttaaact

SEQ ID NO: 790546 - DNA, 545 bp, Homo sapiens
catttctctctcatacacagaggtgactcatgtttattcctttgaatctatttgctgcttaggattatccacttatattttctaagcagtccaccaatcactaacatgaaccacgcacgagggaagcaagcagtattcctggccatgcaacmaatttctagttgtaaatgaaatcatcagaaaccatagaactgtgtggcccaagtctgatttcagatcagaagctaaaaaggctcacgtccttttctgtttcttcttctaactccctctaaccaggttgagaagccctacaagctttcactaaaagattacactgccggtggttgacgatttgatgtgctggtggtcactttttccattagagacccacatagtttgaaacttaaactatttaactacaaacacaaggcaaatgatgaaaagatagcagtcacctcagctgaaatttggtggaagtaaaaagtacttctctgggtcctcaaggaagtttctggtctgagatgcaaatactctgaactccaggaaacaagatcagtataggagaa

SEQ ID NO: 790547 - DNA, 601 bp, Homo sapiens
cggatccttttctacctgattgtacttactctccagaaataacctccttctaagctagggaacaacccatacctccagattagagagctctttgtagagtttctgattctggtattacagtactaagcagaaatccacagggaaatactctgcaagcatgttaatactaacttgttaaaagaaaatctgcttttattttcatctttatttcatgccaacaaagcaaaaaaaaaaaataagttactaaacacccagaaggcagaaaagtgacctctmtccatctgcaggagccaagcaagcgtgtgggcttccgtatgcatcctttcttttactcactttctaaatgctgtaacggtccaccatctaccaggtggtcacaagtcatcgataaactcaatctgaggtcagcccacacgacttgtgagtggttcacttatattgcctctgcacctgtaacaggactaagaagacggtggctgcacacgtaaatacacagattgtacctcgacttcgcctttctgcaacagctgtgccgctctgcaggtcctgagccaagagctggacgttaggagtaaaggagctcgttgcaaacgccaggaag

SEQ ID NO: 790548 - DNA, 638 bp, Homo sapiens
actgcacacaagagagaagtcttataaaagtaaagtatttggggaagtctgcattgagagctcacacttcattaactatcccaacattcatacaggggaaagacttcctcattgccctgaatatggaaaatgctttactcaaaatgaaggtcttatttcccatcagaacctttttagacattaaaaagaaaacccatatcagagaaaaaagatatatacctctgatgaatgtgtgtaaaactttgtgtttctctagtaattgacctttagagagtagatatagaagggaaatattttgaatataacaattttgaaatgtttgaatggcagcttcttgcctcacttaacattagtaaatttgtcaagagcatgcccaggaaatgggttggctagaacttgttttagcagaaataaatgtgttttcagtcattatcctccttaaggaaagggtcagtctcacccagtgaccasttctaagttcccgactcttagatggccaatgaagagtattttgtgtgagcctgtagatgtttgaaaactttgatattcagagggtaggcgaaatggtcactcactcctgagacttcctttgtgaaaacagagctttgtaatatttgtgattccctgctctatctttc

SEQ ID NO: 790549 - DNA, 555 bp, Homo sapiens
ataaaatactgggtatcagttgaaaggtattaagacatcaattgtcggctgggtgcagtggttcacacctgtaatcacagcattttgagaggctgaggcaggaggatcacttgagtcgaagagttcgagaccagcctgggcaacatagtgagacccttgtctctacaaaaaataaattagctaggcgtggtggtgcaggcctgtaatcctggctacttgggaggctgaggtgggagaatcacttgagcccaggaggaataggttgcagtgagctgtgttcatgccactgcactccagcctgggcaacagagtgagacccctcctcaaaaaactaaaactaaaactaaaataaaaattaaaaaagaaataaattgttttcttgtctctgttcaaaacctggaccactatgtgtagtcctrttcccagactgtcacacagatctagtgatgttggtacaaattgagagaaagggaaccagatggttcttcctcatctttgtatgcatgtagctggcatagtgattggcatttgcattccataaatgtttattgaaat

SEQ ID NO: 790550 - DNA, 656 bp, Homo sapiens
gcctgtagtctgagctattcaggaggctgaggtaggaggatcctgtgagcctgggaagttgaggctgcagtgggtcatgattgcataactgcactccagcaaaagaaaatttgaaaatgtgctcagtatcattaattagcagggaaatataaattaaaaccacaatgagataccactacaaatccacctgaacagctaaaatattttaaaacacatatgctgtaccaagtgttggtgyaatatgtgcggcaactagaattctcatgcattgctgctagaagtgttaattagcacattcactatggaacattttttggcattatctaaaaaactaaacatatgcctactagcaattccactcctagaaatgagggcatttgtccatgaacagacatataccaccagaacgtttagggcagctttattcataacagacaacaatttaaaaccccaataagtgctcatgataggagtctcttcatatgaagttcaagaacaggcagaattaatcaatgcttctagaaatttggaatagtgattttttctaagtaacctctgggagtggatactgatggaaagagacatgagacagccttcctggatgctgaaaatatttttcctcttgatctggatggtgggtacacacatgtaacaat

SEQ ID NO: 790551 - DNA, 581 bp, Homo sapiens
tagagtcaggggaccagtttctcctgaggcaaattcactcatgtgtgaaagtatatttcagaggtgctttgtgtattaaatgttataagttagtaggtgcccaggaaatgatattcagatgtgaactggctataagtgcagagcatgttttgaaggagrgagctggtaaaagcatagcgtcctggaaacgtaatagtccaggcaataggtagtgggtgaataaactaggaaaacagcagtggggaagcaagtaaccaaaagattcagaaacattccagagatctaaaagacaggacttgataaccaacaggacgcaggtagtgagaacactaggaaaatagaaatgcaatcatggagtcctgcgagaataagaagtggacaagtaaaaacaagaatagaaacagaaggcaattctatagaagaaaaaacaaatgtcttggaagcttgagaaaaattaagatcatgaatccatagaccctattaggtggaaagtaaagctgcaaccgtgtgaatttgatcaatgtcagtaacatgggtaatttgggcaccaggaacacttgtctgtccacagtatgtaggag

SEQ ID NO: 790552 - DNA, 581 bp, Homo sapiens
tagagtcaggggaccagtttctcctgaggcaaattcactcatgtgtgaaagtatatttcagaggtgctttgtgtattaaatgttataagttagtaggtgcccaggaaatgatattcagatgtgaactggctataagtgcagagcatgttttgaaggagggagctggtaaaagcatagcgtcctggaaacgtaatagtccaggcaataggtagtgggtgaataaactaggaaaacagcagtggggaagcaagtaaccaaaagattcagaaacattccagagatctaaaagacaggacttgataaccaacaggacgcaggtagtgagaayactaggaaaatagaaatgcaatcatggagtcctgcgagaataagaagtggacaagtaaaaacaagaatagaaacagaaggcaattctatagaagaaaaaacaaatgtcttggaagcttgagaaaaattaagatcatgaatccatagaccctattaggtggaaagtaaagctgcaaccgtgtgaatttgatcaatgtcagtaacatgggtaatttgggcaccaggaacacttgtctgtccacagtatgtaggag

SEQ ID NO: 790553 - DNA, 581 bp, Homo sapiens
tagagtcaggggaccagtttctcctgaggcaaattcactcatgtgtgaaagtatatttcagaggtgctttgtgtattaaatgttataagttagtaggtgcccaggaaatgatattcagatgtgaactggctataagtgcagagcatgttttgaaggagggagctggtaaaagcatagcgtcctggaaacgtaatagtccaggcaataggtagtgggtgaataaactaggaaaacagcagtggggaagcaagtaaccaaaagattcagaaacattccagagatctaaaagacaggacttgataaccaacaggacgcaggtagtgagaacactaggaaaatagaaatgcaatcatggagtcctgcgagaataasaagtggacaagtaaaaacaagaatagaaacagaaggcaattctatagaagaaaaaacaaatgtcttggaagcttgagaaaaattaagatcatgaatccatagaccctattaggtggaaagtaaagctgcaaccgtgtgaatttgatcaatgtcagtaacatgggtaatttgggcaccaggaacacttgtctgtccacagtatgtaggag

SEQ ID NO: 790554 - DNA, 657 bp, Homo sapiens
acggttttcaaaataataaattctctttataaaatttgtaaattgctatctcctacacttgccaagctagacagtggactcaaggaaagaggcaacattaagatatatgactgtgaaatcttaatataaaatgtaactgacctgtcaaaagaacgtacaaaagatgaagatttatttatatggagatctctcgttagatgccaaagaactgcaaacttggcatgtgcttccatccttattttctgaggagaaacatgggagcttaaattatgttcttctctcttgaagatactatgattttagtaaaatcagagtactatttaggagtactgtattacgttcaacgtccacaatattcaaacacacattgcaataaactttatttatattctttatggcagtagraacacagaaaatatgtaaatatatacagaaatattgaacttaaaaggatcatctcatcctgtctcataaataattattcctgagttcagactttaagtaattagtttactatattattgtataacaggagaaaaaagttactaatgtacatatatctggagtccagaaagcacttcctccttcattttaatataaacatttagttatcaaaattgatttcattgcactatatattttttgtcccagaaatga

SEQ ID NO: 790555 - DNA, 591 bp, Homo sapiens
ggtaatccttggctctctatttctatttaaatatgaggaataatatagctaatatttacacagtgattattaagtgctaggcattgctctatgtgaattacatattatcagctgtaatatacctgataattctcctgcctcagcctcctgagtagataggtctacaggcaaatgccacmacacttcactatttttattttttgtagagacagggtctcatgaggtcttgaattcttggcctcaagcaatcctcccgccttggtctcccaaagtgctgggattatagctatgagccactgtgcctggcttcaacatgccatgttaaatcaaatgttctttactgcttttaagtagtccaggatttaaattttcaatgtgagtgatatctactactgaatcttcacatgcaaaataatgtaatatggtgtgaatgtttattttgattaatttaaaaatgtaatgtaaaatcagcacaaaatcaggaattgttaggtggaaaaaatcatatattttatataaatgtaagttatataatagccttactattctaatgtgccatgatttgttttcaatatagagcatttctcttga

SEQ ID NO: 790556 - DNA, 611 bp, Homo sapiens
tctaggcagtaaagagttgtgaagacagacaaaacacacaaaaagcatggacgaccaaagtgtacatatgtattactgcctgagtgggacactgtatgatgtgtaagacaatggtactagtcctgattcctttgatgaattcaaagttttggacagtattttgattattagctcatccttctttgcctactaacttatatacaaccatctcaatttgtaaggggaaaaacatcttgttaaggacaagggaacatgactttatgaattcaaatagactcttcaaatataaagctgctgaaatttcttcatacaatacacaactaatactgtttatatttttattgtccatttacacaagagattttagtttttaaattcaggacatacatacaacttggtaatacttatacatgacaaatctccctccattttttccccaatcatgaccayagacatcaaatacctaccaagaagccatgcataaagtcttcgattcagagacatatccctccttagcactacatgaagggctgctgacaagatcctgatcatatccggtcgagtggcctgaaagagttaggaatatggttgtacttagcaatatacaatat

SEQ ID NO: 790557 - DNA, 563 bp, Homo sapiens
ccctccttagcactacatgaagggctgctgacaagatcctgatcatatccggtcgagtggcctgaaagagttaggaatatggttgtacttagcaatatacaatatatattatttttttcctctttaaaaaatgccctgaaatatgcttagaatattagggtgtatggagtactttcatggattatttcaaacacaggatattacttccattttacagattaggaaacaggaagaaagttaggtaacatggctatttagctgcataactgaaactataacttaattattttaacttacagtttaaagttctttgtctatataataaaagcaaattctgacataaaacaaataaaatgaagcaagatgggacagacacaagaaaatgatatgccattagtctttcacatttataaygttgtcaactgactataaactcctgagaaggttactatcttcatccactctttattctttttaaaaatttttatcttgtagtattttaaacatatcaaaaaatacagaaaacaaaataataaaccgttttctaccaatcatccagcttt

SEQ ID NO: 790558 - DNA, 314 bp, Homo sapiens
aagaaaggattgtggaactttatagccagttgatcagaagcacaggtaaaacaaactagggcttgtgattggcatcaaaacaggaggacagtcttatgaggctcagccctcaacctgtgggatctgatactatctscaggtagatagtgtccaaattgaactgcagcacatccagctggtatctactgtagaactgcttgcttgctggtaagggagaaataaccacttgttttagggttatagaaatcttctgcattgattgtcgtggtgagagcagaggaaaaactatctgtgttttcttcccccacacatct

SEQ ID NO: 790559 - DNA, 571 bp, Homo sapiens
tccccgcgcagctcccgactccccgtaaaccagagggcggccgaccagcttcgcagctcctggcggggccggagcggcaacacccccgacgccacagcagtcagactcgcaaggcgtccccgcggctcaggacctagccgggccgagaaggatgctcggagccggctaccagcctagcggccgcactgggggcagggacgcttttacctgctgctggctcggccgcttctcgccggcgcagctctcctggcaaccacggcagctacaccgagaccgggagccgaagggcstagtgacagctcccagagtgcaccgtgctcgcgcccacgccggcgtcgacgtctgaggccttcgatccccgcccccgatcggcttcctgcctcccggcgctagctgttgccacagcgccctcaagtggactgtcgcgggaagcggccatggctaccaatttcaggagtggctagaaagggggttagcagatgttttcatttgaagagataataggaactgaaaacagcttttaaatattatttgaatagtttctcaatatttcatatgagtaacctgcatc

SEQ ID NO: 790560 - DNA, 547 bp, Homo sapiens
aatggagaaaaataattcacttaactgagaagaaaaaaaaatccaagaagagaaaaaaaaaggccttttaaatatacctaaaacttgagtatccacttttaattaagctgcgcactctttaagaatatccttttaaatcccatgttactagactttagccatgccagcaggtaagatttttagctttagaactttacaaaaactaacctcacaagagaaaccaataagccttaattaggttatgagttaaccaccagtgtatgaggtattttcaaaggggtgataggcagcttttgaaagcatcattgcaatattgtgactgagatagtgaaagagatccaacccaaccaacttcattttatttccagcccccaagctgtccttgcttatcccttttgccagtttgcayaggaagacagaagtcaaaagactgactggtaagcaaacaaacaacaacaacaaaaaacttttattcttttgccagcatgtcaggctttggggtttccttccccttagctcaactctaagccaagaattttaagttttg

SEQ ID NO: 790561 - DNA, 673 bp, Homo sapiens
aggtcctttaatgagaagggagcttgaaggggccccaaacaagggggatcctcaaatggttcccctggaagttgtttcttggcttttggggaattattctctttgagcctacccaatatgattgctaaaagggctcagttgattctgtaacactttaaaaggtctagtaaaaatgccacgtccttgtgtcaaaaacaaacaaacaacaaaaaaaacaccttttcttcaacgttccagggtcaaaggagtccttatgctttgtaatgcactccagsgaagtgcaggctgaagatggtgcccactagaaagataagtgacaaaaaggcatccctttagtctccttcctttggtgtgacccagggtggataggaagacagaagaggcatctcccctgctgtttcccctccatggttcctgggtcctggcctcttgttgaatgtgccactcatgcttgcaggcatggcccccagccatggaaccagagacactaagctattggggctattcacactcacccaagtggctctagtcctgtgcctgtgatttccctttgacttcctagacttgtgtgaccttcctggccccccaaaaaatggatctcaagaaaaactatgtaatagttgggaaaggctcctttaatggaggggttgtactagattgaactctgtatcct

SEQ ID NO: 790562 - DNA, 636 bp, Homo sapiens
tcagacatacaaagatgtcatctattgaactatagtgttctggtgatactttctgttttgtttttttttttaatctgttgcttattgatggaatagtcattgcttaagggcaaatagtggttttgcccttccattatttttcttctaagtcagagattcagtaaagctaacattttactgaatactttaaaaatacggattttaaaagctacagtcaatgagaacctctactaaattttaacctcactcaaattaraaaaatcttctaattctgtatgtgagtgctaaaggaaaccatgaatctgatattgaaaatcatttttgaaccacagtattttatgactgcatgaaagatctgacattaaactatgtaagttgctctcttggattggcataaaaattgtgtccataaaaactatgatttgtgattatttctcatctggagtgtgtccatgttcatgctactgatggagttgaggacatactatcccaaagtatggcaccttggcattttgaatatgttagctgaaggaatctgagaaacggcatgtgcagaaaagaatttgacttacccctgaagcaagtcataagcatgggaaactggaggaaatttatcaaggcttgctccttcagatt

SEQ ID NO: 790563 - DNA, 515 bp, Homo sapiens
tggggttcatgctggtcactctgttttccctctccattgccaccatattttcttcccacctttctcttttctcatctttgctctggacagcagattcctatggactgcatcacccagtatcccttgtcctctggcttttggttgggtttggccaataaaagtcaccaccagaagatagtagggtagaaggaaaaacagrtcaaagtctttcttacctgctcccgccttccctgatctagcaacaacttcagtctctgggaggcagcctctgctccatatctacagccatcgtcaggcactggtaatactattttgtctcttatactttaaaagtgataacagcttcctgctctcaatagtctgagtacctcaatgtactttttgttgttctgttttgtttttccattggctctgcccatatctctataagtagtcctttaattaagatctttttatttctaccatctgagggatttctatatccttctaagcctctcaatttcttactagatatg

SEQ ID NO: 790564 - DNA, 609 bp, Homo sapiens
ccagtgtgtgtttttaagccttcaccatttgagtctttttcaaatatgcatgtgtatgttcttaatgttaatatttactgcctctaacccaatttttctcttcatgtaatttcctaggtgacaatttgttcattatcttccattttaatccaatagataatattcaaatgcaaactttttcaaacttgcttttactgtagatcaattattacattttttaataccctggtatctccttctcaaaaaaaaggttttkccaccatgagaagtttcaaaatacaagatgcagcaaattgactttatccagagtatgacgctgcaacacaccactgttgcgtgtgatatcaagcaggtatttcccctggcagtggcatacccatgattggaatgttgagtggatacaaagcagactatatcactggtaaccttattctacaacttgatgtatgcacattatgggagaagaaagaaatgatattcatggtgattcttacaatttactgttcaaaaatattatttgaagtactctggggaggagcttgattagaccaaatagatagaaaatgtaatacagctccactaggcagaatagattcaatgacttgatga

SEQ ID NO: 790565 - DNA, 638 bp, Homo sapiens
caaagtttgctagggaccatatagaaagtcaggcaaaacacaccagattggctatagtttaaggccaacctcacaaatcctttcttacaattaaaactctacagaaaatataaacagtaatccccatcattcccggcccagcaaaacgtcttccaaaaggaaaaagaaaagcctctcttaaaagtcaactactgacaagctagagaaaagaaaagatacctggggaagaccctcttattcttatgcaaatagttcctcttggcgaggggaggggaaggctctgtggacgtgtggcagggagcacaggccagcctgctgctgggcaccctggggccatacattccagctctggccgggaggggagctggggagccgccattccccaatccatcccgcgcgtgcctgcagccrttggggtggggtggtgtgcagtttcttctaccctcggaagaggtcccaggagaaaatgacatagaaaccaaaggaaaaaaaattggttcgcatattactcacccttcttcaagccccacatccggacgccaaaaatgttgtagaaaaaaactgggttcttgtcgtacaaccagtaaaagttaggcacacagacactttgacgagtgagggggaatggaatttattgg

SEQ ID NO: 790566 - DNA, 638 bp, Homo sapiens
caaagtttgctagggaccatatagaaagtcaggcaaaacacaccagattggctatagtttaaggccaacctcacaaatcctttcttacaattaaaactctacagaaaatataaacagtaatccccatcattcccggcccagcaaaacgtcttccaaaaggaaaaagaaaagcctctcttaaaagtcaactactgacaagctagagaaaagaaaagatacctggggaagaccctcttattcttatgcaaatagttcctcttggcgaggggaggggaaggctctgtggacgtgtggcagggagcacaggccagcctgctgctgggcaccctggggccatacattccagctctggccgggaggggagctggggagccgccattccccaatccatcccgcgcgtgcctgcagccattggggtggggtggtgtgcagtttcytctaccctcggaagaggtcccaggagaaaatgacatagaaaccaaaggaaaaaaaattggttcgcatattactcacccttcttcaagccccacatccggacgccaaaaatgttgtagaaaaaaactgggttcttgtcgtacaaccagtaaaagttaggcacacagacactttgacgagtgagggggaatggaatttattgg

SEQ ID NO: 790567 - DNA, 653 bp, Homo sapiens
gggaatatgaatttgagtgagaggagatattttgtctgaaaccatgaaagctatcatgaaataacactatttttcaagtattgaatgaaaagacctttcaatttcagatcctgtattcagtaaaactatgattcaggaatggacggacaattagaactttgccagattaaggaaaactaagagaatttgttgctagcaaatttactcataaagaatggcaaaaggaagttctctaaatggaaaataaatgaaaacaaaagaatggccagagtttcaggagagaaataaaagcattggataggctaaaaacagggataaatataacagattaaccttttatatgcgtttcttatatcatatttgatggttatagcaaaaattttaacaccatctgacatgctgctcaatacgtgtagaggaaatccttaagaaaaatgcagtcatgtgttgcttaacaacagggacacattgtgagacatgcttcatttctcaattacatcmttgtagaaacctcatagaatgtatttacacaaacctagatggtatagcttactgcacacataggctatatggtatagcctaattgctcctgggctgcaaacctgtagcatgttgctgtactgaataccatagacaattgtaacacaatagta

SEQ ID NO: 790568 - DNA, 650 bp, Homo sapiens
agcactactgtagttttcataccactgttgagaaatattattcttgcctgggtgcttaaagaattgttaaaaagtcctatgagctagagattttaataatttcttcctattgcctaacccttcatggagaacttgctttatcctcagccctatgggacagctctaatcactgtatgaccctcctcttttgggcacagataatgggccatagatggataactgtccagagctggactattaatcatcttatccaggaatctgtaactggggaattagactgagcgtgctacctgcaggaagttgaattcagatagtgtaggctcaagtggtgacgtttcctttgggtgcagccattgtcaaccatgtataaacaagtaaataagcagagaagccagtttgcagagaaatttgaatgaagtagtcatagagtgaaaatgagaggtagctgtgtgtgtgtgtgtgtgtgtgtgtgtgcrtgtgcgtgtgtgtgagagagagaggaacgcccactggaggcattgctatagagcacatggcaaggtgcactatcttgagagtagagaattttcttctctgtaactcccctctttactggctccagcaactctagccagcccagtgcctggtcccgtctgtgcatgtctagggga

SEQ ID NO: 790569 - DNA, 561 bp, Homo sapiens
ggcagcccatggccaccaggagcgagtccagattccttaccgtggcctgggttctgcagttagatggggctgcgctcaaattccatctctgttgctataagttatgtgaccagctgtgttaacctgtgagggcagacctcagttttgtcatctgtaargtgggcatcattattagtagccatcacttttctttttacttactttccttttgcttttttttctttgagacagtctagctctgtcacccaggctggagtgcagtggcccaaactcagctcactgcaacctctgcctcccgggttcaaacgattctcctgcctcagcctcccaagtagctgggattacaggcgcccgccatcatgcctggctaatttttgtatttttagtagagacggggtttcaccatgttgaccaggctggtcttgaactgacctcaagtgattggcccgcctcggcctcccaaagtgttgggattacaggcgtgagccaccttgcccggccactaatattcttatcactgttttctctccagcatttcccctcactcattcttatatgatc

SEQ ID NO: 790570 - DNA, 561 bp, Homo sapiens
ggcagcccatggccaccaggagcgagtccagattccttaccgtggcctgggttctgcagttagatggggctgcgctcaaattccatctctgttgctataagttatgtgaccagctgtgttaacctgtgagggcagacctcagttttgtcatctgtaaggtgggcatcattattagtagccatcacttttctttttacttactttccttttgcttttttttctttgagacagtctagctctgtcrcccaggctggagtgcagtggcccaaactcagctcactgcaacctctgcctcccgggttcaaacgattctcctgcctcagcctcccaagtagctgggattacaggcgcccgccatcatgcctggctaatttttgtatttttagtagagacggggtttcaccatgttgaccaggctggtcttgaactgacctcaagtgattggcccgcctcggcctcccaaagtgttgggattacaggcgtgagccaccttgcccggccactaatattcttatcactgttttctctccagcatttcccctcactcattcttatatgatc

SEQ ID NO: 790571 - DNA, 561 bp, Homo sapiens
ggcagcccatggccaccaggagcgagtccagattccttaccgtggcctgggttctgcagttagatggggctgcgctcaaattccatctctgttgctataagttatgtgaccagctgtgttaacctgtgagggcagacctcagttttgtcatctgtaaggtgggcatcattattagtagccatcacttttctttttacttactttccttttgcttttttttctttgagacagtctagctctgtcacccaggctggagtgcagtggcccaaactcagctcactgcaacctctgcctcccgggttcaaacgattctcctgcctcagcctcccaagtagctgggattacaggcgcccgccatcatgcctggctaatttttgtatttttagtagaracggggtttcaccatgttgaccaggctggtcttgaactgacctcaagtgattggcccgcctcggcctcccaaagtgttgggattacaggcgtgagccaccttgcccggccactaatattcttatcactgttttctctccagcatttcccctcactcattcttatatgatc

SEQ ID NO: 790572 - DNA, 605 bp, Homo sapiens
tccaaggttttttgcctaagccaaatggtgaggaagacttgggggaacactgtttcaggagaggaaaccaagagttctgttctgaaccctgtattagttatctattggtgcataacaaatttccccaaaacctagcagcttaaaaccgtagacattcatcctgtcactctgagtcaggaatctggctatggtttagctgggtgattctggttcagtgtctytcctgaggttacagctgagatgtcagttggggctgtagtcatctgaaggcttgaggggctggaggctctgttcacaacatggctcagagacatgcacagcaggccttaccacgtggccctctccacagtgctgcttgagcgatctcctaacatggcgactagcttccctcaggcaagtaagccaggagatgccaaggctcttacatattttctgacctagcctaggaagccactttctgttatttccacaatgccctatcatttgcacatatcagtcatattcattcagtaggcgaggcacccacacaagggtgtgaataccaggagggaagaatccctggtggccatcttggagggttgctaccacagatcgttagccaactc

SEQ ID NO: 790573 - DNA, 633 bp, Homo sapiens
atattattgtcttcaaaaggaatgaaattcagatacatgctacaaattggatgaatcttgaaaacattatgttaagtgaaaaagctggatacaaaaaccaccaaatcttgtttgaccacgtttatgaggtatctacaacaggcaaatttataaccaatagaatagaggttaccaggcactggttggagggggaaatagagttagtgtttaatgggtacagaatttctgtttgggagggtgacaagttctggaagtagatagtagtgatggttgaacaacactatgaatgtacttaacaccactgaattggtatggttaaaatggtattttttttgctatgtatattttactagaataaagaaatggttttctaccaatctaaatggaagataaacttgtcaaaattttacagacatacgyatgatctttctctatttgctgtccatcatgttcaagttttagaaatgtttgtgcatttgaataattgttaatgaacctaaactgtcctgcaatactattagacattttggaagataatctctgaatttttgttgcattctgttcagaatctgttggaaatcttaatgaaaaggttcaaaaattggtcaccaaaacctggagcttttaaaagct

SEQ ID NO: 790574 - DNA, 634 bp, Homo sapiens
ctgtagtattttgttatggcagaacaagccgactaagacaccatcccagagggcccaggaaaagagtcctaatatggagaaattccccccaagatcagtttcctcgctgatcagctttggtgtcctgagtagagatcccagccctgctctttcctagctcagtgtttctgggcagcactcttcacatccattaatctcagctgtctcgtgtataaaatgggaataataagagcctggcacagtggtgtgcgmctgcagtcccagttactcaggaggctgaagcaggaggatcgcttgagcccgggagtttgaatctagcctgggtaacatacagagactctgtctctacaataaataaataatggccgggtgtggtggctcacgcctataatcccagcactttgggaggccgagacgggcagacctcctgaggtcaggtgttcgagaccagcctggccaacatggcaaaactctgtctctactaacaatacaaaaattagctggactttggtggcaggcgcctgtagtcccagctactcaggaggctggggcaggagaatcacttgaacccgggaggcagaggttgcagtgagctgagatcacgccattgcactccagcctgggtgacaagagg

SEQ ID NO: 790575 - DNA, 586 bp, Homo sapiens
tgtccctcttaactccatcctccacagggtagccagcacgatctttccaaaaagcaaatctaaaactttcaatagctcctactgcccagagacacctagggtctgtgtggacactagttcattcgtcatctggtttcactttcatggctgagctawatgtttcactaggtggtgatttgttcttggcaacaagatgatcttttgcaaatgagagtctcactgaccttgcagaagtgaaagtttactatacctttataaacagccttggctaatgtactagcatgactgctaaaagagcagtgactggaattttcatagtaaacaatgcagcatctcctaccctaatttccccagcaccaggggccttctagttaggattccccaggcccacactttctaacatctctctttccttttccagtcccacactggtcagttacagcctcctacgtcccagctgtgcgtttcctgtgaaaagaataagtgagtaaatgagaagttattttaaaggatgtgaagtggggaacttcctctggaaagaatatctaaacacacacttgatgtttcttttttttttttttttttt

SEQ ID NO: 790576 - DNA, 624 bp, Homo sapiens
gcttccctttcttccctcccctaggcccctaggcattcagcctactttatgttacttttacaattttctcattatattctaaccatcactcaagtgcagttcaaatgccagttcctcctggaagccctactttctcctcagctggagttctcctctgtgctctatcagtgtttggttggcattcattgagtgcagattgcattctaccagatgctagtattattatatagggtctgatttcccctgctggaacataaggatgttgagaggagaaactacgtctttcctgattttctacctctctcctagcctasaacagtgcattgctcaaaatagatggtagtaaatgttcagtaaataaggtaggaaagcctagggcagccagaaacacaggctcagccttggctgctgaatatgttagctgtgcaactttgaatgaattatcaacctatggctcggagtttatcattagttaagttcttttaaaggattgtatgagaaaatcatgtatgattctcagcataataatatcttgtgcctattaagcactgaataaaggttaaaaacaatgttgctttgtgttgagttatatgtgcactgtgactgcattcctgttttcactgt

SEQ ID NO: 790577 - DNA, 666 bp, Homo sapiens
ctcatgtagagaacttgagggctaggaattgttttagacattgagattgcaaccataaacttgagagacaaggtctctgttttggtgagaggaagtacacaaataaacaagataattttagatagccaagagagcaatgaagaaaataaaacagggtgaattaatgcagaatgagtagggaggattaatgcagaatgagtagggaggatggtactttagctgggattattagggatggtttctttgagtagaagacatctgtgctgagatctgaatatcagcacatggccgctatgaggatctgaaagacgtagtcaagggcttcaagactgcgataagtcaccaggagcactggctcacgyctataatccaagcactctggaaggcagagtgaatgagactcagtttcaaaaaataaaaatgaaaagaaaaaaaagaccatgataagtgacataatttggatatgtgtccctgtccaaatttcaggttgaaatgtaatccccaatgatggaggtggggactggtgggagccgattggatcatgggagcagacttctcaggaatgatttagtaccatccccttggtactgttcttgtgacagtgagtgagttcttatgagatctggttaccatagctcaaaaacaggcatagacaatgcatacaca

SEQ ID NO: 790578 - DNA, 576 bp, Homo sapiens
ctccactgggaccatgctgggtcagacctgcagccagaatttggtcttgcccaaggctcacagtgaccactgatgactactacctatattcattgaaggcccatgttctctataattagcaggtggcaaatccagccaggcttatgtccttcccttcagggtggtgagttcagccacaggttggtccagagatgccttttgggaggctgggcctrgagtcgagaaccttaggaagtctaccttgtgctctattttactgtggctgagctggcatcctagccaagagagaaagtccttctcactcttccccctcctttcctcaagcagaggattttctctccatggcaaccatcaccccaggcccgcagcaagtgctgcctggctactgctgatgttcactcatggcccaagagctcttccgtcaggttgtggtaaatgcttcaggcctgggactactccttcagggcagtgggcttccttctggtccagggcagatccagaaatgccattcaggaaccaaggcctgggattaggggcttcaggagcctgcttggtgctttactctgctgaggccaa

SEQ ID NO: 790579 - DNA, 626 bp, Homo sapiens
tccttgtgttgaagaacatgacgaggcttccagatcctgactcacatgcttttagataccaaaagaaacaacagaaaaaagggctttatgttgtcatggcatggccacaaatatatatatatatgtatacacacacacacatatatatgtacaccataatttaaaaatacaaaaagcaaatgttcaaattctgatatgtaaaccaacatatttcattcaaactaaatactctaagaaaaggataatgatcaacaaaaagcgcttttcttaccaacatacttcaatttctttacaacgtaccattaaaattctgctactcatcacgtcaaaatgctactgctcattaargccaagaaactgctataaaaatagttcttatgaaaagtaggaattcaataaaagatcttaaatgacttcatttctgaaaagtgtgttaatgttgagatacatattcaaattttactaagagtaaaaagattttcattggcaatatctaggttattggtgaagcctgctataagaaaaactgaaatatttattgaaaaaatctaaatcattaaaactaaaatgtggagaaatttagacccagatagtaaaagttttaacccctaattcatctcttatta

SEQ ID NO: 790580 - DNA, 627 bp, Homo sapiens
tgggatggtcttctaatagaatgacacctgaaatgacacatggcaactttattagcatcagaaatgaatgagtaatgcccaagagcaagacctaatgaataataacaaaactaaaacagcaccagcaactaatggaattagatactttttwaattttactttaagttctgggttacatgtgcagaacatgcaggtttgttacacgggtatacatgtaccatggtggtttggtgcacctgtcaacccgtcatctaggttttcagccctgcatgcattaggtatttgtcctaatgctatctctccccttgccccccacctctgacaggccccagtgtgtgatgttcccctccctgtgtccatgtgttctcattattcaactcccatttatgagtgagtttagttttctgttcctgtgttagtttgctgagaatgatggtttccagcttcatccatgaccctgcaaagaacatgaactcattcttatttacggctgcattgatacttattttttaaaataacactcccactgtgaaattattcttgaaacacaacaataaaaataaaacaaatgaaaagcaatacagtataacaactatatatatagcatttacattgtattaggtatta

SEQ ID NO: 790581 - DNA, 627 bp, Homo sapiens
tgggatggtcttctaatagaatgacacctgaaatgacacatggcaactttattagcatcagaaatgaatgagtaatgcccaagagcaagacctaatgaataataacaaaactaaaacagcaccagcaactaatggaattagatacttttttaattttactttaagttctgggttacatgtgcagaacatgcaggtttgttacacgggtatacatgtaccatggtggtttggtgcacctgtcaacccgtcatctaggttttcagccctgcatgcattaggtatttgtcctaatgctatctctccccttgccccccacctctgacaggccccrgtgtgtgatgttcccctccctgtgtccatgtgttctcattattcaactcccatttatgagtgagtttagttttctgttcctgtgttagtttgctgagaatgatggtttccagcttcatccatgaccctgcaaagaacatgaactcattcttatttacggctgcattgatacttattttttaaaataacactcccactgtgaaattattcttgaaacacaacaataaaaataaaacaaatgaaaagcaatacagtataacaactatatatatagcatttacattgtattaggtatta

SEQ ID NO: 790582 - DNA, 493 bp, Homo sapiens
tacatcacatgggaaagtctgtctttagcctcaacctagagccccctgtgttcctgcagcaaggctgaacattgctccataactggccttccttttccagtgcgcaactaatgcccaggatgaaaatacagtatgaaaagatgacgtcaggtccagttgcctttaacaacagcccaaggtacaaaaacctaaaaacccctgtggaaagccaaagccctgtggrgaaaccccaatgataaggtatctgaagacttagggatattttggttttcaggggagactgctgattttctgggttattcaggcaaaatccagttgagaagcaaatctaactttctgtttctgtgaccaaggttccatgaactgcatccattttatgtttagtagggatgactggttcaaactgtgggagatcttaaggactcatgtgcatggcctttataacattgcaatagtaacagctaccattaatgacccatagatcattgtatac

SEQ ID NO: 790583 - DNA, 529 bp, Homo sapiens
tctacatacaacctagtgtgagagggagagaccaaacaacatggcagtacggccagtggcccgggggcagacaagcctgtcctctcatgccagggacccctctccaactgggctgtttggcttctctgagccttggttttcttatctgtaaatgggggatcatctttccgcatggggtcattgtgggaattaaactgaatgaggtaatgcacctaaagcaccagagccwattctggtccctgatgagaggtgtatggatggagatgctattaatattacgaccctgagaactgaagtcagatttggctgcgtgtgtgaggcccagccatctcactgcagcagctgtcatgatcattgcctcccaggaggagccggagggagaccctcggggtgaagaatagcatgcgaccagtgccccagccccagggctgctgggaaggtgatgagtggggagggagagtggcctttaagtttacacatgtctccttcctgtaccccatctctgcctggtcttgggggtcacatgaga

SEQ ID NO: 790584 - DNA, 659 bp, Homo sapiens
caaggagtgggattgctggatcatatgatagtccttttttaattttttgagaaacttccatactgtttttcataatggctgaaccaatttacatttccaccatattgtacaaggattaccttctctccacatcttcagaaatactcrttatcttgtgtcttttttattatagctcttctaagatgtgaagtgatatctccttgtaatttttgtttgcatttttctgtgattggtgatgttgagcacattttaacatacccactggccatttatatgtcttctttggaaaaatgtccagaaatgcaggttctttactcatttttaaactgggttatttgttttgttgttttgagttgggactacatttaaccaaaaaggcgaaagatctgtatgctgaaaattataaaacattgaagaaagaaatagaagaagacacaaataaatggaaaaatatcccatactcatggattggaagaattaaaatgtttaatatgtccataccactcaaaccaatctatagattctatacaatctctctcaaaattccaatggcatttttcactgaagtagaataagtaattctaaaattcaaatggaaacacaaaatatcccaaatagacaaatcaatcttgagaaagaagaacacgttggaggcatca

SEQ ID NO: 790585 - DNA, 659 bp, Homo sapiens
caaggagtgggattgctggatcatatgatagtccttttttaattttttgagaaacttccatactgtttttcataatggctgaaccaatttacatttccaccatattgtacaaggattaccttctctccacatcttcagaaatactcgttatcttgtgtcttttttattatagctcttctaagatgtgaagtgatatctccttgtaatttttgtttgcatttttctgtgattggtgatgttgagcacattttaacatacccactggccatttatatgtcttctttggaaaaatgtccagaaatgcaggttctttactcatttttaaactgggttatttgttktgttgttttgagttgggactacatttaaccaaaaaggcgaaagatctgtatgctgaaaattataaaacattgaagaaagaaatagaagaagacacaaataaatggaaaaatatcccatactcatggattggaagaattaaaatgtttaatatgtccataccactcaaaccaatctatagattctatacaatctctctcaaaattccaatggcatttttcactgaagtagaataagtaattctaaaattcaaatggaaacacaaaatatcccaaatagacaaatcaatcttgagaaagaagaacacgttggaggcatca

SEQ ID NO: 790586 - DNA, 554 bp, Homo sapiens
taatgataaactaattttctttcccttacaagtaacatgcactttttactgagatgccaaatggattccttcgtttcctttaaagtctaaaaattttactaatatatgtttttggcttttttttgttcatgatcctaaattttctagaactgttagatcatgtcaaaaactttactaatatatgtttattctcaagcacattatgtgctcttgcaatatgtagtttcgaatcttttccttgaggcaggagaatctcttgaacctgggaggcggaggttgcagtgagccaagatcgcgccattgcactccagcctgggcaayaagagcgaggctccatctcaaaaaaaatatttttttctatcttttttttcaattttagaaagttttcttttttgctttttgttttttgttttctaacacagagtctcaccctgtcatccaggctgtggtgccatcacagctcactgcagcctcgacttcttgcactcaagttttcctcccctctcagcctcccgagtagctgggacaggaaagttttcttgagttatagtgtt

SEQ ID NO: 790587 - DNA, 554 bp, Homo sapiens
taatgataaactaattttctttcccttacaagtaacatgcactttttactgagatgccaaatggattccttcgtttcctttaaagtctaaaaattttactaatatatgtttttggcttttttttgttcatgatcctaaattttctagaactgttagatcatgtcaaaaactttactaatatatgtttattctcaagcacattatgtgctcttgcaatatgtagtttcgaatcttttccttgaggcaggagaatctcttgaacctgggaggcggaggttgcagtgagccaagatcgcgccattgcactccagcctgggcaataagagcgaggctccatctcaaaaaaaatattttttyctatcttttttttcaattttagaaagttttcttttttgctttttgttttttgttttctaacacagagtctcaccctgtcatccaggctgtggtgccatcacagctcactgcagcctcgacttcttgcactcaagttttcctcccctctcagcctcccgagtagctgggacaggaaagttttcttgagttatagtgtt

SEQ ID NO: 790588 - DNA, 436 bp, Homo sapiens
ggtctcaaactcctgacctcaggtgatccacctgcctcggcctcccaaagtgctggaattacagccaccatgcccggcctggtgtatgaattttaatcctagaatctcagaattgaaagtcatcctaggtcagtcaccctaaacttattttgggttattctcctctttgatactctggttaaaacaaaacagccacaaatattctctcttgaaaatatgctttaaatataatttcagtgtgtttaaagtctccctgaagctcaaccagggattggggttaagaatctcytgtctccaggtcactctgtttgtttaggaatcttttgtaaagaatcttttgctgtatagtgctgcactattaggtggtcatccaatatatgctcaaaccctctaaggcagggaggtcaatatataataaggaagccctttccattta

SEQ ID NO: 790589 - DNA, 634 bp, Homo sapiens
acaggctctacctgggttcacatccgggctccttgtgtaatagctatgtgacactgggcacattatttaaaccctttatctcttcctatttctcttctgtaaaggggaaataatgctatatacatcacagggctgtgagaattaaattagttaatgtatgtaaaatgcttagcacagtgtccagctcatgataaactccataccatatttactattaataataatagtatgagcaacaaattagtacttattagactgatacatgcatacacacaaagcmgtagtacacatacggcaaggatatgaacaaaaactataccaaactactggaatgcttgcctctgcagagaatagtgatcaaagggaataaatacataaaaacactgatcactgagttccattcccagatattctgattctgttttggtcaggaatagggctttactggcatgtgccctggaaatctctattcttccaaaagcagcccagcagacggtgattcacgaatgggcttgggacacccggagtagtaaaaggagcatgttccttgtggttccaacacacttaggtccacattctagccctgaccctcattatagtttgttggacaagttatttaatcctctgatcctct

SEQ ID NO: 790590 - DNA, 618 bp, Homo sapiens
attctgattgcctcctttggaaagacttattaggaaatcaaaagatgcaatcatttgtctcttacctacctgtgacccgtaagcccccaaggttggacgggggagggccttgctggatggaactaatgtacttcttacatatgttggttgatgtgtcatgttgccctaaaatgtataaaaccaagctgtgccccgatcaccttgggcacatgtcatcaggacttcctgaagctgtakgaggaactggcacatcctcagtcttggcaaaataaactttctaaattaactgagacctgtctcagattttctgggttcacattttggtaaccatgggggattctgagtggagatgcccctgacctttcacaaatctcctgtcagtgcttggtaccagcacaaactaactttatggctcaaaccaataggacaatctgctgaggtctgagtgcaccccctccagagaatccctgatctcccaaaatttggttgagatctaaagtttattttgctgtacaactcctctttgttttttggagttttacttgcttccaacacaaggaaggcaagtttttcctgcttccatgatgatggaaggcaggtaactcctttatggagttt

SEQ ID NO: 790591 - DNA, 535 bp, Homo sapiens
cctttattttatgctattgacagcttctaacaactcagtatactcctatgaacaaaatttggagcatatttgtttctctctacctgatttcttcagactgtggaaactatttgtgagtatttttaacttatggcaatacagttatttgcataagtgcaataagaatctgttttcatttgtaacaggaaacaactggagaaacgttatttcaccaaggctttgactggaatgttgtgcttttttttaaggaatcaaacttgacttatggatccaataaagcccttggaaaaactggcctcatattttgtgtaaacagtccccgtacagggtttstgacttgtggtaagtaatgaatgtcaccttccgacaggcccagaagccccaggtttatcttgaaacctcaagaggagaggaaattcacccaattcatagatatttgatgacaaaatccatgcctggtttggctttaaaaagtctcatctgagattcttcttatgaacaagtttcatcaaagccaatttaaaagcctatgttt

SEQ ID NO: 790592 - DNA, 632 bp, Homo sapiens
atttatatttaaaatgaaagtaatataatttacattaaaaatataaactatattagatatcataccactatatgttacatatacaataaaataacttaaatataaatatataaatattccagtaatgtatgtgtacctaagaagaataaaagactrttgatttttttctacctattactcaccagaatttaaatagcccccaaagtctagaagtcttttgctctcctctggtgttgttatataacgaagtcttttttggcagctttgccccaagcaggagttcagtagtgtaagagctacccaaaaacctacaaatataaatgcaatcttatcagtatataatttaaagtgaggataataattcctattctgcctacctctgaatgttgtgatgaggatcgatgaagataaaatgtaagaaagctttcctcaagctctaaagctttttatgagtatgtgggaatacagtaaaagggtgataatgacattcctaaatattgtcaaacaccacttattaaatgcatacctgcactgtttcaagtataaactgctacactaaaacagtggcaccaacactgtggtttcaagttagaatgctacgacttactttagaaactgtgaacccctcatgg

SEQ ID NO: 790593 - DNA, 632 bp, Homo sapiens
atttatatttaaaatgaaagtaatataatttacattaaaaatataaactatattagatatcataccactatatgttacatatacaataaaataacttaaatataaatatataaatattccagtaatgtatgtgtacctaagaagaataaaagactattgayttttttctacctattactcaccagaatttaaatagcccccaaagtctagaagtcttttgctctcctctggtgttgttatataacgaagtcttttttggcagctttgccccaagcaggagttcagtagtgtaagagctacccaaaaacctacaaatataaatgcaatcttatcagtatataatttaaagtgaggataataattcctattctgcctacctctgaatgttgtgatgaggatcgatgaagataaaatgtaagaaagctttcctcaagctctaaagctttttatgagtatgtgggaatacagtaaaagggtgataatgacattcctaaatattgtcaaacaccacttattaaatgcatacctgcactgtttcaagtataaactgctacactaaaacagtggcaccaacactgtggtttcaagttagaatgctacgacttactttagaaactgtgaacccctcatgg

SEQ ID NO: 790594 - DNA, 632 bp, Homo sapiens
atttatatttaaaatgaaagtaatataatttacattaaaaatataaactatattagatatcataccactatatgttacatatacaataaaataacttaaatataaatatataaatattccagtaatgtatgtgtacctaagaagaataaaagactattgatttttttctacctattactcaccagaatttaaatagcccccaaagtctagaagtcttttgctctcctctggtgttgttatataacgaagtcttttttggcarctttgccccaagcaggagttcagtagtgtaagagctacccaaaaacctacaaatataaatgcaatcttatcagtatataatttaaagtgaggataataattcctattctgcctacctctgaatgttgtgatgaggatcgatgaagataaaatgtaagaaagctttcctcaagctctaaagctttttatgagtatgtgggaatacagtaaaagggtgataatgacattcctaaatattgtcaaacaccacttattaaatgcatacctgcactgtttcaagtataaactgctacactaaaacagtggcaccaacactgtggtttcaagttagaatgctacgacttactttagaaactgtgaacccctcatgg

SEQ ID NO: 790595 - DNA, 605 bp, Homo sapiens
tgaagataaaatgtaagaaagctttcctcaagctctaaagctttttatgagtatgtgggaatacagtaaaagggtgataatgacattcctaaatattgtcaaacaccacttattaaatgcatacctgcactgtttcaagtataaactgctacactaaaacagtggcaccaacactgtggtttcaagttagaatgctacgacttactttagaaactgtgaacccctcatggaataaaatggtacttttaccragtacccaaataaatgtttgttactaatgtaaatggatgaaaaaatatgttttgtttttacttataatgtagagctagtaaggtagcttttatcatggactagttaatttaacaatttattttttatcaaaaaaaacctctctgctatatcatagtgattttttctccatgtttctgaatgacctatgatactcttttataaaaataatttaaaatatatttctaataatttgtatttgcttttaaactttttaactaaaaatatccgtttaagaaaacgtaaatatttcctaggccagcaccaaaattttgtatcgtatgtgtaccatgttaaatactttaatgaaagtactt

SEQ ID NO: 790596 - DNA, 605 bp, Homo sapiens
tgaagataaaatgtaagaaagctttcctcaagctctaaagctttttatgagtatgtgggaatacagtaaaagggtgataatgacattcctaaatattgtcaaacaccacttattaaatgcatacctgcactgtttcaagtataaactgctacactaaaacagtggcaccaacactgtggtttcaagttagaatgctacgacttactttagaaactgtgaacccctcatggaataaaatggtacttttaccgagtacccaaataaatgtttgttactaatgtaaatggatgaaaaaatatgttttgtttttacttataatgtagagctagtaaggtagcttttatcatggactagttaatttaacaatttattttttatcaaaaaaaacctctctgctatatcatagtgattttttctccatgtttctgaatgacctatgatactcttttayaaaaataatttaaaatatatttctaataatttgtatttgcttttaaactttttaactaaaaatatccgtttaagaaaacgtaaatatttcctaggccagcaccaaaattttgtatcgtatgtgtaccatgttaaatactttaatgaaagtactt

SEQ ID NO: 790597 - DNA, 467 bp, Homo sapiens
ctggcccacctgccgggcaccctgacccctggaggttacatcctaatgggggaagataggcagtaagcgccaaagaagtaaataagataacgacacactgtgctaagtacttgggggcgataggctgatgtgctggaagacagttttagacagggtggtcaggacaggcttcctaaggatgtgacatttgaactcagatgaatgacaagaaggagccaggcgaagtaagagctagggagggaaagctggtgccaagaccccgaggttaacaggaggcgacagattttgagagacagaaaggccagtgcagatagaggctgttgagcragatggggagtggtaaggaaagtcactggtaaggtgggcaggggtccaaccactggggcctgtggccacaggaaggagtttcagttttattttaagtgcagtgaaaagcaaggggaaggtctagaccttccccttgagag

SEQ ID NO: 790598 - DNA, 604 bp, Homo sapiens
gacttcccacttacttgggatccctgctcagaaacacattccttggccattcatgtaagatgcactttccactctcactctctgatattttactctgctttattcctccacctagtatctcacacacacgcgcgcgcgcgcrcacacacacacacacacacacacgactccctcctggcatctaccattattgtctccccctaccagcatataaacttcttgagatcaaggactttttgtttttttctcttctaatattgtaactctggtgccaaacacatagcagacgttatagaaatatttgctgaatgagtaagtaagtgaatttcaactttgagaaagtgtgggcctcccagggctgctcctgagccttgatctgcagagattaaaaaaaaaattataatagtgatgatgatggtaaggcccattacttgacctggagacacaagtgaggctatgtctctttagcatttaatctttagccctaacctacccagactaatgatgatctagtatttctctttgtgctgaattatgactgagcaccagggatttactcagtccagtggagtctgtcctgcttccagaacccctacagagagaa

SEQ ID NO: 790599 - DNA, 608 bp, Homo sapiens
ttaatagcctcctgctgaccagaagcttgactgatgacatgtacaattgattaacacatattttgtatgttatatgtattatatactatattcttacaataaagtaagctggagaaaaaatgttatgaagaaaatcataagaaagagaaaatatatttactattcattaagtggaggtggatcattatgaaggtctccatccttgtcatcttcaygttgagtaggctgaggaacaggaggaagaggtggagctgtttcaggggtggcagaagtggaagaactgtgtataattggagccatgcagttaaaatctgtgttgtttaaggatcaactttatttctgtttctgagttgaatctcctttgacataaccattaaagcgtttttctccaatgtctgcacttttaaattctcctttctttttcatcagattcagtattggagcagcaattcctgatgtgctgaagtcaacagctatctcatctaacaattctgtttcttttgcctggaggaagttgagaactgataatctttgggatgtaggtttagaagaagtcatgagcctctaatgtgtccagatatgggatattgtggtggaagatgttgagc

SEQ ID NO: 790600 - DNA, 608 bp, Homo sapiens
ttaatagcctcctgctgaccagaagcttgactgatgacatgtacaattgattaacacatattttgtatgttatatgtattatatactatattcttacaataaagtaagctggagaaaaaatgttatgaagaaaatcataagaaagagaaaatatatttactattcattaagtggaggtggatcattatgaaggtctccatccttgtcatcttcatgttgagtaggctgaggaacaggaggaagaggtggrgctgtttcaggggtggcagaagtggaagaactgtgtataattggagccatgcagttaaaatctgtgttgtttaaggatcaactttatttctgtttctgagttgaatctcctttgacataaccattaaagcgtttttctccaatgtctgcacttttaaattctcctttctttttcatcagattcagtattggagcagcaattcctgatgtgctgaagtcaacagctatctcatctaacaattctgtttcttttgcctggaggaagttgagaactgataatctttgggatgtaggtttagaagaagtcatgagcctctaatgtgtccagatatgggatattgtggtggaagatgttgagc

SEQ ID NO: 790601 - DNA, 540 bp, Homo sapiens
cacttttaaacaatcagatctcacaagagctctatcacaaaaacaccaaaaggggaagtctgcccccaggttccaatcacctcctaccaggccccacctccaacaatggggattacaatttgacttgaaatttgggtggggacataaacccaaaccatatcaaagtctcattttttcaagagagagattcgtttatatggtgtcttcaaacagggacttcttttcctaagttactccacagttgacccaactgaggaatccctaatgcttcctcttgagstgaagcaatgcattctcctagagatctgcatggtaaccacctcttcaatcccatccaaggaaaccctgacccagtgacgtgacctgcactgttgtctggaaggactcatctgggttcaggtgtttctgtggttaaggttctcaaattgggatctttcgtgattacctgtgaatacttcaatgaggttaaaagtgtaaccagatgcaccaggaatgtgaaaggaatattttgtatttttcaatgaactatccacagctaat

SEQ ID NO: 790602 - DNA, 540 bp, Homo sapiens
cacttttaaacaatcagatctcacaagagctctatcacaaaaacaccaaaaggggaagtctgcccccaggttccaatcacctcctaccaggccccacctccaacaatggggattacaatttgacttgaaatttgggtggggacataaacccaaaccatatcaaagtctcattttttcaagagagagattcgtttatatggtgtcttcaaacagggacttcttttcctaagttactccacagttgacccaactgaggaatccctaatgcttcctcttgagctgaagcaatgcattctcytagagatctgcatggtaaccacctcttcaatcccatccaaggaaaccctgacccagtgacgtgacctgcactgttgtctggaaggactcatctgggttcaggtgtttctgtggttaaggttctcaaattgggatctttcgtgattacctgtgaatacttcaatgaggttaaaagtgtaaccagatgcaccaggaatgtgaaaggaatattttgtatttttcaatgaactatccacagctaat

SEQ ID NO: 790603 - DNA, 532 bp, Homo sapiens
tatgtaaagaattcccaaaattcagcaataggaaaacaaacagcccaattaaagaagaggcaaagatgtgaatagactcttcatcaaagaagatatatagatggcagacacacacatgataaaatattctatctcattaatcactagggaaatgcaaattagagccacaatgagataccactccatacctattagaattagaatgggtgcaataaaaatcctgacaccaccaggtgttagagaagttacggagcaactggaactcrtgtgttgctttggaaaatacaaaatggtacagtcactgtaaaaatcagctttgtgtctccacatgaagttaagcatacatttaccagttgatccagtaaccccactgctgggtatttaccccagagaaaggaaaacttacgtccacacaaaaacttgtgcacatatgtttatagccgctctctgtgtaattgctgaaacatggagggaacccaaatggcctttatcaggtgctggggtaaaaacagctggtgcgagaccactgtga

SEQ ID NO: 790604 - DNA, 583 bp, Homo sapiens
tgggaatcctcttgtttgtggagaagaggaaacgtgtcgggggcaaagtcacaggggcaaaccaggtttaccctctctgaagctctcacggccacaggtgcccaggcctggccattcctccatgggaagcttctgcactcacttcctcagtgctggcctgggtctgcggggcaagctgagtgtcccggggcaraatgctttctggagaggactccgctaccagctgtggctgaaggacctggcacagggcctgttcctggggcccttggcacaccatcctcctccagccgagagccgtaaggaagaagtttccctagtgaagggcatcaacaggccccaggaggtcctcctgcctgccaggacacccgtggtcctccccatcctaactagttacaattaaaatgaatctagcaaacacagacagccaggccctcccacgccctgctctgggatccaggaacaacgacggcgcccaggggagcccacacacttaaggggagcagcttacagtctcactgtttattgagcagctactgtgttcttgatgcttttgtaaaccagaaagtgtctgagacaggtctca

SEQ ID NO: 790605 - DNA, 615 bp, Homo sapiens
gtcctaaaggctccccgtgagcagccaggtttcaacttcctgggtttcttgtcagtccccactcaccatctgccttccagcttccggaatttggttgattcttctcatctgctattttcttcctcatacgttttctttgtcccagtagatagatgtgcatttaaaaaaaaaatccctgtgtcattttcttggaatttcagagaacaatggagagaaataagtgtgttcaacctgccatgtttaaacagcagtctccagcctcagttcttgactgggggaatcctcagccctcaggaggattgtatggtatccccatcctycccccattccttccttatcctgctccaggagtccatgggagccctcggcacacaggactctcttccccactctctgaacctggggcatagttctgtcctgcctccatagcccatacctgcttctcaagagcaggggccttgtcttcttctctctacttcgacaggtctgggcaggcctcaggaagatagatatgagctcatggtgtgggtcattcctaagaagtcactttggactttgaggagttaaaattcaaagctggggatgagagtcaggcatttctaaattagaatatca

SEQ ID NO: 790606 - DNA, 614 bp, Homo sapiens
tttcaaatgaggaaatggaggcacttaaaaattgagtaacttgcccaaggatgcattgttagaaaaggatggagctgagggtagaatcaagatggcttaatccctaaaacccaagggatggaacccagaacactgcctcttccactcttcaccagcttctgccctgcagggtacacgcagatggctccaagcaggggccccattgctcactgggggaaactggcctccctgagctaagtcaggycctgggcagagggacagatgctctctgtgcatctctaggccacagcagggcgtttccaagtccttcccagaccagacggcggcttctgctgtaggctatagtaataacaacagcgttgagcactcacactgtaccagagcaggggtggcgccgcgctgcacacctgccgcccagggtctccacagtcctcacgctgcccttgcattgattattgtctttatgtgaccagtgtggtagctcaggtgtcaagacctcaaggcacccagccagggtcgcatctcacgtctatggcagatccaagatctgaacttggacttgtctgaatcctggataagctggggggtgaagctggctgctgaggatcctgtgt

SEQ ID NO: 790607 - DNA, 508 bp, Homo sapiens
gatggctgcagaactccaccatcacgtccgtattactgactggaagcaggaggcagcaatcagtggtggtggagtcaccaaagggaagcccttccttttaaggagcctttccagaatcggcacacaacactcctgcttgtatctcygtgctggaacctatcccgtggccccgcctcctgcaaagctgagtgcgtcgccaccccaaacaaaaaaatcagtgtttggtgactgagggaggagggaagaaggatattggaatgggcattgatcaggctctgtcacagatctcagtctccaaaacacgaaactggggcactgaggtccagagaagtgagggaatttacacacagccacaaagcaaattagcagcggagttgggattttcacctgactgttgaccttcccatggtacaggtgtcccctcacaccctggtacatccagccactacagcactgcccctcctcacttccagccctgctggggtcaggatctgttttgtatttctct

SEQ ID NO: 790608 - DNA, 616 bp, Homo sapiens
caaagcaaagaaaaaaaattggaaaaagatagaagcaagacctgcaaagcacttcccccatttatctgagattagacacaaagaggaataattttgtctcccacctgctgagacactccattctttacccctcaacgtgttgttgtcactactgccatttgaacttctttgtttctatcaccatttttctctatgtgtatgttccagatgctttcagacttcagggctaatattcacaagtcacttttcatcttgtttgtattcagagagtcatcatagcttctgtgtgtgactgaaggcaatttgaggtgccttctcaactagttaacagctaagaacaggaagatagagccaaattttcttttttacatagaaaaaaggcatagctrtgacaacatagaaaaaggtaaatttattcaaacacctactgataaactgtgaaggagatttatactaagtcaggggttcttagtctctttggagtctgaaatacctttgaatatgatatgaaagctatgaactcagtccctagataaaagaggaatttgaatgaggaccttaaggtattttgttctactatcctcctttcattataatcaatgttttcctattaata

SEQ ID NO: 790609 - DNA, 554 bp, Homo sapiens
ctttggcataaggattcctttgagctggagacaattgaaaagaagcagatacaagaacacctctctctcctctccctatttgcctaaaaacagggtataaatttatgagtatatttctcctcccatctctgaaaggaaggacaaatataatcatcagactttagacctttaccagcctagagacagcactggcaaaatctacacaacaaactttactaactagcctttgtccaccattattttcccacatrtatttgccttcccacaatttgctgcccctggagcctcaaggttcttttcctttgtcttgtcacacctctaaactttattgttctctgatgaagatgctatataagctgtaagccatctcttggagagttactctttccctgagtagctggtgagtatctcaccagactgatttcagagtgtcagccaaggatataagctcatttgaagttcagggccctctacctagcttgttcaggtggttgtcagaatttagttccttgaagttgtttcacttattttcttgttggttgttggctgggagt

SEQ ID NO: 790610 - DNA, 554 bp, Homo sapiens
ctttggcataaggattcctttgagctggagacaattgaaaagaagcagatacaagaacacctctctctcctctccctatttgcctaaaaacagggtataaatttatgagtatatttctcctcccatctctgaaaggaaggacaaatataatcatcagactttagacctttaccagcctagagacagcactggcaaaatctacacaacaaactttactaactagcctttgtccaccattattttcccacatatatttgccttcccacaatttgctgcccctggagcctcaaggttcttttcctttgtcttgtcacacctctaaactttattgttctctgatgaagatgctatataagctgtaagccatctcttggagagttactctttccctgagtagctggtgagtrtctcaccagactgatttcagagtgtcagccaaggatataagctcatttgaagttcagggccctctacctagcttgttcaggtggttgtcagaatttagttccttgaagttgtttcacttattttcttgttggttgttggctgggagt

SEQ ID NO: 790611 - DNA, 569 bp, Homo sapiens
taagaaactagcgttcaccatatataatgagcacttataatccagcattacaaagataaataacccaattttaaaatgggcaaaagatttgaatagatatttctccaaagatagccagtaagcacatgaacagatgttcaacattagaaaagtacaaatcaaagccacgataagacaccacttcacattttctaaattggcaatatttttgaatagaaaacaagtgttggcaaggatattgagaaattggaactttcatacatttctggtgggatagaaaattgtgtagtcaccttgtaaaatggcttgccagtttctcaaaaagttaaatatagagttactatatgacccggaaattctactcttaggaacacccaagataattaaagccatatgtttacacaaaaacttgaacatgaatgtttgcaaaaacattactcawaataggcaaaaagtagaaaaactcaaatgtccatcaactgataaatgaacaaatatggtgtatccatataatggaatattattcaactgtaagaagaaattaagtactgattcataaaacaatacag

SEQ ID NO: 790612 - DNA, 618 bp, Homo sapiens
aaagacttgccctgtggcagcttggtgcactgttaagagttaggaactaatagcttgaacaaggactgagttagaaatttgtgtctgccacttactgactacttgtatggcattgtgaaaatttcttcacctctctggccaatgtttctacatctgtaaaatagaaataatacctcccattcctacctccagggctattatgaagatctaggttgatcaactgctgtataacttctagctaactgtagctaacacttccataccaattctttccaattttctgttaaaatgaacagacctcagatttgtatgttcctgcctaaagcagcaagcatggatgcaatggcggcggcagcccttttgtgaccagacatgagagaaaggcccagagagtcacagagaccttgcatccatctgcttgtttaggtctctggtccagctcagggtcaccaaccttcacacttcttgtttggtgacagaaaaagcccagatctttaagccactgttacctgtgttttctatatctgcaagtaaattcaattcttaactaatacacyaagctctaatgaacttgtatgatgtgcctgacactacactaaatacctgatgtatgttgtg

SEQ ID NO: 790613 - DNA, 603 bp, Homo sapiens
tttccaattttctgttaaaatgaacagacctcagatttgtatgttcctgcctaaagcagcaagcatggatgcaatggcggcggcagcccttttgtgaccagacatgagagaaaggcccagagagtcacagagaccttgcatccatctgcttgtttaggtctctggtccagctcagggtcaccaaccttcacacttcttgtttggtgacagaaaaagcccagatctttaagccactgttacctgtgttttctatatctgcaagtaaattcaattcttaactaatacaccaagctctaatgaacttgtatgatgtgcctgacactacactaaatacctgatgtrtgttgtgctctttgataccccagaacagctctcctacaggacactgaggtgcagagagattaagcaatttactcaaggtcacatggctctaccgatacctgtcacatactcatggaggcctcaacaattgattcagttatttaattattgtcagaaagatgacacaagatcacactctaaaccaaaatacttttgtgaccaacatcagccaatattctatagcgctgatcacatcattgagttacctagggtccatgttgc

SEQ ID NO: 790614 - DNA, 580 bp, Homo sapiens
aaaaataaactttagttttctatttttaggaactattcctgtggtatcagttttgagctccttgctttcgggaatatgatttttcatagttaatacacaccatgggcgacagtcaataaagttacctattgacttgtctagacttttttggcaacttacaaaacttatactaaaaagactgtttctcctatttaatcttaaagagacttttgtccaattgatatatgtaaagatctctagaatacatccttcaacagcagtatagatatcttgttcatttgtggtcataatacatagtattatgtctacacagtaggactataatagctaatattaaatctacatagtctatatagtaggactataatagttaatattawatcaggcactatccctttctgctagatttttaaaagagaatttcacattcatatgggtattttctaatgttctgatttgttctgaatgttaggaaaaatgggtaagtcaatattttaatattagtacatatgagaatatcaaccaaagcaaacattaaaagccatggagacttgattaaaagttcacaaatcataaatgt

SEQ ID NO: 790615 - DNA, 637 bp, Homo sapiens
attccaatgaccgaatcccagaataaaaatgtttaccattagtaaactcaattgtttatatatattttttttacaagttttaaccttttggaaaaacagaagcagatatgataaaataatttcttgaagtacttttttaatccaattaagctgataataatcacttcgaattttaatacaatacaatcatgttcccaaatttcctaggctcataacaatacagtctcaatacaaaagacgtaataatctatttttattyattttaaatcaaagagaccattccatttcctaacaaacaggtaagttacaaaagtagtccattttacttttcatcagtctttccctgttttgaacaagtttttttgagaattcttagttttagtttttgtttagcttacacactgaaaattttgagaagcatctaaaaaaatccacaattagtgcaaaaagaggggacaatactttaagtcattccttctataaaaagaattaaggttactaaatgccaatttttaagcaaatatatagtttcctatttgccttctgaaagacagcagatataaaaatagttcaatattaggtttaacaaggtttgaacaacacatgtactatcagctttattttacctgcaaaaata

SEQ ID NO: 790616 - DNA, 530 bp, Homo sapiens
taaaaagtttctgttatttcgtgtgtttggttgtgctgccttctctgtgtgtcacctgaccaacacacccaaaccttgctctcctcctagtcagggtctcctagagagtagctatcttagtaggaataaactggacacaggtcagaaaagagccacaagggcatctgccataaacaagttccctgagagagggacacctggtcatgggtgtgccaggataaagaagtatyctgtgaaacgcacactgaaaacattcacgagattttttcctcttgagccacaacacagcaggattagaatttatagccactctccagagacagaccttaaggccaaataagaaagcaatcataacactaatcaggtgagtttgtgcaaatcattcatttctgtttgtccatttcttaatatatgaaattgaagatataccatctacccattccaatacaaatgtacagtggtaatcagagtcaagtaagatgtgacataatttttaacagtctgtataccgagtgggctaatattaacat

SEQ ID NO: 790617 - DNA, 517 bp, Homo sapiens
attgtatgtatgtaccacattttgcttttccatttgtccattaatggacacttatattgcttctgccttttggctattgtgaatactgctgctatgaagtgggtatgcaacacgcctggtaatttttgattagatatcagacattatatattttatttatttggatgattgctatatttgtattcttataaatagtcttgaggcttgttctgagatgyagaatatgtagaaatgctttgatgattttaaggtttgcttttaagttttttttttgtttgtttgtttttttttttttttggtgttaccagtacaacctttagtctaatttttccttgctgctgggttactatgctaaggtaccttgttaagtacttttcctgatactccgtgaattatgtggctttccactctggctgatgggaatacgaactacttatgagtctgtgtaagctgcagggattatttcctctgctccttctatgtggtctttcccaagctttgggtagttttctcacat

SEQ ID NO: 790618 - DNA, 517 bp, Homo sapiens
attgtatgtatgtaccacattttgcttttccatttgtccattaatggacacttatattgcttctgccttttggctattgtgaatactgctgctatgaagtgggtatgcaacacgcctggtaatttttgattagatatcagacattatatattttatttatttggatgattgctatatttgtattcttataaatagtcttgaggcttgttctgagatgtagaatatgtagaaatgctttgatgattttaaggtttgcttttaagttttttttttgtttgtttgtttttttttttttttggkgttaccagtacaacctttagtctaatttttccttgctgctgggttactatgctaaggtaccttgttaagtacttttcctgatactccgtgaattatgtggctttccactctggctgatgggaatacgaactacttatgagtctgtgtaagctgcagggattatttcctctgctccttctatgtggtctttcccaagctttgggtagttttctcacat

SEQ ID NO: 790619 - DNA, 517 bp, Homo sapiens
attgtatgtatgtaccacattttgcttttccatttgtccattaatggacacttatattgcttctgccttttggctattgtgaatactgctgctatgaagtgggtatgcaacacgcctggtaatttttgattagatatcagacattatatattttatttatttggatgattgctatatttgtattcttataaatagtcttgaggcttgttctgagatgtagaatatgtagaaatgctttgatgattttaaggtttgcttttaagttttttttttgtttgtttgtttttttttttttttggtgttaccagtacaacctttartctaatttttccttgctgctgggttactatgctaaggtaccttgttaagtacttttcctgatactccgtgaattatgtggctttccactctggctgatgggaatacgaactacttatgagtctgtgtaagctgcagggattatttcctctgctccttctatgtggtctttcccaagctttgggtagttttctcacat

SEQ ID NO: 790620 - DNA, 565 bp, Homo sapiens
taagttaaaatgaggacatatgcatggacccgaatccagtgtgactggtgctcttataagaagaggtaaggacagagacacacacagaagacaccttgtgaaaactctggaagagcccattcacaagccaaggagagtggcctcaggacaaacaaccccactgacaccttgatcttgggcttctactgcccgggatgatgaagaagtcaatttctatcatcaaagccaccaagtccctagtattcattatgccggcccctagaaaactaatccaccccctctttcttgctccccatacctgagtccctttgcccatccagcaccacatcytgaggagcccggggaatgtggtatttccacaattagaaatttacctcagtgtacagtttggcctgtgatttgaaaatagaatttaatcataccaaaataatgataataagcgtacaaaaaccccaaatagcctgttattcattatatatgttagatgcgctgtcaaattttctattcaatttaacctgacttttccaaaggattggaaatggctgaaaatcaaatgtgcatatat

SEQ ID NO: 790621 - DNA, 432 bp, Homo sapiens
atttaggtcttagcatttcagctagaaggaacaaacaaaacataacttattggtgggctattgtgataaaatagtgggtaactaagttattttggaatccatattttaaaatccatattttgaatagagaatgtggaaragaaagaagtgaggtgagattcaaggacgtgcaagagaaatggtgtaggttagttattttataggttgtcacatattaagatgacaaagcgttcacactgagagtataaagtacttcttttttaaacaatggtatattttaaaaagagaaaagacagttttagaagcacacatatcctcacaattttctaataaatagcagcccacagcagctggcatgacactacaccagcttttctgtgtctcaactcacatagtaaactgagcatttgagtttgcctcaaaaaactcttg

SEQ ID NO: 790622 - DNA, 432 bp, Homo sapiens
atttaggtcttagcatttcagctagaaggaacaaacaaaacataacttattggtgggctattgtgataaaatagtgggtaactaagttattttggaatccatattttaaaatccatattttgaatagagaatgtggaagagaaagaagtgaggtgagattcaaggacgtgcaaragaaatggtgtaggttagttattttataggttgtcacatattaagatgacaaagcgttcacactgagagtataaagtacttcttttttaaacaatggtatattttaaaaagagaaaagacagttttagaagcacacatatcctcacaattttctaataaatagcagcccacagcagctggcatgacactacaccagcttttctgtgtctcaactcacatagtaaactgagcatttgagtttgcctcaaaaaactcttg

SEQ ID NO: 790623 - DNA, 620 bp, Homo sapiens
ctgacttaattaacttcttcaatttcaacttttcctcttatgtcatggtttttaaatggccaccatcttgttcactcatgtttctatgcactcccatttgtaaatgtccttctccaagtatgtctcccagaaaaagctttattctgatagcaatttctgggggagatgtcatagtatattagaaaaagcacagactttgaaactatctagattcctgagtctgaatcccagcccttgaactgcaagctaagtgaccttgagtgagttatataacttccctgttttctcactttaaaggaggaattgtaccacctgataaaatgatagtgaagactagagaaaatcagtgtagcataaaacaaagtatagcccttagcacaaagtggtaaaccctcaattaatgatatctatcattattatatatctctatygcaggctagaaaacgatgacatcaaaagatgactaagttgccttgtgagtctatctaggtgagtgtgtccttattctaggagcaagaaacctaggtttgatagtccccaagagtgacttctctgttttcagtattctttcccctggctctaatccaggggtacagattaatccactgctccttggtaaa

SEQ ID NO: 790624 - DNA, 630 bp, Homo sapiens
tagttgggaacatattccccatagcacccatttctcgtatgtttttagacattctgtgaaaacatcccagtttaatttccaggggtaggattgttgagtcaaaggtttatgcatgcttaattgcattaaatacagacgaattatttctcaaaaacttaacttacaatcccactaatggtggttaagaacgacatttccccctcacgtttgccaccacagggtattatgtatatatttcaactctgccaactggtgaaattggcatttggggggttttgttttttgtttttgtttttaattttttctcygttttggtttgtgtgtctgcatttctctgactactgacatgaacatcttcagaaatgtattcgtcattttcaatttttctgctgtaactaccccatcactggcgtgaacgtcttcagaaatgtattcatcatttgcaatttctctgctgtaactaccccaccactgatcactgacttgaaggtcttcagaaatgtatttgtcatttgcaatttctctgctgtaactacccctatcactgatgtgaacgtcttcagaaatgtatttgtcatttgcaatttctctgctgtaactacccttatcatgcctttttgcctatacata

SEQ ID NO: 790625 - DNA, 552 bp, Homo sapiens
catagaaaaaacccaggcatcaaagtcacatttgtggtaactctagagattaacactgtcatcatttcttgttcaaatataaataaaaataggaaacatggtcaatatttgatcgtcgtcaaatttgcattggagagttctagggaagacaaagtttgttttatatcttattccaagtcagtgtttccacgtggttagagatacaggattacctcagtcttgaaaacatacaactgaccaggaatgactaaaacattttccaatttaaatgttgaacaaacaggtatgartaacctcaaaaataatactttaaaaattgagggtgcctgctggttggacacatggaaataaaatgttgacattaacaacactgccaaggacctgctacccaatagaaaatttgaattcacaatagcaatgcagtcaagggagatggagctgtgccattaaagatacttttttccatgtagctgtattttaagattctccagagtgcttgtgcccacaacttatgttttaaaaaatagcaaggttgtcatgctacataccaga

SEQ ID NO: 790626 - DNA, 639 bp, Homo sapiens
tcaggagttcaaaaccagccggccaacttggtgaaaccccatctctactaaaaatacaaaataaaaaaataaataaataaataaataaataaaaaaaaaaacacattagcggggcgtgatggcgggtggctgtaatccyagctacttgggaggctgaggcaggagaatcacttgaacctgggaggcagaggttgcagtgagccgagattgtgccactgcattccaacctgggcaacaagagtgcaactccatctcaaaaaagaaaagaagtcatctccacaatatataactgcaaggtaaagcagcaaatgctgatgtagaagctgcagcaagttatccagatccagctaagatcactgatgaaggtggccacactaaacaacagattttcagtgtagatgaaatagcctaatattggaagaaaatgccatctagcactgtcatagctggagaggagaaatcagtgcctggcttcaaagtttcaaaggagaggctgacccttttattaggagctaccacagctggtgactttaagttaaagccggcactcactgaacatttcaaaaatcttaggaccctttagaattatgctaaatctactccccctgtgctctagaaatgaaacaacaaagcctggat

SEQ ID NO: 790627 - DNA, 611 bp, Homo sapiens
taactgccacaagggattttgtttgtttatttttttctctagcagcgaaacaagcactggcctggagataagcagtatcgaaacaattacaactcctctgacctccacacactgcctacctgccccccacaccctctttccaccagccgtagctacagctttgattggacaagagactgatttcagtacctttctcctggtaagagaccactgaccacggactggctttggctggttcacagaggctgtgcactgagtgcctttgcatccctgactcactttttgacgtatagggcttgactgtaatgcactgaaatattaaggcttgtctacggccatacgamctgaatgtgcctgatctcatccgaaatattaaggttccacttcaaggtgaacatgggtcacatgtaacatatatgtttatctagtctgcatgcattaggcctccctcacaaatatctgtaagattatcctgtaacctactgaatatgtacatatagctaatctcattgggcacaaatcacagcctctcctttttttctctaaagtgcctactttttgtctctgagagaggatgtgtttcccagcctgtcaggatgaccacgtgcagg

SEQ ID NO: 790628 - DNA, 623 bp, Homo sapiens
gtttttccaagtataagataatatcatttgcaaacagggataatttgacttcttcctttccaatttgattgctttttttttctttcttttgattgattgctgtagctggaatttcagtattttgttgaataacagtggtgagagtgggcatccttgtcatgttccagatcttagaggaaaggctttcagttttctcccattcagtgtgatactagytgtgggtctgtcatatatagtttttattatgttgaggtatgttcctttttttttttttttttttgagacagggtctcactctgtaacccagagtggagtgcaagagcatgatctcagctcactgcaacctccacttcccaggtgcaagcaattctccagcctcagcctcctgagtagctgggactacaggcatgagtcacaaatgcccagctaatttttgtattttttgtagagacggggttttgtcatattgcccagactgatctctaactcctgaactcaaagcaattcacccaccttagcctcctaaagtgtagggattacaggtgtgagccacaacacccagctagaggtatgttccttctatacccagttgtttgagggtttttataaggaagggatgttgt

SEQ ID NO: 790629 - DNA, 644 bp, Homo sapiens
ataaggttcaccccaaggcatttgtttctgattcagccggccgggcgtggcgactgagattgttcatttttaacacactccctggtgatacccttgctcctggtaccacactgcaggttgagtagcacggctgtatggagtgttcataggctagaaagatagctcktttttcctctgggaaacttgagagataaccctagagaacaggtgtaaactggcacatctcagggttgctgcatctgattgcaagacacctgctgtgtcactgactggctctagttgatctagactccttattcctgaaaaaatcacatgtgatcccctcctaggcatttgtgttctcatcccccaagacttatttccagtctcttccttcatttgctaggaaaatggggctaaggaatgaaggaagtcagtacaaaggaaagaaagcctatggcattgattccaggcccctttgaaaagtgttatttgtttatctattaggccccacatttcctaaattgctttattgcatatatgtatttataaaaattcaaggaaataaaaatcaccttagctttgaaacataacatagcacctttttgggtaaattgaggcacatccagaggggtcacagaaggagagctggaaaactcgacctt

SEQ ID NO: 790630 - DNA, 615 bp, Homo sapiens
ccgtgtgctcattaaagggatccaggtttttcctcattgttccagtgaacaaaacaggttcctaagtgcccaaaatagtcacggtcattaccacagactcttttttcattttattccaatgctaacatcaacaatagaattaagataccaaaaaataaaattcatgataataattayagcgttacaaatgcctgtttacaaaacaacatatctattaatgttccactgtacaaagcgtgctccaaaataccttccagaccactgaacactaacaaaactgttgcaatgtgctatcttatgaagataatgaaaaatacaggcctgatgtttaaaactgttttcctcatattattagcttaacatgaaatataaggatataattattcgagggtctacatgaatagagctatagaaattaactatcaatcatgtaatactggaaaataccgacagcatgattaaagtttgtgcttcaaagccaaattattaagcattttccaatttgcactaaagaataaattaggattattttctccattggcaaaacagttttccaagattaagaatctctcaccgggcgcagtggctcacgcatgtaatcttagtattttggga

SEQ ID NO: 790631 - DNA, 615 bp, Homo sapiens
ccgtgtgctcattaaagggatccaggtttttcctcattgttccagtgaacaaaacaggttcctaagtgcccaaaatagtcacggtcattaccacagactcttttttcattttattccaatgctaacatcaacaatagaattaagataccaaaaaataaaattcatgataataattacagcgttacaaatgcctgtttacaaaacaacatatctattaatgttccactgtacaaagcgtgctccaaaataccttccagaccactgaacactaacaaaactgttgcaatgtgctatcttatgaagataatgaaaaayacaggcctgatgtttaaaactgttttcctcatattattagcttaacatgaaatataaggatataattattcgagggtctacatgaatagagctatagaaattaactatcaatcatgtaatactggaaaataccgacagcatgattaaagtttgtgcttcaaagccaaattattaagcattttccaatttgcactaaagaataaattaggattattttctccattggcaaaacagttttccaagattaagaatctctcaccgggcgcagtggctcacgcatgtaatcttagtattttggga

SEQ ID NO: 790632 - DNA, 553 bp, Homo sapiens
ctgctcagggttagctttgccactaaacaagctgactcttaatcatgcttctggtccagcttcagatgtgtaccttagagcctaggaggaagatgctcttctatttgagtctttgcgtgtttgttcagaacataggaatccactgggctaactgctcataatccattagtgctatggtctgaatgttgatatckcttacaaattcatagtttggaacctaatacccaatatgataatattaaaaggtggggccttttgggaagtgattaaatcatgaggactctccacttgtgaatgggattagtgtcctaataaaagaggttgaagggagttgccttcccgcttccactatgtgaaaacacagcaacaagaagccatctattaagcagagaccgtgcacttactacatgttgcatctgcgggtgccttgatcttggacttctcagtctccagaactgtgaacagtaattttgttatttataaattatccagtctaaggtattttgttttagcagtctgaacagtctgagacaatgaggtatagtggggacac

SEQ ID NO: 790633 - DNA, 553 bp, Homo sapiens
ctgctcagggttagctttgccactaaacaagctgactcttaatcatgcttctggtccagcttcagatgtgtaccttagagcctaggaggaagatgctcttctatttgagtctttgcgtgtttgttcagaacataggaatccactgggctaactgctcataatccattagtgctatggtctgaatgttgatatctcttacaaattcatagtttggaacctaatacccaatatgataatattaaaaggtggggccttttgggaagtgattaaatcatgaggactctccacttgtgaatgggattagtgtcctaataaaagaggttgaagggagttgccttcccgcttccactatgtgaaaacacagcaacaagaagccatctattaagcagagaccgtgcacttactacatgytgcatctgcgggtgccttgatcttggacttctcagtctccagaactgtgaacagtaattttgttatttataaattatccagtctaaggtattttgttttagcagtctgaacagtctgagacaatgaggtatagtggggacac

SEQ ID NO: 790634 - DNA, 480 bp, Homo sapiens
tgggaggcacctgaaatcagttatcaggcaatgagaaatggttaggcaaattttcctgagacattcggtgtttctccagattgtaatgatgtttgagcttctgatttacatgtgtgggggcagaaatgcagatgacaattaggaacaaaacaagaactcattttggtggaattgtgacttccaagtctttctcaagcacctgcagggtgaggactggtaggtagactgtatcaacaatccagcccagcctccgagctaccagcccatggaggaggacaggtgagttgtctataggtagatttttgttctcttccttgcttcctcacttttgttctctctccyacccctagaacatgactccagcttaatagataggattcctgactactggtttttggaatgaagatagcatttttgagaacaagttctgtattgtggcaatgaatacatgattaatatcactattgatttcatcagtgc

SEQ ID NO: 790635 - DNA, 480 bp, Homo sapiens
tgggaggcacctgaaatcagttatcaggcaatgagaaatggttaggcaaattttcctgagacattcggtgtttctccagattgtaatgatgtttgagcttctgatttacatgtgtgggggcagaaatgcagatgacaattaggaacaaaacaagaactcattttggtggaattgtgacttccaagtctttctcaagcacctgcagggtgaggactggtaggtagactgtatcaacaatccagcccagcctccgagctaccagcccatggaggaggacaggtgagttgtctataggtagatttttgttctcttccttgcttcctcacttttgttctctctcctmcccctagaacatgactccagcttaatagataggattcctgactactggtttttggaatgaagatagcatttttgagaacaagttctgtattgtggcaatgaatacatgattaatatcactattgatttcatcagtgc

SEQ ID NO: 790636 - DNA, 611 bp, Homo sapiens
tgcatacaaattaagaaaaaatagctacctatgaaggtgacagtctgagaatccttttgtcaggcagattcacattctttaggaacattaaaaaacccactattcacaaagttggaaaatctgcagacaagatgaatgtaagggtatttcaatttttaaatttgatttttaatttaatttagggttttgtttgtttgtttgagacagggtctcactctgttgcccaggatggagtgcagtggcacaatcatggcycgctgcagcctcagcctcctgggctcaagcaatcctctcacctcagcctcccaagtagctgggaccagaggcatgaaccactacacctggctaattttttagttttttgtagagatgtgattccactatattgcccatgctgatattgaactcctggcttcaagcaatccttcatccttggcctctcaaagtgctaggattacaggtgtgagccactgtgcctggccagtattttaatgttataattcaattttactacaatgtaaaacccatgcacataatttttgttaggggagagattgggagaaagaaatatagaagtagaaataaagccagagcaaacagagagacaaaca

SEQ ID NO: 790637 - DNA, 635 bp, Homo sapiens
ttttgtgggtgtataaactgcctgttcatgtcttttgcccgttttcctttgggttgttcaccttttttaaaaaataaactcatatgagcactctttgtatattaatgaaattaaccctttctatgttccagttagttctccagttttttgcttgtcttttgcctttgagattttttttttctatatgaacatttgacaaattagttgttttcattttatagtttctgttcttactcattctcttagtgagaatttaaaagaccttcttttccatgtatgagagtgcattgaactaaaatggtaactttcatttgcatttccaaaagaatttcattgcaaatgagttgcatattttgactgccaaaataatattattttgataatatcattcatgatatatcaacagacaaataggatggatttagtggattcacaattatttaaaatattttattatattaatgttrattaacatcaatgcaacgtaaaaggagaagatggtcactagtggcataccactagtctctgtatttagttccacctgtttgatattttgcttaaatatttggactagaataaaataggcatgcttactagatttagtaatggtacaaagatggaaggattgttgatat

SEQ ID NO: 790638 - DNA, 571 bp, Homo sapiens
acattgtattagtcagggttctctagagggacagcactgataggatagatgtatatataaaggggagtttattaaggaatattgactcacatgatcacaagatgaagtcccacaataggccatctgcaagctgaggagaaggaagcccgtcaaagtccccaaatctcaaaagtaggaaaattgacagtgcagcyttctgtcagtggctgaaggcctgaaagcccctggcaaaccgctggtgtaggcccaagagtccaaaacctaaagaacttggagcctgatgttcaagagcaggaattatccagtatgggagaaagatgaaggcaggaagactcagcaagcctgctcttccattttctcctgcctgctttatttcagacgagctggcagctgattagatggtgcccacccagactgagggtgggtctgcctcttcccgtccactgactcaaatgttgatctcctttggcaacaccctcacagatgcacccaggaacaatactttgcatccttcagtccaatcaagttgacactcaatattaaccatcacagaaatagaatattggtgagc

SEQ ID NO: 790639 - DNA, 679 bp, Homo sapiens
tgcttatttgcattatcacttgtgtgtatacaggtcgcatgtatattttatatatagatttcatttacatttgcccccatttcctctagactcttcagaccacagatcaaaacttttgcttctttcgtcactcccataaactaaaggtcagtgttttgtcctgtctagctgcttaataaatactgataagtaataatgattacattcaaatctcaaaccatgcacatgaataatctgaagtttttcataaacattagagatagagtctcttataatttatctgatgtacacatgtacatgagttagaaatatggcttaaagggattttcatttggagttaaccaagggagaattttggctaatgtttatgtccaargaaccttagagtgccttaatttttctcatctaggaaatgggattactgatctcattgatgaggttctgtgtttcttcaaataacctctcatcgagactgagctgtataataactaaatgtttggttttgtacgttacacataaacatgtaaaactgacaggatgatgagaaattccatgaaagatcctagataaatttttgtgattcttagactgttagtatataatatgtatgtggtctgtgacatttttctgccatttatttctttaattaaattttgttttttaaatttcctttgaggat

SEQ ID NO: 790640 - DNA, 679 bp, Homo sapiens
tgcttatttgcattatcacttgtgtgtatacaggtcgcatgtatattttatatatagatttcatttacatttgcccccatttcctctagactcttcagaccacagatcaaaacttttgcttctttcgtcactcccataaactaaaggtcagtgttttgtcctgtctagctgcttaataaatactgataagtaataatgattacattcaaatctcaaaccatgcacatgaataatctgaagtttttcataaacattagagatagagtctcttataatttatctgatgtacacatgtacatgagttagaaatatggcttaaagggattttcatttggagttaaccaagggagaattttggctaatgtttatgtccaaagaaccttagagtgccttaatttttctcatctaggaaatgggattactgatctcattgatgaggttctgtgtttcttcaaataacctctcatcgagactgagctgtataataactaaatgtttggttttgtaygttacacataaacatgtaaaactgacaggatgatgagaaattccatgaaagatcctagataaatttttgtgattcttagactgttagtatataatatgtatgtggtctgtgacatttttctgccatttatttctttaattaaattttgttttttaaatttcctttgaggat

SEQ ID NO: 790641 - DNA, 589 bp, Homo sapiens
aggatgatgagaaattccatgaaagatcctagataaatttttgtgattcttagactgttagtatataatatgtatgtggtctgtgacatttttctgccatttatttctttaattaaattttgttttttaaatttccwttgaggatggaaaatgagttggcttagtcacagaattaatgggtgaatgtttaactatctgtgaagaaaaaacaatgggttaggtcaacatttctctggaaagtgtttaaagtctagaaatgggaattggccaagatgaattcattataaatttgaattgggtacaataagctgcgtattaagaaaacacgtagaagtggacaaaatctcacgtgaattttttttaatcctagggtcttagcttttggacacagggttagtttgctattaaaaagaaatcttagtgacaaaatactccctaacaagagaagccattagaaaaggtccaaacgaggaacagatttacttctagcaccttatggggaaatattcctctaaatcagtagtttgacttcagtgtgaaccagaatcacacagaggctgtggagccccaatcccaggggctctgtagt

SEQ ID NO: 790642 - DNA, 589 bp, Homo sapiens
aggatgatgagaaattccatgaaagatcctagataaatttttgtgattcttagactgttagtatataatatgtatgtggtctgtgacatttttctgccatttatttctttaattaaattttgttttttaaatttcctttgaggatggaaaatgagttggcttagtcacagaattaatgggtgaatgtttaaytatctgtgaagaaaaaacaatgggttaggtcaacatttctctggaaagtgtttaaagtctagaaatgggaattggccaagatgaattcattataaatttgaattgggtacaataagctgcgtattaagaaaacacgtagaagtggacaaaatctcacgtgaattttttttaatcctagggtcttagcttttggacacagggttagtttgctattaaaaagaaatcttagtgacaaaatactccctaacaagagaagccattagaaaaggtccaaacgaggaacagatttacttctagcaccttatggggaaatattcctctaaatcagtagtttgacttcagtgtgaaccagaatcacacagaggctgtggagccccaatcccaggggctctgtagt

SEQ ID NO: 790643 - DNA, 560 bp, Homo sapiens
aattccatgaaagatcctagataaatttttgtgattcttagactgttagtatataatatgtatgtggtctgtgacatttttctgccatttatttctttaattaaattttgttttttaaatttcctttgaggatggaaaatgagttggcttagtcacagaattaatgggtgaatgtttaactatctgtgaagaaaaaacaatgggttaggtcaacatttctctggaaagtgtttaaagtctagaaatgggaattggccaagatgaattcattataaatttgaattgggtacaataagctgcgtattaagaaaacacgtagaagtggacaaaatctcacgtgaattttttttaatcctagggtcttagcttttggacacagggttagtttgctattaaaaaraaatcttagtgacaaaatactccctaacaagagaagccattagaaaaggtccaaacgaggaacagatttacttctagcaccttatggggaaatattcctctaaatcagtagtttgacttcagtgtgaaccagaatcacacagaggctgtggagccccaat

SEQ ID NO: 790644 - DNA, 637 bp, Homo sapiens
attcattttgacttaaatgccaatcaccaggagtcttctgccactgaacacctcaataatctccctccagagctggaacatacactgtggtggacatggagatgtgccacccatcacccccttcaaggacttgtcccagcttctggaggtgtagttgctgggcaaccttctgctgtcaccccttttggggacagccctcatgcaatgactaatcaaggtggagggagaaagccctggccattggcacacaggacgaccctcatggaccatkttagctccagggttcctggtgggatcagctggtctctctggctagcactccagctcaatttctccatccacccaatcctgcttcttccctcttcattccacaaggattaattccaagggtaactctgtaataaacatccggaacaccaaactccatctcagagtctgcatcccagataatcaaactgcagcacagaccaaagaagcttctagggcttggggaggatttttacttgaaaactgttagttatattcgtaagacttatttcttcccaacccccatctagcttctgcagaatcataacacttatttctaaatcctgaaatccgatataaaatagtggaaacaaggactctgtatgtgaat

SEQ ID NO: 790645 - DNA, 553 bp, Homo sapiens
taaagaaaatgtgatacatatacaccatagaatactaggcagccatagcaaagaaagagatcatgttctttgcagcaaaatggatggagctggagaccattatcctaagtgaactgatgcagaaacagaaaaccaaacactgcatgttctcactyataagtgggagctaaacattgagcacacatggacacaaagaagggaacaaccgacaccagggcctacttgagggtggcgggtgggggaagtatgaggatctaaaagccacccattgagtactatgcttactatctgggtgatgaaataatatgtacaccaagcccccatgacacacaattcatctacagaaccaaactgcacatatacacctgaaactaaaagttaaggaaagaagacttttatttcaaccagactgtgctttattcatgttacatacctaatatatttctatacacatgtgatttgagctagatcactgataagggacatttgtttagaggaagaattgtgtatttgtccaaataaatctttgaagatactgtaaaattccatgaga

SEQ ID NO: 790646 - DNA, 647 bp, Homo sapiens
gagagtgagagaaatttgaaagtagattcaacagcattcatctttttgaggaagtttcaaaggtctgtttagagattgcatctgtgattgtggaataaaccttgattgtcacctgcaccgcttttgctaggttttgtagattaaaaagagcattaattaaaaactagaaagttcaccagattaagtgattgtgttttctacatatgggaaacagatccccttggattgcaatctccattattataaggagctcattcctatttttgaactaatgtaaataagaaatcaatgaaatttaaatagattgtaactgcttgtgaaactgtaatcattgaagttgttatatgccactatttctcatttrcctattagttaaaaaaaggagaggagggattaaaccccattcattgcctctttccctttgtatacaagagtatgtgtccgaagaaagtttctcataaacccacaagggtacttggtttttggagcactcatgttcccaagtcacgatgttagtcatgtagtggttttccaataggatttcatctctgtttgccataatagttttggaaactgcaattcaaccccaatcacatttagcgtttataaaagctgtctttatgggaaagctgaagtaagacccacag

SEQ ID NO: 790647 - DNA, 636 bp, Homo sapiens
ttctaccgccttacaaaaccttcaagtattgtctctactctgctcactgtgtggtcacatgaacagaggtcatcatcctctcttgcctgcatccttgcatctggccaccccctcctggcctcactgccactggcccatccttcccatagctgagggacttcgaaaatgcacatctgaacaggtcatttcttttcctgcttaaagcatccttcagtagatcgctgtggttgtcaggatgaagtctgagctgctgaacatgtaacaaaaagtcctctgtattctggaaagcctcgttccagcccctgcctcttcaggcttgttaccttgaatgctccatgtcatcgcctccatcgcaacttgtactccacggcctcaccacastatggtgctgaactctcccgacctggccataccctttcgcctctctgcctctctgcagtaatcagcaagtgcagagagggcaaagggcatgtctgtcctgcgaacagtgtcctcagaaacccacaggactcctgactcctagcctccatcggtaaactttgttgaatggatgaatggatgaatggatgaatgaatgatgagtctttgtgcatagtcctttgtatgccactccatgcccttctttgtgtagtcggt

SEQ ID NO: 790648 - DNA, 636 bp, Homo sapiens
ttctaccgccttacaaaaccttcaagtattgtctctactctgctcactgtgtggtcacatgaacagaggtcatcatcctctcttgcctgcatccttgcatctggccaccccctcctggcctcactgccactggcccatccttcccatagctgagggacttcgaaaatgcacatctgaacaggtcatttcttttcctgcttaaagcatccttcagtagatcgctgtggttgtcaggatgaagtctgagctgctgaacatgtaacaaaaagtcctctgtattctggaaagcctcgttccagcccctgcctcttcaggcttgttaccttgaatgctccatgtcatcgcctccatcgcaacttgtactccacggcctcaccacagtatggtgctgaactctcccgacctggccataccctttcgcctctctgcctctctgcwgtaatcagcaagtgcagagagggcaaagggcatgtctgtcctgcgaacagtgtcctcagaaacccacaggactcctgactcctagcctccatcggtaaactttgttgaatggatgaatggatgaatggatgaatgaatgatgagtctttgtgcatagtcctttgtatgccactccatgcccttctttgtgtagtcggt

SEQ ID NO: 790649 - DNA, 613 bp, Homo sapiens
ttggaaattatattccactattgctatttgtttttacagttttcaattcagctcctacttaagttattcaacatcactaccatagttgatctgtaataccgagagcatgcactctccatcagttaaaaaacaatgtccttgaaacatatattaatccataggtagtagaacattaaaacatttctaatccatttcactgaagttgctgtgaactgcagctcaacaaacaaggaggttagaacatcataactgatggagaaaactcaaccctgccattccaggttggttgcaagaatgctgggacgggaagctcagggaaaggaatccagaagttcagcatgcagccttggtgtgggtcaggcacagccaactgctgaaggtgtgttttgtgtccaagctggcaggtttactagggtacgcctcttgaagatggtgggtagcctgattrgagcctagagtcaagaatgtcaatgggttggcccttctgatgagttatagtatcatgtcccaggagagctagattttcacgaactcatttcctcaaattcaaggttttagatagtttctctccatggctatgaggaaatgaaaataattaactatgaaacagtga

SEQ ID NO: 790650 - DNA, 561 bp, Homo sapiens
aatacagtaatcatcttacaagaccactgctaccctttggattcctcatgtcggaatcagacaccaggtatgaatcagattagttcataattacttgagatataaataaacaattgctcagaagtacaacttttttatacccaaatgacataaatttctctcctgttttcatgaaaggaattttgtacacacagtatcccaggtatattaatagcatacaagtaaaagtcaaagcattacaactttgacaaaaataaacagaatgttttcagacttcaagatagaaaaatttcttacaagcacagccataaaggaagaaaactaaatccagggaccagaagaaatgctaaaaattattattcaaraaaactttcctgaaataaaaaagattagaagttacatattgagagagttctccatacacctaaaaagatcaacccagaattataatatcaagacactctaccacaattactgggttttaattttttaaaaatcctttgactatttagaggggaaaagagcacatgatttataagagatcataattagataaacttc

SEQ ID NO: 790651 - DNA, 619 bp, Homo sapiens
tgcttgacagttttacaaagttagcatgaccatgatttaccaccttttccaacttataacatctgtgaatttgcttgaaacacatactgccagccagtcatagtcaaatcctgtctccatatccctgcccctcctgggagcacatttatttattatgtctttgcgtaattattcttatcattggaaacagtgtgcttgatgttaatgttcaaatctgtcagaggtaacacttcttttcatagctactttgtaatcctttttctaactatgaggtaaagaatacataaagaggaatttatattagataagtatttcatcataaatgttcaggtatgactacagtacacagcatattcraagatgattgccataatatgcaagacctctatgagtgtcctacaagccactatcagaagataaaggattattgttttggtgattcagtaccacaagtggtgttgctattggtttcatgattttccaaaatggtaaagagcttttgatgaagttccaaataccatgtgatcttcctttggttatataattacattcttgggaagatcaatgtgtattacatgtatattaagatatacattagatgtgtattaaaacttcagag

SEQ ID NO: 790652 - DNA, 603 bp, Homo sapiens
ccagctggacgacccgaggggcttggcctgcggggaaggtgcaggacatgtgccagtgcctccggcagcagcacttgttcctggaatggaggcaccactcaggggtcagcacggagcaccggctcagtcctgcggccagcgctgctgcraagtccttagaaaggcttagcagtcctccgttcattgccagccagcaagaaagtgtcggctgagagtgttgtctcactgtcttgcacgactgtgcacccagctttgcagctcagacagacacactgggtgggtgccactgcctgggatctacttgcacctcccaatttacgcagagggagtcattccacttagagccccaggctggggagggcgagtggcatttgggttgtaaagactgaatgcctactgtgtttggagcaaagcagtgagcccccaagtcacagcccctggtgtggacagaaacgccatcaatgggaacccctgagtatcttcaggattcagaagagggaagagcagcaggactttgcagacctgggaaacttcatagggaaagaggagtgttcagggttattccagtagggtgagagaagggaggaacaccaggcaggatga

SEQ ID NO: 790653 - DNA, 484 bp, Homo sapiens
tgcaccaatctctcaaggcttttaaaaaatgtgcagtcctcacacaagtcaaaagtgccgaatgtcagccagccatggggtccctgccaaagagagctgctctccaggcccacccacagcatcatcacaattccaacctgaagcagcaacacatatgacacagcctccaccccattccgttaggagcagctgtcatgtggctgggggctgaggtttgtgtgtggactggaaggagagaggtgggggctcgcggtcctcwgagctgaactctccctctcattcggcaccttcacccacaagccacctttgtccttcacaaaagccacctgggctctgcctcagacagacagcagttcacagcatgcaggccaatctcttagctaacttcacgggaacgagcacttacattctccctcctccaggcccaagatttcataaccagaaactccagcatcctctcctgggctgcactgcagttgttcag

SEQ ID NO: 790654 - DNA, 536 bp, Homo sapiens
  misc_feature 332: n = A,T,C or G
gccgggcgtggtggctcatgcctgtaagcccagcactttgggaggccgaggcgggtggatcacaaggtcaggagatcgagaccatcttggctaacacggtgaaaccctgtctctactaaaaatacaaaaaattagccggacatggtggcgggcgcctgtaatcccagctacccaggaggctgaggcaggagaatggcgtgaacctgggaggcagagcttccagtgagccgagatcgggccactgcactccagcctgggccacagagcgagactccacctcaaaaaaaaaaaaaaaaagattcattatgaagagcaaaagaacaaagcttccncagcatggaaggggacccaagtggattgctgctgctggctggcgggggtsggggggtggggcagcttttaattcccttatttctcccctcccatgttctgtttctgccctatcggaatgcccttttttcaatctttcctgcaattggctacttttaggatcctgctgattggtgcgttttacagagcactgattggtgcatttt

SEQ ID NO: 790655 - DNA, 507 bp, Homo sapiens
tgatatgcccctgaggagaaagcaggtttatcacagcgaaaaccaccattaaccctccactactccctggcaggaggcacacaggaaacgtctatgtactcggagacaggtccagggctagggcacacagtgggccaggtgttcccggggaaagccaggcggcacaagctgcttagccctgtttgactgtgctctcagtgcccaggtgcagagggcatctgaggtctgagaatgkggattcctgctaccagggctccatctcctgggggaggggtggaggcaactcgagtgaacacagcagaatgaacagtaagactcctgcccacacccctacctcctcggctctcaaattcatgtggacacacctagtttgggggatggtcccagactctgccatcccggcaatgaggacacatgaggccactggatgacagccctgcccaccctccagaagcccgggtctgccacacctagcacctgcagccaccaccttgatgggctcacaga

SEQ ID NO: 790656 - DNA, 631 bp, Homo sapiens
ctcactgttacagattagagatgggggcgctttctagtggaggattttgcttttgctcttctacttttgcaagaagctttttgtcctgaaaagtggacagtcatctccttttatagcttggaatgaaaatttgactatggaagttgcagtcgctacttgagaaatatttcctccttctttttttttttttttttttatttttgacacggagttttgctgttgttgcccaagctggagagcagtgcgcgatctcggctcactgcaacctccgccttccggtttcaagcgattctcctgcctcagcctcccgagtaggcgggattacaggtatgtgccaccatgcccggctaatttttgtatttttagtaracacggggtttcaccatgttggccaggctggtctcgaactcctgacctcgtgatccacccgcttcggcctcccaggtcctccttccgttttaaaggataaaccttgaaatgcttttaaaatatgcagcgtgtagaatttggttagttggttggttggggttttttagagaaaatgagaggtagaatggactctaagttaaaccctgggggacagtgtcactctggccgctggcctggctgggaaaggcgatgagaccctgag

SEQ ID NO: 790657 - DNA, 631 bp, Homo sapiens
ctcactgttacagattagagatgggggcgctttctagtggaggattttgcttttgctcttctacttttgcaagaagctttttgtcctgaaaagtggacagtcatctccttttatagcttggaatgaaaatttgactatggaagttgcagtcgctacttgagaaatatttcctccttctttttttttttttttttttatttttgacacggagttttgctgttgttgcccaagctggagagcagtgcgcgatctcggctcactgcaacctccgccttccggtttcaagcgattctcctgcctcagcctcccgagtaggcgggattacaggtatgtgccaccatgcccggctaatttttgtatttttagtagacacggggtttcaccatgttggccaggctggtctcgaactsctgacctcgtgatccacccgcttcggcctcccaggtcctccttccgttttaaaggataaaccttgaaatgcttttaaaatatgcagcgtgtagaatttggttagttggttggttggggttttttagagaaaatgagaggtagaatggactctaagttaaaccctgggggacagtgtcactctggccgctggcctggctgggaaaggcgatgagaccctgag

SEQ ID NO: 790658 - DNA, 547 bp, Homo sapiens
cagaaaaccagctccctggggacggctgtttcctcccagcaaggcagcaggggcgagaccgtgaaagaaccatcctgtgttctcagctgtgcacttccctcacgttcttactctgagaccaagcttcctccactgtccctggccaggcaagagccccacaatggtcacctgtcaccatccaggaaacatctcatgaaaactctgctcaattgtaccaagaaaatactctgagccaacatccagcagccggatatgactgtgggagttgacaacaaccctacccctctaatagtaatgcttttctgccagaagaaagaactaaaacctcaagacaaattaatcaatcacaggragaaaggaggcgattaggtgaccttattttttaaataagctaataattcaaattcagtaatccaatgtagttgcttgcatttatagttgctttaattttgttctgaatagtctatgacaattaaagggcattcaaaaacatagctgtgctttatgacataaaggaggatgattacttttctagtctagcaagtcc

SEQ ID NO: 790659 - DNA, 547 bp, Homo sapiens
cagaaaaccagctccctggggacggctgtttcctcccagcaaggcagcaggggcgagaccgtgaaagaaccatcctgtgttctcagctgtgcacttccctcacgttcttactctgagaccaagcttcctccactgtccctggccaggcaagagccccacaatggtcacctgtcaccatccaggaaacatctcatgaaaactctgctcaattgtaccaagaaaatactctgagccaacatccagcagccggatatgactgtgggagttgacaacaaccctacccctctaatagtaatgcttttctgccagaagaaagaactaaaacctcaagacaaattaatcaatcacaggaagaaaggaggcgattaggtgaycttattttttaaataagctaataattcaaattcagtaatccaatgtagttgcttgcatttatagttgctttaattttgttctgaatagtctatgacaattaaagggcattcaaaaacatagctgtgctttatgacataaaggaggatgattacttttctagtctagcaagtcc

SEQ ID NO: 790660 - DNA, 556 bp, Homo sapiens
tattagatataaaaaggaatggaatactgatacatgctacaacacaggtaactctaaatataaaattatgcagagtgacataactaatcactaaatagcacacgttgcataattccattcatatgaaatgtcctgaacaggcgaatccagagagacagaaagcatactagctgagtggctgccagaaactggggagactggggaacaaggagcagatgctaacggggatgggctgcttctggaggcaataaacatattctaaggttgatcatggtgatggttgcacaactatgaatatacttgaagccaccgcatagttcactttaaatgggtgaggggtatggtaggtaaatcatctaaataaagtcgtttttaaaaaaccatctctgcagtttctttgctaccagatcccacgggcrtcttgaatccttgccaggactcaatctgtcatcagaagaatggggctatgaataggaatctacctaatcgggttgttttcaggcctacaccagatgatgacctcattcaggaacgtcgacgaagtaggaagcctctg

SEQ ID NO: 790661 - DNA, 626 bp, Homo sapiens
gggtggtttaaaggctgatgtgctctccagggcttgtgagtcttcctgggcgcccctacccagtcaggatggctgcagacgcatcttcatgcgcattccagcagcgtctctgccaggggtgctgaaagtcactgtctgaagcagctgggagatggaagtgattctgactttggggcacccaccctctggaaaatgtggcacatcattagagggtggttcaagcacactcagctctcagggagcagttattcctggcaccaagaaactagcctggaaaaaatctgtcttttgcaacatgcaggatccatgaaggacagagctctgattttcaaggtgcaggatgttcagcggttygattccagatgaggcatctccactcactatacttcagcgggatcgtgggctccctggcacagatgtcagggttatgaattgtgattggtttatattttatgatccacattttggaaaccaattatttgttgaggatctttgtcttctcatttattttaggtctagggtgaaacatttcttttatgtttaacactgggcactgacgctgaggtgtgatccacacacaaggtatcaagcctacctcaagtcgagcaggggtcttcaggactgca

SEQ ID NO: 790662 - DNA, 546 bp, Homo sapiens
ctcttcatgagtcacagatatctttgcttctcctcaaataggatcaagtgactaaacctgaggcaggggctccatccaatgtgatgatggctttgagtttggggcaccagctctgaagggtgagggacagatacagggtctcttagctcctttcttgctgctgagggctcctctgctgcctgtccaatgctaccaccttctttctccaagtaggattctctcctctcttggaccactcttgaagagagtctcatacacaggcattctgatagtttcctaaggttttggctgctaattacttagagtcacaaacaatctttgagtaccaagcatccttcttctgacctgatcttatttttyccactctggttcaaaaacaatgttaccaaagatgcttaaagtctctgatagaaagctgttattgccattgatgctcccagtatttttcaccacttagatcagtcaactcacccattgtggtcatagttgtcaagagcatacagtagaatctggtagtgaatccataactctaccaaagagtaaaaa

SEQ ID NO: 790663 - DNA, 537 bp, Homo sapiens
tacatctggaaggttacacgagaaacctctgaggtttctggagatgtaaactgggggcatgaaggcaggggaaagggagagacttcactgtttacctttttattattttccaattttaaatcatttgaatgtataacttgtctaaaaatcaaattttaaaagttgagggaattaacattacagaaagtaacaaacctcaaggaagcagccaccttcaccagatggacagtctacctcactcttcccatgctccagtagttactgaatgccagtcccctccctccattcagtctgccccacctgctggccttctagagcctcagtgcagtcctattccyacacctccaaacacatccatacactgtgatggtcgatctgcgaccaccagttgagaggaaatgtgttgtgtttccacacttcagacaaacagagtgttattttattgaggtttgggatttttttcttgcattaacagggtttctagatcccagtaggtgaatgagaaagaagtatgcttttattgcgtaaggaatttgt

SEQ ID NO: 790664 - DNA, 549 bp, Homo sapiens
aaaaatcaatagaaacaaaaagtcataggtattgttccaatactccaggaacatcacaatttggattctgtagatgtgtgtaatataatgtgtaatattacattctgacaacctcaagttgaaaactgcacagctgaagatcacttatagtcaataacacttttcaaactttaattttaaattcatcaagtctctccctaatgtaacatactttttaataaaggaaactgtcagagatgctataatacagaggaaaacgtttatatactctttcattataattttyccacaacttccaaaatgaagaaaaagacatggaaacattaagttcagagaataattgtggcagacaattccctcctcctgaaagttcagttaccccaacacaggcataatttcttactgtctcaaaaggaactgaattcacatacaaagacaaacgtgggattttgttgagttctgttggacacagaacacaattgctcaagcactggttgggcacttgtattctaatagctcacggttactgagcactccatgtctgggaag

SEQ ID NO: 790665 - DNA, 601 bp, Homo sapiens
gggagccaggtatgtaaggcagttgccggtgggcatgttttgaacctgtattgggcccttatatgtatgatctctgtgatcccatcattactgttcatttcttccaggagaggaatgacacacttctcactttaattgccagattatctccaattctgaatcagtggaatataatttaatatgattttactatgattgagtcattctctcccaggtactgctgggctaggataaaatgagatctgaattacattaaaataattaattattccaagagaagaggtgacagaatgttttaagtgggtgtgtaatttagataacctagatgcagataagctgaataaagcatttaatccagcacattcrtattttaacttgatcatcagcaatgggagtttgaaacccaattgcagctgcaggtcccacacaactgaatttggttccgtgtgcatagcagtgttcgctggacatgcctggaagtctgaaggtgtgcccttttataggcaggaattccaccaggatgggtatagcttgtttttttaaaaggcttgggactggatatgattgcccaagaagacagtgtagacagcgaggagggctg

SEQ ID NO: 790666 - DNA, 601 bp, Homo sapiens
gggagccaggtatgtaaggcagttgccggtgggcatgttttgaacctgtattgggcccttatatgtatgatctctgtgatcccatcattactgttcatttcttccaggagaggaatgacacacttctcactttaattgccagattatctccaattctgaatcagtggaatataatttaatatgattttactatgattgagtcattctctcccaggtactgctgggctaggataaaatgagatctgaattacattaaaataattaattattccaagagaagaggtgacagaatgttttaagtgggtgtgtaatttagataacctagatgcagataagctgaataaagcatttaatccagcacattcatattttaacttgatcatcagcaatgggagttkgaaacccaattgcagctgcaggtcccacacaactgaatttggttccgtgtgcatagcagtgttcgctggacatgcctggaagtctgaaggtgtgcccttttataggcaggaattccaccaggatgggtatagcttgtttttttaaaaggcttgggactggatatgattgcccaagaagacagtgtagacagcgaggagggctg

SEQ ID NO: 790667 - DNA, 618 bp, Homo sapiens; identical to SEQ ID NO: 770643

SEQ ID NO: 790668 - DNA, 616 bp, Homo sapiens
attttttggctttttaatagtagccattctgactggcatgagatggtatctcattgtggttttgtttgcatttctttaatgatcagtgatgttgagttttttttttttcatatttttgttgactgcatgcatgtctcttttgggaagtgtctgttcagatcctctgcccactttttaatggggttgtgtttttcttgtaaatttaagttcctcatagactctgaaggagatattaccagtgaaggctgagaaacagcaaagatggcagccagctccttcctttggaagctccatcccagggggatactgacctgtatccagcccgcacatacctgcaagaggtggctggagacccctgttgsgcattctcacccagtcaggaggcatgggatcagggacccatccaaaaaagcagtctggctgctttggggtagagcaggtgtgctgcactgtgggggatccttcctcctccagaccacctgtattctccaaagccagcaggttggaatggctgagttgaccaaactgcagaggtggcagctgcccctcccaccaggagctccatttcagggagagatcaaagctctgtccatagaaccgctgctggagtggttaa

SEQ ID NO: 790669 - DNA, 636 bp, Homo sapiens
taaaatacctagcaatccaatttacaagggatgtgaaggacctcttcaaggagaactacaaacactgctcaataaaataaaagaggacacaaacaaatcgaagaacattccatgctcatggataggaagaatcagtatcatgaaaatggccatactgcccaaggtaatttatagattcaatgccatccccatcaagctaccaatgacttccaatgcttttggaattgggaaaaattcttcacagaattggaaaaaactactttaaagttaatatggaaccaaaaaagagcctgcattgccaagacaaacctaagccaaaagaacaaagctggatgcatcacgctacccaacttcaaactatactacaaggctacagtaaccaaaacagcatggtactggtaccaaaacagagatatagacaaatggaacagaacagaggcctcagaaataacrccgcatatctacaactgtctgatctttgacaaacctgacaaaaacaagaaatggggaaaggattccctatttaataaatggtgctgggaaaactggctagccatatgtagaaagctgaaactggatctcttccttacaccttatccaaaaattaattcaagatggattaaagacttaaatgtt

SEQ ID NO: 790670 - DNA, 563 bp, Homo sapiens
atcagtaaagttggaagctgacacacttatagagtcctgcttgccaaaaataggatttcatttgtactggaattttttcccctgaaccagttttgccaatgctgtagtaaatgacaactttgggaatgcaggattgggaaacacgatgtttcagtaggtggcgcttcaacacagcccacctgctcgagggcttacgtgagtgctcaactttctaatacctgtggtgcatcaaagaggcttggcccagtttgttaacatcgcagccagactgttgtctcaggcaataacgacgtcaaatgcagctgaaacatctaggcgggaaggactgttactgtaggtcactggtaattattttcacacacacacacacacgcacacacacaccttcatacatacctacactagctctacttctaaaattaaaagccagagagagccagtctcaaaatgtcaatsatactgcaataatttcagcttcttatttattttttgtttgggttattggtctatagttgcttattgtctgttttcttttaaaaagaattttgcaatatttttgcacc

SEQ ID NO: 790671 - DNA, 571 bp, Homo sapiens
tcctagtagcactaccatctcaactgacttggggaagaagaagaatgggacatccccaggcgagaatgcaacagactccactgtttttacctggagcccaagaatttttcatggatagaggcttctgtatttgttgtttacctatggcatttcacagagctgtgaagtggtagtttttgacaattktatccagtttggggtttattttgggtggaggggaactgctgacatttcttcacactgggagtccccagtgttgttcaaattttaagaatggaaatttctactgccgctcttatttgcttgatacaacattcagtatgcccaccccacatctgactctataccatctctctgcttgcaatcaaatggtagagcaatcatgccacatattttgtctgaccaataaataagtgctaatttgagtgaaagctttcactgcaaatgaagtgctgcaaataatatataatgaatttcctacctgccacagtggttggcgtcacagtggtctggactccatatggataagtaagtcagctcatcataattaaaaaataaatgtttagctttt

SEQ ID NO: 790672 - DNA, 541 bp, Homo sapiens
tggcaaggaaattactgaagtagttcaaataatccatcccataatttcatttgagtaagaaataaagataatcctttaggagtaaagaggtgaaattgcaactttgtccccaggttctgtaactaggccttcccttatctttccatgtcatgactataggtctatcttatgttccatccaaataaaatttaaaaaataatatatgaaagtcttcattataagcaccccatggttacaaaatacatataaccattataagcagtaagtagctttaccttytaaagcatatataatgatgaaaatttatttcttcaaacaccttgcacaatttgtataattcaatgctacttaagtatctaagatacaaatacagctccacaactggtatgtcacatgctatgaactttttaaaagttgacagctataactttcagtgaataaagtagaaacaaagtatgaatgaaaactgatgcttcaatgaataaggtatgcttttacaacggtactgcctaaaaaatttctaaacataaccacatcctga

SEQ ID NO: 790673 - DNA, 541 bp, Homo sapiens
tggcaaggaaattactgaagtagttcaaataatccatcccataatttcatttgagtaagaaataaagataatcctttaggagtaaagaggtgaaattgcaactttgtccccaggttctgtaactaggccttcccttatctttccatgtcatgactataggtctatcttatgttccatccaaataaaatttaaaaaataatatatgaaagtcttcattataagcaccccatggttacaaaatacatataaccattataagcagtaagtagctttaccttctaaagcatatataatgatgaaaatttatttyttcaaacaccttgcacaatttgtataattcaatgctacttaagtatctaagatacaaatacagctccacaactggtatgtcacatgctatgaactttttaaaagttgacagctataactttcagtgaataaagtagaaacaaagtatgaatgaaaactgatgcttcaatgaataaggtatgcttttacaacggtactgcctaaaaaatttctaaacataaccacatcctga

SEQ ID NO: 790674 - DNA, 610 bp, Homo sapiens
tgctattgctaggccaataattatgatttgcattgaaattgcaattcacaagcatgtagaatgatccagccaaaagaactcagcccttttggttccatttaaatctggaagccctagaggaaacactactcatttgcagaaactgtagtgccagtgcgtgtgataaattgaatgaaaaggacaggaaagacacttcaagcattcactttctgatattgaaacccatcctatttttaatcctctctcttggrtatttaattccagatcctagtcaagtcatgctgtaaaaactacccaggttgacaaattatcagtgcttcacttagctgcaatttcccttctgaaaaccaccttcatgaagtggtattcagaaacacacgcttagtttagagacaatcttgttgaatagagaaatgactctgaaaaccaaagaattaatagcagaaatcataaaattagttaattacaaaaaagtgagacagtaaataagaatgtttaaatgggctgaaagtttacaagttctgaaacaacaagtgttggtataattaaaagagatctataactggaggcctagggtttagaaggatcatgacaatagatcctaggaact

SEQ ID NO: 790675 - DNA, 645 bp, Homo sapiens
atcttatgagaaaaacagatagacaaatacaaaacattacacatgagttaactgcttctagagagttatgaaaaatactacagtattctatagctggggagaatatatttgcagtaataaaatcaagaaaggatttgcaagtcaaagtatattaagtgctctataattcaktttttttaaataaaataatttgcaaattatatgaggaggaaattcacagaaatacaaatgaccaaaaaaaaaatgaaagatattcaatcttactagtaatcaggaaaatgcaaatcaaaatcataatgaaatatgattttctacccaccaaattggcaataccaaatgctagtgagaatgtggagcaacaggtcccatattgctaaagggagaataaattggtaaatctactttggagagaaacttgtcaatattccaaaaaaggtgaatatggatacatcgtctgatttggttttactgtgtccccacccaaatctcatctctgaattgtaatccgaattgtaatccccaagtgttaggggagggacctggtgggaggtgattggatcatgggagtggtttcacccatgctgttcttacaatagtgagtgagttctcacaagatctgatggttttatacatgttcggcagttc

SEQ ID NO: 790676 - DNA, 603 bp, Homo sapiens
agcatgccaatatttccacaactttcccaacatcaggtattacattttttaatgttgctaattcattacctgtaaataataatatctcactgttttgtcttatattttcttttgagataaatttaaacatttttaaattttgtttttattttcttaagaaacatttgagagaatgtgccaggaggcagaatttgtcatgtcaatagcaaacaataggatgtcaaactgaaaaaaattgaagataatgcattagagagaacatgcaatttgataacatttatgcttctgttgcattattatatttttagtcaaacttagagtcacagwcaccttaatttaagcacaggaaatatacacaaatttccaagtcatcattatcaaaatttaatataattgtttgaaattaaaaaagaataaaaataatcctaccctatttacagtttctggactcttatcacttgattcttctggaattttaacaaggaatttagaggtgtcagccaactgagtatgggttggtagtcttctgacagtggggacaaatgtgaagatcagaggtttggcttcagaaccaccagcagagacctatgagacatgtagtta

SEQ ID NO: 790677 - DNA, 584 bp, Homo sapiens
atgtgtcaggcacagttcaaggatcaggagtgctgctctgaggttacaggtgttcagtaggtggccatgacaggccttgcccagaaaagaaaacttgagcaaagacttgacgaggctagaaacaggagacagccatgcaaccgccctagagaaggagcaagcctagaacgttccaggccagaggggctgaacaaagtgagccagagggaatggggtgggagtaaargtcagacaggaaagactgcttctggggtggaggggcaagtgtcaaaataaaccaaactcagatctgatcaagtctcgccatcaacttaaaggtacagaaatacaggggcagatcaacatggtaatacagagcaacatgataataccttgagattatcatcagcacaagtaaggctgtggaagactctacaggaaaagtgacctagtttcttcaaaaacagccaaaaactgaaaaattgcaagaaagaggtaatgaagaggctcctatggattaagacttgaacaaatcaaccaatcccactataaaaaccttatttggatcccaattccaaccagcaaactgtcttaccactattcat

SEQ ID NO: 790678 - DNA, 356 bp, Homo sapiens
agggaatggggtgggagtaaaggtcagacaggmaagactgcttctggggtggaggggcaagtgtcaaaataaaccaaactcagatctgatcaagtctcgccatcaacttaaaggtacagaaatacaggggcagatcaacatggtaatacagagcaacatgataataccttgagattatcatcagcacaagtaaggctgtggaagactctacaggaaaagtgacctagtttcttcaaaaacagccaaaaactgaaaaattgcaagaaagaggtaatgaagaggctcctatggattaagacttgaacaaatcaaccaatcccactataaaaaccttatttggatcccaattccaacca

SEQ ID NO: 790679 - DNA, 466 bp, Homo sapiens
aataactatgacttccaaatcaagcctttagagagaactctcatttgaaataccgtatgtctatgctattgtagtacaaagtattcacatatctgtgtaaagactgcttgtaaacagattccagtaagttttatggaatggagtgggaggcaaggttgtgaatatgtaggtatcatacagcataaacaatctcctgagttcttaacaaagctctagattgcctatgctgggtatggttctaccattgagaactcttccactaattcagtcctatcacaaaaacttggtttttaaaagatgagccctmcaaatacagagaaatgtgcatcatgaatattcttgtttaaaagtgttccattttaggccgggcacggtggctcacacctgtaatccaagcagcactttgggaggccgagatgggcagatcatttgaggtcaggggttcaggaccaacccggccaacata

SEQ ID NO: 790680 - DNA, 582 bp, Homo sapiens
aacctactagttataggtattccagaggagaagaagaaaaagtaaaaagtgcagaaaacctatttgaggaaataatttaagaaaacttccttaattttgtcagagatctagacagccagatataagaagatcagaaaactattgtaagatatagtgcaagaagtacctcaccaaggcatatagtcatcagactatctaacgtcaatgtgaagggaaaaaaatcctaaaatcagaaagagagaagcatctaatcacttataaaaaaaaatcccgctgggcacggtggctcatgcctgtaaaaccagcacttttgaaggccgaggcgggcggatcatgaggtcaggagatcgagaccatcctggctaacatggtgaaaccccgtctctactaaaaatacaaaaaattagcygggcgaggtggcaggcgcctgtagtcccagctactcgggaggctgaggcaggagaatggcgtgaacctgggaggtggagcttgcagtgagccgagatagtgccactgcagtccagcctgggtgaaagagcgagactccgtctcaaaaaaaaaaaaaaaaaagtaatcccatta

SEQ ID NO: 790681 - DNA, 538 bp, Homo sapiens
aggaaccaagtaaatttacacttacctaatcaagtaatgcatcatgtatagaaacctaagttaactggtactaaatattcaatataagtgttgtgacttttcgccccacccccatgctgggtccaggaaagctgtttctctggctgacaaccctctcatctcaccccgtgcccccactttgtcttcagggctcccagtgagckcctcacagcccccagatttcttttctgccttctccaccatagtgtaagctccttcaggaaagaagccgttcttccttcttctgacctttgcctagggatcaaatgtctctggtgcccaacatggtgttagtagaactcagtaagtattgttgcattaatgaaatagttattttttttaagttattagatttttgtctctaaatttttattcttgtttagcacatggttggtctcattgtctcattacctttaataatgttctttttttattttggagacagggtcttcctgggctcaagtgatcctcccacctcagcctctgctgtagctgggac

SEQ ID NO: 790682 - DNA, 585 bp, Homo sapiens
ttctcaagagcctttcaaagatttttttttaaatgcacatattccaaaagataaaagcaaccaaaatgttcatcaatggatgaatggataaatgaagtgtgatatgtacacacaatggaatattattcagtcttaaaaaggaagaaagctctgacaccccgtaacatggatgaaccttaagaaaattacaccaagtgaaataagccaatcagaaaaagacaaatgctctgattccacttacatgagatatctagagtagttaaattcatgaaactgtaamacagtgtttaccggggtagatggggagttgttatttaatgggtatagagtttcagttttgcaagataaaaagagctctggaaattggttgcatcaatagtgtaaataaatgtacttaacaacgctactgaactgtacccttaaaaatggttcaggcggccacggtgactcacacctgtaatcccagcactttgggaggccgaggcgggtggatgacgaggtcaagagatggagaccatcctggccaacaggtgtgaaaccccgtctctactaaaaatacacaaattagctgggcgtggtggcgcg

SEQ ID NO: 790683 - DNA, 605 bp, Homo sapiens
cctgctgccatttaatacgtgcctttgcttttcctttgccttctgccatgattgtgaagcttccccagtcatatggaactgtgagtctattaaacctctttcctttataaattacccagtcttgggtatgtctttactagcagtgtgagaacaggctaatacaagtgacttctaagytttccccatctccagaggtcttgacttctaaactagatacaggttttcttggctctacttgcaattcacaattagagcaggactcatttttatatttttggcttgcagttaaactttaaaatgtatcttcctaaattgcatggtttctttctgttggtctcagttgagtatatagggctggggacaagcagaccagattcatttgctgtcttttacacctttaactcttaggaaaactattctttgagacttttcttttctttttttcttttttttttttttgggggggacagagtctggctctgtcgcccaggctggaatgcagtggcacgatcttggctcactgcaagctccacctcccgggttcacaccattctcctgcctcagcctcccaactagctgggactacaggcgaccgccaccacacc

SEQ ID NO: 790684 - DNA, 605 bp, Homo sapiens
cctgctgccatttaatacgtgcctttgcttttcctttgccttctgccatgattgtgaagcttccccagtcatatggaactgtgagtctattaaacctctttcctttataaattacccagtcttgggtatgtctttactagcagtgtgagaacaggctaatacaagtgacttctaagctttccccatctccagaggtcttgacttctaaactagatacaggttttcttggctctacttgcaattcacaattagagcaggactcatttttatatttttggcttgcagttaaactttaaaatgtatcttcctaaattgcatggtttctttctgttggtctcagttgagtrtatagggctggggacaagcagaccagattcatttgctgtcttttacacctttaactcttaggaaaactattctttgagacttttcttttctttttttcttttttttttttttgggggggacagagtctggctctgtcgcccaggctggaatgcagtggcacgatcttggctcactgcaagctccacctcccgggttcacaccattctcctgcctcagcctcccaactagctgggactacaggcgaccgccaccacacc

SEQ ID NO: 790685 - DNA, 605 bp, Homo sapiens
cctgctgccatttaatacgtgcctttgcttttcctttgccttctgccatgattgtgaagcttccccagtcatatggaactgtgagtctattaaacctctttcctttataaattacccagtcttgggtatgtctttactagcagtgtgagaacaggctaatacaagtgacttctaagctttccccatctccagaggtcttgacttctaaactagatacaggttttcttggctctacttgcaattcacaattagagcaggactcatttttatatttttggcttgcagttaaactttaaaatgtatcttcctaaattgcatggtttctttctgttggtctcagttgagtatatagggctggggacaagcagaccagattcatttgctgtcttttacacctttaactcttaggaaaactattctttgagacttttcttttctttttttcttttttttttttttkggggggacagagtctggctctgtcgcccaggctggaatgcagtggcacgatcttggctcactgcaagctccacctcccgggttcacaccattctcctgcctcagcctcccaactagctgggactacaggcgaccgccaccacacc

SEQ ID NO: 790686 - DNA, 612 bp, Homo sapiens
aatgaagtattagagtactagcattaaaaaagtcctacaaattattagagagaaaatacaggttgcacgcaaagcataaagaatgagaatggcataagacatcttaacagtgccacagaaactaaaaagtagttctgagtaaaaatgaactatttacccagccaaaccgttaattaggtataaaggtagagttaagacatttatagacatacaagatattaagattactgagtcaattgatattcaacaggggtgcaaatggagaaaaagtcttttcaacaaatagtggtgggacaaatggatagccacatgcaaaagaacatatatataagagctaaaaccataatgcttttagaagaaaatatagggtttatcttcatgaccttgaatttgacaaaggattcttggacatgacaccaaaagcacaygcaacaaaagaaaaattggagtgatatgattaatatggtggaacaggaggtctccagcttgcatcctccgtctccttgacacaaacaacaatctggcagccatccatggacaaaagtgcctctgtgggagctctaggatccaggtagaaggttatgaaaccctggtaaagcccaagacggagga

SEQ ID NO: 790687 - DNA, 552 bp, Homo sapiens
tagtcaaattcaaaatagtctaatagtgtaatgatggtatatatttcacttttaaatttagtataaaagacaaaagtattgaaaataaatataggtataataacgtattaatggatacacagtataaagagatgtaaattgtgacatcaataacaaaatgggatgaaggagaagtaaaagtgtagttttygtatgcactctaacttaaattgttatcaacttaaaatagattgttacaactataaaatgtttattgtaagcctcctgataaccaaaacaaaaaaatgtctagttgatacacaaaagataaaaagaaaggaaccaaagaataccactccaaaaattatccaattttttttaaacaaaagacaacagaaagacaggacgaaaggaacaaaggaattaggcataagtcagaaaaacaattaacaaaataacaaaagcaaattctttcctatcaataattactttaatgtaaatggattaaattctccaatcaaaagacatacagtagttgaacaggataaaaactaggatccaacacatgctgcc

SEQ ID NO: 790688 - DNA, 613 bp, Homo sapiens
tgacccatcatgcctagctctatttatcttttagaaaacaacttttatagaatgctcaacaaaatgtgtagttttttttagaactattgtttaagtttcaggggaaagatgtgcaactttgctatatgaataaattatgcatattttctttcctagatagtaaatatagtacctgataaatagttatttgatcctcactctccttccaacctccaccctcagataggcctgactctggcttccttctttgtgtccatatgtacttgatgtttggcttccacttataagtgagaaaatgcagcattyggttttctgtttctttgttaatttgcttaggataatggcctccagctccattaacgttgctggaaagggcatgatttggttcttttttatggctgcatagtattccgtggtgtataagtaccacattttctttaccaagtctaccattgatgtgcatttaggttgatttcatgtctttttattttgaataatgatgtgatgaatatacacatgcatatgtctttatggtagaatgatttacattttttggtgtatatacccaacaacagaattgctggccaaattgtagttctgttttaaaagttct

SEQ ID NO: 790689 - DNA, 628 bp, Homo sapiens
gtatgtcttcttttgaaaagtgtctgttcccattatttgtccactttgtaatgtggttgtttggtttttgcatgtaaatttgtttaagttccttatagattcttgatattagatatttgtcagatgcatggttttcaaawattttctctcactcttaggttgcctgtttattctgttgatagtttattttgttgtgcagaagctattccaccaggttgctggtggaattggcccaggatgacagctggagaatggagtcagtttaatcgaactatgaaaaccagattacttctttcactgaatacctcgaagaatatttagatacagatgagctggtatggatcttagaaaagcagcatcttattaaaacagaaacatctaagctcttgtctgatataagtgtttgtctatagtttacatacagaaggaaattttcaccaatttggggaacgggcccttcatcagatgctggttggggatgtatgctatgctgtggacagatgatgctggctcaagcccttatatgtagacacttgggaaaggactgttattgggagataacaaaaagaacaacaacaacaacaataaaataccaatggatcctacagtgcttcttagagagaaaaaa

SEQ ID NO: 790690 - DNA, 628 bp, Homo sapiens
gtatgtcttcttttgaaaagtgtctgttcccattatttgtccactttgtaatgtggttgtttggtttttgcatgtaaatttgtttaagttccttatagattcttgatattagatatttgtcagatgcatggttttcaaatattttctctcactcttaggttgcctgtttattctgttgatagtttattttgttgtgcagaagctattccaccaggttgctggtggaattggcccaggatgacagctggagaatggagtcagtttaatcgaactatgaaaaccagattacttctttcactgaatacctcgaagaatatttagatacagatgagctggtatggatcttagaaaagcagcatcttattaaaacagaaacatctaagctcttgtctgatayaagtgtttgtctatagtttacatacagaaggaaattttcaccaatttggggaacgggcccttcatcagatgctggttggggatgtatgctatgctgtggacagatgatgctggctcaagcccttatatgtagacacttgggaaaggactgttattgggagataacaaaaagaacaacaacaacaacaataaaataccaatggatcctacagtgcttcttagagagaaaaaa

SEQ ID NO: 790691 - DNA, 651 bp, Homo sapiens
gcacaactttgggttttatttggagagcggtgattcacagaggctcatttttaactacatatttatccctcagggatagcaaaattagctcttcaatgtaaggagagggacttgaccaggcataaagttctaatgtgcactgatttccttgaaattttacatacaggtgtagtggttgtaacaagtaggataatgtgaacagtttagcctttgacaaaactgtaaaacaagtttgtcttggccttttttattctcttcctatccctattcttcttcctacatccttttttctacttttacatctcccttactcttataagtgatgaaattttctcatactcttttttgactactgggccccacagtgtagactcataaacaggccaaatctctatgggcatatattactgttccagatctttctgttctttccaccataaaaaacttacgttgcctgggttttagttcattgatcctcattatgtggctggttagcattctaaaaaagttacwcaacaaattcaattttaggtatacagaagttcaatcttaggtataagtagaaaataacaccatccttgatgtagcgaatgagacccatagttacctggccttagtattctatttttcatgtgcctagactcatgtctt

SEQ ID NO: 790692 - DNA, 513 bp, Homo sapiens; identical to SEQ ID NO: 782562

SEQ ID NO: 790693 - DNA, 626 bp, Homo sapiens
ctttccgcctctagaactggcagaaataaatttgtgttctttataaatcatccagtcttaggtattttgttatagcagcataaattgactaagacactgacttagcaggattatctggtaaaaatcaactttaaaaggaggtacgcagttgagcctatgagaaggttcaggaacttcactaaagattacccaagcaaagaatccttgtcagcctccctcttgtttaagaaaataagacacatcctttttttctttgaatgktataagtccattttctcatttaactagtttttcattaatgaggaagtgacttatctgttgcgactatgtagtagaaagtatttgctgaattctcatagcaggtaggcatttaatgaggggaggttggtgtctataaaaataaaagtaaaacaaggttaatagttggaaaaatctataaactcagtttctgagtccacagggcagccagtcaagatttttataagattgccaactagacacaaccaggagaaatgtctgccactgacagactggtactttggaaagactgacacactctgagcatatcttcagagggaaggcattgagagtgggtagaggaaggacatagatgtcgtactaaaggc

SEQ ID NO: 790694 - DNA, 554 bp, Homo sapiens
gtacgggagttgaaagatgaaacggtcaattttagaaagaaccaagctgatctgatagagctgaaaatgtcacatcaagaatgtcataatacacttgcaagcattaacagcacagttgaccaagctgaggaaagaattttattaggttgcaaaagtaattgtggtttctgccattatttttaatgtcagagattacaattacttttgcaccaactgaatagcttgacaaaggaaagaattttcagacatgttyttcaaaataactcagtcagacaaaactttttaaaaataaagaagaatgaacaaacactctaagatataaaggattatgttaagaaacaaaatctacaactcactggtgtcccagaaagagaaggaggaaaagcaggcaacttgcaaaacatatttcagggtattatccataaaaatttccccaacccctttagaaacaattaaaattcaaattgaaaaatgcagagaatccctaggagctattataaaatattaccatccctaagaaccataatcatcagattctacaaggctgttataaa

SEQ ID NO: 790695 - DNA, 554 bp, Homo sapiens
gtacgggagttgaaagatgaaacggtcaattttagaaagaaccaagctgatctgatagagctgaaaatgtcacatcaagaatgtcataatacacttgcaagcattaacagcacagttgaccaagctgaggaaagaattttattaggttgcaaaagtaattgtggtttctgccattatttttaatgtcagagattacaattacttttgcaccaactgaatagcttgacaaaggaaagaattttcagacatgttcttcaaaataactcagtcagacaaaactttttwaaaataaagaagaatgaacaaacactctaagatataaaggattatgttaagaaacaaaatctacaactcactggtgtcccagaaagagaaggaggaaaagcaggcaacttgcaaaacatatttcagggtattatccataaaaatttccccaacccctttagaaacaattaaaattcaaattgaaaaatgcagagaatccctaggagctattataaaatattaccatccctaagaaccataatcatcagattctacaaggctgttataaa

SEQ ID NO: 790696 - DNA, 554 bp, Homo sapiens
gtacgggagttgaaagatgaaacggtcaattttagaaagaaccaagctgatctgatagagctgaaaatgtcacatcaagaatgtcataatacacttgcaagcattaacagcacagttgaccaagctgaggaaagaattttattaggttgcaaaagtaattgtggtttctgccattatttttaatgtcagagattacaattacttttgcaccaactgaatagcttgacaaaggaaagaattttcagacatgttcttcaaaataactcagtcagacaaaactttttaaaaataaagaagaatgaacaaacactytaagatataaaggattatgttaagaaacaaaatctacaactcactggtgtcccagaaagagaaggaggaaaagcaggcaacttgcaaaacatatttcagggtattatccataaaaatttccccaacccctttagaaacaattaaaattcaaattgaaaaatgcagagaatccctaggagctattataaaatattaccatccctaagaaccataatcatcagattctacaaggctgttataaa

SEQ ID NO: 790697 - DNA, 639 bp, Homo sapiens
agaaaggatcctaaaagcagtaagagaaaakaaacgaataacataaaatgaagctccaatatgtctgttagcagacttctctgtggaaaccttacaggccaggagagagtggcatgaaatattaaaagtgtcaaaggataaaacatttattctagaatagtatatctggcaacaatatcctttaaacatgaaggagaaataaaggctttcccagacacacacacacacacacacacaaaagctgagggattttatcaacaccagacctgttctacaagaaatgcaaaagggaatacttcaatcaggaagaaaagaattttaatgaccaatgaacagtcatctaacatacaaaactcatttgtaataataactacagaaaaatggaataacactctaactgtggtgcttgtatcttaaatagaaagactaaacaatgaaccaatcaaaaataataactacaacttttgaagacataaaagtacaataaaatataaatagaaacaacaaaaagttaaaaggtaaagggataaagttaaaaagtgtagagtttttattagtttttcttttcctttatttatgcaaacagtattaagttatcagcttaaaataatgggttataagatagtatttgaagcctca

SEQ ID NO: 790698 - DNA, 523 bp, Homo sapiens
gaacttgaatcttcttctagtcctgtactgctatcttaaattctccaccacactgcctcccttacccaggccagatagcatttactcttcagaaggaaggaaattagctaagtctctaataatcaggaaaggctttaaggaggaggtagaccttgacaaatgagtataatgttactaagtgaaatgcagagcgaagggtattccagaattagcagtgaaagcacataaagagggtgggaggaagaacatggtctgtagagtaatgaggccaagcctaagaaccagggcagcaagaattgtttggggcaagtcttgaaaaccatacagaaatgttggaatgtgttgtagcaggaagtaagggccccatacagaaggccttatatgarggaagggtctgtagtagggaggacttagggctttctggtctactggctcttttggaagtttgaaatcatggcagggacctaagaccctgaacctcctgcctcttgatttggtcaactctgaatgtgaagtatatttt

SEQ ID NO: 790699 - DNA, 572 bp, Homo sapiens
ctagagttaaggtttttgccaatttaaattccatgtcagatatacactcacagacaagcaagttcgcaccaagtgtttcacatcaaagggcaaaaaatgcatagcaccaaacacagattctagcaatcctaaggtgaatgggctttgtacgccattatttaccacactcasttttaattcctttaacaacttaaactctagtgtgtgttcatgaataacctgctgtggattatttggatcaggccttacagaaataggaaaagcgcaaggtcctaagggctctccagctatggcagcagagtgtaaaattctttgtattggggtttgtatttctgctactgaaggaggtggtacagatgtttctgcaattggaggaagtggtataggccaatttttatctccctctcctgttttttattttcagttggagctgtgggtgggacaacagattctttcagatttttagacttagcctgctgtccagcagaataatgaggagataatggcacaagtacagtatgaactaaactccaagtggagaaaacagaagaatcaactttaagaccttttgg

SEQ ID NO: 790700 - DNA, 648 bp, Homo sapiens
tacatggctttatcagtttttttcactggtgtcctttttttgttccaggatccaattcaaaatatcgcatttcattcagttgtcgtgtctccatagtgtcctctggtctatgacagtttctcagtctgttcttgttttttttttttgtttgtttgtttttggtttttttttcccagaagtccattaagcygagaatgaccttgttttttatgacctaacagttttaaggaatactgttgaatgttcctcagtttgtatttgtctgaagttttgcttatatttagagtggagttgtttttggaaagaacaccagagtttaaatgcctttcttatcagatcatatcagaggtacctggtatccattggcatccctggttttgtgaaccttcatcccttggttaaggtgatgtttgccaggttttccccctggcaagttgctgcctttcccttttcatagtctgttctttggaagactctagcccaccctcaagtaggtgggaagaattgagctatagctcctggaaggagagggtgtatctctgtatatcatttgaaattcttctgtaaagatttgtctcttatcccttatttatttattcagtcacttatatcagtatgaactcatgcatttttatttaataatttgag

SEQ ID NO: 790701 - DNA, 648 bp, Homo sapiens
tacatggctttatcagtttttttcactggtgtcctttttttgttccaggatccaattcaaaatatcgcatttcattcagttgtcgtgtctccatagtgtcctctggtctatgacagtttctcagtctgttcttgttttttttttttgtttgtttgtttttggtttttttttcccagaagtccattaagccgagaatgaccttgttttttatgacctaacagttttaaggaatactgttgaatgttcctcagtttgtatttgtctgaagttttgcttatatttagagtggagttgtktttggaaagaacaccagagtttaaatgcctttcttatcagatcatatcagaggtacctggtatccattggcatccctggttttgtgaaccttcatcccttggttaaggtgatgtttgccaggttttccccctggcaagttgctgcctttcccttttcatagtctgttctttggaagactctagcccaccctcaagtaggtgggaagaattgagctatagctcctggaaggagagggtgtatctctgtatatcatttgaaattcttctgtaaagatttgtctcttatcccttatttatttattcagtcacttatatcagtatgaactcatgcatttttatttaataatttgag

SEQ ID NO: 790702 - DNA, 563 bp, Homo sapiens
atcaagacactggcagattcagtgtccagtgagggtctgcttccccatagacggtcctttctgactgtaagctcacatggcagaaggggtaaaggatctctctagggtctcttttataagggcactaatcctattcatgagagcactcctcttatgaccttatcacctcccaacagccccacctcctaatatcatcaccttggaggttaggattttaacatactaattttgargggacacaaacattcagtccgttgcacatcaactacagggctgtttccactggaggtgcgtggcttctttaccagtttttgctaggaaattttagtttaaaggagaagctcaagttgatatttagaagctagtggtaatgaaaaagcagggagatgactcccaggcttaagcagacaaacctatcaacctatgtaggttcatattctagataatttttaagaagaagtcgattgttcaagtttttttaaatcaaaattttattttgaaataattgtagatttacacgcatttgtaagaaataacacagagagatctcgtgtactcttttt

SEQ ID NO: 790703 - DNA, 558 bp, Homo sapiens
aacaagtttaggtacaagagtaagaagttatttttgaacatggtaattttcttatgtccatgttcaccacatagggacaccaagaaagcagttagatatatgagtctggacttatggggagaagtccaacctggacatgtaaatctgtgaggcattagtgcacatagtctttgaagccattagactggatgagattaccaaaggattgattayagatagaaaagggaaggggcctggtgtgtgatccatgacatactataatgtttagagttctagaagatgaaaaggaaccaacagaggggactaagcaatgaccggagaaataaaatggtatttaaatcatatcctgcaagccatctgataaaagtcttttgtaaagagagtgatgaaatttcttaaataaaatgaagtcaagtgaaatgaagacagataattaaacatgaggtctgacaacatgagcctgacaagtcctgtttggatatagtgttggggcaaagaacaagattggaggagattgaagagagaagggaggaattggtaataagaagtattttcttc

SEQ ID NO: 790704 - DNA, 550 bp, Homo sapiens
tctgacctgacatttgtagacatcatcttagggctgttctccccttagaggatagtaacttaggactatatcagttacgtctggtaacgatatgccatgtctgtgatactagcatgcatttctataaggaaggaagagatggagggagagaggaatttgttttgaatactctgaaaatgtctagccagtggattataattaccataatcacagtttttggccatttggatgaaagaatgttgttcatgcccatactgctagctaagacagtcatgtgcayactgcattatgaacctatttccaatagattaggaaaatagttacaacaggtttgaggcttctgttttgcaaaaaccttttatagcgttatggtctcagaaggaaccattgaagaaaataatcattaacattttctcgaacactaaatcctccgttctgctcctccaatatctcataggctgtcatctgatatcagcacttatgtaatgtcacgataggtggtgccatagttctatactgccttacattataggaaaatataaagtgttat

SEQ ID NO: 790705 - DNA, 625 bp, Homo sapiens
agacattcaataatcttgtacactttagccactactgctactgacaaaagtagattgtagagcccagccttttgggttagacactataaatttctttctttctttctttctttctttcttttttgagacgaagtcttgctctttcgcccaggctggagtgcagtggcacaatcttagctcactgcaacatctgcctcccgcgctcaagcaattctcctacctcagcctcccaagtagctgggattacaggcgcacgccaccatgcccagctaatttttgtacttttttagtacagayggggtttcaccatgttggccaggctgttctcaaactcctgaccttgtgatccacccgccttggcctcccaaagtgctgggattacaggcgtgagccaccgcaccaggcctgacactataactttctaatcctagctctactacctattagttctataatttgagctaataatttaaacttctaagattttgtttactcatctgtaaaatgagaataataacagtgagattaaattagttaacataggcattgcatccagtaaaatggtatagtttatagtatatgcttgacacatagtaagtatgcggctgttgctgaactactacca

SEQ ID NO: 790706 - DNA, 665 bp, Homo sapiens
tgcagcaccctgtaagtctccttcatgctctttcccaattcacactatattcccaccagcctctcaggaagaaactgctctgctgacctgaatcattatagataactttggccagttctcaaacttcatatagatggaatcacacagtaaatgttcatcttctagtcaacattgtgtttatgaagttcgttcatattcttccaagtagcaggtttttattactatataatattccacggatatacccartttttgttttttgtttgttttttgtttttgtttttgagacaaagtctcgctctgtcacccaggctgaagtgcagtggcatgatctcagctcactacaacctctgcctcctgggttcaagcgattctcctgccttagcctcctgagtagctgggattacaggcgcctgccaccacacacggctaattttttgtatttttagtagagacagggtttcactatgttgaccaggctggtctctgactcctgatctcaagtgatccgccctcctgggcctcccaaagtgctaggattacaggcgtgagccacctcgcccagtctataccgcatttttaattctaattctgagggacacaagttatatcaggttctgctattatgcaaaatgttgctattaactaccttgtgcatgctattt

SEQ ID NO: 790707 - DNA, 665 bp, Homo sapiens
tgcagcaccctgtaagtctccttcatgctctttcccaattcacactatattcccaccagcctctcaggaagaaactgctctgctgacctgaatcattatagataactttggccagttctcaaacttcatatagatggaatcacacagtaaatgttcatcttctagtcaacattgtgtttatgaagttcgttcatattcttccaagtagcaggtttttattactatataatattccacggatatacccaatttttgttttttgtttgttttttgtttttgtttttgagacaaagtctcgctctgtcacccaggctgaagtgcagtggcatgatctcagctcactacaacctctgcctcctgggttcaagcgattctcctgccttagcctcctgagtagctgggattacaggcgcctgccaccacacwcggctaattttttgtatttttagtagagacagggtttcactatgttgaccaggctggtctctgactcctgatctcaagtgatccgccctcctgggcctcccaaagtgctaggattacaggcgtgagccacctcgcccagtctataccgcatttttaattctaattctgagggacacaagttatatcaggttctgctattatgcaaaatgttgctattaactaccttgtgcatgctattt

SEQ ID NO: 790708 - DNA, 665 bp, Homo sapiens
tgcagcaccctgtaagtctccttcatgctctttcccaattcacactatattcccaccagcctctcaggaagaaactgctctgctgacctgaatcattatagataactttggccagttctcaaacttcatatagatggaatcacacagtaaatgttcatcttctagtcaacattgtgtttatgaagttcgttcatattcttccaagtagcaggtttttattactatataatattccacggatatacccaatttttgttttttgtttgttttttgtttttgtttttgagacaaagtctcgctctgtcacccaggctgaagtgcagtggcatgatctcagctcactacaacctctgcctcctgggttcaagcgattctcctgccttagcctcctgagtagctgggattacaggcgcctgccaccacacacggctaattttttgtatttttagtagagacagggtttcactatgttgaccaggctggtctctgactcctgatctcaagtgatccgccctcctgggcctccyaaagtgctaggattacaggcgtgagccacctcgcccagtctataccgcatttttaattctaattctgagggacacaagttatatcaggttctgctattatgcaaaatgttgctattaactaccttgtgcatgctattt

SEQ ID NO: 790709 - DNA, 628 bp, Homo sapiens
cttttttaggcctagtggtgggttatgtctttctattgtccccagagccaggggccacctgcatcacagtattcattagtttcccttaaccctacccacaactttgaatattgtttcttattgcctctcatagtttacccattttagcatgcygtgtgtttgttttcttgctgatctctgatagataagcatccagagatgatgatatgtctgctattaattaaggatttgttcgtcactccatatgagttaataaaagtccaaaatatgacttaaaattaacaaattttgtatgaacttgtggttgttccatatctatctagaaacatatctctagaatagttctcatttcatgtcgagattaagatatttagtatatagtggcattaactcttcatcttgcccattaaaggcaaaacagattgttttttaattatttcttcaaatggaacttcctttcataaagacaacgtgtactgtaagcattctttactgttttttacagccaagaaaaatcgacatagtttacacacctattgatttgtcataagatgtcaactagagaacaaaaaaaacccaaacagattaatggacaagagtgttaattgcaatgatatataaaaaagcc

SEQ ID NO: 790710 - DNA, 628 bp, Homo sapiens
cttttttaggcctagtggtgggttatgtctttctattgtccccagagccaggggccacctgcatcacagtattcattagtttcccttaaccctacccacaactttgaatattgtttcttattgcctctcatagtttacccattttagcatgccgtgtgtttsttttcttgctgatctctgatagataagcatccagagatgatgatatgtctgctattaattaaggatttgttcgtcactccatatgagttaataaaagtccaaaatatgacttaaaattaacaaattttgtatgaacttgtggttgttccatatctatctagaaacatatctctagaatagttctcatttcatgtcgagattaagatatttagtatatagtggcattaactcttcatcttgcccattaaaggcaaaacagattgttttttaattatttcttcaaatggaacttcctttcataaagacaacgtgtactgtaagcattctttactgttttttacagccaagaaaaatcgacatagtttacacacctattgatttgtcataagatgtcaactagagaacaaaaaaaacccaaacagattaatggacaagagtgttaattgcaatgatatataaaaaagcc

SEQ ID NO: 790711 - DNA, 604 bp, Homo sapiens
actcagcaattgtcatatttttctccacttttccctaagtcaataggcaaccatgaagttgacaatgttgctgataacattgtcatactcaacatcatttcccacaaagcttaaacctctacagaaactcagcagtccctacaacacatccttgaagaatgagaggggtgtcaataatttcagctgctcaaatggaaggctctgacatcaaggaatattaagtggcacattgaagggaattctactattaagtaatgaaggtgaggaaaacaatttctcaatccacggttatttctttgttatactaagaacmgtgcccaatacttatggaacaaaataagcctatcatttggacgtctcctatcagcctgaagcctgatgtcatataaaccaataatctgtgattgaatttttcagctttcagtgttttatttttagcataatatttggtattgccatacgtgacttattattctgttcaatttaatcaaattagagaataaacaaaacgacaaacataatttctcttaatgtgcgtgtgtgtttttcttttttgagacgaagtttcattcttgttgcccaggctcgattcgagtgcgatggc

SEQ ID NO: 790712 - DNA, 604 bp, Homo sapiens
actcagcaattgtcatatttttctccacttttccctaagtcaataggcaaccatgaagttgacaatgttgctgataacattgtcatactcaacatcatttcccacaaagcttaaacctctacagaaactcagcagtccctacaacacatccttgaagaatgagaggggtgtcaataatttcagctgctcaaatggaaggctctgacatcaaggaatattaagtggcacattgaagggaattctactattaagtaatgaaggtgaggaaaacaatttctcaatccacggttatttctttgttatactaagaaccgtgcccaatacttatggaacaaaataagcctatcatttggacgtctcctatcagcctgaagcctgatgtcatataaaccaataatctgtgattgaatttttcagctttcagtgttttatttttagcataatatttggtattgccatacrtgacttattattctgttcaatttaatcaaattagagaataaacaaaacgacaaacataatttctcttaatgtgcgtgtgtgtttttcttttttgagacgaagtttcattcttgttgcccaggctcgattcgagtgcgatggc

SEQ ID NO: 790713 - DNA, 478 bp, Homo sapiens
aaaagattttatggattcaccagactgtcctagtgtctgaactttccaaatctagtcactcctctggttgaaccatattggaggcagctgttcaaatgtcaatggcatccatcttgaaagaataagttatataaccctactggtcattaacaccatagctcctattagatgattaggttcctcagaataagaagaactccacctagagggaggccccaatcaagatgccactttgaattttggccagtttggttctgcaccacaaaatactttgggayatgggaaaggagtgtcttcaaagcatccatcatgcaaatacctgtagctggtagacagttttgcccgtaaaggtttcaatgaagagctttaggataggattctacctaacttggctggaagcttaaggccattctcctgaaatcatacctctatgagtctctttgaagttctctgtttctctggcacatttttgctttaa

SEQ ID NO: 790714 - DNA, 613 bp, Homo sapiens
tgcctttgtttttgacgtataatttggctgaacatggaattctaaaatggcagatttttattaatttgaagttgttgctccactgtcttctcacttggattgtttctaagcagaaatttgtcatcattcttatcacagattctctgtaattatatttttttcctctggtcacttttaagattttctttttaccagtggtttccagcaacttgaatgtgatgtgattaggggttgttttcttaatgtttctcataattaggatttcttacacttcttaagtttctgggtttatagtttttatcaaattaraaaaattttctacttttatatttcaaatagttttcccccactctcttcctcttcataagagactctgattgcatgtatattagcatattttaactgtcccactgactattgatcctttatgctttctttttcagctttgtctctgtgttttctttttgatcatttccattgctgtgttttcaagtttaccaagatatactgtcttttacacatcttctgttggttacattaaacattctactatgcgtggttgacttatcaaagtctgacataattgatattgttacaattctttctagacaat

SEQ ID NO: 790715 - DNA, 590 bp, Homo sapiens
aaggatctgttatttacaatttttccatctgtatggtcaaagtgaaaagggcatctcaatttttttaagttgttaggagatgtttattatctcaaagccaaaaagagattgggggcagcggtaatattggccgtaatttgagttatctccatatagaaattgaaggggggatgctgggacaattcgtgtagataattcagaccctaaagcttccagaactagaaataaagagataagtgaggaagatgcactaaattttgcttgtctttgttttcccagaactgtgcttataattgactcaatttatcacatcacatacacatgcacctgtatggtggtgtgaagttgctgaaaagagttgtagtcataaattttaaattgatgaactttagcgtctacatggaagaatattatgcagaaaacaattyatagaatcccagcaagttctagcgggagggaccttggataggacatagctcagaatctcaacccccaaccacagacaagaaagacaaaagtctgcaacaataaggaggactcacaagtgcttctactactgtgacagtagttgtgatccaggtcttcattcc

SEQ ID NO: 790716 - DNA, 422 bp, Homo sapiens
tcttaccgacagctgtgcaggaagaccagccaaaacacacaaagcaggagcagctcccaaggccaggtgtggtggttcttgcctgtcatcccaacaaagcgggaggccaacgtgagtgaatcacttgaggccaggggtttgagaccagcctgggcaacacagtgaaaccctgtctctacaagaaatcattttttattattagaatgaagaagcgtwcctctaaccctcagccattactttaggagagagagctctgctctagaactcaacatatgaaattgggagtcccaatgtggctagctaagtttaaatacaagagctgtcagacatttcctctaccgtaatgaaatctgtggcatcctttttgtattttgaaaacttagttttgacaggcctaagaaaagaagaagagggcccagaag

SEQ ID NO: 790717 - DNA, 445 bp, Homo sapiens
agccaccaggcctatctgattttttatttttgtagagacagggtgtcactatgttgctcaggctggtctcgaactcctgagcttaagcagtcctctcgccatgacctcccaaaatgctgagattacagtcatgagcccccatgcccaactggtagtttcttacaatgttaaatatacacttaacttaccatgtgactcagcagttgtatctttaggtattacccaaaagaaatgaaaacatacctccacacaagaccttctactcaaatattcwtagtagcccagaactggaaacaacccaaatgtccatcagctgataaatggagaaacaaattaggatacatccatacaatagaacactacttagcggtaacaaggatgaatcttaagggcattctgctaagtggaagaagccagatacagaagactgtagctttcaattcta

SEQ ID NO: 790718 - DNA, 582 bp, Homo sapiens
tggtgctttttttttttttttgagacagaatctcgctctgtcacctaggttggagtgcagtggcgcgatctgggctcactgcaagctccgtctcccaggttcacgccattctcctgcctcagcctcccgagtagctgggactacaggcgcctgccactgcgcccggctaattttttgtatttttagtagagatggggtttcaccgtgttagccaggatggtctcgatctcctgagctcgtgatccgcccgccttggcctcccaaagtgctgggattacaggcgtgagccaccgcgccyggctaaactggtgcttttagtttaaatctagaactaaaggattctttcttaacctggattttcttatgtcaaaatctattttgaaccatgccccaaatttcagttctcagtgacataattaatgatttgctatatcccaccctatgcaaataacagtatcggtaataatttcagtattaacaccagcaataaagagactaaaaacaatttcagtttttccttcccctctttcaattacttttattctaatggtaaatcctattaagaatgtacattcgaattac

SEQ ID NO: 790719 - DNA, 592 bp, Homo sapiens
tttataagttttgacacacatgtatacccatgtgaccatcaacacattcaagataatgaaccatcccctttccccctgccaaatttcttcattctcctacgtaatccctccctcttgtcccttgtccttagggtttctgtccctagagattagtttacattttctaaatttttatataaatggaatcatatagtatttactawttttttttttggtctggcatgttttactatggataattattttgagattcattcatgtttttgcatgtaaaagtagttcactcttttattgctgagtagtttctattgttacacattttgtttatgtgttcacatgttgatggaaatctgggttgtttttaggttttggctattacaaatcctatgaaaacatttgtatgcaaatctttgtgtggtcatatgcttttatttcttttgggtaagtacctctgtgcagaatggagaggtcatgtggtaggtgtctgtttcactttagaagaacctaccaaattgtttttcaaagtggttataccacttagtcttagtttgctgagtgttcttatcaggaatgggtggtgaattttatcaaa

SEQ ID NO: 790720 - DNA, 637 bp, Homo sapiens
tcccaataccattacattagcaaagaaattttgacacgagttttggaggagacaaacatttaaactatatcattggtgaagtctagtaaatattaaaataaataatcccaatctcacatcagctacttcaaaaacagagaataagggaacgtttctcaacttattttatgaagctagtgttatccaatcaaatcctaagacgattttggaagaaactaagtttcaatttcttgtgtgaaaacgtacatggaaaaataatatagaacagccaaaacactttcaaaatagacaaacagctggagggtttgttatatctgaattcaaaacctactttaaagttttaataatgaagatggtggggatagatatttagatagagataaagtgcagtagaacaatgtaagcaatagagacagtttatttctrtgagaaatagactcataattatatgagctattgactttcaaaaatgtaccaagataattaaactgatgaacattaaattaaaaggtggagatttttgtgggaagatgaaacttaaaacttggtggtgagtcttgttgagagggtgacaactgagcaaagacttgaagaaggtgtaacagttaacagtgcagatgcctgggggaagagcgtt

SEQ ID NO: 790721 - DNA, 541 bp, Homo sapiens
aaataaagcctagtctctacggaaataaacaaaaaacaaatacataactgagatgaatctcagaacactggataattttggtttggaaaagtgtttctgtttgggacaagaccttctttgtctagttaaagttactgatgaggctaacaggacacatatgctatttatttatttttactataggcagaatattatgtctttatcttgtatcttcaaagaaactaatagctgtgtaatatggggggaatttacaaaacgtatttaaaggcatgtttatctgttaagacttaactggcctacaaaatagtcgtttgttggcaaactatcaagtttttatcrgggaatttagacaagtctgttgggtcacagaagagggtctataaattggaggactgaaagtggatttacagttcctgatcagtctagtaactcatccttgcttttagatgccttggcttaaagacctcagctcttgaggatatattatcacactgccttcagaaaagggttgaggagctcccctttcaaagaactggcctac

SEQ ID NO: 790722 - DNA, 572 bp, Homo sapiens
ttcctagtagagagcagtcaatggatacattttccaaattgaattgacttcatgtaagtgaattttttaataaacagcaaatttacacggtgaatattaccttttcagaatctgtttattatattaatattgatttctcaacattatacctctattaaaaactctttgttaatgaagggttttgacactaaaaaataaactaatatatagcataacactgaagtttaagaaaattattgtatgaaacattcagtaaaagcaagcacttactaccctgtcagtccaaaatgtaatattgtgcaatagcctttaaattgtattgttataaaaatgttgcttaactgggcccttaggaattaatawcggttctaaaaataaactaaatggattattttccttggcctccattttatgtcctaaatggtatttctgtgttcagtcatcttttttattgcgaaaatttgtctaacatctaggaattgctttgggaaaagacattctacccataaagttgaatttctttcttttttttctcagaagagaggaaattaggttacccacaccaccaccat

SEQ ID NO: 790723 - DNA, 617 bp, Homo sapiens
cttgattgctgtagctttgttgtaaattttgaaattgggtggtattagtcctctgtttttcttcttttctaatattgtgctgccattttttttttgcctctccatataaactttggaatcaatttgtcaatatccaagtgatatatttctgggattttgatggagattgcattgaatctagagagcaagttgggaagaactgacattttgttaatgctaggcctycctatccgagaacatggaatatctctctattcatttagtccttctttgatttccttaatcaaaattatgcagttttcctcatagatcttttatatattttgttagatttatacctaaatattccattggtggtggtgggaatgttaacataaatggcattgtgtttttaatttcaaattccaattgctcattgttggtgtgcaggagagcatctgcaatgaatttttctatactaatcctgtatgctgcaaccttgctatcaatagcaagctattgatcaactagtaagcaataataaatgcttattagttccaggagttttttggtcaattgtcctggtggcctctggaagagtcctcctctagacccagggttaagagtgtgcattattt

SEQ ID NO: 790724 - DNA, 617 bp, Homo sapiens
cttgattgctgtagctttgttgtaaattttgaaattgggtggtattagtcctctgtttttcttcttttctaatattgtgctgccattttttttttgcctctccatataaactttggaatcaatttgtcaatatccaagtgatatatttctgggattttgatggagattgcattgaatctagagagcaagttgggaagaactgacattttgttaatgctaggccttcctatcygagaacatggaatatctctctattcatttagtccttctttgatttccttaatcaaaattatgcagttttcctcatagatcttttatatattttgttagatttatacctaaatattccattggtggtggtgggaatgttaacataaatggcattgtgtttttaatttcaaattccaattgctcattgttggtgtgcaggagagcatctgcaatgaatttttctatactaatcctgtatgctgcaaccttgctatcaatagcaagctattgatcaactagtaagcaataataaatgcttattagttccaggagttttttggtcaattgtcctggtggcctctggaagagtcctcctctagacccagggttaagagtgtgcattattt

SEQ ID NO: 790725 - DNA, 635 bp, Homo sapiens
gataaagaaaggataaagaagggggtatgagctctggattggttggtttatatatgaagacatacatgcaggcaagttgtttatgtccaggaattagcttatcctgagagggacagtccctccaggggcaacaaggccctggatgtcaaagcatcaaattcagaaaataagagacatgactaatacaccattaaagtcaatattatcattaatattattcgacattatcctgaagtctctagccaatgcatacaacaaaaaaaacaataggatgaaaaacgatttgaatgaaaaagacttttaaattctcagatgatgtatctacttaaaatttaaaaacaaagtcaacctattaattatagaaaccaaaaactgtcctatatactatataccagtgatgctcaattataaaatgtagtataaaaagtgattcacaatagcaacaagaactacatgtctagaattgatagacaatttcaaagtctrtataaggaaagatgtaaatgtttattgcagataaaaaagaaaacatcaggaaggtaagagttataggccatcaccactctacctagttccaataaccacgattgaattaaacgacatgagttccccaacatggttctaatttcagttat

SEQ ID NO: 790726 - DNA, 659 bp, Homo sapiens
cgtttcctgggagagaatcattctaggggagaaggagcgagcctggaacataggggctgtaagtggagcacgtggactcctccttgggtcctagagagagaaggaaggctataagtgaatatagaaggctgtttcattaaaatacttataggaggccaacactttgggaggccaaggcgggtggatcacctgaggccaggagttcgagaccagcctggccaacatggtgaaaccccatctctactaaaaatacaaaaattagctgggcatggtggcaggcgcttgtaatcccagccactcgggaggctaaggcaggagaattgcttaaacccgggaggcagaggttgcagtgagccgagattgagcccttgcactccagcttaagtaacagagcaaaactccatctcaaaaaaaaaaaacaaaaaaamaaaaaccagcgtcatggtaggacttcatggtgcatgtgttacaggttgcatacctacacacacacaaacacacacatgtacctgtgcacactcacagcatagagcaacacacagagaagtgttgattctccttcatcctgccccagaccacgacacagtattggcaccaggagggcccagtgaatgagaagcaatgcccagaggaagatgtgaaggtacctgtggaagacc

SEQ ID NO: 790727 - DNA, 659 bp, Homo sapiens
cgtttcctgggagagaatcattctaggggagaaggagcgagcctggaacataggggctgtaagtggagcacgtggactcctccttgggtcctagagagagaaggaaggctataagtgaatatagaaggctgtttcattaaaatacttataggaggccaacactttgggaggccaaggcgggtggatcacctgaggccaggagttcgagaccagcctggccaacatggtgaaaccccatctctactaaaaatacaaaaattagctgggcatggtggcaggcgcttgtaatcccagccactcgggaggctaaggcaggagaattgcttaaacccgggaggcagaggttgcagtgagccgagattgagcccttgcactccagcttaagtaacagagcaaaactccatctcaaaaaaaaaaaacaaaaaaacmaaaaccagcgtcatggtaggacttcatggtgcatgtgttacaggttgcatacctacacacacacaaacacacacatgtacctgtgcacactcacagcatagagcaacacacagagaagtgttgattctccttcatcctgccccagaccacgacacagtattggcaccaggagggcccagtgaatgagaagcaatgcccagaggaagatgtgaaggtacctgtggaagacc

SEQ ID NO: 790728 - DNA, 633 bp, Homo sapiens
agtttgcattttcctgatagtagtgagtgagcatctcttcatatgttgatcgacaatttgtattccatcttctgtgaattacctgttcatatatatatatatttttactggattaacatttacagacattctgtatgtaatccaggtattgctgtatatgtaatatgccttagtctgtgacacttaacctttcttacatctttcttgtacaaaagcatttaattttcactagttaaatctgtcagttttcttcattatagattttgggctaaatgttatgcttaggaaagcctcctccaacactaggattatagaaatattcccttataatttcttctaataattctacagttttatttttatgctgaacactaataaacttggaaatgattcttatgtagaggaatatatatttgtttcgttccagttgccccaaaacttttcactgaattgtttaycctttcctaactgatctgaaataaaatcccacctcaatcattgtaaattttgacacgcaagtcagtcattttctggactttttatgccactccattgaacaatttgtcttctctgagacaatattgggccagttaaattactgttgcttgaaggtgtgtttcggtatctggtctg

SEQ ID NO: 790729 - DNA, 505 bp, Homo sapiens
tggctcaaaaagcccgagggccaacattcacctggcatgaaagggaaggaaagtgattctgagggaagaaaccttctaggtgtggctgacccataaccaacaaggagatgagaaaaaactatagaagttgaattttttttaaaggcyagtgtttatagtgagattttccaaagataaattaaggaactgatgtgttcctgaactaggtctaaccagggtcaattcccaaaagagtctcttaagtatttatttgatctcatttccacagttgagtggacaactcttgcccatcactcttccttctatgcagtgttgctaatgattcctcctactccacttcttcaagaaccttctcaacagaagacgccagaggagggggcctaagaagatacatagcaggaagtccccagcaaaccatttatctattttctccacagatctacaatcccaaattgttcagctggaaacactagtaggctacgtcgcttgccctaaataagctttg

SEQ ID NO: 790730 - DNA, 505 bp, Homo sapiens
tggctcaaaaagcccgagggccaacattcacctggcatgaaagggaaggaaagtgattctgagggaagaaaccttctaggtgtggctgacccataaccaacaaggagatgagaaaaaactatagaagttgaattttttttaaaggctagtgtttatagtgagattttccaaagataaattaaggaactgatgtgttcctgaactaggtctaaccagggtcaattcccaaaagagtctcttaagtatttatttgatctcatttccacagytgagtggacaactcttgcccatcactcttccttctatgcagtgttgctaatgattcctcctactccacttcttcaagaaccttctcaacagaagacgccagaggagggggcctaagaagatacatagcaggaagtccccagcaaaccatttatctattttctccacagatctacaatcccaaattgttcagctggaaacactagtaggctacgtcgcttgccctaaataagctttg

SEQ ID NO: 790731 - DNA, 580 bp, Homo sapiens
ggagttgtaatccccgtcaatatgacagtgattaaaaaaatggctgctactaaccacatgcagcgtggtttaaatctgactcatctgctaggcatcccatcctaatcaaaagctattcaggggctggaaggcaaccatcaagctccagcagcaacgtgccagggcccacagctgcacarctgaaaatgtcacgccaggggctggctgcctcccttgccctgaacattgcatcccgcctgctgagtgggggctggcggagcggcccagccagctgtgtctgatgtcgcagttgtccatgggtttcaccttcctttttccttgacccatggagtttggggaaaaaaaaaaaaaaaaaaaaagctgcaaagtcaaacaatgaagagaccagagaattgaagtccatttccttcccaaaccaaataatgtcctctcctgcagggattctagcaaaccttctggttcatttttctcaaggtgtgcaattgaaccttcttttctctatctaaggcattaagtcaaggttgctctgtttattagtactcggaagcaggtactataaagaagagaaaatcagtggtga

SEQ ID NO: 790732 - DNA, 580 bp, Homo sapiens
ggagttgtaatccccgtcaatatgacagtgattaaaaaaatggctgctactaaccacatgcagcgtggtttaaatctgactcatctgctaggcatcccatcctaatcaaaagctattcaggggctggaaggcaaccatcaagctccagcagcaacgtgccagggcccacagctgcacagctgaaaatgtcacgccaggggctggctgcctcccttgccctgaacattgcatcccgcctgctgagtgggggctggcggarcggcccagccagctgtgtctgatgtcgcagttgtccatgggtttcaccttcctttttccttgacccatggagtttggggaaaaaaaaaaaaaaaaaaaaagctgcaaagtcaaacaatgaagagaccagagaattgaagtccatttccttcccaaaccaaataatgtcctctcctgcagggattctagcaaaccttctggttcatttttctcaaggtgtgcaattgaaccttcttttctctatctaaggcattaagtcaaggttgctctgtttattagtactcggaagcaggtactataaagaagagaaaatcagtggtga

SEQ ID NO: 790733 - DNA, 580 bp, Homo sapiens
ctgagggtatttttaggtttccttttttagactatacatatacacaactcaaatggcctcctcccacttctgttaattctgcctggataatttctatttacactactggttccaaagttttcatctctcaaaagagacctctgtgggcccagagggaayagattgaaagaccctaataggttatatcacttcatttaatggtatttagtgacagcaaggactgaaagcctgaattggaaaggaaacccttaattctacccctaattatcatgattaagtagaagctctgacatttgattttcttcttttacttggaattcttgctgtctttcagcatccacagtcagcatgctcagaaggctttctgttgtaatgagctgaactcttggcctgacaaaagccattctctcagccacacattctacttgcagccaaaggaatccaggcatgattccccccagcacatcaggccattgaagcccctccacccccagcttttgcccagcatgtttccactacaatgaagcctcttacttgcatatctgcgtagctaactcaattcttatgacccagctccagc

SEQ ID NO: 790734 - DNA, 578 bp, Homo sapiens
cttcatccatgtttttgcaaaagacatgatctccttcttttttatggctgcattgtattccattgtgtatatgtaccacattttcttcatccaatctgtcattgatgagcatttaggttaaatgttttactattgtgaatagtgctgccataaacatttgtggccatgtgtctttatggtagaatgattatattctgctaggtatatacccagtaatgggaatgctggggtgaatgatatttctgttttagggtctttgaggaatcaccacactgtcttctacaatggttgaactartttacactcccaccaacaatgtataagtgttcccttttctctgcaacctcaccagcatctgttatttttttaactttttaatagtagccattctgactggtgtgagacagtatctcattgtggttttgatttgcagttctctagtgatcagtgatgttgagctttttttaatatgcttgttagctgcatatatgtcttcttttgaaaagtatctgtttatgtccttttcccactttttaatggtttttttttcttgtaaatttgtttaagttccttacaga

SEQ ID NO: 790735 - DNA, 549 bp, Homo sapiens
tttgaaattaagcagtcctgaatctgaattctgactgccagttatacattttatgggtttagccaagttatttaatacttcaaagcctctgttttcttacctgaaaacagtaatatttcctacctcatagaattattggctgcagttttataaatggtattatttgctgcaattttaactgtataaacatctcccttttatatataggtcccaaacgtggtatcttttcacaatgatgtattttatccgaattcttggaattactcatggtgtctttcaaaattaaagatctgtgaaacctgaagcagatatgaatattgtaagttgttagaaaataaatctggcytgctgaaataacagagaatgctacttttcaaatttggaattttaacttaatagatttacagtcaaacgtatacatctatatgttaatatttctcatctgctattctatagcttagtttctccttcagccttattctatctttgtaatgaaaaatgtgtaactatattcatactttcacatatttgaaatatatattcatatat

SEQ ID NO: 790736 - DNA, 532 bp, Homo sapiens
aagttgataaaaagtaaatgaatcataatgaacatatagaactaattaagttaatgaaagtcaaaggaatatgtaaatacaattttcagatctgaacttaagcataaacaactagtattttaaaaaataaggtctactgcaaaacaagcaatggggaaaagactccctatttaataagtggtgttgggacaactggctwgccagatgaacaagattgacacatgttcacctacgtaacaaaccttcacatgtacctccaaacctaaaataaaagctaaaaaaataaaaaataaaaaataaagattatatcatagtattctagcaccttgacaaaaaaagaataaacaaacaagtctgaatagattcctttaagaaatggaatctgtaatttaaaattttaccacaaagaaaactctaggcctaaatggttttaccagtgaattcttctaaacatttaggaaagaaataacaccaaacttgtattaaaatgcttcccctgaacagaaacaggaaaaatttcccaaataattct

SEQ ID NO: 790737 - DNA, 561 bp, Homo sapiens
agttgattatatcaaggcctgtgatggtatcggaggtaatctgcataaagctagtctgctagcacaggcagtggcaggactgagagtggataaaggaaatactccatttcctggagcttgttttaactgtgggaagcatggtcatactaaaaaagaatgtggaaaaaatcagtgagtcaggtcaccagataggggaaaaaagaaaactgttgatcctgaaatatgtccaaaatgtaaaaaaggaaaacattgggctaatcagtgtccctctaagtttgataaagatggggacccgatttcaggaaacaccatgaagtgcccatcgygggccccgttctaaaccagggcatttccagctcaggccattccctcacccctgtacaatatctgtcccctgccacagctggtagtgccgcagtagatttatgctgcacaaaagctgtgagccttctgcctggggaacccccacaaaaggtcccaacaggagtctgtggacccttgccagcggggacaattggattacttttaggaaggtctagtttaggtttaaaaggggtacaa

SEQ ID NO: 790738 - DNA, 561 bp, Homo sapiens
agttgattatatcaaggcctgtgatggtatcggaggtaatctgcataaagctagtctgctagcacaggcagtggcaggactgagagtggataaaggaaatactccatttcctggagcttgttttaactgtgggaagcatggtcatactaaaaaagaatgtggaaaaaatcagtgagtcaggtcaccagataggggaaaaaagaaaactgttgatcctgaaatatgtccaaaatgtaaaaaaggaaaacattgggctaatcagtgtccctctaagtttgataaagatggggacccgatttcaggaaacaccatgaagtgcccatcgtgggccccgttctaaaccagggcatttccagctcaggccattccctcmcccctgtacaatatctgtcccctgccacagctggtagtgccgcagtagatttatgctgcacaaaagctgtgagccttctgcctggggaacccccacaaaaggtcccaacaggagtctgtggacccttgccagcggggacaattggattacttttaggaaggtctagtttaggtttaaaaggggtacaa

SEQ ID NO: 790739 - DNA, 438 bp, Homo sapiens
gttgctatggaggtggagccgagaggtgattcctggctgctcccagactatgccaaagaggcagagagatgtggtaagtgtacaagaatgacacaggagtttatgggagttcaaagactctctgaccagtccgagaataaagcattagggaaaaaggcactggggagaagttgccaggaattctcagcatcaagcaggaggttacccacttaatgtttggtatggcgttagaggctgtcctcaatgggataatcagataagcatttttttttcccgagacaaagtcttgttytgttgtccaggatagagtgcaatggcatgatctcggttcactgcaatctctgcctcccgggttcaagctattctcctgcctcagcctcctaggtagctgggattacagatgcccgccaccacgcccggctaatttttgtattttag

SEQ ID NO: 790740 - DNA, 641 bp, Homo sapiens
gatttggagctcatgggctgctgttgagattcttttgtcccatggggtgctcccttgatgtagtgctctctccgttttcctagggatgtggcttcctgagagctgaacagttgtgattattatttcttttctggaccttgccacctagcagagctattgggctctgggcttgtctgcacagttgtgtgatgtgaactgtcttcagctctctcagccatagatagcagcacctgctccagtggaggtggcaggggagtgaaatggactctgtgagtgtactgagttgtcgtttttttgtttgtctttttttttttttttttttgagtggcatcttgcctggtcacccaggctggagtgcaatggcacaatctcagcccactgcaatctccacctcctgggttcaaaggattctcctgcctcagcctcccgagtagctgggattacaggcrtctgccaccatgccctaaggatttttgtatttttagtagagatggggtttcaccatattgaccaggctagtttcaaactcctgacctcatgatccacccgcctcggcctcccaaagtgctgggattacaggtgtgagtcaccacgccttgctgagttgtagtttttttaattgcactagttttgtgctggct

SEQ ID NO: 790741 - DNA, 542 bp, Homo sapiens
aaccttctctctgttttttttctgggagttttttgttttctgtttgtttgctaggcattagcccacttggggaaatctaggagttttatagttttaggacttacattgaagtctttaatccattttgagttgatttttttttgtatggtgtaagataatcgttcaatttcattcttttgtatttgcatatccagttttctcaataccatttgttggagactgtatttcccccattttatattcttggcacccttattgaagagcagttgaccatatatggttggatttatttcttgactctattccattggtctatagatttgtctttatgtcagtactataccatttttattactgtagctwtgtaatatatttcaaaattagaaagtgtgatgcctttaacagatagatgaaaagatatgcaatgttactactcatcagggcattgcaaatcaaaatcacaatgagataccacctcacacccatttaaaaaacaaaagacaagtgttggtgagaatgtgaagaaattggcagccataccc

SEQ ID NO: 790742 - DNA, 501 bp, Homo sapiens
gtgagcctccacgcccctcacccagctgcagtgagcatcagcgttttgcaggcttgcttccgcactgtctccgagttttttcctggagtgtattaaggtaatccgtaattccaccttgaatacctcagtatgtgtctttaacagataagggtattttgccacgactgatacacacatttaacaaaatgatccataattccttaatagagtctgatattcagttcactttcaagtttcctccaagccgtgayggcccacctcctttccaagcgttgctttccctacttgtgttttcagtttccacctttctcacactggctatacgaatataggctctccagacgttggctgaggtgatgaaaacagtatgtggctttcggcagctctggatcaaaggacggagaggtggatccaaacctgacagcaaacaactgatttcagatgcccatggtgttaacagtagagtgatgcccgcgaggaggggtgggccagagctgaggg

SEQ ID NO: 790743 - DNA, 665 bp, Homo sapiens
  misc_feature 109: n = A,T,C or G
ctggcacccctggatccttttactgtgtctctagttttgctttttcagaatgttgtagagttggtagcatacattatgtagtctttccaggctagctgctgctgctttnttttttttttttttttttttgagacggagtttttgctcttgttgcccaggctggagtscaatggtgcaatcttggctcactgcaacctccttctcccaggttcaagggattcttctgcctcagtttcccaagtagctgtgattacaggcatgtgccaccacacctggctaattttttgtatttgtagtagagacggggtttcaccatgttggtcaggctggtctcgaactcctgacctcaggtcatccacctgcctcggcctcccaaagtgctaggattacagatgtgagccaccgtgcctcacccagactggcttctttcactgagcagtaggcatttaagtttcctgcatgtcttcttgtgactttttagctcaccgataatactctctttgaatataattttttttttcttcttaaaggttactgggcactctgcttccttcctttcagtgtcttggtgttttagaagtgaaatccttcactcctgagcttgtcaaggtagcaggtcatgtttcggtgtttggatgtcatcagtggggttcaccaggctttca

SEQ ID NO: 790744 - DNA, 577 bp, Homo sapiens
cctggccatgtgctggtttgtgcagctgagaacagaatgggaacgggcatttttatttgtccccatcgcccgggagcctggtcggttgtgtcgcttctcaggcaataagcaactgaatggactggcagtggctcttcaggcttttaggtttgctaaaaacaaaacaagccaaaaaagatgtgcctgacttcctctcgtggccaatggcactgcccaagggagcagcggttcctggggccacggtggaggatgcccacctgttcagagtcccaagaagccctgaatcggcacctcgcccaccttgcagcctgtcccccgggagcaggctctggagccccktttcggggaacgctgagcacacctgaagcctccacgtggggtgggcagtgctggccgtggctcctgctggttccacactctgacatgcagggccttggctatgtgtgtcctccagtgaggcacaccccctccagcggaggggcatcctcgtttcctggagcaccctctttccattctcccatgtttgtttttcttttgtttattccacacctttttcgggtagtgagtaagcctgtcc

SEQ ID NO: 790745 - DNA, 574 bp, Homo sapiens
cctctgtggcagtcatttttctttggtccaggcccatccatgacaactgaactatttcccaagtaagtgtgtagatcagtatcgtatgtggtcagctctcaataatccacagtaagtaacagaaaatatgaataaattaattcactgtgctggctgagtgccactgagatgtcatcctcacattccctactagaacccacrctctgctcgccttggtggcagagtatggcttggctctcctttctcctactacaggctgtcgggaccctggcccttcagccccctgcgccccttgaagaatgtcagcttttcattgcagataatcacaagtctgctgaccttaatgtgccaagggccattcaaccacacagaaaaggtgtagaatatagtttcataagtgttgtaaatttcatccagaaagtacaggttctcattcatattcatgcatgcctgtttgctttccttttgagtaagtcctgtgttattgagaaaagaggaagggaaataatattattgctattagccgactatggtgttactgatgggggaaaattgaaacttgtaaaattatgtg

SEQ ID NO: 790746 - DNA, 670 bp, Homo sapiens
cctcctctagcatctcgcagccacagaagtttcttggtttgtagatgcatgattctaatctctgcctccaccttcatacagcattacctctatcatttgtgtcaagttttctgttttcataaggatatcagtcatatcgaattagagtctactctaataaactgaccttaacttgatttcctttgcaaagactctatttccaaattaagtcacattcacaggtattgtgggtcagaactttaacatatctttttgaagagtcataacagtggagctctggagacaaacctggctgcacactgtttttccaggttgaatctagtagtggggactctgcaagaaaaggggtaagactgattcactctcagaagattctctctctttgccatacctgcacgtctgatctgaatgtcasagggcaagcaaatggtgaacattgtcttctcagttaggtagctgagaatagcaatgagatttacatcctcctgcaattaaacaaagcaactgactactagggaaatcttggggaaatttctgcccaaggaaactaagaagcttcatcccattagggcatgacgacttgaatttcagatgcaagggggagatagtgtgtatgtttttgtatcagctggtagcaacagggcagtccttttgccccatttgtacaata

SEQ ID NO: 790747 - DNA, 506 bp, Homo sapiens
tcaacagcaaaccagataaagaagaagaatttctaaacttgaatatagatcttttgaaataacccagttagctgaggaaaattttttttcgaaagtgaagaaagcctacaggacttatgggacaccattaagtgggcaaatatttgtattattagagtactagcagaaaaagatatagagaaggttttggaaagcatatttgataaaatagtagctgaaaaygactcaagtcttgggatggatatgaacaaccaaatccatgaagctcaaaaatccccaaatagatttaacctgaagaggtcctctccaaggtcattataatcaaattgttaaaggtcaaatacaaagagaattctaaacacagcaaaaacatcaagtcatacataagagaatttctataagagtatcatcagatctatcaccagaaatcatgcaggccaggaaagaataagatgatatattcaaagtgctgaaagaagaaaactttcagcaagaatactatacac

SEQ ID NO: 790748 - DNA, 563 bp, Homo sapiens
aaataaataaataaataaataaaaacaaaaaataaatttactagggtagaccatgcagaaagaatgtgcctgggtactgggacctcttctagctttgctccagaaatttggggaaggagtaaagacagtagcaattccagaggctccttgaagaggagttggggttggggaggataaagttaggtggtggttggaaatgggagagagcaaggagaaaactcacagtagctgctgtatggaccctgataccctgtacctctttccttgccctccaggtcctggagtacaatgccrttggaggcaagtataaccggggtttgacggtggtagtagcattccgggagctggtggagccaaggaaacaggatgctgatagtctccagcgggcctggactgtgggctggtgtgtggaactggtgagaggggtagggcaagggagaagaagtttcctgcaatggtggtgacttgggtgggaaggggagggatgggcctgaaacttatttctgggttgtgtttgtgtttctttgtctctagtgtgctacggccaaatttagagtgaatca

SEQ ID NO: 790749 - DNA, 436 bp, Homo sapiens
gactgtcaccttttttggaaataaaatctttagagatgtagtcaagtcaagatgaggtcacactggattaggtttgggccctaatccagtgaaaaatgtccttatgaggaagggaaatttggacacagatagacatgggggaaagagaggcaatgragcagtagaggcagggactgaggtgctgcagccgcaagccaggaaatgccaaggattggcagcaactaggggctgggagaggtgagtgagcatcccctccacaggttgcagaggaagcaccgccctgctgacaacttgagtttggacctccagcctccgcaactatgagacaatacatttctgtcattttaagccacccggtttgtggtactttgctgccacagccctagaaaagaagcacagatggagttatctcatagaatggaaaacgtagcgctgc

SEQ ID NO: 790750 - DNA, 603 bp, Homo sapiens
gcttagatctcaaagaaccttgcagaacagaagggcactcactcagttcttcacacaccccgaatttttttttttttttttttgagacggagtctttcttcgtcgcccaggctggagtgcagtggcgcgatcttggctcactgcaacttccgcctcccaggttcaagcgattctcctgcctcgcctcccctcccgcctcccgaatagctgggacgacaggcgcacgcccccacgcccggctaattttttgtgttttagtggagatgggatttcaccgtgttacccaggctggtctcgaactcctgagctcaagcaatccgcccgcctcggccttccaaagtgctaggattacaggcgtgagccaccgcgcccagacacacaccctgatttctggctggatctgatttaccggacaaagactccaatatatagagagaggcaacatgtcatkgtggttagaaatgtcaactttgccgtcaagctgtcctggttcagatcctcactccaccattcattagctgtgaacacaggcatattatttaactttcccctacctcatggtgaccatgactagagatggtgataatagtagctaactcagaa

SEQ ID NO: 790751 - DNA, 588 bp, Homo sapiens
gctcctacttccttggcctcagtttccaacccttctacctgacccccccctttcaggaaacagtgtcccaccgtgtccccaaatayagcttctcagttcctcattggatctgggaggctggggccccaacaccagaagatgtgagttacccctgccaggcagggctagtttgcccaaaagacttcagggtaggcagggggagcccatctgcctcttcccccaaggacagagaagaacagagccctgtgccaggcttgaggctgtggcagtagcaggatgggaaagtgccaacccccctcaagtggggaacctcccctcacttgtggcctctatttttagtgcttccctaggctctagctggagaaaccgtttagtcatcagggtgtttattttccggctgtttccgacgtcaggaaagcagaatgttgagactgaagagatccaaggctgctggaaaagacttcttaggatcaggcctgggaattcagccgtcagacccctgggtcccagatcacacacacacacaaaagaaagtgggcaggggtcagccaagcccccaggagaccaagagagctgggttctcagcca

SEQ ID NO: 790752 - DNA, 593 bp, Homo sapiens
gtaaaacgggtggggtagaaattagagtggcttctcttctcagctttagtcttcagagtggccgataaaaacagaatagaaacctaagcattccttcctcctctctgtcccccgggggaaggaagagagaataaatgccacatctcattaagcttttacgatctcaggcaggcagagtaggaccacaccggaggcaggcagagggctgggggaggctgcaggaaggaytccccagttctctcagggagctgtgttccagaacttaaaggccggctctacagaaaatgaaataagggttaacaacagatgtgggagtaacagctgcttttattaacatcagaagggcaacagtacaggaagttgggtagatgtggggacaacagagagactgtggcagaggcaggactgcagatctatggaaattgcctggaagagtcagctgtaagggatgagaatcctgagggtaaaagagaaaagggaaagactcctctttgatcttatgaagctgaaataacaagatcttaaacatgagtgagaatctgttgccccaacctaaggtgactttaaatccaaggtaaaaaacacggcatggg

SEQ ID NO: 790753 - DNA, 597 bp, Homo sapiens
cactactttgtggcagcccccgacccctttcccagtggcctttccaattttataaaaagaaaaaggaatcaagatggccaatggtttaataataataacaagcatcacaatagctattattatgaagtgctttgtgtgtgctagacactgcgctctcatttaatgcttgtaatgaatatataaggtagattctattatttctcccattttactaattataaaaccaagaattggmggtcaacatcttgccaaggttaccctcctaggcaagtcatgtctgttgaatacagggtttaaagccactcatgttggaccccaaagccctaggctttagcttctcctttattccatgataatgttccctcgtatccatgcagacacactggcccaggtacattgtgagaagaaagtgggtatataggttgcctcctgagttcagaggtgaaaactcacatgggaggaggagccaagctaggccctactttgaggaggaggagtggcatggagtgctgctttaccttctgtggtatgtgacatgtccttctttaaagtcaaacttgtgcaggagggcttgcccatcaaacaggtggtaaaatg

SEQ ID NO: 790754 - DNA, 527 bp, Homo sapiens
aaacacatgaatacaaaagtctgagacattgtatgtaataaacaaaaatggcaggtcttttatcactgtatttttagtgttaccatgaaatttttttttttttttttttgagatggagttttgctcttgttgcccaggctggagtgcaatcgtgtgatgttggctcaccgcaacctctgcctcccgggttcaagcaattctcctgcctcagcctcccaagtagctgggattacaggcatgtgccaccacacccggctaattttgattttttagttgagacagggtttctccatgttggtcaggctggtctcgaactccctatctcargtgatccgcccgcctcggcctcccaaagtgctgggattacagcatgagccaccacgcctggcctcatgaatttttaaggaaagttattgcaaatctttaaccctagctaatcatataagctttagaagacaaaaaggtactttttcttgagtagttaagagatataaagttctggagatagactactccaagattttcat

SEQ ID NO: 790755 - DNA, 526 bp, Homo sapiens
ctctctctctctccactttcaaaataaaagggtggtatatctcttggtcgtacagattaccaggatataaaattccataaccatctttcatttcaccaaaaacgaggtaaagaaaatattaccactgatagggtagaaaatatattgtgagacacaagaaaagaaacttgatagcaaaagagttttaatcagtagagatcttaaactcaatacaaggcaagaggaaaggacataaaaatcragcgtgggcttgctaaattcaagatttaaatatattgcctttctttcactacaatcacaactcagttaggtagatactttaattcacattttacagatgagaagattcagagtttaagcttcccaaggacagaaaggtaagtcagtgggaaattccatgtacattccattactaaatgccacataactgtttggataacataagaagagtgggtcattatatgataccaattagaagatattagggatggtggaggcagtaatttctgggataagaactataatt

SEQ ID NO: 790756 - DNA, 592 bp, Homo sapiens
aaaacccattttctgggagaaattcaagccagcttcagaaatctgcataagtagcaaggagcctaatgttaatccccaagacaatagggaaaatgtctccaggccatgtcagagaccttcatggcagcaccttccatcacaggcacagaggctcaggaggaaaaagtggtttcataggccaggcacagggtgcccctgctgtgtgcagcctagggacttggtgccctgtrtcccagctgctccagccatggctgaaaggggccaatgtacagcttgggctgtggcttcagagggtggaaaccccaaaccttgccagcttccacgtggtgttgagactgcaggtgcacagaagtcaagaattgaggtttgggaacctttgcctagatttcagaagatgtatggaaatgcctggatgcccaggcaaaagtttgctgcaggggtggggccctcatggagaacttctgctagggtagtgcggaagggaaatgtggggtgggagcccccatacacagtccctactggggcactgcctactggagctgtgagaagagggccaacatcctccagaccccagaatggtagatccaccaac

SEQ ID NO: 790757 - DNA, 636 bp, Homo sapiens
atctcaggacaagtgtccttataagagtgaaacaaagatttgaaacagacaggaggaggcaacgtgaccagggaggcagagactggagtgatgcagccacaagtcaagaaatgccagtgggcaccagaagctggaagtgacaaaggaaggattccccttagagactccagtgggacagcagcactaccaacatctcgattttgtacttctggcctccagaactgttcaaggacacagttctgctgttttaagccaagattgaggtgatttgttacagcatttacaggaaaaaatacagcacctaagaagtagtcagacagatgagggatctgagtcccagagagggggctmactcacccgaccccacgtcaaccactgggccaggacactcgggtctctctgacgccaaagtgcatgcagttccgtagtggcccagtgcacagctcagaagggggacccaccgggacctaactggcctcaggctgtgctaacgcaaatatagattccgaagtgaggctgcagtgggcttgctcctgtctgggctgatcagacccccacctgcacagcggtgtcccattcttagcttttcagggggccagataaagtgggcattctgcctaaagaagtgaagatgtg

SEQ ID NO: 790758 - DNA, 627 bp, Homo sapiens
ttttctatgcctgaaaatggaattgctctggttttttgagtgacttttcactagagggccttccagttactcctgtaagctgcctaacctggcacaccacgcccaagtgtaaccgtgaatccaaatgagtgggctgacctaagggaatgccaccaggcctcatcctgagcccaggctcaygctttgccctcctgggaaccttggcctgtgcatctttccttatctgtggagtcacgtctttggagcacctgggcttaggaagaatgattagtgaatctgtgtaagccaagcaaagttcaaagacctgcccagtcttcatttccaaacaatctcgtatctatgagacagtggccggcagcgtgactcagcctgaccccagcctcagtaacaaactctggcaaagacacgcggggagaggctgcagcgcttagaacttggagccatggtcacctgaccccggaatgaaacccgataaacaagcatttactgaacacccactggaagtgcttacaaggcactaagctaagcaccatcaagaaccttgatctcaaaggctgcaccacctctgtggcaggtgacggaagggaatgcttttcccatgcaactgcctaggaaagaaatcccaga

SEQ ID NO: 790759 - DNA, 627 bp, Homo sapiens
ttttctatgcctgaaaatggaattgctctggttttttgagtgacttttcactagagggccttccagttactcctgtaagctgcctaacctggcacaccacgcccaagtgtaaccgtgaatccaaatgagtgggctgacctaagggaatgccaccaggcctcatcctgagcccaggctcacgctttgccctcctgggaaccttggcctgtgcatctttccttatctgtggagtcacgtctttggagcacctgggcttaggaagaatgattagtgaatctgtgtaagccaagcaaagttcaaagacctgcccagtcttcatttccaaacaatctcgtatctatgagacagtggccggcagcgtgactcagcctgaccccagcctcagtaacaaactctggcaaagacacgcggggagaggctgcagcgcttagaacttggagccatggtcacctgaccccggaatgaaacccgataaacragcatttactgaacacccactggaagtgcttacaaggcactaagctaagcaccatcaagaaccttgatctcaaaggctgcaccacctctgtggcaggtgacggaagggaatgcttttcccatgcaactgcctaggaaagaaatcccaga

SEQ ID NO: 790760 - DNA, 510 bp, Homo sapiens
acgtcctcgcgcggggcccatgctgatcttctctgtatcattccaatttttttttagtatatgtgctggcaagtcatgctaggttggcattcctcagggtgtccaaatgagaggagtaaaggggaggtgattaagcaagaaggcccaggggagctggggaagctgggagcagagttcccctgggcagaggtcatgaaggggcacccaagtgacagccgagggagaacaacttctggaaagtctgtctcagcaggcatcagaggaaagcatctctatttggcatcaaagagctcagcatggcctccctcagggccccagcrcctttatctttgggatggatgtgataatagtctcagggggaggtcggcagtctgggaattactgtttcaagctagaatggacacctagaaggcactaatatccctaaatagtatctgcaggaagttatccagccagttttcttttcacgtgtctctgttccctccctctttttcacaaaattcttaaggt

SEQ ID NO: 790761 - DNA, 591 bp, Homo sapiens
cacagtgttgggattacaggcgtgagccactctgaccagccaaagacttctactttcatgaacttactgtaaatcttacccttaagtgaaagcctcaacattactgaaacacatacttaccataaatcctgcccttatgcaaattccctatggtatataagccctgggtcttggggtataacattgtagggatccaccatgtcatctggaggctgcctgagacatggtttctgttcgtaagtccctattaaatgtttccttctgatcactgtgtttgtcagcctctttctttggcctctcagctccctgggcctttggaggtaggtttgcatagacctgctcaccgcagaagagtgcttaatatatatwttttttttttttgagacggggtctcactctgttgcccaggctgaagtgcagtggtgccatctcagctcacggcagcctccgcctcctgaggtcaagcaattctccctcctcagcctcctaagtagctgggattacaggggtgcgccaccacgcccagctaatttttgcatttttagtatagatggggtttcaccatgttgaccaggctggtatcgaactcct

SEQ ID NO: 790762 - DNA, 638 bp, Homo sapiens
tactaatttttttaaaagaaaagttatatatgacacattatcatgcttctaactttagatttgtatggcatgtcagaattacatataacagctttaggtaatataaaaaacaatgctttttggaaacagaactatttagaatctagctgkgtgacttcagggaagctatttaaaactttctaaatctttttacctgcaaaaatggagctaatgttttcttcaaaagggtgttttgagtacgtggcacaaagtagaccctcaataagtgttattctcccatttattttatttcagtacattctaaaatggcaaatattccctgatagcttcaaaatttctagatatttttctaatgaaatagtacattttgttaagtaaaaaggaaactacaattttactcaaatgaacactgagtatataatattatttcacacacttgtgttttaaaattacacaccagaagagagtgatagcaaatcctatgtttaatagactaactagaacaacactgactccataaccatttaacaatggtcacatttaaggtaaaaggcctaaaagtaaagataattatagaaaatgtagacattgcaaaaatccatccttctccacagataaaatgctgctgtggctttgac

SEQ ID NO: 790763 - DNA, 537 bp, Homo sapiens
ctgatgggcttccctttgtgggtagcctgacctttctctctggctgtgcttaacatttttccttcattcaaccttggtgaatctgacaattacatgtcttggagttgctcttctcaaggagtatctttgtggtggtctctgtagttcctgaatttgaatgttggcctgccttgctaggttggggaagttctcctggataatatccwgaagagtgttttccaacttggttccattctccctgtcactttcaggtacgccaatcaaacatagatttgatcttttcacatagtcccatatttcttggaggcattgttcatttctttttactcttttttctctaaacttctctgcccactttatttcattaatttgatcttcaatcactgataccttttcttccacttgatcaaatcagctgttgaagcttgtgcatgtgttacatagttctcgtgccatgattttcagctccatcaggtcatctaaggtcttctctacactgtttattctagttagccattcgtctaatcttttttcaag

SEQ ID NO: 790764 - DNA, 537 bp, Homo sapiens
ctgatgggcttccctttgtgggtagcctgacctttctctctggctgtgcttaacatttttccttcattcaaccttggtgaatctgacaattacatgtcttggagttgctcttctcaaggagtatctttgtggtggtctctgtagttcctgaatttgaatgttggcctgccttgctaggttggggaagttctcctggataatatccagaagagtgttttccaacttggttccattctccctgtcactttcaggtacgccaatcaaacatagatttgatcttttcacatagtcccatatttcttggaggcattgttcatttctttttactcttttttctctaaacttctctgcccactttatttcattaatttgatcttcaatcrctgataccttttcttccacttgatcaaatcagctgttgaagcttgtgcatgtgttacatagttctcgtgccatgattttcagctccatcaggtcatctaaggtcttctctacactgtttattctagttagccattcgtctaatcttttttcaag

SEQ ID NO: 790765 - DNA, 626 bp, Homo sapiens
gtcaggcttgactttgttctttggctcctccaggttaggaatccactgtgctatggaggctgaggtgctccctgacccctgttcactacactctgatgggtggtgtcagtcaaagtgttttgcagtgtggtggcagtggggtccattcttgtttgtatgtgtcaagagcagtgtcagcatggcagggtgcatactattgggctgggggcagggttcttgcaggtgctagggtacctgcctctgtggggatgttcacgacagtggtgaaggcattgtggcttggggctgtagggggtccctgctggttactgtgtgtgctgtcacacttgtagtgttgttggtatatgggtagggtgctggtgggtgcgggtctgtgtcttttttctgtgtgctgcagttaagggtggttgtttggggtgcaggagtttccattgttttcattgcctggtttcactcccattgttggcatggggtatacactggcatgggcrgtgcattggcagggatggggttggctggctatgtgactgcaatggctatcaccagggagaatggactgactgtactgtcactgcagcagtgacagggcaggatgcacactctcacatctactgatgagaagagga

SEQ ID NO: 790766 - DNA, 507 bp, Homo sapiens
cttatcagtttgcatttcaaattcaaccatgtctttgtgagtcttgataggtcattccatgttataattgtgtggtattccattgcatgggtgtgatgtaccacagtttatccatttaattattgaaggacatcttggtagatcacagatagtggatattatgactaaagctgctataattatttgaatgcacattattttgtgttgacatattttaaaatgtactagatcaatttttgaatgtgctgtagctggatcgtrtcataaaattatgtttatcttttaagattgtgagttagttttgatttttttcttagtgtttatactttatttaacctttctcaaacttacagtagaattttcaggactctcatcctatgtaagagttcaaatagtcttttctctccaaatgttttcacaattttgtttgtgtttctttgttttcctttttgacttttttggaggaagaccacagcctatgcacattcactatcttgaaaagattct

SEQ ID NO: 790767 - DNA, 594 bp, Homo sapiens
cgtatcgagtgaacaatgtgtactaaaatggacagatgagaggtatacattgggatgtgaattgataatctagcaggttgtggggctagagggctttgggaaaagacaaaggaagaacatacaaacaaataaaataatactgtctttcaaagactaaaacctgtttggaaagagaggtagagaaagcaaacatataggatcacactgagttgatattttcccctagatttcagactttaagtcctctgaccttctctactctgagaagascccttctcttctctatttacataagatactgtaagtctatgcattttgttctctataggatgttcacagggaaagatataggcatggttcaatacatagatttaaaatgaatgcttgtaactttggttcccttctctccatttccttaatgtggtgactaagtacatttctataaataaaaaggctgtagtacacatccttgatagcagcagtagcaaacatactggggagactggatctcactctggtgtctgtcctgggacacaagtgcctctataagaggtgtgtaagacaacttcaaagggaaaaggaatataggtaaaa

SEQ ID NO: 790768 - DNA, 644 bp, Homo sapiens
gaaaactccaataataatcccccttcctcagagtattgacatatacacacagatgtttacaaatggtgttctctccaaatgtgagaatcgtagtaaccacagacacccaatagctgtatgtgtctgtgaaatcattcaccaaaattgggagatcrttctaggataacaaaatcaggaatgagtttgtctactatccaagagccaggtggatagaaagcataaattggccataatatgatgaaattggaagagatggatgattagcaggacaggtagtaaggatagtagaacgtggtgataataatagtaactaccactaaattgtcatgagaaaacaattaaatcagagactgcatataaatacttagcacaggctacagatagtgctcaaaatgctaaagtaacacattgttaatgaaagaaatagagacaaaatatcaatttcaagttgtttatggttaagaaagatacttgctttctctttaagatcttttatattatccttattttaactgtgtgccagaagtttttaggacaaagcaaatgcaaatatattatttgaatgaagtgggcagaaataataagatgggctgatcctgacgtttattcttatgtgataaaaatgagagttaatctaagcagaa

SEQ ID NO: 790769 - DNA, 644 bp, Homo sapiens
gaaaactccaataataatcccccttcctcagagtattgacatatacacacagatgtttacaaatggtgttctctccaaatgtgagaatcgtagtaaccacagacacccaatagctgtatgtgtctgtgaaatcattcaccaaaattgggagatcattctaggrtaacaaaatcaggaatgagtttgtctactatccaagagccaggtggatagaaagcataaattggccataatatgatgaaattggaagagatggatgattagcaggacaggtagtaaggatagtagaacgtggtgataataatagtaactaccactaaattgtcatgagaaaacaattaaatcagagactgcatataaatacttagcacaggctacagatagtgctcaaaatgctaaagtaacacattgttaatgaaagaaatagagacaaaatatcaatttcaagttgtttatggttaagaaagatacttgctttctctttaagatcttttatattatccttattttaactgtgtgccagaagtttttaggacaaagcaaatgcaaatatattatttgaatgaagtgggcagaaataataagatgggctgatcctgacgtttattcttatgtgataaaaatgagagttaatctaagcagaa

SEQ ID NO: 790770 - DNA, 597 bp, Homo sapiens
agctttctatatatggctagccagttttcccaacaccatttaagaaataggaaatcctttctccatttcttgtttttctcaggtttgtcaaagatcagatggttgtagatgtgtggtgttatttctgaggcctctgttctggtccattggtctatatctctgttttggtaccggtaccatgctgtaccatgctgttttggttactgtagcatagtttgaagtcaggtagcktgaagcttccagctttgttctttttgcttaggattgctttggtaatgagggctcttttttggttccatatgaactttaaagtagttttgtccaattctgtgaagaaagacattggtagcttgatgggaatggcattgaatctataaatcaccttgggcagtatggccattttcacaatattgattcttcctatccatgagcatgaaatgttcttccatttgtttgtgtccttttttatttcgttgagcagtggatcatagttctccatgaagaggtccttcacatcccttgtaagttggattcctaggtattttattctccttgtagcaattgtgagtgagagttcactcatgatttggctttctg

SEQ ID NO: 790771 - DNA, 597 bp, Homo sapiens
agctttctatatatggctagccagttttcccaacaccatttaagaaataggaaatcctttctccatttcttgtttttctcaggtttgtcaaagatcagatggttgtagatgtgtggtgttatttctgaggcctctgttctggtccattggtctatatctctgttttggtaccggtaccatgctgtaccatgctgttttggttactgtagcatagtttgaagtcaggtagcgtgaagcytccagctttgttctttttgcttaggattgctttggtaatgagggctcttttttggttccatatgaactttaaagtagttttgtccaattctgtgaagaaagacattggtagcttgatgggaatggcattgaatctataaatcaccttgggcagtatggccattttcacaatattgattcttcctatccatgagcatgaaatgttcttccatttgtttgtgtccttttttatttcgttgagcagtggatcatagttctccatgaagaggtccttcacatcccttgtaagttggattcctaggtattttattctccttgtagcaattgtgagtgagagttcactcatgatttggctttctg

SEQ ID NO: 790772 - DNA, 597 bp, Homo sapiens
agctttctatatatggctagccagttttcccaacaccatttaagaaataggaaatcctttctccatttcttgtttttctcaggtttgtcaaagatcagatggttgtagatgtgtggtgttatttctgaggcctctgttctggtccattggtctatatctctgttttggtaccggtaccatgctgtaccatgctgttttggttactgtagcatagtttgaagtcaggtagcgtgaagcttccagctttgttctttttgcttaggattgctttggtaatgagggctcttttttggttccatatgaactttaaagtagtttwgtccaattctgtgaagaaagacattggtagcttgatgggaatggcattgaatctataaatcaccttgggcagtatggccattttcacaatattgattcttcctatccatgagcatgaaatgttcttccatttgtttgtgtccttttttatttcgttgagcagtggatcatagttctccatgaagaggtccttcacatcccttgtaagttggattcctaggtattttattctccttgtagcaattgtgagtgagagttcactcatgatttggctttctg

SEQ ID NO: 790773 - DNA, 597 bp, Homo sapiens
agctttctatatatggctagccagttttcccaacaccatttaagaaataggaaatcctttctccatttcttgtttttctcaggtttgtcaaagatcagatggttgtagatgtgtggtgttatttctgaggcctctgttctggtccattggtctatatctctgttttggtaccggtaccatgctgtaccatgctgttttggttactgtagcatagtttgaagtcaggtagcgtgaagcttccagctttgttctttttgcttaggattgctttggtaatgagggctcttttttggttccatatgaactttaaagtagttttgtccaattctgtgaagaaagacattrgtagcttgatgggaatggcattgaatctataaatcaccttgggcagtatggccattttcacaatattgattcttcctatccatgagcatgaaatgttcttccatttgtttgtgtccttttttatttcgttgagcagtggatcatagttctccatgaagaggtccttcacatcccttgtaagttggattcctaggtattttattctccttgtagcaattgtgagtgagagttcactcatgatttggctttctg

SEQ ID NO: 790774 - DNA, 537 bp, Homo sapiens
gctaatatcttctacacatattaatcttctctacttgcttcccactgtaacctctttatattcaacaggatccttgggcagggaattttccacgctataaagtcactcccctccagtggggcagcagagcttccagtcctcacagcctgcttgcctacccagggttcaacttctgagccacagaactgggctgtgagacaaaggtggataaaagcagccactcttttttactgagatttatgtggactttctggaataaatatttcccaacagtatgctctttggccaatttctagagattatttttataattttatccagttttattgctgccttttggtggtgagtgaatataccaagacccagaaatacccattctcaaagtcccatcggaasaaaattattctgaagtaaaattggttcaacaattttgggaaccattacataccaaaaattattcttgatttgactttttatagtctacaaaatatgaaaactattaagaagttacctcattcttttttttttttttttttt

SEQ ID NO: 790775 - DNA, 621 bp, Homo sapiens
  misc_feature 609, 610, 611, 612, 613, 614, 615, 616, 617, 618, 619, 620,621: n = A,T,C or G
tgcagcctttctctgccagcacctgttgtttcttgactttttaataatctccattctgactggcgtgagatggtatctcattgtgggtgtgatttgcatttctctaatgatcagtgatgttgagtttttttcatatgtttgttggtcacatgtacgtcttcttttgagaagtgtctgttcatgtccttcgcgcaytttttaatggggttgtttgttgtcttgtagatttgctcaaggtccttgtagactcacaatagcaacgacatggaatcaacccaaatgcccatcgatgatagattgtataaagaaaatgtagtatgtatacaccaaggaatactatgcagtcattaaaaggatcaagatcatatcctttgaacggaaaggcgttatcctcagcaaactaacataggaacagaaaaccaaacagcgcatgttctcacttataagtgggagctgcgtgatgaggccacatggacacatggcagggaacaacacatactggggcctgttgcgtggcagggagagagagcatcaggaagaatagctaatggatggtgggctttaatacctaggtgacgggatgatctgtgcagtaaaccaccacatgtnnnnnnnnnnnnn

SEQ ID NO: 790776 - DNA, 558 bp, Homo sapiens
agcttccaggatccctttctcccagcatggctcctggcaggtccccaggtctgagccctggatcaggagaatcgcagggtggctcctgagctctgctgtgggcacagggtgcagagggagggactgtagggaggataagtgcttaataaccagctctctgggggaggcggctcttatttgtagcatttgctcacttccattgtgtaagcgttcccgtcacagtgatttcaagctaccaacatgacatggacttaggaggagataatgcaattggctctcgcccgctggatcaagccagctcctgcataccatgaagarctaacttgcctcttggcctttgcttatgctgttccttctgcatacaatgtccttcctctttctcccttggtgaactcctatggatctttcgaggcctagttcaagtatctggttttctgtaagactgcctcaaacttcccgccttccaccagaccctcagaacctacggggtcatagatgctgggtagggagagctagctgggtgctggataaatgaatgaatatggttagaggcctaca

SEQ ID NO: 790777 - DNA, 633 bp, Homo sapiens
acatcctcacctactcactcataggcaggaacacatacagagtcccatagtgttcccaacatgcctttgataatgccgttgtcttcccctcactctaaatacacagcagtgacctcttaggcaagtcaaccaacatccctcttggcaayatccaagagggaagctcctttcctcactcactgtctcttcactacaaagctgtttccaacctcaaggagggacatggtgggggctgggcagcggggaggggagaaagtgccagggggctgcagtgcccaggaggtagaaggctttcccacccaaccccttccttctctcttcactcaggccccactggaggctccatctatcatttggaggcttagcctaggaggaggcagcggctgggagatggggaattagagcccagaggaaaggaaaataccccaggcttccattccaggttgattgagagcagttgattaatagataaacatataaataagtgggcctgcagccacagagttcctaaatcctaatcatttctgggaaacctttggaacagtggttctccaagcacagaacctggaccagcagctgcagcgtcactttggaactttttagaaatgcacattctcggccccatctagacct

SEQ ID NO: 790778 - DNA, 627 bp, Homo sapiens
ctttcattggtctaacgagtgttttgtcagccctcctgcctcaccaaggacctttctgtactatttctaaacctctggaccaggcaggatggtcttcccaggacattacttcatccccataagcagctttccacttaccaagaatctgttgggaccctcctggcttctcctcctcccagtgtcctctatccttgcatgaggtcacctggcccccacccattctaccacacccccagctccccaaactgaaggtaagaacaatttaacctgctatagctccatcytttgttcctcagtctccagatgccctggttgctggttgaatcctgccttgtactccagactaaaacctggacatcttcctaccaggaatggggttgggactgtggcctcagctctaacaacttgtcactgatcagccttctcttaggacaggggtcctcccaagggtctgagatctggcctctgactcccagcttgctgcctgtgtctggtgtccctgctggaagctgcctgcttggattcccaagtatagttcccaccagcttcctcatctccgttctccacctcttagttgggatccccatcagacaagccaagcatgactcagtgtattgcgtatgctgc

SEQ ID NO: 790779 - DNA, 596 bp, Homo sapiens
caagccttgctaattacatgactttgggcatgctattaaccactctgtccctcaatttctccatctgtaaaatcgggacaataagagtgcaaattttagaaggttgttgtaagggttgatgtatataaagtacttacaatggtttccaacacattgtaagtgctatttaaatgtcagctcttratattattagtttctcacagaaacatacttctataatgtagtacattatacatgtagaaacatacttctataatgtagtatttctggggaatagatataaactgattcagatgtctgacgctttctgcacttccccttgcccatgaaccaagtctgtattgaataggttaaaacactctcttgtcaccatgagtatgtataagactgggctgaactctcttcttacttgtacaacagaatgtcggctgcctggagtactgggtatgtgagcaggcccaccgtgccatcgtgcttctgcttggtagtctttgcctgtgagaggtgaaaagagaggaggggaagaaatctgaaatctgacttgaacctaattatactgctagattaagaaaattttaaaacaagcaaattgtgat

SEQ ID NO: 790780 - DNA, 610 bp, Homo sapiens
caccatcaagatgcttatcataataacactattgagttctcattgtgtatcaggcaccatactgaatggcttataacagtgtttttccaagtgtggtccccagaccggcaacatgagcatcacctgggaactcattaggaatgcaaattatctgactccctcagacctgttgagtaaaaaacctagaggatgaacccagcaattggtgtcttcgccttccaggtgatactgatggcatgctgaactttgagaaccattgctttatttgcattctctaatttaatytacaagccaataaagtagatactgttatcaacctcagattgcaaaagttgaaactgaggcatgggaggctgagttacttgcttaatgtagttcagcttctaaagggaagattctggtttcaaatccaggtcacctaatccagagccccactaggccacagtgacctgtataaggtcttttggtacgtatggggggcaacactgtccaatatggtatgtgtccatttaaattgaaataattaaattttaaaaattgctttcttagcagcacattcaagtgccctgtggcttcatgtggttaatgcctgtcatagtggataaatata

SEQ ID NO: 790781 - DNA, 570 bp, Homo sapiens
gtgattcgcccacctcagcctcccaaagtgctgggattacaggcgtgagccactgcgcctggcctcatttgtattttttatttggtgattttctttgtgatcttgttttaaaagattttgtgttctcattagcttcactgaggtctacagaagtttatatctaaaaatttcttcagtatttggagtaaatttttgacttggtattccttttctgcctttcattcatattacactgtgcataggttccattttgcatcttyagatttctctatttaattaagaattgagtaggtggattttccttggttcctttccctttttacctgggtactgttttaattttcttcttgaaacttgaggtggaggggtggatattaatggggttttcttgttttgttttgttttgagaccgggtcttactttgtcacccaggctggagtgcagtgacatgatcatggctcagtgcagcctcaacttccctgggctcaggtgattttcccacttctgccttccaagtgcataccaccatgcccagctaagagtgtgtgtgtgtgtgtgtgtgtgtgtgtg

SEQ ID NO: 790782 - DNA, 641 bp, Homo sapiens
actaacatgagaacagtgtgggggaaacaacccccatgactcaaattatctaccactgggtccttcccacaacacatgggaattatgggagtacaattcaagatgagatttaggtggtgacacagagccaaaccgtatcaactgtatactccataagggtttaaaatctttattcacttcactgatgtatatcaygcacctgtttccttgtagatagggcagaataaatattttttcatgaatgaatgcactgaggcacttcagaatacatcaatctacagtgtttaggaattgactatgacctgaattaatatgctttgttcacctcacatccccagatcctggagtgtagtaagtacgacatgtatagtagaatgaataaaaaataatggattcaggcacaacacagcttcctatgaggctagggaattacccagactcaggcaaaattcattactatcattctcctctttatgaacctgacaaccaaacataatggcttaggaattttttctgttaaatatatttgattgatattatatacccagaaggtcaagataatgtggaaaatattatctactgcccttgagtcaaggactctgatgtatatcgtggtgaatatttatgcttactatgtcatt

SEQ ID NO: 790783 - DNA, 606 bp, Homo sapiens
tggagaaaccccatctctactaaaaatacaaaattagccggatatggtggcgcatgcctgtaataccagctactcaggaggctgaggcaggagaatcgcttgaacctgggaggtggaggttgcagtgagccaagatcgtgccattgcactccagcctgggcaacaagagtgaaactccgcctcaaaaagaaaacaaaaaacaaaaaaacccccaaaataatgggccaggcatggcggctcatgcctgtaatcccaacactttgggaggccgaggtgggcggatcacctgaggttgggagtttgagaccagcctgaccaacatggagaaaccctgtctctrctaaaaatacaaaattagccgggcgtggtggcacatgcctgtaatcccagctactcaggaggctgtggcagaattgcttgaacctgggaggtggaggttgcggtgagccaagatcgcaccactgcactccagtctgggtgacagagcgagacttcgtctctccaaaaataaataaagataatgcaggagaggccagtgacagtggctcacatctgtaatcctgccagcttgggaggtcaaggtcgatggatctcttgaggccaaga

SEQ ID NO: 790784 - DNA, 537 bp, Homo sapiens
tgcgcgcctctgcagagttgttgctagggagacttgtgtcatcatccacaaccttgtttctcacttcctggttgggctcatctctgaagaacaggtctcccagcttcgctccttatcactgcattgtgaagaggaggaaaagtgaatcwcggagagagaaaggaaaggatagaatcacaggctgcgtctgcacctgaaaagtgacccgcggaaactctatggcggattttttttttaactttcttcttcctgttaaaacataggtcactaactgtgatgttatttgttttctaagtggtatgtgagattttctaatgtagttagaagtttcattgtctgatggacacaatatgcccttccggttctattcaaaccagcaggatctgtcggtgcttagagatggctgcctggactggaatcaaatctaatttcagggaaatgaagatggaatttgaaggtcacttttaaaattaagtcattgatgctgctgttacagagtgtgacagaggatccatgtctgtgacacaggacggtggg

SEQ ID NO: 790785 - DNA, 475 bp, Homo sapiens
ctaatgccacttttgattctaaaagcattttaaaacatgtcaagaacatgctaaaaaaatgaagtttccttacagttttcttcagtgggggcatggtttgggttcttctttttttttggcatttgatcactcctccccctctttaacccctcactgtttcataaatcacagcaaatgtttctccatgattttttggaaaaaattttggaagaagagaacatttttgccagtctttttgcctaaatgccaaatatctgtgagtgctattctcatatccaaataaccraagcagatcctattttttttggtggctaacagtaccttcaccatagaaacagctttctggctatagttgtgaatcacatatacatagtgacagtaacgagttcccgattctgcaacacattttaacccattcagtacacaacagatgtcccacatatattgatcactccttgtttcacctacttcattt

SEQ ID NO: 790786 - DNA, 672 bp, Homo sapiens
catttctgttctgcgaggagcgggatcctcttgtcaagcagtcagtccctgctgcttccttactggggcaggatcaggacgcacagggatttggagtgccttggaaccaaccaccacccacgccgtttgccagctggtaaacatgcccatcaggtccgggggttggcattgcctggamatctttagtgttcatcttgctgacatctggtgccctcgggcaggtaggtgcagttggctgcctggtttacagagcttgtactgggcccaggttagcagaggtcacatccatttatcccactgcgcagaggagttccttctcaggaaacccagtttataagaagtactgactgccagaaatagagcagaaatgagaaccaggaggcaattgtgagaggaatggagacttctgacctctggggattggggtaccctcccccttaattgctgttggggtagcagagggcttagaagcccatgttcctagacttttagaattggaagaagacttagaagtaatctaggctgggggtccccaacccccaggctgtggcccgttaggaacctgaccgcacagcatgagggataggccagcgagcactaccgcctgagctccgcctcctgtcagatcagcagcggcattagattctcataggggcacaaaccctattggga

SEQ ID NO: 790787 - DNA, 618 bp, Homo sapiens
ctcaggttactaataagaacctttaggcaagaagtaggtttcttaccaaccttgaagtgaagagctctatcatcttgtagacagttgaatgagttttgaaatttcaaaggcctctagaaaatttaaatgatctaatatttacagtagatacctagacagaagtcattgtcctcacttctcaagtaagcctgaagaggaagatcccagtattggcaaacaggacctctagccagccagtgtttacctgggatcagaagaactcccacagggtatggcactggggtttagaggagtagtagggagggaatatcattgaaaagtgggagagggtaaaagggaagaaagaatctgatgaaccagtagaggtcacgggcattctgagcttcctctyatgttgctgaaagcaatcagggttagattcatgggttctggcttggattggagtcacacaaacaggattgaagtcccatcatcaatgccaccatcatcactatcatcatcaccaacatctttgtcatcgtgatcaccatctcctcctcatcaccattaccgtgatcaacttcatcatccttgtctccaccatcatcatatcacaatcactatcgtcaccatcatcat

SEQ ID NO: 790788 - DNA, 606 bp, Homo sapiens
tttgtaggggcatcactccaatctctgttttggtggtcgcatgtggtgttttccctgtctgtgtgtctttgttttctcttttataaagttcccagtcatttgatttagggcccaccctcatctaggtatgacctcattttaagtaattatgtctgcagagaccctgtttccacwtaaggtcacattctgagcttcttgttgagcttgaatgttaaggagacaccattcaacgtagtcctctctgtttttctgttttgttcaataaatagggagggcacttttagaacattctgactcttccttaaccagccatgtcccaacccaggaagttgatgcccatcttacaaggagggccagaaaaagggaacaaggcacacagaggtatcctcagagctgatggatggctgctggcagatgcccagaaacaggtgctgggcctggagggtggaagtatataccatggtagctacatggtttggtgtcaaaatacttgtattttagtgagcatgagaatgagagtaagagtgggacagagagaagagaaaagggagggagaaagatggcttattcacacacaaaaatttagtggttcagaattaatttaac

SEQ ID NO: 790789 - DNA, 627 bp, Homo sapiens
aatatctgaaacggggtaatttataaagaaaagggatttattttgtactgttattgagttgagaagtccaaggtccagggggtgcatctggtgagggccttcttgctggtgggaactctctgcagagtcctgaggtggtgcagggcatcacatgctgagggggtgagcatgctaatgtgctagctcaggtctctcttcctcttctctctctcttttttttttttttgagatggagtctcactctgtcacccaggctggagtgcaatagtgccatttcggctcactgcagcctcctcctcctgggttcaagcaattcttctgcctcagcctcctaagtagctgggattataggcacccgccaccatgcctggctaatttttgyatttttagtagagatggggtttcaccaagttggccaggctggtctcaaactcctgacctcaggtgatccacctgcctcagcatcccaaaatgctgggattacaagcctgagccatcacgcccagccttttcctcttcttataaagctaccagctccactcccatgatagccggttagtccgttaacccattaatctatgaatggattaacccattcatgagggcagagctctcatgatccaatca

SEQ ID NO: 790790 - DNA, 519 bp, Homo sapiens
tgacaaagcttcagaatagcaggatcttagatccctgaatcaccacttgggggagagcttcccaggaaacctgccgaaccccatcaaattttgcatgagaaagaaatacgtttttattggattaagccactaacatttcaggtttgattcatttcttaccatagcccattcytttttttttttttttttttttttttttttttttttgagacggagtcttgctctgtcacccaggctggagtgcaatactgcaatctcggctcactgcaacctccacctcccaggttcaagcgattctcctgcctcagcctcctgagtagctgggattacaggtgtgtgccaccatgcctggctaattttttttgtatttttagtagagacagggtttcaccatgttaatcaggatggatatcatagcccattctatattgatcaatgtagctaccaattgctgttgaattgtatattttaccatttcagtcaccagagaggtattcaaaaacaaacatccctataaat

SEQ ID NO: 790791 - DNA, 598 bp, Homo sapiens
ggtattaatgtgaccaggcctgcttcagctgaaatgtggtggcatgcgcctataatcccagctacttaggaggctgagacaggagaaccgcttgaacctgggaggtggaggttgcagtgagtcgcgatcgcaccattgcactccagcctggacaacaagagcgaaactccrtctcaaaaaaaaaaaaaatgttcgatagctccttatttcctaatgaaacacaacagcatccttggcctgccattcaagattcttcatgaccttgccccgattgacatcttcagccttttcctcacaatccagctcttcctgtctttcatctccatgcctttgcaggtcctattcattctgttaggcgtgcctttctcctctcacttccatgagtataaaccagcttgcaggttaccttcagaacaaaatctctttcattcccccaggtcccaaggcttctcttcctcttctgaatttctacagcacttactctgtctcactccctttgctacaggttattttcaatattatattgagaatttctgtccccggccagacctctttcctgtgtgctacacctatagctcctgcccttccctagacagct

SEQ ID NO: 790792 - DNA, 598 bp, Homo sapiens
ggtattaatgtgaccaggcctgcttcagctgaaatgtggtggcatgcgcctataatcccagctacttaggaggctgagacaggagaaccgcttgaacctgggaggtggaggttgcagtgagtcgcgatcgcaccattgcactccagcctggacaacaagagcgaaactccgtctcaaaaaaaaaaaaaatgttcgatakctccttatttcctaatgaaacacaacagcatccttggcctgccattcaagattcttcatgaccttgccccgattgacatcttcagccttttcctcacaatccagctcttcctgtctttcatctccatgcctttgcaggtcctattcattctgttaggcgtgcctttctcctctcacttccatgagtataaaccagcttgcaggttaccttcagaacaaaatctctttcattcccccaggtcccaaggcttctcttcctcttctgaatttctacagcacttactctgtctcactccctttgctacaggttattttcaatattatattgagaatttctgtccccggccagacctctttcctgtgtgctacacctatagctcctgcccttccctagacagct

SEQ ID NO: 790793 - DNA, 609 bp, Homo sapiens
gcactgtgtgtctgtgtgcctccaaaattcgtatgttgaatgcctagccccagtgcctgagactgggaatgtatttggagatacatcccctttaaagagggaattaaattaaaatggggtcattaggatgggccttaatccaatctgactagagtctttataagaaaaggtgatttaggttggctgcggtggctcaggcctgtaatcccaggaatttgggaggctgaggcagaaggattgcttgagcccaggagtttgaggccagcctcagcaacataggaagacctcatctctattaataaaaataaataaataaataaacaaataaataaaaattagccaggcgtggtggcacgtgcctgtagtccragctacttgggaggctgaggtgggaggattgctggggcccaggaggttaatgctacagtgaaccaagatcatgccactacactgcagcctgggcaacagagtgagtccctgtctctaaaacaacaataataataattttaaaaagaagaggagatttggacacacagctcacacagaggaaagaccactcaggacacagtgaggaggtgccatctgcaagccaaggagagagaggtctta

SEQ ID NO: 790794 - DNA, 559 bp, Homo sapiens
cctaaccacactaacattccaagcacaggacttgcagctagatttaagctaccacatcacaaacaagtcatatatccagatggttttaagacctacaaacttcaaaaacttaggcaatggtctaaagacccaggagagggagtttccttcttgtattcatctgttctctcattgctataaagaattacctgagactggataatttataaagaaaagaagtttagttggctcacagttccacagactgtacaggaagcatggcagggraggcctcaggaaacgtacaatcatggcagaaggggaaggggaagcaggcagcttctacatggctggagcagaggaagagagcaaagaaggaggtgtgcacacttatagacaaccagatcacatgagaactcactatcacaagaacaacaagggggaagtctgcccccacaattcaatcacctcccaccaggcccctcctccaacagacccgtcctttagttgtaatcctccaactggggattataattcaacatgagatatgggtggggacagagagccaaaccatatcact

SEQ ID NO: 790795 - DNA, 592 bp, Homo sapiens
ttctattattattctttgggaccatacttctcaattgccctttggtttatctttaaaagagtctttcatcccatgaaatttagtgttctctcccttttctcattataaacaattcacttcacacatgcagaaaaatgaaattaggttgaataatacaaagttatgaatgctgatagaaaataaatawcttcttatcttcctttcactttgctgcttggtctctgtggttttgcctttctggatctgtgccttttaaatgccttaaagtctaaaagttgaaaggtagaaaagacgagaagatttactgttaaggagcacaattgggtcctatgtctttatagtcaatattttaagtagtttaaggaaaaggatgttaatttaagagataggtcaaatgtttgtcttgtttttcaacaggatcacctggaagaatatgttgtttttatttattagatatttacaaggctctcatagcccagccaattatgatgaacactaggtatttaatacaatgtgataaacgtaaaaactgccagtatagtttgtttccagattttttaaaaaagtactgaatcatggatccagtaaaaag

SEQ ID NO: 790796 - DNA, 646 bp, Homo sapiens
gcagcacttatcttggtatctggctcttgtccaagaactggcctttgaagaccttccgtgttggaggagagatgccagaaaggggaagctctttctcttcattgggtgtgcctgcctgcccttgtgaggcgttcctgccttaccgtggaagtggcctgtcctttgaatgattcgggtcactgagtgaaaagctccatgtggctgacgatggagaagttccccacagagcctctttcagaggctctttcagtctttcagtccagcagtagttccctcctgggtgtcagagactgaaggaggcatgagaagccagaggcacatcccagcagtgtgccccrcaaagaatggcctcttctttgtttgagggctggtcattctgactatggacctcacaatcactggaatcggatgacaaaagaatgttgtcaaagaacattaatcattgcatgggttgcaattcgtgattagctggatttgcataaaagaatgtagaggccttgaaccacaaaagcgaaaatgtgtatccaagaaatagtggtggccatcattccagtgagagcatgttcataactcactgctgcagaagaaatgatcaaaaagtggtccaggggccccgggttctctgtgttaaaaatatttctcaaga

SEQ ID NO: 790797 - DNA, 646 bp, Homo sapiens
gcagcacttatcttggtatctggctcttgtccaagaactggcctttgaagaccttccgtgttggaggagagatgccagaaaggggaagctctttctcttcattgggtgtgcctgcctgcccttgtgaggcgttcctgccttaccgtggaagtggcctgtcctttgaatgattcgggtcactgagtgaaaagctccatgtggctgacgatggagaagttccccacagagcctctttcagaggctctttcagtctttcagtccagcagtagttccctcctgggtgtcagagactgaaggaggcatgagaagccagaggcacatcccagcagtgtgccccacaaagaatggcctcttctttgtttgagggctggtcattctgactatggacctcacaatcactggaatcggatgacaaaagaatgttgtcaaagaacattaatcattgcatgggttgcaattcgtgattagctggatttgcataaaagaatgtagaggcctygaaccacaaaagcgaaaatgtgtatccaagaaatagtggtggccatcattccagtgagagcatgttcataactcactgctgcagaagaaatgatcaaaaagtggtccaggggccccgggttctctgtgttaaaaatatttctcaaga

SEQ ID NO: 790798 - DNA, 682 bp, Homo sapiens
tgacatatattaacttttaccaagcaatacatttttacagtgtaaatttttcaggtatcatagggcatttttagggtgtctgggcatttttagggtgtttaccattttctggtagtttaatctaaataaactctcaggcaagcagatttttaaagaggacacgatacagtcaccctgaccttattaagcctctccccctttcattattaattcatttaaagaggtgtcattttcaactacatttttagtcgttctagctatagtaatgggaaaaaaaaaacaacctgaaccttaaagtcagcattgcaagaatatcaacacagactcagaataactagatgtatacacactcttgataaaaagcagttttcagaaacatttctcagctcattgtayacaattgttgacattttgccactgaaatctttttaatgttgtagccctttgaaatttgtgtaaaggctttgcttcacattaaagtagatgagaatataacgaaaaaccaaaaataaaatctttcaaagcatgcctggtattgtagggatttatgatggtatcacatttagggatcagtgaacacaaatttgttaagaaaaaaaaaaaagcaagatttttttcagagagttccagagagactgtctgaagcgtgataaaaacaaaatccactagtggaactcactag

SEQ ID NO: 790799 - DNA, 628 bp, Homo sapiens
ttggtagagtattttgtctgtgtattgaaaaaagatgaacctcagggagacgtaaacttgccctctaagtttcttttttttagttttatttatttatacgagacgggatctacctgtcgcccaggctggactgcagtggtgtggtcagtcatctgatctcagctcactgcagcctcagcctcctgagcacaagtaattttytcgtctcagcctcctgagcagctggggctactagtacatggcaccacgcccagctaattttttttttcttttttttagagacggggtctcactatgttgtacaggctggtctcaaactcctgggctcaaactgtccgtccaccttggcctgccaaagtgctgggacttcaggcatgagctgccacgcctggccaccctcttaagtttctgatatgaggtctagaccagggtgtatagaaaaactttgatttaagaaaattcaaatctatcagaggtccaagaccaaaaattaacctcattcaattacgtaaatgcatttgtgtctcaggagtcagggtctgctgggctgttttcaggacttctcatccaccgtggcttgatagtttgctggaatcagcacagaaactcagtctgggtttccctctct

SEQ ID NO: 790800 - DNA, 620 bp, Homo sapiens
tgctggaatcagcacagaaactcagtctgggtttccctctcttgccttcattttcctaagagaattggtcagagttcctgtgtttgtgatgagaaagggtcatacgtttttactctaaagttcttttttctactttcaactgttgtggatttaatgacagtgttctttgatcacagtaaatatatggagcatttgccaaatcagaagaggcataaacctgctctaacaatgtttttgaaaatgactgtggaatgtggtggttgcctgtggcaaagaaagatgaagatggcgcagggtgtgtctggctggtctcaactgttagcctgccagtttaactgctagtctgctttcctggtaactcactggcttgtatttggtaagcacttccaccctggccctttagggacttatccaggccctggaagtytgtagccttagctcctgcctatcaatatcccagtacacaaggagtcagaggtctggacagaaggtgtggctaaacctggtcatagaagattaaacaaggaggaggctgtcttcccagcctgtgagaaaaggactgtttgcaatagacaaaccacccaagaagaaaaacaaaaatcagcttgattgatttttat

SEQ ID NO: 790801 - DNA, 588 bp, Homo sapiens
aggatcccaccccaaatctgaaggcagtgtctcaaaggaggatacagaagttgttgccaagaaataggagaaaagtggcaataaagaaacagaatgggccgggcgcggtggctcacgcctgtaatcccagcactttgggagrccgaggcgggcggatcacgaggtcaggagatcgagaccatcccggctaaaacggtgaaaccccgtctctactaaaaatacaaaaaattagccgggcgtagtggcgggcgcctgtagtcccagctacttgggaggctgaggcaggagaatggcgtgaacccgggaggcagagcttgcagtgagccgagatcccgccactgcactccagcctgggcgacagagcgagactccgtctcaaaaaaaaaaaaaaaaaagaatgagcaaaaaccttttactactggcatgtagatgtctttcagatccagacaatatgtattttaaatgaggctttgatattgcacattgtgagagctgctcttgtatgacttcatgtcatgtttgcttaggcaaagcgatttttctgcttttctttctgggccaaactggctgcagcaaatcaaattgttc

SEQ ID NO: 790802 - DNA, 683 bp, Homo sapiens
gcaacatccagccccaggtggacataaccgtttccatggataaaccattcccaggtggatatcaggcctcaagaggatagcagtcaccaggtagccatcaggcctcagatagacaccaaggtcccagatgtacagcaggccccaactgaaccccagactcatgtggacatcaggccacaggtagacaccaagccttaggtagatacctaacttcaggtggacatcagaccccaggtggacacccagtccccgggtgggcaatcaggccccaggcacacatcaggccttaagtggacacccaggccccaggttgatatccagctcccaggtgatcaccaagccccaggtagacgccaggccataggtgagcaacaggatgcagtaggtcatcaggccacagctggataccagtccccggtgaacacaaggccccagtgggacacagatctaaggcagacatcaggccccgggtggacgtacaggcctgaggtggaattcaccctgagggggacattcggccccagktgcgcatcaggcctcaggtgaataaccagtccccaggtggacattagcctgcaggtcaaccacagtccccaggttgatacctgatctccaagtggctacccaatctgcagggtaacattaggcccctgtaggatcccaggctgcaagtggattcctag

SEQ ID NO: 790803 - DNA, 662 bp, Homo sapiens
ggccagggggactttgccacccagaagagaaggacacaggcccagccgacttttctacctgccaattgtagagccccagggccttgagtgaatataggctatagccaaggagtgattaaggcaggccttgggcaagacccagcactgtgcttgcttcaggtgtgacccagtacctgaagtggtggtggtggtggtcataggggtgcttgtatcatacatcataccagccccagctttaggtgtctcagaacrgagagagagagagactctgtgttcttgggagaaagtaagggaagagaaaaagagactctgcctggtaatccagagaatcaccccagatcttatccaaggccatcaaggcagtacctctacaagtctgcagagaaccagtgtcactggaaagccttcccaagaaggatggctacaaataagctcaggcaatgaagagtacaataaatacctaactcttcaatgctcgggccccgaggaacatctactagcattaacaccatccagaaaaacatgacctcaacaaacgaactaaataaggcaccaagaatcaatcctcgagaaacaaagatatgtgacctttcacatggagaattcaaaatagctgcgttgaggaaactcaaagaaattcaagataacacagagaagggatt

SEQ ID NO: 790804 - DNA, 652 bp, Homo sapiens
ttctacctgccaattgtagagccccagggccttgagtgaatataggctatagccaaggagtgattaaggcaggccttgggcaagacccagcactgtgcttgcttcaggtgtgacccagtacctgaagtggtggtggtggtggtcataggggtgcttgtatcatacatcataccagccccagctttaggtgtctcagaacagagagagagagagactctgtgttcttgggagaaagtaagggaagagaaaaagagactctgcctggtaatccagagaatcaccccagatcttatccaaggccatcaaggcagtacctctacaagtctgcagagaaccagtgtcactggaaagccttcccaagaaggatggctacaaataagctcaggcaatgaagagtacaataaatacctaactcttcaatgctcgggccccgaggaacatctactagcattaacaccatccagaaaaacatgacctcamcaaacgaactaaataaggcaccaagaatcaatcctcgagaaacaaagatatgtgacctttcacatggagaattcaaaatagctgcgttgaggaaactcaaagaaattcaagataacacagagaagggattcagaattctatcagataaatttaacaaagatattgaaataat

SEQ ID NO: 790805 - DNA, 568 bp, Homo sapiens
taatacagaaatcgtagcataccacctgtcagaaattgacatagaggagtaaaatgtgccacatttctttacatagagaaaataaataaaaaggcaggaacttggaacaaaatcatgaagtcttcctttgtggggactaaatcttactatatatcatactaatttaccttatggtttctttttattatttattattattatactttaagttctagggtgcattgcacaacgtgcatgtttgttacatatgtatacatgtgccatgttgstgtgctgcacccattaacttatcatttacattaggtatatctcctaatgcttcccctccccactacccccacatcacaacaggccccagtgtgtgatgttctccttcctgtgtccaatgtgttttctgcataagtccttttatgcagtaggggtcacagtcacctttttaagtatatgaagcttgaactctggtactgtggaaaatgactatttggctgtcaaaaagagagaggtggaaaatggaattggttgggctgtggattaaggtcaggttctgcagcagagttacattggctgt

SEQ ID NO: 790806 - DNA, 558 bp, Homo sapiens
tttaagtgcatacattttaattagtaagaagagggctccaaaaacatgtaaataggcagcaagacaatacatgcttttggcaagtgctattatgaactatgaccacacagtaagagatgaatatgggtggtagagaaggcttctttttttttgagacagagtctcactctgtcgccaggctggagtgcagtggcacaatctcggctcactgcaacctctgcctcctgggtttaagtgattctcctgcctcagactcccgagtagctgggactacaggtgcgcaccaccatgcccagctactttttttkttttttgtttttttttttttgtatttttagtagagacagggtttcaccatgttggccaggatggtctcgatctcttgacttcgtgatctgcccacctccgcctcctaaagtgctgggattacaggcatgagccactgtgcctggcctgagaaggcttcttagatgacttatgtgttgagaaataaatgacaagacagtgaacaaaatttggggggaattctttacaagcggaagtaacaacaaataaaaa

SEQ ID NO: 790807 - DNA, 556 bp, Homo sapiens
ttctcttttagtgtgggtatggtactcatttgaaatacaatttagcttatttatttcagatcactttcaattttaggttttataattccttcccatctgtattaatatattttataatgtatagtacactaacatgcttctaaaagtcataactatgcagaaaagtatactcagagaatcatccctctcttcctcaaacsttgcaccctgcttaccctcaccttatagataaccaactttattgctctcttccttctctgtgcatgtatttctttttgtgtaaagataaatagacatatttgtgtgttattatttctcatttttttcctgtgcaaatggttgtgctttcattccatgtgttcttttgcactctgcttttacgactcaacataatctcctggaattcactccaaatcagttcatagaaatccttctctttattttttcaaaagcacaggactggattctatgtatgcaatgtaatttattcaatcaagctcttatgcttgagcatttagacagtagtcagtattttggattgtaaataatagtgcac

SEQ ID NO: 790808 - DNA, 535 bp, Homo sapiens
atattttaaaacaaagaaatgaacaaaatgtatacttttaacaaatgcttttatattttgaagttaaaaatgtcaaaccatataatagaaagataagaaaagcatacaaaatagctctcaaacagagaaaatcactgtaagtatatacttatagcaatggtttttcatttgtctctaaattttttaatatgtagaacaagtaaaatgaaattattggggacttaatatattgatcttttataaactccactaggtttttcctcaaacatgcatrtttcctgtctttctggagattcactaacttatttagctaccattttttaagcaatagagtatgtttaaactttattttattaaaaaggtgttgagtaaatgtatagaattatgatttttaaaattgtttataattcatttcagcctcttgaagtactttaaaactaaataagcttcatcagtttccttacatgagcaaagtaattttgcagggaatcatgacagtatgtaagatttttgaaaacgaaaaccaagaatttat

SEQ ID NO: 790809 - DNA, 621 bp, Homo sapiens
caatatggctttccattttatttgcccaaacatggaaatctagccatttttcaagtgcagctgcctacctttactttgggtaaatttctgtattaatattttttcactgtcttagttatcaaattctgttgcatgtaaatctggtttttttwaatatatgtaaagtttttaggtagaatgttaatttagtggtggtccccaaagtggagggcatttacctttaagtgtaagatgattcattggaaagaaagaacaaaattctatttttacatatgctgtatgtatcctaatgtattagcatagctgtacacatgtaaggtgtataaattaatattcttatattagatctgtgtggtgcaaagtttttttatacaagtatgaataataataaaattttgtgaacaattgtccagaggcatgaaatcaaatatacctatgtaggtcttaatcctatattttatgacatgtctgatgggaaagttcttaaaattactttgctaatgaaattgaaaatagcctgctaatttcagcccacacggaatgtgtgaaataccagtggaaacagctttggatcaggttcagacttttgtttttgtcctacttctgctaattactaatggc

SEQ ID NO: 790810 - DNA, 573 bp, Homo sapiens
gaagcatctattaatactgtgtgctcctaggagctcaccacctaaaaggaaggcagacaattcaatacaattgagtaaagtaaaataatggagatgtacacagtaaaatgtatgagttacatgtaacccattctgaagggtgagagttggttccctggaagatgtagtatttgatccaaagktgactgagtgtgaattaggtggattaaacaggagagacaacaaaggatagttgggccaatgatagggtggatatttcttcaatgaaaagttacaacgtatatgaaaagaagcagcatatataacatgagatgggaaatacaagcagtttgctggttttgaagcttagagggcaatgccaagtggtaagaaatggtacagtaagcagggaccagattatctaggaagccttatgagctaaggtaaagaatttatgctgtatgcaacaagaaaccattacaggttttccatatgtgagtggtagagtcaaacttatattttacgttattctagtggcagtgtggaggatggatgtgaggggataaacagaattaaaggtgaccagttggaagg

SEQ ID NO: 790811 - DNA, 515 bp, Homo sapiens; identical to SEQ ID NO: 789120

SEQ ID NO: 790812 - DNA, 619 bp, Homo sapiens
ctagcatttcttatagggcaggtgtactggcaacaaatgccctcagcttttgattattggggaatgtcttaattactcctttgtttttgaaggatagattttctgggtatagacttttggttgacagaatgcttttctttcagcactataaagatgtcatcccattcctttcttgcctccatagtttctggcaacaaactggctgtgawtttcattgtagagcccttgtacatgacaaaacacttcttgattgctgctgtcaagattctttctttgactttggcttttgacaattagattatatgtctcattgtggatctcttggcaattatccttcttggagttgattgagcttcctggatgtatagatttgtgcttttaatcaaattggaatattttggccattattttttcaaatactttttctgccctttcctctctctctctcttcttttctccagagaccccattaaatgtatgttggtatacttgatgatgttccagaggtcccttaggttgtgttcatttttctttattttttttctttctgttcttcatacttgatcatttcaattgaccgattttctagttctataattctttattctgcctaatcaat

SEQ ID NO: 790813 - DNA, 619 bp, Homo sapiens
tcatctactttttctgttgttcaagtgttaaaacagcaatctattccaatgtgaggaacagccttgctttgctggatttattaattctccatatgtttatctcccatgtggctgctgcttaagagctttttaaagggtaactttctagtaagtaatttttaatccgactttagaacttatatcccccagcactgagtgatgctcccaggaaggtgagagtccagtgctccttcttgtaacagagttttgtcaatactagcctcagaacagcttccctaccacaattctatctccatcttccatgccatcaccacagttaactttctaaaggcacaaacatagttagtcccctgttaaaastgcttctgggcagggcgcggtggctcacgcctgtaatcccagcactttggaaggctgaggtgggcggatcatgaggtcaggcgatcaagaccatcctggccaacatggtgaaacaccatctctactaaaaatacaaaattagccaggcgtggtggtgcacgcctgtagtcccagctactcaggagactgaggcaggaaaattgcttgaacccaggaggtgaaggctgcagtgagccgagatcaggccactgcactccag

SEQ ID NO: 790814 - DNA, 619 bp, Homo sapiens
tcatctactttttctgttgttcaagtgttaaaacagcaatctattccaatgtgaggaacagccttgctttgctggatttattaattctccatatgtttatctcccatgtggctgctgcttaagagctttttaaagggtaactttctagtaagtaatttttaatccgactttagaacttatatcccccagcactgagtgatgctcccaggaaggtgagagtccagtgctccttcttgtaacagagttttgtcaatactagcctcagaacagcttccctaccacaattctatctccatcttccatgccatcaccacagttaactttctaaaggcacaaacatagttagtcccctgttaaaactgcttctgggcagggcgcggtggctcacgcctgtaatcccagcactttggaaggctgaggtgggcggatcatgaggtcaggcgatcaagaccatcctggccaacatggtgaaacaccrtctctactaaaaatacaaaattagccaggcgtggtggtgcacgcctgtagtcccagctactcaggagactgaggcaggaaaattgcttgaacccaggaggtgaaggctgcagtgagccgagatcaggccactgcactccag

SEQ ID NO: 790815 - DNA, 593 bp, Homo sapiens
agatgacttaaacccacgacttcaaggctatagtaagctatgatcgcaccatcgcactccagcctgggtgacagagcaagaccctatctcaaacaaacaaacaaagaaaaagacaggataaaagtcacagaaatggtctacacactaggaaaaaatgtgacaattttttcatgaacacagcattgtctcctcttyaaagccctccatgtgccccagctaacatctggtatcaagtcaattacgtggaacaaagtctgcttgcaccatgagaaagctcagcagcatttagtttctacaagccatacgaacaaatagcacatttacaggaatgcaattacaaaaaagctttatctgagttaaacttggaattctcattaaaatttttttaattggttgtttttattacaaatagtacagagttaaaaatgataagatactaggactttggttaacagctctgtaatggagtttataatatttggaaaactgcctgtaaacagaatttctctacatgtgggatttgaagtgcaattgcaatgaaatattgtttgtttttgggacggagtctcgctctattgctcaggctggagtgc

SEQ ID NO: 790816 - DNA, 608 bp, Homo sapiens
ggctcaaaattgaaattaaataaaaaggttcacacaaaaaattatttctttccctagcctctctgcccatttttctttctacttagtaaccatttgtgtcagcttctgatttatactgccactgtttctttttgaaaaaataaacaaatacacatacgtaaacttacacatatttttcttatttttccctgtccttaccaaatgttgcacaccatatatatcattctacacagtattttttcttttaaaacgacttatccttgggatcattccaacaccgctstctttgttcatcctcttctctggctgcatagtggatgggtgtgccactgtttattctaccagtaccctcgggatgaacccttgagttgtttcctggcttctcctattataaacaatgcctccttgtgccttatagtattttgtacttctagagatatgtcttcagggtaaatttctaccttgattaccagtatttttcaaagctctccaagtgattcctctacgaagccgagttgaggcttcctggaataaacttaggattgtgaattggctcacttaaaagtcaggtgcttagaaccacaaagaagtttgtgtttcaggtatga

SEQ ID NO: 790817 - DNA, 591 bp, Homo sapiens
gtttaaatatacacctaacctttggggagattaagacataaaacctgtcttcagaggctaagaatctttagaaagagctcacacaatatcttaacatgtttcacagagatccaatctaattctagatttgactttttaaacacrtctccccgtaggagacatttctaaccctttgcttgtttgaccgatatctactactatgtaattctgtgtctttcaggtatagcgttaggaatacgaacatatgcaagatccagtcttctggggaaaatcactgagaagtaataagtaggaaaatgtgggtggttcataaagagcaaaattacacttgcaacacagggttaatggcatggaaagaaaattttaaaaattgtactgattttctccaaaattgatacaatagataagatcaaaaattaatctagagcacaaagataattttgatcattttcaaagatgaaaaaatagcataaactatgtaatcatatttactaaactcctatttaatgactatttcataagttattaaatataattcaatttaatgccattatttagtctaaataatttataaatgtcctgaagaaatgc

SEQ ID NO: 790818 - DNA, 625 bp, Homo sapiens
tcattaagtggaagtggatcatcataaaggtcttcatcctggtgtcttcacattgagtaggctaagggggaggagaatgaggaggggctggtcttgctgtcttataggtgacagagatggagaggtggaagaagtggaaaagaaggcaggagaggcaggcacatttagtgcaactttatgaaaatacattgtaatttctgtataactttttgctttttcatttctctaaaaatgtttctrtaagtaccaatccttctttcaccatttgctttgttttcatgggcctcctgtctcatagaggggcctatgtcgtaaaagaagtcaaaaggaatctcggataattggaacccttctgccaaactgatgactgtctggcacggattcagaagcagtcgtctccatcaagtcatcttctgttaatttctctactctggcggtccattagctcttgaatttttccaagatccatttcagaaacccttcatcctgactttttttccccaatatccacaatattttaaataatttccttgatagattctgtcataattcctgtgaagttatgcacaacatctggacacagtttcctccggcaggaatttatggtttctggatcgatggcttt

SEQ ID NO: 790819 - DNA, 637 bp, Homo sapiens
tttgaactcttaaaacacttgccacaagtagttttacaattttgtcgtggtaaagtagtacacaggtgcactgaattctctttcacctttgagcgtttactggatggtatcatgtgcttagaattctccttttgcctttgctcttgctatggtttatastgggtgtagtataattccctgcctcactggcattgggcttggacatataatttactttggccagtgaaagatgagttagcttcacacatgcttctgtggacttgcctggtttagcttacactctaggtgccctgctctgtgccgtgaaaaagaaaaataccttagatagtgatcgcttcttcagcttagaccttgttttagtccatttagtgtggtaataacagactacctaaaactggataatatatttaaaaagtttacttggcttataattctggtggctggaaagttcaagaccagacaactgcatctggtgaggtcctctggctgttccagttcatggcagaaagcacaagaggatctctttgcatgtgcaaagagatcacatggacagaggggaaggtggggaagtgtcaagcactttttcataaccagctctaccagaaacgaatagtgtgaaatctccctcacccccagg

SEQ ID NO: 790820 - DNA, 566 bp, Homo sapiens
tgcagaattattgaaacataaattgactaatttggagggaatattttgttatttcccagaccactggacacccagaacatttacttaagtccagatgtctgagattttgtgggaattagctcatatattgttccaaataaagaatatttcagaaacttttgtctaaaattgggcgtggttttcagtgctcaaatctaattacttcattgggtatgttgtgtggcaatttttttcacctcaaccctcacacacataatatgtgaaaattgaagcctctgtatctgaggtgtggctcataagcagagcaattaaattccaacctcaggacctcctacttaattgggkaattcactaacaatatccattaaagtgaggctttcttactgctaatccagttcctgggtaattgctttgagttctacagaggaaatctaatcctccaatttatagtagaaatgatttgtttcaaagtaatttcatatggctctttcttttttaaaaaatgttaatcataacaatattatacaataattattacttccattttatatatagattattaatat

SEQ ID NO: 790821 - DNA, 632 bp, Homo sapiens
gtatgttgttcagattatttactatgtcttcccatctatcttcactttcactgacactttcttcttctgactccagtctacagttaagctcattccccgaaaaaaaaaatacatatatatacacatatgtgtgtgtgtttatatatgtgtgtrtatatatatgtgtgtgtgtgtgtatttttagacttctagaatttgcttttttttctttttctaatagttttcatttatttgatgatattctcctcttttcacgcattatgtctccatttttttttcttgagacagagtctcactctattgcccaggctgaagtgcaatggcacaatcatagctcactgcagcttcggcctcttgggctcaagtgatcttcccacctcagccccccaagcagctgggtctacaggcacacatgaacacacctgactaatttttgaaatttttatagtgagaaggtcccattatgttgcccaggctggtctcaaactcttgagctaagttgatctgcctgccttggcctcccaaattgctaggattataggcatgagccactgcacctggtctatatctccatttttaataacattgaacctatttatcatagctgttttaaagtcattgtttgataattt

SEQ ID NO: 790822 - DNA, 616 bp, Homo sapiens
ttttctcatacttctaatctgacatggcctgacaaggtttcattgtcctttgctgtgatgtgacatcgcacagagaagatcttgtctcaccctgggttgaaggcctctagagggctggaccccagctatatgtcagggtctctgtaggtatagcctgaatgactgaatgaattcagaccagggcatgcaggtgcccagcccagagctggatgcttttaggcctcattctctttttcagatgtcacaggaggcccaatgaccagggtctccagtcaggcactacagccacattattacctctaccctacagagacagccctgggatgtaaaaagyggtgatcagctcattgattcatccaataagcatggattacacattcagcctggcccagggatggcacataaggcaggcacagtccctgacgttgtggagagagctcagacacccaacaggtcaggaaccagcaagaaaccctcatagaattctaaacctctgccctactctgctccagtcctggctccccgggggaagccaactggggctgttcccagcccaaaggtagagaggaaggtgccttaaccagctgtctctgctcttctgcaggccctgccatcc

SEQ ID NO: 790823 - DNA, 633 bp, Homo sapiens
gggctgcttccagggaatgagacaccttctatatcacctgcacagagtcacctttgtgctgtctgtgcagcctcctttctcacagagacctgcccatgaggtgctgagtgaaatggggacacccaggagcacctgcagggaaggyttcttggctctaagccatcttcaaatgctcccatagggttcaggttataaagatcattgacagcacaagcagtgggaatccccgtcctgcgatcatcccatcttgcctggctggccagaactctgggtgtcttatttatggactcatggaggcagggagccctggtacctcactatgtgctctcctccccccgtttcatccaagtgacatctgggcatccaggaaagccctgcaggagattacaggtgcccagaggaccaactgccatggggaggaggcttggaaggaaggaggagtggcccccacctatactgtggtggctgagatcttgacttctatggaaggtgatgcctctttccttagcagcttccccaaagtcagagccctccccagggtcagaagcttacccaggcaggggcagggagcagtcctgaccctctacgctctggagggccccacagaagggcccagcagatgcagtggtcaca

SEQ ID NO: 790824 - DNA, 633 bp, Homo sapiens
gggctgcttccagggaatgagacaccttctatatcacctgcacagagtcacctttgtgctgtctgtgcagcctcctttctcacagagacctgcccatgaggtgctgagtgaaatggggacacccaggagcacctgcagggaaggtttcttggctctaagccatcttcaaatgctcccatagggttcaggttataaagatcattgacagcacaagcagtgggaatccccgtcctgcgatcatcccatcttgcctggctggccagaactctgggtgtcttatttatggactcatggaggcagggagccctggtacctcactatgtgctctcctccccccgtttcatccaagtgacatctgggcatccaggaaagccctgcaggagatyacaggtgcccagaggaccaactgccatggggaggaggcttggaaggaaggaggagtggcccccacctatactgtggtggctgagatcttgacttctatggaaggtgatgcctctttccttagcagcttccccaaagtcagagccctccccagggtcagaagcttacccaggcaggggcagggagcagtcctgaccctctacgctctggagggccccacagaagggcccagcagatgcagtggtcaca

SEQ ID NO: 790825 - DNA, 628 bp, Homo sapiens
ggtcagcattcaaagtcaggactgtctgattcaagagcctgtatttttaaattattcatcaccacacttggtttctcagacttgttaggaaaactagggcttcccacaggacaaactagcaaggcaagtcaagtaacaactcacatacccaatctttagtttatgaaacaagaaatgtgagacaatgtcaaactggagcccttttacttgaggtcagtgaactcagtcctagaacctcattctcttcatacatattccagcccttgctacagtgtctggtaactgcaaactttgtkctatatgtctcctcctcccaaccagattgtgagttcctcaagggcaagaaccatactgacttttctgtgcacctgagcactttgtggaccttagcagcagttctgatacttatttattgattaatccaaactaagtctaggatttgggattatgacatctctttcctgatttccctctgactcttatctgctcatcttgcttctttatatttctattcttttttccctccattgtgtatttttttttgcagttgttcttatcagttgggataagataaaagcaatcccagaaaagtagtccctgtccattaaaaaaaggaatctgagtcatg

SEQ ID NO: 790826 - DNA, 639 bp, Homo sapiens
ttcagcagtgttggatctgtgaccttctcctacacctcttcaatgcaggaggacattaaaacacaagctgcaaatccagccagagggaaacggctgccctggacctgaggcctctttcatattcaaagactgacttcaattgactgggggtccatataaataatatatttctcaaccaaaagagcttccctgagcaattattctcatcagaaaagtttctatgaggtgccaagagaattattttaagaaatgtttttagaagtttcttgacctcagaattttttcaaggtgtcaacttgggctgatccccaataacaacaatccatagcttagtcagatttcaggttttaaagtatgtggcatttttaagaaggctcctccccactttccttcaaacatatgccgaaagyaaacacaagttcaagcccattgttgtgtttttcaactacaaattttctatctcttcctttccttcctccaccatcacctcaaaattcagtcagcagaaggtagaaatgagtaggaaccgtccaacattatgggacaccactcaagggtttccttgcctcagctttgcaagtatttcagatccttgattgtccttaaaatttacagtttgatctggcagtaatctctggg

SEQ ID NO: 790827 - DNA, 653 bp, Homo sapiens
gattttctgagaaggctcaaatcattttaaatcaataaaaatcttgaagttttgattatctgtttgttagttcagaaacatgtgtgttccagctaagtgtgtttacatatattattttcacaacagataaaaataaattcaaagaaataagattttaaaaatcacattgtgacttgttttattttcttatccaaataaaatgcttctttatctgtttttgctgaaaacaaagggaaaaagtcttgctttaaactaacaactatcaaaagaaaaattaatagaaaattctaatgagttttcctagaatccattaaagctaattttattggcatatataacttctttcctattatttttatttctgatccaactactttttttggctgtggttgaaatatgttccaagacgtaatatgttatttttattaataaatacgttctttataattaaaaagayaatcatatcagctttgctgagagctatgtcagaaaagttgacaaaaagaccaaatagattgctgaaatataattacattttagtatagttagtatcaattcttaattattaaaatgttagctttagatatttattaaggcatgatactttattcacatcctaattttacaaaattacattataaaatttctgttac

SEQ ID NO: 790828 - DNA, 504 bp, Homo sapiens
gtaatgtgattaaaattaggtatactactttatttgttttctgtgtgttcattctttttgtctttccaaccttccctttttgtattcttgtatattatcttaataacgactatgaactgtggaaatttcacagaagttgtgtcttgtttgtggacttttttataggtgtggaaatgccaacgaaaacaattacattagagagttttaggggactattagagctcctctggcccaagccctttagttttatagatatggaaactaagaccagagaagttaagtgacttkccttcaagcacacaagaagtaatctttctaagccaagatgagagtactgtctataccaccatctcaatatacgctgggtaaaaaattttcattttgagccacctagcactgaacatccttcctcattgcatgagttgcgatgagaggcaagaccctaacatctctcactgtggaattggagggaccataccatcctcctcactctaggaggatttc

SEQ ID NO: 790829 - DNA, 613 bp, Homo sapiens
gtggattcttggttgggcagactatgtgatcattaatgatcactgaggatcagttctcagtttgacatgagatgggagtaggtttgtcagctttcttcaaagatgtgtctttccaattgaggaaatttcgcatgcttaggcaaccagccacccacacatgctagcgccagatagtaatttctgaatatgagtgtgtgcaactcctggatgtgtgtggctttctgtggaaaacaaacaccctgtaaacrgttggatggattaaatagagacttaaatcggtatacgacattggttacattttcgttaactcttccctttcaattttgaaataattctttctcatacaacagtgcatgaaaccattgtgagaaggttttatggtgtggtaaaaagaccctaggactgtagaagtagttggatgaagccctcatttcttagttgtgccttgaattaccttctgagaccacaccttcatttcaggaggctttgtcttctttctttataaacacatgggagtgagctaaattaatgatataaacaaatcctccatattcactattctatgattctagggattctgtaaataaattggagtgaccttagtttcagaaat

SEQ ID NO: 790830 - DNA, 554 bp, Homo sapiens
tatttaggataattcagtcttcttgtcagattgcaacctttatcgttatgtaatgcccttcattgtccttcatttttattgatttaaaatctgtttcatctgatgtaagaattgtgactcttgctcttttttgtttttcattgcatggtagattttttttttkgccatcttttactttgaggctgttggtgttgttacatgtgagattggtctcttgaagacaacagatgatttggtctgatgtttttatccagtctgtcttttacgtggggcatttagcccattgacattcaaggttagtatagatatgtgtgaatttgatcctttcatcctgttgttagctgttttttacatagacttgattgtatccttgctttatatttatgcctgtgagctatgtacctaagtatgtttttgtggtggccaataatggtcttttgtttccctgtttagcactcccttaaggacctcttgtaagactggtctagttgaaaggtatcaacttagcatttgcttgtctggaaaaggactttacttcttcacttatgaaactt

SEQ ID NO: 790831 - DNA, 554 bp, Homo sapiens
attcaatacagatgtaagtcacttcctctttctgggtctcagttttctcatccataaattaagaccaacgaactggaatgtttctaaattactttccagtcctaataaataaggatgttatctttatagagatcttgcttagataggctggcactgggcagtgaaagaaaaccaaggaggcaaaccagtcaccatcagataatttatgggtgaaagtcaggggctgtctattacttaagaggcgaagtccagggtggacaacaacggmtggcatgtgacaagataaactacgaacctacccaggataagaaggcaaggaatccattcaaatataggggtgaatggtggactagatattcaatccagccaataaattctgctgaacaccttccttcaagctgtttttataagatctcccctatacatagaagcttatattccacatggtctcaaatgctaaaattttacttgatacttcgaacatattaatatcataaaagaaataaggtaagttttgaaattcaaacattatcttttgcagtagccactctgaa

SEQ ID NO: 790832 - DNA, 561 bp, Homo sapiens
aaaaacaaaataactatgaaggtcagtactggaacaatgataagatttgggtaagtggtgtggattaaacaacagcattgtagcaatgttaatttcccgattttgattattgtggtgtgattatttaagagaatgtccttgttcttagaaaatacacactcaagtgtgttgtgaagaggtttgatattgtcaacttattttcatttgagagtatttagttcagaawatatatatatatatatatatatatatatatatatatatgcagagagaaagagagacagaaagaaaataaaacagatggggcaaaatgcgaacaattggtgaatccgggtaaagagtataggaaagatccttacactattcttagactttgaaattatcccaccttctcagcttgtgcaacatttgaggagcaaaccaaatggaaggtgcacaaatattatcctgggtggagggtgcaagacaattagaagacaaaaaggggctcggtctcgaataaccaaattaatcctgagaatatattgttcacaaaatcaaaatgtttctagttttttccat

SEQ ID NO: 790833 - DNA, 626 bp, Homo sapiens
gtttattgagaggttactcacactctctgagcctcagtttcctcatctgcaaaatggagataataataatacacacctcatagggttgttataaagattaagtgagttaatgaatataaagtgtttaaaatagttcctgggcaatagttagcacttaattttagatattattattattatactttagttattactattgtaaatacaatagtyctcctttatccacagttttgctttccatggtttcagttacccatagtcaacgtggtctgaaaatattaaatggaaaatcccaaaaataaacaattcagaagttttaagttgggtcctattctgagtagtgtgatgaaatctcatgctgttccactgggtcccacctaggacgtgaatcatccctttgtccagcggatccacgctgtctattctacagcctgatagtcacttagtagccatcttagttatcagattgttgttgtatcactgagcttgtgttcaaggaacacctattttacttagtaatggccctaaaacacaagagtagtgatgctggcaattcaaatatgcgcaagagaagccacagagtgcttcctttaagtgaaaaggaaagaataagactgaattattgg

SEQ ID NO: 790834 - DNA, 635 bp, Homo sapiens
gaggcaggaggatcccttgaggccatgagttcaagaccaacctgggtatcatgtgagcccctgtctctacaaaaattttaaaaattaggaaaagagtaacttgagggctggtacattggaactacataagtatgctgcctccaccartctgtcctccaattatgttagcagtcattgatgatccttgcctgaattgattcttttattggaaaatgggaaaatgatgatattgtataaatttgtttgtaattgttacctgacattcctctataaagaagaatcaaatagggattaactaaaaagtcagggtaaatgcctaaatctttcccttagttataaaatttcaggaaaaaaagaagttgatataattgtcatcattgatcactagtgagttttcacttgtttatcataatatattcatggttttaatttactcagtgattataagcaattatgatcattattcttcttgatgctcaattgtcccaaatttggccaaggagagagcccctttaacctgactcctgagtccttttgacacaatcccactggtcttttggtgctttcctatatcctggcacaagaagtcccagcctcaccttgtactttgcctgtgccaagacaggaatccacca

SEQ ID NO: 790835 - DNA, 488 bp, Homo sapiens
ataaatgaccaataagcacatgaaaaggtgttctacgttattaatcttcagggaaatgcaaattaaaaccataatgaaccaccatttcatactcatagaatgatggtaaggatgtggaaaaactaaagcgttcatacattgctggtgggaatgtaaaacaggacagccaatttaaaaatcagtttggcagtttcttaaagttaccataaaatccagcaattctctaaatatctagagaaatgaaaacatwttataacatgcaaaaatgtgtacaccaatgtccatgggaatgtaatttgtaatagccaaagaatggaaataatccaaatgtccatcaactgataaatggattaaaaaatgtgtgggccaggcacagtggttcacacctgtaatcccagcactttgggaggccgaagaaggtggatagcttgagcccaggagttcaaggctagcctcggcaacatggcaaaataccatctctacaaaaa

SEQ ID NO: 790836 - DNA, 844 bp, Homo sapiens
aattggggttccaaggtttgtttgttcgtttgtttgagacggagtttcactcttgttgcccaggctggagtgcaaaggcgccatctcggctcactggaagcacctcctgggttcaagtgattctcctgcctcagcctcgcgggtagctgggaatacaggcagcggccaccacgcttggctaatttttatatttttagtagaaacgggatttcaccatgttgcccaggatggtctcaaactcctgacctaagttgatcctcccacctcagcctccgaaggtgctgggattacaggcgtgagccaccatgcctggccggagtttttattttccttttacaagtgcttcctcttctatttcccacagaacattctggaaaaccaccagggtagaaccctgacttctatttgaccacagctcaccattcttatatgttttgtgattttcattttcccttaagaattgtctccaattgcgacattcttcagaacttattaaagatatctgaagtgtatacggtgaaaaatgtatagaatggtggtgtcaccacttgatgttgagtgtgaaatgtgtgggtagtaaacttctgaagctgctgctgtaagggccaagggaaacttccccttcaccctgtgaaagtttgcagaaaaagcaactcactaagacaggttaattggagaaaaggcatrcaaatgtatttaacatgcacacggggagaatctcagattacttattccctaatagagttaagaagcttatacagcatcctggccaaacaagttatgggagtagggagaagaggaattccattgagaggatcactagggagaatgaatggatccagga

SEQ ID NO: 790837 - DNA, 645 bp, Homo sapiens
tgatcgtaccactccactccagcctgggcaagagagcaagaccctgtccccacaaaagagagaaacctttctaggatgttaaaatccctcaaacagaaatcttagaaatcagagagtattaactctgatttccaaattaacatcttggaaatcagagaatacagctaatgacaagaataattaaaatgagctgaataacactcaaaaaagaatgcaaatcaactttcatggatgaaatcgcatgatttgtaaaaagcaggcagtgagcagatattttgtggttaatgtttgttgattaaggttctttgctgttcaccaacacaatcagtaatttgtttttgttgtttttatatgtaacaagtttgttgtcctacaaaacatcccacatttccataattttacaaaattaccctgaatgagatggaataagcygattagaaacaaagatctgagagcaatgtgatatctctaattatatgattttatttccttttaggaaaatggagtagcttttaatgttctattaatctctgatttcaaagtgaatatgaaagaaataatgactatatttgtgaaactaaggtagatgattgtcaaaacatgacattaaaggaataaattcttaaagtatcttatttttgcgtt

SEQ ID NO: 790838 - DNA, 676 bp, Homo sapiens
cccttctttcggctctaaccttgttgggccccttgatattcctcagaggtaccagacactctcctcccctagatttctacccttctaactctatcacctcctctaagtctttgctcaaaatctttctcaatgaggtcttctgcaaccatcctrtttcaaattgtaacccccattgattgcagcggtatttccaatctcacttaccctgttctacttttttaaaaatagtgcttttaccttcttttttttttttttttttttgacagggtcttactctgtcactcaggctggagtgcagtggcacaatcttggctcactgcaacctctgtctcctgagctcaagggatccacccacttcagcctcctgagtagctgggactataggtgcgcaccaccatgcccaactaatttttcgtattttctgtagagatggagtttcaccatgctgcccaggctggtctcgaactcctggattcaagagatccatgtgcctcggcctcccaaagtgctgggattacaggtgtgagccaccacgcccagcctattagtgtttttaccttctaacatataatttacttacgatattgtttagtatatgtctcccttgattaggatataacacccacgaggatggatttttttaaatgtttcacttactcctatatcccaagtgcct

SEQ ID NO: 790839 - DNA, 631 bp, Homo sapiens
atccaaaatgatctgtttttaaaccaaacctatttgattggtataactatccttactatttaaagaaaaaaaaaaaagaactgatttccagagaggttaggtgccataccaagtgtcacacagctataatgagtatgttagacaaagacctgaattcagaccctctggctcagacacttcctttggccacattgtctagtcatatayatattttaaacatgctattaaatactagctttgaactgctagctttgagcttactagaatagaagactgaagggaatggaaggtactggtagtttcatgctgaaccttcagagagtgcacactctttgaaagcataagacagacatgtcaagaaataaccagcacaacaaataccatatggcactgaggatcagaggatgaagcttccatggggaacagagaaggccccatggggcgacaggatttcaaccaggaagaaagcgggggtgactgggtacaagacatcctcaagtgagtagacgtgctgcttggtgcttgtacagaaaccataggtgttatgtctgaaaagccaagcctgagccatccatcctgttgagagcctggaacgccaggctaatacttttgaaattgatcttgtaaataa

SEQ ID NO: 790840 - DNA, 631 bp, Homo sapiens
atccaaaatgatctgtttttaaaccaaacctatttgattggtataactatccttactatttaaagaaaaaaaaaaaagaactgatttccagagaggttaggtgccataccaagtgtcacacagctataatgagtatgttagacaaagacctgaattcagaccctctggctcagacacttcctttggccacattgtctagtcatatacatattttaaacatgctattaaatactagctttgaactgctagctttgagcttactagaatagaagactgaagggaatggaaggtactggtagtttcatgctgaaccttcagagagtgcacactctttgaaagcataagacagacatgtcaagaaataaccagcacaacaaataccatatggcactgaggatcagaggatgaagcttccatggggawcagagaaggccccatggggcgacaggatttcaaccaggaagaaagcgggggtgactgggtacaagacatcctcaagtgagtagacgtgctgcttggtgcttgtacagaaaccataggtgttatgtctgaaaagccaagcctgagccatccatcctgttgagagcctggaacgccaggctaatacttttgaaattgatcttgtaaataa

SEQ ID NO: 790841 - DNA, 659 bp, Homo sapiens
ccccctgatttagggaactttcaggagttggtcatcctcaaaccccaaatcagtggactgcctataatttaaaaccactttcatctgtctggtttgatcaggtcttccaaatgacaaaaacaaaacaaaacttccatgtcccagcmaggttattgaggggacatgtgaagtaaaaatgaaaagaggtggtcatctagatgttataacatttggagaatcttgtaaatttcttattgcctcaaaaatatttgtttaaaaagctccatccaaatttggttattatgatatgcatccacttggtggtctcagcctctggtgaccagagctaggtgtatgggctgagtcccgtggtctgcatgcaaatatgcagagtgaggtcacggaaggtagaccctggttgccatctgcaagaggaacaagccatcagaaccctctggctttcagcctaggtctcagttatttgtctcacagggtgcagttgatttaaaaagttataaaagtacccaggggtgatgctcacatggaatcagaaccttaggactataaaataaagatcaataaaaaaatcttttatggatccgttagcaactttctgtgggatgtgttctggccttccttgtttttgactgggcaagctgcattcatgccctcctacgggg

SEQ ID NO: 790842 - DNA, 659 bp, Homo sapiens
ccccctgatttagggaactttcaggagttggtcatcctcaaaccccaaatcagtggactgcctataatttaaaaccactttcatctgtctggtttgatcaggtcttccaaatgacaaaaacaaaacaaaacttccatgtcccagcaaggttattgaggggasatgtgaagtaaaaatgaaaagaggtggtcatctagatgttataacatttggagaatcttgtaaatttcttattgcctcaaaaatatttgtttaaaaagctccatccaaatttggttattatgatatgcatccacttggtggtctcagcctctggtgaccagagctaggtgtatgggctgagtcccgtggtctgcatgcaaatatgcagagtgaggtcacggaaggtagaccctggttgccatctgcaagaggaacaagccatcagaaccctctggctttcagcctaggtctcagttatttgtctcacagggtgcagttgatttaaaaagttataaaagtacccaggggtgatgctcacatggaatcagaaccttaggactataaaataaagatcaataaaaaaatcttttatggatccgttagcaactttctgtgggatgtgttctggccttccttgtttttgactgggcaagctgcattcatgccctcctacgggg

SEQ ID NO: 790843 - DNA, 607 bp, Homo sapiens
ctggcactgccagtggtctcgctagcacacgggcatgcatttacaatcagctgactgtaggacatgattgaaaatgacttaaaagtcgcaagtctgtagtcccagctacttgggatactcagcaggctgaggcgagaggatcacttgagccccaggagttcgagctcagcctggacagcatagagagaccttgtctctaaaaaggaaaaaaacaaaacaaaamaaaaaaaacagacaaagaaaatgaccttaaaccagtgttttatttttttaacttttattttaagttctgaggtacacatggaggtttgttttataggtaaacttgagtcatggcagtttgttgtacagattattttgtcacccagctattaagcctagtgcccattagttatttttcctgatcctctccctccttccaccctctgccctccaacaggccccagtgtctgttgttcctctctatgtgtccatgtattctcattatttagctcccacttataagtgagaacatgtgatatttggttttctgttcctgcattagtttgttaaggtcgggaggtggcctccaactgtatccatttcctgccaagtacatgatctcatt

SEQ ID NO: 790844 - DNA, 614 bp, Homo sapiens
ttacatttctgcaatactctaaaaagttaaacgtggaaatggatccatggaaagggatttataacattagttaaaataatgaatgatgctcattttgtcaaatggccaaatgcagagagtatattgcaccatctgtttgagaagcccacagatttattttcctaaacatctggcagctcatctctagggtctgtctatgtaccaagccctgcctggctctgtacctgagaattagggttggcttagaatactctgggaatacatacaactgctcacagagtatcatgtggttcccttgtgcartctacacaaatggctaatgtagtctctttcccaacaagggctttagtaaaatcccgcctacaggaagttttcaaaaataccagcatttcaggggactttattggaatgtgctggcccttctgatgactttagcattggaaaaactgagggtgagaccatgattacaatggcagtgcatgtgggtagtgacatgagttttgcaggtgctgacaaaggaaaaaacattcatactctactatgtttgaagccacagggctggggtccactctgtgggatctgcttcactagtaaaaatatctaataacaaagtt

SEQ ID NO: 790845 - DNA, 614 bp, Homo sapiens
ttacatttctgcaatactctaaaaagttaaacgtggaaatggatccatggaaagggatttataacattagttaaaataatgaatgatgctcattttgtcaaatggccaaatgcagagagtatattgcaccatctgtttgagaagcccacagatttattttcctaaacatctggcagctcatctctagggtctgtctatgtaccaagccctgcctggctctgtacctgagaattagggttggcttagaatactctgggaatacatacaactgctcacagagtatcatgtggttcccttgtgcagtctacacaaatggctaatgtagtctctttcccaacaagggctttagtaaaatcccgcctacaggaagttttcaaaaataccagcatttcaggggactttattggratgtgctggcccttctgatgactttagcattggaaaaactgagggtgagaccatgattacaatggcagtgcatgtgggtagtgacatgagttttgcaggtgctgacaaaggaaaaaacattcatactctactatgtttgaagccacagggctggggtccactctgtgggatctgcttcactagtaaaaatatctaataacaaagtt

SEQ ID NO: 790846 - DNA, 626 bp, Homo sapiens
  misc_feature 29: n = A,T,C or G
gctttttcttctgctactctattatcagnttatttcagcagtctcacttcagagggaaagtttaaacttccctaccacacatacacaaacacacacacacacacacacacgaaataaaacaatactgcatacatccattttgaaataaaaataatttttggacaataaaagcaataaaaggagttagcactgaacaaatgataaggttgacaggttcaagtgaatgaaatttaagtacatacatacataccacaagatgaagaacaaaaaatgattactctcaaattagaaaaattaaaatgataaaaatacgagagtattgtaatacacataacagtaaacatttaacattatatatattagggaaattaatattatctatatggccaatttcaggtctgactggacagatggttaaagaatatgaacagatggtttgcacaaggaaaaatacaaatagtgaacaaacacttgggaaaatgtttrgcttccataataattaaagaattaaaaattaaaatggcctaatatattgcctcatgcatattaaattattaataatagtgtttttttggaattaaagctaccagagctttaagaactcatacactgtctgtagaaatagg

SEQ ID NO: 790847 - DNA, 624 bp, Homo sapiens
atagcattctaacccccaaattctagctgccttaacagccttgaaccaaattgctgtttccttagcacagtgagaccactgctatctgtttgggttccactttcctcttgcacagtgtggaagctgcccccgggtaccttccaagcctgtcatggcaagtgtactgtttcctttcttctaaaaatcacaaccctttgctstctgttgtctatgactgaaaacagctgcttcatgcattttgtccagttttgtgcttattattttggaagtgttaagtctgatacttcttagttcatcatgaccagaaccaaaagtcagctcaggagtttttagagctacaaatcttcatgtttgggggaagaaatattacattttaatttatttgtttttataatgtggcactgaaaaaatatttctactgttttcatgcttctctcttttccccttctctatatccagctccttctttttctaattatccttataggagtgactcaagctttgcttatatgcaaactggaattctggcaactacaaaaaagttttatacaacactaaatctgcaaatactagaattttacttctgaggaatagagagggatttacgtttataaactatataaa

SEQ ID NO: 790848 - DNA, 663 bp, Homo sapiens
cctgtctatcaattccaggttaccagagtgaaggggtaagactccaggcacccggcttgaagacacattggcccggagtaaacgctgttctgccaactgcgggtgttgcagccaattcctttctaatccttaatttccttgtctgtatgaaggacagtcatggaagttgcatgagacatgcatccaatgtttgccacagaggaagtcctctgcaggcattaactctcatgttattaaagcgcctgccattttatggtgacttcctcttttcacattaatctgtcttattctgctatcatccttttcatgttacaaacctgaaagctaataaaagattaccaattccactacagtatatattctatccttgggtcttttattttggcatagtmtaaagcactgtgcagcacatagaagtgtccaataaatctttggcaaattaaagagattgaagtattaatagcattaacattcattctgtattttctttgtgctgggccccgtcctaagtgttttacatgcttgaactcctttaatctttactaaccgtcttgaaacgtaagtactgtatgaatgaaatacatttttgatgaattaaaagaatgccgtttttgttgccatagcaacacgggtctgaaaatatgaatccaagtttagaagccg

SEQ ID NO: 790849 - DNA, 595 bp, Homo sapiens
ttggtaggtatttaggaagttgggtttggattcaattgttaaacaacttaaaacattagtttctagtgaaacacacatgacgtattacagaaagttcactgcttgcctgaatgttgaatatatatatatgttgagtttgcctcaaactgccgcagacagacactcccaggcttcccctgttctgcttacactagggcagcccagagtgcatcacagaaatctctggcgtgctgcagcctccacctgcaaaggaaatgtgcttcattgagggcagagctgctcatcatgatggcagcaaccaagaatgtggcggagctgagtctttaacgtgytattctcgagcacaatatgagcggtgtggagttactgctattattttatgttttaatcgtctcacaactcaccagcttccagggactgattttatcatctttgcataatggtgcaaattgggcaaggatgggaatacaccaaaaataagtctgtaccatggtggtggcaaagggcaacgcctagatactggacccagaattgaccttgtatttatcaaaggcagttttgcagagactgtgtttaaaataccttagaatcaacc

SEQ ID NO: 790850 - DNA, 595 bp, Homo sapiens
ttggtaggtatttaggaagttgggtttggattcaattgttaaacaacttaaaacattagtttctagtgaaacacacatgacgtattacagaaagttcactgcttgcctgaatgttgaatatatatatatgttgagtttgcctcaaactgccgcagacagacactcccaggcttcccctgttctgcttacactagggcagcccagagtgcatcacagaaatctctggcgtgctgcagcctccacctgcaaaggaaatgtgcttcattgagggcagagctgctcatcatgatggcagcaaccaagaatgtggcggagctgagtctttaacgtgttattctcgagcacaatatgagcggtgtggagttactgctattattttatgttttaatcgtctcacaaytcaccagcttccagggactgattttatcatctttgcataatggtgcaaattgggcaaggatgggaatacaccaaaaataagtctgtaccatggtggtggcaaagggcaacgcctagatactggacccagaattgaccttgtatttatcaaaggcagttttgcagagactgtgtttaaaataccttagaatcaacc

SEQ ID NO: 790851 - DNA, 626 bp, Homo sapiens
ccatatattattttctgcctgagtaatattttgaaacgccagtgaccattttgctattgactcattacgctgccgttttttcgatctatgtgaacatgtgtagaaagctatgaaaacagaaagcacagcatcaccaaaggcaagatagaacccactgttggtattggatagcgttgcctatatgatcaaaaatgtgtcatcgattaagtgtgaaacgtttattctggtcaatggcttcccaatttagtgtaaacatataattctatgctgattcctctggttagagccatagtatatcaccgtggtcttccagrcgcctttgcgtttactttgagtatagacatgattgggctcaagctaaactcagtcgtctttgatttggttgcatgcggagccagtgccatccatgccactcagcttcagattgtttctaagtatccctgaaaaacatcaggcacacacagaaccactaccttacccttggggtttgtcaactcacagacctactgctttacacaaagaaggtggttaaacatgcatttcttttaaaggcatatttggtccctctaaaacagcgcaataaaattgcacaatctaaaggaaggaacagtttgttttgccctttt

SEQ ID NO: 790852 - DNA, 596 bp, Homo sapiens
ctattgaatccctaacccctggtgctgttgtatttggggtaagaaagtaattaaggtagaatgaggtcataatggcagggccctgatgcaataggattagtgttcttataagaagagactccagagagtgaacttccctccgctcctctctctctctctgtctcccaccaaacccacctgtcatacarcagcaagaaggctgcgtctaccagccaggaagagaacccttgccagaaagtgaacggttggcaccttgagcttggactagccacctccagactgtaccatggactttgctattgttagtgcagagctaccagctctgcatgtgactatctgaatgatgtacagtctgtagtatttgccatggtagtccgagccacctaagacaatctcactgtgcataaagatcttctccttcgtcccccattcctctctctcctctgatcacacgtgtgcttccttgtccccacaggcttcacttaaaaacccaagttccatgagaaaataatttgggaattcaatacggagatggcaaagcataaagtccagcatggggacccctgagcgtgggctcctgcgacctcagaggccac

SEQ ID NO: 790853 - DNA, 664 bp, Homo sapiens
gtaaccacactggctaaggtcaccgtttcttttcactttgacttacccgcactgcagccggtggtggaagctacagggagcttttggggcctaacaggaagttaagctgggattatgccattttagtagcaattgagaaagccattgtggaatgtttcaataaagtgagaaattccaaacttctaaatttgtgactttaaakgataccgtttttaggcatccttaaagttatatgcaggccaggtgtgctggcttatgcctgtaatatcagaacttcggtgggaggccaaggtgggaggactgctttagccaaggagttcgagaccaccctgggcaatgtagggagactccgtctctacaaattaattaaaaaattagctgggtgtggtggcatatgcctgtggtcccagctactagggaggctgagacaggaggatcacctgagcgcaggaggttgaggctgcaatgatcatgccattgcacgccagcctgggccacagagtaagactcagtctcaaaagtaaaataaagtaaaagttatttacaaaagaactgagagcaagatcagatacaaatcaataaaacatgaaacagaagcaataggaataacgacatctgtagaagttattctcacgcagagaagtaaattgtacaagaaggttta

SEQ ID NO: 790854 - DNA, 664 bp, Homo sapiens
gtaaccacactggctaaggtcaccgtttcttttcactttgacttacccgcactgcagccggtggtggaagctacagggagcttttggggcctaacaggaagttaagctgggattatgccattttagtagcaattgagaaagccattgtggaatgtttcaataaagtgagaaattccaaacttctaaatttgtgactttaaatgataccgtttttaggcatccttaaagttatatgcaggccaggtgtgctggcttatgcctgtaatatcagaacttcrgtgggaggccaaggtgggaggactgctttagccaaggagttcgagaccaccctgggcaatgtagggagactccgtctctacaaattaattaaaaaattagctgggtgtggtggcatatgcctgtggtcccagctactagggaggctgagacaggaggatcacctgagcgcaggaggttgaggctgcaatgatcatgccattgcacgccagcctgggccacagagtaagactcagtctcaaaagtaaaataaagtaaaagttatttacaaaagaactgagagcaagatcagatacaaatcaataaaacatgaaacagaagcaataggaataacgacatctgtagaagttattctcacgcagagaagtaaattgtacaagaaggttta

SEQ ID NO: 790855 - DNA, 612 bp, Homo sapiens
ctgatggaaactccaggggaagtaagggtggggaagaagtgtagcttgtaaaagatttcccatcttttagtcctaaactttcaactgggggaagaatattacattttaaatccaacccacagaaaggaaaattcatcaaaatctccaagccgaatgggatctgcraccctttccatgaagactgatcagataggcctggcgcagctttctgctctgctcccaagagctgtgcaatgtgtggtccttgggccattcctgctgcataaatgtgcattctttgtattggaacccagagtgtaggaactagtcgctttgacagagaatgaggctggccctgcatccatgttagacattgctatccttttcttaaggtttcttcattgttacatagtacatcttgggaaaggaaacagaaagctaactgcagtgttaattcttggaactggcatgaaaacgaagaggagaagtgacacagcgaaagagcttacgtttgggaatcaaagacctggattcattttctacctctgtacttgcaggatttgtgcaagattttgaccaattacttaacgcatctgagccccaaggatcctgaccataaaatgaggctacttc

SEQ ID NO: 790856 - DNA, 628 bp, Homo sapiens
atgccattctccatttgcctatctgtaagttggattgttttcaggattaaataaggtggcagacatggagtgctcagcaggggctttagctgctgcttctcaccccacacaaaagccccttatccaacctcaagtcacagggccacctgaataaactgattcttcactagtaactgaatcagccacttgggaattaacgccaatattggccacttcgatcagcatcactccttataactctctcaccacagtggcaatgactacgcttttaacctctgggaagctcaatattttcaccaggatcttatgctttgttatttttgtcctaacattttttcccttaatttccagactcatagcccatgagctaccaactgagggtggctccgcaggactcttgatgatttctcacggtcwcaggtgacgtgcaaaaccatcccggttgtcagtgctgcgccctggtcttcctttcctagaaacctactacgggaatccctaggtccagattctgagaagatggagggagcagcttcactgtacacgaacttggggaagctaaagggcaaagtgaggggcgggtgtgctggtgaagatgagggtgaatctaaaatgagaggataaggtaccc

SEQ ID NO: 790857 - DNA, 545 bp, Homo sapiens
tctcaggtagctgttcagaagaggtatgtatataaaaatgctttgaaaaaattttaaactatagcaatttaaatgattaagagatttttaatagccaatacgttttttagattctaatgaatctaaactttgaatcctgacatttgattgtgtcattaaaaaaatgtaaacataaggttaaagtgaatatgtgctaataatattttaaacaaataagaataagctttattttcaaaataaaaatatttccactattgtcactaatttgaactttttaccctagtaaacagcagatgaaatttagtatctactatttttttgtgaaatgtcccratattttcaaatcataatgccacaatttgacaacttctgtagctatagctttactgttatacattttctctactgttatgccaccttatttactattgacattgtattaaggtcagaacaacagctcgtaaaaccagaataggatgtgtgtcagtctcttatgtaacttttccatttactattcattcttgatggcagaataggaaaaacac

SEQ ID NO: 790858 - DNA, 681 bp, Homo sapiens
atcgcttgagcccagaagttccagaccagtctgagtgacatggtgaaaccctgtcactactaaacaatgaaaaagttatctgggcatggtggcttgcacctgtatctccagctacttgggaagctgaaatgggaggatcacctaagtctgggaggttaaggctgcaatgaaccatgattgcaccactgcactccagcctgggcaacagagtgagacactgtctcaaaagagaaaaaaaaaattattttttaaaaaagtattggccaggcatggtggctcatgcctgtaatcccagcactttgggaggctgaggcgggtggatcatctgaagtcaggagttcgagaccagcctgaccaacacggtgaaaccctatctctactaaatacaagaaattagctgggtgtggtgatgcatgcctgtaaccccagctacttgggaggccgaggcacaagaattgcttgaacctgggaggcggaggttgcagtgagccaagactgcactattgcactccagcctgggyaacaagagcaaaacttcatctcgaaaaaaaaaaaaaagtgtcatagcaatgaaagagaagacttaggaacaatcacagattagaagagactaaggagataagacaactaaatgcaatatgcgattcgggactggatcctagaataaaaagatgacattag

SEQ ID NO: 790859 - DNA, 693 bp, Homo sapiens
ctgtgtgccagataccagtgatacaaagataaacttggaagtccttgattttaagaagctagtgagaaggtccattcaaaagtagctatgaagtagtgtgttaatagtagtattagagatacgcacaacagagagggacatatagatcctcttggctgagtcttagagataggatgagatactgttttttaaaaactgacactgtgctaagctctttatttattacctcatctaatctttgcaataactctatgaggtaaagttattccagtttaaaagattacaaaattaaaatttacaaaacttaaatgctgggattctaaagaaatggaacaatccaaaatgccaaccctagccccaagctcttaatcaccaggctaaaagtattagcagcaggctaagaggaaaagaagaggtctccaacagaagaggaaccatraacaaaaagcaaaatgacataaacatcatgatgtgtgaataaaaacaaagctatgagcccgggaggtcaaggctgcagtgagccatgatcacaccactgcactccagcctaggtgacagagcaagacccagtctcagagaaaaagcaaagctagatacagttgacagaacacagaatctgaggaagagaactgctcaacacaaaagtggacagaaaaagatcagtcttagagagtcttggcggggttagaattt

SEQ ID NO: 790860 - DNA, 574 bp, Homo sapiens
caatttgcaaatattgtctctcattctgtgggttttcttttccctctcttgatcatggcttttgaggcacaaaagtttttaattttgaagtccagtttatctgtttttttcttttgttgccagtgctttttgctgtcatagctgtgaaatcattcccaaatccaatataaggaagattttctgccatgttttcttctaagagttttatagttttaactcctacatttaggtctttgatccattttgagtttacttcttttcttttcttcctttttttttttygaaacagggtctcacactgtcatccaggctggagtgcagtggtgtgatctcagctcactgcaacctctgcctcccaggctcaagtgattctcccatttcagcctcccaagtagctgggactataggctcgtgccatcatgcctggctaatttttttattttttgtagaaatggggtttcaccatgttgcccaggctggtctctaattcctggactcaagcagtccaccagcctcagccttccagagtgctgggattacaggcatgagactgcaactggccacgccttttttt

SEQ ID NO: 790861 - DNA, 574 bp, Homo sapiens
caatttgcaaatattgtctctcattctgtgggttttcttttccctctcttgatcatggcttttgaggcacaaaagtttttaattttgaagtccagtttatctgtttttttcttttgttgccagtgctttttgctgtcatagctgtgaaatcattcccaaatccaatataaggaagattttctgccatgttttcttctaagagttttatagttttaactcctacatttaggtctttgatccattttgagtttacttcttttcttttcttccttttttttttttgaaacaggktctcacactgtcatccaggctggagtgcagtggtgtgatctcagctcactgcaacctctgcctcccaggctcaagtgattctcccatttcagcctcccaagtagctgggactataggctcgtgccatcatgcctggctaatttttttattttttgtagaaatggggtttcaccatgttgcccaggctggtctctaattcctggactcaagcagtccaccagcctcagccttccagagtgctgggattacaggcatgagactgcaactggccacgccttttttt

SEQ ID NO: 790862 - DNA, 580 bp, Homo sapiens
catagtgcaatattgcttttcattgtgcaatatagtgtcagcgcctggaaatggaagctgggcttgaatctcagccttgccacacactgtgtgttttagacatgcagtaacccccggatcaaataagagcatgtgtttgaaagacactggcaaactgcaaaagtctgtacaacgtaggttgttttaatccccagattttgtgcttatgccctctgggagggcatggaggtacgatccrgtgcaagaaagaaattcttacacatccctaattgcgggaagcagagtcctgaagagaaggggaaacctgcctatgcttttcccatcgagtcatcagttaattacaggctcctacacggaaatcggatttttcttccttctctctctaggttcctctctctctaggttcctccctcatcattgatctcttacattttttctggcacaatgaggactcctccagccctagaaatgagccatttctccaaagacccctggctcctgtcagaggatactggtcagaccgccacgtctgctggtggttacagggtttcactacccgtaggtcctctcagggtgcagg

SEQ ID NO: 790863 - DNA, 630 bp, Homo sapiens
tgtgtgtacgcctgtgtgtatgagtgtacgtgtgaagtatgtccagtgtggtgaatgtgtgtgtgtgtcaggatcctgcaatttaagcagacaaaaatataaacaactgaattgttttgaaaagattccagaaataattttgagtttattttcaagggcagggttacccattactatcagagatctcgttgctaaggactccctttttttattttatttttgcactgactccttgcctcctgccagcaacctgtgccaagcctcagcgtcctgcctggaagggcatggttaatagctgctggaggtggccctcctcctctgagagctccctctcagctagtgtggcagagggcaaggcaggaatgcggtgggtgtgttcagggtgagaactcgcacacttcacacagcccgccacttggggaggggatcctgcctcaccccacgtcagggttcctctttctaygatggatgaggagaatcactaggggtagagaaatgcctgttaaggcaggatacagggcatgtcccggcaggcctgggaccggtcctcgttcatcacagcctttctccagagcctcaagcgccaccatcagtcttttgagccctggttttcctgactgcagaatgaga

SEQ ID NO: 790864 - DNA, 391 bp, Homo sapiens
ttacaggtttaaacattaagaatagaatagttgtttattgtgttgataaggcaagaattagatggacaaaaaaagtcgtcataaactgcagacctggattttctgctgatttatccctgaagtccccagtgtgacaggctgcaaggatgaaagctgctttgattcgaatgcatagaaatgcaacaygagggtaaaaacctaaaaaacattaaactgaccaaaaggcatcattcatacacatcatatgccatttatatcctgagacagtagagcccaagctgtaaagatccagaaagcaaataaataaaatcatccagacccagatcaggggtggggaatgaggcccagggcaggagatctgcacggcttgccaacacaatgcaatgcatgg

SEQ ID NO: 790865 - DNA, 599 bp, Homo sapiens
aaaaggaggaagaactgtaccagaatcaaccaccttatgttagataagctgatgacaaaggaaaagggagccactacctctcacctacaagccttttaaataattgcaaaaagacccctgccttgcataactggaccttaggatagggttgatgagcaggaagctaacagtatggtccagagaagcaggaaaagcaacaggagatggtatatggttcccattgggtaattttggattctggaggaggcttgtgatcagcaggggtttgactgtgctaaaggagggtcatcatgtgacaagtctcacatctctgattgttcaaggccaccagtggactgctttattcacctttggtcacctacctgggcaaaatccgattgctttctcctgcttagggttaagcattccccawgtgtgtggatcaacccgtattggccccaggagcacagcttatgcaacacggcttgagaaatgttctcaaaaagttctctgcatccttatgatgtttaaacttgctcaagaaattgcaactgtggtaatcaagtggcatctcctgattatcttgtgtccagtacctttctccatgtccccaagctcct

SEQ ID NO: 790866 - DNA, 406 bp, Homo sapiens
aagttctcctgaaggaacccctggggaaagttgccttccatattccagacaaaagaatcttggttggccgggcgcggtggctcacgcctgtaatcccagcactttgggaggccgaagcaggcagatcacaaggtcaggagatcgagaccatcctggctaacatggtgaaamcctgcctctactaaaaatgcaaaaaattagccgggcatggtggcaggcgcctgtagtcccagcaactcagaaggctgaggcaggagaatggcgtgaacccgggaggcggagcttgcagtgagccaagattgtgccactcactccagcctgggtgacagagcgagactccgtctcaaaaaaaaaaaaaaaaaaaaaagaatcttggggtaattcacattccaagttctacagggag

SEQ ID NO: 790867 - DNA, 660 bp, Homo sapiens
gcagagtcctttttaccctgtaatgtgacatatgcacaggttccagggattagaatgtgggtatttgtgaggcagctagccgccagcctgccacagctagtttcctctgaaccaagccaatctggactccaaagctagagcatgaactccaacagcttccatttttaggaagcaggacaagtgctaagacccagaatccatattcaaactcatgccatttaagaggcgctcgcagctgagctctcactaatgaggytgaggtgtgatggggagggtcgtctggaccaggtcagtggacagctcaatggggccatgaaagagagggcctagaggcattgacctgatgtgtcactgatgggcacttgtcagcgcaacatgtagctgatgagttgcaggagaagctcagccctcgcaggccggggatgacctgcatcctgcctctttctcaacagcatgcctgcttttcctcagctccagagtgacccatgccacctccctgggtctcagtttctcctggcagaggagaggcaagcacagctttcaaccccgccatagaggcatccggcggcaatgaggaggactgcttgccgggctgcgtgcagagcatcatacttaggatcaaattattgcccccaaagagtcgtttttcttcacccctgg

SEQ ID NO: 790868 - DNA, 660 bp, Homo sapiens
gcagagtcctttttaccctgtaatgtgacatatgcacaggttccagggattagaatgtgggtatttgtgaggcagctagccgccagcctgccacagctagtttcctctgaaccaagccaatctggactccaaagctagagcatgaactccaacagcttccatttttaggaagcaggacaagtgctaagacccagaatccatattcaaactcatgccatttaagaggcgctcgcagctgagctctcactaatgaggttgaggtgtgatggggagggtcgtctggaccaggtcagtggacagctcaatggggccatgaaagagakggcctagaggcattgacctgatgtgtcactgatgggcacttgtcagcgcaacatgtagctgatgagttgcaggagaagctcagccctcgcaggccggggatgacctgcatcctgcctctttctcaacagcatgcctgcttttcctcagctccagagtgacccatgccacctccctgggtctcagtttctcctggcagaggagaggcaagcacagctttcaaccccgccatagaggcatccggcggcaatgaggaggactgcttgccgggctgcgtgcagagcatcatacttaggatcaaattattgcccccaaagagtcgtttttcttcacccctgg

SEQ ID NO: 790869 - DNA, 606 bp, Homo sapiens
acttgtcagcgcaacatgtagctgatgagttgcaggagaagctcagccctcgcaggccggggatgacctgcatcctgcctctttctcaacagcatgcctgcttttcctcagctccagagtgacccatgccacctccctgggtctcagtttctcctggcagaggagaggcaagcacagctttcaaccccgccatagaggcatccggcggcaatgaggaggactgcttgccgggctgcgtgcagagcatcatacttaggatcaaattattgcccccaaagagtcgtttttcttcacccctggtggcatgcttcttggaagcggggagygaaggggttcctgcagtgactaacaaaatagattatggagacagccacttatcttatttgtcatctcgccaaagaaaggctgctctgatgttccaaaaaacaaactcatcatctttatcagatgagaagattcaggaaccacaacagaggctaagagtgtaaatcctttgtcttctcttctgtcgttaatactacggcaggcaaagagagcaaagagaaaccaacccttgagaaatttgaacctgggatgttggaattggaggcatcaatttccctacat

SEQ ID NO: 790870 - DNA, 539 bp, Homo sapiens
agaagctcagccctcgcaggccggggatgacctgcatcctgcctctttctcaacagcatgcctgcttttcctcagctccagagtgacccatgccacctccctgggtctcagtttctcctggcagaggagaggcaagcacagctttcaaccccgccatagaggcatccggcggcaatgaggaggactgcttgccgggctgcgtgcagagcatcatacttaggatcaaattattgcccccaaagagtcgtttttcttcacccctggtggcatgcttcttggaagcggggagcgaaggggttcctgcagtgactaacaaaatagattatggagacagccacttatcttatttgtcatctcgccaaagaaaggctgctctgatgttccaaaaaacaaactmatcatctttatcagatgagaagattcaggaaccacaacagaggctaagagtgtaaatcctttgtcttctcttctgtcgttaatactacggcaggcaaagagagcaaagagaaaccaacccttgagaaatttgaacctgggat

SEQ ID NO: 790871 - DNA, 485 bp, Homo sapiens
ccaccagtagtaattttattatttccagatttctttgaaaggcagctaaggtctggccagttctgcagaaaatattttggacagacaggaggctaaacccagctctttcagcacagtgccttgcagacggcagatgagcagtgaatagccttaggatattgactgaagtgtcgyaacaccttggccttggcattgacctgctgtgccctgcccttgcctggtcaggcgcctcccgctttgccatgatggacatcacaccctccacagggagccagaaccctcacagccctgtattctctgccttgaaggttttcccaactccttcgtaaaatttgacttcccctttaaatcctaccttaaaacgtccattgccttcagtgtcaattgctttcccccattcttcttgggagaggtggctgctcttttaccacactctattgtcagttttctgtttccatgacagctcattgaccatgaggcttgat

SEQ ID NO: 790872 - DNA, 573 bp, Homo sapiens
tagatcatgggacttctcggcctccataattatataagccagttcctcataagaaatatatatgtgtgtgtgtctatatatatatagatagatacacacacagattaaatatatatatatatatatatatatatatatatatatatatatatatatatacagtagagatgaaacaagagtgctaggagaattcagaggagggagtaaagtccatccaaggttgaatcttctgtgggcatcagatcaaagacaagctccctcaasgctgcagtgaaccatgatcacgccactgcactctagcctgggcaacagagtaagactttgtctcattaaataaataaataaataactccagtatggtttaaacagcaagatatatcttgtttacatttcaatcacctcaaacagatgctcttaaaaaaattagacaaattccccaccaacccggttaaccactctagctcatttgtgctgtagccacagcaagaggaagccacagctctgtgcgcattttggaaggattcccacaaagtagagacaatctctatgcaggttctcctgaaagctggccaa

SEQ ID NO: 790873 - DNA, 573 bp, Homo sapiens
tagatcatgggacttctcggcctccataattatataagccagttcctcataagaaatatatatgtgtgtgtgtctatatatatatagatagatacacacacagattaaatatatatatatatatatatatatatatatatatatatatatatatatatacagtagagatgaaacaagagtgctaggagaattcagaggagggagtaaagtccatccaaggttgaatcttctgtgggcatcagatcaaagacaagctccctcaaggctgcagtgaaccatgatcacgccactgcactctagcctgggcaacagagtaagactttgtctcattaaataaataaataaataactccagtatggtttaaacagcaagatatatcttgtttacatttcaatcacctcaaacagatgctcttaaaaaaatyagacaaattccccaccaacccggttaaccactctagctcatttgtgctgtagccacagcaagaggaagccacagctctgtgcgcattttggaaggattcccacaaagtagagacaatctctatgcaggttctcctgaaagctggccaa

SEQ ID NO: 790874 - DNA, 439 bp, Homo sapiens
gaggtgtgttcaacttcccttcctgttatggccaggaattcagctttcagatttctctgtgatccccttagccaagggggtgtctgttccgttggttggggggcttaggagtttatttttgttttacacaaccttcaaaagagaccygagcaccagttagactttcctcaactgagcccactggtcaccagcaaaataatagaggtacaaacagcagaggacacttacgatatccagactgaaccctgcacaccacatcaaatggcaaggctttatgactagccagggaggttaacaggtacaggcatcattgcatttctccacaaagtgaacatccatagcaaggtaagtataaataggaactaaatcatggctacagtgtgaagtaccagaatagggctaaccctttccttgacctgattctaatgcattgtatgag

SEQ ID NO: 790875 - DNA, 591 bp, Homo sapiens
aggacatcagtcaagttggattaggacccaccctaaatgacctcattttaacttacttctttaaagatcctatcaccaaatacaatcacattctgagatattggaggttaggagtgcaacatatcaattttggagaacacaattcataccataatatatggtatcctgatttatatcctggagcaaaaaagggacattagtggaaaaacaggaaacctgaatgaagcctgtagttgagttaatattagctccttacttttgataattttgccatggttatgtaagatgtattactacaggaagctgtgtaaagagtctatagaaactttcttttctagctttactaatcttctgaaagtctaaaagtattttaaaatagctttaaaaaytttctagttatagaaaactagtttttttaaaaataagtaaataaataagggagactcggccaggcgtggtggctcacgcctgtaatcccagcactttgggaggccgaagcaggtggatcacgaggtcaggagatcaacactgtcctggctaacacagtgaaaccccgtctctactaaaaatacaaaaaattagcggggcgtg

SEQ ID NO: 790876 - DNA, 637 bp, Homo sapiens
aggagattttttgcacacatttcttctggcacagagtcaaaatgtaccagctgagaatatgaggggactaagattctgtaacagcaagaagaaccccagatcatcctttggaatctataaggctggtgacatgatttcaaatccaacccgttggatgtacttccgttgaagtacatctccttccaagctcatatcattccttgaattccccaaatctcccaatagttgaaatttcccagccgccatcactctggaatgaatgtgaaataatcacgccrgatgcagcggtctgatgccaattccaagctgtcagcttaatcaggaaagtgccgatggatctgtcctcccattacattatccgctcaagctcccttcaaggcatcatcaatttctataaaatactgtactctgcattgcccacagacaactttctgccgtttgaatcaagtgagagttgaatttcagcaatgctctgatacagacaatgtctgcacatctccagctacttcggtgaaaagcgaaggcttcacggtgagagtcacgtgactcaggaatgaagaaaaaatacctgaacgaggcagggagattttcatgtgtggatgaagcttctgacgaggcttaacaatgaggatccaga

SEQ ID NO: 790877 - DNA, 638 bp, Homo sapiens
gggctcaggcaggtccagaagcttgctggccagctagggaaatgggattagaaggcagtgcctgggacaggccaggggtactttgaaggactcaggcactacaggagcacagggctgggtcctcagttagcctgggagccagcaggcaaggggtgagctgacagaggagaggaagtaggtggatgaggaagagaagggggcattccaggggacacggacgttggggccagcttcagcctcagccccatcactgtgggaggatgtcagctcactacagatggggcagactgaggagatccaggctgcatcctgagactcggtgttgctgctgtagcaaccccagtgctcttctcatctgatgagcgacctctccattcaaaaaaataaagtacgtattggtgtctctgtatgaatctggggctayagtggtgaacaagccggagaagctcctggaccttgagcacttaacatttcaatgggaagataaaaaataaaccagcacaagagtaaacaggaccattgcagttgtggcttaaagggcggagaaggacactttctgggaattgtagctaaggctctgggatgtgaatataggactgcggatctgtccacgcccaaagaggaaagtaaatcgtcct

SEQ ID NO: 790878 - DNA, 632 bp, Homo sapiens
tgaatagcatttggtgtttcatcacactcagcattggctacaatctctctattctctttccactttcaggtaataacccataaactcatcttctatgaaacaggaaaattgtgttcctaattaagtcatcttagttatgagatatattggatgcttacttcaatggataataaatggaatgatgcttttaaactcaagtctgattcacaggaaggtcaagaaacttcaaaaacaaaagcattctaaccgattccaacatcctaacccattctattatccatgccaacctactgagttctaacccrttgactacaactcaacttctggcacctgacccagaaaaacatgccactgatggctcaaggaaaaaagccaacaagtgcagacgagtttagaagcaccagaggaacaaagggtttagagcagaggttctgcagatgccaacacacagcaacctctcacggacaggacggcaagcaagccctgcactcagtcatcacacattgttctctatcgcatgttcatgctgaatgcatcaacccggctattaagtcaagacatcattatagcccccacgtgaaggactcacactggacaaatcttaattctcagaaaagtaaggacacctttca

SEQ ID NO: 790879 - DNA, 632 bp, Homo sapiens
tgaatagcatttggtgtttcatcacactcagcattggctacaatctctctattctctttccactttcaggtaataacccataaactcatcttctatgaaacaggaaaattgtgttcctaattaagtcatcttagttatgagatatattggatgcttacttcaatggataataaatggaatgatgcttttaaactcaagtctgattcacaggaaggtcaagaaacttcaaaaacaaaagcattctaaccgattccaacatcctaacccattctattatccatgccaacctactgagttctaacccattgactacaactcaacttctggcacctgacccagaaaaacatgccactgatggctcaaggaaaaaagccaacaagtgcagaygagtttagaagcaccagaggaacaaagggtttagagcagaggttctgcagatgccaacacacagcaacctctcacggacaggacggcaagcaagccctgcactcagtcatcacacattgttctctatcgcatgttcatgctgaatgcatcaacccggctattaagtcaagacatcattatagcccccacgtgaaggactcacactggacaaatcttaattctcagaaaagtaaggacacctttca

SEQ ID NO: 790880 - DNA, 568 bp, Homo sapiens
tggcccatctagagtgaccactgccaagacactggctacagtgaggaggcgcagctggacctcccactgagagcaggcaggagctccaccctccccaggtgccactgcagctcccctggtgtggctccaggcgtctctgtgctcttgggggaccagggaggcccccctgccccctgcagactcagaagtgcctgctcctactgcgtggcttctctccgctttcagtgtcctttccaatctcagaggcatggccagtgctgcacactccatgaagctggcaggaaccagggacaagcaggagccctgccccttctgagttggtggggcaggagctcccaggtgcagctgcagctgcccaagcccagctatrgacccaagcatctctgtgctcttggggtcctgggaaggcttcctccccattgcaggctgggaagtgcctgcccccactgcctgtcctctccccactcccaggacctgctccaatcatggagcaaggttggggccaagcctgggcactgtcacagcctggccaggtgggcacatgcttggggcagtgctgccatgccat

SEQ ID NO: 790881 - DNA, 568 bp, Homo sapiens
tggcccatctagagtgaccactgccaagacactggctacagtgaggaggcgcagctggacctcccactgagagcaggcaggagctccaccctccccaggtgccactgcagctcccctggtgtggctccaggcgtctctgtgctcttgggggaccagggaggcccccctgccccctgcagactcagaagtgcctgctcctactgcgtggcttctctccgctttcagtgtcctttccaatctcagaggcatggccagtgctgcacactccatgaagctggcaggaaccagggacaagcaggagccctgccccttctgagttggtggggcaggagctcccaggtgcagctgcagctgcccaagcccagctatagacccargcatctctgtgctcttggggtcctgggaaggcttcctccccattgcaggctgggaagtgcctgcccccactgcctgtcctctccccactcccaggacctgctccaatcatggagcaaggttggggccaagcctgggcactgtcacagcctggccaggtgggcacatgcttggggcagtgctgccatgccat

SEQ ID NO: 790882 - DNA, 629 bp, Homo sapiens
cccactgcaggtctcctctgagctgttctaacactcaataaagcttctcttagttttgcccaccctccacttgtgtgcgttcctcattcttcctggatgcgggacaagaatgaaggcaaaggcaccactggccacacaggtttccagccacaaaagcaataccccaaagatctcgtaacattgtgatggaaataaatcagttgatattktcaactttaaataatgagattcagaaactattatagagtttatacaagcacaagcttaaggatggccacctggaaaacacaggctccaaaagaatgggtcagcattgcaaagtgggaaagtaagatttttacttatatagacagtgaatggggctgcaaccctctctacacgagatcactatacacattacagtgatttgattggttacagcttgctacgttccaaggaagaatgctttaacattccatgaggaggggtgatgatctaaaggggtcttatccttggtgtcatctctgtggcctttcctaatcatttataggaaaaagcagaagttgtaactgcatgctatgtgactcagaccacatagccagccaccacatgcctctcaaggctcaaaatagtttaaagcttcaactgct

SEQ ID NO: 790883 - DNA, 629 bp, Homo sapiens
cccactgcaggtctcctctgagctgttctaacactcaataaagcttctcttagttttgcccaccctccacttgtgtgcgttcctcattcttcctggatgcgggacaagaatgaaggcaaaggcaccactggccacacaggtttccagccacaaaagcaataccccaaagatctcgtaacattgtgatggaaataaatcagttgatattttcaactttaaataatgagattcagaaactattatagagtttatacaagcacaagcttaaggatggccacctggaaaacacaggctccaaaagaatgggtcagcattgcaaagtgggaaagtaagatttttacttatatagacagtgaatggggctgcaaccctctctacacgagatcactatacacrttacagtgatttgattggttacagcttgctacgttccaaggaagaatgctttaacattccatgaggaggggtgatgatctaaaggggtcttatccttggtgtcatctctgtggcctttcctaatcatttataggaaaaagcagaagttgtaactgcatgctatgtgactcagaccacatagccagccaccacatgcctctcaaggctcaaaatagtttaaagcttcaactgct

SEQ ID NO: 790884 - DNA, 547 bp, Homo sapiens
aaagttataattacataggagggataatttctggtgtgctattgcgcagtgggttgaacagcaaggtacagtatattacaaaacagctagaagagaggctttctaatgtccttgccacaaagaaataagtgcatgggtgaccattacactaagtactctcatttggtcattacacaactatatgtgtattgaagcatcaaattgtacacttacccaaaaattacattaaaagtatataaataagaaaaacagatcrtggcggatgggagacaggactagattgcagctccagacagagcagcttgcggaggcttgcattgtgaatttgagctccagattgactgcaagaacaaaccagcaattctgagaggacctacagaccctctgaaggaagaggacttcctgcaggacccaggagacaccccaaatactgtgagtcccccagctgtggaagtggaaaagagagaccctcctctcccgaacacacaacctcactggaataagctgaagatctgcttgcagcagaagtttctgactttacctggaa

SEQ ID NO: 790885 - DNA, 547 bp, Homo sapiens
aaagttataattacataggagggataatttctggtgtgctattgcgcagtgggttgaacagcaaggtacagtatattacaaaacagctagaagagaggctttctaatgtccttgccacaaagaaataagtgcatgggtgaccattacactaagtactctcatttggtcattacacaactatatgtgtattgaagcatcaaattgtacacttacccaaaaattacattaaaagtatataaataagaaaaacagatcgtggcggatgggagacaggactagattgcagctccagacagarcagcttgcggaggcttgcattgtgaatttgagctccagattgactgcaagaacaaaccagcaattctgagaggacctacagaccctctgaaggaagaggacttcctgcaggacccaggagacaccccaaatactgtgagtcccccagctgtggaagtggaaaagagagaccctcctctcccgaacacacaacctcactggaataagctgaagatctgcttgcagcagaagtttctgactttacctggaa

SEQ ID NO: 790886 - DNA, 611 bp, Homo sapiens
cagtaagcattgaataaatacttctgttttgatcatccgcaacaagtgcacaatttccttctattcaccagacaataatgacagttatttcatggtgcttccctagacattacttcagaaacatttccaacagacatatttcttccactttatgaatgtttagtgatgcatattastggcctcggaggggatgttgaaaagtgtttctcctcagtctggctcctcaagactcttggtgaacatgtataacacatagctgctggttgggaacaattttcaagaggcaaattaatattcctagggacttcctccttttccgtaagcatacatatgtgactgctacttccacaagtatattctttttagtcatctaattacaaaggtgcaaaactgaagggcctagaacaatgccattccctagttaaaataattagtttgctataaaaaaaaaaaagggaaagaagagggcaggagagtccctttggtttagtatttaaatattcaagctgtggggtgtgttttctaatcggaatttcagaagaggaaaataaacagtacaagagccaaatatgtattaattatggtttatttatttaatgccaccgatgtgt

SEQ ID NO: 790887 - DNA, 549 bp, Homo sapiens
attcttcatgcacttgaagtgttgggctttgtttaaagcatcacttttttctaaaactaaatctctctaaacattcaatgatggcaaggcatggttcacacctgtaatcccagcgctttgggaggcagaggcaggtgcatcatttgagatcatgagttcaagaccagcctggccaacatggcaaaaccccgtccctactaaaaacacacaaaaaaagccaggtgtggtggcacgcacctgtaatcccagagactcaggaggctgaggcaggaagatcacttgaacctgggagrtggaggttgcagtgagccaagatcgcgccactgcactccagcctgggtgacagagctacacttcgtctcaaaaaaaaaaaaaaaaattcaatgctttctagaaaatctggcactttctgtctgctacaaaaagccacttttcccccacccatgttgattaaaacataattgttgcacatttaatatttgtttttcaaaggtccagagtaaagcaaattctcagcgtgattcttcccaacactgctttaaaacaacg

SEQ ID NO: 790888 - DNA, 594 bp, Homo sapiens
acccctgccacacatacatccaatctctggaacctgtacatatgccacattacccagaaaaaagaaaaggacttggcatatgtaattaaggttatggaccttaacataaggagattatcttggattattcaggtggacccaaaaatctaataacatgagcccttaaaaacacgtaattttctccagctggaggtagagagatgtggcaaaaggagaaggcaaagggatttgaaacatgggaaggacatggctcactgttgctggcttaaagatgaagggagacatgtgacgaggcatgcctgtgtccttaaggagctgagagaggttcccacygacggctggcaaggaagcagagatttgagccctacagccacaaggaactgagttctgccaatgacttgaaagagtttggaagtacattcttccctagagcctccaaaaaataaatggacctgtcaacactttaattttggccttttgagattccaagccgaagatcctgtgagctatgctgtgctggacttctcatttacagaactgtgacatcatacatggatgttgttctaagacactaggttcatgataacatattat

SEQ ID NO: 790889 - DNA, 576 bp, Homo sapiens
gagggcagtgccctgagagctgggttttgcagtgttgggagggagagcaggagtggctgcacactctcctccaggttctgattatttctctctcctttttttttcttgagacagggtctcactgtcacccaggctagagtacagtggtgtgatcacagctcattacagcctcaactcctgggctgaagkgaccctcccacctcagccttgtgagtagctggggctataggcatgctccattatgcccagctattttgtgtgtgtgtgtgtgtgtgtgtgtgtgtgtttttgtagagatggggtctcactatgctgcccatgctggtctcgaactcctgggctcaagtgatcctcctggctcagcctcccaaagtgttgggattacagatgtgaaccattatacccagcctcttccttctctttaaaaaaataccttagataacttttaaaagtaataatactagtttataataaaaaaggaagtgtatgtaaatgaaaaaataaaaataaaagtcccctatatctcactcaccctatcccatcccactctcaacagcagcattcgctgctaacagg

SEQ ID NO: 790890 - DNA, 576 bp, Homo sapiens
gagggcagtgccctgagagctgggttttgcagtgttgggagggagagcaggagtggctgcacactctcctccaggttctgattatttctctctcctttttttttcttgagacagggtctcactgtcacccaggctagagtacagtggtgtgatcacagctcattacagcctcaactcctgggctgaagggaccctcccacctcagccttgtgagtagctggggctataggcatgcwccattatgcccagctattttgtgtgtgtgtgtgtgtgtgtgtgtgtgtgtttttgtagagatggggtctcactatgctgcccatgctggtctcgaactcctgggctcaagtgatcctcctggctcagcctcccaaagtgttgggattacagatgtgaaccattatacccagcctcttccttctctttaaaaaaataccttagataacttttaaaagtaataatactagtttataataaaaaaggaagtgtatgtaaatgaaaaaataaaaataaaagtcccctatatctcactcaccctatcccatcccactctcaacagcagcattcgctgctaacagg

SEQ ID NO: 790891 - DNA, 604 bp, Homo sapiens
ttattttattttatgtttcttgaaagaattatgtttgacttatttagatacaaatttacataaaacataatacttgtgcataataaaaagaatatatgagtaaagtaaattggttaaattattcctgagactaattcaaaattagaaactgactcttctgaatttcaagtcaattttttatctccatgttctttcatgcaatattgggatctgcgtcatcaaaagtgtcggtgacatagcatgttttaagaatgttcaaatcatgtcttctgcaaattcaggccacagaaccraatctgcaagtttatatgtgtataaatgggtagcaatagccatttcactgttgccatatggccagtagaaattaataggtgcattctaattccagaaataataaaatgagtgaatctgaattttgccattggtgaaaatggaaatcctcctccattttattacttttgttttcccatgttccttttttttgaagagaagattttctgtgttttactgaaaccagaagatcaggtaaatctccgtagatctgggattctctttttcttgctatagctttctaataaaaataaataaataaacaccaacacac

SEQ ID NO: 790892 - DNA, 607 bp, Homo sapiens
gcttatgtaaataaagaaacaggttgtatatgtagagtatatatcttgctattaatataacagacaataaaattataactaaaagtaatttgagccattttttaaaaaacagacccctgtcacaaccgagttctcctatgcctagaaatgacctacaagaatggacagatcagcccagagaatctggaattcacacttcctgtgcactcgtcaattgctgctcatgtgaatttttcatacatcagtcaatttcggcttcattttataacattattagttattatttgttgattgccatgtgcaatggatatattgtgattattatcttaatatacattttgtagaatttgacattgtagattacctttccttytggaaattcttctccaaagtgatttacagaatatttcttgctttacttaggatagactaagtttctttaatgtagaaatcaaaaaagtaataggtttataaaagataaacatttctctccctcatgtaagttcagaggtagtcaatgttccagggtcagctttatgaagttgtccataaagctagatttctccttatttattatcctaccatttccttgctgttgtcttcattc

SEQ ID NO: 790893 - DNA, 607 bp, Homo sapiens
gcttatgtaaataaagaaacaggttgtatatgtagagtatatatcttgctattaatataacagacaataaaattataactaaaagtaatttgagccattttttaaaaaacagacccctgtcacaaccgagttctcctatgcctagaaatgacctacaagaatggacagatcagcccagagaatctggaattcacacttcctgtgcactcgtcaattgctgctcatgtgaatttttcatacatcagtcaatttcggcttcattttataacattattagttattatttgttgattgccatgtgcaatggatatattgtgattattatcttaatatacattttgtagaatttgacattgtagattacctttccttttggaaattcttctccaaagtgatttacagaatatttcttgctttacttaggatagactaagtttctttaatgtagaaatcaaaaaartaataggtttataaaagataaacatttctctccctcatgtaagttcagaggtagtcaatgttccagggtcagctttatgaagttgtccataaagctagatttctccttatttattatcctaccatttccttgctgttgtcttcattc

SEQ ID NO: 790894 - DNA, 578 bp, Homo sapiens
agaagatttcatggcagactgggtctgtgagttttgtgttctgggaattctgaaagcttattttggaggctgtttcttctggcattgtaacaattgtgtgcatcacaacatctaattggcttaaattcatttctggtttaactatctagctctgttgctctaccatctctaatttttaattataattctttttttttttttttttttgagatggagtctggctctttcaccccaggccagactgcagtggtgctatctcggctcactgcacgctccrcctcccagtttcacgccattctcctgcctcagcctcctgagtagctgggactacaggtgcccaccaccacgcccagctaattttttgtatttttagtagagacggagtttcaccgtgttggccaggatggtctcgatcttttgacctcgtgatctgcccgcctcggcctcccaaagtgctgggattacaggcgtgagccactgcgcccggcctattaattcttcaagttgtaatctgcagaatattctagtctccttttcagcattctagggaacatttgttttgtatttcaaaccatgca

SEQ ID NO: 790895 - DNA, 577 bp, Homo sapiens
tattgtgtaagtaatatttagaattactatgagccagtaaaaattaattccaaaagatttttatatagctattttagttcttttattttaatgtataattaataaatgtatttttattcctaaataactgtcataatttttatattttttgaccaattatatcccaatatatttcatccattataataaatccttgccagttaacttaatttagaatatttttgtttaaagtttcattgaaaagttatatgcttccagattatttttacttactcgtataatatgaaacaaaattgtaagagaagttatacttaaaattacaatataattcagggaacaagtgtaaaaccagcttattcatttactygtttattcacttatttatttacaaagttcttccataaaacttactttctagagagataaccaatcaatacaatttttacaaataaataagtacattttatatgtagcattttagaagacatgttgtcttagttgatctgggctgaaatataaagtatcatagaaatttattgctcataggtggagactggcaaacacaaaattcaggtgc

SEQ ID NO: 790896 - DNA, 633 bp, Homo sapiens
attttttcttttctcacttttggatgggaaagctaggaactttaagtgattataggataaaaacaggtaagagagtgaggttgaacacctagtagaaataaggaatatttacaaattccggagaaagagaaagactgggatcgagagaaaaaaatgaatgagttgatttttggtaaaaggaagaaaatgccatctattgtaagaaaaaagagaattagtaattcatgatcttaataattaataaattgaataactgaaaattttagatttattaacactgaagtttaattatctcgagcttatcttcttttacttttatttattttttcctttcagaaatgcctttagactttgcccatgtactttgtatcaagcatgtttgtataaattaygttacttactctggaaaaaccgatttaactgatgaataatttcttaaagctcaagtcaagatttttcatttaagttccttgtcaataatgcaaatcttacagctctctaatatattaagaataacttgtttttactattattcatgaaactctctataaaattagtgatttgaaatagaagtaatggcattttatgcctcaaatagtagcaaaattgaagttacataccttagagtaaata

SEQ ID NO: 790897 - DNA, 621 bp, Homo sapiens
tttattagcaattctcttctttttctttcatgactaaaaaagcaactgtgcttcaaaacctagtacctctctttcaatttgcaacccctgttgagactaaggatgactgaaaacaagttttccttagaaaagaatattgaagcctgatgtgaaggagagaaaagtgaaggcatttattgctaagccatggaagctgatttggagtttgagataataatttatatcatctctttagaattttttacaccccatttctgagcttccttttctctgaatcttaatatttataaaaataaaatggtgtctaaggatctctaaagtacaatttyatataaatttctatctgattgaaaatttgagttctttcagaggtccaacaatgtatctaaatgttccactgcaattcttgaatacaaagaagccagaacacagtaacacttgttataatcatcacatacaatggaagtataaactttaaaaaaggtcagccttgtagagaaggactctgttgtttgtcaggcatccatggcgctttgactttttccctcctttcataacaaaaattgtacatgaattccaaatgagtgggtatgaatttcctatcaagatgatgttccaact

SEQ ID NO: 790898 - DNA, 552 bp, Homo sapiens
ctgatagaatctctaggggaaagaagtattccaggaaataccaatggggtacattttgccagatgacattatgccaggctggtaaaaggtaaatttccttgaacagaaagcaacttattgtctcaagtgttttgttaaactttatttaaattgcatgckatgtttcccaagtgaatcatacctttacacatttgattgttgtattttaaaacattaggtctgtttctacatttttcattttgctgtccaatttattttttaagatatttcagttactcataggaatgtaatacactctgttactttcattttcacatcttttttgttctcttgggattgtgtgttggtggagtgggtgaggaatgatgaatacatgtacgtgtaaagatggcatttattttctgagactgccaaaaaatagagaaataaaaaacagactgtacatgacaaaaaatgtataatatacatagaatctggataaaacaatgtaaatttgttgtgtaaatacattttaaaagactgaataatttccagcgtcatgtaggataaata

SEQ ID NO: 790899 - DNA, 539 bp, Homo sapiens
acgtgtaaagatggcatttattttctgagactgccaaaaaatagagaaataaaaaacagactgtacatgacaaaaaatgtataatatacatagaatctggataaaacaatgtaaatttgttgtgtaaatacattttaaaagactgaataatttccagcgtcatgtaggataaataaattaacatcgtgtgtgtatgtacrtgtgtgtgcacgtgtgggtgtatgtgcgtgtgagtctacattaaaataaaatcagctaatgctttatttggcatttatatctattcagtaagtcattcatacgttaagcagacctggaacatcttaattatatttgatatgatacatataaaagtaaattatattaatatgaaaattggttgttaatgccaaattagctttatcttgttcctgctaccgatgtttttttactttatcactttatttataatagattttcaagtcaaaataggagattacatgacaaaattatgaagtcactttggaacaccacaaaattatgtttctttacaaacctaa

SEQ ID NO: 790900 - DNA, 592 bp, Homo sapiens
tctactgtccagataaagaggcatttctaatatgtcagaatttgccacttttttcaccattaaaagccatctagtgtaacatgtagcaaaaccttcaagcttgctatcactcctctgggctccctccaaaaagcaatttgtatcagctggcaaggtcattaaggaaactggtcaaaatgcaggtgggaaatgcaaccctgttgggtagagtcttaatgcatccatttatcagggatacaacgtcatttcaatggtgttgagtattaaaccatgattttccaagcatctcatggcaactgccaacttgggagatgatataaaatgtgtaagtgtgcaggyatatttcttaaaagtatgtatatatagagttaaatatattaatgatgtatgagtttatttcaaaaattatatgaagcaaaattttttttttgcaaaataatactgcagcatgtcgtattctcatggcacattaaatacagtttttatctactcattgatttctaatattctaactttccttcggcaaattgctaaaacatcatgatctagctaccctatccctaaagtgataaagttatgcaatatgcattct

SEQ ID NO: 790901 - DNA, 615 bp, Homo sapiens
gtgagccctagttgcttttaatattgctattagttaatgaacctgttattactttccttttttcacgtatcacaatcccatgtgccttgcttgtacttcctagcaatatctaccacataaactgcctgatcaagggttacttaagtgcctacttttgatgggaattcaratggaagctatatatcagtttgaaattagttatacgatttgattcatcattttgatggagtaacctttaagataatcttcttttaagaatagatttttatgaagcttgtgtcattaatattcttattccaagccccaaagcaaaaatatttgtcagagactggggtcctggatggctctaaatctcaatacagaagactgatttttattatttcagttagtaagtgtgatagtcagagtaatttctcttctcccaaagatgtctatgttctattcccagacacctgtgactaggttatattacatgataaaggggaattaaggtagcagatggaattaaggctgctaatcagctgatgttaaactaggaaaattattctaaattatgcagggaggctaagtgtaaccacaagggtccttaaatctggaggacagaggcaaacaagt

SEQ ID NO: 790902 - DNA, 544 bp, Homo sapiens
atgagagaatcaaatacttgggaaaatgtttttttaaaaaatgtataaactacataaataattgattaccttttgtcttattaatgtgatgatatgaaatgtgttttatatgaagtcatctcaccattacacacacacacacacacacacacacacacaaacttaccaatttctacaaaaatatgcattcatcttaggctcatgtaatttaaatatgggcataaaataacaagcagtaaagtccaaatgaagtagaacttttttarcatatagatggctgctatagagtaggcatgttataggggtaaaaacaaaaaaattgagaaaagtatattgaaagatttatatctcaagacatcaatatatacctcccaaatcaaaaataattatattcctgtagaaaatataacatttcaccattcaaaatcagttacatattctgtcttggtaattaatcaatgaaaaaatatattggtcttctagtaaaacactatttgaaacactgatgacttcacaatggagaaaatcatttagacaaagacat

SEQ ID NO: 790903 - DNA, 619 bp, Homo sapiens; identical to SEQ ID NO: 750374

SEQ ID NO: 790904 - DNA, 619 bp, Homo sapiens; identical to SEQ ID NO: 750375

SEQ ID NO: 790905 - DNA, 521 bp, Homo sapiens
ctcctctcatggctttgcactgcatttttcatttcatcttgttagcattcagtgttttgggtatgccatcactctcaatagcattcaatattttgggtgtgcacgccaagagatgacacaaaatggaagtcggttattatggctgacttgaacatctttgaaaccaagaggagactgaatgttattataccagatggatgaaatcagagtaggtttgaagtattcacaataataggctgcagtgtatcttgaaataaatgtctattgatcraaatgaaataaaaattgcctcaaaattaaaccactaaaacgattaaatttgcatttgtcccacaggttttattacaattgagaaatctgagctgcagggacaatttttcaattgaagaatcaagaatcaatcaaagaattgtacctataaggataatttgttcaattgtttttttttggtcatatgcctttttactgtaaattctctattgttaccagttattttttgctggtcccaaaagaggaattaa

SEQ ID NO: 790906 - DNA, 618 bp, Homo sapiens
tgttacctataattttattgataatctttcacaaattgactaatactttttggaaccaagcagttaccagtctcctgcttgtgaggagcatcttattttcaccaccaggaagatatgaaaagcaaaggaaggtggaaaccgtcattcagcatctttcatttgctaggcactgtttagtattaaatatgttacagatattaaaatatttagccctcaaaaaatgcaatgaggaatacattatcaacttcatttttcagatgaaccatggttatttaccttgctcaagatcatttaactcgtcactgatcttaccagaatgagaatctacctaagtgagcctttttgtccatattcctttcactacttcagatcaatctctagaacaattacaaatagcctgtctcctgatttaacataagttactccctgttatctcttcctccagcttctattttagttttagggycctttatagttcacagcccattttaagaaaactaaaagttgatgcatttgtgctctaataaatccttaatgacttccttgaatatgttccaagcttctttcatgttgtgaaacttgaattcacttctgggagctttagagagagtgactgaa

SEQ ID NO: 790907 - DNA, 617 bp, Homo sapiens
gtcacttgtttctgtatgtacctgcgaaatagaacatgaaagcataattttccactaagtgttattcctcataatgcttgttgcttgtgtatgaatatgtgcaagatatacacacacacacacacacacacatatatatatatatgcacacatatatacactatgcctctgtattagtctgttttcatggtgttgataaagacatacctgagactgggcaaagagacttactggacttacagttccacatggctggggaggcctcacaatcacagcagaaggagaaaggtatatctcacatggtggcagacaagagaatagagcttgtgcagggaaactcccctttttaaaaccatcagatctcatgagacttattcactatcacaggaatagtgcaggaaagacccacccccatgattcaattacctcccactgggtcctcccacaacacatgggaattgtyggagttagaattcaagatgagatttgagtgggggcacagccaaaccgtatcagtctcaaagctgtgagtttggactatcctgatattttggtcggaataaagcaatttcaaatttcagtactacctgcgaaaaaaaaaatgtgactctacatgt

SEQ ID NO: 790908 - DNA, 571 bp, Homo sapiens
tgtgtagagtcctaaatctgaagctttggttagatagttttccaatatcttggaaaaaacacaagtgatgtaagaagaaagaactgaggtacttggaggaattgaggtatggaaatgaattcggggtaagaactgactctatttaacatttaaaaccatctattactaaataagtatctccaatgccaaaagtcagttgatccagtaaagtagcaaaccaggcatggtattactgattcctctacctacataaaaggttaaatctctttaaccaccaggtggcaatgactcaccagctttttggatgtacacatttttacattctgcattcattcagagaagatcctttgacarctagtgagatcccaggcactaatttgtcataacagaatgagcgctgctctgttaagcaatgactactatggctacacactggattaaaatgatgagaatcacagtttccttctgggccagtgtagaaatgccaaagtttgagttaattgcagcattcaaggagatgaaagaatgtgtctaacttctctcttcactacaaatattccaggggaaatta

SEQ ID NO: 790909 - DNA, 656 bp, Homo sapiens
  misc_feature 639, 640, 641, 642, 643, 644, 645, 646, 647, 648, 649, 650,651, 652, 653, 654, 655, 656: n = A,T,C or G
aaagcaatctacagattctacactcttcctatcaaattatcaatgtcatttttcacaaaaacagaaaaaaaaattctaaaattcacagggaaccaaaaaaaaaagcccaaacagccaaagaaatcctaaacaaaaacaaatccattggcatcatatttcccaacttcaaactatacaataaggctataataatcaaaacagcatggtacttgtacaaacacagacatatagaccaatagaacagaactgagaacccaggaaacayacctacagccatatgatcttcaacaatgtcaacaaaataagcaatgaagaaaggactccctattcaataaatggtactggaatagctgactagccatatgcagaagcattacactcgacccccaactttcatgatatgcaaaaattaactcaagatagattaaaaatgtaaatgtaagacctcaaactataagaatcctgggagaaaacctagaaaacaccatttctagacactgaccttaggaaagagtgtatgactaagccctcaaagcaattgcagcaaacaaaaattgacaagtgggacctaattaaactaaatagctccctgcactgcaaaagaaattatcaacagagtaaacagacaacctagaaaannnnnnnnnnnnnnnnnn

SEQ ID NO: 790910 - DNA, 645 bp, Homo sapiens
aaatcaaaaaaggttttttgataagaagtgcattgaacctatagatcactttgagtagtactgacatctttgcagtattaagtgttcctgtcaggagcacaagttttcttttaacttgtatatatcttctttaattttcacgatgttttatagtttttagtatacagtgtttcacctccttggttaaactttttctaaatattttattctttgtgacactattgttttcttaattttctttttgtattgttcattggtagtatatacaaatacaattcattcaatgtagtaaggcataaaaatagaacaaagaaaaaattcacatgatcatctcaaataacacagaaaaggcattttacaaattaaacaagcttttataagtaaaaacactcaaaaaagtagaaataggaatttcttgaatatgaaagagggcatttatgaattkcccactttcatcacgtttattcaacattgtgctggaagttctatcgaaggcaactaggtaagaaaaaggaataaaaggtattcaaaagaagaggcagaagtaaaactctattttcagataacatgatcctatgcatagaaagtcctaaaacatccacaagaaatcttactaaagctaaaaaatgaattcagcagtgttag

SEQ ID NO: 790911 - DNA, 566 bp, Homo sapiens
tgttctttatttgcttgagctaatgctttttgtttcttgcaactcaaagagtcaagactattaaagtctttgtctctatgattctatgatgtcttcatacaaagactgctaatagagtaacttaataattgaataatcactgaaaactgtccaataatcctgataacttcttcaaatattaagatgtgtaagaggaggattcttagttaatggagtttacaatctgaaaatgggagtaatgttgtaataaagtattatggaacaagaaatatgatttaaataattttcttttggaataaataatctcaatatgatacatgtggttcaagtataaaaaaatttaaattagcatgaaaagaktcatgttttattaaaataggtctcttcaagtgcaagaatgataatttctcctaatttggagtaattaaaatctgcacacctaatacagggtaacaggaatttgattttatcattttactgattcaagccaagcctagccatgaatacgactttgtataattttctcactgggatcatttccgagtgttatttgctaacacaaaatc

SEQ ID NO: 790912 - DNA, 641 bp, Homo sapiens
aaaaaattttcaaaatagggttaagtttgtaatttgtggagtgtgtcaaggtgagtgcaaatgagttattaactgaatggatcagggaatgttaggtgtggaatggaagcctaggaaaatggcatccacaactgatgggtagaataacacttacggttctgaggcatgtttgaatggagggtaaaacctgattgggcagcttaaaaatgttgtgatttaaactaaccatccttagatcattttgttaattgagaacttaagcgagaacaaggtttgatcatatattgtttcctgactagcagaaacggattttaccttattaatgtttgcatttggctgtgtcttgtttacgtctttgtcagaagtcatttcaaatttttttttgtttttttttatttgaggtcagcaattcccttttctattctgtgactttgtattaattatattttctctctgtagactggmtgtgatacttattaataaaaactaacttctcttttcctcaagtatagccatatacatatcctattagtgtctattgaggcaacttatcccaactgagaaattagggactgttggtttgcagctccattaatgagcaaataggaaagagctaaagtgttgcatatcatcttttctgt

SEQ ID NO: 790913 - DNA, 602 bp, Homo sapiens
ccagggccattctgctattgggcagggatgccgtttttttctgcttcagaccagttctctcagcaagctccttcttccccgtccccattcctactttcccaccctcccctctgacataccagaaccaagcttgggggattttatcttcttggtccagaggttctaagataaagttaactggaaatttaaggtaaaagcctgattaattttaaagggatagaagctgccctcctcagacttgctgtgcaggtagatagagattcrgtggagtgaagcacttcaatgcaagagtttatttgtagtttgggggatttctttttttctaatttttttttttttttttacattttctatttacacaaagggatttcttccactccacccgcacccgccgcctctgctttcaatcttttttcttttcttttcttttctttttttttttttttgagacagggtctcactcagtcatccaggctggggtgctagagtgagtgcaatggtgtgatctcagctgcaacctctgcctcccgggctcaagcctcagcctcttgagtagctgggactacaggtgcactccatcacgcccagctaatttttgtatt

SEQ ID NO: 790914 - DNA, 623 bp, Homo sapiens
ccatgtccccaccagactcaagagcccaactggcttcacccagtggatcctgcaccagggctgcaggtggagctgcctgccagtcccgcgccatgcgctggcactcctcagcccttgggcggtggatgggactgggcgccgtggagcagggggcagcattcgtcggagaggctcgggctgcacaggaacccatggaggcgggggaaggcccaggcagggcgggctgcagtccagaggcctgccccgtgggaaggcagctaaggccctgcgagaaatcgagcgcagcgccagtgggctggcactgctgggggacccagtacaccctccacagccgctggcccaggtgctaagcccctcactgcctggggccggtagggcccgcccgccgctctgagtgcggggcccgccaagcccacgcccacccagaactccagctggcccacaagcgccgygcgcagccccggttcctgctagcgcatctccctccacacctccctgcaagctgagggagccggctctggccttggccagcccagaagggggctcccacagtgcagcggcgggccgaagggctcctcaagtgccgccaaagtgggaacccaggcagaggaggcgccgagagc

SEQ ID NO: 790915 - DNA, 624 bp, Homo sapiens
tacaaagttgcttactggcataagctccagcaatttaatatgttcatccttttatttctaatattgtctattttcctgataaatcttgacagatgattaaccatttttattagtgtacttaaagaaatgttgatctttattgaactttgctggatttctgttacaatttttttatccatgattttttactagaaattcatatctactaawgtgtttggatttattctgaagactttttctaatatttctcagattagaaactcaattcactaatttacagtctttcttaccttctaatatatcatttataagtctaatatttccttaaatactgcttgtggtaggcagaataacagcatccaaaatatgtccatatagtaatagatactgatgcaatgtaatcacaatgggctaaaagtggaagacagaagcagagattcagagagatttgaagatgcaatattgctggctttgaagatgaaggagaggacacaagccaaggaatgccggtggcctctagaaactggagcagtcaaggaaaagaatgatcttttagaacatctacaaagaatgccactctgtagataccttgattttattttattaaagccaatttcagaattc

SEQ ID NO: 790916 - DNA, 622 bp, Homo sapiens
ttttttttctttttaaattcatgttaaagtgcttagcacaatgcctggctcaggatgagtgttgagtaaatgacagcagtgatcgtgattacactaggacgtaggtaggtgcctatcagtcaggtgtagccagtggttatgggaagactgggagggtgcacacctaggccttcccaagggcatgggggtagacccagcttcaatgctgcactcaagcccagtctaaggcagcctcaaaggccacgtgacagatactcacacaagctgaagttggtggagtgtctgtccacgggactggcttacccagagtacatttcaagtgacaaggactcttgcagtgagcttggctgcagctaatttgtcattacatcatgaaactctccctctgaaaatggaactcagagtccaattcacagaggaatttattgscaagatcacagccacagcaagacctggagccaggcagctctgtctcttggggctgagtcagtctgggctgatggtgagtaccatgcaggcccctcctagaatgtatgcttgtagctaaccagctccaaataaactcatatgcaaaggcctaggaggaaaactacccaaaagaaaaggtttacctgatgctaac

SEQ ID NO: 790917 - DNA, 622 bp, Homo sapiens
ttttttttctttttaaattcatgttaaagtgcttagcacaatgcctggctcaggatgagtgttgagtaaatgacagcagtgatcgtgattacactaggacgtaggtaggtgcctatcagtcaggtgtagccagtggttatgggaagactgggagggtgcacacctaggccttcccaagggcatgggggtagacccagcttcaatgctgcactcaagcccagtctaaggcagcctcaaaggccacgtgacagatactcacacaagctgaagttggtggagtgtctgtccacgggactggcttacccagagtacatttcaagtgacaaggactcttgcagtgagcttggctgcagctaatttgtcattacatcatgaaactctccctctgaaaatggaactcagagtccaattcacagaggaatttattggcaagatcacagccacagcaagacctggagscaggcagctctgtctcttggggctgagtcagtctgggctgatggtgagtaccatgcaggcccctcctagaatgtatgcttgtagctaaccagctccaaataaactcatatgcaaaggcctaggaggaaaactacccaaaagaaaaggtttacctgatgctaac

SEQ ID NO: 790918 - DNA, 565 bp, Homo sapiens
gaatcacttgaagccgggaggcagaagttgcagtgagccgagactgcaccactgcactccagcctgggcaacattcgtctcaaaaaaaaagaaaagaatacaggcctgtagaaggattgcttaagcccaggagttctgtagtgtgtcataccagtagggaatctgcactaatttggcatcaatatggtgacctcctgggagcaggggaccaccaggttgcctaaggagtgatgaacaagcccaggtcagaaacaggtcaggtcaaaactactgtgctgatcagtagtggactcacaacrgtgaatagccactgccctccagcctgggcagcataatgtgagtgtatttatcgctaataaaaaaattatttaaaaaatatgtatctctgacaccatgggacaggcactgactcttgaattggagagacctggattcaaatcctgaggtagtctcttactgtatgaccttggactgtccattcaactcctgagctttatttcctttatctgtaaaatgggaataattagtatctcccctacaagggtttttgaaataatgtatatag

SEQ ID NO: 790919 - DNA, 585 bp, Homo sapiens
tgacagcatgctaggcaggaggctgactacatcctatcatgttgatggtttatattgttttcaccacactccagatgcctggagctgtgggctgacttctcgttgatctgcagtgagcctctgtaaaaatgttctttaatacccaagagrtaccctgttgcaaataatacttttcagaaaagtctttaaaattcaggtaaaggcaattcattcatatgagttgtttctccagctgaaattggcattctcaatgatgttctcaatgaactgatgataaagccaactcaagacctcccacccccaaaaaactcccaaacgcccaaaactgtcgtgaaaagaaggaagtcttgttcatggctctcaggatgtctgtaggaatttgcacactgacatgaacttaaagcaggacagatggatggcaagggctgtgcatctcattggatatttaagttgggaaatgagaacagtgagtctagcacgtaggcaaataaagttctgcagaatgaagctgattaaagaatttgaatttgaacctggaaggacttctatggtcctttctatgtatgtaatggtgtttttgtaggt

SEQ ID NO: 790920 - DNA, 585 bp, Homo sapiens
tgacagcatgctaggcaggaggctgactacatcctatcatgttgatggtttatattgttttcaccacactccagatgcctggagctgtgggctgacttctcgttgatctgcagtgagcctctgtaaaaatgttctttaatacccaagagataccctgttgcaaataatacttttcagaaaagtctttaaaattcaggtaaaggcaattcattcatatgagttgtttctccagctgaaattggcattctcaatgatgttctcaatgaactgatgataaagccaactcaagacctcccacccccaraaaactcccaaacgcccaaaactgtcgtgaaaagaaggaagtcttgttcatggctctcaggatgtctgtaggaatttgcacactgacatgaacttaaagcaggacagatggatggcaagggctgtgcatctcattggatatttaagttgggaaatgagaacagtgagtctagcacgtaggcaaataaagttctgcagaatgaagctgattaaagaatttgaatttgaacctggaaggacttctatggtcctttctatgtatgtaatggtgtttttgtaggt

SEQ ID NO: 790921 - DNA, 585 bp, Homo sapiens
tgacagcatgctaggcaggaggctgactacatcctatcatgttgatggtttatattgttttcaccacactccagatgcctggagctgtgggctgacttctcgttgatctgcagtgagcctctgtaaaaatgttctttaatacccaagagataccctgttgcaaataatacttttcagaaaagtctttaaaattcaggtaaaggcaattcattcatatgagttgtttctccagctgaaattggcattctcaatgatgttctcaatgaactgatgataaagccaactcaagacctcccacccccaaaaaactcccaaacgcccaaaactgtcgtgaaaagaaggaagtcttgttcatggctctcaggatgtctgtaggaatttgcacactgacatgaacttaaagcaggacagatggatggcaagggctgtgcatctcattggatatttaasttgggaaatgagaacagtgagtctagcacgtaggcaaataaagttctgcagaatgaagctgattaaagaatttgaatttgaacctggaaggacttctatggtcctttctatgtatgtaatggtgtttttgtaggt

SEQ ID NO: 790922 - DNA, 483 bp, Homo sapiens
ctgttattgggcccagccccaatttaaacatcttgagggcagagaacatctgtcttttttttttaaggaaaaaaaaaacaaaacactactctatctccaaaacctgatatgtactcaatatttaataaaaataaattgaattaattaatcctttccaaccttacagatatttctgattgatagatccattgtccagcaacaataatatatgactrtgtctatcttagtaaataaatttctaaaaagctcaaatactgggacatgaatggctcactgagagcaatagggtgtggagaaagagagagagggagcgagcagagggagctggatgtacacgcagttgcagtcagtcacttgtttcctgagtagactatttgagtttttgaatggttattggtgtgattatgtctatcccatcaaattgttgatgaactttccagttttttttggaaaataaatattaaaggatacaattctgattat

SEQ ID NO: 790923 - DNA, 631 bp, Homo sapiens
aatggctcactgagagcaatagggtgtggagaaagagagagagggagcgagcagagggagctggatgtacacgcagttgcagtcagtcacttgtttcctgagtagactatttgagtttttgaatggttattggtgtgattatgtctatcccatcaaattgttgatgaactttccagttttttttggaaaataaatattaaaggatacaattctgattatgtttatatttcgtttcattttgttttcaacttaccctgtgaatttygtccatgatgttatggtatcttaagggatgaatctaatacagaattatgcacaatttttgtcatttgcctcccttaaaagaaaaaaaaaaatgtccatgactatactaaaagatcctgtcatcttaactaagaggcagctgtttccctggagttttttccctcttaactatatcagctatactgagtgggatgtaatcacatgatttaaaattgataattagtgtgtgaaaggcacttggcaatgaaatacatagcaatatcagtgacataattttggcagcagaaaaatgctaaatataatccaaatgtcaatgtagaaatgaaaacagtactagctagtcaatgatttatataatgtcttggga

SEQ ID NO: 790924 - DNA, 505 bp, Homo sapiens
ctggggcaacacattaattacgacttgacacatatgcatgtcttctccgatgccccagggttttgacctctggttataactcactcctgcttgatcatttattgaacacatatttatggagcaccaactatggactaggctctactccagkagctggagattgagggggaaagacagataggatccttgtctccaaggcacctatggaccagtgaggacacaagtaatacagaaggaaacgtacaaataagaacatcagagctctgaagaacacagggtgttgtgagctagaggagagacccaccaacctttcaaaagggaacagaacatttgggagcaaagcagctagaggaagaaaagtgccacctgttcagataagtaaagagggcaatacagctggagcataataaggaattatgagcgtggtgccaaaaggtgggaagctcagcaggggtggatcacaaagggaggggaaaggacagggcaggggaagacaaagcaggaa

SEQ ID NO: 790925 - DNA, 655 bp, Homo sapiens
cccctcggtgccgggacaccagaggatccagggagccgagaccgccccgaccctagacatccaaaggggagagcccttagaattattccctggccgcagggcttgggtggaggctgggggtccacttcaagactcggtttscaataataatagcatgtcctggtcacgctgatgccaggaccccacagaaggcaagcgattgattccgcgggcccttcaggcgtggcgtccaatttgcgcaaagcacagtaatccaagactttcgcgcactgaggactttaagggggcgctggaccgagacccatcttttctgagcagctccgggcgggcttagaattttttctcccaattctaaccaggatgcacggctctgaacttacagtgacctccgctcagtgttcttggctctgcacgggcgggaacccgctcaggactcaggaatattcacactagcaccaggggcttgcagaccactggagtggagggcgagaaaatagctgtatatgttcgcataaggtgtatttttctaaactagctaaatagatctcaaaaaaagaaagtcctggtccggaagccaagactgcgcccctcgatctgtccagattcgctaagggcgcctgagtgatgagacgatattgatgccccaagttttcat

SEQ ID NO: 790926 - DNA, 589 bp, Homo sapiens
tgcccaatagccttataggctgaaaattggggtatttcactgccatttcagttatttaaattgaaaaattctatcagcggcatggggatgtgtgtgtacatgtatatgggcatgtgtgctaagcacttgatctatatgtcccatacactaatataaattcttatctcaaaatgttgttgcattgcttaaataagataatggaaagmaagtgggtaataacaaactcctctgagctaaaggagcctgttctaacgcaaagcaaggaagctaagaaccttaaaaaatggttagaggaattgctaactagaataaccagtttggagaagaacataaatgacttgatggagctgaaaaacgcagcatgagaactttgtgaatcatgcacaagtatcaacagccaatcaatcaagcagaagaaaggatatcagagactaaagatcaacttaataaaataaagcatgaagacaagattagagaaataagaataaaaaggaacaaataaaaccttccagaaatataagactatctgaaaagaccaaacttacacttgattggtgtacctgaaagtgatggggagaatggaaccaag

SEQ ID NO: 790927 - DNA, 589 bp, Homo sapiens
tgcccaatagccttataggctgaaaattggggtatttcactgccatttcagttatttaaattgaaaaattctatcagcggcatggggatgtgtgtgtacatgtatatgggcatgtgtgctaagcacttgatctatatgtcccatacactaatataaattcttatctcaaaatgttgttgcattgcttaaataagataatggaaagcaagtgggtaataacaaactcctctgagctaaaggagcctgttctaacscaaagcaaggaagctaagaaccttaaaaaatggttagaggaattgctaactagaataaccagtttggagaagaacataaatgacttgatggagctgaaaaacgcagcatgagaactttgtgaatcatgcacaagtatcaacagccaatcaatcaagcagaagaaaggatatcagagactaaagatcaacttaataaaataaagcatgaagacaagattagagaaataagaataaaaaggaacaaataaaaccttccagaaatataagactatctgaaaagaccaaacttacacttgattggtgtacctgaaagtgatggggagaatggaaccaag

SEQ ID NO: 790928 - DNA, 623 bp, Homo sapiens
ttaaatgtaattcgaaagttgaagtttgaaaaatggtttgaatactaagcactaagtaggcacccctcaaaaatgttattgtcctaatcacccaacaaagaaagcattgttggactaggtatataactttgcagggtcagtgttctaaatagcaatactgatataaatagataaattatgaaaattttagtctttaaattgtttgctgactataatctgattgtcttcatgcccagagaaaaataaataaatataataagaactatcggaaagtactttttagaccttcaggtatgggcactattacattctagttttgatctacaagtatgaatattatcaaatagttggtcaatggttgttgatttgaaatttttcatgtagcatcattcagarggtataagcagtataaccagatcccagaaaggcttagtaacagtacaagggaaacaatcctagaggtttttattaattgaaagttccatatgtgtcagcagagtttcatggttgccaaaaaaaaggtaatgaaatctcaggcttcagaaactaaagtagagtgttcattgtaatgtgggcccagtcatgctcaaatgcgcactgataaggaaacctggactctcgtg

SEQ ID NO: 790929 - DNA, 551 bp, Homo sapiens
actctgtacatcactgagacaaaacttgctcttcctgtcaaggtcctccatggaaaacaacagaagtaagactcgtgctgtctctatctcatttccttggaatgaaagtcgtcttttgtttagcatacgcactgcaactctattatcctcctgcttccatccttgactatacaatattggtgayagtccattttccggcacctgttataaaacagatgcattccccccaccatttaattcagttaatgttcctaacagttttgtgcaaagtatctcagtcaggttctccacacgaagtttctcaaaagtgtacacatgtgaataacactaaactaacttctacttccatataattctgtcacaaggtcacacaaaaaaactaaacagaaaaaaaaaatccagcttctgggagggctgcagttttgcaatcatttgcaaatagtccataagtctcatcagagcttgcttcactgttaaatcaggtcaaacaagaagaaaactatgacggtagcagggctgttcaataagggcagattcttcatcctcctttt

SEQ ID NO: 790930 - DNA, 551 bp, Homo sapiens
actctgtacatcactgagacaaaacttgctcttcctgtcaaggtcctccatggaaaacaacagaagtaagactcgtgctgtctctatctcatttccttggaatgaaagtcgtcttttgtttagcatacgcactgcaactctattatcctcctgcttccatccttgactatacaatattggtgacagtccattttccggcacctgttataaaacagatgcattccccccaccatttaattcagttaatgttcctaacagttttgtgcaaagtatctcagtcaggttctccacacgaagtttctcaaaagtgtacacatgtgaataacactaaactaacttctacttccatataattctgtcacaaggycacacaaaaaaactaaacagaaaaaaaaaatccagcttctgggagggctgcagttttgcaatcatttgcaaatagtccataagtctcatcagagcttgcttcactgttaaatcaggtcaaacaagaagaaaactatgacggtagcagggctgttcaataagggcagattcttcatcctcctttt

SEQ ID NO: 790931 - DNA, 619 bp, Homo sapiens
gaggtaaacagacatggaggctgcaccagaaatggcctagcatgactgccacccactgctgcattcatgtactcactcaacaaatactgattgggtgtctaatatgtgcacaatattctcttgagcatttctcatgttagactgtcttaaagggggattacttccagcaccttttttattaaggctcactgcctcatcttgggagtaagcatgggcttttctttatggagagtcatgctacttaccccaccttcacacaatcagaggctcctagcctgggaggtaatgaaaagaagaggagaattsaaccacagctgtaggagaattgcctcagatatggtcagcttcccaaatcaaagcagggactgagttcatggcatttggtgtcccccctacccacccaaaaaacaaacaaacaaacaaacaaaaaatcttcatcttccctgcagatccctggagggacagttttagaagagaaatctgagaacacttagggaagtcaatgagggtaatttatagtaatacaagagatttttgagttcagagatcgacaacagcatctataagatttcaacccaagttgacacatacagcaagggttgtatggtgagacagatgg

SEQ ID NO: 790932 - DNA, 611 bp, Homo sapiens
aaggctggttcaacatgttgaaatcaatcaatcaatatatgtgtcattaatagaataaagttaaaaaattttatgatcatttcaatagatgcaggaaaagcatttgacaaaatccagtaccctttcataataaaaacattcaacaaactaggaacagaaggggacttcctcaaacwgataaagaacatctacaaaaagcccaaaactaacattatacttaatacttatactcaataatgatagattgaaaacttccctcctaagattaggatcaaacaaggatatccactttcactgcttttatttgacattgtcctggaagttctagccagagtacttaggcaagaaaaagaaattggcattcacattgggaggaaagaattaaaatgatctctctttgtagacagcatgatcttatatctaataaaaattattagagcaaataaaacagttcagcaaatttacaggacacaagatggatatgcaaaaatcaattgtacagttgactcttcaacaatataggtttgaactgtgtgttcacttatatgattttcttctacctctgccatccctgagatagcaagaccaacacctcctttttctctcctcct

SEQ ID NO: 790933 - DNA, 661 bp, Homo sapiens
cccccctttgtcagctcatcaaagcttaaatgtctagtttcaggaaaggcaaattggttttcatcaaggcctgaaaaaacaaatatgatccctcacaaaaagacagtgtgaggtccctgtattgtattggatatagcctggagagtcgacccttcaaaggaaaatatccattaatttcagctccaaaggacacacgaattgaccctacaggattttcagccttcatttacatgccttatacaaacaactgcctctttcscctcctgttgctacctgaattgggtaggatgggccaggagcttgagaatgcctctctgtccagatacagatactctgcaaacaaatcctacaatcttgcaacccaagaaagaatctctctcctaatgtctaaacataaatgtacaacacaagcttttctaacatctgtgaagttgaaaacaaacaaaaaatacttgccatgcttgcttaagactctacaccaaaatcacatcacaaattctcttgccatacactggttcaccaaaaaaggaaactaacaatatttagttcctggctactatgtgccaagaactttcatatatgcttcatgcatacccttttgaggtaaatactattatctatattttaaagataaggaaactgaggctcacagagatgaaga

SEQ ID NO: 790934 - DNA, 564 bp, Homo sapiens
aaacatcttatgatgtttccattcagcactcaaagcactgagagaacgttacctacattccttttagaaggtagtatacactgacatcatctaaaaatggaatcattagtatattttttggaatgaatctactacaagatatttacttgaggaaraaaaacctctcagacctcaaagtcaacctctggacgtatctcaaaatggaagagggacccatcaaatttatacagaaagtagatgatagcttactattagagaaaactgtcaaaacaagcactacccaccaaaagtaacggtgacaaaacagaagttgaagaagacagtaatcaagagtctatggctaagaggtgtcgaggagtgctgtggggcagcaggggctctggaggcaaaagagtgtgaccgactcctgactatgccagagaatggctctgaaacaagacctttgcttccatacatgggaagtggagatgacacgacccaccagagcagtgtttggtggattaaagatgctgcccatgacccacctggcacattttcactctgtcattgtccctttgcctttcc

SEQ ID NO: 790935 - DNA, 564 bp, Homo sapiens
aaacatcttatgatgtttccattcagcactcaaagcactgagagaacgttacctacattccttttagaaggtagtatacactgacatcatctaaaaatggaatcattagtatattttttggaatgaatctactacaagatatttacttgaggaagaaaaacctctcagacctcaaagtcaacctctggacgtatctcaaaatggaaragggacccatcaaatttatacagaaagtagatgatagcttactattagagaaaactgtcaaaacaagcactacccaccaaaagtaacggtgacaaaacagaagttgaagaagacagtaatcaagagtctatggctaagaggtgtcgaggagtgctgtggggcagcaggggctctggaggcaaaagagtgtgaccgactcctgactatgccagagaatggctctgaaacaagacctttgcttccatacatgggaagtggagatgacacgacccaccagagcagtgtttggtggattaaagatgctgcccatgacccacctggcacattttcactctgtcattgtccctttgcctttcc

SEQ ID NO: 790936 - DNA, 627 bp, Homo sapiens
gtggcctgggggttggggactcctgttacagaataagtaaaatattacattttattctctataaaaatagttttgtgattattttaaatgaggcttgaaattataccattaagaaataatttgtgatggcacctaataaagaagagaaaaagaacactctaaaacaagagtgaaggaagagaagctggcaggaaaaggttaattacaccagaaaaccttggttcaggataacagttaacggatcagcaaactccactggagtgtgcgggtgataaaggcacagtggaggctgccttgttcccgtcttctggtactctgtgtcacctggatatgcctacctgacggagttccacaaggaacrctgttaatgacaatatgtgaaggcaggtttggaataatttttgtagacataaatcctccaaactaatgggacctggaaacaagttatttagtactactcttttgtattttatgaaaaatgcaattcctttaacatacatgactacatactatgatgagacaggttaaataaattttgatattgtttccatttgagaagctctggagcctctttacatgtgggtcattttgtgaacatggtctttaatcagactttttgatagcatt

SEQ ID NO: 790937 - DNA, 633 bp, Homo sapiens
gagggatccctccagaactctctcttctatcttgggatagtgtcacgtaaccatagtcatctgtgttttcataggagcctagtaaatcttccattccactctcctcaagagtaatggaagagaaacagagtgaggaaacctcctcgcacctccaacattcagaccacgtcccaagtccttgtcgcaggagaggaacacaatcaattgtgacagtcagtccccaytgcacacactccctcttcgtcctgtcttgctgtgcgctctaggcacgtcctagagatgggcgcttgggaagtcactcagttcatttcttaggtcacttatcccacgcagctcagcaccccagatgcccgctcatgcctgcctctctccacctgcgctcgtgtggaggacagagtgcccgtcagggcgggggtcacccccagactctccaacacatggctgatggagaccaatggccagaaaaatcagaaatggaatttcaactcatgcctgttttctgcttttccacctaggagaaccaggatgtcctggcagcccggggaaggatgggacgagtggagagaagggagaacgaggttagtagttcctatttatggtgctctaattctgagctgtcgactatttaacaat

SEQ ID NO: 790938 - DNA, 219 bp, Homo sapiens
gggagcaagggaagaacagtaaagaacgaaataagtagataaagtatgtggtatgttattagttaatacaagccrtggagaaaactgaacagggaaggggataaggtatgtgggcatgtaggctggtgttggagttttagagagcattgtcggaaggctcacttagaatgtggaatgtgagcgtgctcttgacagacacaagcatgaggctgtggctct

SEQ ID NO: 790939 - DNA, 593 bp, Homo sapiens
ttcaagtttcagacacagaagatggatccagtgcccttaagggacttacagacgtagtctctaaagaatctaaaattttgtgattctcatggagaatggaaagcgtgcccaaaggcaagagacatgtaaatgctttgagcttcacaagggcttgcctcttcttgtcactaatgaaggcaccaaggaggtttattttattttatttattttttttaaatcttaagtgcagtcctagccttaaggataagaagttaattctctaaaatccaagtctttgtaaataaatggcatttaatctcacaaggaaaaaataacagggttgcatgtttatgcctaattttctatcctgctgcctttcaggaaaggatttttttaacattatgaaatatattccagagaggtytcaggtagaggataatcagtgacttattaacacctacaggtattttatcagaactatatcatagcatagtcaaagaattccttgtggtggaagaattagaagtatgcttatcagatttgcaggtgtcatgcagctgtcagagatagcagataccagaggtgctcattcaagattcagaacgtcttgacaa

SEQ ID NO: 790940 - DNA, 734 bp, Homo sapiens
aagtctttgtaaataaatggcatttaatctcacaaggaaaaaataacagggttgcatgtttatgcctaattttctatcctgctgcctttcaggaaaggatttttttaacattatgaaatatattccagagaggtctcaggtagaggataatcagtgacttattaacacctacaggtattttatcagaactatatcatagcatagtcaaagaattccttgtggtggaagaattagaagtatgcttatcagatttgcaggtgtcatgcagctgtcagwgatagcagataccagaggtgctcattcaagattcagaacgtcttgacaagctacaacatcaaagccaaagtagaatttattgtaaattaatcttgaaatcaataccacaggtatagaaggagtacaaacttggctgcagttcaggtgtttagacataataaacttaacatggattaacagtctgatgggttttcccataaatctccttcaattttaggctaccttagtggagctgtggtgcctaaggacccagaggtcattgtttctcttctcagtgcttgtagatttttaccttccgcgtaacttcttcgccgttgctccaaattagcacagaattatatataggtggcctcattctcctggaagcatgattcttgtccttcctaaacctttctaagatgcaactttcttttttttaatgttttgatcattctctgaaagtgggatccccttgttat

SEQ ID NO: 790941 - DNA, 504 bp, Homo sapiens
aattagaagtatgcttatcagatttgcaggtgtcatgcagctgtcagagatagcagataccagaggtgctcattcaagattcagaacgtcttgacaagctacaacatyaaagccaaagtagaatttattgtaaattaatcttgaaatcaataccacaggtatagaaggagtacaaacttggctgcagttcaggtgtttagacataataaacttaacatggattaacagtctgatgggttttcccataaatctccttcaattttaggctaccttagtggagctgtggtgcctaaggacccagaggtcattgtttctcttctcagtgcttgtagatttttaccttccgcgtaacttcttcgccgttgctccaaattagcacagaattatatataggtggcctcattctcctggaagcatgattcttgtccttcctaaacctttctaagatgcaactttcttttttttaatgttttgatcattctctgaaagtgggatccccttgtt

SEQ ID NO: 790942 - DNA, 734 bp, Homo sapiens
aagtctttgtaaataaatggcatttaatctcacaaggaaaaaataacagggttgcatgtttatgcctaattttctatcctgctgcctttcaggaaaggatttttttaacattatgaaatatattccagagaggtctcaggtagaggataatcagtgacttattaacacctacaggtattttatcagaactatatcatagcatagtcaaagaattccttgtggtggaagaattagaagtatgcttatcagatttgcaggtgtcatgcagctgtcagagatagcagataccagaggtgctcattcaagattcagaacgtcttgacaagctacaacatcaaagccaaagtagaatttattgtaaattaatcttgaaatcaataccacaggtatagaaggagtacaaacttggctgcagttcaggtgtttagacataataaacttaacatggatyaacagtctgatgggttttcccataaatctccttcaattttaggctaccttagtggagctgtggtgcctaaggacccagaggtcattgtttctcttctcagtgcttgtagatttttaccttccgcgtaacttcttcgccgttgctccaaattagcacagaattatatataggtggcctcattctcctggaagcatgattcttgtccttcctaaacctttctaagatgcaactttcttttttttaatgttttgatcattctctgaaagtgggatccccttgttat

SEQ ID NO: 790943 - DNA, 621 bp, Homo sapiens; identical to SEQ ID NO: 789971

SEQ ID NO: 790944 - DNA, 602 bp, Homo sapiens
tagtcatcacaaaaaatatttgagtgtatgactttttgccaggcttatgctagttactcccctacccactaatttttattattattttgacgtataatttatgtacagtaagatgtacagcttaagtggatagctagattaatttttatgtatgtattcacctgtgtaaccatcgtctgcatcaagatatacaatgtttccagccctcagaaggctctcatgtcctctctcttatcaatactccctgacagaaggtagcaaccaattatgacttctgtcaccataggctaattttgactggttttgaacgctataaaaataaatcatgtaagtatatattcttgtttctggcttctttctctctacattatgtttgtgagattaatccatcratgtgtgagccatagtactttttttctttttatttctctgtagtatactattatatacatataccacagtttatccattctcctgttgatgggcaatcagctaatttctgttttctgtctgttataaataagcctgctctggacactctagacatttttatgtgtgccttttgacagatgtaaggactaatttctattgatacataccca

SEQ ID NO: 790945 - DNA, 558 bp, Homo sapiens
gtatcatgtttaagaaatcattgctaaatccaatgtcataaacttttttctccctgttttcttctatgagttttatagtttcaggttttatgtttaggtctttaatctattttgagtaaatttttgcatatagtagtattggtaagggtctaacttcattcttttgcatgtggatatccaatttttctagcaccatttgttgaagagactgttctttttgccctcttgtgtagctttcscaccattgttgaagatcatttaatcatataccttagggattatttctgggttttctgttctattccattggtctatatgtctgtttttttatgcattatcatgctgttttgataactgtaaccttgtaatatattttaaaagaagtgtgaggcctctagtttctttttttttctcgagattgttttgactgttctgggtcctttgagattatgtatgcattttagtgtatttttctatttttataaaaaaaagccattgggattttgatagagattacattgaatctgtagattgcttagggtagtatgcacagtttaa

SEQ ID NO: 790946 - DNA, 573 bp, Homo sapiens
taagaatggattttacacttttaaaggattatgaagtcaaaaggggaaaagaaagagaagaagaagaagcaaaacagcagcatcaaaaactatatgtgatccataaagcctaaaatacttattaaatgccaacccctgtgcttaaactccttgtaccaaatttttttcctgccattctctcttatacccactctaatcaggcttttacycccagcactctaccaaaatggctcttaacaaaggtcacctctctgacttcacctttcagtaccctaccccttcctcactccaatctaaccacaacattctccttgcagctcctgaaaagatacagggttgaaagaagcaagcaatttcagctgctgcccaacacaggagaaaaagtttggagcccagctaagttaagtacccttaataccaaaagtcaatattctttcagaggaagataacagaattcagtctttacaccatagctcccaaaatgcacagtgtatgagtcaaacttactagatccgtaatgaaacggggaaatgtaaccactagtaaagagaagaaacagtcaactgaaaccaa

SEQ ID NO: 790947 - DNA, 573 bp, Homo sapiens
taagaatggattttacacttttaaaggattatgaagtcaaaaggggaaaagaaagagaagaagaagaagcaaaacagcagcatcaaaaactatatgtgatccataaagcctaaaatacttattaaatgccaacccctgtgcttaaactccttgtaccaaatttttttcctgccattctctcttatacccactctaatcaggcttttactcccagcactctaccaaaatggctcttaacaaaggtcacctctctgacttcacctttcagtaccctaccccttcctcactccaatctaaccacaacattctccttgcagctcctgaaaagatacagggttgaaagaagcaagcaatttcagctgctgcccaacacaggagaaaaagtttggagcccagctaagttaagtaccmttaataccaaaagtcaatattctttcagaggaagataacagaattcagtctttacaccatagctcccaaaatgcacagtgtatgagtcaaacttactagatccgtaatgaaacggggaaatgtaaccactagtaaagagaagaaacagtcaactgaaaccaa

SEQ ID NO: 790948 - DNA, 533 bp, Homo sapiens
ggtctcttatgaagtacaatccaaagtttgcatacaatttaaaacaaaagcaagaaatgtcacgctttgggaacactgtttttctcacactaaaatgttctatctgaagcaaggggaagtgtccaaattatagttcacaraatacctttattttctcacaacaaaatcatccctagtcagcggcccaacattactcatttctgtcatcaaaaacaccctttctgtgggttggtatgaaatatccgcaggcatcacaagtactataagaaagggctttttcaaaatgtcctgtactcactcctcttctaacctgggtaagttttctgtacacagagagtaccgtgtcctcctactgtgtaacagtagggtctctttcactcgtgtccatgtgaagagaccaccaaacaggctatgtgtgagcagcaaggctgtttatttcacctgggtgcaggcaggctgagtccgaaaagagagtcagcgaagggagataggggtggggccattttataagatttgggtaggtaaaggaaaat

SEQ ID NO: 790949 - DNA, 637 bp, Homo sapiens
aggcctaataaacaggcataggttgggcaaaaacagattttgagagggatccaaccacttttaattcctggggttccatgaggaaaacaagtttcttcccaaaatggagtcagtggtgccttctctgtttttcccaagtagtcccatgcccccaggagttatcttggggcttgtcatgcatgcattgagagtgacaaggcaaaatgaagaaaaataattcggtcgactgagaaaaaacyctttttccagcaaaacaagatccaagaaaagaaaaacataaaggccttttaaatatactgataacttagatatccacttttaattaacctgagtgctctttactaaaatccttttaaatcccttgttatctgactttagacataccaagcggccatattatttgctttcaaactttactagaggctcagagaaaggaaaatccaaagtggttcatgaggggaagagaatcaacaaatagcaaaggttgcacagacatcagaccagaaaggatacattccctaagccaggattgaacccagctgccattgtaaaatgggctaaacaaaacattgccacatggttacaggtcatgctctcaaggatgtaaaacaagatggaggcctgcagcgaagtttgc

SEQ ID NO: 790950 - DNA, 591 bp, Homo sapiens
aaaacagaaaagaggctgggcgtggtggctcctgcctgtaacctcagcactttgggaggctgagatgggtggatcatttgaggtcaggagttcgagaccagcctggccaacatggtgaaaccccgcctctactaaaaaattcaaaaactagccaggcatggtggcgggtgcctgtagttccagctactcaggaggctgaggcaggagaatctcctgaacccaggaggcggaggttgcagtgagtcgagatcacaccactgcactccagcaacagagcaaggctctgtctgtctcaaaaaaaaaaaaaaaaaaaaaagaaaaagaaagaaaaagaaatagatgatgtaccttatttggtttttccgattaacagtcatgttagttaatcccacattcactactaaatagtctagcaatgtgaaaaaaaatcatytgaaatcttaggtgttcaaaaatcttctctttcttcttcacttcattgaatttataaatgctctaaaataagataatcgcttccccagtgaagtactattcatatgtgttacatatctggcatacttttatccttttaaaattcagctaaacaactga

SEQ ID NO: 790951 - DNA, 568 bp, Homo sapiens
aagacgccctaatcccttgccctgcctagcctcaaagtctctatcactcagaggagtactgggagggctcagtgtgagccatcagaaccttccagggtatcttcccttgcttgttctctttgcgcagtccacttggtttgctaaactcctgctcttccatcaagacccaactcaaggccaggcacggtggctcacgcctgtaatcccagcactctgggaggcagaggtgggccgatcacttgaggtcaggagttcgagaccagcctgggcaacatggtgaaacaccatctctactaaaaacacaaaaattarccaggtgtggtggcaggcacctgcagtcccagctactccggaggctgaggcaggagaattgctcgaacctgggaggcaggggttgcagtgagccgacatggcgccactgcactccagtctgggcgacagagtgagaccctatctcaaaaaaaaaaaaaaaaaaaaaagacccaactcaagtatcatctccaggaagccttcccctactcccagcaattaaatgctcctcagagaattcccatttttggtttactct

SEQ ID NO: 790952 - DNA, 575 bp, Homo sapiens
gctgcgctgatagacatccatgaacttcaccactgcatgagaggcgatgacacatgagcccggtgggcgacacaaaagatggctagcccctctctccacccagctctgtaatgccactctttggagcttccgaatcaggcaaktccttccaaaatctaacgtaagtccctcctactgtgtttgaagcacttccctaagctttccaccatcaacactggtgaaggcctgttttcattccagagatcacacgatgtactcaagttccaagggacatggcctgccacatctgatcccgccacctcactgtgacagctgaactgaatcctgggccaacctcgatgccagaggacagtctgagtatgggtataccccatggggatgctctaagctttccctaaaaggaggaagagccagctttgccaagctagtctccagtttcctacgtcctccccacaaccactaccataacgtcaaccataccaacagctgtttattgagcacttactacatcctgagtactgtgtacagtagtccacagctatcatttcacacaagtttctccacatggtactatt

SEQ ID NO: 790953 - DNA, 585 bp, Homo sapiens
tcctatcagtttatttcagagcctcacactggttcccttggccccacatcccttgcagtggtggacagaggttattttgtccccattgtacagataagtagacccaacgtctcagagaggtgaggcaatttgccttcaatcgtacagcgaggatgaaatggaaagaagaggcttcttggcctagtgcccctgtacccctgattttccaagcacagttgcacatawaagcactccaggcacttttttggaaagaactcttgagctttaggtataaagttcatgtgacccacagcaggcagagttcagctctccccgtgaaggtctcaggctattctggtgagactcttgagaaagcacagaggcctggcttgggggtcagggagaaattccagggtcctgtgccccctcccaaacccactccacaccagtgccggtcaaatgctggaggacaggttcacagtccagtgtgaaattctcttataggaagcaatcaggcagcccctgtcctcatctccattcactctcagccagtgcccacccccttcccatctccgcacccacagtctggctccccatggcaggcca

SEQ ID NO: 790954 - DNA, 623 bp, Homo sapiens
gcctctccttcctgctaataaagtgggaatctggggccatggactcaatggccatcccaaggagtccttgaactggttccatcaggcatcagggaagcctcctctcagtcacatgaagcctgatggacaggagtgaccctatcacagctgggactttgaatcttaagtggatggatgtgtgatcagtccaagcaaaggagaaattcttcaagttcccacagtctagtccctacggaccttcccggttctgtctcttagtgcttcccgtgttacagttttcgccgcagcaatagcaagctgcacgcgcactgcgatctcctccctttgaacttttgytcctgctcttcccaggtctggaattccctttccaggcttacgcttcatttctcaaggtcccctctggcaaggcccctggaatcctccctcaggcccctcctcactctatgggtgcattgaccaatttcacagtatgctttgtgtctgtctgtctcttccaagagactacaaacttcttgacagctggggccttgaatcctcaggctcagcacaactgctggtgcaccgcaggtgcctggccaacatgggacatgggcccagaaacacagggatggcccgacaccttc

SEQ ID NO: 790955 - DNA, 627 bp, Homo sapiens
gatgagatttgcatttctaagagatcactttctctgcagcgtggagagtggattaggagggacaagaggctattgctgtcatgagaggagacagagaggggaatggacaaattgagagattcagggtcggagctgacagaacttggagactgaccggatttgtagggagagggagaaggaagtggggctctccactcaccagctcgtccctcacaaggggcagcaggtggtgctggtcagaccaatgtgtgtgtattatgcactgtggaccacgcgagmcgtggcatgggtaggtgtggctacagccagcctccctcctcagagcagccctcttcactgagctccagggggtgggagtgaggcaaggctgcagctgccctgctgtccgccactgtcagagtgccaggacacctgtaggtatgtgtgggaggacccagaaatccacgtggcatggatattacacatgctcccagactcacagctctattcacacactggcttagatataaacatgggccatgtgcacataccagacacccagatttccatagcgcatgccccagacatgcacaggtttccatgtatacacagatctattaatgatgttgtaataataaccaacattta

SEQ ID NO: 790956 - DNA, 600 bp, Homo sapiens
tgctttctaggtcccatcattgggccttctcctgtggtttctccagtatgttttggaaaaacctctatgggtctcagttaccccacttggccaatgagggcattggactggatgacccaagatccctccctctctaactctcaggtgctgggaatcacagattctagtctgcactctgtctagcatggctgctctctccatctggtccttgctcagaccctgcaggcagctggggtctccctgtcaccttcgcagccaggttggaaggaggtcaagaatggagacaagaagactgaygggtgggtgagctcagaggggagtatccaaaaaggggttcatttcattgccacctgtctcccaaccagattccatcattccatccgcatacattactccagcctctcaggcctggtctagacccctaggacccctcctctgccagtgggggaagaaaggggaatgcaagttgggggagtggcaggtacggcccttccctgggaggtggtggtaactgcaggccactagctgcccctcaagggtgctgaggagcctggctggagctagggctcggccctccatctcggctgaaggcagcaccct

SEQ ID NO: 790957 - DNA, 540 bp, Homo sapiens
tacagtaggtgcctaggaaatgtttgctgaaataattatctaatttaagaaggattctaggagggaagctggtgaggtcctgccccctgccccattggctgcagctggcaaggaggcaggggcttcatcaaggggtggcaratagggcagtgcccagctcccaggcttggcctgcatctcccaggcttggcctgcatctcccaggcacctgcctgagtacacaacctcttccctcgtggggcctctggtttcctgcctgggaacgggggtgggagcagtggctgaccaaggcagaccactgcccatgtcgggcgtggtttcccgagttgatgggagcacgttcctgagataggggtgcgatggccggaatgtaaggggccagaggcagtgatagactgcgccagtccaagagctgagcaaatattgaccctcagcaggacagcctcttgaaaaccctccacaggatgcctctcgctgttcccctatctctagccaccctcatggtagggtgcctccagctggatggaggtggggtagggg

SEQ ID NO: 790958 - DNA, 545 bp, Homo sapiens
ggctgatggcaagatgagggtcatggatcgtaaaatccaggcagtgccagggctaacaaagtcctcagagatgacctggcctacagagcaggagactgagggctggagggaccagggactcacccagggtctctcctatggagggaacagggcagggygtcacctgcacctcctgaagtggaggtcttcgttctttccagtccacatccccttttggagtaaactcagccacgatggtccacttggggctgcggtgggcctctgtacctccaggctgcgggcacctgtgctacccacaccccactaaggcaactgctgtggggctgggttggcaggtggcctgagcagaggcaaaggggatggtcaacaggggcaaccttaggagctagaagatgccgggtctgccagcaccagcagaaaggagggtggagccgagtcttgagttcgagtccctgctcactcacgcatggacaggtgccccgtagcaggtcacagcgcccttgtccgtcaagtgggaataatgctggctgccccagctgggaggg

SEQ ID NO: 790959 - DNA, 373 bp, Homo sapiens
gacttcctttagattccatatataactgaaaccgtgcagtatttgtctttctgtgtctagcttatttcacttaaagtaataatgtccttcatgttcatccatgttgttccaaatggcaggatttctatcttttctttaaggctgaataatactgtattatgtgtatatatacatatatgtatataacaatttatttttaatttaaaccrgagaacaaaaataactaatagcctactaagtgaaaggtgcatacaaggtaattctcgtgctcaaatccaagtctgggtaaaaaagccataaaaacagtcatgtgtcacttaaccaaagggaatatgttctaagaaatatgccattgggcaattctgtcattgtg

SEQ ID NO: 790960 - DNA, 373 bp, Homo sapiens
gacttcctttagattccatatataactgaaaccgtgcagtatttgtctttctgtgtctagcttatttcacttaaagtaataatgtccttcatgttcatccatgttgttccaaatggcaggatttctatcttttctttaaggctgaataatactgtattatgtgtatatatacatatatgtatataacaatttatttttaatttaaaccggagaacaaawataactaatagcctactaagtgaaaggtgcatacaaggtaattctcgtgctcaaatccaagtctgggtaaaaaagccataaaaacagtcatgtgtcacttaaccaaagggaatatgttctaagaaatatgccattgggcaattctgtcattgtg

SEQ ID NO: 790961 - DNA, 587 bp, Homo sapiens
tgttttatgttcagtgcgctggtttaatgggaactgtggtattaagtgcatgtcagaagtgtgtcttctcttgtgatgtctacagggcctgggcctctgctttgcgcacagctatcccccaatcaaagccagtagaaaacacatcttgattgtgatggacatgcaggttccatcaaccattctgcagttacagaactgtaataaaaagccgatctttttattatacctgtatcaacatttaaaaactaatcccaggctggggtgcagtggctcgatctcggctsgctgcaagctccgcctcccgggctcacgccatttaaaaaaaaaacaaaaaacaagagctattccactttcttgtagacagaaactgatcagaatgtgtgtattctagaatattaagtgaaattaagatttttttttagattttgaaattttagtccttcatatctttgcagttaatgcccatatttctccatttttattttaaagtccaatttgaagaaaattcctttgattaaaaaaatttacttgtacatataaaacctttttaaatattattatatgtagacttgattattattttaaca

SEQ ID NO: 790962 - DNA, 597 bp, Homo sapiens
ggatcccatgccttccttctttctgagtttattcctgcattttgggtggtcccatactccggggcttcctaagaaagatccacagcaaacaaaaaattttgaggtcttggaaatctgagaatgtctttattctaccttcctgcctaatttctagattggctggatagagaattctagaataaaatgaatttttccacataatttcgaaggcattaaattcattctcttctagcttccagcatttctactatgagatgtcaagccactctgaatcttgattcttcttataaaatctcttctttctagaggctgataatatattcttttcatcccagagtttcaaaaatttcccaatgatgtgtcttaatgctggagtgcagttgcacgatcttgggtcactgcaagctctgcctccygggttcatgccattctcctgcctcagccttccgagtagctgggactacaggcgcctgccactaagcccagttaattttttttttttttgtatttttttttaaacagatgggatttcaccgtgttggccaggatagtctccatctcctgaccttgcgatccgcccacctcggccttccaggt

SEQ ID NO: 790963 - DNA, 613 bp, Homo sapiens
atttggtttgacatttctttcattcttacctagaagcaaaatttggaaggaaaagtggacagtcttcactcatctcaacatttgtcacctaacagaactaacgaaccatcattttataacacacatacacatacacagcatggaagcacaggcatactcacatgccaatgctgttctctggcaagatgttaaaaatagaatcttgaataatagataattgagaaacttatgggtcaagtagacatagaggataatgcaataactatcatgatacattgttcaggaaagttatcttcattgtgggagaataaayattctcagcacaacttacagacatggtttttacatgtgaaatttattccaaagtaaagaaattactacccacagtgatattttattgtaatatatgcttgttttcaagtataataagctatgaacttactatcatttgaacttgtagatacatgcctgaaatatcattagtgttgggacaagatgatcaactcttcacaattgtcactgatgatattttgagctaagacatgtgaagctttgttagtggtattaactttgttggttttgctacaggcgactgattttccaactttcattc

SEQ ID NO: 790964 - DNA, 566 bp, Homo sapiens
tccaggcagaagtttgctgcaggggtggggcactcatggagaacctctgctagagcagtgcagaagggaaatattggagcccccacacagagtccctgctggggcactgcctagtggagctgtcagaagagggccccatcctccagaccccagaatggaagatccactgacaatttgcactgtgcaactggaaaagctgcagacactcaacacaagactgtgaaggcagctggaagggaggctctactctgcaaagccacagagacagagctgcccaagaccatgggaatctacctcttgcatcagtgtgacctgagtttgagacatggagtcaaaggatatcattttggagctttaagatttgtctgcccagctggatttcrgatttgcatggtgcctgtagcccctttgttttggccaatttctcccatttgaaatagctgtattgacccaatgcctgtaccctcattgtatctaggaagtaactaactcacttttgattttacaggctcataagtggaagggacttttcttgtctcagatgagactttggactgtggactttg

SEQ ID NO: 790965 - DNA, 599 bp, Homo sapiens
taatattataatgtcatctcacttaggcagagtcatcttccttaaatgagtcaactcatggaagacaaacaccaggtgggtatgtctcagtgctcagtggtgattcaaaattttgggccaaacacagtggctcatgcctctaatcccagtwctttgggaggccaaagcagggggattacttgagctcaggagttcaagaccagcctgagcaacatggcaagactctgtctctacaaaaaatacaaaaactactgggtgtggtggtgtggcgcatgtctgtggtcttgagaggctgatgcacgaggctcacttgagcacaggaagttgaggctgcagtgagcccactgttacataacagtaacagaactgtttatcagcaaaaatagattgccttgtggaaggtagcatctagatacagtagaaaataaggaggtaagttgacaagtaggtactttatatctcagagcatgatcttttgatgatagataatgttaagtttctgaacttgcaaatatgttaatcaaattctggaacatagtgactcctcttcaatcaatatactgtactatataaccactctaagaagctcagccttaaaa

SEQ ID NO: 790966 - DNA, 576 bp, Homo sapiens
aatattataatgtcatctcacttaggcagagtcatcttccttaaatgagtcaactcatggaagacaaacaccaggtgggtatgtctcagtgctcagtggtgattcaaaattttgggccaaacacagtggctcatgcctctaatcccagtactttgggaggccaaagcagggggattacttgagctcaggagttcaagaccagcctgagcaacatggcaagactctgtctctacaaaaaatacaaaaactactgggtgtggtggtgtggcgcatgtctgtggtcttgagaggctgatgcacgaggctcacttgagcacaggaagttgaggctgcagtgagcccactgttacataacagtaacagaactgtttatcagcaaaaatagattgccttgtggaaggtagcatctasatacagtagaaaataaggaggtaagttgacaagtaggtactttatatctcagagcatgatcttttgatgatagataatgttaagtttctgaacttgcaaatatgttaatcaaattctggaacatagtgactcctcttcaatcaatatactgtactatataaccac

SEQ ID NO: 790967 - DNA, 497 bp, Homo sapiens
aatgagtgatcttatttttccagtgtatgttctgtgataccccacagttattctgtccctaaccctgtacagagatatacatcataaatttttttcagcaaagaatgaaggggtcagagtatgttgcagaaagtagctgggtagagacaaaaagatcagtttagggaagtggaatctgaagggatccagatagaacacaggaaatggaggttaggttgaagtgcaatggacccttggcaggaggatggcacagtacattatcagactgggcatcagagaccaagaggtgytggatcccaaggtaatcagccaaagcatgacacgaccttggtagtgccaaacagggacactgaaggcttcttaagtaaatgaaaaaggaaccagggtagtcaaaggatctctacatggataccaaagccttcagtagggtagagttgggcttaagaaagacgctgaagtcaacagtaaaagggagagaaggactaggagacagaaga

SEQ ID NO: 790968 - DNA, 725 bp, Homo sapiens
catttttactactataagatacttctgaactgtgacccaaagaatattttataaatataattaagttagaacagtagggttttgttttgctttttcaatctccaagtatatgtcctagtctgttctcagtactctttaaattgctcttgattttcaccatgctttatatttactgttcttagaaattttactaaaaatataatctcttaatgttcattctcattgatttttgaggtcaaaaatggaaataatgattttcagtatttttaaggttgtcaaatcttcacacagccattcaccaaatgattgtaagtttgaaatacactatctgaaacaaatgccttctactatgtaagaataggtctatgggatatatttattaaagtttgaatgcagattaaactctgcaaggttaaatgacaaggttaagtgtctaattttgcagtctttttatacctggtgagtgcaaaggcttcctaatgataggattaaatatggttcctagctacaaacagttgcttgtygttccctataggttagcctctatattctgtacttatcacaaacagagaggaaataactttctgggtcttttgtgagtctttttaaaatacacagactttagggaaatcatattttcttgaaggaaatgaggcatgaccaatcacacaaaacgtgagaaaatcccttgatagatgacctttgccacatgtagaagaaactgt

SEQ ID NO: 790969 - DNA, 626 bp, Homo sapiens
ccccaaagtcagcaacctactaaaagggggatggttaacttggaactgcaaccatgctggtgatcagaaagagaaagtctgtttcctccttccatcatcaaggaggttgttggagaggacagactatatccttccttaaacacaccttcctttccccaagcagttccatcttccaagtctggcccatgaaagtggataagtggaaaaattttagtaaatagtttgggttatataaattaatgactgacctaaattttacattgcattgaggattaaagaaaaaaaaaagaaagtcctttctggccagaatgggaaatttggggttcawatgtgtgcagccttgagactcaagtaagttacatcttgtgtatatcagctctgaagctccccagccaaaaccacttagtacaaatgaaatataacaaagttgcttggtgggtattttactcaaacctagtaaagttctctttcatcctcagcacttttttttcaaaattttgtaattcacctcaatcttataatcccactctgaaatttcaatgttgcttctgataaaaaaaaagactagcagtatgatcctgagtaagtcacttaatttctctgacaattaactcatctgcaaaatg

SEQ ID NO: 790970 - DNA, 655 bp, Homo sapiens
tttctatataatttaatacaatcctttaaccctaggccaaagtttacatttccatgccttcttataaccttttactataaaaacacattttactattcttacaccccttacatgtaaatctagtttcagtagtttcaattacatggtataatgttaactcctaacaatttttaactttaaggtaaaacctggtaagttactttaattgtgtgctgactgcagccgaggtttgcctttttagttaagggtgtaattaatttcatatgtccccaggccttacctattgtgaagccaacaagacagrcagttctcaaaacccaaaaagcagtttataacctcaaaacacttagcaaaccttgcatctgacctgcatagtttagttcacctatttacattttaatgacaccttcattttaccaataatctttaaggctgtttttatttcttaaagagtaaagtcacatgcactgcaaggtactacagcttttaacttcccttaaaaaaattagatccaagtgcttgtctttctttaggccaaattaattacagctctttgacagacgttacacacagtacacacacagagaggcagaagaaaacctagtcactgaatggggctatttaagagacagatttagaaaaacatgcagatatt

SEQ ID NO: 790971 - DNA, 623 bp, Homo sapiens
ttatttcttaaagagtaaagtcacatgcactgcaaggtactacagcttttaacttcccttaaaaaaattagatccaagtgcttgtctttctttaggccaaattaattacagctctttgacagacgttacacacagtacacacacagagaggcagaagaaaacctagtcactgaatggggctatttaagagacagatttagaaaaacatgcagrtattgaaccagaaagggctcattccataaggcaaagtcttgccactggagttacaagccatgccctcaggatgtataacaaaatggaggcttgatttaacaaccaaaactttgcagagaacacagtgatagttgttgggggtgggggtctggcctgctaaaggggaaaaagaactttaaaggttaactgcagacagggtggagaagagaaaagaaaaaaaaacatttaaaaatgcctggggaagaacctcttactcttatgcaagttcctccaccagggagaaaagtttaattactgtccgatggagctgaaccctttggccagggaagcagaaggctgctgtggtgatgcatagctgggaacaagccagccagctgtgtgggacccttggaccatacgtcccagcccca

SEQ ID NO: 790972 - DNA, 582 bp, Homo sapiens
gggtagtgttccttttgtcatttctgattgggtttatattgatcttctctttttttcctttatcagtccatccagcagcctattaattttagttagtctttcacagaactaacttttggtttcattgattttcttgtatggtttttctcatctccatttcattcagttcagctctgattttggttatttcttgtcttctgctagctgtaggattgctttgctcttgtttttctatttcctctaggtatgttaatttgagctctttccaactttttgatgtgggtgtttagcactataaacgttcctcttaatactgctttagccatgactcagagattctggtatgttgtatctttgttttcattagtttcaaagaatctcttamtttctgcctgtattaggcaattttcatgccgatgataaagacatacccaagactgggcaatttacaaaaaaagaggtttaattggacttacagttccatgtggctggggaagtctcacaatcatggcaaaaggcaaggaggaccaagtgccatcttatatggattgcagcaggcaaagagagaatgaggaagatgca

SEQ ID NO: 790973 - DNA, 494 bp, Homo sapiens
cttggattttccttggcctttctcccagtttggattccttgatcccttctccctctgggtttattctcctgttctgtggaacatttcatccagtagttttgtcaggttaagaaatttggtacacaccttttatttgtcaattatgccttaataaagctggaaaataaattgttgctggacatgatgggtcatgtctcccaacactttgggaggctgtggcagaaggatcatttragcccaggagtttgagaccagcctgggtaacatcgagagacccccatttctacataaaaaaaaaatttttttaattgctgggtgtggtggtgcatgcacatggtcccagctactcaagagaatgaggaggaaggagtgcttgagacagggagtttaaggctgcagtgagccgtgatcatgccactgcactccagcctgggtgacaaagtaagaacctgtctcaaaaaacaaaatggcaaagaaatcttttaaaaattggt

SEQ ID NO: 790974 - DNA, 589 bp, Homo sapiens
ctctctttctttctctctctttctttcttttttcagagtttcactcttgtcacgcaatgacacaatctcagctcactgcaacctctgcctcccaggttcgagcgattcccctacctcagcctcccgagtagctgggattacaagcrtgcgccaccacacccggctaattttttgtatttttaggagagagcgagtttcaccatgttggccaggctggtctcaaactcctgacctcaggtgatccttctgcctcgggctcccaaagtgctgggattacagacctgagtcaccgcgcctggccagcaattggtttcttatgaagcttttcttcttgacttatagatgaccatattctccctgtgtattcataacatcttcctcctgtacctgtctatgtccaaagttccccttcttataaggacacaaatcataacaaattaagaaccactctaataacctcattttaatttaattaccacttcaaataccctatttacaaatatcatcatattctgatgtaatgggggctaggacttcaacatatgaatttaggggaaatacaactcagtccatgatagtaaataatgca

SEQ ID NO: 790975 - DNA, 566 bp, Homo sapiens
ttgcattacactttattttgataggttttagtcacctcaggctgccgtaacagactgggaggcttaaacaacagaaatttatttctcgtagttctggaggctggaatgtccaaggtcagggtgccaacaaaacagattacatcctgagrcctcttggtttgtaggttgtgtgctcacatgacccctttctttgtgcatgtgcagaaacagagagaagacagagagagagagagagagagagagaaacagagtgaaagagcgagttctggtgtctcttcttataagggcactagggggctctactgtcatgacctcatctcatcctaattacctctggaaggccccatctccaaataccatcacactgggagttagggcttcaacatatgaattttggagggacacaatcattctatcaaaaacagatagtttcttcaaatcctttaggaaataaatagggctcaactataaaactctaaaatatcacatgtgcaagagcttgtgttaggcactgaagaagatagaaatatatttaaaataagaattctacttttgaagagttttta

SEQ ID NO: 790976 - DNA, 604 bp, Homo sapiens
agagaggtcaactctttcccccagtctccattacttgctgaataaaacctagtttcaatgctttatctttgacagaattccagatgctctaaatacttactagcacttgctttttttttttttttttgagatggagtctcgctctgtcacccaggctggagtgcagtggcgctatcttggctcactgcaagctccgcctcccgggttcgtgccattctcctgcctcagcctcccgagtagctgggactacaggcgcccrccaccacgcccagctaatttttttgtatttttggtagagacggggtttcaccgtgttagccaggatggtcccgatctcatgatcttgtgatctgcgcgcctcggcctctcaaagtgctgggattacaggcgtgagccaccacgcccggcctaatttgcttctttctaatgactaaaaattttgaacttttttttttcgtgtctgtcttagtcctatttgtgttattataaaggaatatctaagattgggtatttaaaaagaaaaaaaattatttggctcatagttctttagactgtataaaatcacggcaccaacatatgcatctgctgagagcctcaggctgct

SEQ ID NO: 790977 - DNA, 623 bp, Homo sapiens
catgttcttatgtttatgtccgtgtgcaactaatgtttagctcccacttataagtgagaacatgcaatatttggtttttggtttctatgttaacttgcttgggataatggactccagctacagccatgctgctgcagggatatgatttcattcttgtttatggctgtgtagtattttgtgatatgtaccacattttatttatccaatccactgttgatgggcacctgggttgattccatgtctttgctattgtgtatagygctgcaatgaacataagagtgcatgtgtccttctggtagaatcatttattttcctttgggtatatacccacttgtgggattgcctagttgaatggtagttctatttttagttctttgagaaatcgccaaactgctttccacagtggctgcactaacttacattcttacagtatgtaaacatccccttttctctgcagcctcaacaacattagttatattttgacttttaaatgataactgttctgacaggactgagatcatatctcattgtggttttgttttgcatctctctgatgattagtgatattaagcatttcttcatatgtttattggatgtttgtatatcttcttctgagaagtgac

SEQ ID NO: 790978 - DNA, 483 bp, Homo sapiens
tgtacacttaaaatgggaagttcatttcctcttgcttctactccccttacccccacagccacttctgccgttcatcacacagtggggtgctcatcatcacagtggggtacctgggtccctagatacctgccagatattgaaatgtaaagactttacagatagtcatcagccaaagtagaatagaggggaaggttactgaatttgaggaggtaaagaatctttgagggaaaacatgtcttatatgtaatacatgcttcataaatgactaccagatacataaaaagagagataattatggattctgcagatggcctgagaatgataagaattcattytggaaaaaaatcctggaaagggtagactttgaaataagaatgactaaacaaagaaaaattattatggccaagagaatatgggtagccttcagcataccttcgttccttgaagactatgttgatttgaatactcacaagacattgggac

SEQ ID NO: 790979 - DNA, 539 bp, Homo sapiens
cctgctataatctgaatgtgtctcccagcattcgtaggttggaacttaatccttaatgtggcagtattaagaggtgtggcctttggaaggtgattagttcatgagggctctgccatcataaaatttccaaatggaaattttagaactgaaaaatactgtcaactaaagaaaaaaatcaggcttttaaagaattaaaagtattattatttttttttgagacagggtttctgttgcccaggctgyagtgcagtggcacaatgtcggctcactgcagactccatctcctggactcaagcgatcctcccacctcagccttccaagtagctgggactgtatgtacttattttctgtctacttattctattgattattaagataggagtgttgaaatatttgactgtaattgtaaatttatgtatttctccttgcagttctatcaggttttatttgacatattttgaagctctgtttgttattagatcccttaacattgaagattgttatatccttttgattaattaaccccttaattaccacaa

SEQ ID NO: 790980 - DNA, 615 bp, Homo sapiens
catctgggctcaagtaatgctctcacctcagcctcccaggtagctgggactatagacatgtgctcctaggcccagtttgaacattttttgtaaaagttttatatagtcatacattttcatttcccttggataaatgcctaggattggaattgctggattgtgtgatagtatgtgtttaatattataagaaactgccaaatggtttacattctcaccaccaacctatgagagttccagtagctgtacatgttcaccarcacctcacattatcagtctgtttttatcttagtcgtcctcatggatgtatagcagtctctcaaagtggttttggtatgaatttccctgatgatttgacactgatcatcttttcatgtgattctatcttcttttgtgaagtgtctattaaaatattttgcccattaaaaaatatttatcttcttcttaaggtgtgtaagactaccctttatattccagatactgttcctttgtcaaagatatgtattcagagaacatatccactcagttgtggcttgccttttcattttcttaattgtatactcaaaagtgcatatgttttaaatttttactttaaatttaaaaattttcctgatttgt

SEQ ID NO: 790981 - DNA, 623 bp, Homo sapiens
gcagcagcagtagaaggtcctcttgggcccagcaccactggccttcctcaggagtcagctctgcaatttaactaacaagccacgattcctgcagactgtgagggccatgtgcaagataagcatgatgacagggctagatgcacagtacctggcagagaaagctttcagtacgtctcaactataactaccatacagttcctttattatattggggtttgtttgtttgtgacggggtctgattctttcacccaggctggartgcagtggcacaatcatggctcattgtagccttgacctcccagacccaagcagtcctccaacctcagcttctcaagtagttgggactacagatgcgtgccaccatacccggctaatttaaaaagtttttttgtaaagacagggtctccctttgttacccaggctggtctggaacttctgggctcaaacagtcctcctacctcggcctctcaaggtgctgggattacaggtgtgagccactgcacttggctatagttggcttttttaacttgaggaccttgggccctggtgttcatggatgggcttcaaagggtcagaaaactccatgaaattgtgtggaaatattgtaggcatatatagttttc

SEQ ID NO: 790982 - DNA, 571 bp, Homo sapiens
ttggtctagggtacagttcatatctgatgtttctttgttgactttctgtctaaatgatctgtccattgctgaaaatagggtgttaaactcttctactagtattgtgttacaatctatctgtttcttgagatctattaatattggctttatgtatttaggtgctctgacattgggtgcatatacatttacccaacatcagagcacctaaatatgtaacatatccttttgctgaattgaccaaccccattatcatatattaatataatgaccttctttgtctctatttacagatgacttaaagtctattttatctgatataagtatagccactcctgttttggtttccatttgtgtgaagtatckttttccatttatttactttcagtctatgtgtatccttataggtgaggcaagtcttttgtaggcagtatatagttgggtcttgttttctttttttttaaatccatttagctactctgtgtcttttaattggataatttaatccatttacattcaaagtaattattggtaggtaaggatttactactgtcattttattaatttttttcta

SEQ ID NO: 790983 - DNA, 608 bp, Homo sapiens
aagctggaaacatttcaaatatttatcaatatgtgaatagacaaaggaattggtgtatctccataccaccgaatacactaaacataaaactattgatacatgttaaaacatagatggatctcaaaaatgattacatggagtgaaagaagccgactggaaaaggagcatactgtgtgattctatttacataaaattctaggaaatgcaaattaatgtagagtgacagaaagtagaccagtggtgcttggggataggcaatggaagagcaaagacagggagggatgaaaggaggtggtggccaaggggcaccaggaaacttttgtcggtattatctttatttcagtgatggtttcatgggtatattacatatgttataactgatcaaatcgtatactttaaatataggcagtttattgcgtatccrttatacctcaataagcctatttgagaaaataaaactagatagtacaatcccatatcatttgatcagaaagtccgagtgcggtggctcacgcctgtaatcccagcactttgggaagctgaggcgggtggatcacttgaggtcaggagtttgagaccagcctggccaacatggagaaagccagtct

SEQ ID NO: 790984 - DNA, 576 bp, Homo sapiens
accttgttggccaggctggtctccatctcctgacctcgtggtcccccacctcggcctcccaaagtgctgggattacaggcgtgagccaccgcgcccggccaatgaagtcctattttcacacttcctttgaggactacagtaatgttaycaggagacaagcagtttctgcacctcctctgccttgacccaagtacattccaatagacgtcatgaggtgacaaactgtgggtgcccatgttgagcactgctaccgccagcattgccaagttgatttgtatggatttgtgtcatttccctgaagttcaacataatgctcaaacaggagggctctgctgtggggcaggcctgggttcacattcaggctctgccaattactgagtgagcttggaccaacgatttaattaagattccattttctcatctagaaaatgagatcaagtaagtacgaccctgcacagtatccatcactataaaggttagactagctattattattactattataagctaatgaaacatattcttctagttacaagaaaatgaagctgggcacagtggccctcctgttgttgcagc

SEQ ID NO: 790985 - DNA, 576 bp, Homo sapiens
accttgttggccaggctggtctccatctcctgacctcgtggtcccccacctcggcctcccaaagtgctgggattacaggcgtgagccaccgcgcccggccaatgaagtcctattttcacacttcctttgaggactacagtaatgttatcaggagacaagcagtttctgcacctcctctgccttgacccaagtacattccaatagacgtcatgaggtgacaaactgtgggtgcccatgttgagcactgctaccgccagcattgccaagttgatttgtatggatttgtgtcatttccctgaagttcaacataatgctcaaacaggagggctctgctgtggggcaggcctgggttcacattcaggctctgccaaytactgagtgagcttggaccaacgatttaattaagattccattttctcatctagaaaatgagatcaagtaagtacgaccctgcacagtatccatcactataaaggttagactagctattattattactattataagctaatgaaacatattcttctagttacaagaaaatgaagctgggcacagtggccctcctgttgttgcagc

SEQ ID NO: 790986 - DNA, 651 bp, Homo sapiens
agagaacacagaataaaagactatttcattctagggctaggcaacaaaatggcatgacctttgtcctaagagtttgattttcagtaaaatttctttataaagttttctagcaaccaagtgtttggaacattaaaatgtgggaaaattttacttgagggcaacactgctttctaggatatggtccaagacatttaaaatgaatgttgaataaggccttttatagtaagtttcactgagtactgcgagatccacaccaaagtcccccagggcctggggctacatcatactctcgtatccccaccaytgcagcagatacatttttgttgcgttgcgttgcgttgaattgaacatgtcatgccctctgtcttttacggaataaagaactagaagactaccacattgtatttcaaggcaatatttttatccagcatgtttctttacatattttgatatttttcataacctcaagcaagaagaaatacatcatccagcagacacagtgtccagtttcttcatgaagactgtgggcacagccagggcttgaagacagtgagccctagaatggtccaggtgctactgtacacctcactggatctcagacctaattctgctctgatcttggtaactgaaaccggatgtggaaacagggaa

SEQ ID NO: 790987 - DNA, 536 bp, Homo sapiens
aactctcattcattgctagtgggaatgaaaaatggtatagccactatggaaaatggtttggcagcttctcataaagctaaacatagtcttaacatacgatctagcattacattcctagggatttacccagatgagttgaaaacgtatgtccacacaaaaacctgtatacaaatgtttatagaagcttaattaaaaatygccaaaaaatactggaagcaatcaagatatttttcaaaaggtgaaagaataaactgtggtacataacaaacaatggaatagtatcaagtgataaaaagaaaggagctatcaagtcaccaaaaggcacggcggaatcttaactgtatattactcagtgaaagaagctagtctgcaaaagttacatactatttgattccaactctatgaccttttggaaaaggcaaaaactacagagatagtaaaaaaaaccaaacagttgttgccaggggtttcgggggagggaggaatgaacaggtggagcacaaggaatttttagagcagtgaaactagtttgtatg

SEQ ID NO: 790988 - DNA, 575 bp, Homo sapiens
ggtatataggatatcattttgaatataaatcatttctatgtgatgagaacatttcaatacctctcttttagctgctttgtaatataaaatatattgttaacacaagtcacactagccttccactggacattaaaacttactttttctatgtgtgtgtttttcccatttgccagcctctctttattttcctctcccacccttccacacttccaagcctctggtatctatcagtctattgcctatttccrtgagatcaagtttttagctctcatgtatgagttgaggacatgtggtatttgaattcctgtgcctggcttatttcactcaatgtagtcacctccagttgcaaatgacttaattttattctttgttatagctgaatagtattccattgtgtgtgtgagtgtgtactacattttctgtatccattggctcattgaagaaacactggttgattttgtgtctttgctattgtgaataatgctgtgatacacatgtgagtgtgttatccttttgatatactgatttaatttcctttgagtaaatacccaatagtggggtcctgaatcatctgg

SEQ ID NO: 790989 - DNA, 621 bp, Homo sapiens
tataatttgcaaacattttctccacttttctggttgtccttttcttttcttttcttttcttttttttttttttttttgagatggagtctcactctgttgcccaggctggagtgtggtgacttgatctcagctcactgcaagctccgcctcccgggttcacaccattctcctgcctcagcttccgagtagctgggactacaggtgcccgccaccacacccagctaattttttgtgtttttagtagagacggggcttcaccgtgttagccagaacggtcttaatctcttgacctcgtgatctgcccacctcagcctcccaaagttctgggattacaggtgtgagccactgcgcccrgccctctccttttattttctttgttatgtcctttgaaggacaaatgttctaattttgatgaagcccggttcattttcttttatcactgtgcttttggtgccatatctaagaaactcttgtcaaacccaaggccataaaggtttattgctattttttatcctaagagttttatagttttgcaactcagaaatataaaatcaaatactgcatgttctcatttaaaaatgggaaataaataatgtgtacacatgaacatagagtgtagaa

SEQ ID NO: 790990 - DNA, 535 bp, Homo sapiens
taaagcattactcaaaaaagaaacaaaaggcatatgggataacagatattagactctttaacctaatctgagattttaatattaaaattatttttagggatacttgccatattttagaagtatgaatatttatgtctaacagatctgtaaacttgttcataaaaagtaatcagttaactttaatcagtcactttaatcagttaactctaaataatctgtcctcattgaggagtaattttgactgcgtgagatttttaaaaaataattttcaacttataaatttactggatagcttccaatattcttttctataacagtcrttgcagttaatagtagcagaaactttctaactggaagatgttcttttctcgctatttttcaagtatgtatgtcatttggaagagtttggagtaataaatagctgagaactaggaagaaaaaaattcaagaatataggaattttattggactaataacccaatataggaagaaatagatctcaaaatgaattctattttctaacaaaatgaatttt

SEQ ID NO: 790991 - DNA, 623 bp, Homo sapiens
ttagtttgccctttctaatgagcactctttcaagtattcttggccatttttctactttctttgtaaagtgtctcttcagatctttttcccatttaaattaggttgtttcattagtgttttgtgagaaatctttatgtatacaaatcctttatcagattaatagtgtcttgatgatcagacattttaaaatttaaagacattcaatttaacattttcttttcttytttggtgaatttttttgtgtgtgtgttctctttaagaaactttcgccttccccaaagtttttgtcttactttttctagaaattttagttttcatttgagtagttatatctgtggtccattttgaacagtttttgtgtgcagttgatatagggacccaggttaacttttttctttttctttttagcttccatacatttttttttttttaactacataagtagttatttcagcattatctattgaaaagactttcctttccctgttgttttggtgctttacaaacggctgtgtatatgtggatctatttctggattttattctcttcctttgacctatttgtccttattccaacacaatactctctatttctgtagctttataatgattcttgaaattagg

SEQ ID NO: 790992 - DNA, 593 bp, Homo sapiens
taaattcctaacagcgtcatgggccctcaagcactatgcctactcagcctaatggatgagtcggccctacggaaggcattctttgcttctgaacccctcttttctcctgttccaatctggactacttattctgtaggccctgagatgttttcttactgttatcctgacaattcaatttttttctctcatatattggatcccctatttctgtgaatatgtggctggttttctttctggtagtacgccttcattttgatagagtgcatctttcagaaggctctgctatagcatgtctggaggtaaatatgaggccttgcatgtgagataaatgtttcaatctactctcataattggttgtatagaggaagagtaatcattttcttcaacagtaagttcttagttgaaatgaacttctgtaatacaagacagatcaacaagagaaaaacagaagtktattaacatgtgtatttcatacatacaccagagacacccagggaatgagtagttctcagaattggctttgaattctggctgatatagcatcttcaataatgaacagcaaatttctggagaggtaaaggaaaagaacttta

SEQ ID NO: 790993 - DNA, 615 bp, Homo sapiens
gtcttctttgagttaaatctgcttgatattccatcacctttttgtacttggatattgatatctttctctaggtttaggaagttctctgttattatccctttgaatttctatccctctgcctcttctttaaggccagtaactcttagatttgtctttttgaggctgtcttctagatcctgttgccatgcttcattgttttttattttttcttttgtctcctctgactatattttaaatgtttgtcctcaagctcactaattcttctgcttgatgagttctgctattaaagaacttggatgcattcttcactatgccaattacatttttcagcttcagagkttctacttgatttttaaaagttattttaatccctttgttaaatttatcttacagaatttatctgaattccttctctgtgttacctggaatttctttgagtttcctcaacacagttattttgaattctctgtctgaaaggtcacgtatctctgtttctccaggattggtcccaggtgccttatttagttcatttgttgacgtcatgctttcctggatggtgttgatgctagtagatattctttggtgtctgggccttgaagagttaggtatttattg

SEQ ID NO: 790994 - DNA, 643 bp, Homo sapiens
gatggggacccactatgttgctcaggctgaagtcctgggctcaagcgatcccccagcctcagcctcccaaagtgctgggattataagcgtaagccaccatgcccagccctgtttttgtaaataaagttttattgaaacatatccatgcccatttgtgaactattgtcaatagcttttgcattaaracagcagaactgagttgtcgcaacacaggccccatgtcacccctccccatgcaaagcctaaaatgtttactggctggccctttttggaaaaagtttgccaacccttcacgtagaatgaggctgaggctggttcacctaccctcaacagaagcaagggcaggttcagaagcgttcagtgggcgcgtgtgtgcagtatggtcagcctccctctctcccattttactgcagatttgttcaggtgggaagtccttacgtcagagattaagtaagggcctgggaagcaaccacaggaccctgtatatcacaaccgtgtttcttccactcctggaacttaggaggcaatagaatttttaaactattgtgaagcataattggagtccttgtttttataaaactcttatgtcttttgcttgtttgttgatagttggcgggatgcacgaaacggtgctcactgtcac

SEQ ID NO: 790995 - DNA, 643 bp, Homo sapiens
gatggggacccactatgttgctcaggctgaagtcctgggctcaagcgatcccccagcctcagcctcccaaagtgctgggattataagcgtaagccaccatgcccagccctgtttttgtaaataaagttttattgaaacatatccatgcccatttgtgaactattgtcaatagcttttgcattaagacagcagaactgagttgtcgcaacacaggccccatgtcacccctccccatgcaaagcctaaaatgtttactggctggccctttttggaaaaagtttgccaacccttcacgtaraatgaggctgaggctggttcacctaccctcaacagaagcaagggcaggttcagaagcgttcagtgggcgcgtgtgtgcagtatggtcagcctccctctctcccattttactgcagatttgttcaggtgggaagtccttacgtcagagattaagtaagggcctgggaagcaaccacaggaccctgtatatcacaaccgtgtttcttccactcctggaacttaggaggcaatagaatttttaaactattgtgaagcataattggagtccttgtttttataaaactcttatgtcttttgcttgtttgttgatagttggcgggatgcacgaaacggtgctcactgtcac

SEQ ID NO: 790996 - DNA, 622 bp, Homo sapiens
atctcagtggagtaaagaataacaaagcagcattgctgcaaacatgtctcacctcccaccatagggcggtttttctcctatctcagaattgaacaaatgtacaatcgggttttataccgagacattcagttcccaggggcagacaggagacagtggccttcctctatctcaactgcaagaggctttcctcttttactaatccacctcagcacagaccctttaagggtgtcaggctgggggacggtcaggtctttctcatcccaggagcccatatttcaggctatgacatggggagaaaccttggacaatatcccgctttcaagggcagaggtccctgcggctttccacagtgcattgttcccctggtttattgagactagagaatggcgatgacttttaccaagtatactacttgtaaacattttgttaacaaggcacgtcctgyacagccctagattccttaaaccttgatttcatacaacacatgtttttgtgagctccaggttgggtcaaagtggctggggcaaagtggctggggcaaagctacaaattaacaacatctcagcaaagcaattgtttaaagtgcaggtctttttcaaaatgcagtctcttctgtcttccc

SEQ ID NO: 790997 - DNA, 598 bp, Homo sapiens
ccacactgatgaatttccggatcttctctccctgcgtcatggtaagttccctgagaaaagggatttgatttattggtccatcagcacacagagggctggcttcaatgtgaaaggcacttttctcagatcaactttattggatgaaaccatgagaaaggcaattagtggctccctgaaggagctgaaacttgagtttgggtttcactcacacccatcacatctaaagtatatttggggaaggaaggaactccaggaggaagggatcgttttacccaccaaacccttgcttgttggcaaacaagttgccctgatgacagccacaggtttgatttcctcactgaagcctgcagtgrgttctctagctctgctccagggcaaggttacacacaaaaaaatctaacaagaaatcaccaaggcgtgaaacctgtccaaatccattatattctggaagggatccatggcccttcatccttccccgaggacaaatctatagaaatgttctgtttgcttttctgctgtttataaacatctgcaataacttaggggtgtctagccctgtcaatctggccaaactctgtggctgaaaatcagaaagctc

SEQ ID NO: 790998 - DNA, 581 bp, Homo sapiens
atcttgggtttaaaaaataaaaatgaagcaaaatctacagtcaactatgttgacttttttatttgaaatgctaatccgtggctcagggcattggtaggtatggatattgacttcttttttatttatttacttattttagagacagagtctygctctgtctcacaggctggaatgcagtggtgtaatttcagctcactgcaacctctgcctcctagctaggctcaagtaactctcctgcctcagcctcccaagtatctgggattatgggtgtgtaattacacgcctagctaatttttatatttttggtagagaccggatttcatcatgttggccaggctagtctcgaactcctgcctgccttggcctcccaaagtgctgggattacaggcctgagccattgcacctggcctggcttctttaataggtatcaatgacattcttcatttcttcagcatctgaggcctcagataccaagtactagacttcagtagttttaaaggtaattatgtgtccttaaacaggcaaaccaccttcaaagttactaatagtttagaaacattttacgtcttttttttaaatca

SEQ ID NO: 790999 - DNA, 551 bp, Homo sapiens
aggtgctattaagtaggagaaaacagactgattggacataggtcttgaggagactgaggaacagcagggtaggaatgaaggagggagcaaagcaaggtcttcatgaccagggtgtaggtaaaacatcagtttcccctaatctcrcagctatccccacgggggtgaatcacatcatctagggagggatccctatgttgtattgaggaaagctagtgaaaaatccacctgagcttgggattgcgtagaagaggacctgggtctcatggctcttttccaggagctgaaaacctggttgcctattatatctcggaccaagaccatagcaattattctaagagagatgattgaacaaacaactgtcaacagatagtgaagaggtaggaggcaaaaaggggactctcaggtatcacagagataactgcaataggaagccgccacgcttagggctgggaaccagaggcaaggctgggatcattaaaatgtggaagcttttccaggagctgggagtgaaacctctcaggcgtggacaccactctcctggtaactggtac

SEQ ID NO: 791000 - DNA, 474 bp, Homo sapiens
gaaggggatgctctagaccagggatccacaaatcattaacctctgggccaaatctagccaactgcctctttttgcaaatgatgttttgttggaatgtggccatgcccattcacttgctgctgtctgcagctgcctttgcgtcacaatgacagggctgtgtaggtgtggctgggagcttatggcccacaaagccatgcgtatgcaccacctggccctttacagcaaggctggccagcccgaccttccacgagcgtttctcagcggaagcagtgtcacctctgagtgggtatttaagaaattgcttctggtgagtgyaggtcaagctcattgcaagacaagttccatgctataaaagctacttttctttaagttcttatacttccactttatattaaagttaagacattatgtttatcttttgcgatttggagcatagataggtgatcatctgtatgggtttcattacagggcatt

SEQ ID NO: 791001 - DNA, 613 bp, Homo sapiens
ttcaaacagaactctaagaaagaaggcagattcttttttttttttttttggtgtccttcattttgttaaatgtgcatttttgatctatctgaattaacacaagggggttaattccgtaccaactaccagaaaggagccaatattgtggcatggcagaagcttgtactgtcaagttgcccgtgggaatgggaatgggaatgggaagagttgatgtatttttcaccatcttctgcatagggtgtaacctgaaggtccctgtgctggccctgggaaggggcgcgagggcttgtcccttcagggactttgctcccccctcggtctcccccagggccttcctccttgcctgccagggaccctcctcatgccccttgtccgygcctccccagctgctctctatcccatggcccccttttcaatgtatgccaggcactttatgttttggtttgtccagtctctgtccgcaccctctttctctaaaatctaagtgccctgagggcaggcccagagctgaatatacccccaaacagcccccggcccattggcagccacaaatgtctgttgagcaagcgagtggtgggtgagagcagattgctggtgcgctggctgtggaccc

SEQ ID NO: 791002 - DNA, 506 bp, Homo sapiens
atgattacttccatttccctgctgggtcaaccgaggcctggagaggttacataacttgcacagggtcacacagctagtaagtagtggagtggggaagcatccaggtggtttggaggggtctgtaagagcagtgatgtgtgaaggagttgcaggtgaggtgaagggcatttttgaatttgcatcttatatgtctatctgcacccctccgcttctcctcactgctccctcagctgcccggattcagtgtgtcctcactgcatagacaactgcgggctctgctaccttcccaaatcacctcccccttgggtagaaagccattgwtctaagtcggcttcactgcagaatccagtcccaactatgcctttggcaaaagacacctgagcaaattctgtcctttttttcttctctcgtctgaggacagtgggcttgaacctagccaacctacaggggtcagcttgccctcagatccaggtgcactgcccttgtaggcaggactcaaggctgtt

SEQ ID NO: 791003 - DNA, 637 bp, Homo sapiens
aacttaattgtacatttttaaataactaaaagaatgtaatcggattgtttacaacacaaaggataaatgcttgaggggatggagaccctattcctcatgatgaggtcatttcacattgcatgcatatatcaaaacatctcatgaatcctataaatatatacacttagtatgtacccacaaaatttcttttaaaatttatgaaagagaatctgttgaatgaatgatttcctgaaagtctctcctccagcaaagggcagaccagcatttcactccaggtttcctttcaggacawgcagcctgctccctggcatcacctcaccactgggaatgactgggtccatcttgctttccagggcgtaaaccctgagcagggtgccaacttgccggggagtgcggcgtgagccatgccagtgcagggacgctgttgctcaccctttcattcattcaagcatttactagagccacttttcttccaggggttttcccaccagatcagcagttttgagatagtcagggacataaccatgtccttgggaggcagcaaccatggagacctcaccgtcaacacacaatatgcgctgtagtcaagctcattccagcaaagctgcctccggtaaggactttcccctgtagaggg

SEQ ID NO: 791004 - DNA, 637 bp, Homo sapiens
aacttaattgtacatttttaaataactaaaagaatgtaatcggattgtttacaacacaaaggataaatgcttgaggggatggagaccctattcctcatgatgaggtcatttcacattgcatgcatatatcaaaacatctcatgaatcctataaatatatacacttagtatgtacccacaaaatttcttttaaaatttatgaaagagaatctgttgaatgaatgatttcctgaaagtctctcctccagcaaagggcagaccagcatttcactccaggtttcctttcaggacatgcagcctgctccctggcatcacctcaccactgggaatgactgggtccatcttgctttccagggcgtaaaccctgagcagggtgccaacttgccggggagtgcggcgtgagccatgccagtgcagggacgctgttgctcaccctttcattcattcaagcatttactagagccacttttcttccaggggttttcccacyagatcagcagttttgagatagtcagggacataaccatgtccttgggaggcagcaaccatggagacctcaccgtcaacacacaatatgcgctgtagtcaagctcattccagcaaagctgcctccggtaaggactttcccctgtagaggg

SEQ ID NO: 791005 - DNA, 602 bp, Homo sapiens
caggcagacagcagtagggcctgaggaatctccacacgctccactccaagggggttccatgtctgacttttcataactataacttatatggcactattgagatcctggttaagtttctcactttatagaagctattatagtacagttaatattttgctctttgcagagaacacactttctaggtttagaaaacacatatacacgtatacacactcacatactttatctrtcttctatcttttctggcttttacacaagatttactgctatgttgtttctttagaaaacaaaattgatttggataaccattgttattatcaaataacatgtgtcaaaattaggtgtaactgtgtatgtataaatgagacatgtggaagtaatttgtataaatcacaactcctatggtttgcaagtgttggattatgtgaggatcttgcagtcagaggccctaattcaaattgtcttagtatgttacaagcactaaggttaggggagagtgatgctcttggaatatcctccaattacacaatgatttacgaggcctgtgaacagctgtgtcctttagtaattaaattggaacctgcttttagttcatctttagg

SEQ ID NO: 791006 - DNA, 535 bp, Homo sapiens
gagcccgctgattatccaaagaacaaaggcttctttgttaggccttgctcccttatctctgcagctaaagctaaatttttccccaggctgctctatctgtgcctgtagctttgattttttcaggctatttctctgtttgaaggagttttaccaaggacccctcctaactgtctgcctaaccagtttcttttccttcttctctctctgaactttctgtcttgtggaagacagmtaagacagagctactaagacagacctactgccaaacactccctgggactgtggcttctaggaagctacaggcctaagggtctgagaagattcggcacagcctatgaccagtggctgagccaagctgcccccaaatgcatgactgaatctgtgatagtcctgatatcaccatgatgtatgagcctcaagattatctcagtaaatcttggctcagaactggggactctggaagaactggcaaaagaacacacagaactattaaatatggagagatgagtgcagagagaaaaaaatgggctattca

SEQ ID NO: 791007 - DNA, 687 bp, Homo sapiens
aaagtttaaaaggtagcagggttgtgttgagcctaaagatctatactgatttatcataacgaactgtgttattattttttagtaaaatagaaaatctgggtaataatggtagtaaatctataacagcaacttagtatttgaaaggtggaaaaaattctaaacctttgaattatcaacattgaattctttatataarttttggttattttgctcttctagttttctttggtagtcttataattttactaaatcaaacatcacaaatattaacctctgtttcatcggatatattttcttaaaccagcataatcaaagccattttatttctctttggtcctctaggactaaatatatcaccactcattacagcaacgttgtttgatggtaaagaaaattctcttttatttttgaagtaaaattactggacacaaaaatatgttacactaaagagaactttttaatttttgaaattgaaagctcagttatacaaatcaccagaaactggtaagtacagtttgcagtaatttctgtctctgatgaaatcttggtttattttttcttaaagaatacttaccatggaaatgtactttattaaccacaccctgatagattcccatgtcaaaaatgcaacaggagttgctggttgccaatgagacaataagataaacaaaaagtacctcataattt

SEQ ID NO: 791008 - DNA, 634 bp, Homo sapiens
gtttaaaaggtagcagggttgtgttgagcctaaagatctatactgatttatcataacgaactgtgttattattttttagtaaaatagaaaatctgggtaataatggtagtaaatctataacagcaacttagtatttgaaaggtggaaaaaattctaaacctttgaattatcaacattgaattctttatataaattttggttattttgctcttctagttttctttggtagtcttataattttactaaatcaaacatcacaaatattaacytctgtttcatcggatatattttcttaaaccagcataatcaaagccattttatttctctttggtcctctaggactaaatatatcaccactcattacagcaacgttgtttgatggtaaagaaaattctcttttatttttgaagtaaaattactggacacaaaaatatgttacactaaagagaactttttaatttttgaaattgaaagctcagttatacaaatcaccagaaactggtaagtacagtttgcagtaatttctgtctctgatgaaatcttggtttattttttcttaaagaatacttaccatggaaatgtactttattaaccacaccctgatagattcccatgtcaaaaatgcaacaggagt

SEQ ID NO: 791009 - DNA, 687 bp, Homo sapiens
aaagtttaaaaggtagcagggttgtgttgagcctaaagatctatactgatttatcataacgaactgtgttattattttttagtaaaatagaaaatctgggtaataatggtagtaaatctataacagcaacttagtatttgaaaggtggaaaaaattctaaacctttgaattatcaacattgaattctttatataaattttggttattttgctcttctagttttctttggtagtcttataattttactaaatcaaacatcacaaatattaacctctgtttmatcggatatattttcttaaaccagcataatcaaagccattttatttctctttggtcctctaggactaaatatatcaccactcattacagcaacgttgtttgatggtaaagaaaattctcttttatttttgaagtaaaattactggacacaaaaatatgttacactaaagagaactttttaatttttgaaattgaaagctcagttatacaaatcaccagaaactggtaagtacagtttgcagtaatttctgtctctgatgaaatcttggtttattttttcttaaagaatacttaccatggaaatgtactttattaaccacaccctgatagattcccatgtcaaaaatgcaacaggagttgctggttgccaatgagacaataagataaacaaaaagtacctcataattt

SEQ ID NO: 791010 - DNA, 634 bp, Homo sapiens
gtttaaaaggtagcagggttgtgttgagcctaaagatctatactgatttatcataacgaactgtgttattattttttagtaaaatagaaaatctgggtaataatggtagtaaatctataacagcaacttagtatttgaaaggtggaaaaaattctaaacctttgaattatcaacattgaattctttatataaattttggttattttgctcttctagttttctttggtagtcttataattttactaaatcaaacatcacaaatattaacctctgtttcatcggatatattttcttaaaccagcataatcaaagccattttatttctctttggtcctctaggactaaatatatcaccactcattacagcaacgttgtttgatggtaaagaaaattctcttttatttttgaagtaaaattactrgacacaaaaatatgttacactaaagagaactttttaatttttgaaattgaaagctcagttatacaaatcaccagaaactggtaagtacagtttgcagtaatttctgtctctgatgaaatcttggtttattttttcttaaagaatacttaccatggaaatgtactttattaaccacaccctgatagattcccatgtcaaaaatgcaacaggagt

SEQ ID NO: 791011 - DNA, 551 bp, Homo sapiens
aagagaactttttaatttttgaaattgaaagctcagttatacaaatcaccagaaactggtaagtacagtttgcagtaatttctgtctctgatgaaatcttggtttattttttcttaaagaatacttaccatggaaaygtactttattaaccacaccctgatagattcccatgtcaaaaatgcaacaggagttgctggttgccaatgagacaataagataaacaaaaagtacctcataatttaggatctcattgcgctgttactgaactaggaataaacagatatgtttctcagaacaactgtctatttttatgcctctagagatgacatgggttaactttcttgtgtggcttataaactgaaaaaaatctaataatgcagtattgtttaggcacccatagagactgctctgggaagaaagacacatataagttctaggaggtttgtcttaaaatattacgaatattattttacatttgaaccgagtatttttgaaagtgcactttattatacaagtataatagttacccttccatacgagctcaataaaat

SEQ ID NO: 791012 - DNA, 551 bp, Homo sapiens
aagagaactttttaatttttgaaattgaaagctcagttatacaaatcaccagaaactggtaagtacagtttgcagtaatttctgtctctgatgaaatcttggtttattttttcttaaagaatacttaccatggaaatgtactttattaaccacaccctgatagattcccatgtcaaaaatgcaacaggagttgctggttgccaatgagacaataagataaacaaaaagtacctcataatttaggatctcattgcgctgttactgaactaggaataaacagatatgtttctcagaacaactgtctatttttatgcctctagagatgacatgggttaactttcttgtgtggcttataaactgaaaaaaatctaataatgcagtattgtttaggcacccataragactgctctgggaagaaagacacatataagttctaggaggtttgtcttaaaatattacgaatattattttacatttgaaccgagtatttttgaaagtgcactttattatacaagtataatagttacccttccatacgagctcaataaaat

SEQ ID NO: 791013 - DNA, 608 bp, Homo sapiens
ctccccttagcaatttggtattgtccaaacatttaggtttctgaacatgcctgaggcttattttatgctccaaatttgaggcttgagacttgaaccctgccaatgttaaagtctccacttgcaatatgaagttgaataattgcattcctcctckgctccctacaaagaatcccaagatgcctctaaaaggttcctagagcctcagatataattaatagcctagaacttcagagagcagaagtctgaaaggtctctccctgcccacttcttccgtatctcgttcagtatgcaccgctgaaaccttctggactaggcctggtcctgagacagcaccacctctttcctggagggtgagaaatgtgccaaaggtttaacctgctatccactggcccaggcaacaggatctcagactttttgaaaattgtgaggcccctgaggagctgattcagcataagatatcctggttaactgaaaatacaatataacaaactttctgtcataaaataattataacacagagtagttatcctgcccacccaccccaaaaaatgttatggtacaaaaggatccgctactgtgtgcctttctctagctagctcattttattc

SEQ ID NO: 791014 - DNA, 549 bp, Homo sapiens; identical to SEQ ID NO: 746689

SEQ ID NO: 791015 - DNA, 593 bp, Homo sapiens
aagccaggtgcagtggctcacgcctgtaatcccagcactctgggaggccgaggcgggcggatcacttgaggtcaggagttcgagaccagcctgtccaacatggtgaaaccccatcactactaaaaatacaaaaattagctgggcttggtggtgcatgcctgtagtcccagctactcgggaggctgaggcaggagaatcgcttgaacctgggaggtggtggttgtagtgagcagagatcgcgccactgcactccagcctgggtgacagagcgagactgtctcccaaaaaaaaaaaaaaaaaaaagtgaacctcaccatcagcagtctggtctgtgacaggcacatcactactactcgagcatccctgmcaaacacacagaacctaaagctaattaggaagaagcaacagatggacccaagttctaaatattctaaaaaattctaaaaaataagtgaccttattttctaaaaactaaggatattctaaaaaaattagggatattctaaaaaataagtgacctgactctggaagagatacgtgcacacgtatgcccattgcagcatcattcacaatagcaaacaggtaaagcaacc

SEQ ID NO: 791016 - DNA, 615 bp, Homo sapiens
aaagaaagaaacaaagtagaagctattcctcaggcccagagtttttacacacacagggaccccagagcttcccccagcagagccgtgggagggctgcacggagatcacagggccagagccaccagagcgcaccttcctctggggctttgtgcccgcacactggtcccaaccctggctctcaccctgcgccagtcactgggtctccacagtccaggggcagcaggcccagtgccacagaaacagaaacacgcctgacaagcgagccccagctcctggctttctcggcgggggccgcaggcagctccaggcctccaagcccaggtcagcccgggccacggaatctctcgctccacagaacttgagctgatgcccgcgtcccatctgccagtgtgacrtggccaggcaggtgtgggggcaccgcgaggcagacggaacagcacttgtttattgtttaccagagaggactcttctaagaacccctgtcctggattgataaactaggctgtaaggctggacgggaaaggtcacgatgtctgcttctcctggtaaacaggcctgggtcattggcatgaaggaaccagcagatctgtgccaggagtccagaacaaataacaa

SEQ ID NO: 791017 - DNA, 536 bp, Homo sapiens
ttgtccactagcagataatcatttgccccaacccaccatgttcagaaatctctttctgatgaaatctcaaagcagcttggtagagccaggcatttgtgaacttagattttttttttaaattgtggtaaaatatacataatgtaaaatttaccatcttaatcatttttattatttatttatttatttatttatttatttatttattgaaacggactctccttctgttgcccaggctggaatgcagtgacacggtcttggctcactgcaacctctgcctcccrggttcaagcgattctcctgcctcagcctcccgaatagctgggattacaggtgtgcgccaccacgcccagctaattttttttgtatttttagaggagacgggggtttcactgtgttggccaggctggtctcaaactcctgacctcaagtgatctgcttgccttggcctcccaaagtgctgggattacaggcgtgagccactgcatccggccattttagctattttttaagtgtgcagtacagcagcaaattatatt

SEQ ID NO: 791018 - DNA, 536 bp, Homo sapiens
ttgtccactagcagataatcatttgccccaacccaccatgttcagaaatctctttctgatgaaatctcaaagcagcttggtagagccaggcatttgtgaacttagattttttttttaaattgtggtaaaatatacataatgtaaaatttaccatcttaatcatttttattatttatttatttatttatttatttatttatttattgaaacggactctccttctgttgcccaggctggaatgcagtgacacggtcttggctcactgcaacctctgcctcccgggttcaagcgattctcctgcctcagcctcccgaatagctgggattacaggtgtgcgccaccaygcccagctaattttttttgtatttttagaggagacgggggtttcactgtgttggccaggctggtctcaaactcctgacctcaagtgatctgcttgccttggcctcccaaagtgctgggattacaggcgtgagccactgcatccggccattttagctattttttaagtgtgcagtacagcagcaaattatatt

SEQ ID NO: 791019 - DNA, 664 bp, Homo sapiens
gtttggaaaggatttcttgttaagtgcgagttgattgtgaaaccctagtgcaagggtgttcagccccggctgtatgctggagtctcctgggggatgctaaaatccctgatgccaggccccaccccagaccagttagtgcaactctgtgggtggctctgggcagccatttcttagcagctccccaggagtggttcccgcgtgcagcccggtktgagcaccgcctcccgagggttcctgaggccacccgtgtggggccccaggttggaagcctctgggcctgaggggtgctggccagcctgcccagcgctaagcagtgtagaatggaaccaccagttactctgcttgtcggggcgtgtcgggagttgcttgggctgccccagcggatgcaccggcgctgacattcgggcaatgtcttgtgcattccaggcaatgtgccttagctgccttgagagatgtcaaaagctacctggcgaaagaagggggacaaattgcggtaagtccaggcaatgtagccggctcggtgtccagtcccacccatgagggtgtcctcaccggcctggggtgtaccgagacctgtgcctctggccctgagggtggaggaaagcaggtggccagggcagcccaatggctcaggaaggaggatgtggggtggactcagggaccc

SEQ ID NO: 791020 - DNA, 664 bp, Homo sapiens
gtttggaaaggatttcttgttaagtgcgagttgattgtgaaaccctagtgcaagggtgttcagccccggctgtatgctggagtctcctgggggatgctaaaatccctgatgccaggccccaccccagaccagttagtgcaactctgtgggtggctctgggcagccatttcttagcagctccccaggagtggttcccgcgtgcagcccggttygagcaccgcctcccgagggttcctgaggccacccgtgtggggccccaggttggaagcctctgggcctgaggggtgctggccagcctgcccagcgctaagcagtgtagaatggaaccaccagttactctgcttgtcggggcgtgtcgggagttgcttgggctgccccagcggatgcaccggcgctgacattcgggcaatgtcttgtgcattccaggcaatgtgccttagctgccttgagagatgtcaaaagctacctggcgaaagaagggggacaaattgcggtaagtccaggcaatgtagccggctcggtgtccagtcccacccatgagggtgtcctcaccggcctggggtgtaccgagacctgtgcctctggccctgagggtggaggaaagcaggtggccagggcagcccaatggctcaggaaggaggatgtggggtggactcagggaccc

SEQ ID NO: 791021 - DNA, 664 bp, Homo sapiens
gtttggaaaggatttcttgttaagtgcgagttgattgtgaaaccctagtgcaagggtgttcagccccggctgtatgctggagtctcctgggggatgctaaaatccctgatgccaggccccaccccagaccagttagtgcaactctgtgggtggctctgggcagccatttcttagcagctccccaggagtggttcccgcgtgcagcccggtttgagcaccgcctcccgagggttcctgaggccacccgtgtggggccccaggttggaagcctctgggcctgaggggtgctggccagcctgcccagcgctaagcagtgtagaatggaaccaccagttactctgcttgtcggggcgygtcgggagttgcttgggctgccccagcggatgcaccggcgctgacattcgggcaatgtcttgtgcattccaggcaatgtgccttagctgccttgagagatgtcaaaagctacctggcgaaagaagggggacaaattgcggtaagtccaggcaatgtagccggctcggtgtccagtcccacccatgagggtgtcctcaccggcctggggtgtaccgagacctgtgcctctggccctgagggtggaggaaagcaggtggccagggcagcccaatggctcaggaaggaggatgtggggtggactcagggaccc

SEQ ID NO: 791022 - DNA, 664 bp, Homo sapiens
gtttggaaaggatttcttgttaagtgcgagttgattgtgaaaccctagtgcaagggtgttcagccccggctgtatgctggagtctcctgggggatgctaaaatccctgatgccaggccccaccccagaccagttagtgcaactctgtgggtggctctgggcagccatttcttagcagctccccaggagtggttcccgcgtgcagcccggtttgagcaccgcctcccgagggttcctgaggccacccgtgtggggccccaggttggaagcctctgggcctgaggggtgctggccagcctgcccagcgctaagcagtgtagaatggaaccaccagttactctgcttgtcggggcgtgtcgggagttgcttgggctgccccagcggatgcaccrgcgctgacattcgggcaatgtcttgtgcattccaggcaatgtgccttagctgccttgagagatgtcaaaagctacctggcgaaagaagggggacaaattgcggtaagtccaggcaatgtagccggctcggtgtccagtcccacccatgagggtgtcctcaccggcctggggtgtaccgagacctgtgcctctggccctgagggtggaggaaagcaggtggccagggcagcccaatggctcaggaaggaggatgtggggtggactcagggaccc

SEQ ID NO: 791023 - DNA, 557 bp, Homo sapiens
gcccagttgctctgccttatgagattttcctgcttggcttatgaggaccatcttggattttcattacctagaagaatttagtattctctctaaacttggatatctttctgtatattctccctgagcttttaataaaagattattattgaaagtgagaaaagcccactctccagagggctcatgtatcctaatgaagcatgtgattctgaacaagttcactgcctkcgacaaaacagtgctcccctcaatctaatgactcaccttaatcattttttgtttggaacgttcttaagaaagtataattagacaacatccacaactttccacaggcccatatatcccttcaataaaattgatcaagggaagaagaatgactaccctctctggaagattagtagtacgtaatatgtgcaattcacaatgaattcaaggggctgagccgctcctgcagaaagccatctctgatcccaccctctttgcccctttccgctgccactgtcttcacacaaatgtggtttctccctttggaactctcagagcatggctcagtgcctctc

SEQ ID NO: 791024 - DNA, 557 bp, Homo sapiens
gcccagttgctctgccttatgagattttcctgcttggcttatgaggaccatcttggattttcattacctagaagaatttagtattctctctaaacttggatatctttctgtatattctccctgagcttttaataaaagattattattgaaagtgagaaaagcccactctccagagggctcatgtatcctaatgaagcatgtgattctgaacaagttcactgcctgygacaaaacagtgctcccctcaatctaatgactcaccttaatcattttttgtttggaacgttcttaagaaagtataattagacaacatccacaactttccacaggcccatatatcccttcaataaaattgatcaagggaagaagaatgactaccctctctggaagattagtagtacgtaatatgtgcaattcacaatgaattcaaggggctgagccgctcctgcagaaagccatctctgatcccaccctctttgcccctttccgctgccactgtcttcacacaaatgtggtttctccctttggaactctcagagcatggctcagtgcctctc

SEQ ID NO: 791025 - DNA, 557 bp, Homo sapiens
gcccagttgctctgccttatgagattttcctgcttggcttatgaggaccatcttggattttcattacctagaagaatttagtattctctctaaacttggatatctttctgtatattctccctgagcttttaataaaagattattattgaaagtgagaaaagcccactctccagagggctcatgtatcctaatgaagcatgtgattctgaacaagttcactgcctgcgacaaaacagtgctcccctcaatctaatgactcaccttaatcatttttkgtttggaacgttcttaagaaagtataattagacaacatccacaactttccacaggcccatatatcccttcaataaaattgatcaagggaagaagaatgactaccctctctggaagattagtagtacgtaatatgtgcaattcacaatgaattcaaggggctgagccgctcctgcagaaagccatctctgatcccaccctctttgcccctttccgctgccactgtcttcacacaaatgtggtttctccctttggaactctcagagcatggctcagtgcctctc

SEQ ID NO: 791026 - DNA, 603 bp, Homo sapiens
atcaactgctgtaactcaaggccaccctttttccaagcattttctgtgggttagtgctttgatccagaatttgtgtttagctgtcctaaagagaggtttacgtacctcatcctgcaacagagtcttactgtactccaggtggtgcctctccaaaatagaagaaccatgaagtcttgctaatggagacgtggatctagaaggaaaacaacatgccatgattctagctgtttaaaaattacacataggttcatacaattcaggatttttcttaatgtctctcttctccctcctcactcaattatctgtgaagtggtcaaaaataacatattggaaaagattttctagatttagaagatgagaatatgctcttttggaaaaaaaaaaaaccttaatttgttgaatgcataaatgatttaattgtttaaactaaggagttcagctcccttgtatctaaattctttaagttccctggggcttatggcggtggaytatgacttataaaacgtatagcaaacatgtggaggcccataggttatctgcatagaaccaagatgaaaagcactataaggtaacatttctctcctcccccaagacagtgagata

SEQ ID NO: 791027 - DNA, 608 bp, Homo sapiens
ccttaagaaagggactgtctcttgaacagagaaaagtaaccaaggctaaaaacaacagggtgtgggaaaagggaatgaaagggtggcctgatgggatagtaggccatacaatgtcttactctgaggccagcctgttctcaggatgggctgtgtgctggctcaggctgggagtgggggtgggccaaagtgcaggggcttagrggaaggagagaaattgaatcaaagtttggttaacaagcattttgttcaattgctcagtggggacaagcagttcagctcatcatttatcaggtaaggaatgagaatttgttcggtctgtatctaattttgccataggttaaacacagggcatctgtgcatcttatctaagtcatatgagaaagagtcgttctgatgcagagcagatgagtcccaaaattggggcttagcaggggagggttcttggctgcacccaggaaagaattcaagggtaagctggtggttttagacagcaacttttattgacacagcaggttccagcattggcagcagcagcagaggtaccaatggcagtgtgcccagagtagcagctcaaaggcgagtctgcagtcatatttatacccactttt

SEQ ID NO: 791028 - DNA, 566 bp, Homo sapiens
cctacactgttcaacaaaagttctgacaataaaatttgttatttaaaaagttctatttatgaatacaagtatttgagtgctgttacttttatacagcctaagtgaggaggagtacaaattccatcttctaatcaccactgttccgtgaatctattcagtcttttatattttctgtgggtgtttaagtatttctatttcctaccaccaattgtcactttcagtactaggacarctagccaaagagattttagtttcggataatttgttaatcaaggcatcatttagaaaaattacttactgtttatttcgaattgcctgactacataataatcatgacatgtatccttaaacacatgacctacttcactgtacattttacttgatcatcccagcacactgtctgcatggtcaacttggtgttcataaactgtgaaatcatgtgatatggtcaactcctacttggagcttgcttataccttatatagagagaggggctgtggggcatcactggtgagtgtgggaggcctgaaaggaagtcctatatctccctctcctttggacgcaaa

SEQ ID NO: 791029 - DNA, 650 bp, Homo sapiens
tcataatttgccagcctctgctttatataatgcctgacaacatgtttgtgagctttatctactggtgcactggggcgggctcacaccagcttatgagaactgatctcattgtgcacatatcatcccaactattcatgccgtgatgtattgttggtaacttgaaatagtccatggtggagtatttacgccaaggaaattgkcaaatgtcacaaattatgtgcctcccaccacgatcatttgccttagaatgtgacagggttggatctcaatggcaattaacttgatatctccaagcctctgtttcctcatctgcattgaggatatggaaacatccagagatacttcatatatgaactgcttagcaagatggctgttacataatatcctattctgatacaatgatggtcttctaaaatattccagatattggcagatatcgagagctcatctcagcactttttatcttttcaatttagatgtttgatgttcctattgactttgtaaatgtctcttgcatgtgttccttgctctccaatgacattgagacttagacccgaccctcaacatttcttacctaaaactatcctgatttcctttgatcctccattccttcagttcatcctccacaatgatctccaggattatgtttt

SEQ ID NO: 791030 - DNA, 650 bp, Homo sapiens
tcataatttgccagcctctgctttatataatgcctgacaacatgtttgtgagctttatctactggtgcactggggcgggctcacaccagcttatgagaactgatctcattgtgcacatatcatcccaactattcatgccgtgatgtattgttggtaacttgaaatagtccatggtggagtatttacgccaaggaaattgtcaaatgtcacaaattatgtgcctcccaccacgaycatttgccttagaatgtgacagggttggatctcaatggcaattaacttgatatctccaagcctctgtttcctcatctgcattgaggatatggaaacatccagagatacttcatatatgaactgcttagcaagatggctgttacataatatcctattctgatacaatgatggtcttctaaaatattccagatattggcagatatcgagagctcatctcagcactttttatcttttcaatttagatgtttgatgttcctattgactttgtaaatgtctcttgcatgtgttccttgctctccaatgacattgagacttagacccgaccctcaacatttcttacctaaaactatcctgatttcctttgatcctccattccttcagttcatcctccacaatgatctccaggattatgtttt

SEQ ID NO: 791031 - DNA, 650 bp, Homo sapiens
tcataatttgccagcctctgctttatataatgcctgacaacatgtttgtgagctttatctactggtgcactggggcgggctcacaccagcttatgagaactgatctcattgtgcacatatcatcccaactattcatgccgtgatgtattgttggtaacttgaaatagtccatggtggagtatttacgccaaggaaattgtcaaatgtcacaaattatgtgcctcccaccacgatcatttgccttagaatgtgacagggttggatctcartggcaattaacttgatatctccaagcctctgtttcctcatctgcattgaggatatggaaacatccagagatacttcatatatgaactgcttagcaagatggctgttacataatatcctattctgatacaatgatggtcttctaaaatattccagatattggcagatatcgagagctcatctcagcactttttatcttttcaatttagatgtttgatgttcctattgactttgtaaatgtctcttgcatgtgttccttgctctccaatgacattgagacttagacccgaccctcaacatttcttacctaaaactatcctgatttcctttgatcctccattccttcagttcatcctccacaatgatctccaggattatgtttt

SEQ ID NO: 791032 - DNA, 625 bp, Homo sapiens
tatgtacacacatagatgagtagaccaatgcagctgtatgatatagatatagaaatagatccatatcataatttgggtcacatttttaaatggggtaaagcagcaagtgaaatgtcattaaaggagcttattttattaaattattttgtctcatgaatttaacacacagttttgcattttgtgattgaactagtctttctcttccttttccttcccttcaccttccttaataccactgaacattaagcaagactgtagtcccaccacactaggcctgagacattcccactgtgctgagagacccataatttgagaacaggcctcctgggaagagaacggttcgcgttaccatttttttttycccccagcatgcttccctcacatatcctggcctgcaatgcagaggccagggggaaacactggggagagggctcccaggacctagcagtgtgattatcacagctggtgctgggtcgctgtttccacagccacattccggagctgtgaaaggtctgcccagacgtaaatcccagcccctctctgtcagtgctaacagatggcaacctcatggcgagacttgttttatggcacagattttatactcagttggagcagccaaccttgt

SEQ ID NO: 791033 - DNA, 591 bp, Homo sapiens
agaaaacacctcatgtttttcctgagatcctgtttactctttgcaaacacaattagagcaagcaagagatctgttttccaagtttgaggtagcaaattccaggaggcacagagatggaggtttgtcaacatttgactgtaacagctgtcaatggtaacagcaagcgagagatacaaaatcataaaacgctgctaaacagtgggggaaaaaaaaaatcaaacctcagctgtctagagaccaaaccttgtaagtgctagagtaaggatatatgcttktctcatacctgtctgctaaatttactgtttcctaataatcttactaaaggatgagcttgaatgttcagtacaaaaacaagagtttgacacattcatcagacttctcaaatttcaacttaagtgggaaatagagacttcatcgtttctaagttttggagctccttttcatttgttctctagagaaggaaggcaggaagaaaaaataggaaagcgaatttgagaaagtttagaagtagaatcccatgcagaaggctcctccagtattaggcattccgtttactttctgttctgtgccaggatcccagaagctaattta

SEQ ID NO: 791034 - DNA, 591 bp, Homo sapiens
agaaaacacctcatgtttttcctgagatcctgtttactctttgcaaacacaattagagcaagcaagagatctgttttccaagtttgaggtagcaaattccaggaggcacagagatggaggtttgtcaacatttgactgtaacagctgtcaatggtaacagcaagcgagagatacaaaatcataaaacgctgctaaacagtgggggaaaaaaaaaatcaaacctcagctgtctagagaccaaaccttgtaagtgctagagtaaggatatatgcttgtctcatacctgtctgctaaatttactgtttcctaataatcttackaaaggatgagcttgaatgttcagtacaaaaacaagagtttgacacattcatcagacttctcaaatttcaacttaagtgggaaatagagacttcatcgtttctaagttttggagctccttttcatttgttctctagagaaggaaggcaggaagaaaaaataggaaagcgaatttgagaaagtttagaagtagaatcccatgcagaaggctcctccagtattaggcattccgtttactttctgttctgtgccaggatcccagaagctaattta

SEQ ID NO: 791035 - DNA, 591 bp, Homo sapiens
agaaaacacctcatgtttttcctgagatcctgtttactctttgcaaacacaattagagcaagcaagagatctgttttccaagtttgaggtagcaaattccaggaggcacagagatggaggtttgtcaacatttgactgtaacagctgtcaatggtaacagcaagcgagagatacaaaatcataaaacgctgctaaacagtgggggaaaaaaaaaatcaaacctcagctgtctagagaccaaaccttgtaagtgctagagtaaggatatatgcttgtctcatacctgtctgctaaatttactgtttcctaataatcttactaaaggatgagcttgaatgktcagtacaaaaacaagagtttgacacattcatcagacttctcaaatttcaacttaagtgggaaatagagacttcatcgtttctaagttttggagctccttttcatttgttctctagagaaggaaggcaggaagaaaaaataggaaagcgaatttgagaaagtttagaagtagaatcccatgcagaaggctcctccagtattaggcattccgtttactttctgttctgtgccaggatcccagaagctaattta

SEQ ID NO: 791036 - DNA, 577 bp, Homo sapiens
tgaacaatagtttgtgttcaaataagtaactttttctaccaaatgtgtgagcaaagaaataacagcaacttctttactatctattccaggaaaaaaaaaaggatagaacacttcctaaatcattttataaagctaacattacattgataccaaaaccggaaaaaaaaagttttcaaaggaaaattatagattctctctcatgaatataagtgcaaaaagtctttttaaaatatgagcaaatagcattcagcaatatttaagaattatacaccatgttcmagtgggatttacccaagcatggctcaacatgtaagaatctatgtaattcatgatattaacaggctaaagaagaaaaatataatcatatcaataggtgtggaagaaacaatggacacaattcaacatccattcataatttaaaacacttagaaaaatgagagcaaaggaaaaggtgttcaacttgataaggagcgtctacaaaaaacctaaagctaatatacttaatggagaaaaactgaatgctttcactgtaaaataaaaaacaaggcaagggtgtccgctcttattcaacacagtg

SEQ ID NO: 791037 - DNA, 581 bp, Homo sapiens
attcatgatattaacaggctaaagaagaaaaatataatcatatcaataggtgtggaagaaacwatggacacaattcaacatccattcataatttaaaacacttagaaaaatgagagcaaaggaaaaggtgttcaacttgataaggagcgtctacaaaaaacctaaagctaatatacttaatggagaaaaactgaatgctttcactgtaaaataaaaaacaaggcaagggtgtccgctcttattcaacacagtgatgaaagttctagccaaagcaagaaagcaagaaatggaaacaaaatgcaaacagattgaaaagaattattttagatcatctgtactagcaaatgacatgattgggtacacagacaatcccaaggaatctacaaaaacacatatgactaataagctcagaaagttcttaggatacaaaataaacatacagaaatcatttgtatttctacgtactaataatgagcaccctatgttcatggactggaagactcaacatagcaaagatgtcaattctcccaaaaattcatatataagttatatgcaattcctagtaagatcccagcaagatt

SEQ ID NO: 791038 - DNA, 581 bp, Homo sapiens
attcatgatattaacaggctaaagaagaaaaatataatcatatcaataggtgtggaagaaacaatggacacaattcaacatccattcataatttaaaacacttagaaaaatgagagcaaaggaaaaggtgttcaacttgataaggagcgtctacaaaaaacctaaagctaatatacttaatggagaaaaactgaatgctttcactgtaaaataaaaaacaaggcaagggtgtccgctcttattcaacacagtgatgaaagttctagccaaagcaagaaagcaagaaatggaaacaaaatgcaaacagattgaaaagaattattttagatcatctgtactagcaaatgacatgattgggtacacagacaatcccaaggaatctacaaaaacmcatatgactaataagctcagaaagttcttaggatacaaaataaacatacagaaatcatttgtatttctacgtactaataatgagcaccctatgttcatggactggaagactcaacatagcaaagatgtcaattctcccaaaaattcatatataagttatatgcaattcctagtaagatcccagcaagatt

SEQ ID NO: 791039 - DNA, 570 bp, Homo sapiens
agctgaatctcaagggacattatatggccaccaggaaaagctagtgctaattaagtttttctctggatttctcattactgacaaacagctcttgacttcacaaaaacaccagtggcttcacagaagtagcatccagtagttggtcaatgttatttctgtggttgctataaccacataaggcagctctttgacccctgaggatcttatccctggccaytcctgtttgagtcagggatatacacttttcccaaatttattgactttattaagtggacaaccacctaaatcaatatctctctctccttctccctctttcccctctccccttctccctttctttatcctctctctttttttcaaatttgagagtccatgattgggtattgatgagcaggatagcttgggggcaagaaacctatttattagcaatgacctaatgtatgagcatagaaagaaaagactgaggaaagccaaagatggagaacctgacagttccgagaaaatatgactgacctcaacctgtgaggctttcatgttctcaaatgacacagaaatgactaattttcttct

SEQ ID NO: 791040 - DNA, 672 bp, Homo sapiens
agttattaaaatggttggggagggagtctgaaattagatggatccctggttctagagccacaattttttttctattaatctgagaacagggtaaaataaatgggaatgtgttgcttaatggatactatgattgagtagactggttaaacttattaagagggttaagaaatgagactcttcacgtagaagaaaagagtatgagctttaaaatcagatgaaacatgctgtgcatcctggttgccccatgttgtagcttgggtgcttctagtaccctcttggagccttgggattctcctatataaaaggatttggttgtaatgattaaagatcacagatggaaagtccaatatatggctggcattcaatacgagaatctgggaaataaaaccacatgaaaggaataatgaatgatgaaaatcacagtgttcccctgccaggcctttggcttttaaataatgactcaatccgaaggaccgattttgtaaaatactagacaccagcaatargggccttttagtgatctacacgtcccaccgtgtgggtggtgagcatattatgtgttcacatagaactatgtgaatgtagacttaatcctagtgacaattgtgtgggagctataaataaaacaatgttttaaattaataacatttagtatataacttggaacagaat

SEQ ID NO: 791041 - DNA, 559 bp, Homo sapiens
tgtctatacttttccttttttacagagcacaaggtaggtgaaaaggaacagacagaagggatacaaactgtggaggaggagaatcaaaaccacctaagtgaatagtgttttgtgtccattggctctatcatgcctccttatycagactgccattggcctggctcactaggactttccctttcccttgaagggtaacaatggcttctagtcttttcccccttacatctaccctggacatggatactgacttaatcctattattttctaacctttctaaagaggtttctgtttatattgctcaccttcactccccaagctgtggttttaacccccatggttctcctaggcaagggagtatggtggcagaaacatggtcatccagtctgggttgaaaattgaatatactttgggccttaacaagcagcttaacttctctaagcttcagtttcatcattcatgaaatagggataataaggtatatttcacgggtaaggcttacatcaggtaatatatgtcaaatgtggagtgtcattccagataaaatatgtaatcaataaat

SEQ ID NO: 791042 - DNA, 559 bp, Homo sapiens
tgtctatacttttccttttttacagagcacaaggtaggtgaaaaggaacagacagaagggatacaaactgtggaggaggagaatcaaaaccacctaagtgaatagtgttttgtgtccattggctctatcatgcctccttatccagactgccattggcctggctcactaggactttccctttcccttgaagggtaacaatggcttctagtcttttcccccttacatctaccctggacatggatactgacttaatcctattattttctaacctttctaaagaggtttctgtttatattgctcaccttcactccccaagctgtggttttaacccccatggttctcctaggcaagggagyatggtggcagaaacatggtcatccagtctgggttgaaaattgaatatactttgggccttaacaagcagcttaacttctctaagcttcagtttcatcattcatgaaatagggataataaggtatatttcacgggtaaggcttacatcaggtaatatatgtcaaatgtggagtgtcattccagataaaatatgtaatcaataaat

SEQ ID NO: 791043 - DNA, 559 bp, Homo sapiens
agccacaacattcccttaagccaaagtctaatccagagcaaggccctaactcttcaattctctagagtctgagagaggggaggaagctgcagaagaaaagttgaaaggtaggcggggtcctgtggctcatgcctgtaatcccatcactttgggaggctaaggtgggtggatcgcttgaacccagtagttcaagacccrcctgggcaacatggtaaaaccctgtctctacacaaaatacaaaaattagccagatgtggtggtgcacccctatagtcccagtgactcaggaggctgagatgggaggatcgcttgagcccaggaggcagaggttgcagtgagctatgattgtgccactgcactccagcctgggtgacagagtgataccctgtctcaaaaaaacatgaaaagaaaagtgggaaggtagcagaggttgttggtttgtgaggtttaaggaaagaagccatgtccataacattaaagtgcaagataaagtactaagtgcaatgtagaagctgcagcaagctaatcaggaaatatagttaaagtcactaatgaaggt

SEQ ID NO: 791044 - DNA, 559 bp, Homo sapiens
agccacaacattcccttaagccaaagtctaatccagagcaaggccctaactcttcaattctctagagtctgagagaggggaggaagctgcagaagaaaagttgaaaggtaggcggggtcctgtggctcatgcctgtaatcccatcactttgggaggctaaggtgggtggatcgcttgaacccagtagttcaagacccacctgggcaacatggtaaaaccctgtctctacacaaaatacaaaaattagccagatgtggtggtgcacccctatagtcccagtgactcaggaggctgagatgggaggatcgcttgagcccaggargcagaggttgcagtgagctatgattgtgccactgcactccagcctgggtgacagagtgataccctgtctcaaaaaaacatgaaaagaaaagtgggaaggtagcagaggttgttggtttgtgaggtttaaggaaagaagccatgtccataacattaaagtgcaagataaagtactaagtgcaatgtagaagctgcagcaagctaatcaggaaatatagttaaagtcactaatgaaggt

SEQ ID NO: 791045 - DNA, 624 bp, Homo sapiens
tacctaatttcaagaatcattataaagctacagaaatagagagtattgtgttggaataaggacaaataggtcaaaggaagagaataaaatccagaaatagatccacatatacacagccgtttgtaaagcaccaaaacaacagggaaaggaaagtcttttcaatagataatgctgaaataactacttatgtagttaaaaaaaaaaaaatgtatggaagctaaaaagaaaaagaaaaaagttaacctgggtccctatatcaactgcacacaaaaactgttcaaaatggaccacagatataactactcaaatgaaaactaaaatttctagaaaaagtaagacaaaaactttggggaaggcgaaagtttcttaaagagaacacacacacaaaaaaattcaccaaaraagaaaagaaaatgttaaattgaatgtctttaaattttaaaatgtctgatcatcaagacactattaatctgataaaggatttgtatacataaagatttctcacaaaacactaatgaaacaacctaatttaaatgggaaaaagatctgaagagacactttacaaagaaagtagaaaaatggccaagaatacttgaaagagtgctcattagaaagggcaaacta

SEQ ID NO: 791046 - DNA, 539 bp, Homo sapiens
agttaaaccattccaaccatttatatccttttgagccatctcagtcatcccagtcatcatggaacagacatgggctattccttctgagccctgtttgaattccagacccataaagtagggagtgtaataaacgttgtttaatgccactaagaaataaaataagttcttctcctaccctagcaacataatttgttactatgttacaaaacagttgctcaccagtggcattgactttgatgcagtcacgtgtatgacctctccagagccgcagcaaggatggcagctgaaggcttatcctggcagagttttcttcagctgcttcaacccagaggaccacaagtgatctatgaaagctggtgtttctccaactgccagagggtgctctagcyattcaggatgtttgcctgatacccccaactaccagcctgtctgggatggtgatgagagctctggctctaatagtagcttaatctgggttcaaatcccagctctaccacctaaattagttgcatgattccaggcagcttagtgaacttggg

SEQ ID NO: 791047 - DNA, 627 bp, Homo sapiens
ttaacccattctccaagaattgaaaaaatgaccttgcaaatatgtgcaagactctggaatcttcctttggcagatgatgaatgagatgaatatttccaggtgcttgccttcagcaccagcacatgtacattctagtactcttggccttgatcctacactgaatctgagggtgcaaggactttagatagaggctcaggacagactggacctgtatgaacytctgaattgtagctagcctgggcagccagttacttggatccctctggggcttctggacaaacaactcttttatagcccaaggtagatggtcaggggcgaccagagagagcaatagattcgttgacttcaagcttaacatgagttagcagtatggtgaggcttccagcaaaatgtaagcactcaataaatgttagctattattactgtggtggtgttagatgttcttccttatactaactcaaaatctgtctccctataacttctaccccatggtccttgacaattcagtatatctaattcatcttctacataacagctcacgaggtatttaaagatagctatcttatcttgactctttttttgggttctcctctttgaagaaccaagaccaatattcttgcctgccag

SEQ ID NO: 791048 - DNA, 593 bp, Homo sapiens
  misc_feature 435: n = A,T,C or G
ccttattgtgctattccagaaagtgtattggcttcttttacacatgtccacttttatgtaaccatttcttcctttttagtagaaagcccatgttttcagatgctactctttattttccttgaccaaacaatggatcatcttaaacacaatagatagaaagactgcatgagagattcatatgtcacaggtgaataaaattcccttccttctggtttttattttggctggcaaaagcacctargatgataggttctacgtagaggtaagatagtgcagcacagtgatactttttattacccgctttttcatcctatgtaatagggatgcaaagcaaatactttatggaaacaccaacaactcaagctgacatatgccacagtgacttacataaaagcaactcgtgcacagatgaactgctcttgaatacagaagacngatttcagttctggacagtcagggtggggattgtatatgtgataataatgacacaaggcagacagaagctatttttaaaagaactgcctggaggccagagggttattcccaaggggagaaaaaaatcagcattactgttttcacttctaagtgtggag

SEQ ID NO: 791049 - DNA, 552 bp, Homo sapiens
atgatgttcagtatttgggttggagcccaaaccccacgattatgcagtatgtccatgtaaaaaaactgcacagtactcccgaatctattttttgagttttttttgtttgtttgtttttttaaatacagtgtcttgctctgttgctcaggctggagtgcagtggttcagtgtctgctgactgtagcctccacctcctggattcaagygattctcatgcctcagcttcccaagtagctgggattacaggcatgtgccatcacatccagctaatttttgtattttcagtagagacggggtttcaccgtattggccaagctggtcttgaactctggacctcaagcgatccaccctcctcagcctccatagtgcgaggattactggcatgagccaccacacccagtcacctctgaatctattttttaaatatgttgtacaatttaccagtgaggtgatctgggcctgaatttttcattgtgaaagttttaaaaattactgttcaatctttctttgtgttcagattttctatttcattttgagttagtagtttttatt

SEQ ID NO: 791050 - DNA, 471 bp, Homo sapiens
aaggcagtcatttccagtaagaattgctagaacaaacattaagcatttcacagtgaaaagggtcataggtatattttcatcctttgcatatagaagaaatagcaatctattattctcagtttttgacttaaaaggtattgttgcttccctttctttccctcccctactcaaktttttgcccatggatccagatacctacaagggcctaatacagggaaagtgcactgtgtatgagctatgaaggcacaatggaagcttgcctggcaatcagtgccagaacagacagctagtctgatgaattctgctacacatcacagggctactagttttttgttttttgttttttttttttttgtcatacattactgcaagttccctgaggaagtttactgatctgtagttttacgagaaatgcacgtcatggaggtggcgtgggggagcgggtgaacaaggaaactttagttgctataa

SEQ ID NO: 791051 - DNA, 499 bp, Homo sapiens
accaatgtttctcatgccttttagtctctggactcctttttaaacattcttaaacataaacctaatttttagcataattgtggaatataaagaggttttgtctatgtgggttatatatatttattgtaaaataaactagatagaatttwaaaatatttaattatttattaaataataataaatcaatatattaatataaatagcacatattgtatgaaaaacaaccagatattataaaacaaagatttaataggaatagtgtcacttttttgcatttttacaaatcttttaaatgtctgtctgaataatagatagctggattctcatatatgctttaatattctctatctgttgtaatattatataccatatagtttctggaaacattaattttctactaatgagagaatgagagagaagaagaaaaataacttcttagtactgttaggtaaataataatactcataacacttaattaatattattttgaccttgaaga

SEQ ID NO: 791052 - DNA, 568 bp, Homo sapiens
aatcctttgcttctgtctgagtagaaatctttggaattattttctgatgataagcagaaagtcctttactcatgagattccaaaaataatattaatatacccaatattttaacataacgtctacataaagaataagaaaattattaaatagacactatttcaaatctagcactttcctcgtgtgtgcctgtgagcaatttactaaactcttttaggtcccagtttcattccctataaaaaaggataaataatgytaactcattggcttactgggatgcttaaaagaaaaaaaatacatatatattatataaagaggtgtgcatagtgtctgctacataacatttcagtaaactgttgccatcattattatatttactgataagctaatggagggtagaaaagactgtttcctgtggttctctgaaatcataatacctggcttgtcgctgcccagagtgcttactccataaatacttaataatttaatatgatttgttagatttattgtctgtggaccatatagcagatttctagcataaaaaaagtgcaattctcttatttttattgt

SEQ ID NO: 791053 - DNA, 605 bp, Homo sapiens
ggtgcattaatgagctctggggccatgctggaagtagctgagcgtgggcaccgggcctggaggttggtggaacactggtgctgggccagttcttggtcccagagaagcacctcttccttaccaacatgtccttctcttcaatgaatcattacagggttcaggtcagcctctgtgattccagstgtggtggctcacacctgtaatcccagggcttgggaggccaatgcgaaaggatcacttgagggcaggagtttgaggccagcctgagtaacatagcaagaccccatctctacaaagtattttaaaaatagctgagcgtggtggtgcacacaagtatacagcccatgtgctattcctgaagagcaggagaaactgcctttaacagttatcagcctgatccagttcaccagctcggccaccaactagactatgtgaccttgggatgagtcattctctgtgccccagtgtccttccttctctggtcagttgcatatcctagacccaatcttttttttttttttttaaagttaaggtctttgatttggttgattgagagggagcaggagtagacaactcacaacagtggctaatctgaggaccttctg

SEQ ID NO: 791054 - DNA, 446 bp, Homo sapiens
caactggatgctcatgctcatgaaactagaccacacaagcagacaaaatgacaattccaagtggattgtaggtctaactgtggaaagtaaagtcataaagcctcagtagcatatgcaaagatattcaagacctcagtcttgaagatttacttctatattttcttctaagagtttgttttagctcttatgtgtagggctgtgacctattctgagttaatttgtgygtatgaaggaaggaaggggtccagcttcattattttgcatgtggctgtccacttgtcccagcatcatttgttggaaagactattctttctccattgaattggcttggcgggcttgttgaaaatctgttgactgtgaatgtgaaggctgagaacactttatcatgaactgttagcttcacctatgtaaagatatcttctctctgctctgcctcctgtcaaaat

SEQ ID NO: 791055 - DNA, 446 bp, Homo sapiens
caactggatgctcatgctcatgaaactagaccacacaagcagacaaaatgacaattccaagtggattgtaggtctaactgtggaaagtaaagtcataaagcctcagtagcatatgcaaagatattcaagacctcagtcttgaagatttacttctatattttcttctaagagtttgttttagctcttatgtgtagggctgtgacctattctgagttaatttgtgcgtatgaaggaaggaaggggtccagcttcattattttgcatgtggctgtccacttgtcccagcatcatktgttggaaagactattctttctccattgaattggcttggcgggcttgttgaaaatctgttgactgtgaatgtgaaggctgagaacactttatcatgaactgttagcttcacctatgtaaagatatcttctctctgctctgcctcctgtcaaaat

SEQ ID NO: 791056 - DNA, 609 bp, Homo sapiens
atcaatgattcctatggtttcagtcatcacaaatctactaactcactcatctacatttgcactccagaactcacttcaaacttaaatatccccttgccctctagatatctctgtccaaatatcctcaagtaccaacaagctgatcatctttcccacaaaccacttgaacctccagtattctctatcctgtacaccaataatcacccagctacttgagttaccttgacattttcgcctctactacatgctacttatctaaactcctcatyctgacagttcaacagcataagtatctctggaatccatctctctccttctatgctgactgccatgccctagttcagagcctcctcatctcttgctcgattattaccatagcttcctaatatagctgtcttcctctatcttgtttgatttaaatccatctttccattgccataagagtgatacattaaaaagtaaaatctgactacatcacttgcatgcttaaaatactttaagttctaggtccattacatagcccttccttcgcctctagcctcattccttattactccactttttgaactgtgtgctgtcatgtatcaaactctgtaattttgctgacat

SEQ ID NO: 791057 - DNA, 656 bp, Homo sapiens
attttgctgacataccagttttttctatcctcagtgaatttatttactaacctgtaatatgccatattattattgttttaccgggttaatgtctacacaattctctaaaagccatcacttcaatgaaaagccttcctggatccctcctattagggcaggtgmccctacctaagagtcccataaaacactctgagctttgcattaagtgttaagtgcaacccatctgcattaagtggattccccacccatatccttttcccttgagcttgcgagcactttgagtagtcagactgcaacttcacctacactcaggacatgatccaatacctgaaacagagtacgtgctagataaatagttgttaaaaaaataatgattttagtttctaaattgtgttgccttacatgagtgtcacaacaatcttgtgagttctgagggaaagaatatgctattacctctgtgactagaaaaaaataacatttaatattctactgaattactctgtgatttcatgattttccagacatctcatctttccactacattagccctgccaaaatccacacacctacctatagcaattggaattacagataatagagccttgactatttagatttggggctcctatatttggatactccatgacaatttgttc

SEQ ID NO: 791058 - DNA, 530 bp, Homo sapiens
ccataaactttatttaacaatatctttgcagcattctgattgatttcccaggagagatctagaagtggagctgctgagtccaagagcattcataatgctttttttatttttaatttttttagagacagggtttcactctgtcactgaggctggagtgccgtggcacaatcatagctcactgcagcagacttgcactcctgggctcaagtgatccacctgcctcaacctcccaagtagctgggactacaggtttgccccaccacacctggctaatcacaatgcttttgatacatgttaccaccaacctgataatgatccatttaagccacccatttttatgactgaagactccttagattycctaggcttcctcccagaggaacgtggtaggacagaattttaaactacgaagaacttcaagttcagtccttacatcctatttgaatgtgaaataacttcacctctctgtttttcaatgccttcatttgtcaaatgaagctacagtactttcctcaatgcaatgaaaaagc

SEQ ID NO: 791059 - DNA, 615 bp, Homo sapiens
gcccctcatatcctggtagcttagaaattctctaatatcttacagatttttgtgggttttttttccttgactttcataagtcatagtaaaagtgttagtctgctacaaactgtcccaccattgccagaagaggtccctacaataaatatctccagaaatttgccaaattaytttataacaaaatatttatgattatgttatattccactgaactggtgttctataactttcttaatgtcttcctatttattgcatttacaataatcttatttttaaaattttttgcagtgggcatagtaattaatgtgtttttttttcccctgaggaatttatttttttccaaatgaattcccaggagcaagaaatcctttaatgtttaaaaaaatatgaacaatgtattgctcattaaaggctttttttggataacctttcaaaaggattgtaccaatctataacgccacataaaatgtataattgctgcatttttattacaggctctccagcagcgaacaattttatatttaattttggatgatttaataattataaataatatatgtcatttcaatttaaattctctttgatcacttacaaagttaagaagtgtgttatatg

SEQ ID NO: 791060 - DNA, 615 bp, Homo sapiens
gcccctcatatcctggtagcttagaaattctctaatatcttacagatttttgtgggttttttttccttgactttcataagtcatagtaaaagtgttagtctgctacaaactgtcccaccattgccagaagaggtccctacaataaatatctccagaaatttgccaaattattttataacaaaatatttatgattatgttatattccactgaactggtgttctataactttcttaatgtcttcctatttattgcatttacaataatcttatttttaaaattttttgcagtgggcatagtaattwatgtgtttttttttcccctgaggaatttatttttttccaaatgaattcccaggagcaagaaatcctttaatgtttaaaaaaatatgaacaatgtattgctcattaaaggctttttttggataacctttcaaaaggattgtaccaatctataacgccacataaaatgtataattgctgcatttttattacaggctctccagcagcgaacaattttatatttaattttggatgatttaataattataaataatatatgtcatttcaatttaaattctctttgatcacttacaaagttaagaagtgtgttatatg

SEQ ID NO: 791061 - DNA, 625 bp, Homo sapiens
aggctgacaccttgattgcagccttgcagaggacccaggaaatctgtgctggaactcttgacccagtgaaactatgagaaaataaatgtgtgttcttttaagccacaaaatttgtggggtactgtaatacagaaatagataactaatacagttatgttctgtccatcccctgccttgatcagtcttagaatctagtcccatacacactgtcccaggtttgaccaattcatactggccacgtctggagctcctttcttctcttagcaggtccagcacttccccagctgtgatatattgtgacttgaccgtagttattggttttagcaattgacagctacattttgccagaggtgatgaggtcctcatagccagcctgmcagtgagcgatgccgtccaaaaatcccattttagagtcagcatcctaagaccacttctcatatcaactgtcatagttcaggtacacagagaaacagattccaagattctgagatgtgcgtgcacgaggtttttttggggtgcactcttgggacaaacatcttcaaggagtgagggtagcaggattgagctggggaagaaattgacctgcactgcagttgcaacaaaggtttcagctgctcctataagt

SEQ ID NO: 791062 - DNA, 648 bp, Homo sapiens
gccttccatctctttttaagctacacatgcttgtcattgcttggggtggtagagcactgagttgaaagcaagaaggcctgaagttgagtatataggaatgaatgaaacaggcatgatccctttccacactgaatgtggagatgtaagtggataacagggttgactccccagtattggactcccaggattgtttatcccacagttccattgacttcagtcatagggtgggatttcttattcctatgacaagaataataaatccatcctacttatttggtcagaaactaagacttactgcaaacagcataaagcattgttcctgatgatagttagggggaaacatgtgacctaatttagttcaatctgactgaaaggactttggttgcaaggaaagactctgtctcccagtaaatgtgaagaagccagcaggtaagatccatcctayctggctgtcatctttatttcaccagtgtcagcagcttcagggtgacactgatgccatggacagtggagtacagagaatgaaagaataggacatcttaaactgctgactcaaccagctctgaatcccatcctacctctggatttccactcatgggcgataataaaatgtcctattgtttaagatcagttgaattggctttttaa

SEQ ID NO: 791063 - DNA, 528 bp, Homo sapiens
acggtgctaagccattcatgagggatccacctccatgattcagtcatctctcactaggccccacctccaaccctgggatcacatttcaacatgagatttggagggagcaaatacccaagccatatcatgtgtgtgcacgattttaggcaaacttcattttaccaaaagttcttcagtttttaaatttgtaagtatattaatttcaggtaacacagaaakgtataaaatggagcataaatctctcctgcagtctcattccccaaaggcaatcactgtcaacagacttttcagaaacccacatgcacacttaaaaaaattgaattattcaatatgtactatttttgaccacagatatgttgtacattgcctttattttcacttaccaatatattgtagacatcttctcattgtctggttttaatgttaaaaaaagtgttttatcgttttagtgtttatgttctaaaaaattaatactgaggttaggtttacatgcttattgaccacttgtatttgttttgctcatttatc

SEQ ID NO: 791064 - DNA, 635 bp, Homo sapiens
gtggcacggttgagaaaggacaggctcaactctgtgttcttttcaggtgccagtcccctctactgctcgaacaccagggctcaggccctttggaatgtgacggagccagggagagggaagacaccatggaagcaagcaggcacccgggtaataaggaactcctggaaattgacctcccttgctccccctttccccctctctgccccctcctctcccatcacttcattttattcattcactcattcaacctatgtgcaccaagttgaggtgatcagctgggtctccagatgcaggagggggtgtggtcatggttggttgtggttgtggcacctgcagaaagtgaacactttatggtggtggttctgtatacttttgtgacmtatccattggtaagaccagaaagtcccagaaccacaagcctgttcatgtttaccaaaccacttgtctgactcctggttttctttactcttttggtaatactggaaattggaaattcaactcctctctttttatgtgacagaaaccaaatggcatggcccaccttccaaagtcctgggttcctataaagaaagagctctgcagaaagatggaagttgcaaagattcccccaataagctttctcacgtaagtccttt

SEQ ID NO: 791065 - DNA, 638 bp, Homo sapiens
agtgccatattcccttcctgaaggtagacagaggtctgcaggttgcccggcacatttgccatcagaaccgtggccgggggtggggcacatttaccatcagaaccagggagagaagtgagttgaacaattatggcttcagacaaggactgcccaggagaggaytccccatctagtggctgagggtccttctcctctggatgccaaaatttcctctaggatcctcttttcatgtccccagttcctgcccaaaactctctttaattatgttttgccattaattaggatacagtcaaatcttacctcgaggcttcttgctctttgaagtgtaaatctcagtgggttatcttttctcctcatttcaagctgtctggggaggtttcactgtgtgagataaaagcctatggcaactggctttccaagtagggttctgtttgaacaatgcagctatgacttgtcactttttccagcaaggcttttgttttggcttactctccatacagacactgctttggtgatgtggaataatgatccttataaaaataatgtctgagtgttttaaatgtatgatttatctatggactggagatgttacagtcagtgtcatgctggtacaggatgttcagcctgttgacacttct

SEQ ID NO: 791066 - DNA, 598 bp, Homo sapiens
ttggggactggttatgtacaagaatacaactttctagtgcattatgccacaagtgacctgtaaaataaagacccctggaaatagaaaacactgcaatttacccgtatgtttgtagacacttgatctaattactcttctctttaattacaaatatttttytttgaatttattctttctttatttagacacagacattttcaggtgttacatattttccaaactcatgacaggctatattactcattggcagaagaatgaaagaatcactttacctcttctgaacaaaagctataatatagctagttttcttcatccttcaccaaagcataaggaatattaataactgtaattcggtttgaaaatgttaaaatcccaactagctaaacagcataaaaactctttccagtggactcctaatggctttgagatgagcatgtgggaatgtcttagaatagcagatatttttcttatggtggcagttgctttctccctaccataaaaaaaaaaaaaatttagggatgacaacgtatcgtctactctcagagctgttccataatggaggaaataaaatgatattttaggatatggcaaacaggga

SEQ ID NO: 791067 - DNA, 607 bp, Homo sapiens
gatgaccaccttcacagtcacagaagtacggagcaggtcgatcatctgctcgtgggtcagagtggccacggctactttgcagatctccacgaggcggctcccttggcgaaggccagccttccaggcaaagccaaaaggttccacatctgcgacaattccttcaaaattcacatggaagccaagctggcccagcccgttcctcctcagggtcatttccacagtctcgcagcctctcgtcactatctaagggggaaggagactgttagagatgcccttcctgcccaagctgccatggggctctgccaaaggtgcacgtatgggcctccatgccagccctctcccttgggccctcgcagcccagcctgtctctctctgccttttcctcaaactgtccaagtgacaggacaaggacacatttargttcagagctgatcacaattaacatttgcatcaagtgcaaagaaaataacagaagcaaagcaatggtttcattcttcattctaagtcatatctgttcttgatacaggtgtcctgctttcttagatgtcactgacccagagcttgagagcttcagatgggctcagataattcccgtttttcctttatt

SEQ ID NO: 791068 - DNA, 629 bp, Homo sapiens
aggctgacaccttgattgcagccttgcagaggacccaggaaatctgtgctggaactcttgacccagtgaaactatgagaaaataaatgtgtgttcttttaagccacaaaatttgtggggtactgtaatacagaaatagataactaatacagttatgttctgtccatcccctgccttgatcagtcttagaatctagtcccatacacactgtcccaggtttgaccaattcatactggccacgtctggagctcctttcttctcttagcaggtccagcacttccccagctgtgatatattgtgacttgaccgtagttattggttttagcaattgacagctacattttgccagaggtgatgaggtcctcatagccagcctgmcagtgagcgatgccgtccaaaaatcccattttagagtcagcatcctaagaccacttctcatatcaactgtcatagttcaggtacacagagaaacagattccaagattctgagatgtgcgtgcacgaggtttttttggggtgcactcttgggacaaacatcttcaaggagtgagggtagcaggattgagctggggaagaaattgacctgcactgcagttgcaacaaaggtttcagctgctcctataagttgcc

SEQ ID NO: 791069 - DNA, 681 bp, Homo sapiens; identical to SEQ ID NO: 771245

SEQ ID NO: 791070 - DNA, 681 bp, Homo sapiens
taaggattcgccacactgttttccatagtggttgtactagtttacattcccatcagcagtgtagaaatgttcccttttcaccgcatccacaccaacatccattatttttttatttattgattatggccattcttgcaggagtaaggtgatatcatgttgtggttttgatttgcatttccctgatcattaatgatgttgaacattttttcatatgtttgttggccatttgtatatcttcttttgagaattgtctattcatgtccttagcccacttttgataggactgtttgtttttctcttgctcatttgtttgagctctttttagattctggatattagtcctttgtcagatgtatagattgtgaagattttctcccactctgtgggttgtctgtttactctgatgactgttccttttgctgtgcaaaagytcttcagtttaattaagtcctagctatttatctttgtttttgttgcatttgcttttgggttcttggtcatgaaatctttgcctaggccaatgtctagaagggtttgtccaatgttatcttagagaatttttataatttcaggctttagatttaagtccttgatccatcttgagttgatttttgtataaggtgagagatgaggatccagtttcattatcctgtatgtggctagccaattatcccagcacca

SEQ ID NO: 791071 - DNA, 513 bp, Homo sapiens
ccataaactttatttaacaatatctttgcagcattctgattgatttcccaggagagatctagaagtggagctgctgagtccaagagcattcataatgctttttttatttttaatttttttagagacagggtttcactctgtcactgaggctggagtgccgtggcacaatcatagctcactgcagcagacttgcactcctgggctcaagtgatccacctgcctcaacctcccaagtagctgggactacaggtttgccccaccacacctggctaatcacaatgcttttgatacatgttaccaccaacctgataatgatccatttaagccacccatttttatgactgaagactccttagattycctaggcttcctcccagaggaacgtggtaggacagaattttaaactacgaagaacttcaagttcagtccttacatcctatttgaatgtgaaataacttcacctctctgtttttcaatgccttcatttgtcaaatgaagctacagtactttcct

SEQ ID NO: 791072 - DNA, 595 bp, Homo sapiens
gtgcccctcactgaaatttctcatctgtttacctgtttcctctactggaaaatgaagcagggcccagtgctcttaggcaccgtaaccagcacccacaatactacaagcatcctcaaaggagcccatacaacttttagttactttaaaaattaggagaaataaatgaactccagggtcgaagattatactcctctttataccaaaccagtcataaagtacaatttttgatttttttttaacggcgcaaggggcccccaaaagtcatgacatggcaatgggctgacatctactcaggccccagcttggaggcagcaggatctggtggccccrcagcctgcccggcccaggtgaccacaccccaagatggcgtgacacccaccagcgtctgcacgatggcgtggttggtggcgttcatgtaggagttcagagggaaggcacactccccctcacagtagtaggcggcgtagccttcaggcgcgatgatccagtcctgaggaggagaagagagtgtgggaaaccatgcagaaggcctgagccacagcatcccaacccccatgctggccagaaaccaccacgccaggctcacgacccaagg

SEQ ID NO: 791073 - DNA, 580 bp, Homo sapiens
gaagaagcagagcccagtgaggagaaagaaacacacacacatcaaagttccctccatcttaggcagtgatgtgaacagcaatgaagcacagacggctggggggtaaatttcccgattcaaaagccagttcgagggtctaactgccttaaaactcatttctacccccagcaaaggccctactaagggaggtgccaatgccccattcctctctcatgtagtcttatcccataatactttctggaaccttctgcggacactggtttcttttatacacgtgtgttgtttaaatgctgacatctgcctggattccataagggaatcaaaccccatccacctcacacaaggccactgcaggcrccctgctcaaagagatctgcttatgaacaacctcaactcgtgaggccccaacacactcatccctctgcaggggcaagaggatgcgggacagggcctgggacaagcaaccatcaccaccaccagcaagaagaaatgagacagcagagagtcaaaacctgatgacctttcagaagaaaacactcccgaggtttctttgagtagtgaaaatgatacagggggtttt

SEQ ID NO: 791074 - DNA, 600 bp, Homo sapiens
aaacagaattatacatactgtttgtagccaacactttttttaaaaaacatgtaatctgagcataataagattttaaagcagaattacacagcgttttacataagttaacatatttatggcacttggcacagtgcccggcacacaggaggaaaatgctggaaactgtcatttcatcatccggatcaccttgggttggtgcccttatacctgtttcacagatgaagaaactgaggcacggatagggtaacttacattagtttcccagggctgcygtaacaaattgcggttgtggtttaaaacaacagaaacttgttctctcgcatttttggaggctagaagccccaaatcaaggtgcccgcaggccaggctcttccacaggctctagaggaggacgctttctggccgcttccagcttccagtggctgctggtcatccttggtgttccttggcttttggacatatccttccaacctctgtgtcctgtgtcacgtggccttcttccctctgtgtgtctgtgtcctttcttttaaggacaccagtcactggatttagcacttactcgatccagtatgaccctatactaactagttacatctgcaa

SEQ ID NO: 791075 - DNA, 507 bp, Homo sapiens
gaaccatattgtttcaagagctagaataaaactagagaatggctcatgtagagaatatcagggagaacatcaggactaggaaactgaaataaccttttgattgttttcagaagatatgaattcccagcaaggagccagagagggttatacggaagcagaagatgaatgtgatttctgaatgagattaaaacaagaaaggctggaataagaacaggcataagaaccctaggacaggaaggagagccgagatgcccagggcatggtgactgcaaacctgattcaggagtaagccttgattcactcagccctaagagatagcttataacaaatggtaactagaatggtgagagctgaaaaamtaaaaaaagaaggaaaaggcgaggcacagtggcacacgcctgtaatcccagcactttgggaggccaaggcaggcgtgtcgcttgagctcaggagttcaacaccagcccaggcaatgtggcaaaaccccatctctacaaaaaaaaataa

SEQ ID NO: 791076 - DNA, 620 bp, Homo sapiens
ttcctgagtttgtagcagcagtaacaggcagggtcatgtaagcagcacacaactgcaactgaggctcattaaatacctacaattttccagatataggtgtaggccccagcataaaaaggtgaatcaaatgtacttccttctctrtttacaactgtaagataatatgtagcatgccttaaagaagtgggtataaaatcctataggaataaatggatattgaagtactatgtgagaaaacccaaatgatcatcaactattaagtggaaaaacataaacatagtatatctgtgcaatggaatatcccacaatggacatattcagcaatgaaaaggaaccaactacttatatgtacaaagacatgaatgaacctcaaacacattatggtaagtaaaagaagcagacacaaaggaccacatattatatgattccatttatgtgacatattcagaacaggcaaatccataggggtagaaagtagattattgattgtctggggttaaggttggaaatagggattaattgtcagtacacatggaggattttaccggggtgatgagaatagtctaaaagtggtttatggtaatggtttatggtatctggtaaagttaccaaagctcatc

SEQ ID NO: 791077 - DNA, 585 bp, Homo sapiens
atctgccaattgttactggagaaaaaaaaaaaagcttaagtaagcctcatttctcagaataattcatctaaacttcttatctcttgaagatatatacaagctttttggttctagattatcttaaaaaatttagtagcactacaaataactcctttaagatgatttaaaaacatagtttatctccaatgtcctgattatgtcctttaattcactaaaatattcacatacttctttattctgtgtaaaaatggaataggaataggataaagaaatgagtgcaaaacattgtcttagatgttatatcaatgtaattattacaagagagctgattcaagagtytttaatgggtactgggatttattcaataaagtttattactcagtccaaaactcttacaaagataaaatgtcaagtttccatctcccctagaaggagtgatgatgacttcaatggcctaagtgagataaatctttcatttagcttacgttttggggactttcctgacccacaatttattttccctcgtgtccaactcacacatttataagaaaggaactcaggttgatgtatgtcagaaggactatt

SEQ ID NO: 791078 - DNA, 595 bp, Homo sapiens
catctaccacttatcctaagggtttatagggatcaaatggaataatatagaaataagttaagaaagtataatgtgatatataattatataataaagttgttatcgatgaagtggatattgatattttactgaggaataaagttgttattgatgactaaatctctcgcaaatgcaattcttcttccttgagcagatggccactggcagtgttagacttcatcattctttttactaccgcttcttgcagttgtccccctrgattccctctctccagtcttccaacacttcaagtccttccaagcttcacccagtggcatttttgatcgtgttattccctttcttaaaatacttctgaagattccctattgccaagtcgtactacttagcttagaattacagtaagagccaacatgaaagttccatcaactcagagtaaatgacatgcccaagattcaggaaccaatcaccagcaccaaacaaccctagcaaggctctcagctgtttctccagcctctgctcctccacttagacaagtgcagcttccggctgcctgaagctctggtggcttcttaacctggcaacacatcattctcaa

SEQ ID NO: 791079 - DNA, 421 bp, Homo sapiens
gttgagaggtggtgggacctttgggaagtatttgggtttggagggatccaccctcatgaagggattaatactatctcatggaagtgagttctcactctccagggactggattagtttccacaaaagtgggttgttataccataaaattatccctcatgttttgcctctttttcacacactcttatcttgtggtgccatcggctatcataatgcggcatgaggtttcyggccagatgcagctgcctgaccttgaactccccagccaccagaaccatgagctaagtaacctcttttatcattattatttttaaaatacattactcagcctcagaaaatggactaagacaatatgcatttgctcctggcaaaatatcttctcagtaagacctccctgggctaaactaaaattttaaccttctaa

SEQ ID NO: 791080 - DNA, 622 bp, Homo sapiens
gttgtcacacactgccttgcagaaaggcagatgtccactgagctggttaaaactcaaactgtccacggatggcagtgctgaaaggcacactaaaacatactcacctgagctcctgtatctatccatctgcatgccccgcctcccatcagggctttgagcagtgtcagcaactgaacaggcgagccatactcctgtcacacatcccgccagggggatcagggaatctcccatttcacagtgctataggataaggcaagaattgcatgtgcctctgtgctccatctgtttcatgaagatgagaaaacccagaccaccaacctatctcgaccaaaatccacatagagaagttgaaggaaaaatttctacttcttttaacaaaagtgaatgcttttagctastataaattcttggtgtcagatacagagaaatgttttaaaaagtagaatgggtagaaagaaaactcttataatgcttgaggcttaaaataaaatatctgaaatcattttactgaacaaatattactgtagtgcttactatgtgctgatgtgtgatgcaggcaattaatgaaaattaatgagtgtaaacctcataacaataagcagatcaggtactattaccatta

SEQ ID NO: 791081 - DNA, 614 bp, Homo sapiens
ctgtaagagaaaaccaaatctccaaaccagctgaatttccgtaatagaaaaccaaatctccacatcaaggatgaatccgaccttgggtggggaggaatctagacctaacacaggcaactaagaggaggtactgactgtgacgtaaagaccacattcctgaagcagcagctccagggatacccgagctatagagctggcatagcaacaacgtctttccagactatcagtgaaaaaagtagttgtcctcgaggatagcccagtttttatgaatgtggatcagatgggcctgggtttgaatcctagtgctattacttastgaccacatgatccctgtcaagtcgcttatgtgctatatgcctcagcttctcgcttttgtgctatatgcctcagctgataagatgggggtaataagcgttgcactgtgtcacagttactattgtgaggatcatattggatctatggcctgtgatgtaatcagcacgacacctggcatgtaataaatgctcagtaagtattgttcttgctgttaaactctgttgatctgggagcaagtagccccaggcataatattccccaactttgccctcctggctcacttaaatgtaaccagactg

SEQ ID NO: 791082 - DNA, 596 bp, Homo sapiens
gggcttaagaatctggaactgtgttgtccaaagtggtagccactagccacatgtggctgttgagcagttgaaatgtaacagttacacatgttaaaataatatgttggatatactagtttataaaaatatatattattcacattatatatgtttgtaattttttaaatatggttcatattttatgtttattggacagcactcatcttattactcatggggatggtgccctgggtttaatccctaaaaggtcctggattccaccaccagttcagtgggttctaggtccccaaatagttatctgccrtagagttaagtatatctggcaccagaatagtgtcttcttgtttacctcaggcatcatgcaatgtcgtaggcactgaggcaaacagaacagtggtcaaaataaaatatcggcctttgcagagctttcagaagaggtgcttttgtgacaagttactacaaagtggccatatgacaaaatgtgatcagaaaacttgctttggttatagcctggtagtgaagttgcaaaggaggagctacacctcacttactttcatgctgtttttagaccaggggctctggccctggagccagtg

SEQ ID NO: 791083 - DNA, 338 bp, Homo sapiens
ctctgtaaccagactcctctatctaactccgttttaaaataccgtatgtgggcaacatctgtgcctgagatggagatttggccagaatgttaaaaaaataaacatggcggttcagctggatactggcaaccagctaccrccccatggatggccgcagagaagattcatgtatataaaatagtatattaaagtaaacttacaaaagcaaagagcaatcattgcaaccataattttttcttcctctttgggattctaattttaaaagcattaaaggagacagctgctcatgctgtgatatgcgctaaacagcctgaaggatagaaaaaaatatatttgta

SEQ ID NO: 791084 - DNA, 589 bp, Homo sapiens
gctgttgcagcctagggcacggcactagggtttccctagaccctccccaccttgtggttttcctataccctccctactgtggtaaaatgtgcctgtatttaactgtcctccaattatcctaattcatgtgtgtctcctgggatctgttgctacaccatgatgaggtgtgtaattttgttagtagtattcttaagtcatttggtaataatctttcatcctgtgaagctacaacatggatttttttaaactcttgtttccaagkgcctaatacagtgttataggaaatgcttagtgactgcatacaccatgcacaacagagccaagtgtacttgagagacaactggtccgttgagaacaaaatgcatttggaggccatgaagttcaagttgagagcagcattcccatgcacacctctctctggggaatgcagccagtccctgcaaaccccattcccctctccaggttaaaaagttcctcttcaccctgatgttagtttgaaaagtttcggccataaccatatttagttatatttagggagaggggagtggtgggtcaaaggcttaaaaaaaaacccaagaatgtatatata

SEQ ID NO: 791085 - DNA, 562 bp, Homo sapiens
caatgtagtacagtacttcttcctggggaggtgctaagtagggggagtagggaagcagtttttcttccttgcctgacgtgggactagttctgagtctttttttatataacgttgttggaaaatacaattgccgtgtgtaatattgagaagaactgcctctctaccctcaagacagtgacactaagccatgargggcctcagggggctatgaagggcgacaccccgctcctttacatcaagtgatagaggaataaaaaagttcccctccacagtagtacaatgggcctctgtccttctctaggagactttaataaagtaactgaatcaaatgaaatttgatcagatgtatacagttcagccttcttgctttgccccttaacaatttatcgaggtgtttctacccatggtcctgttttattaaatgatatttgaagtgttccaccctctgagaaaatgtggtttatatccttggcatacatttacataatctcattaaggagatctctccagcttagttaaactatcccaataaaaaatcttatctttagtagaaaaagactgt

SEQ ID NO: 791086 - DNA, 562 bp, Homo sapiens
caatgtagtacagtacttcttcctggggaggtgctaagtagggggagtagggaagcagtttttcttccttgcctgacgtgggactagttctgagtctttttttatataacgttgttggaaaatacaattgccgtgtgtaatattgagaagaactgcctctctaccctcaagacagtgacactaagccatgaggggcctcagggggcyatgaagggcgacaccccgctcctttacatcaagtgatagaggaataaaaaagttcccctccacagtagtacaatgggcctctgtccttctctaggagactttaataaagtaactgaatcaaatgaaatttgatcagatgtatacagttcagccttcttgctttgccccttaacaatttatcgaggtgtttctacccatggtcctgttttattaaatgatatttgaagtgttccaccctctgagaaaatgtggtttatatccttggcatacatttacataatctcattaaggagatctctccagcttagttaaactatcccaataaaaaatcttatctttagtagaaaaagactgt

SEQ ID NO: 791087 - DNA, 602 bp, Homo sapiens
ggtttcagtaaatctctaggctaaatcccacaggttttgtccatttctgccagtgacatggtggcaggatccttcaccatcctagtcaccattatttgagtgcaccagaatctgccaagacccctgtattggtttcctgggtctgctttattagcacaaactgggtggcttaaaacaacagaaatgtattctctcacagttctggaggccagaagtctgaaatcaaggtgccagcaaggttggttcttctggaaagctctgagggagggtctgttccatgttctctcctagctcctggcaatctttgacattcctcagcttatagatgtgtccctctgatctctgcctctgtcactttatggccatcttctcmctgtgtgtgtctgtgtcttcacatggagttctccccgactgtgtcactctctcctcttataaggatattaatcagattagattaagggcccaccctactccagcatgacctgatcttaactacctacatctacaacaactctaccataagaaggaaatgaaagtaggccgggcgcagtggctaacgcctataatctcagcactttgggagactgaggtgagcagatcat

SEQ ID NO: 791088 - DNA, 612 bp, Homo sapiens
ttactgaagatgagtaattggaggctgtatctcataactgagcacatgaaatcataaacatgacaaatggggcatttttatagtgaaggtttgtgcagagatacccaaaacttctgctgagctataggcttagaattagattcaacacactctcggtctgaagaacagctrtgtcaagagtgcagctctggccggtcatggtgctcacgcctgcaatcccagcactttgggaggcaaggtgggtgaatcacctgaggtcaggagtttgagaccagcctggacaatatggtgaaacactgtctctactaaaaatacaaaaattagttggatgtggtagtgcatgccggtggtcctagctacttgggaggctgagtcaggagaatcgcttgaacctgggaggcggaggttgcagtgagccgagatcgtgccactgcactgcagcctgggcgacagaggaagactccatctcaaaaacagaaaaaaaaaaaaagtgcagctctctaattgggctcttttacttactatttatataataaaagccacgttcctaggctgtataatggggttaatcatagtaagtaccttgtaaagttacagtgataaccaaataag

SEQ ID NO: 791089 - DNA, 570 bp, Homo sapiens
tatgttctggcaatcacatttgctttcttgaagcaacatttgttgaacaacattcaattatgtcattttggctgtgaattaattgccacacactaatcgtgtcagagaaggctgttaaatattatttgcctttctgcctatattggaatagcccaagataggcctctgtaataattatacttcaaaatctcaatggcttataaaaacaaaagttatgtgattgatttattgattgatttacttgccacatcttagacagctcttctccagcttcagctgccatttytgagacaggtggcttctggatttttcggagagaattctagatgatcattgaagatgtttctaaaaagcaaggcaggcctaaaatctgtctgtatcgttttagccacatgttatttgtctgaatttagtcaagcagcctcactgcatggaaagctgctgaattaacccagctgtgcacttaggaagaacaagcagaatggagaactcagaatcttgtctccaccttgcaatctatatgaacaagtgatttggagttctgcatgaagaataacctcaaaaccaaat

SEQ ID NO: 791090 - DNA, 627 bp, Homo sapiens
tgtacattgcagcacttttcacaataggaaagacatggaattaacctagatgcccatcaatatggtttggataaagaaaatgtggtacatatacactgtgaaatattatgcagacataaaagtggtgaaattatgtcatttgcagcaacatggatatagctagagaccattatccaaagtgaattaacgcaggaatagaaaaccaaataccacatgttctcacttgtaagtaggagctaagcaatgtgtactggtggacataaagatggaaacagtagatactgtagattgctgggggkgaaggaagagaggcaatggttttttaaccactgggtaactattgagtactgtgcttagtacctgggtgatggcagcaattgtcagtatcatgcaatataaccaggtaacatacttgtacatgtctcctgtgaatctaaggtaaacattgaaattattttaaaaatctactacttcaccactatattaaaataaaataatttaaaataaaaaataggaacagagtaatagtaatagtaataggaacatgtaaatctgaattggaatggaaaatgatggactacatttttaacaaattaaaaatagaatatttttaaatgtgacaggatt

SEQ ID NO: 791091 - DNA, 642 bp, Homo sapiens
ggaccctttactataactggtgataggcttgaatttctcctgttctaccaactaatccattcttcattaaagtttaaagagcctgtttggcagttgaagtgctattgattttgaaaccatggcacatgcagaaattgtctcacttgtgttgtttcctgtatttgctttaaaaagttgggatacagaaagtaaagcactttaatttaaggagtagatatagctgagtcaacatttatycagggtactttgctctaagcccaggatgacagaaagaaaacacaaaattctaatcattaagctctcgagtacattccaatgaacagtgactaacttttaacaccgcagggtgaaatttcaggacttttaaagtacaaaaaaagaatcagcttcttgagtaaggaatgcaatgttttgaaagtgaatcctgagtcaattttcccaccaccatatgaaagacgtatgtgtggaaagggtggaaaggcacgaacccattccctaactcgaacgtgaagaagaatgatctttgatttcactctattctagctctatcctgagttagtctttctggttctctgagtacaacttttccagagagagaaagaaaactataaagcagatcctttagaatcattctatatccca

SEQ ID NO: 791092 - DNA, 526 bp, Homo sapiens
ctaggactgtgagaaaatattttctgttaaatcatccagtctagggtgtattttggcagctctagcaaaataaagtcctatattacacatttttaggcacttgctacttttagcagaaatatgaatatctataattagaatgcagttagtgatactttaatgtcaacaattaaggcrttaatatcactgtatattcctggtgcactacagcctacaaaacataacattcatttattaaccccaataacaaggtagctagtattgtccatttcattaatgagagaaaaatctcttacaagttacaaaatttatacagagctatatgtccatagagtactgttgataggcccagaatttgggtcctcttattctatgtccaaggctaaaacagaataaaaccattattttagaattgtctcacaataaaccatcaataaaaccttcccaaatggcaaattaacatcctacttgatgttggactgaagaagcagcacagtaagaatagttaacaggcttccatctgtgg

SEQ ID NO: 791093 - DNA, 423 bp, Homo sapiens
taacgcacctctgggatgaaatcccatccctggacctcggttgtttttattgttgttgttgtttgcacaaggacagggagcaagttacaaataattcctgtcttctaccagctaataatcctatcttggacttcctttctacgtctagactaaatccttccaattcttcattaactgcactcccaggagcttytccttttccaactgctgacttaaaattcacactcattgattggtgaccacagacttggatacctatccttgtcccacagctcaaccatttccgtggctcagcaccagcatacctccaactggtcctatttaccacctagacatttctctcctcctccttcctctgaggtcctttctgtggctctcaaacatctttcagcaagttctttcctcatgtagattcttaatcaa

SEQ ID NO: 791094 - DNA, 611 bp, Homo sapiens
atggtacatttcaatatccaccatcaatgtgttgtttttcataaaataccactgaagtcaccacaactcgttggaaaccccaaagtcccatttttcagacttttcatctgttaagcacctctctgagaaccctgtctaaatttggagtgctygtcaggtacaattctgtttgacttctggttgtgattcacacttcagttgagcttcctgtcattttaaaatgtcacccttgtgggtttttatataaataaatgtgggtgttcccattttataaattttataaacaggaacacctacattaatttatatagtggctttgatgttcaagaaatactgtatttaactctgagatgctcagggtttacagactgtttttgaacttcactcatcaataatctacatataaagaatcaaacactcctaaatcatccccctttgtccaagcctcctgaaggccatatggatgttgcctggtatcccctggaatgtgcatcatgggggcagggacttactgtcttggtttttgctttattgtcagtgttgagaacctaaggttcacaatcaaacacaaaacaggtggagaacaacccacctgttaccctagacagaaa

SEQ ID NO: 791095 - DNA, 489 bp, Homo sapiens
gttccgagggattctggaaggaaggagtggggactggggaaaagggccagatgaaatccaaactctcttaaggaatgtcacaggagggagcagcctatggccttgggagtgggtttcattgcagcaggaggaggaggttctaacaggcaacgcaaactagccccccaccccctccccactccatctccacgcacacacgcctcacttcaccakcttcaaggttttctgacctctgagagcacacaagaaattcaggacacagagaggaagggacctgcctggggtctcacaatcaagccggtagagggtccccgaggcacccccagcactcatgtatctatttgtgcgtatttttatatattttcttagttattgcctgcccaaggtacggaaggtttgaaagtctgatctgtgcacacacaagcatttacatgtatgtgttttctttttttacgaagatgtgaggatcctgtacacactgcactgtac

SEQ ID NO: 791096 - DNA, 614 bp, Homo sapiens
ccaactggagcctccacagccaggcctgatggtgggtggagccagttgatagtgcaagatagaggtaaatggtgtttcctttcctgctgcagttctgatggtctgtgacccaggctaccatgtaaatggaaaatggggcgacatagtgggttttcctcagactaacagtatgtagaatagagaccatccggcatttgttcaaggtaggcaggactggtgggagcagaagttactcaagtagcagcaaaggggtggcaaaatgatggcgacttgaaggtaggrtggcttagggaatggagccagggactcagtagttgtatccatcctacgaacacactgtggagcgcctactgtgtgctggaggccaggctggtgaagggcagcaggagggacccggagaaggggtggctcacatgcaacttggaaaatcagaaatagaacaagggccggagcacagatctgtgggcactggccacctgagccagcgtgggtcctgaaacccccagctgagacaggacatgtgtgccacccagagagcccttaggagggcctccccgtgtgaaatgaaaccagggggtgggaggttggggtagcttccgttctcatctcctcag

SEQ ID NO: 791097 - DNA, 528 bp, Homo sapiens
gggactctccaatcccagaggtctaaacatgagttctggtaaacctcgccactgagggctacagtgctctgtgtctccaagtaaatttaaaaggcagcctaggcgataaggacagcaaatcttaggtgagtcctagtactgaattagtaccagagaaagtggactgaaggggcatacaayatactgaggcaccagctggggcagccaagggagtgctggcatcacccctcccttaaatccaggctgcacagctcatggctccaaaagaaacctcttccttctgcttgagtagaggagaggggaaaatgaacagatctttgtcttatgttttggataccagatcagatcagccacagcaagataagttactggtcagagtcacgaggcctctgttccaggcccttgttcctggaaaacatttctagacatgccttgggccagaaaagaacacactgacttgaagggaaggacctggttctggcagtacttatcatctactaaatgaagaactctcccatactgaataaa

SEQ ID NO: 791098 - DNA, 527 bp, Homo sapiens
gagtcattatcccttgactctataaaaccaggcatctaacttttacctcacaattatttataaataacatcccattcaacgttaaagtaacataagtggtaggtctgttatattccctagggcagagggctctggagatgtggcagccccatcagcactgttcagattatcttgatagagatcaaaatcctgtgtataggcaggccacagaagagatcaaggagagctgtggaaacagttgctgtagagtctctaaaaatcttcatagtaaacttggagcaaaaattccttaaacttcccactctgcctccactgcaatgaaattgttgggcctagcctcacttctttatgattmtcagtttcagcccccacacaaccatccccataacgtcatgccactctggctcaatctcagcttgtagattcagactccagacatttggtccctactataggacttgtcataggagggaattaagaaggaatgagggccgggcatggtggctcatgcctgtaatcccagcact

SEQ ID NO: 791099 - DNA, 604 bp, Homo sapiens
gcatcctacaagataagacccactgacttggaattccagtcagacacaggcaacagggtagagcctgcctgagactggacagagcccctgggaggtggggcaggcagccacctatgctgcttgattgattcagctgttccagtctgcaggctttggagagtccaaatggtccagatkaggaaggttccccacagcacagcacagctgttttgccagatcatgtctagactgtttcttaaagtgggaccctgatccattcctactcactggggaggacctcccacctcggcactcccacaaccctgcctgtattctacaggtagagtgctgaactctccctgggacagagtgcccagagagaggcagactgccaccttggttttctggatgattcagctgttccagcctgcgggatttggagtgtctaaactgacatgggtagaggtggttcccaagcatgacatggatatttggttgaggcatggctagactgcttctataagcaagaccctgatccactcctccttgtgatgcgggtactcacagccagggcctctggtcacccctgcccgtgttctatgacagaattctaatttctccctgg

SEQ ID NO: 791100 - DNA, 628 bp, Homo sapiens
agggtgtaaagggttttgtcgggtcaaatagccccagggctcgggctgacatgagtttttcttttaactcgtgaaaaggtaattgctgttggttgtaatagatgtagtttatccaatttacatttttattaactgtcacctaccaaaatattgactcaaatcctgcagctatttgatttcaagcttttaattaatctggtattctctgtgggactccaattgcrtctaaatggatgtgagagtcaaaagacccataaggggcttctcttgtgttacgatgtcttatttttcctccctatggttgatgaaatgccagggtgaaagggatagccaattggactaatgtacaagtgccactccagttatttggcagagtgcccagtgaaggtctaccacaataccaccacacatctgctcagggatgaacaagggctgactgattagtaagctcttgaaaatgtttaagctcactgcatcctttcaggtctccaaggaatgctaagtttcctccctgtcatgagagacacaaagtgaacttatgttgggagacggaggttggatggcccttgggggctgacccgcagggtgccagactttgggatacagcagagagagcttggcatgactt

SEQ ID NO: 791101 - DNA, 594 bp, Homo sapiens
ggaagttgccttccccccctcagcccagtatagccaggaggcgagcatgggactaagcttggtgactggacagtctcattggactttgaatctggaataagcaatataagaatagaggaaacagacttcattcatgttattggcaacatcctgatcaaaccattcctgcttcctattccttcccaacccctccccaagaagtgcctttgcttatgtcgatttccatacctggttctctagcttttcccttgattctgtaagctccctatagcttacccctccaaccccataaattccyttctctcctaagttaatcagagatgctttctgttgcttgcaaccaacaatttctgataggaaacccagctcaaatgttccttcatctggttctgcacaaacatacttccctgtacattcccatagcaccctctacaaagtgcagatcacatattgttttttttttttttctgttccttccattagggtaaaaactcatattggtcccatccttgtgagctctgggctcactagctcatgcgtggtccaaagccaaacatttaagggaacaaacatttaaagactaaattaatggac

SEQ ID NO: 791102 - DNA, 606 bp, Homo sapiens
agtctggctaggaataacgtgggatgatttctgtttgggacactccttctgtctgtttcatggaagatggcgtgagggagggcacgagggggaagagaaaaggacagaaagggggcagggaggtagctgttggagcagctcaggtggaagatggtggtgagtgggattaacatggtggcaatgggaacagagtaaaggggctgactggtgagattgtgaacagagcattagaattgaataggctgctcaattgtttctggtaattctgaaagcaaaaactggccatttgagatggcttccatcagaaggaggtggtgagggagttcgagtgtgcctgtgcatggtggagcaggggtggggggattggtaggggagggtgtcacaccgtctccagmatccccctcctgccagcagccatgaccgtgcaggctgtcttgcctgttttctaaagagcttccccaggcagcaggggagagaggagaaggggggctggccacccacgccactcagcagaggtgagccaggagcaacgagtcctcaaattcgccctcccccaagccactacaggctgccaggtgccttgtttttgatgaaagcttttaaaaa

SEQ ID NO: 791103 - DNA, 636 bp, Homo sapiens
ccataaggtattaactgtgcttacaaattaataagaaaaagacaacaacctattaaaaatgggcaaatgataaaagaggtaattatcagaagaagaaatacatacagaaaattatagattgatatgtcagtaaatatataaaaagatgttcaacttcattaataatcatataaacataaattasatataactattaatatggttaggctttgtgtccccactgaaatctcatcttgaattgtagtctctgtaatccccgcttgttaagggagagaccaggtggaggtaattgaatcatgggggcagtttcccccaggttgttctcttgatggtgaatgagttctcacgagatctgatggttttataaggggctcttcccctttctctcagcctttcggcttcctgctgccttgggaagaaggtgtcttgctttggcttcctgccatgattgtaagcttcctgaggcctcctcagccatgctaactgtgagtccattaattctctttcctttataagttagtctcaggcagttctttacagtgtcatgaaaacggactaatacagctatttttacccacctggttaaaaaaatattgatatgatctatattgttagggttgaggggaaatgggaaat

SEQ ID NO: 791104 - DNA, 636 bp, Homo sapiens
ccataaggtattaactgtgcttacaaattaataagaaaaagacaacaacctattaaaaatgggcaaatgataaaagaggtaattatcagaagaagaaatacatacagaaaattatagattgatatgtcagtaaatatataaaaagatgttcaacttcattaataatcatataaacataaattagatataactattaatatggttaggctttgtgtccccactgaaatctcatcttgaattgtagtctctgtaatccccgcttgttaagggagagaccaggtggaggtaattgaatcatgggggcagtttcccccaggttgttctcwtgatggtgaatgagttctcacgagatctgatggttttataaggggctcttcccctttctctcagcctttcggcttcctgctgccttgggaagaaggtgtcttgctttggcttcctgccatgattgtaagcttcctgaggcctcctcagccatgctaactgtgagtccattaattctctttcctttataagttagtctcaggcagttctttacagtgtcatgaaaacggactaatacagctatttttacccacctggttaaaaaaatattgatatgatctatattgttagggttgaggggaaatgggaaat

SEQ ID NO: 791105 - DNA, 611 bp, Homo sapiens
tctaaacattttatgatatcataatttattgacctgatagtttttttgtttttgttatgctaagatgagaaagaatgagaacgtaacataagaatagaatttggtctcagcattttcctctggtcaaactttgtcattttagtatctctgtaggacccaacacagaatttgcttaaagacaactgctttttcaggcttttgtgtacctgagtggacctctacctccaaagctgcttgagtcagccagaaaattatcagtgaaatcatgttgtggggatagcaacttcttaacgccaagcaacaactcaggtgaagctgtttgagagaggagctgagcccctgctaaarctgaatttcccattatgcaccctgaattagcattggtgtcaaaaggcaaggccaagttcacaacgtctgcaaaaatgcaacagtgcaaggtattcagttttgttttgatttttggttttggttatcactggaaataccacctcagtagattttaaccctcatcttgactctttctgctacaattcatcttaacagaaaatccaccctggtcttcacaggagtgaataggcaccacagcccagacaccccacaagttagtgcta

SEQ ID NO: 791106 - DNA, 630 bp, Homo sapiens
taattagctgcctctggaatatttgtcattttaacagagcaattttgcatttccctttgctttagttctgtggcctccaacctgacattcacaggttccaacaaatttcaacacgtcacatgttgtggatgatttgaaacaagtcaccttggagccggagaacctttgaggatggcatggtggaaagaacattgacttggaaatcacatgttgataataatggcaatgtggatgttggcaatttacttaatctctctgaaagtgtttcattaaaaatgaaaatgaggaacctaacttttgggcttattgtgatgatggaaatcatctctctcacatgcctaacatgtagttcaataagtggtccatatagaatagtaataaagcamaattcatttttttcctcctcttttgatgtgtgaaaggaaaataaaacttggaaccccaatttactatgtcaaaaggaaaaaaattaagctgaaagctgagttatgtaagaagctgcctttccttttgtttctaagcagatagctacagataaaagctacatatctccactggtagctactctatattcaccctatcttacataaagtgctgatttactgacaccaggcaaatacataattgact

SEQ ID NO: 791107 - DNA, 485 bp, Homo sapiens
atcctctttttggtcctgcatcatttcagattttagagtgttagctcagctccctcctcaatttctttaggtttttatttcttagcccaaacctcactattcaatttctaccaagaaaataattacataaagaattcaggagtataatagaatcaagcatttggaagaaagatgcaggaaaacttcatacgacaatgtgcaaatcattacaaactgaacattatcattttcaaaaattatgttagctacctcaccacaggaaaacttcccgtggcccatttgcacattaagtcactcggtttcatatttcatgagcacatctttcctcatcctctctttcttctctacctctcctccattagagcaataaaataaattctctcattttcctatgcaaagccactagacattcycttttgtagctgagattcctggacaacagttctctctaaatcctgccttctatcctaggctgctgaactagg

SEQ ID NO: 791108 - DNA, 568 bp, Homo sapiens
gtaatacctacccatgagagagcataggtaaactatctaatacagaatcttgtatatgctgggtcctctataaaccatagcaatgaattccctccattcattttccaagtccctaagtgcaaaaccttggggtacacattcaagaaaaagtctttaagattttgaaaccacaggtaaactaagtctgcaaagaatcacatctttcaaatggaattagataagtcatagggtatttaacagggtgctggtcttaaagagaatrgaagatttaatttggtttagttcctttggcatttgcaggtgaaaaccaccacaaattaattagcacgtcttcatttgcttgaggatgattaataatactcagggaaagaggttttacataatttatcagtctgacacagcccaacacctctaaagttccaagaacttccaattccagctggtctgtgacacttaaaaactagctgcaaaatggcacctctcttgtagacagtacatttgctgttgttctgaagtgaggggagggaaatacaattacaaacttccaggctactttctttctagtttg

SEQ ID NO: 791109 - DNA, 527 bp, Homo sapiens
acctcatgaatatatacatatataactactatgcacccacaaaaattaaacatgaaaaaataagtagcatttctaaacttcaataacattcaagttcagagacaaatcaagaatacaatccaatttaaaatagccacaaatatatacttagggttacatctaaccaaagaggtgaaagatctctacagggaagactacaaaacattgctgaaagaaatcatagatgatacaaataggaaaacatcccatgctcatggattccacaaaccaatrttgtgaaaatggccatactgcccaaagccatctgcagattcaatgctacttcaaagcaatcctaaccaaaaacaacaaagctggaggcatcacaatacatgatttcagactataagcctacaataaccaaaacagcatggtactggtacaaaaacagacacatagacaaatggaaccaaatagcctagaaataaagctgcacacctacaatcatctgatctttcacaaagtcaacaaaaataagcgatgtggga

SEQ ID NO: 791110 - DNA, 527 bp, Homo sapiens
acctcatgaatatatacatatataactactatgcacccacaaaaattaaacatgaaaaaataagtagcatttctaaacttcaataacattcaagttcagagacaaatcaagaatacaatccaatttaaaatagccacaaatatatacttagggttacatctaaccaaagaggtgaaagatctctacagggaagactacaaaacattgctgaaagaaatcatagatgatacaaataggaaaacatcccatgctcatggattccacaaaccaatgytgtgaaaatggccatactgcccaaagccatctgcagattcaatgctacttcaaagcaatcctaaccaaaaacaacaaagctggaggcatcacaatacatgatttcagactataagcctacaataaccaaaacagcatggtactggtacaaaaacagacacatagacaaatggaaccaaatagcctagaaataaagctgcacacctacaatcatctgatctttcacaaagtcaacaaaaataagcgatgtggga

SEQ ID NO: 791111 - DNA, 527 bp, Homo sapiens
acctcatgaatatatacatatataactactatgcacccacaaaaattaaacatgaaaaaataagtagcatttctaaacttcaataacattcaagttcagagacaaatcaagaatacaatccaatttaaaatagccacaaatatatacttagggttacatctaaccaaagaggtgaaagatctctacagggaagactacaaaacattgctgaaagaaatcatagatgatacaaataggaaaacatcccatgctcatggattccacaaaccaatgttgtgaaaatggccatactgcccaaagccatctgcagattcaatgctacttcaaagcaatcctaaccaaaaacaacaaagctggaggcatcacaatacatgatttcagactataagsctacaataaccaaaacagcatggtactggtacaaaaacagacacatagacaaatggaaccaaatagcctagaaataaagctgcacacctacaatcatctgatctttcacaaagtcaacaaaaataagcgatgtggga

SEQ ID NO: 791112 - DNA, 565 bp, Homo sapiens
gtgggcatgtgaattagttcagtccctgtggaaagcagtttggaaatttctcaaagaacttaaaacagagataccatatgacccagcaatcccattactgggtatatatccaaaagaaaattaattgctctaccataaagacacatgcacttgtgtgttcattgaagcactattcacaatagcaaagacatggaatcaaccaaagtgctcatcaatggtagatcggataaagaaaatgtggtatatatacaccatggaatactatgcagccataaaaaagaagaaaatcatgtcctttgcagcaacatagatgcagctggargccattttcctaagcaaattaatgcagaaaaagaaaaccaaacacagtatgtcctcacttgtaagtgggagctaaacattgggcagtcgtagacaaagatggcaaaaatagacactgtggactactagagggggcaggaaagaagcatgagggtactacacttactacctgggtgataggaccatttagatcccaaacctcagcatcacacagtatgcccatgtaacaaacctgctcacatac

SEQ ID NO: 791113 - DNA, 545 bp, Homo sapiens
aaaaggtggatgtgtgaccattccaatagagagaagctgagaatatatacagggagatatacagaagagggggagaaaaagttataatgataggttgggtccacactatcaaaaaatttgagcatcatggtgaagtaattagtcttttaataaattagggattattttaaaaattctaaattttttaaaccgttattttaggttcagaggtacatgtgcaggtttgctatgtaggyaacctgcatgtcaccgggatttggtgtacagattatttcctcaccctggtaatcagcatagtacctgataagtagttttttaatcctttcccttctcttaccctccaccctcaattgggccccaatatatgttgttctcttctttatgtccatgtgtactcaatgtttagctcctacttataagtgagaacatgcagtgtttggttttctcttcctgagttagttggcttaggattatggcttccagctccattcatgttgctgcaaaggacacgttcttattcttttttatggctgcatagtatattc

SEQ ID NO: 791114 - DNA, 545 bp, Homo sapiens
aaaaggtggatgtgtgaccattccaatagagagaagctgagaatatatacagggagatatacagaagagggggagaaaaagttataatgataggttgggtccacactatcaaaaaatttgagcatcatggtgaagtaattagtcttttaataaattagggattattttaaaaattctaaattttttaaaccgttattttaggttcagaggtacatgtgcaggtttgctatgtaggtaacctgcatgtcaccgggatttggtgtacagattatttcctcaccctggtaatsagcatagtacctgataagtagttttttaatcctttcccttctcttaccctccaccctcaattgggccccaatatatgttgttctcttctttatgtccatgtgtactcaatgtttagctcctacttataagtgagaacatgcagtgtttggttttctcttcctgagttagttggcttaggattatggcttccagctccattcatgttgctgcaaaggacacgttcttattcttttttatggctgcatagtatattc

SEQ ID NO: 791115 - DNA, 619 bp, Homo sapiens
cctgcattagtttgctaggaataatagcctccaggcttcatccatattcctgcaaaagatatgatctcattctttttatggctacatagtattccacagtgatatgtaccacactttctctttatccaacctgtcattcattgatgggcatttaggttgattccatttctttgctaatgtgaatagtgctgcaataggcattcgtatgcatgtgtcttcatgatagaaccatttatattcctctgggtgtatacccagtaatgggattgctggatcaaatggtggttctgcttttagctctctgaaaaatttccacgctgcttttcacaacggttgaattaattyacactcccaccaacaatgtataagcgttcctttttctccacaacctcaccagcatctattatttttttgactttttaataacagccattctgactggtgtgagatggtatctcattatagttttaatttgcatttctctaatgatcaatgatattgagcttttttcataggcttgttggctgcttctatgtcttcttttgagaattgtctgttcatgccctttgcacactttttaatgggattgttttactcttgtaaatctgtttaagttcat

SEQ ID NO: 791116 - DNA, 757 bp, Homo sapiens
acatggatcctaggagatggttcattgccattgagtagtgcatgaagaaaaatgtagtaaagcttcctataaaactcctcactgaagctcagatttgattctgattagaggcccctccactcatctctgtgggctccccagcgtggcttgcctattgagccagggacctgtcaggctytcacattagattcagctggccctgagattagacaaaaaggagccactatatgggataattttgagaaaaagagaggggaatatgaccagagttattacacaagctaatcaacaagactgtagtacctgcaccagcaatgccttctccctgtatgtggcatctaaagaccaggaatatcttacacttctccggcacttcctatttccaaagaacttacaaacattgtaccacatgtattttatcctcaagaaaacatttgggggtagtaaaacaggtatttctgcctttatttaatagataagcaaactaacatccagagagattaaatgacctctgtaaagccacacattggtgttagagaaggtactctgacttttggctttcttgccctaaaaagatggaaaatatagaaatataaatatgaatatatttaaatatatttgtttatattaatataactatattattttgtaaatatattagatataaattgtatataattaaatacaaatataaattaaaaaggattcagaccacaggaagcttgtacataataggagggttcacaaaaaattttga

SEQ ID NO: 791117 - DNA, 540 bp, Homo sapiens
gtaaatggcaaactttaaatacattgtgtgctttttagcaaaacagacagaaaccagtcattgtattttatatagttagtcataaaacccatagctttaaaatggatagaaactagtcattgtgttttatatagttagacagtttcctttattttgttttstatgttaaagttataggttttatttttaaataaatccccaaatcctttggatcttcccgcctcctacaaaaaatacttaccctaacttctctttcttcaaaaggcagttcaggagaaggtaagttaaagttggtttttaaaaagagttcattttcaccgtcacatatatggagaaactgatggagaagtaggttaatttgacatcatggaggtctcaaaactatatgagcagaagcacagggatgagttcttatgtacccgaactcagaattccaattcctgactgattaatggattggttgattgactgactgactgattacactaacatttactgagagtcgatcatgtacaatttgctgcacaaagtacttaacat

SEQ ID NO: 791118 - DNA, 540 bp, Homo sapiens
gtaaatggcaaactttaaatacattgtgtgctttttagcaaaacagacagaaaccagtcattgtattttatatagttagtcataaaacccatagctttaaaatggatagaaactagtcattgtgttttatatagttagacagtttcctttattttgttttctatgttaaagttataggttttatttttaaataaatccccaaatcctttggatcttcccgcctcctacaaaaaatacttaccctaacttctctttcttcaaaaggcagttcaggagaaggtaagttaaagttggtttttaaaaagagttcatttycaccgtcacatatatggagaaactgatggagaagtaggttaatttgacatcatggaggtctcaaaactatatgagcagaagcacagggatgagttcttatgtacccgaactcagaattccaattcctgactgattaatggattggttgattgactgactgactgattacactaacatttactgagagtcgatcatgtacaatttgctgcacaaagtacttaacat

SEQ ID NO: 791119 - DNA, 540 bp, Homo sapiens
gtaaatggcaaactttaaatacattgtgtgctttttagcaaaacagacagaaaccagtcattgtattttatatagttagtcataaaacccatagctttaaaatggatagaaactagtcattgtgttttatatagttagacagtttcctttattttgttttctatgttaaagttataggttttatttttaaataaatccccaaatcctttggatcttcccgcctcctacaaaaaatacttaccctaacttctctttcttcaaaaggcagttcaggagaaggtaagttaaagttggtttttaaaaagagttcattttcaccgtcacatatatggagaaactgatggagaagtaggttaatttgacatcatggrggtctcaaaactatatgagcagaagcacagggatgagttcttatgtacccgaactcagaattccaattcctgactgattaatggattggttgattgactgactgactgattacactaacatttactgagagtcgatcatgtacaatttgctgcacaaagtacttaacat

SEQ ID NO: 791120 - DNA, 540 bp, Homo sapiens
gtaaatggcaaactttaaatacattgtgtgctttttagcaaaacagacagaaaccagtcattgtattttatatagttagtcataaaacccatagctttaaaatggatagaaactagtcattgtgttttatatagttagacagtttcctttattttgttttctatgttaaagttataggttttatttttaaataaatccccaaatcctttggatcttcccgcctcctacaaaaaatacttaccctaacttctctttcttcaaaaggcagttcaggagaaggtaagttaaagttggtttttaaaaagagttcattttcaccgtcacatatatggagaaactgatggagaagtaggttaatttgacatcatggaggtctcaaaactatatgrgcagaagcacagggatgagttcttatgtacccgaactcagaattccaattcctgactgattaatggattggttgattgactgactgactgattacactaacatttactgagagtcgatcatgtacaatttgctgcacaaagtacttaacat

SEQ ID NO: 791121 - DNA, 574 bp, Homo sapiens
tcttttttcccagtcttaatacctttttttcttgttttatttcattagctactgcttccatgtagtatgatgttgactaggaatggtgagagggagcttctttgccttgttcttaatctcatgggggaaaagcatcttgtttctcaccattaagtatgrtattagctttgtataatttctgttcctttaaattcgttaaggcatgttttgtggcccagaatgtgatctgtcttgatgttccatgtgagcttgagaaaaatatgtattttgtagttgttggatgaagtattctgtcaatgccaattagatccagttgattgatggtactgttcagttcagctatgtccttattgaatttctgcctgctgaacctgtcaattattgttagaggcttgctgaggtctgcacttgtaatagtgtatttatttattttcctttacagttctgttagtttttgcttcacatattttgatgctctgttgttagttacatgcacagtaaggattgctgtgtcttcttggagaattgaccattttatcattatgtaatgttcgttatccctaataattttcct

SEQ ID NO: 791122 - DNA, 626 bp, Homo sapiens
agataccgaaacacaccttcaagcaacagtaatttaactggcccaatattgtctcagagaagacaaattgttcaatggagtggcataaaaagtccagaaaatgactgacttgcgtgtcaaaatttacaatgattgaggtgggattttatttcagatcagttaggaaaggrtaaacaattcagtgaaaagttttggggcaactggaacgaaacaaatatatattcctctacataagaatcatttccaagtttattagtgttcagcataaaaataaaactgtagaattattagaagaaattataagggaatatttctataatcctagtgttggaggaggctttcctaagcataacatttagcccaaaatctataatgaagaaaactgacagatttaactagtgaaaattaaatgcttttgtacaagaaagatgtaagaaaggttaagtgtcacagactaaggcatattacatatacagcaatacctggattacatacagaatgtctgtaaatgttaatccagtaaaaatatatatatatatgaacaggtaattcacagaagatggaatacaaattgtcgatcaacatatgaagagatgctcactcactactatcaggaaaatgcaaac

SEQ ID NO: 791123 - DNA, 511 bp, Homo sapiens
taatgccttgctatctaaatcagctcctgtagattctgtattatttaactgaaccctgtaactgatacagtgcttaatttgcgttgaataaccactaatagtcatgaaataactgacaaactgcacacaaattttttttttttttgagacagactcttgctctgtcacccaggctggagtgcagcggcatggtcttggctcactgcaacctctgcctcctaggttcaagccaagcgattctcctgcctyagtctcccgagtagctgggactacaggtgcgcaccaccatgcctatttttttggtatttttagtagagacagggtttcaccatgttgcccaggctggtattgaactcctgacctcaagtgatccgcctgcctcatcctcccaaagtacagggattacaagtgtgagccaccatgccaggcctcaatttttaactatccactttagcaactgtctgataataaaacactgaattgtgacattttgagacatctccctctgcaa

SEQ ID NO: 791124 - DNA, 639 bp, Homo sapiens
cagggttagaatcatgtgcaggaacacagtagtaggctgcctggctgacacagaattacccacattaggtgcaatacctacgacctctccttcagaatacttcaaagttgtgtccaatttgtttgtaaaatggggaaactacgactatttatacaccaaagttcatatttttgatgtgtattggtagcaaccagaacatacttagaacaaagaccatcataaaggcataattytttcttacttttttctactaagtgtcttattgggagaatgagggattacctaaacatttttaatctgattttcactatctgatattcatgtgtaattgttaattttgtactgggggaaaaaaatcaccaacttgagcaccagctctcatttggaaataatttttataatattacaatgaatataggttgaaacaattaagaactttaaaaaaaaaaatgaagttctaatatgattcaggcatgtagcccacacttggaatgctgtggctctcattacaacctaccctgcaaaccaaatagcaatttgaaagttctgaggtttcagagggacaggcagggcaaattagaatcagttacagaggcaggaaaaaacaggcagctgaaaatgtctgggaaatgtactttt

SEQ ID NO: 791125 - DNA, 565 bp, Homo sapiens
ctcattcgctgtaggggtgtagatactgtcaagcaaaactttctgaaagtttacagcctaggacagggaatagagacatgtccttcaagtctgtagtacagactttcaaaatacaagcccagcgtgtaaatatgtggacgactgcatattaacggtccccgatgaatcacactcctaggtgttcacatccttatgcagccccttcccacagtgactctggtrctggccgcgagggtggctttggccagtgggcaatcagcaaacaagaccataagcacaagcctgacaagcactgagccctgggtttgttcttctggaaggtggttacaacagccccagatccagtgattccccaggtgactgcagccacgtgagtgagaccagaagaactgcgcagcagagcccagcccaaattgcagaatccccagcaaataaacacttgttgttttaggccaattatacattaatagcaataaacaagtactacagagcattttaaagatggaggcaatgtatgtctacgtagggtagcaaggaagagcaaacgtcaaacaagctttaggtc

SEQ ID NO: 791126 - DNA, 638 bp, Homo sapiens
atctctggaaaatctgctctttggagatactgagtgccgcaattcgatcggctaattctggcatcacctgcctcctgaacagtcccccgggaccaaagaacacagtggaatttgcactaatgatccccaatggggctccaggaaggctgcattttggataataacttacatgttgaagcaggtttgatcatcctggttgagtgtacttgctaagaatgaatgaataaaatttataatgaaaataaatatagaaagcattgggttttgattaaaatacccyatataaaattaagtatatcatagtaaattaactccactcttctctgccacactctcccctttctttgaacaatctcttctgtctccatattaagtttctatatggatggccatattctttggttaatctgacctcaatttatagcctctctcaataactgttctcctctcctcttcccagaattagtcttcctgacttaaattattatttaagtatgtcttaaagcattcctattcaaactaaatacgtaaccaaaaggaaagagcaggaagagtacaacagaactactcatttttactctttcttctttttccctttactttttctggatcccatctaagtaattttcaaaataagt

SEQ ID NO: 791127 - DNA, 566 bp, Homo sapiens
accctatataaaattaagtatatcatagtaaattaactccactcttctctgccacactctcccctttctttgaacaatctcttctgtctccatattaagtttctatatggatggccatattctttggttaatctgacctcaatttatagcctctctcaataactgttctcctctcctcttcccagaattagtcttcctgacttaaattattatttaagtatgtcttaaagcattcctattcaaactaaatacgtaaccaaaaggaaagagcaggaagagtacaacagaactactcatttttactctttmttctttttccctttactttttctggatcccatctaagtaattttcaaaataagtatcttaaacggaaattattctcctagtcaacagggatcaatttttaaagggggagggaaaaaaacccacttttctattgttattgtatgtttgatggaaagaaattcattgacatatttttggcttttgtttttaagtatgtaggaccttgaagttcagtgaaggacaaagtccaaaaatcatggtgccttagaatatttatt

SEQ ID NO: 791128 - DNA, 566 bp, Homo sapiens
accctatataaaattaagtatatcatagtaaattaactccactcttctctgccacactctcccctttctttgaacaatctcttctgtctccatattaagtttctatatggatggccatattctttggttaatctgacctcaatttatagcctctctcaataactgttctcctctcctcttcccagaattagtcttcctgacttaaattattatttaagtatgtcttaaagcattcctattcaaactaaatacgtaaccaaaaggaaagagcaggaagagtacaacagaactactcatttttactctttcttctttttccctttactttttctggatcccatctaagtaattttcaaaataagtatcttaaacggaaattattctcctagtsaacagggatcaatttttaaagggggagggaaaaaaacccacttttctattgttattgtatgtttgatggaaagaaattcattgacatatttttggcttttgtttttaagtatgtaggaccttgaagttcagtgaaggacaaagtccaaaaatcatggtgccttagaatatttatt

SEQ ID NO: 791129 - DNA, 566 bp, Homo sapiens
accctatataaaattaagtatatcatagtaaattaactccactcttctctgccacactctcccctttctttgaacaatctcttctgtctccatattaagtttctatatggatggccatattctttggttaatctgacctcaatttatagcctctctcaataactgttctcctctcctcttcccagaattagtcttcctgacttaaattattatttaagtatgtcttaaagcattcctattcaaactaaatacgtaaccaaaaggaaagagcaggaagagtacaacagaactactcatttttactctttcttctttttccctttactttttctggatcccatctaagtaattttcaaaataagtatcttaaacggaaattattctcctagtcaacagggatcaatttttraagggggagggaaaaaaacccacttttctattgttattgtatgtttgatggaaagaaattcattgacatatttttggcttttgtttttaagtatgtaggaccttgaagttcagtgaaggacaaagtccaaaaatcatggtgccttagaatatttatt

SEQ ID NO: 791130 - DNA, 654 bp, Homo sapiens
tttttcgttatacttatccaagccatagcctctgcctatgttttcttctgaattttagttttagttttttcatttaagtctttgaagcactatgaattaatttttcatgtatgatgtgaggtaggggtcctatttcattcttttgcacgtggatacgtagttgtcctagcatcatttgtggaaaagactattctttcacctactgaattgtcttggcaccctcatgaaaaatcaattgacygtaaatgtaagggttcatttctgaaatctgtattatatttctttgatctatatgtatatctgtccacacttttgattgctgtatttctgtaactgtgaaatctaaaagtgtgcatccttcaactttgtacttttcaagattgttttggctattctgggtcccttgcatttccatacaattttaggataagtttgtcaatttctgcaaagcagcctgcagggatttagatagaaactggattaaatctggagtattgctatcttaatgacgttatgctttccataaatataggatatctttcaacttattaggtcttctttaatttcttttaatgatgttttattgttttcagtctacaagttttacacttttgggctaagtttattttcagatttaaaaactttatccatgtt

SEQ ID NO: 791131 - DNA, 614 bp, Homo sapiens
gtctgatgagacttagaatttgattctcctaccctgtatcttgctaccaaaaatggcacatgggcacacatacacacttttaataggcaacttagagcccatgaaataatgagagtaataataatagtagttacgaagccttgcatttcctattctkctttggccagagagcaataaagcctcatttaaaaagcagctttccatctttctttgaaaaaactttgtagtagaagtaaacaattctgtttgtttcagtgagagaaaacacccatggatcagccaggttgacagcctagtcagcttgcatcctggtttgtttttttttgttttgttttgttttgtcttgaagagtttttgctgaaggaagcattagagttctacttaatatgcatacaatagaaagtagtaattaaggaaaaggatatatcagccaacctatcttaagaaggatctaactagataaactttgtctttaagacagtcctgactctcagactccacaggtgggtgcaaacaacagtgctccccactggagatcctggggcccactttggcttgccttcagaaagggaagacaaagtgtccctcccaagttacaaacgcaggttgtatac

SEQ ID NO: 791132 - DNA, 577 bp, Homo sapiens
ttatttattgaatatttatggcctgtccactaattacctggcacaagtgtaggtcctagaagatacacactagggaaaaaatagacacacagactagatccctactgtcctgtcttacattctaggaggcggagagaaaatgttaaaaatgaacaaagtaagttgtcargtcaggtgctaccaagtgctagggaaggagattagagtggtgggtgccatctggatagggtggtgaggggagccccatctgctaaggtggcatttgagaggagacttgaggtgagagactgggaagtgaggtggggaccgaagcctgacagactagccatgggcaaaccaggcaggagtttagccaaggtgaggacttgtagaggagttgggcagggatgtgaaataattagcttgatgttctgcataggatgccctgggctgcaaggtgtggaactgataagccaagacctcccaggaggctttgccgccatctgcagaatcatgctgatggctttgaagagagaggcagtggtggagagaagtggctgatttggggcatgttttgaataaagagcccacagatttg

SEQ ID NO: 791133 - DNA, 577 bp, Homo sapiens
ttatttattgaatatttatggcctgtccactaattacctggcacaagtgtaggtcctagaagatacacactagggaaaaaatagacacacagactagatccctactgtcctgtcttacattctaggaggcggagagaaaatgttaaaaatgaacaaagtaagttgtcaagtcaggtgctaccaagtgctagggaaggagattagagtggtgggtgccatctggatagggtggtgaggggagccccatctgctaaggtggcatttgagaggagacttgaggtgagagactgggaagtgaggtggggaccgaagcctgacrgactagccatgggcaaaccaggcaggagtttagccaaggtgaggacttgtagaggagttgggcagggatgtgaaataattagcttgatgttctgcataggatgccctgggctgcaaggtgtggaactgataagccaagacctcccaggaggctttgccgccatctgcagaatcatgctgatggctttgaagagagaggcagtggtggagagaagtggctgatttggggcatgttttgaataaagagcccacagatttg

SEQ ID NO: 791134 - DNA, 614 bp, Homo sapiens
  misc_feature 1, 2, 3, 4, 5, 6, 7, 8, 9, 10, 11, 12, 13, 14, 15, 16, 17,18, 19, 20, 21, 22, 23, 24, 25, 26, 27, 28, 29, 30, 31,32, 33, 34, 35: n = A,T,C or G
nnnnnnnnnnnnnnnnnnnnnnnnnnnnnnnnnnncccggggcacccttgggctggcctggcgctgggccgtgcttcgtttgctcttcgcgctgtggctcaccgttttcctggagaggggccgtcgaggcggcgcgagcgtctctgcctgtcccggtcgcgtccagtccccgggcttgcggggccggctcccgggcacccgcctggctttgttcccgcgccgtgggacaggactagtggctggcggtgggttcccgggcgcctggagtcccgcggcgccagcctttccggctgcgggggtctcgggggccgtttggtgactgcagaacgcgccctccgggaagggrgcgctcctgcgtggccactcgcccttaggcggagcccgtctgcgcggccagggacccggcgagccgctgccgcagcccccgccatctgcccgggccccgggtgctggcggactccgcgcctccccacggggagagagaccgcctaatgtcccgccgaccccaggggccccgaggaacggaagccggtccgggacccatcacagtctccgatctcggtgcctgggaggcatttggaggcagattgctgctgctgcttctgctgttgctt

SEQ ID NO: 791135 - DNA, 618 bp, Homo sapiens
gcctttctatggctgcctctgcacatatctccgtctcttctgctgttgactagagtgggtagtttgtctagttttctctgaatttgtttgggtccccctcagatctctatcctggtgaaagaggagtatgcatagcaagtttggttagttgccttttctgcatagattgctatgtttcttggctaagcwttcccccaggccttggaaagcactgacccctgcatttccaggacttgtttgcatccggaaaatgactaattaggtccttgggacttccttacattcctatcccaggtatcttctttgcttcttccactgccttttttttttctttttccttttttgactggccagagaaaagtaaagaacaaaagtaaagctcataaacatagattatccacttttacttgtgttgcaaaacagtctcctgtgctgctggctttccttcctttgcccagtcttaaatgttagcgctccccaaggttttgtcttttgacctttgacttctgcctcctctcacttactgggtggtcctgggtgatttaatccactccctattactgaaactgatggcccaagccagacagccccagagccatgtattcacttacctactgg

SEQ ID NO: 791136 - DNA, 618 bp, Homo sapiens
gcctttctatggctgcctctgcacatatctccgtctcttctgctgttgactagagtgggtagtttgtctagttttctctgaatttgtttgggtccccctcagatctctatcctggtgaaagaggagtatgcatagcaagtttggttagttgccttttctgcatagattgctatgtttcttggctaagcattcccccrggccttggaaagcactgacccctgcatttccaggacttgtttgcatccggaaaatgactaattaggtccttgggacttccttacattcctatcccaggtatcttctttgcttcttccactgccttttttttttctttttccttttttgactggccagagaaaagtaaagaacaaaagtaaagctcataaacatagattatccacttttacttgtgttgcaaaacagtctcctgtgctgctggctttccttcctttgcccagtcttaaatgttagcgctccccaaggttttgtcttttgacctttgacttctgcctcctctcacttactgggtggtcctgggtgatttaatccactccctattactgaaactgatggcccaagccagacagccccagagccatgtattcacttacctactgg

SEQ ID NO: 791137 - DNA, 618 bp, Homo sapiens
gcctttctatggctgcctctgcacatatctccgtctcttctgctgttgactagagtgggtagtttgtctagttttctctgaatttgtttgggtccccctcagatctctatcctggtgaaagaggagtatgcatagcaagtttggttagttgccttttctgcatagattgctatgtttcttggctaagcattcccccaggccttggaaagcactgacccctgcatttccaggacttgtttgcatccggaaaatgactaattaggtccttgggacttccttacattcctatcccaggtatcttctttgcttcttccactgccttttttttttctttttccttttttgactggccagagaaaagtaaagaacaaaagtaaagctcataaacatagaytatccacttttacttgtgttgcaaaacagtctcctgtgctgctggctttccttcctttgcccagtcttaaatgttagcgctccccaaggttttgtcttttgacctttgacttctgcctcctctcacttactgggtggtcctgggtgatttaatccactccctattactgaaactgatggcccaagccagacagccccagagccatgtattcacttacctactgg

SEQ ID NO: 791138 - DNA, 530 bp, Homo sapiens
tagcagtaccccactctactggtaccaacttattatattagtccattttcatactgctataaagaaatactcaagaatgggtaatttatttaaaaaaaaagagagagaggtttaatggactcacagttccacatggctggagaggcctcacaatcatggcagaagacaaaggaggagcaaagrcacatcttacatggtggcaggcaagagagcgtgtgcaggagccctttataaaaccatcagatctcatgagacttcttcactatcataagaacagcgtaggaaaaagccacccctatgatttaattacccccactgcgtccctcccatgacacatggggattgtgggagctacaattcaagatgagatttgggtggggacacagccaaaccatgtcggcctctgagatctattcaaaatgaacatcaccaaggcatatagtcaacagacagcccaaggtcaacacacacacacacacacacacacacacacacacacacacacacaaatcttaaaggctgctagagaa

SEQ ID NO: 791139 - DNA, 522 bp, Homo sapiens
tatgtggcaacagcaagtcaatacctcatcctagttcttcccagggcagtgctgtgcacagagaagacacaaaatatacttcgagttaatacacatttaccgagtatctgctaatttgcagatggcgtgctaaggacaagggagaggctggtgatccagatggcataattcctgccctcagggagcacagttaatcatactttgatgagttctatgaaggaaattctcagcaacacaggatgaygggtgagttaaatgctatggtgttaggacagaaagggaaataggcagtgtagaatagagaccctagagaccccaggtggagatccatgcacacgtgggaagtctgcaagtaacagaagcagcactgcagaccagtggagagacagtgaactcactggtgatactggaaaaagaaactttccacatggcataaagtaaaactgggttcctgcctaagcacgcacaccacacacacgattaggcccagctggattaaaagcgtgtgtgtggtgtgcgtgc

SEQ ID NO: 791140 - DNA, 773 bp, Homo sapiens
aacttattgttaaaacagttcctttaaaaacaaacaaacaaacaaaactcaagaccattcattctaattctctggcttctggacccatggtttccaatacgttctgcatcactgatatctcgctccttatgctcctgacacagggcacttagttcctgagggccttccagtccacaccctcaatgtcactaaagtgacagagatacgcatagagccctccttgtttggaggaagagagaaaggaaaggaaaaaagcaagtaattctccttaattagagctaactggaagatataacagaaaaagaatattatagcttaggactaaaataaaatcatacaaaagggaagttagaatcttcaatttgctacttgagaaactcttcactctgtaagaatcggactttttaaaatacatcacacatggccgggcgcagtggctcatgcctataaccccagcactttgggaggccaagggggggcggatcaaaaggtcaggagatcaagaccatcctggctracatggtgaaaccccgtctctactaaaaatacaaaaaaattatccgggcgtagtggcgggcgcctgtagtcccagctactcaagaggctgaggcaggagaatggcgtgaacccgggaggcggagcttgcagtgagccaagatccggccactgcactccagcctgggcgacagagagagactctgtctcaaagaaaaagaaaatacatcacacttgaagagccatgaatgcagacctggatctgaggctgtaaatca

SEQ ID NO: 791141 - DNA, 644 bp, Homo sapiens
taaccttgcaaactcgattactgttaattctagtaatttatctagattggtttttctatgtgcgtgatagtctgtgaataatggtacttttatttattccttcataatctttataagtgttattgctttttatcacttgctgcactggctgggacctctctcrcaaagttagaaaggagtgttgtcagctgacactcttatctcgtcttcctctctaaggcaaattgttaacatctcactattaagtatgacatttgctgtgggccttttgcagccatcctttatcagattgaggaagttcctgtccgtttctagattgctaagaggcttctttttaaataaggaacacatgctgaactctgtccaatgcttgttataaatctctaaggtgatcatattctttttctcctttaacgtatcggtgtgatgaattattctgattggttttctaaggctacatctattctgagaatacatcgactttggtaatgaggtatttttcctccttctattactgatctcaacttgctgatactttgttaagggtttctgcactgtgttgaggagggagattagcccgcagttaattttcctttctggcaatgttttcacctggttttctcatcaaggctgtgccggtctca

SEQ ID NO: 791142 - DNA, 449 bp, Homo sapiens
gcaaaaagggaaaaattgtagatacgattaccagtagtacaagtgttattattatcacagtagctaatagttattatcacatcagctaattatatcagtcactttttatatggaaacctttcttttttatgtagatgaaacttactgacatatgtttatgtcattatatcttcacagaaaaaaamctaagggagaaatgtatgcttgctttatactagtaattaaagaattggggctttaggagatacttgagtttactgcaagtaagctgttctgatttggggagagcagaatggagggggtgactaaaactacatctgaagacaaaaatctagtggaagcagggtctttattttgcaatgtgttcacttgaatttaccacacaaaaattatttcttctgaaaagaatgtgagagttcattaaatatgcataacctttttcttttctt

SEQ ID NO: 791143 - DNA, 606 bp, Homo sapiens
ttcatttagactgttgattagaacacttctttctggatattttacagcatagaaaatgaattacattgtgggattgtgaattttttaaatattcataaaaatcctcgtagcattaaaggatttagaaagatatatttaccactgagaaatagttcctacaaaggaaataataattacattagccagacrcattttaaaaattatgattcccttcagaaatctgaagaaatggataactttgataggctttggtgttacttttggatgccaaattctataagggtccatccatctcatacttaagaatttcaaagactgtattgaatatggcatactgaaatgtttacatatttgtaaaatagataaattgagccaaataaatatttgccagtattttgcatttggaacagtgagtagatcatcagttacctaaattataggttaaataaatatatagacttctctctcccattcccacctagccaaaactgaattacacattttcggtgtatattgatagctgctggagtctctctgatgctacttagatatcacatggcaaaaaagagaggcttttaaatttttttcctgaagtccttccatcct

SEQ ID NO: 791144 - DNA, 631 bp, Homo sapiens
taacttgtcttttttacatacccttctcctgacaatgttttccttgcggccttctgttccattttaggtgagcagatctaattcagccttgaaatattaattgtagtctctggtgaaaggataaactttcatgccttaaggatatctgtaaaaatacagacataaaatgtgattctctttactgtcccatagggttcagctctcaatgctttcaaagtcttagaagctaaaggaacccttctctttggttttagattatggcttaggttaacaattctccatcattmagtgtttaaatttttaggctatttaaaaacttttgtgaactatttcatattgcagaagacctatgcttaataaaacaagcagcaggttacataaggaaagcaaaccacctcattcatattttctcattttttccctatactttctcttccaccacaacctttctctaaatctttctgttcaaattcatgcatatggagcagccatgcttggatttctgcccccttaagaactgttgagaatccaacttgctaaagcaacccctaactgaatatagctctctaaaaagagatccaatcgtaaccaaactcaggagcatccctttacgtgaatgttctaacttctg

SEQ ID NO: 791145 - DNA, 655 bp, Homo sapiens
cccttgtatactctcctcttcttgagtatgaatgggatccctgtcttaattctaaccattagccttttgcaaatgtgtttggaaattactatcttgatcaggtaatgttatatggcaaaagtgatgagtgcttatactgtaraagattccttcttaggaagctggagagaatgaatctccctgctagtgttgaagaagcaagctgttacgttgtgaacagtctatggagagggccacatggcaaggaaccgggacagcctctaggagagcctcagtcctaccatccacaaagaattaaattctgccgacaaccatatgagcttggaagatgatgcccagctccaaaaaagatcataggctggctgacactttgattgcagtcttgtaaaattctaagcagagaacccattatgctatgcccaggctcctgacactgtgagataataattgtgtgttgtttgaaactactaggtttagtgatagcttgttacacagcataagataactgatacattagttttttggagattgggcatttgttctttcttgtgtatagacacttgttatattggcattggacaatctttgggaatccccaattccctgaactgtttgagtaaagtcttttaaaacacatacttatttgatactatag

SEQ ID NO: 791146 - DNA, 564 bp, Homo sapiens
ccacggaccttagactttgtccttcgacaggtcctggaaaggggcagctgtctcctctgcagtccccaatgctagaacatagaatcttttctacttggccatcattgtctaagcccagtctcttggtggctcatttcctgtttggcttttcccaagaagctttagaagagatccagaaagcacaagagaggagacagacaacggagagaagccgcacaggagaggcagcgcgaaagaagccttctaatctgtcttcaacatcctgctttgcatggtggtctctaggcggcaattcccaagagttcaggtgaggactccaggaaatgccatcggggaggatgccagctggcctgcrgaacttcccagaaaggaaaagccaggtcagtgtttgctgagcaggtggagtccactggtcaccttccctttgctgggtctgcttggcttccaatccccaatcacatctcaggacagaactcacatgggaaggctgaatttggagaaacggagtcagttctcaatggccggatgctctgagaaatgccatggagcctgagataaggaact

SEQ ID NO: 791147 - DNA, 658 bp, Homo sapiens
cagattcgagctaacccccaaaaaaggggctcatctgtgaaacacctgattggctgacctgtgatttttgacactaattagcatatagatattatttgtttggacattaaggatttaaggttacagaacatggcataacacagtatgcaygaacaaatactaaaattatggtgctcataacgaggaaccaatctgatcttaataatagttttaaaattcacactgattcacacttaatggattattttccctacagatggtttattacacgtggtgggaataattgcttttccaatattatgtttggtgggattaattaggtactgtttgtttcccctcaagataatataaacaaaaccttgaaatgagtaatattcagattagcaagcagagaagaaggcatcccaataggtaatgggtggtgaaatcgggcactctcgctccgacacgtctgaataatgcatagctttgggatgctccaagctgtcatcactttctgctaaaaatgcttcccgcatttcccctctcattgagctgattttcatcacaagggcttcccatgctcgtgccatgagggtttggtttatgttttcaatattctaaggtgctaaaacataactagaaagttaagaaatgtattactgtaaagttgggaaga

SEQ ID NO: 791148 - DNA, 658 bp, Homo sapiens
cagattcgagctaacccccaaaaaaggggctcatctgtgaaacacctgattggctgacctgtgatttttgacactaattagcatatagatattatttgtttggacattaaggatttaaggttacagaacatggcataacacagtatgcatgaacaaatactaaaattatggtgctcataacgaggaaccaatctgatcttaataatagttttaaaattcacactgattcacacttaatggattattttccctacagatggtttattacacgtggtgggaataattgcttttccaatattatgtttggtgggattaattaggtactgtttgtttcccctcaagataatataaacaaaaccttgaaatgagtaatattcagattagcaagcagagaagaaggcatcccaataggtaatgggtggtgaaatcgggcactctcgctccgacacgtctgaataatgcatagctttgggatgctccaagctgtcatcactttctgctaaaaatgcttccckcatttcccctctcattgagctgattttcatcacaagggcttcccatgctcgtgccatgagggtttggtttatgttttcaatattctaaggtgctaaaacataactagaaagttaagaaatgtattactgtaaagttgggaaga

SEQ ID NO: 791149 - DNA, 538 bp, Homo sapiens
ttgccaggccctacgacatttcatcccgggcacacagcttcaacaaatgcacactccagggcagtattccaccaggactgactgttacctccctgttactaatctcatttgcactgagaaagaatcccttcctatttttattgaagaaggttagctgctgctcccacagatatcccacgggggttggtcccaggtggcacgaggagggcatcagggtttggtagcaggacgtgagtcctgccattctgggattatttgccttcctgycctcttagtctgttcaaaatggccaaagcagcccgaggagaagctgcatcctcacgaaaggtcagggctcccctctccacctccctaagctcctgcatccggcagctgttggctggcaggccccgattacaaagggctcatgggcagagggtgattaagaggatcacggcctgtttaggtggagggcctgctcttctgttgtctctcacatgtacaatgcctcactagctacaaagggacccagcaaagggagtgcatttttaccacctga

SEQ ID NO: 791150 - DNA, 621 bp, Homo sapiens
gcacctcacaagccacgctctacctaacggtcgctcaggatacatcaaagtatcccctgtcccctagccaacattgcccaccactctggtatttgacaatgaaagtatactaggtgagtgagaaagatgtgtatactccaaaatgaggtatggggagcccctcttgagcaaacagattttgaggaaggctccaaagaagtcttacattagctacagtgttcataagaaactaaarggggcaaatacatctttgggagactggatttaatcaaagtgacctctgatgttctgataaaaccagtcggtattttaaactttaaaatgttttgacgtaactaatatatgtttatatgagaacataaagatatggaaagagcaggaggaaaaaccatcccctacctgaagctgataacctatatgctttagtatctattgttcaagacttcttactaagtattaaaaagtgtgtctatgcatattttaaataaaaacatcatttgacaatgtgttctttgtaaaacagtatattacctattgcaggaaactgttctaacccaataaatacaattctactactctttaaggattgcacaaaaactccaatgcaggggtcaactggaa

SEQ ID NO: 791151 - DNA, 575 bp, Homo sapiens
atggtgcccttgattgttagactcacctgtctaacaagctgtgtggtgcacgtgggtgccgctcacactcacctgcccctaagtgcacttctccaccccttgaagtctggggtgatcatgtgatctccttcagccaatgacatgaacactgtcattttggggcagaagccccagggcgggggactctttgctgtcctctccggctgtgttcctctgtggcggaacctctgttcayctgggttccgagccaaaaggaggattcggagcatgtgtgagaaacacacctgtgctgtttggagccatggagattcggagaggttcaaactctagtgcaggccatccagattgttacggaagatgaattatttcctactgctctttctcccagaaaatgtaatgcttgttgatgttaaaatgaattttttgccttgcagctgatcactcagatacttcaaatttcattttatcaaattctttccagcacctgttcttcatcttactttagttttagagggataaggaggctttgttcctttttaacattctcgtggaaatattatggatattcagaagtg

SEQ ID NO: 791152 - DNA, 669 bp, Homo sapiens
ttatcatccccaggaaatggttaagagcagaacatttgatttttcatcaaatgattcaggacgttcccatttgaagaaagttaataatgtcagataaccttgagaacccagggtgtgtttcttagttaaaactgagcaagtgctgaccacagtaaaagtacgtgggcactgagtctggctctgaattaaagaggaacacaggttcacattagaaaccgtgattgtaggttttattacaagagtttgtttcctgaccctagattcaggtagtaagagcccatattcagagcacaccaccatttctccactgtttcatgtcctggtgagcataagagatcttgcttaaaacaaataaaagtctcaatcatcaragttggaagactaataaacttattgataattcttccttctgggcacttatcagcctcttagatccccttaaggattagaaggaacactataaagttatgtccatagtagggaaggattttgtaaagttctccatttctttcccatagaaaaataatagttcctatttcacgtcaatcacattggcaccatgacaacaaattactttgaacgttggtcagaatgcaagaagacagtgaagtaagcgccaggttcttttctgtctgtaagatcagaccaactgacctggggcagagcttg

SEQ ID NO: 791153 - DNA, 604 bp, Homo sapiens
tagtttccttaaaggtagtatctagagtttgacataatcttctggagaagattctgcagaacccagtgtttggtcagatggggatattttggtcccattgtgaaacctatcctcttagaacactgcagacttctataattacaaaaaaacaaaaacaaraacaacccacccaccccgccaaaactgaaaacagcctagggaccaggtggggaggtctttgtggatggtctctctgcactgagctggactttgccatcaaacttaacctcttgcgctgaaattttaagtgagcattttatgcttagatatgtgggaggcccaattcatgaaccctgttcctcttccggtcctgaacacagaagctcctttgcagtcattcaacacactgtcccacaccaggatgcacgtgtcttacataacaaaattatcaagctggctgctaatcaaaagtcattccttttacattttagacatatttcctgcaccccaataatgtaaaaaaggctagggggctgggatgggaggaagagctgctggtcaggcttagaattctgttgacatctctgtccttccttgggagtcactagcaccaaggatgtctgaa

SEQ ID NO: 791154 - DNA, 589 bp, Homo sapiens
taaatttatcagagtttaattgagcaaagaacgattctcaatcaggccacctcctgagccacagcagactcagagacgccaacgtagccacatggtggaagatttatgaacagaagaagaaaagtgatgtacagaaaatrgaagtgagatacagaaacagctcagcatttactgtatttgaacacagtttgaacagtcagccacctttgattggccaaaacttggtgattggcgcaagagtaggatacagtctgtttacaactctgtttaggttatagttcccaatgtacagagaaaactttaggccaaacttaaaataggtaagaaggcagctttacgctaaccttgatttaacatagggaagagctaaatgtgtctggggaggggctggaaccagcaagctgggagccggctacgcagcggccagcactcttaagaagagggatgcacaggtttccattgctcaaggagctggctgaggccctgcagtggccccttcagccgacatggcctcccactccatgctgggggagccaaagggaggaacagcaggccaggcgtccagcccaggaggaagcgccacatccag

SEQ ID NO: 791155 - DNA, 589 bp, Homo sapiens
taaatttatcagagtttaattgagcaaagaacgattctcaatcaggccacctcctgagccacagcagactcagagacgccaacgtagccacatggtggaagatttatgaacagaagaagaaaagtgatgtacagaaaatagaagtgagatacagaaacagctcagcatttactgtatttgaacacagtttgaacagtcagccacctttgattggccaaaacttggtgattggcgcaagagtaggatacagtctgtttacaactctgtttaggttatagttcccaatgtacagagaaamctttaggccaaacttaaaataggtaagaaggcagctttacgctaaccttgatttaacatagggaagagctaaatgtgtctggggaggggctggaaccagcaagctgggagccggctacgcagcggccagcactcttaagaagagggatgcacaggtttccattgctcaaggagctggctgaggccctgcagtggccccttcagccgacatggcctcccactccatgctgggggagccaaagggaggaacagcaggccaggcgtccagcccaggaggaagcgccacatccag

SEQ ID NO: 791156 - DNA, 589 bp, Homo sapiens
taaatttatcagagtttaattgagcaaagaacgattctcaatcaggccacctcctgagccacagcagactcagagacgccaacgtagccacatggtggaagatttatgaacagaagaagaaaagtgatgtacagaaaatagaagtgagatacagaaacagctcagcatttactgtatttgaacacagtttgaacagtcagccacctttgattggccaaaacttggtgattggcgcaagagtaggatacagtctgtttacaactctgtttaggttatagttcccaatgtacagagaaaactttaggccaaacttaaaatakgtaagaaggcagctttacgctaaccttgatttaacatagggaagagctaaatgtgtctggggaggggctggaaccagcaagctgggagccggctacgcagcggccagcactcttaagaagagggatgcacaggtttccattgctcaaggagctggctgaggccctgcagtggccccttcagccgacatggcctcccactccatgctgggggagccaaagggaggaacagcaggccaggcgtccagcccaggaggaagcgccacatccag

SEQ ID NO: 791157 - DNA, 589 bp, Homo sapiens
taaatttatcagagtttaattgagcaaagaacgattctcaatcaggccacctcctgagccacagcagactcagagacgccaacgtagccacatggtggaagatttatgaacagaagaagaaaagtgatgtacagaaaatagaagtgagatacagaaacagctcagcatttactgtatttgaacacagtttgaacagtcagccacctttgattggccaaaacttggtgattggcgcaagagtaggatacagtctgtttacaactctgtttaggttatagttcccaatgtacagagaaaactttaggccaaacttaaaataggtaagaaggcagctttacgctaaccttgatttaacatagggaagagytaaatgtgtctggggaggggctggaaccagcaagctgggagccggctacgcagcggccagcactcttaagaagagggatgcacaggtttccattgctcaaggagctggctgaggccctgcagtggccccttcagccgacatggcctcccactccatgctgggggagccaaagggaggaacagcaggccaggcgtccagcccaggaggaagcgccacatccag

SEQ ID NO: 791158 - DNA, 551 bp, Homo sapiens
ccattgctcaaggagctggctgaggccctgcagtggccccttcagccgacatggcctcccactccatgctgggggagccaaagggaggaacagcaggccaggcgtccagcccaggaggaagcgccacatccaggtgacatggaactcactcagcaaaagtgcagccaccttttcctgtaaaggccaggtggtaaatcgtgtccacttyacagcccctggggtatctgctgcagctcttcaactcaactcaggcatcaccaaagcagccgtagaccacccggaaacaaaggggtgccactgtgccccaataattgttttttaatgtaaaaacaggtgttgagccagaatttgacctgtgacctggtttgctgactgtgctttagaaagactgggaaggatagtgatgatgggttttgaccacagagatatgggtgtgtgtgtgtgtgtgtgtgtgtgcccgtgtgtgtggctctgtgtacgtgtctgtatctgtactgggagtggggatgcccattgattttcttaccgggggatccttgttcttagagctc

SEQ ID NO: 791159 - DNA, 525 bp, Homo sapiens
actcatccacctggcccatgaagggcccaccccctccatcacttgggtctgcagggcgtgtgtgagaccttgcgtgggaaaaacagctctgtctccatcccctgcaggcggggatcagcaatctgctgaccagggaaaaggtaagaaaagccccttggactgagggcagagttgacaccgtgcattcccctgtgcttggaagaaagtgctgggcgtcgtcacagggacagccactgcttccggaggtagacrggccactaggaacacacaccctctagagcacttctcatttgcacagctccaccttatgcatacatttcccaagtcgtgcgctgagctcctactgtatgcaaacctataggagagaataacttaatccccgcactgtctgagagaaaaagtctctccatgtctgcacttcccagggaacaagacaaaggcacagagaagctaagtgagagttggtggggggcagagactacagggagcaaccccagtgagtggctcccgtgccggctcctgagc

SEQ ID NO: 791160 - DNA, 420 bp, Homo sapiens
aacagaaaggctaggatcccctctctgtgcttcaactgcatgtcaagattctgcatctgactttttcatctgccccagagagctcttagattgcaagtataacatccaaacggataacacctccttgagcatcagagaccagagatggagacgmagccaatgtggatgcctcgaagccagatgctgagtgaggaggagccaggtcttgagccttcctccctccaaccccacagccccttctgtaggtcatccacagcagcctccagaggtcagacctgtggccaggggcattcctcatggtcccttagtgcccatgggtacatttaccaagcacgctgctgattcattattcaccagcgtgagcaaatgggccggcttcccatggctgctgtaacacattttcacatactcagtggcttg

SEQ ID NO: 791161 - DNA, 593 bp, Homo sapiens
ctcttgggagaacaaacctacttccacaagaacaacattaattcattttaatcacctctgaaaggtcccacctctcaatactgttacgctggagattaagtttccaatgaacactcagggacacattcaaaccatagcacatatgacacctatataaaacttatgttgtgttttatactatttattaaagtggacatatagtacttagarcacagctggcccctagaaaccacttccttatactttctgcttcatctgttcctgaatcaacctcctcttgtctcctctccaaaggtttcaacagcttggcctaataatgtgagtgtcttcatatgttatcataggacacatgtgtggccatttctctaaatctatgcccatggtaagggatttttgtgtatcctccatagccaaacagtttcccaaatggatataacaacttacaccccaacttcagtttatgagagtcaattgttccatatcttcattggtacttgatatggtttgcatgttcatcccctccaaatctcatgttgaaatatgatccccaatgttggaggtgtggcctggtgggaggtgtttgggtcatgggg

SEQ ID NO: 791162 - DNA, 593 bp, Homo sapiens
ctcttgggagaacaaacctacttccacaagaacaacattaattcattttaatcacctctgaaaggtcccacctctcaatactgttacgctggagattaagtttccaatgaacactcagggacacattcaaaccatagcacatatgacacctatataaaacttatgttgtgttttatactatttattaaagtggacatatagtacttagaacacagctggcccctagaaaccacttccttatactttctgcttcatctgttcctgaatcaacctcctcttgtctcctctccaaaggtttcaacagcttggcctaataatgtgagtrtcttcatatgttatcataggacacatgtgtggccatttctctaaatctatgcccatggtaagggatttttgtgtatcctccatagccaaacagtttcccaaatggatataacaacttacaccccaacttcagtttatgagagtcaattgttccatatcttcattggtacttgatatggtttgcatgttcatcccctccaaatctcatgttgaaatatgatccccaatgttggaggtgtggcctggtgggaggtgtttgggtcatgggg

SEQ ID NO: 791163 - DNA, 610 bp, Homo sapiens
atgagtaaataaaagacaattactcttattatttaaatctctttatacttgattgttaaaaccaaaaataataatgcatagtgtatttataatatatgtaggagtaaaatgtgtggaaaggatagatcaaagggtgagaggggagacatagaagtacactattacgaggttcccacaagatacataaagtcagataatatcacatggaagtagaatgacaaattaaagatataaactacacattctacagcaacccctaaaacaacaaaacaaggagttatagctaagaagccaataaaagagataaaatagaatcataaaaawtatacaattaattcaaaataagacagaaaaagaagaaataggaacaaaaaacaaatggaacaaatggaaacaaatagcaagataatagacttaaaactaactacgtcagtaacctcatcaatataaatgagcacaacacaacaattaaaaggcagatcatcaggacagactttaaaaagcaaggctgaattgtgtgctccctaggaaccctttttaaatataaagacacaaatagttttaatgtaaaatgatgggaaaagatatatcattctaagtccaagcaaaa

SEQ ID NO: 791164 - DNA, 513 bp, Homo sapiens
gaaactagagtgccccaagcagtgcaagtctgtaaggagccctcaggctctcccttgaaaggtatccgagcctgcggtggctaggggtatccatggctggctcgctgattaggactcaatcgtttggttcagggtttacactgttacagaggaaagccaggggctgaycttgtgtggggggatcttgagtgggacccaaggacactcaccctgccactcactctcagggggctcaaggtggcaccactgccccagagacacctctctgggaaagccagaaaaaatgtgctcagtccaggccaccagggtggcatctgctgagccctcctaaatgcagggcagctccccgccatggaacaaggcgttattgatgatgggtatccgagttaccaatggcagatccatacaggtctgcagcaacaattcttgtcctcagaagaaagaattccactgaggggcataaggcagaagaagagaccaaggcaaactttagagcaggagtgaacatttgtt

SEQ ID NO: 791165 - DNA, 513 bp, Homo sapiens
gaaactagagtgccccaagcagtgcaagtctgtaaggagccctcaggctctcccttgaaaggtatccgagcctgcggtggctaggggtatccatggctggctcgctgattaggactcaatcgtttggttcagggtttacactgttacagaggaaagccaggggctgaccttgtgtggggggatcttgagtgggacccaaggacactcaccctgccactcactctcagggggctcaaggtgrcaccactgccccagagacacctctctgggaaagccagaaaaaatgtgctcagtccaggccaccagggtggcatctgctgagccctcctaaatgcagggcagctccccgccatggaacaaggcgttattgatgatgggtatccgagttaccaatggcagatccatacaggtctgcagcaacaattcttgtcctcagaagaaagaattccactgaggggcataaggcagaagaagagaccaaggcaaactttagagcaggagtgaacatttgtt

SEQ ID NO: 791166 - DNA, 337 bp, Homo sapiens
tctcaagatctaagttttaaatgtcttctttcaagtttgtgattcccaaaatggtttgatattttgctctcatcagttaaaaaataaatgagcacattctcctaatgtatgtacacttatttattaattataaattataaatataaatgaccaaattaataaataacgtacgtgccagatctcactaaygaacccctgcaggcctatattcccagctcttctctttggttcagtgcctgttcagcatggaccgtatcaatagcccccttgccttctggcttctactgggcatagcccatgggtagccctggcagatgaccgaggaaagactatgagg

SEQ ID NO: 791167 - DNA, 547 bp, Homo sapiens
gtctggagactaaaagtttgaaatcaagatttctgcgagccacgcaccctctgaaggcattgaagggaggctccttccttctctctcagtgtctggtggtaccagccagcactccttggcttgtggcagcatcactccaacctctgcctccrtcctccctcctcttccctctgtgtctgtgcctccacatggccttctcatctctgcctgggtctcttctcataaggacatgaatcaccttagattaagggtccaccctactccaatatgacctcatattagcttacatgttaactacatctgcaaagatcctgtttccaaataaggtcacattcacaggtcatggaggccaggacttccacctatcttttgaggggacacaaatttaatccacaatagaaggttgcagggtgacagttgcctcttctaaaacgaacatgaagaatgcggtttgggtgccgccagccactgggagtggtctttcacctgttctccttcctgtccagacctccaccctgcacccctagagaaagtctgggaagccagg

SEQ ID NO: 791168 - DNA, 547 bp, Homo sapiens
gtctggagactaaaagtttgaaatcaagatttctgcgagccacgcaccctctgaaggcattgaagggaggctccttccttctctctcagtgtctggtggtaccagccagcactccttggcttgtggcagcatcactccaacctctgcctccgtcctccctcctcttccctctgtgtctgtgcctccacatggccttctcatctctgcctgggtctcttctcataaggacatgaatcaccttagattaagggtccaccctactccaatakgacctcatattagcttacatgttaactacatctgcaaagatcctgtttccaaataaggtcacattcacaggtcatggaggccaggacttccacctatcttttgaggggacacaaatttaatccacaatagaaggttgcagggtgacagttgcctcttctaaaacgaacatgaagaatgcggtttgggtgccgccagccactgggagtggtctttcacctgttctccttcctgtccagacctccaccctgcacccctagagaaagtctgggaagccagg

SEQ ID NO: 791169 - DNA, 538 bp, Homo sapiens
caaataaatctgaaaacaaacactgcaacagagcaagaaggcagctcaagaggagaggaatgaaaagaggtgacgtctatcagacagctagctggtaacagagaatgagaggccaattagggagagtaatactgagcttctgataaacttggaaatcagaccatagaagttaaaatagcaattaacgaaaacacccaggaagcaaagaaactgtacctgacagggcccagtgaataatttagaagcaagcagttctttgcgatgttgttatattgtagagatcagtcacagaaaggctctcctgctgtcacatttcagcaaaatgaaacactaggagatcrtaagagaggctatgagagagtgaaatcactcattgagtgatgaaaggctaatataaaacctattcattccgttgtttatcacatttgacaagaaattgaacaccacaaaactgaaatcatcacaaaattaacacatttcattaggtgaaaaaaagcttaaagcttccgtagaacaactcctctgcccattttcaatt

SEQ ID NO: 791170 - DNA, 549 bp, Homo sapiens
gagtgtctacagtgtttccagttgaccagcactgtacagctacttggatccttttctgaaatttcatgaaggtcatgtctcaattaccattattcataacagaagcacaatggcgtgctttcctttcaaaatcaatcaagttgtatgtgcaactgggcagctccttctgtgtttggacttccgcctcggttttgcaaaagcaggtggccctttcttgaaaatgaggagcatgactcctcctgctgaratgactacacctcccccacacccttgtgtgggccaggcagtggcctctgatgctgtggcagggtggctgtggcatcccgtcctccagtgcaacccgtgcctcaggacgccctgcacactgacagtcaaggtgtgcacagcacagcacccagcgggtttcactgacaggggatgggagccgcagcccccaaccctcagagttcacagcaacagaagcaagatgacagccagataatccacaatgccaggggcttttgagagtaatgagtcctttctgtctttggatgggtgacactggtggct

SEQ ID NO: 791171 - DNA, 549 bp, Homo sapiens
gagtgtctacagtgtttccagttgaccagcactgtacagctacttggatccttttctgaaatttcatgaaggtcatgtctcaattaccattattcataacagaagcacaatggcgtgctttcctttcaaaatcaatcaagttgtatgtgcaactgggcagctccttctgtgtttggacttccgcctcggttttgcaaaagcaggtggccctttcttgaaaatgaggagcatgactcctcctgctgaaatgactacacctcccccacacccttgtgtgggccasgcagtggcctctgatgctgtggcagggtggctgtggcatcccgtcctccagtgcaacccgtgcctcaggacgccctgcacactgacagtcaaggtgtgcacagcacagcacccagcgggtttcactgacaggggatgggagccgcagcccccaaccctcagagttcacagcaacagaagcaagatgacagccagataatccacaatgccaggggcttttgagagtaatgagtcctttctgtctttggatgggtgacactggtggct

SEQ ID NO: 791172 - DNA, 549 bp, Homo sapiens
gagtgtctacagtgtttccagttgaccagcactgtacagctacttggatccttttctgaaatttcatgaaggtcatgtctcaattaccattattcataacagaagcacaatggcgtgctttcctttcaaaatcaatcaagttgtatgtgcaactgggcagctccttctgtgtttggacttccgcctcggttttgcaaaagcaggtggccctttcttgaaaatgaggagcatgactcctcctgctgaaatgactacacctcccccacacccttgtgtgggccaggcagtggcctctgatgctgtggcagggtggctgtggcatcccgtccyccagtgcaacccgtgcctcaggacgccctgcacactgacagtcaaggtgtgcacagcacagcacccagcgggtttcactgacaggggatgggagccgcagcccccaaccctcagagttcacagcaacagaagcaagatgacagccagataatccacaatgccaggggcttttgagagtaatgagtcctttctgtctttggatgggtgacactggtggct

SEQ ID NO: 791173 - DNA, 604 bp, Homo sapiens
ctgggcttctctccccatccctggatcctggctggccttaatcccagtatgcttggctatggctgtgcctccctgcgtcggggtgcacctctcttctccatgcccctctttcctggcttcatcttgctctgagttgtcaatgaaaagaatcaaactgtgcaaaatattggaagagatttgttctgagtcatgtatgaggactgtggcctgtgacacagccccaggagatcctgagaccagtgcccaaggtggttgggctacaactttgttttacatgttttaggaagacataagacattgatcaatatgtgtaagatgtatactggttctgtccagaaagatgggacaacttgaagygggggcttccaggtcataggtagagtcaaagattttctgattggcaattggttgaaagagttattatttaaagacctagaatcaatagaaaggaatgtctggattaagacaagggattgtggagaccaaggttttatcatgcagatgaagcctccatggagtacgcatcagagctcttatcaaacctaaaaaggcgccagactcttagttaatttgctcctggatcagggaaaagacgtcgagaggg

SEQ ID NO: 791174 - DNA, 500 bp, Homo sapiens
tacattcttatgaactcaagtccatactttcttcagacatccttagtttttacgcgatgtccttttctgttcccagatcccaccctacacatctctgtaggctcctctgggctgtgacagctactcagactttccttgttttcgctgactttcgtgaggggtactggtcgtgtgttttgaagaatgttcctcarttgggatttgcctgatgtttctctcatgatgagacttggattttgggtcttggtttttgggaggaagaccacagaagaaacaccattttcatcacgttttatcacagtacatactatcaacaggacttaatcttatgttgatgttgatcacctgtcaaagatcgtgtttggcaggttcatccactgtcaatttaccctttccccttcctttacatattgtatgccttggaaaaagtcattccatggagcccacactgcaggagtgagagttaggtgtcgccttcttaagggtggagtatcttcata

SEQ ID NO: 791175 - DNA, 500 bp, Homo sapiens
tacattcttatgaactcaagtccatactttcttcagacatccttagtttttacgcgatgtccttttctgttcccagatcccaccctacacatctctgtaggctcctctgggctgtgacagctactcagactttccttgttttcgctgactttcgtgaggggtactggtcgtgtgttttgaagaatgttcctcaattgggatttgcctgatgtttctctcatgatgagacttggattttgggtcttggtttttgggaggaagaccacagaagaaacaccattttcatcacgttttatcacagtacatactrtcaacaggacttaatcttatgttgatgttgatcacctgtcaaagatcgtgtttggcaggttcatccactgtcaatttaccctttccccttcctttacatattgtatgccttggaaaaagtcattccatggagcccacactgcaggagtgagagttaggtgtcgccttcttaagggtggagtatcttcata

SEQ ID NO: 791176 - DNA, 610 bp, Homo sapiens
cctgtactatctctcagaacactgagaactgcactgagccatctgataaatatttcaagtccaaccaaccgtcaagcgccacagatcacaggtcatcaccaggagggctgctagattggttccctacatgatttgaggccaggctgtgactgatgactacagatcccatcacaccactttgtagtggctgctcccaaatactggaaaggagcagggtctggaaagcaagactctgaaattacttcactctaacttttcaaagcccctttctcacatattcatgtcttagtttgctattctttaaaatgaggaggaaaatcttaaggaagtcaacaatggtaatagagggatactagtgactttaaggcctaygctgaaatcacaatagaaagacaataaaatggttttaaattgtggcagaggaagtttcgtatccaaagggatttctaattgttgaactaatggaaccatcctccagagatcactgaaaatgggagaggccttcaacctgtctttactaggttaagagacaccctatttggagtccagagtaaagggcaagaggatcccttgaagtcctgccagatttttgtgattttttcctgaaatc

SEQ ID NO: 791177 - DNA, 656 bp, Homo sapiens; identical to SEQ ID NO: 738917

SEQ ID NO: 791178 - DNA, 639 bp, Homo sapiens
accatatatatagactatttaccctgttgcagaaacttctattggacagcattagagcagactttgcgggtagaggggaatgggatgtatgaggctaggttttgtatgttttggagcttagagtttgagtgagttttcgagagcctctgaaagccattcaaccctgtcccctgagggaaatcaaatatcctgggaagaactcaatgaccactctcaccttcaagtagcattaatgactggaaaataacagtgctggccacgaattaktcctcccacttgctaacctgggccagaaaggaaatggaatgtgtgggtctgttttcagtctgtattggtcagggctcaatagagcaccctagcaagggacacattacaacacacctccatttctgctgtaactttcgtgtttaaaaaaatgactacattaactctttgagaactgaatacttttcagtacatctggtgagtatgccattggagagtttcttttgaatcagacctttgattatggtgccagatctcgccaacttgagaaagttttgatattcttgttcagtgtagccttatgataaaataaaatgaatgaaacactgggcttcctctacaacccctctatgggggaggtccttagcaaaaatg

SEQ ID NO: 791179 - DNA, 639 bp, Homo sapiens
accatatatatagactatttaccctgttgcagaaacttctattggacagcattagagcagactttgcgggtagaggggaatgggatgtatgaggctaggttttgtatgttttggagcttagagtttgagtgagttttcgagagcctctgaaagccattcaaccctgtcccctgagggaaatcaaatatcctgggaagaactcaatgaccactctcaccttcaagtagcattaatgactggaaaataacagtgctggccacgaattattcctcccacttgctaacctgggccagaaaggaaatggaatgtgtgggtctgttttcagtctktattggtcagggctcaatagagcaccctagcaagggacacattacaacacacctccatttctgctgtaactttcgtgtttaaaaaaatgactacattaactctttgagaactgaatacttttcagtacatctggtgagtatgccattggagagtttcttttgaatcagacctttgattatggtgccagatctcgccaacttgagaaagttttgatattcttgttcagtgtagccttatgataaaataaaatgaatgaaacactgggcttcctctacaacccctctatgggggaggtccttagcaaaaatg

SEQ ID NO: 791180 - DNA, 785 bp, Homo sapiens
ctaatgtcctgtccaacacgaactgggatcccatgactctctgaaacaggatttaatgagattttgtataggctctaatatctcatagaccaagggagcccttggatacatatatatttttctgccatccttaagctttaatagtttacatttgtgtaatactttacagtttgtgggagcctaatctcccagactattggttatctgttgtcaaaataatgctgtgtaacaaacaactatgaaatcacaggggcatacaacaatatgggtttattgctcgtaagtctagaggtttgctacatgactctgctgattttggctaggcttattcacatacttgggggtttggggctgtcaattgatctgagctatcagatgacctgggggactcagctctgatccatgtgccttttatctttcatgaagctaacctaggcatgttctcatggtaatgaaagaaaagatagaagaggcrcaagaaagcaagcaaacattgcaaggtctcatataatggccaaagcaagtcacatgaattccgtgccaaggtgtggggaaatgtactccattccttttgatagagaaatttcacctggcaaagggtgtagatacagggaagagaaaataattagtacaattatagcaatttaccatacagatattgccttgtttaatcttcatggtataatcctttacccatgaaaattggtattaatattattccctctttcgcagattaaaaaaaaaaggaaaccaaagtaataagaaattgctgggtgtggtggctt

SEQ ID NO: 791181 - DNA, 482 bp, Homo sapiens
cattgagcaatcattgaaaaagagggagtagggctaataagctaatgtgtagataaaaaggaatcattaaagataatccaaaataaggcaataatagagagagaaagaacaagaagacgggactaatagaaaatgaatagcaaaatgataagcctaaaagcaattatagagataattacattaaataaaaatagcttaaattcctcaaattaaaaggtagaaattattagactgggtgaaaaagcaacagccaactatatgttgtgtaaaagtagtcgcctaaatacaaagcaattcataaattaaaattaaaataattgaaaaaagaycatgcaaacttaagaaacctgcagtggttttatttgtatcaaaatggactttaagatgaaaagtaatagcaaggataaggaaaactatctcataatgacatagagtaaaatcttaaggaaattatagcaatcttacatggcatgcacccaaaa

SEQ ID NO: 791182 - DNA, 656 bp, Homo sapiens
gtaccagaaatatacagccagactaagacaaccacacatatcaacagtcatttactttggacatattcctagaaaattttgcttccatttatcatccttttcccgtccataaaggcacaatttaaaatctatccagtccaggaggctttctgcgctgttcaaccacagttggagtgtgagatagactcagagtcgctgtttccaagagttcaaaattcaccattgtcaatattttccccagttattgccaattatgatcataagccactgccaaaattcatttatcagtcatctgtgagttttctsccttgtagacaagtctgtttataagctcatattccagtgacaaagaacatatgggttgactcattctgctgtagccagttcagaatcaacagtttgcctcattaaaccttaaaattagatagcttattatattctctgcacacatagccagaatatttaggaacaaggcattatcacaatcctaacagctattatggtttattttatgttaatggtgcttgattcctgcactcacagttttacgtagcaagcatgatttggaggtcatttaatcagttcagcatatgaaaacatgcccccatactgtgctgactcatcagcgttttaatgtgacaacacatatacgcaca

SEQ ID NO: 791183 - DNA, 656 bp, Homo sapiens
gtaccagaaatatacagccagactaagacaaccacacatatcaacagtcatttactttggacatattcctagaaaattttgcttccatttatcatccttttcccgtccataaaggcacaatttaaaatctatccagtccaggaggctttctgcgctgttcaaccacagttggagtgtgagatagactcagagtcgctgtttccaagagttcaaaattcaccattgtcaatattttccccagttattgccaattatgatcataagccactgccaaaattcatttatcagtcatctgtgagttttctgccttgtagacaagtctgtttataagctcatattccagtgacaaagaacatatgggttgactcattctgctgtagccagttcagaatcaacagtttgcctcattaaaccttaaaattagatagcttattatattctctgcacacatagccagaatatttaggaacaaggcattatcacaatcctaacagytattatggtttattttatgttaatggtgcttgattcctgcactcacagttttacgtagcaagcatgatttggaggtcatttaatcagttcagcatatgaaaacatgcccccatactgtgctgactcatcagcgttttaatgtgacaacacatatacgcaca

SEQ ID NO: 791184 - DNA, 550 bp, Homo sapiens
agtacttatgctaaacatccaggactgtgcactggacacttaccttatatctgttgaattaaaagaaacgtatgagttacaatgtttaaacagccatctgccatcatgagcgaattcttgaggaaattgcttgggacctaaagtacaacatacgttcgatctttgtgtatatttgtactttttcaatttggaaactttgaaagaaagaggtaaaaaggggagtgagaaagaaaatgaaaaaaaagaaaaaagggggattgtcttaaaaggcaaaacaagtgttttgtggtattttgtactcgtgagagaaagagaaaaaataaagctgcccaaatagacacagcctgacaccaaatcagcggtattaacaccaaacaaagagagaaggccataggatartaaagaaaacttagctgaaattaatcactttagaaaagagaaggatcattcaaattttatgcatggtaggctgaataatggcccctcaaagaattatccccggaacctggggctacgttaatttatgtggtaaaactgactttgcaaatgt

SEQ ID NO: 791185 - DNA, 554 bp, Homo sapiens
ctttattgtccatatcactatcagaattttgggcaaagccattcaacaagtctctaggaagttccaaactttttcacattttcatgtcttctgctgagccctccaaactgttctaacacctgcctctttcccagttccagtcacttccacatttttgggtatctatagcagcactccactctcctggtaccaatttactgtattagtccattttcatgctgctgataaagacataccwgagactgggaaatttacaaaagaaagaggtttaatggacttacagttccacgtagctcgggaggcctcacagtcatggcagaaagtgaaaagcacatctcacatggtggcaggcaagagaagagagcttgtgcggggaaactctcatttttaaaaccatcagatctcatgagacccattcactatcacgagaacagcacaggaaagacctgccctcatgattcaattacctcccactgagtccctcccacaacatgtgggaattcaagatgagatttgggttgggatacagccaaaccatatcagtcagatcacat

SEQ ID NO: 791186 - DNA, 538 bp, Homo sapiens
cggcgtctgtcttcctttgcggacagcaggtggatccactcagagctactgccaaacattagatgggaaatagagactccgagacgtcccctaccaagcactcgaatcacacaatcctgagatgagtgtgggtacaggtcccaacctaggtgacacatgyccgcttccttgcctgctgggaggagctgctgctgccttgctccccgcaggccagccctggcggggtcttcatcaccctcttgccttggcttcagcagatcccctgctttctgtcttccctatgcacctgcaccctttcaaggagcgcgcccagcttccagaaggtccacagaggcctcccactggctcagaggccagtgaaggtcagagatctcagacccctcctctcatccaccacctgcctcctgaagtggccaccatcatcgttccccaaagcctcctgggctagtgaaggaggaaagatttgctctgagaagcatctgggtggaacagggaactcacccacaaaatccaagccagccccatcagtcacttgtta

SEQ ID NO: 791187 - DNA, 528 bp, Homo sapiens
tgatataatactaatccaaatataaattggaacagcctttctaataagaaattcaaataaatctgtatccattgtccctataattttctatgtaggaactatcctaaggaagtatttttaaattttttaaaatttgaaaaaattgaaatatatgcatatttcatcacaacattatttatatgcagatatcacagcactgcttaatgatatcaaaaattataactaacttaagtgtgtaataagaaaataagattatagaatattcattctttggaatatcatgcatgcagccactaaaattatttatgactcttatcaagacaagggaaatgttaatatcataatgttagatttaaaaagaaagaagagaaaattgtatgtrcaatatgatacagattttacaacttcatcagcacatgaatgcatctataattctacataatgcagaggaaagaaaacacaaccccaaaatatatacctggattttatgcaggcaatgatttttatttattttcaaggctgtggaat

SEQ ID NO: 791188 - DNA, 409 bp, Homo sapiens
ttcctctaaccgtgctgtggacaacattctgaggacagcaaagccatggaggagagttcggggaagggggagaatcaaagacatgcctacgagactggacacccagattcgttagttgggtttgctgcccttgcctttgatctcctgtgcaagtggaagggtgagctgatggactattgaygcctggcttcatcctcgttgtaacgatcttattttcactgtatatcctttcagggttatgccgacgttaaagattttatttagcaattatttgtgctatctcatcaagatattgctgtgtgatgctgcaccaagagacaataattcaggaaatgattttaagatcagaaaggtgtttggatttagagtctagaatgagtaggagaaggaataaaaaggatcgatggtc

SEQ ID NO: 791189 - DNA, 666 bp, Homo sapiens
tcaggattctggttcttaagcaggagccgcgagttcaccatcgatgacctcagttcccatctcctagtggccctcagtgggtacagacaccagcacccggcctgtgtgatccgtcctggtgctggccaggccttcctctcgtcccctccagatcagccgggctcagcgtaagttttctaggacaacttcgtaaaatgaattctcatttcataagcaaatatagtgtgagtcatgctttggccacatagaattaagaaggaagaaaaaacactatttatttggttggtactttttttttttttttttttaagaaactacactgtattccagatttgtccscagatcactgtcagcttcctctcctctgggtatatgtttttaaaggacgttgtctattatgggtcagggtcccccgctccaccaggcacttcggtgtgtattttctcacttaactcccagctctgtgcagaaggtctgggagacaccagtgcttaagccaagttttatgggggccagacgaggagcagccgggttgaatgcccaggttttctctggtttccaagcccatactctgctttatccttagttttgggcccagttttcagaacacatccagaatcatccatttgcccagcaaaccaacataaggtatcaaatgaatggcca

SEQ ID NO: 791190 - DNA, 666 bp, Homo sapiens
tcaggattctggttcttaagcaggagccgcgagttcaccatcgatgacctcagttcccatctcctagtggccctcagtgggtacagacaccagcacccggcctgtgtgatccgtcctggtgctggccaggccttcctctcgtcccctccagatcagccgggctcagcgtaagttttctaggacaacttcgtaaaatgaattctcatttcataagcaaatatagtgtgagtcatgctttggccacatagaattaagaaggaagaaaaaacactatttatttggttggtactttttttttttttttttttaagaaactacactgtattccagatttgtccgcagatcactgtcagcttcctctcctctgggtatatgtttttaaaggacgttgtctattatgggtcagggtcccccgctccaccaggcacttcggtgtgtattttctcacttaactcccagctctgtgcagaaggtctgggagacaccagtgcytaagccaagttttatgggggccagacgaggagcagccgggttgaatgcccaggttttctctggtttccaagcccatactctgctttatccttagttttgggcccagttttcagaacacatccagaatcatccatttgcccagcaaaccaacataaggtatcaaatgaatggcca

SEQ ID NO: 791191 - DNA, 604 bp, Homo sapiens
cttcaagagaaatggagcccttctccaaggtaggtccctagtaacaccccttcctctccctccccctcacccacccgcctttcatcactcctttgtgcttggtgtcaaataggacagttctgtcccgtttaggagtggccgctttctggagaagtgtgactgttgtgggtggggactatttgtccagttctctttatttgttcctactcaagcttctcggtcgctgtgaatcatgagtctgaaaccaggcctctaaggactgcttctttggcccgccgtcactgttcayattctggaagtgttcggcttgctttggtgatgttggaattacatggtaattagaatgcgacagaaacataaactaggctgataaaagcaaacccctttacatgtttcaaaaacttgagctgaaaaaggagggtttggttattctggcacttgtatcatcatggaggtgcatgcatttcttactgttgcccaacatctacatgtacctggaaggttggccgtggtttgttctgaggttcggagtccagtcaccctacattggtccccacaagtgtcacctacaggggacacccttgctgttgtccagctcaactca

SEQ ID NO: 791192 - DNA, 551 bp, Homo sapiens
aacttccttctcatcatactgggcccagcccctggccttgagtcccagcgtttctgcttgctagcagcacgtgtgtctttccgggtctcagtgtctctatctatgaattgggaagtcagacccacagtgatagatctcaggaaagacttcagtggtgttgctcccatgcctgccatacagggaatcactccacacctcaaagctaccactgaaccatttggtgggtctctctccttttaggttccttttgggacattgcaggccccagccaggcctgcctggacttggccccaacccactgctatgtgcatgrtccagagtttgactgaggatgaccccaactccagggtcagcccaacccaaggctcaacctgtggttcaagatagtccgcacacatgcacatacacaaacacaggtagcagactgagcaatttacatatgctaacatgtaaattggggttattttgagctgtggaattgtgtggatagtttttaatgaattttatacttgccataataaaaatatattggttacacaactaaaatacat

SEQ ID NO: 791193 - DNA, 611 bp, Homo sapiens
cgtcagattttatggcatttaaatgttcttgtacaatgactcatcttatttactgaaggtgctcattcagcacattgctgggacccatcccagggcccaagaaggggccagtgggagtgaggagacttgagctttcagcttcagtgtttcatggtcagccctcttgtaagtcagttctcaataaacattaactaaattatatttgtatgatttttattgacactttaattttctaattttggaattaytaaagaatgtgttcttatgcatgctaaatataatcttagttaaatctgtacagcagtcgttcattcattatcatttgttaaccatctactttgatcaaccaacttcaccttgattgttgggagccttctgtgacataaagcagataaaaccctagctcattgtctgtcatgtagtaaccactcaataaacttagccattatgactgttgcagataaagggttctagtcctgacccccaagagagggtccttggatcttgcacaagaaagaattcaggttgggttcctacagtaatgtgaaagcagctttattaggaaagcaaaggaataaaagaatggctattccatagacagagcagccctg

SEQ ID NO: 791194 - DNA, 594 bp, Homo sapiens
acgttcccagctgagggtgaacaaagtgatgttctgcccgcttgttttggctttccaagtgtcctttttgtggtctgtttagtaccacattttttgcatttttgttcattttgctgtttgaaacggagcccaagcactgctgaaatrctatctagtgtttctaagtacaggaaggctgtggtatgccttatggataaaatgtgtattagataagcgtcattctggcacagttcgttgtgaatgaacaacaatatatattcaaaaagcttcttaaatggaaacacagataaaataaatatcaacaaaattatgatgtgataatatatcagtaaaattaagttttcattggttgatgaaagggttgtgagtggaggctcacaggaacctaaccccatatttcccctaggagcaatgattcaggatttgttaattcagtgtttgtgacactttatagaacacaactactatgaataaaaataatcagctataggctgggcgcggtggctcatgcctataatcccagcactttgggaggccaaggtgggtagaacacctgaggtcaggagttcgagaccagcgtggccaacatgctca

SEQ ID NO: 791195 - DNA, 674 bp, Homo sapiens
gtgctttgcccttgttttattaaaatgaaagtgacaaattaaaaaggttaataataggagttagaaagagcgtaattctcctaaacacatcaattgagaaagagggaaatcaattggcgtgaatctttggtcttgattgggcgcttgtgggatctaccgctgtgaagggaaaggatagaatgaaagggtgttcrtgaaatgctgtgaagtaattgtggatgcttgagtctgagacattaggtatatttagagattttataatctttcttttttttttgttttaagtactctaaaaaagggaatagttctttatacctaagagatgcacattgtaacatgtaagtttttttcactttcatacattttacttccaaattcgtttgcaggaaagaatcagagatgggaaaaaagaggaattgtccataaagacaaattcctcccaaacgggcctgtaagttcccctcaggctgcagctctccctgctggagtctgcctggatcagcatttccttttcacaagagcaagcacccagtcacccagtctccaaaatcagcccttgtagtatttcctgaatctctgagttctcttcccagagcctcagatggcccagttttctgtttctggatcacccgactttggttttctgggatcccttgctgaactctgcctggtgt

SEQ ID NO: 791196 - DNA, 624 bp, Homo sapiens
gcattttttagctccagaatttctgcctgacctttaaatttcatttcaatgtctttgttaaatgtatgtgataggattctgaattccttctctgtgttattttgaattttttgagctccctcaaaacagctattttgaattctctatctgaaagatcacatatctctgtcactctaggattggtcattggtgccttatttagttcatctggtgaggtcatgtcttcctggatggtctttatgcttcttgatgtttgtcaatgtttgggcattgagaagttaggcatttattatagtcttcacagtctgggctkgatcgtacctgttcttggaaaggctctccaagtattcaaagggaattgactactgtgatgtaagtctttggtcactgcaactgtatctgcattaggggcccccaccaagcccagtaaagttgtgactcttgcagtgttatagaggtactgccttggtggtcttgggttagagctgagagaattccccagattactaggcagagactcttgctcttttcccttactttcccccaaacaaatggagtctctctctgtgtctgtgctgagcttcctggagctaggagaggggtgacacaagccccctgtgacca

SEQ ID NO: 791197 - DNA, 521 bp, Homo sapiens
accacagacaacaattactcaactttctgccactatataacaagaatccccttctctccaatttctaataatgttcttctcacttttctttaattcctcacccttagctttttcagaagtcatcgggcaaatactaacaaacttttcaaatcatttcagatgtcactacaactctcccgacagtcctggcttctacccgttaacctagtttaaaaaccactcccacattttaggttttcggtgtagcagctccccacttctgggcaccacaatcagtattagttatctatcactgagtaacaagccaccyccaaatttagcttcttaaagtagaaacgagtatgtattttctcacacattttctgtgagtcaggaattctaaagcagtttaatgaatggttcagacttaaggtctctcgtggggttgcagtaaaggtggtaactgggctgcagtcatctggagacttgactgagtctagaggatccgcttccaagacgacccactcacgacactgaaaagt

SEQ ID NO: 791198 - DNA, 462 bp, Homo sapiens
tccagcccaccaatatgaacagtgaaaaaggggacaaatcaggagtgtgccattactatttgccaataattattagttgaagaattgcattagtgatacttagatagtatctctttttaaaaaatgggaaacagcaaggaggggatggattgaacatgaaaaactaggagctgtgacaataaaggtcaagaaatgatcctgagacagaagctgatcataaacacaggagcagcagcagccactacatcacattttggagtttctaataattttcctaaattaaactttatgaccagacawctaatggcaaactgccaataagacaatatattttatagcattttagtcatagataagcatatgcttttatgaatcttaatattatggtagaatactacataagatataaatactaaagttttgaaaataaatgtactaaatcatagttttaaaataaagatt

SEQ ID NO: 791199 - DNA, 528 bp, Homo sapiens
tgcatgctgttctctctgcttacttccttttgcttgttcccttgcctttagtaaagtcttatgaaatattccagctttatctatattgtgctgcaaaactcggaaaatatcagagaaaaagggagagcagttcccctccacaagaccgtggtagcagctataaatagatccaatctccccaaccaaagatgactctaaatacagagctggagtgataagccttttgctgttaaggatatgaacatttaattggtgtattctcttttcttcctattgacaaattaggccaagcagaaattcttttaaaaatccactaatcattctttattattttttaaaaagccacaatgaaactgaaatgtttgaagcattgaaggcatctctaaaratatcagaagtatactttaaactgccatgaatccattctcattcttatttctctttctttttcttggaaagttctctcccttttctccagcttctcaagacactcaaaaacctcccctgaatggaaaatgaagccctaat

SEQ ID NO: 791200 - DNA, 627 bp, Homo sapiens
ttcttccagaaagagatttggaaaggcggcaagcagattcttccagaaagagatttggaaaggcagtaaagaaaagcaaagttgaaaggagctctagatattgaatgggctctggctaccaggggctccttgttcatgtcttagggcatcttcgctgacattgtgaagctggctttactgttttcctcattttataggtgaggacatcaaagctcaaktaacttcctaagagtatggctagtaattgtatgtgatggtccacaaatgggaggaaaatgccttttacctgtggggtgaggctgtagagtgtagtgtatctataggtcacttagctgttaatatgaagtggccagttacatagcccaggggtgcttctctccgtaaaatagctgctgctccagcccattacattaggctgtggcttctggggtgttcttatggggacaaggtttgacaagcgatgctggggttcactattagaaaggtttggcaattcttttgctccttgtaacactcggggctcattttctcctgtcttcttagtaagttgttgcagaattgattaagtaaaagaggccacataatgtactgaaagaaatgtcatactagccccacattccttttatg

SEQ ID NO: 791201 - DNA, 635 bp, Homo sapiens
ttgatacaacatttctggctctaaatctgataaaaaatgttacaaatttatagattgattttgcagcaccagcactactgctctgacaccctttttaactagacttgcaattggattttacatacttttaagtggacagaaagcacagaatatgttatttaataatttggagataacctcctattaaatatttttggtatagttattcagtaatgtatatttacagtgggtttaatccacagaacattcaaaaattgtttgggatgtaggatagttcttcattgatgttccacataatatgttttaagagtaaaagtaaattatatttcttccttttgtcttctgttcaagtagaggcccatttctgttttcttgactcttcaccatttttttcatgrcaggttttattctcatataacttacaaattattttcgtcagcctctgttgtcttaccagcaatcaaatccaaattttgtcagtaatatttacagtatgacttcatgcctaaatatgtagaatttaggggcagttatatatactagagttctttaagaagaaaactacaaagagaaattaatttggtgttttaagcagccaaattttatgattagtaatgctcagaaagaaatttgag

SEQ ID NO: 791202 - DNA, 557 bp, Homo sapiens
agggctccactcacttacagagggtaggatatggcctcatactagacaaaatgttatttgatgctactttcaagatgataggggatgggcctggatttaattgatggctattatggtgacctttaaataaatgagattcaaagtaacctgatgtctttactgcttgaaccagcttccatgaaatagtattcctattgggggtgggcctatcattccatatggtcaaggaaacatctttttgaacagagatcctgtaatcatccttacaaactgcacttcaacattggattggattagccagatttgaggaactcactttttacrtcttcataaatttaaaatgttgaaaaagtcagaggcaagggaagacatttatagtacttcacggtagatctccctcaacatgggctatatatccattagtcaatattctatagctattgttctgcaataaaccagacaagatcctactgtattactacccttttattcttggccctaccttccccaaggagttacacattttctagatagtctaaattaagagcaactctcat

SEQ ID NO: 791203 - DNA, 653 bp, Homo sapiens
agaggtgtgttgaggaaaatgcttgggtgcaagaaatggggagagggctggaggaggctgggagagccatgagactgcaatgcaagcttaacccctgtggaggagagaggaaaggaaggaagcaggtagggaacatttcaggtcrtagtgcagttctaagaaagttttggcaaaaccaaccaagagtcctggccaggcacggtggctcacacctgtaatcccagcactttgagaggccgaggtgtgtggattacctgaggtcaggagttcgagaccagccttaccaatatggtgaatccccgtttttactaaaaatacaaaaattagccaggtgtggtggtgcgtgcctgtaatcccagttactcgagaggctgaggcaggagaatcacttgaacccacgaggcagaattgtagtgagccaagattgctccattgcactccagcctgggtgacaagagcaaaactctgtctcaaaaaaaaaaaaaaaaaaaaaagtcctatagccagagtcacacatcagaagagtttccagttttgtagaaagagcctcccttagtatccccaccatactcagttattagctgcaagaagccagtgggaaatgtggtattagcactaacacagggacagatttcagagcacagtagctgggg

SEQ ID NO: 791204 - DNA, 532 bp, Homo sapiens
tatgaaaataataaggaatgtgctggtgagatgagagggttaccagcatcactgagaagcttgttagtggctttttcacagtcaaaggagatttttctttaaatttaattttcttgaataaatacaagaataggagttcttttgggtttaaaaagtaaayaatacagaaaagcataaaattagggagaaaatactaaaatttcaccatcctggtgaaaatatgaacatgtttgtgatcatcctttcatacatttctccacatagttatacctccctgggtataattgtatactagttcaatgttgtatctcctattggtactatagaaacctttcttttaaaaagaatctcatttgttcttcccctgccacttacccaaggcttcaattgccatttcccaccctccaaatcaaagctaacaatgtgttgtttatttatgtataattttctcctgattttaacacatataatttttctttatctttctaactttttttccaaaaataggatcatatttcataaagttctccat

SEQ ID NO: 791205 - DNA, 731 bp, Homo sapiens
aaatagccgtaggaggcagacaggatcctaggcagaaaagggcgggtccctggtgaagccccaccttcaagcccaggaaggctgccagtcccgtggaccgcagtgggaactgacggtgatttttccgcacccgcctatggccacccatgaaccaatcagcactcacttcctcccatctgaagcccatagaaatcccccggattcagccagactcttctggagagacatggggaggaccagctgtagagaggagccacccactccagggtctcctctctgctgagaackaacactcatcaggacaccctggctgcagagaggagctacccaccgcgagtctcctctgagctgttctattactcagtaaagctcctcttcaccttgctcaccctccgcttgtccacgtacgtcattgttcccgggcgctgaacctgccaaatggtggaggtgaaagagctctaacacaaacagagctgaaacacgccccttgcttgccacgttgtgggtgacaagaaggagagaagagctgcagccttttggggagctcagacctaagaactccccgaggcaggactatgacaccctctttagggctctgtggttcctgacgtctccaaacttctgggtgccaccaccttccccggtgccagccattgaagctgcttgagggacacctggtccagccacagccttgcagggagccgaaagatgcccaccctgccgcagccagc

SEQ ID NO: 791206 - DNA, 731 bp, Homo sapiens
aaatagccgtaggaggcagacaggatcctaggcagaaaagggcgggtccctggtgaagccccaccttcaagcccaggaaggctgccagtcccgtggaccgcagtgggaactgacggtgatttttccgcacccgcctatggccacccatgaaccaatcagcactcacttcctcccatctgaagcccatagaaatcccccggattcagccagactcttctggagagacatggggaggaccagctgtagagaggagccacccactccagggtctcctctctgctgagaacgaacactcatcaggacaccctggctgcagagaggagctacccaccgcgagtctcctctgagctgttctattactcagtaaagctcctcttcaccttgctcaccctccgcttgtccacgtacgtcattgttcccgggcgctgaacctgccaaatggtggaggtgaaagagctctaacacaaacagrgctgaaacacgccccttgcttgccacgttgtgggtgacaagaaggagagaagagctgcagccttttggggagctcagacctaagaactccccgaggcaggactatgacaccctctttagggctctgtggttcctgacgtctccaaacttctgggtgccaccaccttccccggtgccagccattgaagctgcttgagggacacctggtccagccacagccttgcagggagccgaaagatgcccaccctgccgcagccagc

SEQ ID NO: 791207 - DNA, 568 bp, Homo sapiens
ccttccccggtgccagccattgaagctgcttgagggacacctggtccagccacagccttgcagggagccgaaagatgcccaccctgccgcagccagcatgcctcgctgtgtgtagtagctggaccccacacctgctcactcacacacccctcaccgctcagctcgcccttggcacgaatgagacccaagccagtagcacgagatgagtgcagcctgccaggccgagtgggctcagcgggcctgagcaaagcttaggcaaaggcgccactgaccacagaggtttctgctggtgaagcgaccccagggatcctgtaacaatatcatggtacaaaattgatggctccttgtttgttagtgttttccaagaagcagaggtyaagactagactggaggagcaagcgatgaggggaatgctgttggaggatagaggcgggagctggagaaggcagagagcatcatcagaccatgtcatagctctgacacctctgcagaaaggggaattttgtttggagaatctcagactatagggcaggtccaaagaaggctgggctaggtcagtctcagtctg

SEQ ID NO: 791208 - DNA, 601 bp, Homo sapiens
acctccattcatattgactctaatttatatcggtgaggttgtccctaatgactgcccttctcaccctgacacctctgccctcctattagacatcctaccctctacccaaactgcttgctgaatctttgtaagattaaattatttaatccacaaatatttatarattgcctatgatgtttcagatcctggaaatacaaggatgaacaaaatatagcccaaggatcttatagctgagtattttgctccaacaatgtgaacctgatttgtgtagcccaaagaaacataatcaataagggctttttaaatcgacatttaaactccattcttgcctgcctaaaactaattcagatcatctgactctcttagtacttcaaagcactggaggagggaaagtaaaataaaatatttacctttcaacaattgtgaaggtaggttttatattcaaaaactaaaccacccaaaggcaaattaaaatcttagcttttaagtctctcactcttttctacaactcaataaggatttcaaaaatcttataatctagtctcagtggaaatccactacactacactttgagaagcttgaagccagtcatttctttcta

SEQ ID NO: 791209 - DNA, 636 bp, Homo sapiens
agggttagtttcatcttttacatacaatctcttttgcttctttattagtaacacatcctattataaatatttgtcatgaataatcattcacactggtttaattactgtatttcttatattctactatgttgttgactttacgatgcaccgttaatttaataataaaagcaaaaggacctggaaaaacagtatattaaaaatacaaagaaaacatttaattgagtatagcatttcttttctttttttttttttggagtataacatttatgcagtttacatttcctagagtgtgtcaagtaatcatcttttaattttattgctggatcatactatcaactmagaacatactaagcacatgtaaggattagaatttcagttaaaactcagtggagtattttaaccagtgtcagccaactgaggtgtgataatcaggtaaacaaatttcttggtggtcttactaggttatcatattgaatggaaagatataattactgacaaattaaaacttacacttttccctgaaagctggcatttttctttgtttgacatttattttgagatatagtctgatagtaagatttgtcctgatatatgagatatggtataatctaaaatcataaatatattacctattct

SEQ ID NO: 791210 - DNA, 418 bp, Homo sapiens
tccatgaattcaccttttttagaaatattacatgtaggtaattaaggatggctctccatttctgcagtgtgatatagctgtgaacatattcatagtaatgaattcatttcagttttccacattatgaatattttttatgaaagtgaggggttctaaggacagatggaaaattctttaattttgaatcctagaattgcagaaccagttgagrcttgagaggtcattcggtcttaccatatttatttcattttttatctttatttttattatttatctggtatttatcataatcaagatgatgacgttaaatcgttttcctttctgctcattcagcttgagaattgtaactacgcggtagaattggggaagaatcaagcgaagttctccctggttggcatcggtggacaagatctcaatg

SEQ ID NO: 791211 - DNA, 618 bp, Homo sapiens
ggacttctaattgtggagaagttaatgacgcacaaaataattaatccagagcctttgcattgtgttgtttccattttatggttttaggaaagagaatgtgacattcatcaccatcagatccaaattccttcaagatgataaaaatgtaataccaattgacatgaaagaatcttgttcagcaagttcatgtgtggtaactcctgcacaacccctggcctttttcttcctgccatggatttcttttttttaagatacttcaaccatctccttgcatttatggttcttgaatttacaaatgactttgtttcttcccaacactttatttcttccaaaataatacccagccaactttctatttatcatagttccactattttacatttcccatgtgtcttgccagcwccctagtaaggtacataccctcaacccatatccattagacaaactcttacaacttagaaccctttcttaatgtgttaaataataatgcagtcattaattctaaaactatcttatatttttttctcactttctctctttttgttaattgccctgcctctaagctcagattacccaggttgatgctgcagtgtgcattttcccaagattgctttattt

SEQ ID NO: 791212 - DNA, 634 bp, Homo sapiens
tctaagctcagattacccaggttgatgctgcagtgtgcattttcccaagattgctttattttgtgagggattactaccgaaagaacaataaactttcccttcggttctgtactcccactcaaggctgagcaagaagaagctgaagtaagtagaagcaggagatatccagtttatcaggaacttcctgataagagaaattggctcttcaactggcaagagtgtagaatctctttcaytaaggatcttacagttgggaaagaaatgaaaatatttcaaataatttaggagaattacagtagagcatcaaaaatctttgggaagtcatctctgttcttatgtctttccagaccagaatcccacagcacaaggcattctcattgcacagcaatgcctggtaatacacacaacactctctgatagtgcaagtatctaatacactcttaaataatttggtctgaccagaaattgaatgggagataaataacctcatgtttcctcaatcttgatgtttccatcattacaaatattttatgaagtaattatttcagagcaatatacttgagtttcctaatttcttactagttctttcacatttaccatagactcatcaataaaccaattgttcttacctaaa

SEQ ID NO: 791213 - DNA, 626 bp, Homo sapiens
attgatttgccattcgatactctcttgcaatattcctgagtctacaaggctgttctttattcttgctttgagaaaaaaaaatgttatttaaaagagtgctatagggaggccgaggcgggcggatcacgaggtcaggaggttgagaccctcctggctaacaaggtgaaaccccatctctactaaaaatacaaaaaaaattagctgggcatggtggtgggcgcttgtagtcccaggtactcgggaggctgaggcaagagaatggtgtgaacccaggaggcggagcttgcagtgagctgagatggcaccactgcactccagcctgggtgacagagcaagactcttaaaaaaaaaaaaaaaaaaaagaaaaagagtactgtaaagctactcaaaataggtattagatttaggaaaattcttttttgaatgaacagcgrcaagtagtaaaatgaaattgagaactatttctctattgactgctctctctaatcctggaaaatatacataccagactatctataattttctttttcttttttctgtttaattttcataaggttctctaaaagaatggaaggattgctgacattgcatttgtgaagaatactggcttatgtgcctattctaac

SEQ ID NO: 791214 - DNA, 461 bp, Homo sapiens
tgcaggagttaccacacatgaacttgctgaacaagattctttcatgtcaattggtattacatttttatcatcttgaaggaatttggatctgatggtgatgaatgtcacattctctttcctaaaaccataaaatggaaacaacacaatgcaaaggctctggattaattattttgtgcgtcattaacttctccacaattagaagtcccccccttycacatctctcaagccaattatgcattacacagtaggtgatggctgtgcaacagtggaaaaattggcacaactacaaggcctttcttatcttttctttttactatagccaactattcatttacaaggtaggtctaggtctctggtgcaactctcttgggataacttatgttgtatgaataatccttttcacatatttccatttatcttttcattcactcagtaagcgtttacttgatgtctaataggtt

SEQ ID NO: 791215 - DNA, 461 bp, Homo sapiens
tgcaggagttaccacacatgaacttgctgaacaagattctttcatgtcaattggtattacatttttatcatcttgaaggaatttggatctgatggtgatgaatgtcacattctctttcctaaaaccataaaatggaaacaacacaatgcaaaggctctggattaattattttgtgcgtcattaacttctccacaattagaagtccccccctttcacatctctcaagccaattatgcattacacagtaggtgatggctgygcaacagtggaaaaattggcacaactacaaggcctttcttatcttttctttttactatagccaactattcatttacaaggtaggtctaggtctctggtgcaactctcttgggataacttatgttgtatgaataatccttttcacatatttccatttatcttttcattcactcagtaagcgtttacttgatgtctaataggtt

SEQ ID NO: 791216 - DNA, 601 bp, Homo sapiens
tatttagcaatctgtgaatttttaacaaacgtttaattatattttcacatggcctcagtcatgcccctgtgtaactggctcagtaagagataagggtgcacgtagctcaggccgtagcaggtgctaatgaagagtccccgttgagagagggcttcttaaaccactgagggaagggctctcccactggagaagaaacactgaagtatattcttctccatcctcctcccaaagtgttgacagagaaaaaaamcagagtgaccttgtttcctgccctgcctgacagtgagttaaacagaattccaaactagaggactggacatttattcacctgcaaaaacattttttttttgcagcatttcaaatgtacttgtgtctagatatggtttcaattacatggaattggcctttgtctttaagctcttattttctctcctgagtgtcccttgaacctctttatgttcacaaaaatcctactgtgtggtttttaaagcaaaaaaaaaaaaaaaaaaagcggggcggggcactgtgcaagtgattaaaagaccattgtacagggaataaaaagaacatcacaattatggttctatgtatttcaatggtt

SEQ ID NO: 791217 - DNA, 599 bp, Homo sapiens
cctgtcagggatccaacagcatataccggtcacagcgcattgttgaataatactcctcaggaagtgtgcagatccaccttttccttcatcatttcagacaggtgaaccaactcttcttcactaactggagccacgagtccagggccctagatatcaacctatcagcacacrtagtgtacacttagtacatgctagattcttattgctccctgtccccaagatgcttatgattaaacatcaaagttactttaaaaaatctagaatttggaaatacttggcttaatttacaaattcattgcccttttaaatgactttccacgcatatgtaggttaacacttctttttgcagtcgcgttcctaaaagtctcagacaccaagtgaaagctgaatgttagtaagtgtctcaaattggttctgaagttagagaaatctccaagcgagactatctaattaaaagatgtgcaactttttggacgtgaaatccaccttactgtttccctgtcttcttttagcacttaaggaggctcatttatttctggtgctgcacttgtcaagatttggggagagaatgtgtttgcatatatgtgtgtgtccttggg

SEQ ID NO: 791218 - DNA, 657 bp, Homo sapiens
ttttgagcctctagaacctgaaacaatatctgatccataaatattcaatctattgaatgaatgtattcctccaaagaagatctccccaaaagattaaatgctcaaatattagaaaatgggctaaatgacaaggattagtcagcctttgatctaaattaattcaataagtctgaagcttgattagtatcatctactagttcttctagtccctaatcctttctcttcactctgatgtgctaattcatgggccatttggtggaggacacagatatttatccggtgagactctggaaagaccagtgtttgcagtgtttattttttcaggracaaaacgaaataaactgagtgatttccatcaaggatcaactattatctgttgtggaacctattatatgccaggcattatacttggcattgaacgtgcaaagatgacacaaacataacagaattatgcccccaaaatctattagggtcccaaagagatatttgattaattctgcctgaaagactgtgcatggtctatgaattcatgaaatgttagtttgtgaaagccaaaaggtgacatcttagataataaatggctattgttcacaacaacatttatacaaacaagatgacaataatgcatttgttaattgtactctatttatggagagg

SEQ ID NO: 791219 - DNA, 592 bp, Homo sapiens
atatagccctaagaaagccaaacactatttcacatttgacaatgctttctgtatggactttacaccaaataagccaaatttcacctttacattagtgtactcttaatgataaacccaattcttaataaaaccttatagacaaatttactcaattttaatccgtttgaccataaggtaagattcttataaacttgtaattaaacatcctcacctccccagcaaagtggatcataaaacttttattaatataaccctttacaatttttgggaaagagcagatcagtgctctaagaaaaacctgttgtgcttttattccaatgttcaatttacataaaaactgagtacccctttagmcaatatgttcacacacagaatttctctcatgagttactttttacaaaccttccacaacttgttcaaaccttcagctttatcttatctaacttataacaatcctttagccctttaatctaggcagaaaaaaatccacattctcatgacttcttatcttttaccaaaaacacatttcacttcctttacacaccttgcatgtaaaacagtttttatttcccaaagattactaaatcatgtg

SEQ ID NO: 791220 - DNA, 609 bp, Homo sapiens
tgttctcctccatgtgtgttatcattcaactcccacttataagtgagaacatgcagtatttggttttctgttcctgcatttaatttgctgaggataatggcttccagctccatccatgtccctgcaaaggacatgatttcactcctttttatgawggcacagaattttgaattctctaataaagactctacatttcaccttcagaagtagttactcaccacaaatattcttatccaaatacatactaggagttctgttgcatagcatgaagtatgttagtaataatttgtattgataataatatccataaaaatcaagtagtgttcaaattgtgtcatgttgattaagaaaattgtcgtctcttttctcagtgaagtgcaaaaatccaacaggcccagcagtcatacaacatgcctactggaagaaaagtagtggttttcaaaatggagtacccaaatgcttggaggctatgagaagatttactaacgagttttaaagagctccatttccagatcctcaagtttctcatgcattcttttgtaaaaactgtttttcctgggaacgtgcctgttccaaaccacttctgctttcccaccacctcatttacca

SEQ ID NO: 791221 - DNA, 609 bp, Homo sapiens
tgttctcctccatgtgtgttatcattcaactcccacttataagtgagaacatgcagtatttggttttctgttcctgcatttaatttgctgaggataatggcttccagctccatccatgtccctgcaaaggacatgatttcactcctttttatgaaggcacagaattttgaattctctaatmaagactctacatttcaccttcagaagtagttactcaccacaaatattcttatccaaatacatactaggagttctgttgcatagcatgaagtatgttagtaataatttgtattgataataatatccataaaaatcaagtagtgttcaaattgtgtcatgttgattaagaaaattgtcgtctcttttctcagtgaagtgcaaaaatccaacaggcccagcagtcatacaacatgcctactggaagaaaagtagtggttttcaaaatggagtacccaaatgcttggaggctatgagaagatttactaacgagttttaaagagctccatttccagatcctcaagtttctcatgcattcttttgtaaaaactgtttttcctgggaacgtgcctgttccaaaccacttctgctttcccaccacctcatttacca

SEQ ID NO: 791222 - DNA, 609 bp, Homo sapiens
tgttctcctccatgtgtgttatcattcaactcccacttataagtgagaacatgcagtatttggttttctgttcctgcatttaatttgctgaggataatggcttccagctccatccatgtccctgcaaaggacatgatttcactcctttttatgaaggcacagaattttgaattctctaataaagactctacatttcaccttcagaagtagttactcaccacaaatattcttatcmaaatacatactaggagttctgttgcatagcatgaagtatgttagtaataatttgtattgataataatatccataaaaatcaagtagtgttcaaattgtgtcatgttgattaagaaaattgtcgtctcttttctcagtgaagtgcaaaaatccaacaggcccagcagtcatacaacatgcctactggaagaaaagtagtggttttcaaaatggagtacccaaatgcttggaggctatgagaagatttactaacgagttttaaagagctccatttccagatcctcaagtttctcatgcattcttttgtaaaaactgtttttcctgggaacgtgcctgttccaaaccacttctgctttcccaccacctcatttacca

SEQ ID NO: 791223 - DNA, 494 bp, Homo sapiens
acataaaaacactgaatattccaaaagccagaatgcctcttctcctccaaatgattgcaaaacttctcctccaaacaactgcaacacttctccagcaagcacgcagaatggggctgcagctgagatggatgaactgatagaagtaagtttcagaaagtgggtaataacgaatttcactgagctaaaggattatgttctaacccaatgcaaagaagctaagaaccatgataaaagattacaggagctgttaactagaataaacartttagagaggaacataaatgacctgatggagctgaaaaacacagcacaagaacttcatgatgcaaacacaagtattaatagctgaatcaatcaagcagaagagagaatatcagagcttgctgaaataagggaggcagacaagattagagaaaaaaagaatgaaaaggaataaaccaaacctctgagaactatgggactatgtaaaaagactgaacctatgactgattgga

SEQ ID NO: 791224 - DNA, 509 bp, Homo sapiens
tcagtaagtccagagaatccaataagatatccatgagaagatctaccccaagacacataatcatcagattctccaaggttgaaatgaaggaagaaatattaagggcagtcagagagaaaggccaggtcacctacaaagggaagcccattagactaacagtagacctctcagcagaaaccctacaagccagaagagaytgaaggtcaatgttcaatatttttcaagaaaagaatttccaaccaagaatttcatatccagccaaactaagcttcataagcgaaggagaaataaaagccttttcagacaagcaaatcctgagggattttgtcaccaccagccctgctttgcgagagctcctgaaggaagtattaaacatggaaaggaaaaaccgttaccagccactacaaaaacacactgaagtacacagaccaatgacgctatgaagcaaccacattagcaagtctgcaaaattaaccagctagcatcatgatgacaagaccgaatttaca

SEQ ID NO: 791225 - DNA, 509 bp, Homo sapiens
tcagtaagtccagagaatccaataagatatccatgagaagatctaccccaagacacataatcatcagattctccaaggttgaaatgaaggaagaaatattaagggcagtcagagagaaaggccaggtcacctacaaagggaagcccattagactaacagtagacctctcagcagaaaccctacaagccagaagagactgaaggtcaatgttcaatatttttcaagaaaagaatttycaaccaagaatttcatatccagccaaactaagcttcataagcgaaggagaaataaaagccttttcagacaagcaaatcctgagggattttgtcaccaccagccctgctttgcgagagctcctgaaggaagtattaaacatggaaaggaaaaaccgttaccagccactacaaaaacacactgaagtacacagaccaatgacgctatgaagcaaccacattagcaagtctgcaaaattaaccagctagcatcatgatgacaagaccgaatttaca

SEQ ID NO: 791226 - DNA, 509 bp, Homo sapiens
tcagtaagtccagagaatccaataagatatccatgagaagatctaccccaagacacataatcatcagattctccaaggttgaaatgaaggaagaaatattaagggcagtcagagagaaaggccaggtcacctacaaagggaagcccattagactaacagtagacctctcagcagaaaccctacaagccagaagagactgaaggtcaatgttcaatatttttcaagaaaagaatttccaaccaagaatttcatatccagccaaactaagcttcataagcgaaggagaaataaaagccttttcagacaagcaaatcctgagggattttgtcaccaccagccctgctttgcragagctcctgaaggaagtattaaacatggaaaggaaaaaccgttaccagccactacaaaaacacactgaagtacacagaccaatgacgctatgaagcaaccacattagcaagtctgcaaaattaaccagctagcatcatgatgacaagaccgaatttaca

SEQ ID NO: 791227 - DNA, 329 bp, Homo sapiens
tcaacatccttaaagttaaaaactctcaataagctaggtattgaaggaatatgcctcaaaataataagagtcatttatggcagacccacagccaatattatactaagtgggcaaaagctggaagcattccttttgaaaactggctcaagacaakgatgccctctctcttattcaacatagtattggaagttctggccagggcaatcaggcaagagaaagaaataaagggtattcaaaagtaggaagagaggaaatcaaattgtctttgtttgtggatgacatgatactatatctagaaaacaccattgactcagcccaaaagcttctta

SEQ ID NO: 791228 - DNA, 629 bp, Homo sapiens
gcctatgtgctaatacaatgctacagttccataaagggatccaggaaatgtttaatgaactgcctcaacatcacttaaaagctcattcaggtcagtgtttgggtttgaatcccggcacaccgctttccagatgtctgacaattccttcacctttctctgcctcagtttcctcctatggaccatggggattgttctagtcactacttgattccactgttgggaggattaaatacatttattcttgataaaaacactaaaacactaaaaaatagcagctattattttctcaaaagtcttttacacaagtagtctaaatatacatcctggtgaaaccactgaatttgttaaggttttttgcatcctgactggctgtgttgagtgaattagcttggaggcagaggtatgaytctcagagcaaacttcaattaatgaattgaattcatctagttaccaggaatacagcaaaaaaattgaaagcttgaagtaatttttaaatataatcaagagactgtcaatttgtatgtatgtcttaagaaacaatagagcagaagcaatttaaaaaaacatgaggtcctgttccatcattttccacttggtttactgcccaaagcagcaagttctttatgtaa

SEQ ID NO: 791229 - DNA, 665 bp, Homo sapiens
aaatgggattaacttattttatactgaacatacttgaatatgttaaaaacaacttgaattttccatatacgctgtactgacagaaataattataaattatgttaaacacacactcacctgttacatatgtatatacggcactttttgtaaaaaagtgtctcatacatggtcctatttttaaactacattttaagatacaaaatataaatggaggtatatttgcgccatttggcaaaaatgtatagactagtattaagatgactgcatttatcttgccatacaaatgaatatattatttccaatttgctaaaactatgtgtgtatatatatatatagtattaagaataaacagaagtacatttcattttctaccctatcaatttaaaaaataaatgtctgtgctctgtcatttmcatctttacctgagtaatatgaaaatacctaaatttaagtggataacccaaaagggttatgactaatttttcctctcacagtttttaaaaatacatataattatcaaacataataggaaaatgggaaagaagaatgagtggaagagttcagtatctcaatcatgacttaattaaaaagtgacttctgtgacatcctttttacaagtttaccttacctatccctatcctcaaggagaaaagggtctccttaat

SEQ ID NO: 791230 - DNA, 511 bp, Homo sapiens
  misc_feature 64: n = A,T,C or G
ggaaaatcaagaaaacagctgatgattgctgggacaactatgctcttcccagtatcgctaattntgctgcaatgcagttaggcaaatgctctatctccttaattctaaacagctctcactttaagagacacttcataaatcgcttacaggggatttaggaaatctagaatttgatctaaagagcttaataagcatttttcatcttatttaagttctgcagttttaaaagtcatgctattgggatgcatcctagtccgaccgtgagagwtatattaaggttttggatctttcatttcattgagcttaaaacccatttctttcagtggagaacatcagctgagtcactacacttgctcgactttcttcttcagcatgtttctacctctcttgctagccagtgaatactgtgcttcactccatggattttaattaatttttcatgatgtacgcttattgatttttacgataaattagagtctatgtttactatatatgagtaaaatttaacact

SEQ ID NO: 791231 - DNA, 622 bp, Homo sapiens
atttaaaactatttatgattttaaaaaacagcaaaaaatgagagaattttatgtgataaagtatctacaactggggatcaaaaagtactggaaacatttaaaataagagagaaggcaaaacaaagcagtattagaaaayaggacatcatcatagactctgcagtaattgaaaagacaatgagaagacattgtagcaaattttacataaatcatgctgaaaattgaggtgaaatgaacaaatttctagaaagacaatttacaaaatatgacagaagtagaatatttaatcctttatcaaaaataatgaataatgaatctaaagttgaaacctttttatttagaaaactgaaggtatatgactttgctgctgaaatccaacaaatgctaaggcaagatataatgccagttttacataaaatattgatagaaaactctaataagtgataatacttccagatatataagttcaaaacaactttacagtttaattacaggaaaggtaaatcactgacaaatatcggtcataaataataaattataaacaaaattacttttgcagtatatacaaattatgctatatcatgatcaagtaggattcatttcagaaaggtaatattattta

SEQ ID NO: 791232 - DNA, 574 bp, Homo sapiens
aatattgtattaaatgattgtgaattaaaattcacaaaaatctatacattttagttaaaccagtaagtatatttagcagggtggctgtacccaatattaacataacagaatcaattatatttatagatattaacaagttggaacacaattttttaacattatagcatgtatagtactattaataatttttaaatacccaggaataaatatatattcagaaatatctgttaaagtaagcctttttacagaaattcataagaggtatttcagataaaattttaaagaccactaaagagagagatctaacatgtttgtggaagattaatattctaaagatattattttctttcaaatttatgcatagyttaaggtaatgttattcaaaaaccaagagtatttttatggaaattgacaagttgattgaaacatttatataaaaatagagatagccaaaaacagccaaagagtcctaaaaatgaacaatgtgtgaggacttacatggccagatgagcatgaagcaacactaaattgcatcatattgggttagtatagatggttataccaatggagcgga

SEQ ID NO: 791233 - DNA, 475 bp, Homo sapiens
aaagcttgtacatattcttggaactcagttgtctagaataatgagaatttttttatgatgttgattttattcagatcaaaaacgtcattcatgttggaaatatttctatctattctaatccaaacattgaacgagcatcactgtctatagtgaatatacttaatatataatattccacatagagaaatttgataaaactcaaacaactttgagactacctaaggatttactgtgttccaatgtctgacaatatgtaaactcactttttgttcatgagaaatctagtttacaaatayagccgtggagtcctttaagataatggccttaatgacaagaaaaaaagtacctatgccatatgaaaaactcacttttgcagtccataagttataaatagccctgttgcagtttcagtagctggctggcagccaggagagagaggaaaacagattgaggttagccacagggagaaaatgaa

SEQ ID NO: 791234 - DNA, 637 bp, Homo sapiens
acactctggtgtgagatgttgatagtgggggaggttctggaggtgtgtggtcagaggttgtaaggaaaccccctgtactttctgcccaattctctttttttttttaagatggaatctcactgtcacccaggctggagtgcaatggcatggtcttggctcactgaaacctcctcctcctgggttcaagcaattctcccgcctcagcctccctagtagctgggactacaggcgtgtgccaccacaccyggctaatttttctattttttcttttaatagagacggagtttcactatgttggccaggctggtcttgaactcctgaccttgtgatcctgccacctaggcctcccaaaatgctgggattacaggtgtgagccaccacacccagccctttctgcccaattttttatgaacacgaaactgcttcaaaaaataaagtctattaaaaatgttgaaagtgtcctacataatcaaagttcaatgagcataagtaggaaattaacattgctgcattattgacatctcatctgcagattccaatctcatttggcctactgtccaaatagtgccctttatttgtccaggatccaatcagaatcacacattgcatttagttattatgtggcattagtctcttt

SEQ ID NO: 791235 - DNA, 450 bp, Homo sapiens
aaaacctccatggaaacccatgcggggataggaaacctgtawctgtaactgatgaatcactgggggctcagtgtggatgagtctgagagacaaaacccccaaaaggacctggtcattagagacccacgacttttgtgagttctacatcctggagttctaccaggttctcacagtgaatatcaaagggaaaaaaatcaatcccgttgtgcttccacagggagaaggaaaaaggaaatatcttaaaatacaccagagaattctgttattattaacaaggtctgcccttaggacaagctgcttaaccagagtctaacctactgggaaattatcagagcctaacttgcctgggagaagggaaatacacaattccagccctttctaactttcctcgtggaggaagagaagtaaatacccaattttagccatccagtcccactcaggggcgagggg

SEQ ID NO: 791236 - DNA, 589 bp, Homo sapiens
attaaatgctgttatctcaaattctacttaaagaggatattataaccttggaaccaaggttttctcccagaaaaagattaatggaaacatcaattgcttttcatagttgatagctgctgcttcaaaagtattttattaaaataccagattaaacccaaaaaacccttaggacacaataaattgatttttggtttatattcaaatgtcagcacttagttgtcctgaaaaaaaaaaaartcatgaaaggtggtgatttgtaaggaagtgaaaccagccaattgaggctctgctaggcatgctgagttctttcttagtccctggagagaaacttatggggcagaagcactaaaaacaggacaggcatggaattcaaggttagtttgttctgtatttgtcaacttctaaccagtagtcaaacagacaacaagagtgaccaaaatcagacacctgtttgtttaaagtatatcttttcaatttcaaaagcaaaagtaacaatggaaaaagaaaataattcactcagaggaaatgtgtgtgcctataaatgtctatacatgttctttctccaaatgtagccactaaggcctttgag

SEQ ID NO: 791237 - DNA, 622 bp, Homo sapiens
ctgctctcaaaccacagtgaaattaaattaaaagccgataacagaaagacaactggaatactcctaaatgcacagagattaaacaacaaacttctaaaatacatatgggtcgaaaagaaatatcaagagaaatttaaaaataatttgaactaaatgaaaatgaaaacataatttatgaaaatttgtgggatacaatgaaagcagtgcttagagaataatttatagctttgaatacatatagtatttggatagtgccmaaaatgaatctagacacagaccttatattcttcacaaaaattagctcaaaatgcatcatcaacctaagtgtaaaatgcaaaactgtaaaagtcatagaagataacatacgagaaaatcaacatggccttagatacgatgtgccaattttaaatagagcaacaaagccatgatccatggaaaaaataactgataagctggacttcattaaaattgaaaacttcttctctgcaaaaatcaatgtcaagagaataagacaagccataggctaggagaaaatattagcagaaaatgtctgataaagaactgtagtgtccaaaatataaaatgaactcttaaaactcgataataaaaagacaaaaaacaa

SEQ ID NO: 791238 - DNA, 633 bp, Homo sapiens
cggccctgacttaatataggcctgattcattcatttagactcaggagaaagaaacagatctgagtaaggtcacgaagagaaagccatgacaaaaagggactgtctctaaagttaaacaaaagtgataaacaattaaaattcaacaaaaatgatagggagaatttaaaccattttctcagatttcttaggtcataaaggatattatgctgttctatgagttgttgccttaagacatattacttatgtaaccccaaatttaatcatttcaagtgcttctttttaagacaagctttactttatcccccagaagacgtttagaaagcacttttcrccaccctagttatccttaaagaaaagctttatccacacttcagtttgtacttcccaccctcatctgtctgtgtgaagagctaacaatacagtgttccttcccttcagtttctccctggggcttcattatggctgtttcctgttagtatagtggggtatgcagtaattgatagtttcatattcccaggtgaggaatgggtcacaatttttggtggcgccatcattttgacacgcaccaccctcatgccctgtaactgaacgagagctcaggtgtaagggttttaaatgtatttgaaagaaatg

SEQ ID NO: 791239 - DNA, 577 bp, Homo sapiens
ataaccacaaaatagaaaccataaagcaaccagctaacaccttcatgataggatcaaaacttcacatattaatattaaccttcaatgtaaatagtctaaacaccctacttaaaaggcagagtggcaagtcggattaaaaaaagaagaccacccatatatctcctgtcctcaagagacccatctcaaacataacagcaccaataggctcaaagtaaagggttggagaaaattctatgatgcaaatggaaaacaaaaaagaacaggggtcattattcttatatcagacacaacagactttagcaacagtaaaaaaggacaaagaaaggcattacataatgaaaaagggttcaattcataaagaaggcttaactatcctaaatatatatgcaccctacattacagcacccatataagtaatgaaagtacttctagacctaaaagacttaaacagccacagaataatagtggaaaatttcaacaccccactgacagctttagagagattgtcaagttaggaaactaacaaagaaattmtgtatgtaaacttgacacttcgtccattggacctaatagaaaa

SEQ ID NO: 791240 - DNA, 599 bp, Homo sapiens
actagaataaccagtttagagaagaacataaatgacctgatggagctgaaaacacagcatgagaactttgtgaagcatacacaagtatcaatagccgaattgatcaatcagaagaaaggatatcagagattgaagatcaacttaatcaaataaagcatgaagacaagattagagaaaaaagaatgaaaaggaatgaacaaagccatcaagaaatatgggactatgtgaaaagaccaaacttacatttgattggtgtacctgaaagtgatggggaaaatggaaccaagttggaaaacactcttcaggatattatccaggagaacttccccaaactagcaagacaggccaacattcaaattcaggaaatagagagaacacmacaaaggtactcctcaagaagagcaaccccaagacacataattgtcagattcaccaaggttgaaataaaggaaaacatgttaagggcagccagagagaaaggtcgggttacctataaagggaagcccatcagactaacagtggatgtctctgcagaaaccctataatccagaaaagagtgggagccaacattcaacattcttaaagaaaagaattttcaa

SEQ ID NO: 791241 - DNA, 524 bp, Homo sapiens
tgaagaactgaagaagttcactgatactcaagtataaactaacacataccagacaccgtggtgaaactgcagatggccaacattaacaataaaatcttaaaagaattcagaatgaaaatcacatgatctctaaagaatcaaaagtgcactaatgagtaatatattttaaaatactcgtgtaaaattattgtcagcctagatagaaatctggctcarcctaaccagcacttgactataaaggaaactggacatttcagacacagggaacaaatgtacaatctatagatcttcaccaaaaaatgtacttatggaaattaaataagaagaaaagaatgtttccaagaagaagcagtggacattacaaaatgtgctggtaaagctaaatagatatggcctgaaaaaataaagcagggagatgaataaaagcaatgctgaaataaaaccacaatgaaagggaagtttggatggaagtgactaagtttttaaaaatattatttgggaagaaggtggtattgatgtagact

SEQ ID NO: 791242 - DNA, 645 bp, Homo sapiens
aaaataaatgtctaaaaacagccaatacaactctgaagaagacatggtggggacacttgccctagcaggtaccagatgcattgtacagctattagggagatactggtttaagaagaaaaaagccagaacaacagacgagaatagggcacccattaaaaatagctttatatatgacaaaaatagcattacggataaagaaggaatggactgacttttgagacaactgggtattcccactcagaaagcaaaakaaaattatttgcctacttcacatccacatgaaaaataacttcttgtccgattaaagacctgaatacaaaaacaaaaatgtttttgaaagaactcattccctccttagtgcccaagcagtggtttctaaaacacccaagttcctgaaagtttattttcatagaatactacaaggataagttaactttcatactggccaaatactctccagagaaagatcagtgtctataaattcatgattaaccagtgaagcattcacgatcttcagcaatccacttcttgttagacttgaccacaacataatgtaacattacacataggtgtaatgttgacatttatagagatccgtatgtgggtttttatttttattttctcacttctatacggaatgttttt

SEQ ID NO: 791243 - DNA, 645 bp, Homo sapiens
aaaataaatgtctaaaaacagccaatacaactctgaagaagacatggtggggacacttgccctagcaggtaccagatgcattgtacagctattagggagatactggtttaagaagaaaaaagccagaacaacagacgagaatagggcacccattaaaaatagctttatatatgacaaaaatagcattacggataaagaaggaatggactgacttttgagacaactgggtattcccactcagaaagcaaaataaaattatttgcctacttcacatccacatgaaaaataacttcttgtcygattaaagacctgaatacaaaaacaaaaatgtttttgaaagaactcattccctccttagtgcccaagcagtggtttctaaaacacccaagttcctgaaagtttattttcatagaatactacaaggataagttaactttcatactggccaaatactctccagagaaagatcagtgtctataaattcatgattaaccagtgaagcattcacgatcttcagcaatccacttcttgttagacttgaccacaacataatgtaacattacacataggtgtaatgttgacatttatagagatccgtatgtgggtttttatttttattttctcacttctatacggaatgttttt

SEQ ID NO: 791244 - DNA, 645 bp, Homo sapiens
aaaataaatgtctaaaaacagccaatacaactctgaagaagacatggtggggacacttgccctagcaggtaccagatgcattgtacagctattagggagatactggtttaagaagaaaaaagccagaacaacagacgagaatagggcacccattaaaaatagctttatatatgacaaaaatagcattacggataaagaaggaatggactgacttttgagacaactgggtattcccactcagaaagcaaaataaaattatttgcctacttcacatccacatgaaaaataacttcttgtccgattaaagamctgaatacaaaaacaaaaatgtttttgaaagaactcattccctccttagtgcccaagcagtggtttctaaaacacccaagttcctgaaagtttattttcatagaatactacaaggataagttaactttcatactggccaaatactctccagagaaagatcagtgtctataaattcatgattaaccagtgaagcattcacgatcttcagcaatccacttcttgttagacttgaccacaacataatgtaacattacacataggtgtaatgttgacatttatagagatccgtatgtgggtttttatttttattttctcacttctatacggaatgttttt

SEQ ID NO: 791245 - DNA, 611 bp, Homo sapiens
ttgcccaggctggactgcaatggcacagtctcagctcactgcaacctctgcctcccgggttcaagggttctcctgcctcagcctcccaagtagctgggattacaggtgctcaccaccacgcccagataatttttgtatttgtattagagatggggtttcaccatgttggccaggctggtctcaaattcctgacctcaggtgatctgtccacctcagcctcccaaagtgctgggattacaggcatgagccaccgcacctggcctacatttattttttacttacttatatatttatttttgagacacagtttcgctcttgttgcccaggctggactgcaatagtggggtctyggctcactgcaacctctgcctcccaggttcaagcgattctcctgcctcagcctcccaagtagctgtgattacaggtgcccgccaccacacctggctaatttttgtatttttagtagagacaggtttcaacatgttggccaggctggtctcgaattcctgacctcaggtgatctgcccacttggcctcccaaagtgctgggattacaggtgtgagccaccgcacccagcccacgtttattttaaattggccacttttaaaga

SEQ ID NO: 791246 - DNA, 611 bp, Homo sapiens
ttgcccaggctggactgcaatggcacagtctcagctcactgcaacctctgcctcccgggttcaagggttctcctgcctcagcctcccaagtagctgggattacaggtgctcaccaccacgcccagataatttttgtatttgtattagagatggggtttcaccatgttggccaggctggtctcaaattcctgacctcaggtgatctgtccacctcagcctcccaaagtgctgggattacaggcatgagccaccgcacctggcctacatttattttttacttacttatatatttatttttgagacacagtttcgctcttgttgcccaggctggactgcaatagtggggtcttggctcacygcaacctctgcctcccaggttcaagcgattctcctgcctcagcctcccaagtagctgtgattacaggtgcccgccaccacacctggctaatttttgtatttttagtagagacaggtttcaacatgttggccaggctggtctcgaattcctgacctcaggtgatctgcccacttggcctcccaaagtgctgggattacaggtgtgagccaccgcacccagcccacgtttattttaaattggccacttttaaaga

SEQ ID NO: 791247 - DNA, 618 bp, Homo sapiens
taaatcctaaatttacatatatagttttctacttcttagcatggcaatcaaaatttcatgaattattcatgaaagaataataagattttgcattgatatgtttgaattaatctcactcatgatgcctagtaatatttttaattatagcaagttactgggaaagtgttttcagaaaagcatttacagtgaatatggagctcttttcctgggttttcatgaacatccaagaactgataatgtaatcagtatagcttaggttgttattcctacattcctttttttccccacaatgaaacattgttgcatagcaaacgcagaataagaagtccggagctggtcttyctgtttccagtccatcccctcctggttggatgggctgaaacaagtaactgaccttcctgtgcatcaagtttaacatatcagcatctctacctttcttgttctgtctacttgaaatttagtatgataatgtctaagagaacatcttgaaaattatgaagtattttagaacaatgaatgggcagaaagtgcagtctcatgtgtccctccacttaccattgtttataaagtttgccggccgggcgcagtggctcatgcctgtaatcccagcactttggg

SEQ ID NO: 791248 - DNA, 618 bp, Homo sapiens
taaatcctaaatttacatatatagttttctacttcttagcatggcaatcaaaatttcatgaattattcatgaaagaataataagattttgcattgatatgtttgaattaatctcactcatgatgcctagtaatatttttaattatagcaagttactgggaaagtgttttcagaaaagcatttacagtgaatatggagctcttttcctgggttttcatgaacatccaagaactgataatgtaatcagtatagcttaggttgttattcctacattcctttttttccccacaatgaaacattgttgcatagcaaacgcagaataagaagtccggagctggtctttctgtttccagtccatcccctcctggttggatgggctgaaacaagtaactgaccttcctgtgcatcaagtttaacatatcagcatctctacctttcttgttctgtctacttgaaatttagtatgataatgtctaagagarcatcttgaaaattatgaagtattttagaacaatgaatgggcagaaagtgcagtctcatgtgtccctccacttaccattgtttataaagtttgccggccgggcgcagtggctcatgcctgtaatcccagcactttggg

SEQ ID NO: 791249 - DNA, 618 bp, Homo sapiens
tcaattttttggatgaatcttgaaaaataaacatgattattacagaaacatgatttcactatatctatgatctcttacttaaattgatggcaaaaggtggcaatatctgttttgggaaataataaatacatatatcatgttttaattttgatttatgaagctttatatgacaatttataggtttttctgaacttatgaagaataattgcaatataataaaaatttttcatgttaaagttaaaatcagataaatatttgaataaaaatttaaaaattatatggcttggaatctatcaagttgggtacgttattgctgggaaaaagggaatttaacacaagtaatgatagaggcaggaggcagagaaatttaaggcagacaggggcaggtccctggtgaaacccrcctttaagccaaagtagcctgaaacccatggcccaaagcgagaatgtctattcctgtttgctcgctctctcccaattggttccttttgaataatgcctttttgccaatcaaatgttgccttttgcaaaactaccaatggccaaccccacctaccccatcctgtgcctataaagaccccagactcagtcagaagaggagagagaagcagcttgact

SEQ ID NO: 791250 - DNA, 634 bp, Homo sapiens
ataaaacaacaagaaactgaatttctgcagaaagtaaaaatgaaatttttcactctttagataggcaaatcagagactatacttcaagttttagaaaaaacatcagtacttttcatataaaagcaggtacttccatacatactttttcaccacataagatgaatgtttttaacagtgcctgggacatgatacgaactcaatgactgtttattgaatgaattaattgaacaagtttatgcaagatattgacataaaattaaacattgtcttcttataccatatagtgtctacaaaaactaagttgatacagaacctgyattgtaacatgattaaatttgagccaagtacatttatctctgaagaatttagaagtttataaaggaatcagaggctgggaactgaataattaatggaagatctctaaggcaatattcttttcattgtaactaatcttaaatagttaaagtaataattaataaataatatttaggttcctgaaaaaatgattaaattgaacgtcaaatagtttgcatttctatcacactgtagaatttatattttttatactgctttactgtaagatttggttgaacaaatacatcttatgatttcaagataagatattaaaatatgc

SEQ ID NO: 791251 - DNA, 605 bp, Homo sapiens
acagaggaaaagacacaattttgaattccagccacacattaattgtgtgcctttaggcaaatcacttaagcttgttaaattcaatttattctactgaataataatacatgggaaagcactttatatacttgaacgaactatgctcatttacagggttctgcgcatgacactgcatccgtaaaactgagaaaccaacaaagtgaggacaggatgaaaaaaaaaaacaactttcggaaygtgcttcctttcctcaatgccatgcagtttgtgcagtcagctgattagccaaaaatagttttgatgactgatgcttcctgcttatgtttagttggtttaggaagctcattagggatgctatcttggagatgagtctggtgggtagaatatctgatgactcttaagcaaatgtacttctttcagctggtgaattaatttctcaatagaatcagtttgctttttactaactgtctggcaatatcccatatttgctatagcctttcaaacacttgcaataagatctggctcacacatacaacctgttagtggtgaaagagaaacattcatcatattcaaatatctccaaacatgagagcagatgaatatgc

SEQ ID NO: 791252 - DNA, 605 bp, Homo sapiens
acagaggaaaagacacaattttgaattccagccacacattaattgtgtgcctttaggcaaatcacttaagcttgttaaattcaatttattctactgaataataatacatgggaaagcactttatatacttgaacgaactatgctcatttacagggttctgcgcatgacactgcatccgtaaaactgagaaaccaacaaagtgaggacaggatgaaaaaaaaaaacaactttcggaacgtgcttcctttcctcaatgccatgcagtttgtgcagtcagctgattagccaaaaatagttttgatgactgatgcttcctgcttatgtttarttggtttaggaagctcattagggatgctatcttggagatgagtctggtgggtagaatatctgatgactcttaagcaaatgtacttctttcagctggtgaattaatttctcaatagaatcagtttgctttttactaactgtctggcaatatcccatatttgctatagcctttcaaacacttgcaataagatctggctcacacatacaacctgttagtggtgaaagagaaacattcatcatattcaaatatctccaaacatgagagcagatgaatatgc

SEQ ID NO: 791253 - DNA, 620 bp, Homo sapiens
tagaacataagagcatccttttacatggaagtggtcattaatttgtctaaaccacctgaaagtaacaagaagatttgttcatggcaacaattctacaacaaagatggcattattccaattctaaagaaattcaggcatagcccaaagttggtatacctatgagaggttgaagcccagcagctggatacatggtttactatcaacacacatctacatcattattattttgcaaaactagaaacacgatattgcctctaagagggtcttcatacctcataagtgttgtattccccgtgaaaggaccaaacctaatatcttcaaatggaggttgaaagcccagaatatgtaaagcttcttcttgggtaataggtggaaggctacaaaagaaacattcattgcctttcatttttcaattccagtcatacgcaaatacagcctrtctcaatgttaatatgcttgtctgatttgcaaataatattagtaatatttttcattattttattttatttatttttttagagacaggttctcactctgtggcccaggctggagtgcagtggcgtgatcatagctcactgcagccttaaactcctgggctcaagtgatcctcttgcctcagt

SEQ ID NO: 791254 - DNA, 634 bp, Homo sapiens
gattcagtggcactaagcaatccagacaattttccaaactgtcatgattcaagagaagaaactggggcaaatgtgaacagaaggagaaagagacagactatttatttattctgttttaagaagaaatacgtttgctttctcttttttttttttttttttttttttgagacrgagtctcactctgtcgcccaggctggagtgctgtggtgcaatcttggctcactgcaacctccacctcccgtgttcaagcaattctcctgcctcagcctcccgagtagctgggacgacaggcgtgcgccaccacaaccagctaatttttgtatttttagtagagacagggtttcactatgttggccaggatggtctcaatctcttgaccttgtgatcttccacctcagcctcccaaagtgctggattacagacgtgagccactgcacctggccaaatgtgaagctagtcaagcgtggttgtggggggagataatgttaaatcagcttaacaataacccacaacactcgttggccttcaaatgatcttctcctaactgctttctaaagaaggtgctaagaagtagccacaatgaaacaaagaaacaagccctatcatcactaagagcaactttagtgtggtctaa

SEQ ID NO: 791255 - DNA, 655 bp, Homo sapiens
tctccactcattgcaacctctgcctccggggctcaagcaatcctcctacatcagcctcaggagtacctgggaccacaagtgcgtgcgaccatgcccagctaatttttgtatttttaacaaagtcagggtctcactatgttgcccaggttggtctcaaactcctgagctcaagcaatccacctgcctcagcctcacaaaatgctgggattacaagtgtgagccatcatgcgtgacccttttaattattttttctaagtttttacagagaacacacttttcamagagctgaacatcactggcaaaggtgagcaactgtgccaaatctcattgtgccaaatttccttgactggtaaaatgactcttacagagtcagataacagaagaattagtttctaacatttcttgagatgtcttcactgcctaataatgacttaattccctaagtagttttcccagccacttaaaatgttaaagctaatgaaacatagaaatgtgtgaccttgataggctctgccaacagtctgtactcacactttcctctagggttccatgaccttgccccctattctctttttgttgaatctcggattgcccctgggatcaattagcatatacggcccaaatgagcgtacttcataaaatgcccgcactgcca

SEQ ID NO: 791256 - DNA, 655 bp, Homo sapiens
tctccactcattgcaacctctgcctccggggctcaagcaatcctcctacatcagcctcaggagtacctgggaccacaagtgcgtgcgaccatgcccagctaatttttgtatttttaacaaagtcagggtctcactatgttgcccaggttggtctcaaactcctgagctcaagcaatccacctgcctcagcctcacaaaatgctgggattacaagtgtgagccatcatgcgtgacccttttaattattttttctaagtttttacagagaacacacttttcacagagctgaacatcactggcaaaggtgagcaactgtgccaaatctcattgtgccaaatttccttgactggtaaaatgactcttasagagtcagataacagaagaattagtttctaacatttcttgagatgtcttcactgcctaataatgacttaattccctaagtagttttcccagccacttaaaatgttaaagctaatgaaacatagaaatgtgtgaccttgataggctctgccaacagtctgtactcacactttcctctagggttccatgaccttgccccctattctctttttgttgaatctcggattgcccctgggatcaattagcatatacggcccaaatgagcgtacttcataaaatgcccgcactgcca

SEQ ID NO: 791257 - DNA, 592 bp, Homo sapiens
gaacgaaatttaaactcagtgaaaaggctgacttaagggagcaggcaattttttaaagacttctttataacagaagtatacgggaaattgattttttttatttttttattttttatttttttgacagggtctcactctgtcgcccagrctagagtgcagtagtgcagtctcagcttactgcaacttccacctctcaggctcaagtgatgctcttgcctcagcctcccgagtagttgagattacaggcccccaccaccacgccctgatttttttttttttgagacagggtcttgctttgttgcccaaactggtctcaaacaatcctcctgcctcagtctcccaaagtgctggagttacagacatgagccaccgtgctccgtggagaaatccatttttagcaaaaccacttctatgctcaataagatggttcacagtggccatgtttggttgacctagtcacatctaatttgctacaggaataatcctgacaaagtgttttttgcatttcctccatatgtaaagtaatccccagaaactgttcccagttgttattttactgagagtaatataactgcctgttcagtatttgtct

SEQ ID NO: 791258 - DNA, 547 bp, Homo sapiens
tttggttgcctgtttctccattggttcatttaggataactgcttctgtctgcgtccatgttacaacaaaggacatgattttgttcttttttatggctgcatagtattccatggtgtatatgtaccacatttttctttatccaatccactgttaatggacatctatgttgattccatttcygctactgtgaatagtgctgtgatgaacacacgagtacatgtctttttggaagaatgatttattttcttttgggtatatacccagtaatggaattgctgggtcaaatggtcgttcagtttttggttctttgagagatcttcaaactgcttttcatagtggctgaactaatttgcattcccgctaacagtgtataagtgttcctttttctctacaacctcaccaacatctattattttttgactttttgataatagccattctgactggtgtgagatagtagtatctcattgtgcatttctctgatgattactgatgttgagtattttttcttatgtttgttggctgcttgtctgtctctttttgaaaa

SEQ ID NO: 791259 - DNA, 618 bp, Homo sapiens
taagcatctgtaaccctattaagctaaacatgagttcatactgatattgtcaactctaatccatcaccgcatgagtcactctagcctcctccccttgcttatttgcaaattcccactgcatcaatgagaaagctggctcccaacatccatttatgtaattgtccgcttccagtgtacatgtgtggcagtatcagaattttttttgttgtttgagatggagtyttgctctgtcacccaggctggagtgcagtggcatgatctcagctcactgcaacctctgcttcctaggttcaaacgattcccccgcctcagcctcctaagtagctgggattataggtgcacgccaccacgcttggctaattttctttttttcttttctttctttctttttttttttttttctgtagttttagtagagatggcatatcaccatgttggccaggccagtctcgaactcctgacctcaactgatcagcccacctcggcctcccaaagtgctgggaatataagtgtgagccactgtgccctgcccagaattgttaactcatacctccaccagaagtaactttgtggtttgaagtagaatactacgtaaagatgtttggctttagccttaca

SEQ ID NO: 791260 - DNA, 618 bp, Homo sapiens
taagcatctgtaaccctattaagctaaacatgagttcatactgatattgtcaactctaatccatcaccgcatgagtcactctagcctcctccccttgcttatttgcaaattcccactgcatcaatgagaaagctggctcccaacatccatttatgtaattgtccgcttccagtgtacatgtgtggcagtatcagaattttttttgttgtttgagatggagtcttrctctgtcacccaggctggagtgcagtggcatgatctcagctcactgcaacctctgcttcctaggttcaaacgattcccccgcctcagcctcctaagtagctgggattataggtgcacgccaccacgcttggctaattttctttttttcttttctttctttctttttttttttttttctgtagttttagtagagatggcatatcaccatgttggccaggccagtctcgaactcctgacctcaactgatcagcccacctcggcctcccaaagtgctgggaatataagtgtgagccactgtgccctgcccagaattgttaactcatacctccaccagaagtaactttgtggtttgaagtagaatactacgtaaagatgtttggctttagccttaca

SEQ ID NO: 791261 - DNA, 618 bp, Homo sapiens
taagcatctgtaaccctattaagctaaacatgagttcatactgatattgtcaactctaatccatcaccgcatgagtcactctagcctcctccccttgcttatttgcaaattcccactgcatcaatgagaaagctggctcccaacatccatttatgtaattgtccgcttccagtgtacatgtgtggcagtatcagaattttttttgttgtttgagatggagtcttgctctgtcacccaggctggagtgcagtggcatgatctcagctcactgcaacctctgcttcctaggttcaaacgattcccccgcctcagcctcctaagtagctgggattataggtgcacgccaccaygcttggctaattttctttttttcttttctttctttctttttttttttttttctgtagttttagtagagatggcatatcaccatgttggccaggccagtctcgaactcctgacctcaactgatcagcccacctcggcctcccaaagtgctgggaatataagtgtgagccactgtgccctgcccagaattgttaactcatacctccaccagaagtaactttgtggtttgaagtagaatactacgtaaagatgtttggctttagccttaca

SEQ ID NO: 791262 - DNA, 618 bp, Homo sapiens
taagcatctgtaaccctattaagctaaacatgagttcatactgatattgtcaactctaatccatcaccgcatgagtcactctagcctcctccccttgcttatttgcaaattcccactgcatcaatgagaaagctggctcccaacatccatttatgtaattgtccgcttccagtgtacatgtgtggcagtatcagaattttttttgttgtttgagatggagtcttgctctgtcacccaggctggagtgcagtggcatgatctcagctcactgcaacctctgcttcctaggttcaaacgattcccccgcctcagcctcctaagtagctgggattataggtgcacgccaccacgcttggctaattttctttttytcttttctttctttctttttttttttttttctgtagttttagtagagatggcatatcaccatgttggccaggccagtctcgaactcctgacctcaactgatcagcccacctcggcctcccaaagtgctgggaatataagtgtgagccactgtgccctgcccagaattgttaactcatacctccaccagaagtaactttgtggtttgaagtagaatactacgtaaagatgtttggctttagccttaca

SEQ ID NO: 791263 - DNA, 370 bp, Homo sapiens
acttttttccatcctcttcagcaaaattgtttcataggtttgcaatacatttaaattatcttgtcaaattctgtattccatctttggatcccaggacagcctaaatgattgtttttgtttacatacattaaggttcacattttgtgctataagtttcttttttgttcacaaaggcagggtgtcatgtatccgctgtcacaatatcrtacagactagttttactgccctaaaaaatcccctaagcttcattcacctattcgcctttcctcttcgatctccaaatccctggcaaacactgacatttttttattctctctatagcttttgccttttccagaagccttttaaaactggcttctttcatttggat

SEQ ID NO: 791264 - DNA, 643 bp, Homo sapiens
aggcaaataaaccacgcgcccatgcaaaacaaacaaacttgtctttgaatatttataaaggctctactcataatagccccaaactggaaacaaataaatgcccacaaactagtgaatggggtgcacacactgtgatatatccatcaaagagaatcctactcaacaataaaaatgaataaacctgtgatatatgcatcaacatggatgattgccagatgcatcatgctgaagaatgaaagccaatctttttaaacaactaaacacacttgccatacccagcaattgcactcttgaacatttactaaaggaaatgaaaacttacatccacacaagaaccagtacaggattcttcatagtaactttacttgtaatagacaaaagctacaatcaaccggaatgtctttcaataggtgaatagttcaacaaaccatggcgcatccacaccaccgaayaccactcagtaattaaaaggaagaagcattggtagacaacaacttggctggatctcaagggcatgatgttgaattttaaaagccaatctcagaagatcacatattgtacaacttcatttacatgacattctggaaaaggcaaagctataaaaacagaaatcagatctgtgattgacagaggctagtgatta

SEQ ID NO: 791265 - DNA, 541 bp, Homo sapiens
tagtatgatgatgatagttaacaatgctctattgtgtacttggaaagaagtcttgcggtgcaagctttctgcttattgtgtttgctatattgatagcctgtttttatcctctgcagattgtgaaagattaataggatgacatcactgttattatctcaatttctatgcaaatttctctctctcaaaaacaaaattttgagttgtccaytctgccttctttataaggtcttctttatctctatatactctgtttaatatttatatacctacatgctatccactacagaaaaattaagttctgtttatgttttatgtttttttctaaacctacatattaattcttgcattcatataaccaacttacccagtttattgaagatttttttttgccacttcaaatattttttcatgagctggatttcagattctgcataacaatgcaatatctgaaggtagtaaaaagttacttacaaaattctgaagggggagagcatgatccctgtctatgtatccttttacaaaccagaaaccaacaaaaaat

SEQ ID NO: 791266 - DNA, 636 bp, Homo sapiens
gatgttctgctagaaaaggcaagacagagaaaatcaaactgaatgtattgatttttcctaattgtatactatcttcaaactctggaactacttatggtttctgagtggtccatatcaagctaatttattatttaatggtagaggatatgcatacttccaaactgaatgagagtgctgtttttattcactattcaaaatagttttgattcatattattttaaaattttgcaatttataaaatactttcctatatcatttcacttgattaatactacaatcaaccacctttcacctcactgttgcttcagataatgtgccaagggaaaaaaataagacaaaatgatgaatctgtattaggcataatatgagaaaaaacttagggcaaaattatttttttcctcctagmtctcttttgttgttttttaaatgtgtttggttttgcactttgattttgccttatggcaattctttgctttgggaaattacttggaacaagaatgagcattaagaaacagcattcatagtattttctgccatctgtctcttgacctgaatttaggtgagaagaggagagagtaaaggagtcaaagtgaactatgttaaataatatgagaaatatttggagtttgctgcaga

SEQ ID NO: 791267 - DNA, 525 bp, Homo sapiens
ggcagtaatctgtgaggaaaagaccagacttcaagagaatatctgcagtgtagaaagatgaactgaaataattaaatgaagggataggtaaaaagtattgcccttagattccctcaaaacccaagggaaagcaaaatcagcccaatacaactgtacaatgtagagatatgtatttgtggcagcacaaatataaagagcaggaattagagctgacagtgtagttggcaggactaayggcatgacctggctggaaaaagaagttagtttaatatttgactgtattaacagaagaatcatatctgttctgatagctggaggctgactatgctggagagcttctgttgacacctccatttccaaactctgtgcttctccaccctacccagtgccccaggatgtggctgacctatgtgtactgcatcaaggagttctcctttattctgacttctcctttattctgacttccagtcggatgtggccaaatggtagcacaagcagaagacaggagggaaacaaaagaatgag

SEQ ID NO: 791268 - DNA, 525 bp, Homo sapiens
ggcagtaatctgtgaggaaaagaccagacttcaagagaatatctgcagtgtagaaagatgaactgaaataattaaatgaagggataggtaaaaagtattgcccttagattccctcaaaacccaagggaaagcaaaatcagcccaatacaactgtacaatgtagagatatgtatttgtggcagcacaaatataaagagcaggaattagagctgacagtgtagttggcaggactaatggcatgacctggctggaaaaagaagtyagtttaatatttgactgtattaacagaagaatcatatctgttctgatagctggaggctgactatgctggagagcttctgttgacacctccatttccaaactctgtgcttctccaccctacccagtgccccaggatgtggctgacctatgtgtactgcatcaaggagttctcctttattctgacttctcctttattctgacttccagtcggatgtggccaaatggtagcacaagcagaagacaggagggaaacaaaagaatgag

SEQ ID NO: 791269 - DNA, 525 bp, Homo sapiens
ggcagtaatctgtgaggaaaagaccagacttcaagagaatatctgcagtgtagaaagatgaactgaaataattaaatgaagggataggtaaaaagtattgcccttagattccctcaaaacccaagggaaagcaaaatcagcccaatacaactgtacaatgtagagatatgtatttgtggcagcacaaatataaagagcaggaattagagctgacagtgtagttggcaggactaatggcatgacctggctggaaaaagaagttagtttaatatttgactgtattaacagaagaatcrtatctgttctgatagctggaggctgactatgctggagagcttctgttgacacctccatttccaaactctgtgcttctccaccctacccagtgccccaggatgtggctgacctatgtgtactgcatcaaggagttctcctttattctgacttctcctttattctgacttccagtcggatgtggccaaatggtagcacaagcagaagacaggagggaaacaaaagaatgag

SEQ ID NO: 791270 - DNA, 549 bp, Homo sapiens
ctataacattcttttctcaatcctttatggcaagaggtagtaaggataactggctttatgagccctagggtatacctcatcccatttggatctttgtaaatcatttctttatttaaatcccttcaaactgtctaatgcatatgacatatattttctgtgggcaccctggctgataarcatttattgaacacctactacataccaagcacttcctatgagttatgtttaatatccctctgaagaaggttctactcttatcccacatatgttgcagatgaagaaatgaaggtgcccagaggttgacttgcttaaggtcaaacagccaacaggtggccaaggtggatttggacccccaacatctgacttagagcccattctgttaactgctatactcatctcactctgttcagaatagtcagatcccacctgggaatagttctttctccctggctttcagaggaattaaacaaaacaaagttgtgtttagaggcaatgccaataagaaagagggaatctcataactatgggaaatggggtgtacaaatttgt

SEQ ID NO: 791271 - DNA, 625 bp, Homo sapiens
atttgatcctgtcatcatgatgctagctagttattttgcagacttgtttatgtggttgctccatagtgtcactggtctgtgtatttcagtgtgtttttgtagtgactggtaacagctttttgttttcatatttagggcttccttcagttcttgtaaggcagatctggtggtgccaaattccctcagcatttgcttatctgaaaaggatcttatttcactttcarttatgaagcttagtttgtccagataagaaattctaggttgggggccaggtgcagtggctcgtgcctgtaattccagcactttgggaggctgaggcaagtggatcacttgaggctagaagttcaagaccagcctggccaacatggcaaaacctcgtctctactaaaaatacaaaaattagccaggcatggtgatgcatacctgtaatcccagctacttgggaggctgaggcacaagaattgcttgaacccaggagacagagttgcagtgaaccgagatcacaccactgtactccagcctggggtacagaggaagactccatctcaaaaaaaataagaaagaaagaaaaagaaattatgtgttggaatgtcttttctttaagaatgttgaatatctaccccca

SEQ ID NO: 791272 - DNA, 625 bp, Homo sapiens
atttgatcctgtcatcatgatgctagctagttattttgcagacttgtttatgtggttgctccatagtgtcactggtctgtgtatttcagtgtgtttttgtagtgactggtaacagctttttgttttcatatttagggcttccttcagttcttgtaaggcagatctggtggtgccaaattccctcagcatttgcttatctgaaaaggatcttatttcactttcagttatgaagcttagtttgtccagataagaaattctaggttgggggccaggtgcagtggctcgtgcctgtaattccagcactttgggaggcygaggcaagtggatcacttgaggctagaagttcaagaccagcctggccaacatggcaaaacctcgtctctactaaaaatacaaaaattagccaggcatggtgatgcatacctgtaatcccagctacttgggaggctgaggcacaagaattgcttgaacccaggagacagagttgcagtgaaccgagatcacaccactgtactccagcctggggtacagaggaagactccatctcaaaaaaaataagaaagaaagaaaaagaaattatgtgttggaatgtcttttctttaagaatgttgaatatctaccccca

SEQ ID NO: 791273 - DNA, 625 bp, Homo sapiens
atttgatcctgtcatcatgatgctagctagttattttgcagacttgtttatgtggttgctccatagtgtcactggtctgtgtatttcagtgtgtttttgtagtgactggtaacagctttttgttttcatatttagggcttccttcagttcttgtaaggcagatctggtggtgccaaattccctcagcatttgcttatctgaaaaggatcttatttcactttcagttatgaagcttagtttgtccagataagaaattctaggttgggggccaggtgcagtggctcgtgcctgtaattccagcactttgggaggctraggcaagtggatcacttgaggctagaagttcaagaccagcctggccaacatggcaaaacctcgtctctactaaaaatacaaaaattagccaggcatggtgatgcatacctgtaatcccagctacttgggaggctgaggcacaagaattgcttgaacccaggagacagagttgcagtgaaccgagatcacaccactgtactccagcctggggtacagaggaagactccatctcaaaaaaaataagaaagaaagaaaaagaaattatgtgttggaatgtcttttctttaagaatgttgaatatctaccccca

SEQ ID NO: 791274 - DNA, 604 bp, Homo sapiens
aaagctggcatctatgtgccacattctctagaattaacatcctttccataaaattactcaagatatttcagagcaatcactcagaaatagttatttatacaacttacttaataatataagtgatggaccacctctaatttaagtgtgttccagtgctttccaccgtgtcctgccttggctacagatattccaccctatcctgtcagtgaccaatctatcctacttgagagaatcagcactggcatatggagggaaccakctggaatttctgttgctcaatgggtggctgatgggggagctgatctggaaagaggctccaaaaagaattaatgagttccagatgtaattaaagactgcttttccccccaaaggggctcaggactagccatggggtggtgcctcttggttccgaattacaccctttaaccacttgttcatccatcaagcactaaacaccaccatctttatcctagtgtgttttgccaagcagtgttttggctttttggtctttttttcctgaaagtgttctatttttacaattagaacactaaagctttaaaaataatatctggaaagttaacaataaggagaaacccctgaattt

SEQ ID NO: 791275 - DNA, 626 bp, Homo sapiens
taaatacattcatagtattgtgcaaccatcactaccatacttctccataagtcttttcaactcttaaaactgaaactctaatgtcattaaacagtaacttcccattcttccctaccccgtgttcctgaaaaccaacattccactctctgggtctatgattttgactacccttaagtacctcatataagtagaatcatacaataccttttggtactggcttatttcttttagcataatgttctcagggttcatccatgttgtagcatattatggaatttcattccattgcatgaacttaccacattttgcttatccattcatccacccatggacacctggaatgcttccatgttttagctattgtaaataatgctactatgaatatggtatacaaatatctcttagagactctactttcaattctattgggtatagatccagaagtgaaatagcaaggtcatrtgatagttctattttcaaccttttgtggaaccataatgttgtttcccacaataactgtaccattttacattcccaccaacagtacacaatggtttctccacatccttgttgacacttgaaattttctactttgatagtaaccattttaatgggtgtgaggtgat

SEQ ID NO: 791276 - DNA, 570 bp, Homo sapiens
cttaatgctcaaataagtattctcactcctcccaatctctcaaccttcattcttctcccatgttcacattgaaaatccccagttcttggcaaagctatgtatccactgccatcacttttgcttctggaaagtttaagaattctgtagaaaatcacataattcacacacacacacacacacacacacacaccamtgagttctgtgtcatttggtgctatcacaaatgctttatttccaaccttaattgagccttcagtactaatcaactcatcttccattcatctctagttaaaattcttttctgttcaaagtttgacctcttgctattcttctacctccatgacttagtcactgatttctcaaacaaatctgaggacacttttaccaaaaccttttaaaaatattcactcttccttacctccctccgacatggttattcttccttttccctaggtatagtttctacacaagtgaccttgtcccagtctactcctccttgaacatcacaagttagtctcgtccatttttttcccatttcttagatgttcaaaattcttcccatcaactgac

SEQ ID NO: 791277 - DNA, 677 bp, Homo sapiens
cactctgtcaacatgactcaccagaccttgtaccaagccaacccgtaagaaattatttacccttccttcaactcactctcctctgtgctcatgagatttcccagcatttatgttttaccttcatcttaactaactctgattcatccctcaaaacttggctccaccgtaatttattcctaaaagccttctatgatcttgaattagatgyccccttttgtgtgtaaaatcttctgtaccccttgctaaagtaattctacttcaagaaacttgtcctcaagaactagtaggggacaaggacaaagaataatgctcaaagttctccactgcagtgttatttatttataattggcaacatttaaaaacaccttgaaatagcaaacaattagaaatatttttgtccattttaaactccttcctttcttcccagactttttgacacacttaatagctgaaacatacaagtccccaagcaaccatatactcccttgcctctgcccccctctgccttcattcctgtttttgtcacggccaactcttacatactttcaaacccagttcagatgccacctcttctggaaatgcccttgtcaactaagtctgggttaagtgaccttctaagggctatcacagaatgccatgttttgctacaatacttctaaaactatactgtaagggcc

SEQ ID NO: 791278 - DNA, 599 bp, Homo sapiens
ggagaaaccacagctttggttgagagtgactactggttagattaaatgagtgactaacctcaaagagtaaagcactaaaactggtcctagtttctagaatccaaaacaacagtcaatgcttactatggtaattcaatgtaactagggcattaacaatttctaacgtgccttccagttcaaaaacaaaagctaatgtataatatagatgaggtacatgaraacatgttaaactatctttaatagtatttttcttctcacctatgctatatgaataggtttaaaaaagtttggaaaagcaatgtaattgcacaggtgtctagttacatcatgaccactgctgaagctaacaaactgcagaaagtacaaagctattctcccataaagaggatgttgcacacagggatgggaaatatccatattgaaaatctccaaggataaattccaataggcaaagtttatctacagtattttcactctagaggcagcaaccttaagtggccttctatacacaaaaatattttttcattatagggttaagaccttttcatattaatgtcaagcactttcctccatgttactactcagagaaaaatgaacag

SEQ ID NO: 791279 - DNA, 591 bp, Homo sapiens
actgcaataattatgctttattgatttgttaaatgtttatattctgaaaaaacatttaatagtattaaaatttcaatcattagcctcatactaattaacataaatttcacaccatgcatatcaatcactttattttaatacaaataatgcacttaaaggaaaaatttcccaaatgtctttatttttgacttggcaaataatgttaacaattatatattytaatatagtcagataggggctccatatttagctacatgagtaaaattctgtttccattctgtgttgaatatttatgctaaaatttattttgatttttctaagttgcacatctcttttacataccttctgaagtaaatgacaccctccacattcaaatcaaaagagacagagaagtggcttaaaattcatattaatagttggattcaaaatttaaacattattataaacatagaactgcaacagctgttggcttaaatttgtgtgtagatccacacagtcaactgctctgtgacaaaggagcaatgataattccaggaagaaaaagcaatcctcaacaaatggtgctggaacaactggatattcatatgcaaa

SEQ ID NO: 791280 - DNA, 591 bp, Homo sapiens
actgcaataattatgctttattgatttgttaaatgtttatattctgaaaaaacatttaatagtattaaaatttcaatcattagcctcatactaattaacataaatttcacaccatgcatatcaatcactttattttaatacaaataatgcacttaaaggaaaaatttcccaaatgtctttatttttgacttggcaaataatgttaacaattatatattctaatatagtcagataggggctccatatttagctacatgagtaaaattctgtttccattctgtgttgaatatttatgctaaaatttattttgatttttytaagttgcacatctcttttacataccttctgaagtaaatgacaccctccacattcaaatcaaaagagacagagaagtggcttaaaattcatattaatagttggattcaaaatttaaacattattataaacatagaactgcaacagctgttggcttaaatttgtgtgtagatccacacagtcaactgctctgtgacaaaggagcaatgataattccaggaagaaaaagcaatcctcaacaaatggtgctggaacaactggatattcatatgcaaa

SEQ ID NO: 791281 - DNA, 646 bp, Homo sapiens
ccatactataggaaattcgaacaatagatcctgtgatggttaatactgagtgtcaacttgattagattgaaagatgcaagaattcttcctgggtgtatctgtgagggtgttgccaaaggagattaatattttagtcactgggctggggaaggcagacccacccttaatctggtgggcacaatctaatcagctgcaagccaatataamgaaggcagaaaaaagtgaaaaagcgagactggcctagcttcccagcctacatctttcttgtgagttgcatgcttcctgccctcaaacatcggactaaagttctccagcttttagactcagactggctctccttgctcctcaagcttgcagacagcatattgtgggaccttgtgatcatgtaagttaatacttaataaattaataggctatatatcctattagttctgcccttctaaggaactctgacttatacagattttggtaccaggagtggttctagtggaacagaataatacagatggagttctttcattggtttttgggtttctggagttggctgctcaatatgattagaccccaaaatgctaaggactctacttttaatagtatgaagaacactgacagtcattggtatgaactgcttagaaagttatgcaaa

SEQ ID NO: 791282 - DNA, 637 bp, Homo sapiens
tgaagagccctgtaattgctcttctctgtatgtgtgatttaacagtggggaccacagttactcaactacaaaatttaaatacaatgggaataattggatcccaaggtggtgggggccaagtggcagcactcagccatcaaaggcaaggtggccatggctaccgtaatggacagcagagacaaagcagcaatcagaatagtctgactcmtgtagatctctggcattggctaattaatcatggtgttcctagaagtgaactgataggaagcctactgcattcctacttaatttatacaaggagaaaacttttaggtcgaatggacaaaagactaatttgaagtataaaaacagagaatagcagcccctaaatcaatttccagacttgacccagtttacagacccagaaccacttgaatgaaggggaggctgggtccccttgaggaaggcctcactacatttttgacaatttatgcagtgaatctttctcccttcctcccccaaggagacctccagcctttcaccagggtaactgcattggggaaagggaaatgatcagacattatggggactactggacactggctctgagctgatgttgaatctcggggactcaaaacatcattgtgaccctccagtt

SEQ ID NO: 791283 - DNA, 711 bp, Homo sapiens
acggcaccattcctcggggtggtcagctagctacccggtggcaggttgattatattaaatctcttccatcatggaaagggcagagatttctcctcactggaatagagacttagtagggatatgagtttgcctatcctgcacacaatgcttctgccaagactaccatccgtrgactcatggaatgccttatccatggtcatggtattccacacagcattgcctctgaccaaagcacttatggctaaagaagtgcagcagtgggttcatgctcatggaattcactggtcttaccatgttccccgtcatcttgaagcagctggattgatagaacggtggaatggccttttgaattcacaattacaacgaccactgggtggcagtacttttcagggctgaaacacagttctccagaaggctgtgtatgctctgaatcagcgtccaatatatggcactctttctcccatagccaggattcacgagttcaggaatcaaggggtggaagtggaaatggcaccacttgctatcacccctagcgatccactagcaaaatttttgcttcctgttcccacaacattatgctctgcttgcttagaggtcttagttccagagggaggaatgctgccaccaggagacacaacaacaatttccttaaactggaagttcagattgttacctggccactgggatcctcctacctttaagtcaacaggc

SEQ ID NO: 791284 - DNA, 711 bp, Homo sapiens
acggcaccattcctcggggtggtcagctagctacccggtggcaggttgattatattaaatctcttccatcatggaaagggcagagatttctcctcactggaatagagacttagtagggatatgagtttgcctatcctgcacacaatgcttctgccaagactaccatccgtagactcatggaatgccttatccayggtcatggtattccacacagcattgcctctgaccaaagcacttatggctaaagaagtgcagcagtgggttcatgctcatggaattcactggtcttaccatgttccccgtcatcttgaagcagctggattgatagaacggtggaatggccttttgaattcacaattacaacgaccactgggtggcagtacttttcagggctgaaacacagttctccagaaggctgtgtatgctctgaatcagcgtccaatatatggcactctttctcccatagccaggattcacgagttcaggaatcaaggggtggaagtggaaatggcaccacttgctatcacccctagcgatccactagcaaaatttttgcttcctgttcccacaacattatgctctgcttgcttagaggtcttagttccagagggaggaatgctgccaccaggagacacaacaacaatttccttaaactggaagttcagattgttacctggccactgggatcctcctacctttaagtcaacaggc

SEQ ID NO: 791285 - DNA, 654 bp, Homo sapiens
gaaacagaaataaagtttatcttagacaagcaaaagccgatcaccaccactagacgagccttacaagaaatgttaaagggagttctgcaatgtgaaagtaaaagacaataatgtgtaaaaagaaaacatataaaggtataaaacccactggtaaaattaagtacaaatacaaacccagaatactccaatgctgtaactggtgtgtgcaatccactcataactctagtatggagccccaagacaattctatcaataacaatattacctatagcaacctgttaagagataggtaatataagatatgtaaatttggacagcataaagccaaaatgtggaggggggggtggagttaaactgtagaggttgttttatcattttttctktttgtttatattcctttttctgtcagctaaagtaagttgtcagctgtttgaaataactggtaataactgtaagcattttttgtaaggttcatggtaattacaatgtaaaaacttatcatacggtcctaaaaaataaaaaccaataaatttaaagatactaccagagaaaatcacttaaccacaaaagaagacaagaagaaaggcagacagtagttacaagacaatcagaaaacaaacaacaaaatgacaaaaataagtccttatttatcaa

SEQ ID NO: 791286 - DNA, 644 bp, Homo sapiens
tcataagggatattggcctgaagttttctttttttgttatgtctctgccaggttttggtatcaggatgatgctggcttcataaaatgagttagggaggagtccctcctttcaactgttttaaatagtttcagaaggaatggtactggttcctctttgtaccttgataggattcagctgtgaatcatggtcctgagcttttttgggttagtaggctagcaattactgcctgaatttcagaaattgctattggtctactcaaggattcagtttcttcctggtttagtcttgggagggtctatgtgtccagaaaatctatgcatttcttctacagtctctagtttctttgcatagaggtgtttatagtattctctgatggtactttgtatttctgtggggtcagtgatgatatccyctttatcattttttattgtgtctatttgactcttctctctttccttgtttattagtctagctagcagtctatctgttttcttaatttttccaaaaagccagctcctggattcactgattttttttggaaggctttttgtgtctgtatctccttcaattctgctctgatcttagttatttcatgttttctgctagcttttggattagtttgttcttgcctctctagctcctt

SEQ ID NO: 791287 - DNA, 587 bp, Homo sapiens
aaaataaaaaaaattaaatacatggctagtttctatgtgctaaaaaaagaaacaaaacacttccaaattggaaaaaaggaaataaaactgtccctctttgcaaacaacatgatagtatgtctacacaaatgtaaagactctaccaagaaacttttagaagtgataaatacagtgaagttttaggatacaaaattaacattaaaacacaggagcatttccatatagcaataatgaaatatccaaaaaagaaatcaagaaggaaattttatttacaatgctaaagaaaataaagtacccaggaataaatttaacartgaaggtggtgtgttctctataaggaaaactacaaaatactgatgaaagaaattgaagaggacacaaacaaattgataaacatcccatgtttgtgtatcaaaattgatatcattaaaattaccatactacccaaagcaatctacagattcaatacaatccatatcaaaatactaaaatcatttttcacagaaatggaaaaaaatcctaaaacttatatgggaaaacaagccagaatagtcaagcaatcctaagcataaagaacaaaattggag

SEQ ID NO: 791288 - DNA, 527 bp, Homo sapiens
aattgctcgttagttccatttttttaaatatactttcagattttccacacagatgattattttatctgtgaacaaagacagcttatttatttcttcccaatctgtagcccttctattttatgttcttgtcctactgcattagctaagatttcgagtacagtgatcaaaagcagtaataataagagacattctttccttttacctgattttagtgggaaaggttttcatttttcaccattaagctgctattgtttttttctttttttgaggcaggaacttgtccattctctaagagtaagagcaagagggccagtgtggycttaactgaaatactgatggggaggagagtaggacatagagtcttggagttatggtaaatatatatatacatatatatatatatacacacacacacacacacacacacacacacatttatttatttactgtgagtaaggcaataatagaaatgtcacaatctgacatatattcacaggatccaactttttaatagaaaattgactgaa

SEQ ID NO: 791289 - DNA, 612 bp, Homo sapiens
taaagaatataaagaatgactcttctgctgttacatccacagattttgtatgtggaggctaagaagaaaatgcatatggcaaacacagcctctaggtgaccccaattaatcatcagtctacctttatgcccaacacttcccattgggagtttagctgggtcagacctgctacttaaraatataaaaccaccagatgtcagtagtggtgcacaatggctctaatgaaacttcctccttggacaaagtataaaatttcacatacagaaagaaataaacaagcagtgaggcagtacaatatgtaaattattaaattttttatacttttttctgaatagaagttgacttactctagaagaaaactaaactcttttttgaacctttgtataagatatttggggttggatttttactgaattagccatgttttgtttcaagaaattctaaatagacattccttgaggaatgagaacaaaaggacaaaattctgtaagtaaataaataaataaatgctaactttagttgtatatttactatagggcttcttagaatttataacgagtttatatgtcttgcacatcttcaaaatgggataaaggtatacattgctttcaa

SEQ ID NO: 791290 - DNA, 681 bp, Homo sapiens
tcagtggcagtatgtatgctccttagaacttttgacaggtgaaatgcaatgcaggccctcaagattttggagcaaatccctgtcatcctgcacagataactactcaccttttgagaaatagatcttggtctgtttctgactggaccctagtagagactgaatactttaacatggccaccaaactgttcatcacaaactgaagattatctaatccatgaagtcataaagttgggcatgcatggcagtactctgtcatcaaatggaagtggtgtacacatgaccgagcccaagcagaccctgaagacacaagtaaattgcataaacaagtgggccaaatatccatggattccactgttgctacactaccttctttctccagattgcacctctggtctataaggagttccctatagtcagttccagagaaagagaataattggacctgatttagagatggttytgcttgatatgaaagcaccatcacctgaaagtggacagctgcagcactgcagccccttagtgggatattcctgaaggatggtggtaaagggaattcctcccagttggcacaatgttgaaaaacatgaagatatttgtgtctcatatgaatgtctaccgaagaggaacctcagtaggaaattttaataatcaagtggataacatgatccattctgtgaatcc

SEQ ID NO: 791291 - DNA, 561 bp, Homo sapiens
cctagataatccagcacactctctctatttaaaggtcacttgattagtgacttcaattccatcgccaaccttcattcccccttgccatgtaatctaacatatgcaaatgctctgggattaggacatgaaatatatttgggggattattattctgcctaccacaaaaggtaaccactattttgatttctagcatcataaattagttttgtccttgaatttgataaatgaaatcrtatgtgttgttcttttgtctgtcttctttcactcacatatttttgggtcttatgtttattatcaataaattgttatttttattgctctgcagcatttcattaaataagtataccatacttcatctattgtgctgtaaaaggagattggttttgtttatagactgtgtctattatgaagaaatctgcaaagattgtttacacagtgttgtgtggacacctgaactcctttctatctggtatatactgaggagtggaagtattcagctataaattaggcatttgcttttagctttagtggaaactgacatctcattttccaaagctggtt

SEQ ID NO: 791292 - DNA, 635 bp, Homo sapiens
agcagaggccagaaaaactatcagggcaatgaaaggaaagaatgtccatgagtaaaggcagaatatcatactcgtcccttggctttgtgtggccaaatctctggccctgaaaatcacaatgatgtagtagaaagacaaagatgggaaaaaaacaaaaatcattcttatcctattaaattgctttcgtaaataaagaggaagccttgggcctccacccaggacttagtttcctgaaggaccaggaaagggtaagagcaaatggatttggaattgggcaatggcaggtgctggctaagtggctggctctccagtttgcctccttgtgtctgccacagtgccatgcaggcaaactggcagccctataaagatcctcaccttcagagacctacagatggtsccagaactctgatcagcaatgccttctcaaagcagaagtgacgccatcaaccaagcacatgtcactcctcagccaaaaccaaacgctcagggagaatccctggccctgacaatgacccttctcttcttctggcatagacttccctagcaaatgtctgagtggagatggcctgggcatcatcctattccctggttgacactctggtcccctggctctgctcagatgggctacacaaagc

SEQ ID NO: 791293 - DNA, 627 bp, Homo sapiens
tgccactatttttcattcttatgttaatgagcatttgagttgtttccaatatttgattattattaataaagcactataaatattttctgcaagtcccttggtgttggctatcacagatcaggacccaaaagagatgagtggaaaaaataaaaagaattgagtggacccgcacaaatgatcagtttttgccaatgtgtcaaggcaattcaatatgaaaagacaatcttttcaactaacaatactgcaaaacctgaatatccttacgaaaaaaaaatctcatctctattgcgtgccacatgcaaaattaatttgagayataacacagacttaaatatgaaagctaatatcgtaaagcttttagaagaaaacataggagaaaatctacaaatgtggagtagggaaagatttcttaggacacaaaaggtacaaacataaaagaggaaattgatgaattgggcctcatcaaaattaaaaacatgttcatgttgaaagatactggtaggaaaatgaaaagttaagccacagatgaagagaagaaattcataatatgtgtaactaacaaaggactactgttcagaatatattgtacattctttaaaatcaataataaaaagcaacaatccaatt

SEQ ID NO: 791294 - DNA, 640 bp, Homo sapiens
tctgtgctctcttcctctctcctgcagtcagtgtgtgctgggcacacagtgcctggacaggtcacagttgctgctgggactggtaaggagggcaggaatgagatagaagccaggccacccaggaaaatgtgaatctgatgagaacccagtcacagctgaagtgcccaagcacttcagttaatcaagacattattgtattgatgtgactaaaattcawcgaaccaaaaatggtttagccttcccctatgttgagctaatctatttcagaatcttcaaaagaaaaccaaaaaccacatgggtgattcattatccacagcagagaaggaaaaattccaatggagcttactcttccccttatcaccgggtaatgctatgaatttgcccttatttatagaaatgctgagtttcttttctcatgagctgtgagactaaggattgaagaacacattttcttttacttcctggggagggtaaggaatagtcgacaaggaaaggaaaagacatgcattgacccaaagcaggctcaaagccaaatggtggagggcacacataacagacgtcctaaaccttggatggtgcttacatgctcagccacgaataagtcaggagtctgaatccacaaacaactggccaggtgaat

SEQ ID NO: 791295 - DNA, 557 bp, Homo sapiens
tgtccaacttgtggctcttttacctgcaaaaaccagctttggtattgatgcgagcctccctagggggcagatcttggatgttcagatgctgttagtatcaggcatgtaccgacttctgggaggacggctgggagcatgcagaaacagatgaccctttgttttctcagataagcrtctggcaccttgacagaggctgacttttgggggaagtttaattcttccttttgccagtactggaaatgatggcaatattgggttgtacctacctctgctcacgaagatggtggtcttagcagcacaggggtttagaaagtgcccctgggcaggctgaatccgatttccctgcttcagccagtgtagctcagcagctagttttgcttggtatttctaccctattgctcaggatgaaagaattatctgcggggagagggggtatcttgcttctttgcaaacttatgcccccggagaaacatcacctgtagatgtgcctgttctctgactacatttgctctgcatgagagcagggatcctgttacccgtagcccatatgctcctca

SEQ ID NO: 791296 - DNA, 442 bp, Homo sapiens
aataataccaccaccacaggtctcatattgtggggaaaatagacttcgctaaaataatccagccattcattgcaaatgacaataataagctttagaatgcaaggtgactagtactgagaatttctctattacctaaattcgctggtctccaacaacaacaaaaaaatgagacatgcaaagaaacaggaaagtctgatcacacaccaggagaaaaaggaggcaacagaaactgcctgtgagggccaccagatgccagatttaacaaagacttcaaagtagccrttataattctcttcagagaactaaaggaaagcacgcctcaggaagggatggaagggatgatgacaatgtctcatcaaattaagaatatcaataaagacacaaattataaaagagaaccaaatagaaagtctggaattgaaaagtacattaactgaaggga

SEQ ID NO: 791297 - DNA, 541 bp, Homo sapiens
tgccattttatacaattcttaaaagaaaggagagtggcggccgggcgtggtggctcacgtctgtaatcccagcactttgggaggccgaggcggacggatcacgaggtcaggagatggagaccatcctggctaacacggtgaaaccccgtctctactaaaaatacaaaaaattagccgagcatggtggcaggcgcctgtagtcccagctacttgggaggcggaggcaggagaatggcgtgaacccggcaggcggagcttgcagtgagccgagatcgcgccgytgcactccagcctgggcgacagagtgagactccgcctcaaaaaaaaaaaaaaaaaaaaaaacggagagtggtatttttcaaatttcccatctaccagcaaaaccccttgacagcaatttcattccattaaatgaagcaaaacaaacaaatcttgcaatttcctctactttcctgtttcctctttctttatgcaaaggcctgcccaaccactctaagaaccagctggtttataataatgaatattcatgctcgatggcatt

SEQ ID NO: 791298 - DNA, 510 bp, Homo sapiens
aaaagcagcaagaataggattatgggaggggtgtgaactttgctaaagtgtaggcatatttctattaatatactcccttactgctcaggggtcatgtggccagaggtcacaagatttgtgacttccccagttgctcctataaataacatcagtattgtacaactttagattgctttttgagatatttttcasactgaccccacctggactcgtgactcatgactcagaactggtcctatggccccacccagaggcaggctcagcactcaaggactgttttccacacccctatgattccatccccaacccatcagcagaacccattctctagtcccctgctcaccaaattgtccataaaaaccccaacctccaacccagggggagactgatttgagtgataactccagttctcctatgtgactggccttgggtcaattaaacactttctctactgcaataccttggtctcggtgaattttgtctgtgcagtagccaagaagaacccatctg

SEQ ID NO: 791299 - DNA, 602 bp, Homo sapiens
ggcattttatatacaaggtaatatggatataattcccttatgttttatagagacttactggctaatccttcatatccctttctaagttcatttttccatgatttatttaataacagtatcttagtcctagtgtgagcacatgaccatgttgggagctacttaacgcattccccataatgtcatgtcttcctataggcgattctagcaggcaattcaggagctattagagaaagagtgttaactgagacaaatgccatccatggagtttatattctggccggaagataggctttatttatttatttttttgggatggagtctcactcactctgtcgcccaggctggagtgctgtggcgcgatctcagctcactgcaacccccgcctcacaggctcaattgattctcctgcctcagcctcccaagtagcagcractataggcacaccatcacgcccagctgattttttgtatttttagtagagatggggtttcgccatgttggccaggctgtatgatatgcactgtattaaaacctttatgttattagctaatgtattcttcttcacaaacactttatgcagtactaggatccctgttctacag

SEQ ID NO: 791300 - DNA, 527 bp, Homo sapiens
ataaagcattcttgcagtacacaattcaagaggccaccaaagataattcacagtctcctttcacttctgttccttaagtttcagtccctcctagtcactgtagattttctaagagaaatcacatcaccagagctgtatctaaggaaaatgaatcagacagaaatacttaggatgaactatamtggaagtaccagatgggtaatagtgggaataaaaaaaaaagggatggatgcaagtttctacaggcaaaagcaacaggacttagcatttagcatagggcctggaacatagcaggcacttcaaaatattttctatgtggctcctgaatgacatgagtagaagaatgaccaaaatcgtttcaaggtgtagaggcaggatgacaaggagctgaaaagtgccattaacattgctaaaacaacaataaaaaatcaagattcaggtatgaaaggggaagaagacaagacatgtagttttgaacctatgagttggaaatgctcatgggccatgtaagtgagaactgtcaggtg

SEQ ID NO: 791301 - DNA, 635 bp, Homo sapiens
ctgcctttcctggtgctgttccatctgcctggattgcttctctttctttttctatttttctttcttttattttgtccttttttttattttttattttttgaggcaggatctcacctaggctgcagtgtagttgcatgatctcagctcactgcagcctcagcctcctgggccctagcaatcctcccacctcgaacacccttctccccagttgctggaacaacaggtgtgcaccgccatgcctggctaatgttgttcattttttgtagagatgctgtctcactatgttgcccaggatggtcttgaactcctgagcttaagcagtcctccctcctcagtctcccaaagtgctgggattacaggcatgagccactgtgccyggctaaattagtactattaaattggtgctatttgtgaacttttagtaaatgttgcagcctatttaatatgtgtttgtgtatgtgtgtgtaaaatgatatgagttagttagtatctctgttttttacagaggaagaaagcaatgctgagagcatgattttgttgaaggtcactcagctaatgaatcacaaaggcaggatttaaacccagatcagtctgaatccaaagcccatccatttaaccacttcattctaccataa

SEQ ID NO: 791302 - DNA, 490 bp, Homo sapiens
gtctgtgttatatatgttgaatacaacagtgaacaaaatagagaaaaatcttatgctcatggagttatatttatgtgtatctcttggtacatgagcagaactttttatagactgggtgtcaggaagtggagcctctgtcgaagcacatcctgaagtttygcagctctgccccattgcctttcagaagggcctttaccagtttgcccttccaccacatgtgtaaaataccagtttttcatgtattgcctccccaacccccattcatgctattaagaaagaaaggcaaaacttgaacagtgttccttgtgggaagacagatgcttaattaccaatggatcagaataaaattaccctagggaaacaatagggaggctagcaacagcctatctggatgtagttagggtggaaaaagagaagagtcaaacaaacaaaaaattggttttcagtactggaataatttatactctatgtggggaaaatatatttgaag

SEQ ID NO: 791303 - DNA, 475 bp, Homo sapiens
attaacatccttgcctactaattgtcatccttttatttttggctccatttctactgaataattttttgtctcttggttatgggttatattttcctgtgtctttgcatgactgataatttttgattggatactagaaattataaattttacattgttggatgctagattttttaaaattattttttgggcttcttgctgtgattaagttgcattacttagaattagtttgatwctttccagaattaattttaagcttttctaagacaggtccagtacatcctatagtttggggctaatttggcaccactgccaaggccttctgaggacactgcacaatcccccacgtattaagagatgttctccctctgtctggcaggagcacaaaatattaacagccccatgtgtgctccagtgattgtctcacctcatctatttctccagcatttttttcctgccctcagtctccttacacaca

SEQ ID NO: 791304 - DNA, 620 bp, Homo sapiens
agtgtcataggatattccactttaaaattaatgctatattgtacagtcagcaatccatagcatgatagccacttttgtgtaagtcggaaagttatactgcaagaaaagggcaacagctccacaagtggtctggaatggaaatcaggaatttctcttgacacattaaactaagcagtctccttcactgaccccaaatttatcaaggactcgttttatggtgagtcaaggcaaagaaasgaaacagatgaggtagatcaaggacacgaattggggcctggagaatctgtaactcatgccaacctcaacccttggtgacaaattgtctttgaactgtcaagccttctctcacaatgggttaatcgtcatctaaaatgaaaatccctctctttgactttgaaaatatttgttagaggaaaaaaagtggaataaacacacacacacacacacacacaaatagcaaagaaaattttttcattccaaacaagaagctacttttggtagaaaatgtgtcatttttaggagcagtaaaacattaaagatgaatatccttactatttgaatcctaaagttacatttaggccttttctattttattgggcacagtagaaagttcaggtcaa

SEQ ID NO: 791305 - DNA, 539 bp, Homo sapiens
gaaagcgtgtgatgaattccatttttcagaatatgattctctgaaaggtagagaaatacctgtcattgtcaaacgtataaaaatgaaaggtaaatatataaaacatcttttttaatattgagaacgagaaagaaaggagtaaaaaaaaagatcaaaagagaaagttcaattctccaaaggtaaggtagtgttggyattggctttggccttgaaaggtgtgcacgcttctggtgggctaagggctgagtgtcaatgggttgtgtgtggaggacaggagaaagagcttgtgtcccttggcagagtgagttcaaatcaaagacctctccactaattaaggatcttcaatgtgtgaccagctcagagagtaagcaagagaagaactacaagtatcaacctttgccttgacaagagtagaaaaatttcctgactataaaacccacacttagagctgtagatggaattcagctatttgtgtgacacaaaaaatactaagctgaaaatttaatttataatcatgctaggttggaagcatctcaaag

SEQ ID NO: 791306 - DNA, 539 bp, Homo sapiens
gaaagcgtgtgatgaattccatttttcagaatatgattctctgaaaggtagagaaatacctgtcattgtcaaacgtataaaaatgaaaggtaaatatataaaacatcttttttaatattgagaacgagaaagaaaggagtaaaaaaaaagatcaaaagagaaagttcaattctccaaaggtaaggtagtgttggcattgsctttggccttgaaaggtgtgcacgcttctggtgggctaagggctgagtgtcaatgggttgtgtgtggaggacaggagaaagagcttgtgtcccttggcagagtgagttcaaatcaaagacctctccactaattaaggatcttcaatgtgtgaccagctcagagagtaagcaagagaagaactacaagtatcaacctttgccttgacaagagtagaaaaatttcctgactataaaacccacacttagagctgtagatggaattcagctatttgtgtgacacaaaaaatactaagctgaaaatttaatttataatcatgctaggttggaagcatctcaaag

SEQ ID NO: 791307 - DNA, 630 bp, Homo sapiens
ggaggcttctgtagcttttgtaacagagtatcctctcaacaattaccttcagctaatggcatgctaaactggacaggaaatcaagtcttggaatgaatggatccattgggccaagtgacagagggtctagcacggtttttacatggcctcaaaggaggaatgttctcattatgcaattatagctccactaaattaaagaatattgatatcttctctgattttatattattgctttttcaattcagtattagtaaatggcataccttattacttcagaatgtaaatgtctgctgtttctttttatcactctaacacctctactttgtttctcggatcacatggtgtttgtgagctaacataagacttaaggtgaccactcacaaaatactgtcattgttatataaaaagtactgtaaaaatctgaaattattttytgaacatagatctagaagcatcaatttaggtgaatcttacaaagggactcaagaaaaatattatcaattaatgaaggttgaggccaaataatttatatctaagacgttttatttttcagtgaatcaaagtttaatcacatttagccctcaaaaggatatatatatatatatatatataaaatattaaaaaataatt

SEQ ID NO: 791308 - DNA, 538 bp, Homo sapiens
attaccaagccctgtgattaaggtcaatgggaaactacagcagcccaattcaggctggactacaaatggtccagacccctcaggaatgaaggtttgtgtccactaggaaaaaaacacccacgacctgctgaggtgcttgctgaaggcaaagggaatacagaatgggtagtagaagaagatagtcatcaataccagctacgaycacgtgaccagttgtagaaatgaggactgtaactgtcacatgtatttcctccttcttttgttaaaaacatgtttgtgcgtgtatacacttgttctaacaaaatatcctcattttatttccttttcctttatcatgtgacttaagatttattgacttcatatcagcatttaagtattgttaactttatgtaatagtgtttgggttgaggattggtacatttctggttataggaaggatacttgcattatgttaggcataattatgacctcattattgtctttatttgaagattatgtatgatctcaggagatgtgtatgggttcaagttgacaagtg

SEQ ID NO: 791309 - DNA, 628 bp, Homo sapiens
atcaatgcactgctaattgcttaggatcctgagagcttcaaatgctgggctctaaaagcaccagttctactcagcaggcttcctcttttcttttctctccatccccctcccactcactcttgacaatatcccatggttggtattcctagtgaaaagttattttgaccctcaatacaaaataaggaaggtagttggcttacggaaataccctagtgctgtggttaagaaaatgggccttctcaacagaccactagtttgaagccttgttccatcatttactagttgtgtgactttgggcaagttagttaaccaacctcyctgggcttctatctctgcatttgttagcagggataataatagcacttaccccataggtttgttatagaattaaatgaaataatctttaggaagcacttagcacagtgcctggtacaagttaagtacccaagaaagtagccattctcatcattgtagactttgactctatttaaagtggaaactctgagggcttctagcattgttaactttataaggctgaacatcgatgtcagtgttggattatattgacttttattcaatcaaaacagtactgatcattccttttagacagatagaaatgaaaaagctt

SEQ ID NO: 791310 - DNA, 605 bp, Homo sapiens
tcagcaccaaaggttagagagcaggcatcttgcacaagaaagacaggcttcatcctctccactttcccctcctgcagaatgaaactgggttcaacacaaattctcaagttaatgggctgtaaatatctggcagctagggcagttgcacagggctgagagccacaagtcagccctggcaccccaggaaatgagttcaccatcttcagctcctccaaatctgcatttgctggaggcacaggctgggagcaaacacctggaggtggaagagggggccagctagacggctccccctagtgggagactggatcaatgccccagaaccacacctcttaaatgggatatygactgcatcttgaagaagggtccccaaagactttcatgtgactccacaaacatcttgaaagaaaatactcacctcacaatatctctgggactttggctttttcctcagtaaattcgggagtggaagagtgaagccttctttatctttcaaccagaaagttgtttgctctcctttgccctgtgggaggcaaaggaaggccctggggaatcgctggcagggttggggtggggctggcgggctgcctgtaatgcatggcctctgg

SEQ ID NO: 791311 - DNA, 482 bp, Homo sapiens
atatgtgctatttttcaagtatatggagattctgtagtgatgactaagaaacaccattcatttaaaagtgttactgatctcatagtacctatttgtcagtccacatactctgcaaatggaaaactactaacatatgcagagtcagtgaatttatttttaaaatagggcttggaactatttggatggatggattctcccagcaataagatttcttttgaattgaaaaagaagggggacaccagtgtttttcaraaggggagaggcctgggtggagctgtcttctgagaaggccattctagcagtagtgtgagccgtggactgagcaatgcttctcagccttgcaggctcattggaatcccatggatcatactggtacctctgtctgtggccacacattctgatgtaattggtctgtggtgggcgtggggacatcaaatctccctaaatgattttaatgtccagcaaagttagagaaccactgg

SEQ ID NO: 791312 - DNA, 580 bp, Homo sapiens
gataatctcttttttatttttatttttttacaattaacaattttattttagatatggtgtctcactatgttgcccaggctggttctgaactgctgggctcaagtgatcttcctacctcagcctcccaaagtgctgggattacaggcgtgagccactgtgcctggtgtatagtctcctttttaatgcccaatacactcaaacatttttaaccttacaagattagcgctgagaggatttgcaaccayatcatgtaactctctcactgtttaagtggaagaaactaagggcctgagagaaggtgagactcctgggtcaaaccacgacaggagtaggaagctctgtttaccattctaaccattagaatctgttaacacttccaagtaagttcaaagaaacaagggggaaaaaagtcaccctccttttgtcacacgtcctgtgtgactcaaactacagctctggtttagtcactccacagaatcccctgtaagcagtgggcgtgactggcatttcctcttccttttaacatcactcctggttacggtagggaaaagcacaatagtggtaaagaaaagaggaaaga

SEQ ID NO: 791313 - DNA, 489 bp, Homo sapiens
tacattgtggggaggctgcagcaaagacttcagtgctataactgctagtttgtacacttcaggtttggttaaagaatgtaaaaactcagggactagtttaggcattcctgtttcttaaggcatgcccaaggaaagaaaaagttcacgtctcatttacagtgactttaggccagacttagagtgagagcatgcgtgagaaagcacacatacacaagcatgtgcaactggcggactctggttttcattcttatagttatcatcttaacgtgcagctcagaggatgcaaaaattattcttctggctgcagcaaacctgggactcarcactggagaatttgttttcatcattttgcagcagttggaggtgggtaccgttgaccactcaatggctctggtagtaagaggtagcaagtatggagcactcgttatgacccacatgtattagctcactgagcactcactacaaccctgtgaggtaggcactctcgcg

SEQ ID NO: 791314 - DNA, 637 bp, Homo sapiens
aaaggggagaggtcacaaggggggatccttctttctgctctcagtttaatcccctctgccagatcaattaattcctctttcctgtggttttagaaattcttcatgctggaatgaggggaggttgtgaagagcagtgaggccctttaagagcctgagtcatcccactttggttctgggacccgtgggcccctttcagggactcatgaccaaagggccctcctcaccccttccaaactggcttctgttcccttatgggctacaggactagccttggcagaactggagtatttgtctctgcttcctgtgttcatttctgccacatggtgrcaaccactccatcggccagtgccgaagggcttttgcaccattccagaaggaaagcctcttctaggaggtcgagttagggagcagaatcccccaaccccactggctttggctcagtgaacgcaatgcacactgaaagaagtggccctggttgtcgcaggagctctggcctttcccctgcaaacctcaggctcaatacccacattcaggatgcccacggatgtgtatgcagaaaggcagtgtggcatgctggaaagaacatggcacttggggcctgataggcctgggtttgtgtaccagctgtgcctcttcg

SEQ ID NO: 791315 - DNA, 654 bp, Homo sapiens
aggattcttgctgaaattgggtgatccaggcccatcgatgatgtccactgaagcccaaagtcaaagcttacttgaaaagaaggtttagaaacctgactaatgtttggtcaacaagaacatctttgaaatcaggaaggaacacatatatatgtattgctacctcttttctgttgccatgatagggccagactaatyacttgcagactgcagcttccagggaaaatcatgatacaatttttattcagaggaaatgcattatgtggattttaagggcagttttcgggggaaaagagggagataaaatgttataggaaagccacatccagttttctggaatgatatataaaaaaaaagaagcaattaaaccagttatgtcttcaatgtattgataatccgagatgcagtggatagttacataagtattttcagcaccattaagtgctccatttattctaggaaaatgaactatggtatctactgcatttacaacctttgcaacaactctactcatgcacttcattgccatactcacagaaaatgcaaaaaagatgagccaaaaagtcatattttatatctatgaccctgcccccttggctacagatactggattgtaagcacttgattgaatggtagccaatgcatagattgtttgtt

SEQ ID NO: 791316 - DNA, 654 bp, Homo sapiens
aggattcttgctgaaattgggtgatccaggcccatcgatgatgtccactgaagcccaaagtcaaagcttacttgaaaagaaggtttagaaacctgactaatgtttggtcaacaagaacatctttgaaatcaggaaggaacacatatatatgtattgctacctcttttctgttgccatgatagggccagactaattacttgcagactgcagcttccagggaaaatcatgatacaatttttattcagaggaaatgcattatgtggattttaagggcagttttcgggggaaaagagggagataaaatgttataggaaagccacatccagttttytggaatgatatataaaaaaaaagaagcaattaaaccagttatgtcttcaatgtattgataatccgagatgcagtggatagttacataagtattttcagcaccattaagtgctccatttattctaggaaaatgaactatggtatctactgcatttacaacctttgcaacaactctactcatgcacttcattgccatactcacagaaaatgcaaaaaagatgagccaaaaagtcatattttatatctatgaccctgcccccttggctacagatactggattgtaagcacttgattgaatggtagccaatgcatagattgtttgtt

SEQ ID NO: 791317 - DNA, 654 bp, Homo sapiens
aggattcttgctgaaattgggtgatccaggcccatcgatgatgtccactgaagcccaaagtcaaagcttacttgaaaagaaggtttagaaacctgactaatgtttggtcaacaagaacatctttgaaatcaggaaggaacacatatatatgtattgctacctcttttctgttgccatgatagggccagactaattacttgcagactgcagcttccagggaaaatcatgatacaatttttattcagaggaaatgcattatgtggattttaagggcagttttcgggggaaaagagggagataaaatgttataggaaagccacatccagttttctggaatgatatataaaaaaaaagaagcaattaaaccagttatgtcttcaatgtattgataatccgagatgcagtggatagttayataagtattttcagcaccattaagtgctccatttattctaggaaaatgaactatggtatctactgcatttacaacctttgcaacaactctactcatgcacttcattgccatactcacagaaaatgcaaaaaagatgagccaaaaagtcatattttatatctatgaccctgcccccttggctacagatactggattgtaagcacttgattgaatggtagccaatgcatagattgtttgtt

SEQ ID NO: 791318 - DNA, 553 bp, Homo sapiens
gagtttctcataaacagcatatagttaggcctcattgttgttgtttttaatctattaacccagtttttatcttctaaatgggaaatttaatccatttacattcaaggttactattgataagtaagacttactcctgtcacttcattgttttctggttgttttatataaatttttgtttcttacttcccatcttatttttgcaatttgggtggttttaagtagccataaggtttgattcctttctcctttgagtatcaactgtaccagtgagttttatagtttttgcacattttcataatggtgatcatcttttcacttccagatgtaagattaccttgaacatttcttctaaggctggtctagcggtgataaattcycttagtctttgtctgtgaaatattttatttctctttcatttctgaagtataatctttctgagtataataattgcattgctaggtttttttcagtactttgaatatatcatcttattctctcctgccctataaagtttctgctgcaaaattcagtgtaagtctaatgatgattcttt

SEQ ID NO: 791319 - DNA, 693 bp, Homo sapiens
aaagtatctaaattggccaaaataattttggaaattttttttaaaaactcatactacttgtatctacaacttacaataaggctatgataattaaattggtgtggaattggcatagagacaaaaatacgaatggaacagaatagagtccagaagtagatccaaatatatattgtcaacttatttttgatgagacattaaggcagtttgtggggtggggggtggttcaacaaattatgctgaaacaaccaccagacatccatgcaggaaaaaatgaagctcaacccctacctcatagcatacacaaaaattaatttgaaacggatcacagactttagtgtaaaagctaaaactataaagctgctaagagaaatcatttgaatattgcttcacaaatttgagttagagaaagttgacttaaagagcacaaaaaaagcataaaccataaaagacaaaactgataactygcatttcatcaaaattaaaagcttccgctcttttgaaaaacactgttaagcaacccactgactggaagaaaatgcatgcaaaatatatttctgacaaaggacttgcatcctttatcagaatacataagtaactcttgcaactcaatcagaagaaaacaccctcagaaattaaaatgaagacataacaactaataccacagaaagagaaagaatcattagaaactattag

SEQ ID NO: 791320 - DNA, 628 bp, Homo sapiens
cttcagtggttgaagcagccttcgtgtattccttctctgggtctgtctgcacaacgcctccctcatgccccaggctcctggtagggttgttggtcacagctctgctcctgccacaggtgggcagatgatacagactgatcagtttgaatatcctgtctccctggtcacaaagattggttcaggcatgggcatgtgacaagtcagaccctttcctgggagtggtgttatgagagagacagatgatcattttgctgtcactactcaygtgggatatgatgagtctgtgactgcagtggtcatctttcccccacaggaagagcatctccctgcagaagtaaaccacgcacagagccctaatgacatcattgcttcagcccctggatccagccaggcctgaagcaggataaccctggacttcccagtgaggtgagccagtaagtgtcctgtttgtttgagctgatttgatttgggattctgttccttgaatctgaaggagacttgagtggcacaacttccttgactccccacagtcctcttctgctcgagttagtaactcatgcatctacttccatgcgacactgttgctccttactgccgccttcctcagcaggactccctgcccctcttc

SEQ ID NO: 791321 - DNA, 597 bp, Homo sapiens
aatgagcagtttccaggaggtagctgccaggctacaccaggccctaggcttcctccaggaattgcattaggggattaagaarcagagattgtttcagactagctattggagccaacgatccttatatatatgtacaatgggtaaaattttcctctcatctgtgctcccctgctaaaagactcaattgaataagagaaacagcagcatgtgttatttgaaaactgtttagtgcaattactgctgcagattttactgaatttgaaaatgatagatggcaaatcttaatttcccaagctctccatcccggcaagcagtttgttaaagactagcagtgcggctaatcgctggtgcataatgcccacgaatacacgtttttcctttttatataacacattatgctaatcaccctgtattccatttttcaataaaaggtcagcagagcagtgtttgttcagaatgtgcaatttaaacttcatgtctgtcattagagataatctaggtttgctgtatcaagtggggttgtcatagaaaccagacccgcaagctctgtttacggcctttggagaataaacactttgcatttatttctctggaaag

SEQ ID NO: 791322 - DNA, 651 bp, Homo sapiens
taaagaaaataagatttaggggcacagtgcaacacgtgccctgaatgatctcatggtagaaatctaattttgcttctatttatttggggttatagataggattatatttctcaggcagagaaagtcattaatcaagaaaggggcctcttaatccttttccctattttaatgagacactttaaaatgccttgcgttggtgaatggcaagtgtcagctgggtgtgattagcaggcttttgtggcaggtttgccgtggtactgtgtgctcaggtattcaccggcctaatcctgcctgcctatcacgggggcagaaatggacaaagatggctttatggcctcactcaagttgcaggctggtgagtgggcatttgagagctttggtgccacagtctggacaatggcatatgggatacrttcttagaaatcagccccccagtattagcgtagcccctaagcagaatctccaaagtaaataatacataccagcaacagagtttcaccgtcagtgtatgggtgggtccctccttcattgaaatcagaacgtctaacctggtagaaaggtgccagagaactgggagtccccctgttccctctgtcccctctcttccctccctccttctttcctttcatggccagcagctgtgctcatcac

SEQ ID NO: 791323 - DNA, 618 bp, Homo sapiens
catggtggcatgtgcctatagtcctagctactctggaggctgaggaaggaggattgctggagcccaggagttcaaggctgcaatgagctacgctggtgccactgtactgcagcctgggcaacagagtgagaccttgtctccaaaacaaaaaaaaagaaaaaaggaaaaaaaaagaataagtgcttattttgttcatgcccctgagaattggctggaggttggctgatctaggctgggcacagatggggtggcttggctggggcaggtcttctccatgtgcctttcgttctcctagactggcaggccagccagagcatgtcctccgcatgtgtagaagttcaccagcgtgggcagagtcaagccaggctgcttaaggcctgggcctggactgggcatgccgtggcttctgcattattctattggccaaagtaagttacacgactcagctgaaaaatcaaagggcmggtaaatatgctcctccttaatgggaaaaatcccaaagttacatgacaaagtgtgttgatgtaggaaaagggtaaagaattggggccagtaatgcaactgatcacctatgttaaccaattagagcaataaagcatcgtattagcactcttttag

SEQ ID NO: 791324 - DNA, 539 bp, Homo sapiens
ggatgtagtggtgaaggtgctgctgccgggctgctgtcacatggagcctgaggcagcacggaggcaggcagagtcaaacaatgaggtcatctgaactcgaagtccaaccacccttgaagcccctggctttttttttttaaagaaactttttgttttataatagttttagatttacaagaaattgtgaaaatattagagttcccagactccatacccactttctcctaatatatatatrtatatatatatatatattttttttttttttttttttttttgagacagagtcttgctctgtcactcagaatggagtacagtggtgtgatctcagctcactgcaacctccacctcccgggctcaagcgatcctcccacctcagcttcctgagtagctgggactaatggtgtgtgctaccatgcctggctaaattttgtatattttgtagagaccgggtttcgccacgttgcccaggctggtctcgaactcctgagctcaagcagcctgcctgcctcagcctcccaaagtgctgggattatatg

SEQ ID NO: 791325 - DNA, 640 bp, Homo sapiens
aaaattttattataagtatgtctcaaatattacatggggatatacttacactaaaaaattatttgttgtttatctggaattcaaagttaactgggtgtcccgtatttttatttactaaacctggcaatgttaccccaaatggcctctcatttttaggtttctcagggcatacactycagaaaaggtgactctgccacttcaatttcagtgataaaggaacctgagccatgtagtgtcctgggaagaacaggactttgtggtcagagtctcatgaggtcaaatctctgctccatggctctgggaaacttgtttgatcattctgaggtcagtctccatcctctgttgtacaatgggttgataattcacagacgccatcacaacactttgcagggtctgacacctgggactcagtcaatggtggccactgctattgatgttactcttatttggacaaatgaacagaatgtcctgagagaggagatcgaaagccatgacaaggcagccccctcactcccacccagtccccttctctgagccggggagactgctaatgccagaagcagaggctaggggtgtggagggggtttggggtgctctgtgaggatctctctggggcctgggctttttgctcaagctcagt

SEQ ID NO: 791326 - DNA, 590 bp, Homo sapiens
cttcatgaatgatttagcatcatccttttggtactattctcgtgacagagttctcatgagatctggttgtttaaaagtgtgtggcaccttccccctctggctctcttccttctgttccaactttgtaagatgttcctgcttcccttatgccttccgctatgattgtaagttttctgaggcctccccagaagtagacaccactatacttcctgtagaactatgagccaactaaacatttttcttcatgaattgtccaatccccaggcatttccttatagcaatgtgagaacggactaatacaaatggcaaggagatttttctttgatattcactgtgagaaccaggtagggctcytggaggtaaaactcactaaaatgtggaagtccccctaagtctaggtgcccttgcagtttttgaccctcagacttattcctcctgagcctctggcaggttgtcagttacagtttaggctttcctacctaaactgttgaggtttagataccggtttaggttttcttaccatactggttcctgtggagatttctgccctggtaagctgtgattctctgtatctgcctgtctgtccaatt

SEQ ID NO: 791327 - DNA, 612 bp, Homo sapiens
aatgaaaacacttaaaaaatctgtattctcatggatattggccatttaatttgtttatcattgattcttcggccaaagataattctaactgggtgagaatgaggactggggagtgagacagcagaggtttttgggtctagcactccccaggacaggactccattgattattagtcaagaggacgtgattggagaccaaatttctttttctttgctcacatgtcattcactcctttgaaccatgtttcctarcctggagcagatggtttcctcctggcgacagatcatctgcctctgctttctgtgttagcttatgttttcaggtttatgtggaacaattctagatagaggaaattacttaggggaaaaaagatttaatatgatgaacatgttttatggatcaagtcctatgttaggtgttttacatagactctcatttatttctgtcaactggttctgcaaaaggaaccgattttcattcccacttacgattgagcaaaccgaggtgcagagaattcaagaaaagtacttaggcccctgggaagagtctggatttgaatctgagtctgtctagttgcaaagtcctgtgctttccaatgtaccatgctgcctt

SEQ ID NO: 791328 - DNA, 598 bp, Homo sapiens
ggggttcttagacagttggcccaaacacctcgctgacaatgctcacggagcctgtgtgcctgagccctgcccagcgtttgcctatagtgcacatgggccattgtggtgaactttacttgcttctagaatttcacgtggacagacatgtgtagcttgcattaaaagaaaacaaaacaaaacacgtagaggtacagcttcttaatcaatgaatgacacatttagaaaacatttaaataaacatacagtgtgatggcctgggagaagctttgttagtaagtgttgtgtaaataccttgagaacacaagacagtgtgtgtgctggcggtcttcagcgggttacacttcggatggtaacacatcggttgttcatttaacaatagttttaaaaatagtcatgctgttcttttcctctttcttcacyttcttttcaaaaatggcaaacattgtttttcaggtttctatatgaacaaaatctgctgaggggcttgcagcaggccagtgatctttggtgtctttccaaagggcctttagggatgattccaaagacagtttctagtcacatagtggacacaccattaatgaatgttggatgctgagtg

SEQ ID NO: 791329 - DNA, 598 bp, Homo sapiens
ggggttcttagacagttggcccaaacacctcgctgacaatgctcacggagcctgtgtgcctgagccctgcccagcgtttgcctatagtgcacatgggccattgtggtgaactttacttgcttctagaatttcacgtggacagacatgtgtagcttgcattaaaagaaaacaaaacaaaacacgtagaggtacagcttcttaatcaatgaatgacacatttagaaaacatttaaataaacatacagtgtgatggcctgggagaagctttgttagtaagtgttgtgtaaataccttgagaacacaagacagtgtgtgtgctggcggtcttcagcgggttacacttcggatggtaacacatcggttgttcatttaacaatagttttaaaaatagtcatgctgttcttttcctctttcttcaccttcttttcaaaaatggcaaacattgtttttcaggtttctrtatgaacaaaatctgctgaggggcttgcagcaggccagtgatctttggtgtctttccaaagggcctttagggatgattccaaagacagtttctagtcacatagtggacacaccattaatgaatgttggatgctgagtg

SEQ ID NO: 791330 - DNA, 588 bp, Homo sapiens
cctggtggctggaggtgaaattcttctcattgtttaaactagttcacagtaactgtaagatggggaaccctgctctgtgctccttagtcctggatttcttagggtgcaaaaactgcctggtccctcactccattccttgtgggtgaggacccatagttggtcgcccaaagcccatggtcctcctgggtgtcctgagagcttctcagagcacctgggccgcgaaccttctctcgcacagacttcccgctgcagggctggccagatgcctcctgagcatcgcctcggctgtgactcacagcccagggaggccatggtcagagtgagctagactccacagcccccagcrccgcagacttctgccttggtcattacatcatgggcaagatcttgcaggctggtggagagacagagtgcctggggagggcctgaccaaccccttatgtctcacgcagtaggcctggaccttcccaggggaggctgttaggacatgaggctcacagactgcactggttttcatttccactgactcactataaaattgaatgttgagttcttccctattctgggccaagtttttcagcagggcag

SEQ ID NO: 791331 - DNA, 600 bp, Homo sapiens
cataaaaccaagtatatgtatgacgatgattcatattttgaaaacacaattgttcttatagaagaacacgaaagggaaagttcaataatgctaagtagttttctcttaggggctgggaatagggatgacttttaaaaatctcatatctatgttttaaaaaacgatgaggtactacttttttattgaaaaacattaaacagaaaaaaaaaacccacaaaaaggaaatacagcaaactacaatcagaggttgagttgctgagacagggttgtgtttcattctttcaatatttttgaccgggcacagtggctcacgcctataatcccagccctttgggaggcygaggtgggcagatcatgaggtcaggagtttgagaccagcttggccaatatggtgaaaccctgtctctactaaaaaatgcaaaaaattagctgggcgtggtggcatgtgcctgtagtcccagctactggggaggctgaggcaggagaatcacttgaacccgccaggcagaggatgcagtgagccgaggtcacgccactgcactccagccaggcgacagagcgagaatatgtctaaaaaaaaaaaaagatgaggtactactt

SEQ ID NO: 791332 - DNA, 583 bp, Homo sapiens
tcctgtgtaactagataaccctgggacatagagcagactgggtctgctggcatatttttctaagtagatttatgtagcttaagtgtgtaacggagatttttcttccctttttgtagggttactattgaacatgctagggctcggtcacgaggtggaagaggtagaggacgatactctgaccgttttagtagtcgcagacctcgaaatgatagacggtatgtgaagggtggatggctgcattgaacaattattgtaggggtagcatttaagattcaggagtcattagcagtgatgattttgggtcctgccgtataatctgttcttctattcccacgttagccarttgttcttgatgaatctatatgagtcatagaacacaaatctattgacggaagtcattagaatggcttgtgatatctgatggcttgaacttgcccacagttgaacacaagtgctgtcattgcatttcttccattgtgaatacgaattttcttcctcagaaatgctccacctgtaagaacagaaaatcgtcttatagttgagaatttatcctcaagagtcagctggcaggtttgttgaaata

SEQ ID NO: 791333 - DNA, 614 bp, Homo sapiens
agctcagcatagactaatactaccttaatgttaaaatctgaatttcttttagcattttgcttaaaagcaatatgctatttgcttattccgtgccctgacatagataatttttgaattctgatagaatacaagtgtggtaaatgccatgtttgtactttatctaacatcttctctttcagtagtcttgttttttttatatcatgtgattgtttgtgtgtcccctttcctcttctttgcttaacacaattatcttgtgttaaggatctcaaagatttcatgagacaagctggggaagtaacgtttgcggatgcacaccgacytaaattaaatgaagggtatgtactggaaactgtgaaagtctttaaaaatatccggaaaattttactgtgaacttagttttgaggacttaaaatttgaatatgttagaatgcagagattctccagagacaattttgctgcttccctcctcccccccacacctttggcagtgtctggagacaagtttggttgtcacaactggttgagagaggatgctgttggcatgtagtcagtaggggctaggcatcctgctaagcatcccacggtgcatagggaaccccctcaacaatgaattg

SEQ ID NO: 791334 - DNA, 625 bp, Homo sapiens
ttagtacagacggggttttaacctgttagccagtctggtctcgaactcctgacctcaagtgatacacccacctcaacctctcaaagtgcttggtttacaggcgtgagccactctgccagtcttctttttttttcttgggatagagtcttgcttggtcacccaggctggagtgcagtggtggtgtcttgactcactggaacctccacttcccaggctcaagtgatcctaatgtctyagcctcccaggagctggaatatcccaccaccatgtctggctgatttttgtatttttattagagatgaggtttgaccatgttggccaagctggtcttgaactcctgactccaaataatctatctgcctgccttggcctcccaaagtgttgggattacaggtgtgagccactgtgcccagccaagaattaagctacttttaatcttagaggtgttagggagtacgataaattccttcttttgaaaaaaatggcagggagataacaattatgtctcaaaaagggactctcaaaaccaggcttcagataccatgaggagtgtggatgtaatcctaaggaaaggtttaggacctgcctttgtagggcatggtttaacctttgttttctatgttta

SEQ ID NO: 791335 - DNA, 639 bp, Homo sapiens
aatcagtggttaaatcataaattataaatacaaagtctgaaaaataacagtgtagaaagtaaattgctatgattcctatgcctgatgtaacaggataattataaagtaattataagaactgattaaataaaaaatataatataaaataaatataaaatatttaaaataaatataaaatataataaatgattaaataaaaarcataaatgattttgttgcttaaactaatatatcaatagtccaaatgagcatgattcctttaaaacagtcatcttagcagttctatatctattctactaattttgctactaaagtatttttcagaaaaactcttttggaaatgtactcagtttaacttaagagccatgtaaaaaactgcatctcaaagttaaaacatgactctctacttctgcccaaattcactgaatagtgttacgagtcaatgagaagataaaaaagataaatacttctgccccaaaatgattttaaatagcctgatttaaaacattatgtacaacagataaactggcactagatggcttttagtgatttctaaatatcaaattcacattcaaaagaagaattcataagttctgaagacaagtctaaaacgatagtttcaaaaacaacagcactgtt

SEQ ID NO: 791336 - DNA, 554 bp, Homo sapiens
aggtgggaggatccattgagcccaggagatcaaggctacagtaagccatgattacaccactgcattccatgctgggaaacagcaggaccctgtctaaaagaaaaaaaatgtgagataaaagtaaggaggctgaggcaggtagatcacttgaggtcaggagttcaagaccagcctggccaacatggtgaaacctgtatctactgaaaaaaaaaaaaaataggcatggtggtgcacacttgtaatcccagctacttgggaggctgaggcaggagaattgcttgaatctgggagccagaggttgcagtgagccgagatggtgctaytgcactccagcctggaccacagagtgagactctgtgtccaaaaaacaaagagaaatggaagttaaatattagcaaaccatctatcaaggtaaaaggttaatatccaaaatatggtaactcgtataactcaatagcaaaataacaaatttaacctaattttaaaacaagcaaaagactaatagacatttctccaaagaagacatacaaatggcctccaggcatatggcaaga

SEQ ID NO: 791337 - DNA, 562 bp, Homo sapiens
atcttagcatgtctattatcaaaaataaatttaaggtcaggcatggtgctcacgcctgtaattccaacactttgggaggctgagatgggcagattggttgagtccaggagttcaagaccagcctggccaacatgctgaaaccctgtctctactaaaaaatacaaaaaaagttagccaggcatggtggcgcacacctgtagtcccagctgctcaggaggctgaggtgagagaatcgcctgagcctgggaasttgaggctgcagtgagcctagatggtgccctgcactccagccttggcaacgagagtgagaccgtctctaaataaatagacatttgtgaggatgtagaaaaattggagcttttatacaactgtttgtgggaatgtaaaatggtgcagccactatggaaagcagtatggagattcatcaaaaatagcactgccgtatgatccaataatggaatatttctggatatgtatacaaaaagagtgtaatcaggatctcaaagatatctgcacacccatgttcactgcaccattattcacattagccaatataaggaaa

SEQ ID NO: 791338 - DNA, 582 bp, Homo sapiens
tagagcatgagtcatattggatccttatgaagccagtaacataacacagtgctaatggagtaacacagcagatgtgaataatacccagggaccataccacattgtatcaatgtttcccaacctttgtcatgttgtagcacacatagaaaatattgtacagcatactggtataaaccagaaagaattagagaaaaaaattacttttttwaaattatataattgatgaaaaaatgtagaagatttgaggaaaaatactgaatttgtatggaactttcaaataaaatcttgccagatgttttaattgatttaattgacatttgattaaaatgttttaatactgtcaccaatgagaaacaccccacaaacaggtaataatttttaggtcttttttaaaaataaccattcgttaatttatgcagttgaaactaagaaatttaacgcttccttctttgggaaataatgttgtgagttaagttcaaattcaaattgatgtttattacaattattttaaaatcatgatgctctaatttgtaatctcccttacataatcctactgctaggtgagacaccactgaagagtaa

SEQ ID NO: 791339 - DNA, 625 bp, Homo sapiens
ggagcatttaatacattttggaaatatttctactgaagatggctaaaataatactatatatttaaaagactagcctttagctaaaaaatacacacttaaggccgggcgtggtggctcagcctataatcccagcactttgggaggccgaggcaggcggatcacctgaggtcaggagttggaggccagcctggccaacatggcaaaacctcatctctactaaaagtacaaaaattagtcgggcgtggtggcgggcaactgtaatcccagctactcaggaggatgaggcaggagaagcttgaacccagcagggggaggttgcagtgagccgagatcgcaccactgcaaaaaaaaaaaaaaaatcacttaagtaaattctcygagaaacaatgttgataaatagactaagaaataccataacttatatgtattaaatatttactgtgtgcaaagcactgttttgagcatttgacaaacaagtattttgtcatttaattctcacagcaaccctggagtagatatcatttcatttcacatataaggaaataggcatagaaaaattaacaattgtgtctaagttgtaaaaccagtaagagtttgggtagaatttaaacccagaagatagaac

SEQ ID NO: 791340 - DNA, 583 bp, Homo sapiens
gtgtcaagctctcaccacttagctttctaacaagtaattttctctgcctgaggtgctaatcttctgctcctactcttctccaacacttccagtgtaatttgattaattattcaactttcaacttcactctttatgcatagcctttttgggctctcaaagtctaggagaggtgctctgccttcatgttatccagaacatccccattcaaaacacttagcacactaattcataattttcctgttctctgaagtcagaaactatgtctgtcttatttttgtctatatacctaactttgaatatagtggcttacatggtaatggtaatcaataaacatttgttgaatgaattgatgagtttattcagaggattaatgagggatgattrcatgaagtacctggtaacactgtccttgttaagaatctaaccatgtctatagatacaaaggtggaaaagggaaatgacacagtaaaagctattttgacctctccactttgatctcaaaatatgattctttttttggtaaatacacagtttttaatcataattatatgaatgtggaaatattctaagtgaaaaaaaacag

SEQ ID NO: 791341 - DNA, 393 bp, Homo sapiens
agttaggtttagctgagggatatagtttaggaaaatattctgtcatccttaagatcactgcctagtactatacgtagtaggacttcatgggcccttccctaagcatttttttttggtgaagctatgtcatatatgtattcttataaaagggaagctataggcccttygaaacgatccatggtcatcattaactatattcatttataccattctgtacgtgaagaacataaagtcagttactttctcatgtaccaatttccttatccaaaaagtaaaaagactagacaggacagttttcatagaatgagtgtataatttgtatttctaaatcagaggactttgtgtcttcattgaaaatttaggagaccataattaatcaaagaagcagtagta

SEQ ID NO: 791342 - DNA, 585 bp, Homo sapiens
attatttaaataaagcttgcttttgggaagttacttaatgctctctcttctgttttaggtttcttttttgtttgtttgtttgtagatgtagtctcactctgtctcccaggctggagtgcagtagggtgatctcagctcactgcagcctccacctcctgggttcaagcaattctcctgcctcagccccctgagtagttgggattataggtgcgwgctgccacaccaggctaatttctgcagtttttagtagagacagggtttccccatgttggccaggatggtcttatgtttttgtattttttttattatactttaagttctaaggtacatgtgcacaacctgcaggtttgttacatatgtatagcacatatataccatggaatactatgcagccataaaaaaggatgagttcatgtcctttgtagggacatggaggaagcaggatggtcttaatctcctgatcttgtgatccacctgcctcagcctcccaaagtgctgggattacaggcatgaagcactgtgcccggccttctgttttacttctgaaaaaaaaagggaataataattttttacctgataactgta

SEQ ID NO: 791343 - DNA, 585 bp, Homo sapiens
attatttaaataaagcttgcttttgggaagttacttaatgctctctcttctgttttaggtttcttttttgtttgtttgtttgtagatgtagtctcactctgtctcccaggctggagtgcagtagggtgatctcagctcactgcagcctccacctcctgggttcaagcaattctcctgcctcagccccctgagtagttgggattataggtgcgagctgccacaccaggctaatttctgcagtttttagtagagacagggtttccccatgttggccaggatggtcttatgtttttgtattttttttattatactttaagttctaaggtacatgtgcacaacctgcaggtttgttacatatgtatagcacatatataccatggaatactatgcagccataaaaaaggatgagttcatgtcctttgtagggacatggakgaagcaggatggtcttaatctcctgatcttgtgatccacctgcctcagcctcccaaagtgctgggattacaggcatgaagcactgtgcccggccttctgttttacttctgaaaaaaaaagggaataataattttttacctgataactgta

SEQ ID NO: 791344 - DNA, 611 bp, Homo sapiens
ttttaatctatatctaaggtctgagccctgaagatcttctgctggagcctcagtaagtttatttcatctaaatgggtctaggtgctgggatgattaccctttgtctcctgctaaatcataaaggtttgggagtttctttacaccccagtaaacttgtctgtggaggcctggggagtttcttcagacccccagtaaaacttgtttaatcctaaatgggctctgttaagaattccttcattatattgtcatgcttcaaggcccaggaaaagcctagacaaaactctctgtgggctctttgttacattccagccattgtatagggcactggcttaatcagcttttaacgtttaacctagctactcagtcagtgctgggacagttgtaatggaggcttgcgttagtragacatggcttgccacaatactatagcactaagttggtttaaattcaaggggaggagtattatactccacttctcagtaggaggaatagaaaggaatccgtggccatatttaatataccaccactatgtatgcagagcaacatagctatacttgcatagtttgttttttgttgtaggttatatgatgtaagtacagaacctgcgcatt

SEQ ID NO: 791345 - DNA, 629 bp, Homo sapiens
acattggcaattaaatttcaacatgagtttcggagggaacactatgcaaaccataggagaggattattattaatacaacctatttcatttggttactgtgaagattaaatgagatacaatgtgtggtgcggggcaggaactgaagctttagcattactctgtgtagtgcctaatacagttaggaagccaggttgcctrgggttgtatcctggctttgttgttactgttgtgtgacctggggcaagtttgttaactctctgtacgtgtctcctcatcagtaaaatggacataattttattataaaaattgaataagctaatgtttgtgcagtgctgagaacagtgcatgacacataggtttgttatgagccgattacacgagtcagtggacacaagaagcactcacaacgtgttagctactattattattgcctgaaactggagcctaatgcttctggcattgcttgagcaagaaatgaacaatgaaccttgaggctggttccagacctatcaggaaaccaggtttttggctcaggcctgccagcagaggtcatcgaccggagagattagttactacctccaggtgttgttgacccttgttcaaaataagaaggaagaatgtatccaaag

SEQ ID NO: 791346 - DNA, 638 bp, Homo sapiens
ctgttagaatctattaagaaaaacattaacaagaaaaagacacacaaagggcagataaaagattcatagagaagctgaaacatccagtcctaagcaaaaactagagtagacaagaaaggaccccagaggaagaacaatgtagttactgtgtgatcaatatatcttgtgatgtatcacagaataattaaaactctgtgccarccaacaaaacaattataccaggccaaaccactattctctctgctttcaaacaaaggagttttcagaagctaaaagatatttgcccacccacccctggcagcctaggtaacagggagagaaaagttagaacatgttaaaagaagaaatctatttacaatgtgtttgccctaactctccaagtgtctgcaaggtttagctgcttaatttttaccacacagtctgtatttgtactgactttagtgacacatatgtgagtacattcctactggaaagtctaggtctcactaaacacagcagtataggcatattcatccttcagcagctttttgtctgaaaatgcaaatcagtgaacggaaacatttttcatgaatgtttttattagtttttttcaagttcagttaatgttaatcttgaggcaatacatttttagatttttt

SEQ ID NO: 791347 - DNA, 627 bp, Homo sapiens
aatgaaaaaaaaaggaagaggcagcctacccgtaggagaggcaagcattaagttaaccaacatccttccagaacatgtgggccagaattgcagtaagattgccatgagtaccctggcgtgagcacctgccccagttcactagagctttaatactcacagaaatcaaggggtatgaggggaatgtaagaaacagacacttgtattttttaaataattattttcttttttgattataaaagtaaaacatgttcaatttgaaaaatatagaaaaatataaatataaaagtactctgaatatcagaggcattttttttctatttctatatagacatagagatatgtacctatagcatttttttactgaccatgttgtataagcagttctgtatcttgcttcattttaccattacacatagcagttttccatrtcattaaaaattctttgtatacaatacatcatctccagcatatatacttggcataatttatctaatcattaacttacgatttgattagtaaattctgttacacctattttttttattaaagttatcctctttttatatgtatatgtatcttcttaactaattctgtaagacagttacaggaattgttggttcctcaggg

SEQ ID NO: 791348 - DNA, 563 bp, Homo sapiens
tagagcagggagtcaaaggaaaactacacacattttcactatatacacgtaccagaaaggcaaatcattaccctgttttggttaactccaaagctgtcagttagctcttcacctgagggagaaggaaacttgaacattacaaaacacaaaatcaatcaaagagaagccagcatggcctagctggagcttaaagagtcaactgaggacagccagtatgccctggtccctggtcactaccagacagggaaagaactgtgcatattcaaacccaggggtacatggaagagggaagtgtgtttggtaggattttgttktgttctgtttcccttgagctcggaaaccttaatggaacagagtaaggcaaatctgtgatccagtgtgtctgagccagaggcttcaggaactgtagaggatgaaccaaaagccagggtgaggaatcatcccgctcactctcagtgcaaatgggtctgcatctggggactcctcacgtgacaacaggctctgctcttctagaaatagtttggatccctgtcaagtatagtctataattttagacttccaag

SEQ ID NO: 791349 - DNA, 539 bp, Homo sapiens
tggacctgtccctggctgcagctcttgctccctataatccattctccacttggcagcaagagtgatctttttattgggtaagtctggtgcacttccttacataacccacccccccacacattatgattggaattacattatgattagcatgaagtccaaagtcctttaagactctacataatccaacctgtgtttgccgtcccaggtctgtctcctttaaccctccccttgtttccccagcctccagtcccactggatgatttctggcccctggatacttcaagctcattctcatcacagggcttcctcacctggaatcatttccctggatttcacrtggctgtctcatctctttctcatcactcaggtttctcctcctcagagaagctttccctgaccactctagctaaagtagcaacacacaggtagtctctcatgactttatcttaaattatgttattgtatttatttggttatatgagtagaatctgtcttcccttcattgttatgcaaacttcaacagagtagagattttgttt

SEQ ID NO: 791350 - DNA, 616 bp, Homo sapiens
gacaatcttgctcaattgagaggtttagtgaaaggctatactgggggctgagcaacttcctaagttgcagccctgaaacagatgccatggctctgcaagaaaaaaagcaatgtcctcaacaggttatttattttataactacaattttaatagacttctcaagtttggtaaaagtcttagtctttgaagaaataaagctgatgaattgttgaattatggcaaatattaggatctttccaattgtccagagctagcatacttctcaggggtctctattttgtttgctttaagacagaattagatatttaaagtacatgatgccaagtaataatytaagagactaattggccagtgtacactaaaatagagaatgtaagcattgaacaaagtggagctatattctgttgccattcagaaatagttggattttttacactgcttccttttttttttgtttctctgtttttttcccctcatatcaatatctcccccagcaaagttgtttcagtaaaaaacaaaacaaaatgggtaggttagttgattttcaacaagagtaccaagacaattacacaggagcaagggcagtcttttcaacaaatggttctgggacactgga

SEQ ID NO: 791351 - DNA, 495 bp, Homo sapiens
tatcctcctgcatcaggctctcaaagcactgggattacaggcatgagccaccacacccagcctaacccctgttctggataagaaactttattctctaatagaggcactggacatgaaatggctaaggaacattactaagctacataccagcaagaacaatcaagctagaggttgcactgtggggctttttttttytactaaaaaaattcttgtgggttccaattcttcctgctgaagaacatacagactctcttggtatgcaaggtcagcatgatagagctcccttataacccaacaaaactggcctacttactgctcctagaacatgcctcatccttccctgcatctgtgcctctgtttggaggtattccaacctcctagactcccttttcttcctaccccagccccacagcctggaggccaacataagccagcaatacctcatctcctggcaataaatgaccctggttacaattgtgcaaaaaggaaactcat

SEQ ID NO: 791352 - DNA, 529 bp, Homo sapiens
ttggtaaaactagatatggcaagataactcaatatgataaacattgcaatcttaaatttttatcataattgaaagttttagaagtatttcattaaaataattaataaagcaatgatccttattaatagacttattatttttacattcttaaaattctgaaaattacaatgaaatatgaagtagaaattagctatgtagtgataggaaatagacaaattgttgttaatagattatataattattaaacccagaaaaatgayggaaaaaatcacttaaagttattaagcatttaatacatgcactgaacaagtgaaaaaaatgctttgttttcctatgtcttataaattttgatctataaactgatgaaaaaataaaagatcaaatcacaacagaaataaaattcttaggtatttctataacaaaaagaacatgataattacatgaaggaaagataatattttctagagaattatgataattttaaaatgtaaacatgccagactagtagatataaagatggaatatctga

SEQ ID NO: 791353 - DNA, 659 bp, Homo sapiens
tgctgggacaccggatcttcagcccactgacacatccttttgttttcctaatggtaggttgtttgtacttaaaatgagcctacactctgtgagctccttgtaacaaatatttctgaagactagtcccctgttttctaggcacaggggatggagagaaacagaaaaccactcggctttggaagagctcccagcatctcaaagagagggagaagagaggcaactcggaacctcacctgcaaaacaagggtgggtggtataacccgccctgtccctctgcctcccyaaacaagaaaatctcttccggtcctttgaggcgagccactctctccaggagcttcggtctggagccacatcaacctaggaggaagggaagatgacaagcccagcgtgtaaatgtcctttcttcctagcaacaacatttgaaagcatagaccttagtcagatgggacacatttggcaaatgttcaggcgtgcagcatttcaattgatgaaatttctttgtggaaccctgttcccaagggcagggaaaattggagagtgaacaattagatgctggcgcggcccggagaggctcgcggatgcctggccgcgcgcctccgcgggacgtcagcgcccgcggcacgatctgctgctgtcactatcagtatccggcaggagcc

SEQ ID NO: 791354 - DNA, 659 bp, Homo sapiens
tgctgggacaccggatcttcagcccactgacacatccttttgttttcctaatggtaggttgtttgtacttaaaatgagcctacactctgtgagctccttgtaacaaatatttctgaagactagtcccctgttttctaggcacaggggatggagagaaacagaaaaccactcggctttggaagagctcccagcatctcaaagagagggagaagagaggcaactcggaacctcacctgcaaaacaagggtgggtggtataacccgccctgtccctctgcctccctaaacaagaaaatctcttccrgtcctttgaggcgagccactctctccaggagcttcggtctggagccacatcaacctaggaggaagggaagatgacaagcccagcgtgtaaatgtcctttcttcctagcaacaacatttgaaagcatagaccttagtcagatgggacacatttggcaaatgttcaggcgtgcagcatttcaattgatgaaatttctttgtggaaccctgttcccaagggcagggaaaattggagagtgaacaattagatgctggcgcggcccggagaggctcgcggatgcctggccgcgcgcctccgcgggacgtcagcgcccgcggcacgatctgctgctgtcactatcagtatccggcaggagcc

SEQ ID NO: 791355 - DNA, 714 bp, Homo sapiens
caacgagaaaagtaatggatcccaataccatggagcttaaaagcatgtattacagaacaaagtggaataattagaatctgtgagacttggagaaatataaactttcataaatgatattctatagaacacattagaaaacaatttgacaatcctgataggatgctggagacatagcatggcctcaaattgagaaggatagaaagccatatagtggcaaaaatataacaacatgaaaatgagcgatgagagagtaaagcaagtcaacttgtgaaagagaaattggagagcttaactggtggggaccctgggagaggtgamaccaccaaatttcctttgagatttggtggtaatttacttgaaaataaatttacttgaaaataaacaggactttttcttgttgttttgatttcttcttagtcacaatgtttcctttatttttaaatttaaaataacattaaaatatctctggaccacagacttatcttgtttaatacagtattcccaattcccagcaccatgactagatactgtaagtatcctgcaactatctattgaattaatcaatggatgatgatttttacactatcaaaataggcctgaagcaataactccacagctggtcagtctgagtccatctctaatctccatactcattagctatggccagtgacctcttatgcatcagttttcacatttgtaaacagggataataat

SEQ ID NO: 791356 - DNA, 563 bp, Homo sapiens
gtggaggaattttcaaagaaataaagaaaaaaaagacataaaactgggcctttgaaaaagtttataaagggcattttttttttggaagaatttaagattggctttagaactctaacttgagttcatattatgatgcatgtacaaattcatgcatatatatttgaaaaataattcgattctctggagtaagctttgytcccttttatatgtatccagaaagctggcaaaagctcatgtatgttatttcaggtcaattaatcacaattattggactgcattaatcatttataaaagactaaattgcttaaaattcaactgctatattttcaacacttcccctcagatattctaagtttttgtatagctcctgaggtcagacggaaattacaaagtcacatctattttaatggcattcttatcaaaaaccacttaatgtggtatatgcactttcactgaactcaaaggcataagccattcagaaaccaagcagctctgggtggcacaaaaacaataaaacaattctacacattcaaatagcttaaaatgaaatagaagaggtgatg

SEQ ID NO: 791357 - DNA, 614 bp, Homo sapiens
ggggctgcgtgcggcgcttgcgggccagctggagttccgtgtgggcgtgggcttggtgggccccgcacttggagcagccagccagccctgctggccccgggcaatgagggacttagcacccaggccagtggctgcggagggtgtattgggtcccccagcagtgccggcccactggcgctgtgctcgatttctcgccgggccttagctgccttcccgcagggcagggctcgggacctgcagcccgccatgcctgagcctcccaccccctccatgggctcctgtgtggcccgagcctccccgacgagcaccaccccctgctccatggcacccagtcccattgaccacccaagggctgaggaatgcaagcgcatggcgcaggactggcaggcagctccacctgcagcccckgtgcgggatccactaggtgaagccagctgggctcctgagtctggtggggatgtggagagtctttatatgtagctcagggattgtaaacacaccaatcagcaccctgtgtttagctcaaggtttgtgagtgcaccaatcgacactctgtacctagctgctctggtgaggacgtggagaacctttatatctagctcagggattgtaaa

SEQ ID NO: 791358 - DNA, 599 bp, Homo sapiens
ttaaatatactcttatatgttccagcaatcacagtacccaaatgaattcacatgaaaactggcacatggatatttacagcagctttatttgtaattgacaaaatctggaagcaaccaggttgctcttcagtaggtaaacacataaatgtggtacatcctacaatggaatattattcagcactgaagagaaatgagctgtcaagccatggaaagaacattacaggcatattattaaaagaaagaagccagtcttaaaaggttatataccatgtgattcccacaatatgagattctgtgaagggcagaattgtggtgacagtaaaaaacaatcagtggttgctagaggttggggagcaggagggatgaaagatggagcacagatgwtttatagggaactgaaatcattttgcatagtgccctaattgtggatacatgttattatacatttgtgcagacctaaagaatgtacaatatcaacagtaaatcctaacgtaaactctggattttgcatgattatgatatgtcaatatagattcatcaattaaaagtagcacttagtgtgtgatgttgataatgggggagactatgcatgtgtgaag

SEQ ID NO: 791359 - DNA, 599 bp, Homo sapiens
ttaaatatactcttatatgttccagcaatcacagtacccaaatgaattcacatgaaaactggcacatggatatttacagcagctttatttgtaattgacaaaatctggaagcaaccaggttgctcttcagtaggtaaacacataaatgtggtacatcctacaatggaatattattcagcactgaagagaaatgagctgtcaagccatggaaagaacattacaggcatattattaaaagaaagaagccagtcttaaaaggttatataccatgtgattcccacaatatgagattctgtgaagggcagaattgtggtgacagtaaaaaacaatcagtggttgctagaggttggggagcaggagggatgaaagatggagcacagatgatttatagggaactgaaatcattttgcrtagtgccctaattgtggatacatgttattatacatttgtgcagacctaaagaatgtacaatatcaacagtaaatcctaacgtaaactctggattttgcatgattatgatatgtcaatatagattcatcaattaaaagtagcacttagtgtgtgatgttgataatgggggagactatgcatgtgtgaag

SEQ ID NO: 791360 - DNA, 583 bp, Homo sapiens
gttcaatatatgcaaatcaataaatgtgaatccatcccataaacagaactaaagataaaaacttcatgattgcttcaatagatccataaaaggcttttgatagaattcaacatcatttcatgtagcaaactctcaataatttacatattaagcaaacatacctcaaattaataagggccttatatgacaaaccgacagccaacatcatactaaatgggtaaaagctggaagaatttcccttaaaaactggcacaaaacaaggatgccccttctcaccactcctattcaacatagtattggaagtcttgatcagagcaatcaggcagkataaagaaaaaaatggcatccaagaaggaagagagaaagtcaaaccatccttgtttgcaaatgatatgattctatatctagaaaaccccatagtcttagcccaaaagttacttcagctcataaacaacttcagcgaagtttcaggatacaaaatcattttacaaatatcactagcattcctatgcatcaattttttaatactctgacccagtagataattagcactgtattgcagagagcaaataaatagcgtatg

SEQ ID NO: 791361 - DNA, 497 bp, Homo sapiens
cttttttttatcattagtggttctttttcagaaatattcccatattctactttgtgtttctctaaatatttatctaaaattgaaactatagctcaaggataacaaccttctaatctatactgcttcatggtccagcctttgtcctcaaccaggacttgtgaaaaaataaatactccaacatgaaacacaatcgttttgctaagaacttaatggatccacaaraaaaatatgaagaccgggctgtcagaaggacatcttaacatggcaataccactgtcttagtaacagattcagtaacataagggatttatgagatacttagcacagaagggaataaattgtgctaaagcagagtaaaaatatgcaaaaataacaaaaataattaacaagtagagaaattactacagattacaaatataaaggaatatgtcacacaatagcaatattgccccttcaggttattaggtaccatttagtaagaactaattatatatact

SEQ ID NO: 791362 - DNA, 614 bp, Homo sapiens
tttttacttccagaatcctgtttttccagaaatctaatgagatcatcaagccactatgtacaatttacattcttatgcagtttaaataaaaggagggaaattatttataaacaggagaaaagaaaaacaataattatgccaggaaaaaaagcaactctgccacgtaatgctaaygaaatttgcatcatgtgtgattgaatatttccattcaaattaagattataatcatacttagagaattactcttagaaggtattaggaacttaaaaattatatttttaggaaaatatgacattttttgaagatatctagccccagaataagccaataggaagtagtcaaagaattaactagtcctatttgaggctgttctgaaggaaccttctctattttgtctcctaattttgcctctaaaactgttcctcctcaaaactcagttagtcatgagctctttatctggcaccttaggaactgccagcgatggcaggaatgccttgtagacagcagaaagcacaaatgctaaaagattgggtgaagtgatagagggcttctcctagccccttgacagttccctgaggaattctctgtggctgtggaagtcagggagaaaaggc

SEQ ID NO: 791363 - DNA, 618 bp, Homo sapiens
cctgagtgcctcgccttccccaccctgccacagacaatgcttttctcccttccctttcctttctttctctgtgcaaaccagttgaacgcacgacaaaaatcattgtttatctcctctataaagttttggttaatagaaaaaaggatttgtgagcctagtcttaagctgtrgtgaatctggtgtgctttgtgtgtctttctgtattgttctgtcataaagaggggtaccttaggatagaacatggccttagaacccataagcctactcttcaagatggcctagtaaactggtcagttataaactttgctgcagatgcatgaaaaaaataaactggatggggtttccctcctgtcttctatgtccttgggaaccatgtggccttgctttctcttttcacaatggcagcccgggttcagggttcaattcctggcttatggaatgagtcctttacctgctgaatgtctgtgtatttgtatgtgttgtgtgtgtgatatgaaagagctttgattaattggtttaaaaataagtgcttaaataaaatattttttcagaaaagtaaaaagtgtaatgccttttagttcacatgactttagtaatctttgggaaataaaaacagcc

SEQ ID NO: 791364 - DNA, 617 bp, Homo sapiens
ccgtgtgctcattaaagggatccaggtttttcctcattgttccagtgaacaaaacaggttcctaagtgcccaaaatagtcacggtcattaccacagactcttttttcattttattccaatgctaacatcaacaatagaattaagataccaaaaaataaaattcatgataataattatagcgttacaaatgcctgtttacaaaacaacatatctattaatgttccactgtacaaagcgtgctccaaaataccttccagaccactgaacactaacaaaactgttgcaatgtgctatcttaagaagaaaatgaaaaayacaggcctgatgtttaaaactgttttcctcatattattagcttaacatgaaatataaggatataattattcgagggtctacatgaatagagctatagaaattaactatcaatcatgtaatactggaaaataccgacagcatgattaaagtttgtgcttcaaagccaaattattaagcattttccaatttgcactaaagaataaattaggattattttctccgttggcaaaacagttttccaagattaagaatctctcaccgggcgcagtggctcacgcatgtaatcttagtattttgggagg

SEQ ID NO: 791365 - DNA, 593 bp, Homo sapiens
ggggtggagctagcagagggccaggggagagacggagttgaattggctacaagttgatcgcacttgaacttgagcaatgggtacaggcaggttcaagacacccttctctccacttttgcaaatttttataattgtccattttgaaaaaaagaaaagttaaaagtaaataaaacttcacaaaaccaaccaaacccccgaaattcaccctgtaaacatcattttcgcatcagacktaaaaggacagagcgtgtgtgtgtttatttactgggaggaccgccttaaagtattaaataacattcaaaggtctttaaaaattaaaaaaaagttaataaaccttgttgttcaagtgaacactagtattactggacattcgagtacatgaaatccaaaagtcatcactcacctttttcagagcacaagcctttatgactttttcatatcgttccttttcgtatttcttcccaaataaaatattactcctcagagttcccgagaacacccagggctgctgagacacataggcaattcttccatgcacgctgaccagcccgtgacttggggccaattccccgagcacggcacttaacagtgat

SEQ ID NO: 791366 - DNA, 539 bp, Homo sapiens
caaatgtgtaattgccttaaaatcctccacttgtcccctcgtgtggatttctcccacacttaatggctgtcgtaacatcttttctaaacagccataaaatctgcgaattccttctatcttacggagcaggcatttatatactactttgtttcttctactaggcgayaggtgctgtgggcagggcctatattggaattagctttgtattatttgtatcacctgtggtgtcctgcaaaaaaaaccagaaatcccccagagagttaagcatttaactcaggcttgaaacatttatgggaaatctattgccatattgttcaggtatacaataagctaggtgttttacacctcttatcttgtttaagttataaaactctaatggctaggccctatcacttgcattttgcaaaagagaaaaatcgaggcttagtaagattgattaaactgttgaaatgactgagcccctaagtgatggaatgggacggaaacccaagtctgcctgcctcttgcccattctgccgatggcctcccaatcacttgga

SEQ ID NO: 791367 - DNA, 652 bp, Homo sapiens
aaacacatatagtcaaacagcaaaaactcaaagaggaaattgttttaaaaagcagccatgaagagtcataatgtatagtgcaacaagcataataatgatggtttctcatcagaaacaatgaagggagaagacaatgatgtgatatatgtacagtrccaaaaaaaggaaaaaaaaagaaaactgtcaacctagaatcttctatctgttgaaaagatcattaaaaacaaagttgaaataaagacatgctcagatgggcaaaagctaggagaaggtctctagcagaccagcctgaaaggaagttcttcaggcttaaggaaaatgataccagatggaagctcagacttcagaaagaaataaagagcactggaaaggacaaatatgtgaataaatataaaacacaattttctataatatgtatgcacatacatgcatacatatgtataaatttctttaaaagaccattggttatttaaagcaaaatggacccaatatatcatgaagtttatagcatatgtagaagtaaacaatatgacaacataagcccaaagaatagcagaaataaattatataatagtaagattattctattgtttgcaaatttggtaggaaattatttgaaaatagattgcaataaacttaaatggatatgtaa

SEQ ID NO: 791368 - DNA, 652 bp, Homo sapiens
aaacacatatagtcaaacagcaaaaactcaaagaggaaattgttttaaaaagcagccatgaagagtcataatgtatagtgcaacaagcataataatgatggtttctcatcagaaacaatgaagggagaagacaatgatgtgatatatgtacagtgccaaaaaaaggaaaaaaaaagaaaactgtcaacctagaatcttctatctgttgaaaagatcattaaaaacaaagttgaaataaagacatgctcagatgggcaaaagctaggagaaggtctctagcaraccagcctgaaaggaagttcttcaggcttaaggaaaatgataccagatggaagctcagacttcagaaagaaataaagagcactggaaaggacaaatatgtgaataaatataaaacacaattttctataatatgtatgcacatacatgcatacatatgtataaatttctttaaaagaccattggttatttaaagcaaaatggacccaatatatcatgaagtttatagcatatgtagaagtaaacaatatgacaacataagcccaaagaatagcagaaataaattatataatagtaagattattctattgtttgcaaatttggtaggaaattatttgaaaatagattgcaataaacttaaatggatatgtaa

SEQ ID NO: 791369 - DNA, 718 bp, Homo sapiens
catgcatacatatgtataaatttctttaaaagaccattggttatttaaagcaaaatggacccaatatatcatgaagtttatagcatatgtagaagtaaacaatatgacaacataagcccaaagaatagcagaaataaattatataatagtaagattattctattgtttgcaaatttggtaggaaattatttgaaaatagattgcaataaacttaaatggatatgtaaactctagagcaaccactaaaaacaataacataaagagtagagctaaaaatgtgatagaaaaaataagaacatatattctattcactgcaaagaaggaaaagaacatatgagactaacagaagacaaataccaagatggtagacttaaaaccaaccrtatctataattacattaaatgtacatggatgaaactccacataaaatgacagagaatttcagctgagcatttaaaaagccagacctaattagatgctgcttacaacaaagactgtaaatacagagagagagagagataccaagcaaaaacaccccactcttagtaaatgacagaacagtggacaaaaattcagtaaagatactgaagatccagatattataagccaacttgacctgtcatttttagaactctatactccacagctacagaatatacattcttttttttttttttttttttttttcaaatgcacaggggaccgttaccaaagtaaa

SEQ ID NO: 791370 - DNA, 597 bp, Homo sapiens
ttggtgggtttgggtgagcccctgggctggtccccatccatctccctcccctgtgctgtgcctgcagaatttcacccggcctgcagctctgtcagcgtgagaggggcacacagacacctgcacctttgaccaccgaaaggctaccttgggccatgtctttatcctggctctgacgccacgtcgttggctttctactgcaaactcaggttttctgagacgtggtctgaacctctcccctsggtggaactgcagtgcatcggcccaggggacctgcgctcacgggcgcacgagcttgagaaagaagtgtcgccagcctcgtgctcgcctggcctcgtgcagcatctgtgtgtggtgtgcacttacgcgtgatgaaagcagcccagccgtgccgtgagaggaagagtcggggaggcgaatgggctggagaaactgtttccgcctggctccgtgttgctggaaacgggcagaggcggcggagatgaatcccgtgtgcgagcgcagagctctctccccggctcgtgcttgctcccctcgtggctgggggctgtggtcctttcaaagctgttccctgcagatcccttcccaggggcactttgc

SEQ ID NO: 791371 - DNA, 597 bp, Homo sapiens
ttggtgggtttgggtgagcccctgggctggtccccatccatctccctcccctgtgctgtgcctgcagaatttcacccggcctgcagctctgtcagcgtgagaggggcacacagacacctgcacctttgaccaccgaaaggctaccttgggccatgtctttatcctggctctgacgccacgtcgttggctttctactgcaaactcaggttttctgagacgtggtctgaacctctcccctcggtggaactgcagtgcatcggcccaggggacctgcgctcacgggcgcacgagcttgagaaagaagtgtsgccagcctcgtgctcgcctggcctcgtgcagcatctgtgtgtggtgtgcacttacgcgtgatgaaagcagcccagccgtgccgtgagaggaagagtcggggaggcgaatgggctggagaaactgtttccgcctggctccgtgttgctggaaacgggcagaggcggcggagatgaatcccgtgtgcgagcgcagagctctctccccggctcgtgcttgctcccctcgtggctgggggctgtggtcctttcaaagctgttccctgcagatcccttcccaggggcactttgc

SEQ ID NO: 791372 - DNA, 557 bp, Homo sapiens
tattagatataaaaaggaatggaatactgatacatgctacaacacaggtaactctaaatataaaattatgcagagtgacataactaatcactaaatagcacacgttgcataattccattcatatgaaatgtcctgaacaggcgaatccagagagacagaaagcatactagctgagtggctgccaggaactggggagactggggaacagggagcagatgctaacggggatgggctgcttctggaggcaataaacatattctaaggttgatcatggtgatggttgcacaactatgaatatacttgaagccaccgcatagttcactttaaatgggtgaggggtatggtaggtaaatcatctaaataaagtcgtttttaaaaaaccatctctgcagtttctttgctaccagatcccacgggcrtcttgaatccttgccaggactcaatctgtcatcagaagaatggggctatgaataggaatctacctaatcgggttgttttcaggcctacaccagatgatgacctcattcaggaacgtcgacgaagtaggaagcctctgc

SEQ ID NO: 791373 - DNA, 578 bp, Homo sapiens
tccacagcggcaggagccgctccagccaccccagggaacctgagaacagttcccaggcacgcacgggtgacaacgcccgaagccattaagaggaaacgtttaaatgaggtgcagtgctcgggacccaacatttattaatactttctattaatgactatgtctatactgccakcatttttactcaaatgtttctatttgaatacaattattaatatacatataacattatataaacatggtatttattacatttatacacaatatacaaacattaataaaatatattataaattatttgaatatttcaaataaaaaaggtctttattttctttattttaatataccaacatctagaataccctgttaaatgagagaatgtgtataaatttatataatagctctctatgatttaaagaaccgggttaacagtaaaggtccaggatactttgtgacttaggtcctcagtttcagtccccacatttattctagcatgttatccctctgtattagtgacagcaagaacagttctgccacaataatccagaaaacctagctttgctttattattattacgactt

SEQ ID NO: 791374 - DNA, 610 bp, Homo sapiens
ctcaatcacacccggttctagatgattgacaagcgcgacgcccaacccggcctggtcccagctctggcctaagaggttcggctggaaggcaggttgaagagttaacaacgatctggttcagggtctggtttgtgtttatcggcccatttttaggcttgcggcgttatagaaaatgattttgctggcaggtggagtgccraggcccactatgtgcccccagtatagcagtcaggtgcctttctgctccaggcgcaacctctgccctgaaccccaaaccagctctctgcgaggccccttcgctttccaccgtctcaggtcagggcagctccatcactccaacgctgaggcccaaacccctggaaggcattctgacctctcctgccctcccacccacgctcctcctgtggctgatggcctcttacctccactgccgccctatttgaagccaccgtcatggtgctaaaagaaacttgtggggccaggtgcggtggctcgcgcgtgtgatcccaatgctttgggaggccaagatggaaggatcgtttgagcccaggagtttgagaccagcctggacaacataaggagacccccttctctaccaaaatttttttgg

SEQ ID NO: 791375 - DNA, 541 bp, Homo sapiens
aagaggccgggcgtggtggctcatgcctgtaagcccagcactttgggaggccgaggcgggtggatcacaaggtcaggagatcgagaccatcttggctaacacggtgaaaccctgtctctactaaaaatacaaaaaattagccggacatggtggcgggcgcctgtaatcccagctacccaggaggctgaggcaggagaatggcgtgaacctgggaggcagagcttccagtgagccgagatcgggccactgcactccagcctgggccacagagcgagactccacctcaaaaaaaaaaaaaaaaagattcattatgaagagcaaaagaacaaagcttccacagcatggaaggggacccaagtggattgctgctgctggctggcgggggtsggggggtggggcagcttttattcccttatttctcccctcccatgttctgtttctgccctatcggaatgcccttttttcaatctttcctgcaattggctacttttaggatcctgctgattggtgcgttttacagagcactgattggtgcatttta

SEQ ID NO: 791376 - DNA, 376 bp, Homo sapiens
gtgccaggccggaagtatttttatattaaagaaattaaccttttatcgctgatataatttccatttttccacagtttttcaactttatggttgtttcatgaaatgtaaaaactgtcatttttatacttagcaatctttcatatttctgaatcttttctcataaatggcttctggatttggaaacaaacttacaaagcctccccagtatgaggctatcaaatttgccttggggtctyttttatatttaaatctctgacctgccttgaatgcggctatgacgcctctatctacctctggcttatgtttttctccagatgacccctagctgccaacactctacctcccacccctactgatttgaaatgccatcttttat

SEQ ID NO: 791377 - DNA, 563 bp, Homo sapiens
cacccaatggcctcactcaagagttgtattagtccattctcacactgctataaggaactgcctgagactggataatttataaagcaaaggggtttagttgattcacagttccacagcgctggggaggtctcaggaaacttaaaaccatggaagaagggaaagcaaacaggtccttcttcacacggtggcaggaaggataagtgccaagcaaagggtgaaaagccccttatgaaaccatcaaatctcatgagaactcactcactaccatgagaacagcggcatgggggtaaccgctcccattatttgattacctcccactgggtccctcccatgacacawggggattatgggaactacaattcaagatgagatttgggtggggacacagccatcccatattcagagtccacactcttgataccgcactgtactgattctcaagttgtactgattctcatagtgggaaggatgttttccttttgctctgtctccacagtcctcacacacaatgcctggcacaggaaagatgctcaataaatttatgagaaaatcaatggtggtaa

SEQ ID NO: 791378 - DNA, 505 bp, Homo sapiens
aatatgtatcaatttgactgctatgtaacatttcatgataccataatcaatcaacgagaattgatggatacttacattttaccattgagttggcattgagaaaaaaaaaatctcattctaaatttacatcaaggggatggaactggaggccattatgttgagtgaaataagccaggcacagaaagataaacttcacatattctcaatcatttgtgggagctaaaarttaaaacaattgaattcatggagatggagagtagaaggatggttaccagaggctgggtagagtagtgggaagagggtaatggggataattaataggtataaaatatagttagacagaatgagtaaaatctagtattagatagcacaacaggatgactacagtcaacaataatttattgtacattttaaagtaactaaaagtataattggaatgcttataacataaagaaatgataagtgcttgagttgatgggtacctcatttaccctgatgtgattat

SEQ ID NO: 791379 - DNA, 644 bp, Homo sapiens
gcttcataatgttccaaagtcttatattttacttttccatttttcctagatgtggatagtttgcttctaatgctcagctatcacaaataatcaagaatgcctcctctgggtataagcaagtttccttaggacacatcctaagtagtagactctagtgcatagggtatgtgagttttgccaggtgcagcaggaggaaactgtaccagtgcacaaaatgatcatccacacagaaaacctaatatgatcaaaagrccaaccattagaaacagagttcagaaaaatagccatttatagcattatcctaatatctttgttcaaatcaatctatatagtcaatataactccaattgaaatccaacaaaaagatactatattttgaaaactaaatttcaaaatatctaagagaattttgaaaatgagagtaaatatagtgacttaccttacaagattttataaaatccttaaaagcaaaagcaattgcaataacagaaatcagtaaaaatctgcagaaaacaactactgacttattaacagacgataggccagtataattacatgaacttagaatgagtgtgaggtgaaagaaaagaacacaaagggggaaaggatggactgttttagggttttttggggaaattggatca

SEQ ID NO: 791380 - DNA, 644 bp, Homo sapiens
gcttcataatgttccaaagtcttatattttacttttccatttttcctagatgtggatagtttgcttctaatgctcagctatcacaaataatcaagaatgcctcctctgggtataagcaagtttccttaggacacatcctaagtagtagactctagtgcatagggtatgtgagttttgccaggtgcagcaggaggaaactgtaccagtgcacaaaatgatcatccacacagaaaacctaatatgatcaaaaggccaaccattagaaacagagttcagaaaaatagccatttatagcattatcctaatatctttgttcaaatcaatctatatagtcaatataactccaattgaaatccaacaaaaagataytatattttgaaaactaaatttcaaaatatctaagagaattttgaaaatgagagtaaatatagtgacttaccttacaagattttataaaatccttaaaagcaaaagcaattgcaataacagaaatcagtaaaaatctgcagaaaacaactactgacttattaacagacgataggccagtataattacatgaacttagaatgagtgtgaggtgaaagaaaagaacacaaagggggaaaggatggactgttttagggttttttggggaaattggatca

SEQ ID NO: 791381 - DNA, 524 bp, Homo sapiens
atttttttcctgaagcctggaggtgttgcttagagacacatggagttctgttctagacttatacattattgacttcccagctgaccactacagtggcagtcttgctatatttcaaatatgacagttatggtctcattttttcctgtgaagcatagagccttctacttagttytaaattgagaccaaaaattcattttcggttggtttccacaaagaccatcatagaattacctacctttggaaattggtcctgagatggatttaaaacagtaagctgatgttcaaagtcagtattttttgagctgcccagatccatatttctgagctactagcttccataaaatgaacttatactgattctttggtaacctagagagatctttcgagctttcgatatttattcccgtatttttcccatttcactgaaactgaattccatcttacctggacattttctgagcaggagcaaacaccaaaattagtgatgggttctccactggtgttccatttttccagactgtctt

SEQ ID NO: 791382 - DNA, 656 bp, Homo sapiens
ggttctatttactccacatctttaccaacaattattacaattattatattctggtttttttggtagtagccatcctaatgggtgtaaggtggtatctcattgcaactttgatttgcatttccttaatgattagtgatgttgagcatcttttcatgatttttgtttgtttgtttttggttttggttttggtttttgagatggagtctcactttgtcgcccaagctggagtgcagtggcacgatctttgcttatctcaagctccgcctcccaggttcacgccattctcctgcctcagcctcctgagtagctgggactacaggtgcccrccaccacgccaggctaactttttgtatttttagtagagacagggtttcatcgtgttagtctggatggtctcgatctcctgacctcgtgatctgcctgcctcggcctcccaaagtgctagggttacaggcatgagccaccgcgcccagccctgttcatgtttttattagctatttttatatcttctttggagaaatgtttattcaagtcttttgctcatttttgaattgggttgtttgtcattgagctgtagaagatctctatacagtctggatactaatcccttataaaatatattatttacaaatattttcactattgtgtcagttgcc

SEQ ID NO: 791383 - DNA, 650 bp, Homo sapiens
atgcctctagcttttttctttttgcttaggattcttttggctatttaggttctttttttattccatatgaattttagaattgttttttgtaattctgtgaaaaaatgacattagtattttgaaaagaattgcattgaacctgtagattgctttggatagtgtgattgttttaaaattttttttaatttttaatttttaatgggtacatagtaggtgtatgtattcgtggggtatctgagatgttttgatacaggcatgcaatgtgaaataatcacatcatggagtaaaatagggtatccatcccttcaagcatttatcctttgtgttacgacaatccaattatattcttctagttatttttaaatatataattattattcactatagtcaccctgttgtgctatgaaagagtagatcttattatttgtaagtaatttttttatacccattaatcatccttatctccccacttctcccaygctacccttcccagcctctggtaaccatccttctactctctgtgtccttgagttctattgttttgatttttagctcccacaaataaatgagaacatgtgaaatttgtctttctgtgcctggcttatctcatctaacataatgatctccagttccatccatgttgtaaatga

SEQ ID NO: 791384 - DNA, 559 bp, Homo sapiens
gagggatctgcgtgaattacagcaaatcaaatgatttccacattataaaagcaagccatggcttctacagatattttaattccttgggaggaagtttcacctcatcttttttccccagtaaagtaacaatcactgtaggaatttttaagtgcacaaactgcaaaatargagtaactacctctgccatgttcaagcacttgggcaattcagtcacttttagggttgtatcatttaaaaaaggggcaacatttatgaattatctcatcagatgcatggtgtttttcaatccagattcaagagtaactattagagttactcattgagcttaatggaaacatcaaaccgacgagtcctttcatgggtggtaaacatgactgggagacaatggctaacttgccccaggtaaggtggctcttcagtggcagagctagaactagaactagaactcagatgtcttgattcttggggtagtgtacccctcctatggaccagcaagataaataacccccaaaggacatcacacatactgaaaactaccaaatttgttacatatatatat

SEQ ID NO: 791385 - DNA, 629 bp, Homo sapiens
aagatatttatttttatctgtctagtcatacctgaatagggactctcttgacagccaaatttcattctgtttcacagttttccaagagaaaagcaacagcagcaacacagtggacacaatcagggtggtggccccacatcgattcagccaagtgcagagcttgctcagtccrtgcacaaaaaggatgcagtagcccatgctggaaaacagggtggaaggaacgggattactttgggggtgcaatagcttccccccagaattatctcctacaaaactaactttcaaatgaagcttgtcctgtgctagagaaacaaatagaaactcccctgccttggacaatattaacatgttagttctctaaagtgctgcactagcaggtttgctatttcttgtagaaatatttcttgctatttcttcagtgtagggaatgagagagtcatcttgtaggcttaaagtgccctggatttcagcagctgaggcatcatgagaagtcccacatataagctcttgggtcctgaatggctcctctgacccaagctccctcatgtcactgtcattgtatgactctattggcactatgcgcctaaattcggagtttatgctgcagcaggtcacaccacagctttgta

SEQ ID NO: 791386 - DNA, 629 bp, Homo sapiens
aagatatttatttttatctgtctagtcatacctgaatagggactctcttgacagccaaatttcattctgtttcacagttttccaagagaaaagcaacagcagcaacacagtggacacaatcagggtggtggccccacatcgattcagccaagtgcagagcttgctcagtccatgcacaaaaaggatgcagtagcccatgctggaaaacagggtggaaggaacgggattactttgggggtgcaatrgcttccccccagaattatctcctacaaaactaactttcaaatgaagcttgtcctgtgctagagaaacaaatagaaactcccctgccttggacaatattaacatgttagttctctaaagtgctgcactagcaggtttgctatttcttgtagaaatatttcttgctatttcttcagtgtagggaatgagagagtcatcttgtaggcttaaagtgccctggatttcagcagctgaggcatcatgagaagtcccacatataagctcttgggtcctgaatggctcctctgacccaagctccctcatgtcactgtcattgtatgactctattggcactatgcgcctaaattcggagtttatgctgcagcaggtcacaccacagctttgta

SEQ ID NO: 791387 - DNA, 605 bp, Homo sapiens
aatgatgtgacaaattggctaaataaattaatgttctttaagcctagtagatccaataataccctacaaaaatatgagaagaaaaaagaggaaatttcatggtattttccaaaagtacacatggtcattcatttttaggacaaagaacgaatggaaattcacttattcccaaagacagcagggagagaagagatatgagaactaagacagctaataayacagccattataatacatgacatttgattaactgcaacttcagacaaaataatttacttctctgagctttaatttggtgatcaactagacaaaagaaaaggaattgatacctatatacctgttatatctgtaggaaaaatgtgtgatagattcgctattataggtgttaggtttgatttttcttttctggttgggaagaagagagaaaagcatccccctgagctgcaaagaggtgaaaatcctgtcttaacacccagacgggggtgctgagagggtcactcagtcaccatcggcacaaatacacatcaggccaagcagctaagggaagagcagggcttttctcagagccgtaaattgcctcagaggaaatccagctcctgaaaccgt

SEQ ID NO: 791388 - DNA, 549 bp, Homo sapiens
ttagcttgattccatgtctttgctattgtgaatggtgctgcaatgaacatatgtgtacttgtgtctttataatagaatgatttatattcattgggtatatatccattaatgggattgctgggtcaaatgatattagggaataccacactgcctttgtatttattcaaggtttgtttttttttttkttttttttttttttttaatggagtctcgctctgtcacccaggctggagtgcagtggagcgatcttggctcactgcaagttccgtctcctgggttcacaccattctcccacctcagcctcccaagtagctgggaccacaggcgcctgccaccaggcctggctaatttttgtttttttgtatttttagtagagacagggtttcaccatgttagccaggatgggctcaatctactgacctcgtgatccgcctgccttggcctcccaaagcgctgggatttacaggcatgagccaccatgcctggcctattcaagctttaattgtactttctcaaagtcatgcctcaaagcctttctgctctattacc

SEQ ID NO: 791389 - DNA, 614 bp, Homo sapiens
ggtctctagctgaatttttcttttcattgtcaaacaatatgccggccaaaatgcattcattactgccacattgatattagcttttgctcagaaagatcaaagaaatgatttgattacctcttattgcaccatggcattatctgtttaattttgatgctctgggttttatttttgttttcttttgggtattttcttttcaggctgttttaaattttttctgtaatttttctatttttcaaatgcattattcagagctgtgtttcccttgaataaaaacaatatttgaaatgaccttcagattttacaaaaatggtatgcttcaaataacacttaatttcatataataatttgttgtatctaattttcacttatttgttcttataaatccaccttaatattaatgatgatctctcartcactaataatataaattcatgaagaccattgagcaaaggatatttgtcttaataatgatgtatacgtgcatgtttttctgtgggacaagagagtggaatagaaggaagaaggcaaacaaattcagagtatttttcttactgtatgttgaaaaaatttaaaatatacttttccatatttatctcctttttactgtatcc

SEQ ID NO: 791390 - DNA, 528 bp, Homo sapiens
gtgcaagctttgtacctattaatctgtcggtatgtattggtttgattattttctgtttcattcacttatagcatatttgtaaatgcttacaggaatcttgtaggttttaactctatctcacaagtatcattcttaaactaatatatgaggttcaaagattatgggtgctttatttcattcttagcatttttttctgaatatgtgcttaaattacagaggagtggggttttttttttcttcttttttggagggtagattaaaaccattagctatacttaggcatagtcctcagtggataagagttgttttgctttcaaaattttcaagcaggctttagtgaaacaaacaatattttcactatgaaatcaccagcatgctagctggaagagctgygccatcatctgtttatggtggtatgccatttggtatctataattcagaacagcaaaggtaaaatttaaatgtttgcatactgaaaattacttctctatgtctttggaaaagagtattagcaatggttgggcatgt

SEQ ID NO: 791391 - DNA, 484 bp, Homo sapiens
cggtgaaaccccgcctctactaaaaatacaaaaaaattagccagtgtgatggcggccgcctgtagtcccagctactcgggaggctgaggcaggagaatggcatgaacccgggaggcggaacttgcagtgagccgagattgcgccactgcactccagcctgggcgactgagcaagactctgtctcaaaataaataaataaataaataagacctgcagggaaaaaaaaatccaaaccatacttgttggaagatatgcccttgtgtgtcaaycctaactcaagaaaagacatactgacttcccaaaacggcattccagataccacagtattaacaaaggcttgcagattgcccatcttaatccaggaaaatcacgggaaataaaatagatgatatgttctttgtaacaaatcctggagaatctgtctgcgatgtttcatttatggtcactgttctctaggataagataaatgtgacagagctagaaa

SEQ ID NO: 791392 - DNA, 613 bp, Homo sapiens
tcctagtgtcgtttctgctgagcagctggtcgtaaggacccgggccttcagctttccccgcatgctggctttccaatttgacatcactgaccaggcactaagagattcccaggtgctagacgaggtgagtaacatrtctgtccttcagcggcctttcacagcccacctaagggcaccctgcatccaagcacatttccattgcccagctgcatccttggtcggggggctgctgaacagtggtatcttcgtgggttttctctcatcgaacaccaccagcttaatccagttaaggaattcctcataacttagccctgtaggtatttccttaggggataacaggagttttcaactaaatagaacaaccttttttctacttcagttagccctataatgttcctcagtatttcatattggaaagtaaacaattctgtgcctgccagggaacaggaatcctgggaactgtttagttcaaaagcaccgggaaagtgagtggctggcagccagcaaccaaggtcatcttgacccaggaacacatgttagaagaatgtggaacattccgcaaatactgggtgcagggtttagcacccctgaagatcggtgatggagatgctgt

SEQ ID NO: 791393 - DNA, 331 bp, Homo sapiens
tataaacacattttgtaattcttgttcctctatataatttaagagacaactgcataaggtaataattacaaatctgtatcacccagaacatcatgtagaaacatctaatttgtatcccaataacagcacaaaggttgggggagggagcaaagctttasaggagcaaaactttgtctatgattgaaatggagttggtattaacctgaactagactgttcaggttattatcttaaattaacactcagagcaacgaggcagaaagtcaacaagaatgaaggcttgaacaacactatgaaccaactagaccgaacacatctatagaaaatccacc

SEQ ID NO: 791394 - DNA, 629 bp, Homo sapiens
caacttggaaatacttagtatatatcttctgtacttttatgcataccaccctttagtacatataaaaacttttttttaaacaagtttgagatcacattatgaatacttctttttcagcctttttgttttccattattatagcttagccatctttccacttaactaaaaaaattgacctcatctttctttagcagttatgagtacattattattacaatgtttttaagttgatttctcttcctttcttttcccaatcatgttgtaagtgtggcctaaattgcctattttcaggataattgtatattatttctgttaaatacatggaaataattaacgaagaagcatttagctgtattgagacaatatatgaaatactggccacagaacattatatggtgatattttctgttattcttttgaaagttttatttagtggtaacrtgtctataatatactttttccttccaaatttggaaaaatgtaaaccatttaatacgtttttaaaaatgcctaattgaaatctttagcagaatttttagtcttttaaatctttaaaaagtcagtggtttaacctatataaaatcaattcagtggctttaattctatttgtggttgaaaatttttggttg

SEQ ID NO: 791395 - DNA, 604 bp, Homo sapiens
gtatagaatataagcaggaaagtatcagagaacatgcggtattcagattctgaaggagtttaaggtccaattaagcaatttaggggaaacagatgcacaaagactcatgtcagagctactcccatttcctttctaatccygactaaatccaagactaacaataaccaccactaccacagcaacaaatcctgctaatagtatatacagctatgtgctgcataatgacagacaacatatgggatggtagtaccaaaagattatagtagagctaaaaattactatcttctagtgaagtcacagccatcatagtgtcatagagcaagacattacttagatgtttgtgctgataatgccagtgtaaacaaacctactgtactgctaattgtataaaagtatagcacatataatcatgtacggtacataatacttgataatgacaataagtgactatattactggtttatgtatttgctatactttttattgttattttggagtgtactccttctgcttatttttttaagtcaaaaacagcctcaggcaggtccttcaggaggtattctagaggaagatactgttatcatagtagatgacagccccatgc

SEQ ID NO: 791396 - DNA, 604 bp, Homo sapiens
gtatagaatataagcaggaaagtatcagagaacatgcggtattcagattctgaaggagtttaaggtccaattaagcaatttaggggaaacagatgcacaaagactcatgtcagagctactcccatttcctttctaatcccgactaaatccaagactaacaataaccaccactaccacagcaacaaatcctgctaatagtatatacagctatgtgctgcataatgacagacaacatatgggatggtagtaccaaaagattatagtagagctaaaaattactatcttctagtgaagtcrcagccatcatagtgtcatagagcaagacattacttagatgtttgtgctgataatgccagtgtaaacaaacctactgtactgctaattgtataaaagtatagcacatataatcatgtacggtacataatacttgataatgacaataagtgactatattactggtttatgtatttgctatactttttattgttattttggagtgtactccttctgcttatttttttaagtcaaaaacagcctcaggcaggtccttcaggaggtattctagaggaagatactgttatcatagtagatgacagccccatgc

SEQ ID NO: 791397 - DNA, 560 bp, Homo sapiens
ttaatgctataaatgtccctctgaatgctgttttagctccattacatacaattttatatgttatatttacattttagttcaggtcaaaatatttcctaattttctttgaggctgtctcttagatctcatggattatttagaagaatattttaacttacacytatttgagaattttgcagatagctttttgttattgatttccagtttaattatattagtgtcagagactatatttcatatgaattcaatttttaaacatttgttaggttttattttttgacccagacctggcctatcttggttagcgtttcatggtcactcaacaggaaattaaaatctacagttgtttggcagagcgtcctattaatgtcattacatccaactggctgctggttttattcagttctttatactggctttccttctgtcagcatgtttcatcaattactaagagaaaagtattgaagtcttcacagccataattgtagatttgcttatttcttgtttcagttctcagtttttgcttcatgtgctttgaagttttgttattaagaacatac

SEQ ID NO: 791398 - DNA, 556 bp, Homo sapiens
acataactagaaatggatggtaaagcatttattctggcattattaggaataggtgataggtcttgttagaatcaatttgaacaagaaaacatgtcagtttgagtgaaatgagaggcattaaatgtgattaaatcctgagatacacgtggtgggaaatgaggttgaaggatttgtctatgagaagattatgaaaagtcttgcaaactaatggggatccatgatcattaagaattttagatacagaaacartaaatagtaaaagaaaaattagagtctcatctttcgtacaatttcatgattgtcttctttattgaacagaagaggatcatgcaatctatagctgaaaatgccaccgttaacaaatttgtgagcaatgtgaaagagaaaacttgagcaatcaaatagttatttcatatttcacgtgcaactcttgggtatgttttttcacattaaccaagtggctcaaatatatatataatatccttacttacatcacctcagttcctttaactcttatcctcaagtggactttatttcatggaagagtactgttata

SEQ ID NO: 791399 - DNA, 556 bp, Homo sapiens
acataactagaaatggatggtaaagcatttattctggcattattaggaataggtgataggtcttgttagaatcaatttgaacaagaaaacatgtcagtttgagtgaaatgagaggcattaaatgtgattaaatcctgagatacacgtggtgggaaatgaggttgaaggatttgtctatgagaagattatgaaaagtcttgcaaactaatggggatccatgatcattaagaattttagatacagaaacaataaatagtaaaagaaaaattagagtctcatctttcgtacaatttcatgattgtcttctttattgaacagaagaggatcatgcaatctatagctgaaaatgccacygttaacaaatttgtgagcaatgtgaaagagaaaacttgagcaatcaaatagttatttcatatttcacgtgcaactcttgggtatgttttttcacattaaccaagtggctcaaatatatatataatatccttacttacatcacctcagttcctttaactcttatcctcaagtggactttatttcatggaagagtactgttata

SEQ ID NO: 791400 - DNA, 605 bp, Homo sapiens
ccacagtgtgtgtttactgattgtttaagaagagtaggttgtagagtcagtaatgtgggggacccgttcccttttccctggcctgcagcagcagagctgggtagtgaatttctctcactgcagcttagaagcctgtgtctcaggctttcctcagaagccaagacacctcagttttcagtactggccctgaggcacatcagagagtatgagacaacccctcagggaagtgtccgaggcaggctccaagaagtgacagcttgctcaaatcccagatccagraaaagcttctgacctctgtttcggagtgtgctgcacctttgtctggaaaggcagacctgccttcatgggctctcccattggtgttaagcaaggctaaatgggggctatatttcactctagaagtggctgcatttcaggagcagagtgtgattaagaaagatggatggcgggtaatatccgttaccaacacctgtaccgtgctcagggatctatttggcagaaaggggctatgtaagagcaagatcattaccatttgagctagaaaacaaaatgtggtggaggtggtgaaggatgggcggaaatgggagggaatggaggatgacaga

SEQ ID NO: 791401 - DNA, 618 bp, Homo sapiens
cccatcactgggggtatccaaagagggataaccactcaggaaggatattatagacttgattcctcattaggagggaagattagactagacaccttttgcagtccatgttagctccgaaattttatgatcttaaaaaaaatgaaaattaaggaaggcatagaaatttttgtaacattttacaaggtgtcttttacatccatcatttcatttgatctacatctgggtccctctttgaaatagcacaggtcaggggtgatgtaagatagtggatatgccatcagctttggagtcaagaccgactttgtttaaatcttgacatgactatagactagccacgtggccttggattagttcatgwccttgctaacaagtttaaaggggacaataatggccttgcagggttacatggtttaacacacaaaaagtgcctggcccccaggaccccttaagcacatgtgggttctctcctccatctatgctcttttacaggaaaggctcacgggagttagatgactcttttgaggtttcccagagcttgcaagtgatggggaagtcagacagagatttcaacctaggtctgtgagattgtggggtcttccctggggaacaattcccctc

SEQ ID NO: 791402 - DNA, 620 bp, Homo sapiens
cagatgctgcctgtgtcgctagcatgcagtctttagctgtcagcccttatggggactgcctcggcctcacctaaggtcctgcccctgctcggtatgacccacaaccatgactggttattgcaggagtatcaagatctaaatgtcttagcccartttgagccaatgctgaagggcctctttagtcctgagctccctatggggttggctgaagttgtcattgagcctgtagggcagctgaacttcttctccctggtcctccttctgccctgtcccttccaaggtgtcaataccaaagccactccttaaaaaacattctgcttgttgaactcagattctgttttcttagcaaacccagtttgcaatgacagttactcagtgatgaaactaacaattgaaccacatctatttatttctccatttaacctctttctgtggataacttcattactattaatagataaagtcattcattcatttacttattcaaatatttcctgaatcttccaagaagtgtgatccctttcttaatccctgccttcaaggagtttagagtacaataagcttacattagttgtttctgatataattgtcgtcctacatttatgtgagtgctgacattt

SEQ ID NO: 791403 - DNA, 608 bp, Homo sapiens
ggagcccaagaaaaaatcctctatccagttgacagccccagctcaggtccagcatagccagtgtcaaccaccaatggtgccagtcctagccccagacaggtaataaaggaacccttctgcaaatgactccccagtcccagatgccccatctgtctttgatcagagacaaaccagctgcaccctccacatagtcctgattcacaaatctatagacaaaacaagagtgtrtgaagctactgagttttggggtagtttgttataaaacaatagaaagctggaaccaggaaagtgagctatgaactgatacttcaaaaagggttaaggaggacgcattgtgtttaccagattgtctggtgttgggttaatcaaaaggcttcctgtgctgggaaaaccagaaaaacataaaagaatggcattagtgaagtgcgtcagggggcagcagttacttagagatggtggtggaagtgtcctccatacgatgctgtgattaagtgcttacagttttctttgtttttattctctatcttgattaaaattttgcagtgtttatactgccacacagaataaatggacccatagcttacatttcaaactgtgccttgctgaca

SEQ ID NO: 791404 - DNA, 608 bp, Homo sapiens
ggagcccaagaaaaaatcctctatccagttgacagccccagctcaggtccagcatagccagtgtcaaccaccaatggtgccagtcctagccccagacaggtaataaaggaacccttctgcaaatgactccccagtcccagatgccccatctgtctttgatcagagacaaaccagctgcaccctccacatagtcctgattcacaaatctatagacaaaacaagagtgtgtgaagctactgagttttggggtagtttgttataaaacaatagaaagctggaaccaggaaagtgagctatgaactgatacttcaaaaagggttaaggaggacgcattgtgtttaccagattgtctggtgttgggttaatcaaaaggcttcctgtgctgggaaaaccagaaaaacataaaagaatggcattagtgaartgcgtcagggggcagcagttacttagagatggtggtggaagtgtcctccatacgatgctgtgattaagtgcttacagttttctttgtttttattctctatcttgattaaaattttgcagtgtttatactgccacacagaataaatggacccatagcttacatttcaaactgtgccttgctgaca

SEQ ID NO: 791405 - DNA, 637 bp, Homo sapiens
agaaaggatgtctccagaacccaaatgtgaatcttgattgtttttagctcatcagggtgttttaattattccagttataatgcaacatatgaatgtgaaaagaagaaataaaactgagctcttgataatgttattggatcaataaattaagtaactaaaaaatccctacctcaagatttcctgttatctgagatgataataattcctcttggttgcctatattatttacattcattctagatttagcctctgaaagaaagaaatattgaagtttttatacttcaatatatattaaagaaaactaaaacactctaacttatttctatgrttttttgacatttcattcctgtttttaatatttcagatggaaaatatcaatgttcttataatttttcttaactttgtcttcagatttgtccattgtacctatcctgcaacttatctgcaatttagctactctttttctatttaactgacaatttcatgttgaattacagcatacatatagtgcaaaaatcttaactatataactcaatgaaattttctgtgactatacctatttaagcagctcccaggtaaaaatacagaacattaccagcaatcccctaatctaccttccagttaccgcttcaaactc

SEQ ID NO: 791406 - DNA, 577 bp, Homo sapiens
acaattctcaaaacaagatatacaaatggccaacaaacatatgaagaaaatgctcaatatcactaataatcagggaaatgaaaatcaaaaccacaatacgataccaccttttaaattttttgactaaatatgtttatttctttgataaaattattgagtatgtcaatccttattttcactaggatatttytgttcatattttgttcacaatttttttaatgctgaagttattgatttaattattattttataaaacatagaatccttagatattcctgaggatggcggtcacatgagcatatttctggctctttctttctaaattcattgaaatgattaaaaggaggtaaaaagtaaggcaaacttacatcagcaggataaggaactagtggaggatgttaatacatgccaggggctctaagaaagcaataggtgctcaaggaaaacaggtttaaaaagaaatcttaaatttcagaaaaattctagaagggtaagagctgaatatggaggaagtatctgagaaagcagagaatacacctattaatggcttatattcagtggaattaggaagtagagt

SEQ ID NO: 791407 - DNA, 573 bp, Homo sapiens
tgtttatgctggccttgattgctccactgaatatttactctttttatctccttttctcatattgcactctttagaagaaagtcactaggcacaccccacatgtaaggagtgagacttgtacttcacctgtggatggctgcatatctacatagattaactgaatttttctgcatggaatatttgtctcttttattaaaaaaattaatttttaaaatttacttttttatttacatcaacatgaatttgtgaatatttattttctactccatcttatagttcaatgcttctttacttttttgttgaccaaatttgtccataaggtataatttccattggctccaatatcyctctgacatagcagcatcactgtgatatttttgcataatccttactttatggaactacacaatgtttcaggctcatctcaattatttcctgccatagctctaggatccgtcatttagaaagttctgattttttttttttttgctgttgttgcagaatgtattagaaattaatccctgtgtgctacatgtgcttagtgatatggggcatcacagtttctaggtcctc

SEQ ID NO: 791408 - DNA, 608 bp, Homo sapiens
agtcttaaatctgggtttggtcttgttacttgttttgataatggatattagcacataggtgtttgctttcttatgcactgattaaatgctgagactgcttggcaaagaagcctagagtagccttctgaagggtgagaagccatgaagagcagagacaagccaacctaggtgagcctagaccaaccagcgtgacaacttccataaaatgagtgaggccatcctagaccatctagtgccctcaaagctgtcccaaaccagaaaatctaaagaattatcagaaattctaattttttggtttaatattttgaaacggtttgttatatattaaaggyctattaatacagataacaccatgtgtctactaaaggaatgagttgtctctttgagagtattaattattttgttcaattcctaacagctcatagtaaaaacagaagtggaaggaaagagtttgagtagtaaaatgaaataaaatgatgcttcctgtaattttcttaaaagatgcttggtgaataggcactttaaagagtctctgtgtcatgagaatttgtaagatgcatccatagggaaaccttaaagagtatattagaccaacaagaaagaaggaa

SEQ ID NO: 791409 - DNA, 568 bp, Homo sapiens
tggacattaccgccaaactctcatctctgtttttcattgccatttcattttctttgtcccttcttgctcattttcctctacttcactcctcccaatacatttctactcccagagaaagtttctaaaacacatctttggaaattccagtttatcttaatttcagctgaggagttgcattgtttttatatactgggaagtacctataatgctgtcaatcatttacattctagtatgaataagttcccaggcacatttgttccccacaccccactaccccatctagtttctggagggaccatgaagataatggrtattggagaagggtgccttcaagtggggaaaatggcaaaagaatggcgaagctaaaagcattatatgtgaatctcatcagctttacagtcttgcttaggactaagtgttgtccccacttaaaaaaaaatccattgtaattagttaatcagacttacctgcagataactttgtatagacaaaagagaaatgggtgtgatgatattaaaaaatacccagtcattgtttacaaacagtcagcacaaaggcttgcgggtaa

SEQ ID NO: 791410 - DNA, 612 bp, Homo sapiens
tggtggacacgtggattgttttcagtttttggctatgaaaaatctagctgctatggacattcatgtacaagtgtttgtatggacatatgcttttattttggataaatacctacgatatgaatggtggagcaatatgataggcatatgtttaactcttaaagaaatttttcaaactgttttcaaaagtgattataacattttactttctcacyggcagtatatgagttccatttttttccacatccttgccaacacttggtatggttagtctttttaattttagtaattctaataggtgtatagtattttcttatggattttcaaagttcaaattacctttttaactaatgatgttgaatatctgatcatgtgcacattcgtcattcatatatcttctttggtgaagtgtttgtttatggtatttccatttttatgaggttgtctgttttcttattgagttttgaaagttctttatatattctgcatgcaagtgttcaacaggtatgcaatttgcacatttttcccctcagcctgtggattgtcctttcattctgttaacagtatctttttaacagtatcttcttaattttggcaatgtatcgattgttttgt

SEQ ID NO: 791411 - DNA, 641 bp, Homo sapiens
accagttcctagatagtgtgaatgccttacaaaaacaaaataatcctaattattccctcctgtcttttgtatcatcgctgtcattcatttcacttaaatatagcatatataaatatatatgaggccgggtgcggtggctcacgcctgtggtcccagcactttgggaggccaaggagggcggatcatgaggtcaggagatcgagaccatcctggctaacgcggtgaaaccccgcctctactaaaaaaaatacaaaaaattagccgggcgcggtggcgggcacctgtagtcccagctgctcggggggctgaggcaggagaatggtgtgaacctgggaggcggagcttgcagtgagccgagatcgtgccactgcactctggccttggtgaaagagcgagactccgtctcaaaaaaaaaaaaaaaaaaaaaaaaatatatatatatatatgtataatcatgtgttgcttaatgacaaggctacagtctaaraaatgtgtcattaagtgattttgtcattgtgtgaacaccatagtgtgtacttacacaaacctagatggtctagcccactacacacctaggctgtatggtgtagcctattgctcaggctacaaagcagtacagcatgttactataatgagtactg

SEQ ID NO: 791412 - DNA, 569 bp, Homo sapiens
ccaagacagcccggccagcacgaggggacagcatgggcctagctgtgttggccgtggggcactgaagggctcacaggggacatggggaggatgcccattggccccacagcctggttctttgcagtatttgggttggtccctgctgcttcctatcatccctggctcctgctcattccccaaagctagagctccagcatccccctcaatcatttgagctttccagtatcatttcaatactttccaagaatgtccagggtcacaggccagggaagtaaaaraacattatttataaggcagggctccaaagctggtatatccctgggaagtgtgtcttggcataaacactagctggatctcaaggccctgcattcacccacaaattctcttcttcaccagcattgtgcttctgtcttaaaaggcagatgatcacctcaattctttttgataacagcccaaatcaaaaacaacgtcattaaaatgaaacaatacaaaactaagcaccaatgttcacagttactcctcctacctcccaaaatggtgagctaagatttgctggggtgtttaagaga

SEQ ID NO: 791413 - DNA, 594 bp, Homo sapiens
gtgagtgggctcccgtcacccgtcctggctcatttgaatacctgcatcacctccagcccctcagcagaacaagaatgtcagataatccagaatgctgttgagagctgctccaggttgggggctcgcagccccagcatccaaaagcctggtttcagcagggcatgcccgcagagcccctaggcgccccgagctctcctggtttgcccgggctttgcctgcacgggctggccccgtggactgcctggccaggccagcccagtaacagcgaagcacaccactctcagctcctgagcttggctgaccagctatactctggcatattggtgaatttcatgggccaaagaacctraggttcagattgtgtcttagttcattgtttcatatttgaatatgcagtttcctacctagcaattgtcatgagtactttcttgctgtttatactatgaacaacatcttgggctaggagagagtttttaaagtttcaacaatgattcattcaagcactttcctttttcaagttactcatatctcagttcattcaatggggttgggggatttatatcagaatcctctagacatttcatttataatatt

SEQ ID NO: 791414 - DNA, 499 bp, Homo sapiens
ttagaaagtcatttcatgtgtcttatatgtttggtgaatcaaaggcaaatgtacatgattgatggtgacagggaacacatttaactcattattctttactttgcagcaaaatgatttgtgtaaactgtctgcctagcattaaaggtaaagcaaacttagaaaccccaaaatgttatattttcatctaatattttcctcttggtttwatagctgtaatcacatatggattcttttatatgggtcttggcatggactgaacaaagagaaaggcagcacagaaagattacataacatatacacagagtccggtgcccagcgaggatggagcccgagaagcggcaatggtcaggacttaatgcgaaaatccagtagaagctgacactcaccctggcccttctcggctggcaggatatagtcactgatgtgaaataagagccatcttattgaacaagcctctggccaagcatcagtctgagctctttcagagataattggcctt

SEQ ID NO: 791415 - DNA, 564 bp, Homo sapiens
ggaccttccccgacatcagtcatttacaaaagtgttggcaacacaaaattgtaagcactgtaggtagggatgcctttatgccaccttagagggtggttttatatcaggattattcctctatcttctcccatcagtgatccagttctgacccagtctcaaatctcatcacaaatagaaagccaaacagcacctacctccatctcttaagaaagytgaaggagagaatttatagactgaggggtaggtgctttcatatacggataatctttcaaaaataccataagctcttccattttttttacagcaggtaaatagggagctaagagaggttcagtagccttccccaggtcttacagcaaatcgcgtcctaatcagagtcttataatccttgccctgtcccatcctgctgcccactgcacagccgcacaacccccctcacacttcacaaaccagggataacaggaagggtgagggctgtggtagcaattttggataatatagtggtccatgggtacttatagcagggaaatactatctgagatcttcagatgatcaaaattgaat

SEQ ID NO: 791416 - DNA, 608 bp, Homo sapiens
agattaatgtgaagaactaggagatttcaagctgaaaatcataaaagataagtaaatgagtaagggctactcatcctacttagtcccatgtttaccttaccagatacatttagtcatttctacttttcctcttgagagtcactaccaggttttaaaacatattttgatgcatacttgcagggagatttttaattattcatgaaattgcatttgtaacttcatagacacccaaagggaaatgttatgtcttggtgagtaaaattttaaatgtaaattatctactacaccacactttcaggaattgctgtacttgctctactatttgcagtgtgactatatactgtagcaccttctaactagaaaatcagacagtttctattgttgtagtattttgcttaattattatccttakagcagagataatatttaccaacaaaaaggaagcacaaaacttttactatcactgagtctgctagaattttttattgagtttggccaccatagctatgcaaagaaggttataaaggaaagagattttatataagaaaggatattttaggggaggtaaattcttgtcctaaagagaataactgattgtttaaaaagcg

SEQ ID NO: 791417 - DNA, 613 bp, Homo sapiens
aattgcatgcatattaagggacagtttgtgcaaggaaggggtcctatcttttggatcattgggtgccatggaaaggggaggtaactcctgggtgttgccatgggaatagtaaattgacacggcatactggtgggcaggaatgattgaaagctgctttcatcctggccctgttttagctagccatcaatctggtcccatgtccaagacccacctctggagttgactcccacctcctacctcagttgcacagtattgtaattaaacaaaatacsattaaagtgtacactttaaattgggtgatatatggtatatgaatttcatctcaatatttaaaatgtcataattttctgaattaatctatagatttaatgcaatcttaaaattcctatgggcttgtttgcagaaattgacaagtttattcttaaatttttgttgcgactgaatgaacacaaaaaagcccaaatagtcttgaaaaaagctttgaggactcatactttttgatttgaaaacttgacacaaaactacagtaattaagacttcaaaatgaggtactactgacataaggacagacagaccaatggagtagaattgagagcccacaaacaaatcctca

SEQ ID NO: 791418 - DNA, 642 bp, Homo sapiens
tttcaattgaataatttaattttttttaattaaaaaaatcaaattggtaaacttctcatgacagaccagctgcctatttttataaataaagttttattggaaccagggacaggactgggctgacaggtaaggtgagtcatgcaagtgcctatctggattataggctgtgtgaggactgcatcttgaagccggcctgaatcccattcctaaatcatactgggaatatttgaacagtttggaagtgttgttgtcctgtctttgttttaaatttcaatattttgtttatcatggatttttgcattagttttcattatttaaaaacatttcactaaaatattatttatcttgactactgaatttgctggtatccccttaaatatcacaatgtttgtggcaaatgtttcactcactccaccttagtcccatccctggttaggratagtgaagagagagagacttgtgacatgttttggaagtagagttgtcagggcttggcaatggttaggatgtggcacagatagctaggtaggtaagtcgatagatggggaaagaggaacaataatgattactacagatttttgacttgagcaattgaatgaataaagagggtcttttactgagaaaaataaggctggcgtataa

SEQ ID NO: 791419 - DNA, 575 bp, Homo sapiens
aggtagaatcaaaatgataaaggcctgctgctttctttgcttcacagtcatttgctatatttttttgcctgaaggaaaatggtagtggaagtgttttgtgattaaagattttgagaagtcagtcactgtatatgctatgtattttgcttagattagccatgatcattaaacgtcttaaaaaagcaaatcatgcctgatgtcaaagaaatatctatgagttcatcataaacataaacgaatgaaagaaagaattaattagtcagggccatctgggtggtaacagaatatttatggcctctgtacaaagctgctgtctgtgacctatgagtgtatagcatggaaaacatttttyctctgtgagatgccacacatcctgatactatctctgttggatccactctccttctgtggtgattataccagtggatctcaaagtgggctgggcagtagaatcatttgggtgatttaaaaaggtgtagattttttagtattgatgacaggactcctgcatcaggatccctatgggatgagctttgcaggagatcctgaagcagtgtcccagcagctgattattg

SEQ ID NO: 791420 - DNA, 633 bp, Homo sapiens
tgattcagtaataaacctccccctccaaatatatcccatcacctctactccctggaacattcttctagtttggactgtagaactgattccatctggaaccttcctttaccatactcctgggtattcctgttggctgtttcatgttttggaattactgtttamtgtgtcttgtgtctccccccccccccctttttttttcctttaagacagagtttcactcttgttgcccaggctggagtgcaatggcttgatctcggctcactgcaacctctgtctcccaggtttaaactattctcctgcctcagcctcctgagtagctagaattacaagcgcccaccaccatgcccagctaatttttgtatttttagtagggacagggtttcaccatgttggccacgctggtctcgaactcctgacctcaggtgatccaccctcctcggcctcccaaagtgttggtactacaggtgtgagccactgcgcctggctggatctaactttttttcctccttggtttactcgctcactttgatggattatgttgtcttgtgttttcccaagaaaagaattcaagggaaatgaattttttgagaactcgcatatctggctgtatttttgttggattcttatatttga

SEQ ID NO: 791421 - DNA, 624 bp, Homo sapiens
ccaaagtcagcaacctactaaaagggggatggttaacttggaactgcaaccatgctggtgatcagaaagagaaagtctgtttcctccttccatcatcaaggaggttgttggagaggacagactatatccttccttaaacacaccttcctttccccaagcagttccatcttccaagtctggcccatgaaagtggataagtggaaaaattttagtaaatagtttgggttatataaattaatgactgacctaaattttacattgcattgaggattaaagaaaaaaaaaagaaagtcctttctggccagaatgggaaatttggggttcawatgtgtgcagccttgagactcaagtaagttacatcttgtgtatatcagctctgaagctccccagccaaaaccacttagtacaaatgaaatataacaaagttgcttggtgggtattttactcaaacctagtaaagttctctttcatcctcagcacttttttttcaaaattttgtaattcacctcaatcttataatcccactctgaaatttcaatgttgcttctgataaaaaaaaagactagcagtatgatcctgagtaagtcacttaatttctctgacaattaactcatctgcaaaatg

SEQ ID NO: 791422 - DNA, 650 bp, Homo sapiens
tccactaaagataaactctaagactctcacttgctactacgccttgtgggcccatttgttataactttagaatgaaaaatttccccaaataatggagacaaaattgcaagataaaaaaggtacccaatgcaagacaagtacaagaaagagacaggtatttcagaaggcatctttgaagactgcatgcaatttctttagtttcaacagaaagaaccatctgtataagatctataacttcatagcatttgtgtaacatgaaatgctttcccttgagctttcccaagaatagagggaaaaggaaaacattcttgtttattttgtttgtttccctctcctaatttcacattttttgtgaaagcctgcacttggatgtaccaagaacaagttgttgatgtaataagtcaagcyggatcaattcaccacttattaataaaaatgaattactagtactcacatcctgctaaattttaaaaaatgttcctcctatctttgttttctcacactgctataaagatactacctgagactgcgtaatttataaacaacaacaaaaaaattgactcacagttccatacctcaggagacctcaggaaacttacaatcatggcagaaggtgaaggagaagcaaggtatgtcctatatggcggcgg

SEQ ID NO: 791423 - DNA, 587 bp, Homo sapiens
gacaaaaaacacacacttctattgatctagaaaggtatttatattttgatgacccacaagaaatatttttggaaataaagtttggactagctacctatatattacagatctgttttaatatttacaacataaataaatagatattaccctgtccaaaacaaaaatagcactgacaaaagatcgacatactcaacaagaccacaccccaacaaaggcctgcaaacgttgtatgtacaggcttttgaggaaaatgcagcagaaaaaattagctttaacaagatagaaacacaaacatatttaattttaaytaaatagaagtcatttgaatgtattgaatagttgttaatattatttttaacagcaaagaaatagctgaattttatttaagagctaactatgctgccaaaatacatgcaattctacctggtgcttaaatggttctttttcaccatcaatagcttgtaacctaaacaataccatatttaaaatctacatatctaccattccatatctagaatgaggtgccggggtgggaaaagcataacccttattgttgtaatggtaaggcagactagctccccatgcta

SEQ ID NO: 791424 - DNA, 601 bp, Homo sapiens
attctgattattagccagaatatgacaaaaaatgtatgaaggctgatctaaggccatcaaaatgaggatagggaaaacatctggaggtgttagcaggtaatttgtgtaggagatacaggatgtttggccatcccttgctgtctcctgtaaatttcttggtaaggttagagggaatagcattaaatttggtagagccatctggtgggggatagcagaaccaacagttaaatttaatatgtttgcaaccatttgggaatactgtaccagaacattttccatgcagaattttttttctatcaacacttaactgcctgaaaaartgaactttaacaccttcaaaagagacaaaaatatcctgtcttactattcataatgtacagcttccaataaaaatttacagatatgagtaattgctataaaatgtgattcataattaagaaaaatctattacagtaaacagatctagtaataacagagttgatggaattatcaatctgtaactttaaaacaaacttaaatgcaatagttaaaaatttttaaaaaggcagtgtttgaaaatagcagctgattagaaactgcagaagaaaggattgatgaactt

SEQ ID NO: 791425 - DNA, 622 bp, Homo sapiens
tttccagtatttataatgggttatcacaattttagatgtcctttacccaaggtgtatatatttaaggatttaatctaattcataaattatttattcttcccaaagtcatttttgctttgcctctgaatttcctctaggtcttttcgaacatcctggttttgagatacccagctgaatgtatttcagctcatttacacacatgtgtattttatatattgcttcctgccctgtagctctttgttttggttatgtttattcctaaactatgggaagggttatgtagctgcccagtaaacaacaaaaggcaggcatgcattttctaagacagacagtgacaaacaaaccctttgcttactctgaatcccaggttaatattacaaaccaagtaatatccaatataagaaattaaaaaattaaattatagccgctagctaactcaggcataatcaaatcattatgtagaaagatttcatattrtattcactggagctctcaaacaagctttatttgatatcaaactatattttcacaaatatttgttgttctcatttgaccaaataaaatatgaaagttgagctcaaacgttgtttataatagaatgacctctacttgggaatgcccc

SEQ ID NO: 791426 - DNA, 581 bp, Homo sapiens
actacttgctttatattaaggatcagcaaaaatcagtaagagtcactagagggtttcactcttttttttttttttgagacagaggttcactcttgttgcccaggctggagtgcaatggcatgatctcagctcactgyagcctctgcctcccgggtttaagaaattctcctgcctcagcctccagagtggctgggattacaggcgcccaccaccacactcggctaatttttgtatttttagtagagacgggttttcaccatgttggtcaggctggtctcaaactcctgacctcaggttatctgcccacctcggtctcccaaagtgctgggattccaggtatgagcccccgcgcccagccagggtttcacttttcaacgtgtgctgcactcacctgatcaccttcaactctaactgatagtatcaaggacaaatcaataaaagttcaaccaaaaggttgtctggccattgatttttaatgttgcatgttcacttccggtcaatgaaatggtagatcttgtcattctgcgactttgcactcttcattgtcttttttttttttttttaaacagggtctcactctg

SEQ ID NO: 791427 - DNA, 581 bp, Homo sapiens
actacttgctttatattaaggatcagcaaaaatcagtaagagtcactagagggtttcactcttttttttttttttgagacagaggttcactcttgttgcccaggctggagtgcaatggcatgatctcagctcactgtagcctctgcctcccgggtttaagaaattctcctgcctcagcctccagagtrgctgggattacaggcgcccaccaccacactcggctaatttttgtatttttagtagagacgggttttcaccatgttggtcaggctggtctcaaactcctgacctcaggttatctgcccacctcggtctcccaaagtgctgggattccaggtatgagcccccgcgcccagccagggtttcacttttcaacgtgtgctgcactcacctgatcaccttcaactctaactgatagtatcaaggacaaatcaataaaagttcaaccaaaaggttgtctggccattgatttttaatgttgcatgttcacttccggtcaatgaaatggtagatcttgtcattctgcgactttgcactcttcattgtcttttttttttttttttaaacagggtctcactctg

SEQ ID NO: 791428 - DNA, 561 bp, Homo sapiens
actaactagataatgctgcgaactttggagctacttttagtaatttaactgagatgacttaaccaagaatcagaattcagtaaaaggcagttgccatgcacaagaaaatcccagctactcaggaggctgtggtgggaggactgcttgagcccaggagtttgaggctgcagtgagccaagatcgtgccactgcactccagaccctgtctcagacaaacaaaaccaatatgtgakctggtccagaggatgagaaagaagaggctggaaagcaaagacagagcaggcaggatgttctccagatgaaggaaacacaagcagagaagctcagagctcccagagagacaccagctccagatacaggagcatggctgtttgctactactgatcagttgtaatggatgcttcgagtaacctgttactaaaatctgctcctcataattcataaattatttttatgttttaatatagagtggactggatcttattcctgtgatgacaaagctttactccctcatgttcttcatctattatcctaagcaggagaaaagactgcagaaccaca

SEQ ID NO: 791429 - DNA, 568 bp, Homo sapiens
ggcagctctcagggtggagctggtgtgtgctgacgtgaactgatcagatccatgttttaggctgcctttctcaggtgcctacatggccacatctgttctggtggagaccagcaaattactgaagctacatgtgtagtttaaagtgacatgccacctaacattgtactacacagtcacagactctcccctaggctcggatgtgaggaggactttttctggygctaatcaaaacaagaatattgagatgatgcttgtaggacttggtgactcgagaaccacgagaaccaatttggaggatggaaaacaggcccaggaaaactcgggaaagaaattcagacagcatataaatgggaaatattaaatggcaaaccagagtgacatgaacaagattgaaatttggttgaaaagtgaaaaattccgttaaatgggttatttggcatcatgtagattttcttagattaaaatttggactgaaaattgagatcagtttgcctttttataactactgtgcccattgaagtaggttgtcattgtagtcggaatctaaactggttggttagcttaggct

SEQ ID NO: 791430 - DNA, 585 bp, Homo sapiens
agccctcacatcagcatttaattatcagagacctaatcaaacaaaagctgccattctcagttccttacatygcttcatctccataaagaagaaagcacagtcctctttggtgtaggcagaaagacttcattcaaacccagtgaactcctgaggttggctgtccagtctttctccttctctcccttgcctgttggctcttggctattcactgctcactaccacatatcactaaaatgaagagaaaacactaaacctttacaatgtaaagaacccttataaagtccaggagagttgaaactatctgttaaatgtgagattgggtatgctgtgtgggatttagttatctagactagcactctctctctctctctaagaataatgagggcaagtaaaattatgtacataaatactatggctttgaagaaaataaaagtatctcaatattttgcttttgtggatattataattcatagtcatcaggaagaatattaaaataatctcacatcactgcagccagaaagtattaatcacgatactaaaagagtccgattcaagggtaggccccagagcatatcaccataataa

SEQ ID NO: 791431 - DNA, 636 bp, Homo sapiens
atacaatttttattttattgaataatggaattcagtgatcattccttaacaaattaggatacttggccagtcagtaaccatagtgatttatcaaacactagagatacggacgaaagtgggccatcctactcctcagggtctctgagaatatacaacatactatcaccaaggaagctgatgcaacattaaaatatatatacaataccaagattgggaaaattgaaaacaaggcagcagacagtgttccaaaataaatgyatagatgaaataatcagcagaggaaatcttacttgatattgaggaatggctacttgtttccggcacacctgcatctaacgtaggggcagatgaagattctcgtggcatttccaaagttgaaagtcctttagtagaaggatctacaaacagaaatattatttaaaactcaggacactgattaaaagcaagttcaagaaccttttctatatcttttacctcttgtctactacaaccattcaactctttatacactttcctggcctaataattactttcatggaattacatatacactagttacaatgctccagggagagctgactctatgtgacattctgcacctatggatctgccttttggagattaatgatagcaaaa

SEQ ID NO: 791432 - DNA, 621 bp, Homo sapiens
taataactgctgcattctattcaattaatcttcatcagtattctaaatatatgaagacaaaatttcctggttcttacagcaccagtgaaagtactccttacgtctaatcatacaaattgtagtagcagttaaaaagattgtgtatcccatcaattaggatgaaatgaaggtgctgaattcctacgggcagttacttgccttgttacagagctcaggacctctgggcttgagacccagaacagtcaccaacaagcttgttcttttgtgagaatcagtttcttcctctataaaatgagattgttaacacatcactaatgtttcagctataagattctatgaattttatttagatgcacaaagcctttgatttgaaaagtcatagagaaatgtgactctctgcaaaccttgcagagtatactttctatagaaaacagaattttctattccattttctgtgggtatyatgtaaaggttaagatcagagagtcataaattgtaaatccactgccaaaaagttcaacctaaacagcaattaaatttaaatcttgttgtataaaggggaatctgctttatttcaagtctaatcaataagaggtccgcaaagaggagctcattacttgg

SEQ ID NO: 791433 - DNA, 607 bp, Homo sapiens
ggtgatttagtaatgaatttttaattatttgtccttcatgagtcattactaatcattagagtttatctagtcatttggtaatttaaggaaaattttattctctttaaaactataatataaagaaagaccttttatagagcaagtatatatggtcttttttaaaatattggcaatgaagcttatttttatttataaattatctggtgaagatgagcagaaattcaatttctcagcccgatttctctatttcaaaagcaatcattattattggtttgtcttagggggcttgtgtggctgcttctatcagacatgaaaaaaaaaatacattccaaatttcaactgtccctccttagccatgataggtcttattgtctaagtcttattcagaaagctcttaggatacaaggctggtggtgcaaactttggtgtcctaggacttaggagcaaatgtttcttytaagttgcatgccaagcatcaatgcatttgctgccttttacatttcaaaaacatctactgttggatcagggctttgctaccccagcaaactaggaaaagcaaccctaggcatttatacccctgaagtgattctctagggaatctgaaagc

SEQ ID NO: 791434 - DNA, 686 bp, Homo sapiens
gtcttggatgcatgagagcaagtgatggcaggaaggctcttcctcctgccttcctcacacatgatactatggtgtgacatcacagaagatggtcctgtgagcctgagtgagctgctgcgctggcttcgggtggcagctggctcagtaacgtggccgctctgtggcctcacctttgggcagactcacccacatcaccaggctcatgacagcccccattgagtgactggcttcctgttcctctaccatcctcccacttargaagtagctgaccagtcctgtgacacatggaggatgccctgtctccatgcctggcacaagtggtgtccacagcctgtgctccagacacctatggctgcctttgtctgggagatccagctctgtgagggcctgcttgtgggggcaggtggagccgcattcccagcctgtcctcctctcctctccgggctctcctctggggctccttctgctctccatcatatgttcatccagtcagtcagtccccagatccttaagtggctctgctaccagccaggtaccacactgaacacagagttcagcttcccaaaccagaggccccagctggaaacctcagaggtccccagctccttcaacctggtgagtcctacttgggccctcccatctgctctccaacccacctccacttacccagctcctccccataccat

SEQ ID NO: 791435 - DNA, 618 bp, Homo sapiens
taattaaacatgtactgtgtgccaaaccatgaggagacagagatagcacgtatgctcaaagctgtcaccgtttacaagtgagataaacaaatgcacaacttgactatgagacaaaatgttcacggaagctcagccaagcatgactgagacggagaagggttctgtccagggagaggcctttcagaagagttkgttagccagatatgaagaatgatcacttctgtactctccatactgagcctgaatggtcctctgcaatttgtataaggatgaagatttgaagatcactctttctagaactcatatgaacaattaaacatctgagggcttgttttcctctgagaagcattaagatctcagagctcccagaagaaaaaggaagccccttaataacaaacattaaaaaaaaaaggtcttttgccctcagggtccttcctagaggtggacttcaaacaaattgtgtattcctctcatcaaatggccagaaagaaagccttttcttattcataatttcagttttaagtgaagttagaagctgtagaactttagaaggaatggttgtcaggaactaaactctagctctataaactggttttaaaaaaccccaggctcacaaag

SEQ ID NO: 791436 - DNA, 576 bp, Homo sapiens
tcctccctgcgtcagcggcggcaccagtgccattggtgaaggcttgcagtggactgtgccaacccacccaccagcaatgcgtctggcccttcatagaatcgaagactcccattcagctaagagagatcaagattgtcccccaaactagaaagctgctctcaacacagagttttcatttcgtacctgtcaaaagagcagtttttacttatttagacataggtttttattgatatcactcctttgtatacttaactaggaaaataaggcaaaaacaattggtctcgattcctctgtgcttcttcagggtacgtctgtcttcccagtcaccgctccaagcaggactgcayggttggcctccttgtgccacatcctttcctgtggcctcaggggcctgaattgggggcgttgtgagggtccccaccaacgtctgccagcggcttctgtcccacaagtttctatgcagacaaggagacaatgcagccaggcgtgtcctgaatccagaggtggtaaaatggggacaaacaggcctcttagagctgggaacacgtggtgtgtggcatctgtaaatacatgggt

SEQ ID NO: 791437 - DNA, 590 bp, Homo sapiens
agttaccatgtgtcctagattccgatacctgtccaatacaatttctagaactttttcacctccccatcatgtctgccttctagtgccccaaaattatgtgagaggctagatgttgtttgacctgtgattgttcttgcttccttggtccttacgtacgagtacatagcatgattgggccagaatccgtcttttgagctcttctagtaaagtaagttttgagataatacctaagaccacatggaaatttggttggtctaagtagaggacaagcacrtatttaactacctttggcaggggaaaaagtgaagtgggagagcttaccagtgctacctatgtgtaggctgacactctgaaacttcagtctccaggaatctccatatgttggcactattttgttgattatttttctataaggttatatttctttggaagatcagtaaacttgctgttctaacccaaattcagtgtagtcttcagcttctgaataaggaataaaggaatcgaatgtgctttggatgttcttttaacaatttcagaatgttggcatgccctttgagcatctaaacttccctcagcgaattggtatttat

SEQ ID NO: 791438 - DNA, 654 bp, Homo sapiens
ttctgtagatgatttatcatattatctagccactcgtgtggaaatgcatggaggtttggttttatggcaaatgttgtttaaaatatcaggacatgttcttgtaccacgtttagggtcgtggtatgggaaggctgtctgcaaaagatgaggaagtttgagcacactgggttattgtggcctaaacaacttgagggtaatgaaagccactcctgtagggctgcttctagccgtgccagcaccctgctagaagtgccatgtgtgttctagcacactccatgtgctacatgctggcatgggattctgacaagaatgttggggtaggcactgctaccactgttgcacaaatgagaaaactgaggctgggagaggctgggtcactttgatctccttatgctgctagtaagtgacmgagccaagatgcacacccaccttggcctgaaacctgagccattcactttcttctccaccccaggctgcctcccgaactccatcattggagtccttgggtaatgactgtcatctcttcatggctgtttggatggcatcactcaccttttcttacatttctctctgagcaactttcttttcttttcttgtaggtcttaaatccctctgttctagtttacagactcagagatggaaaatattgagtat

SEQ ID NO: 791439 - DNA, 640 bp, Homo sapiens
gtttgctaattatttgttttgctgtgcagaagctttgtagtataagtcctatctacttatctttgtttttattacatttgcttttgggttcttcgtcatgaagtctttgcctaagccaatgtctagaaggatgtttccaactttatcttctagaatttttatggtttcaggtattagatttaagtcttttatccatcttgagttgatttttgtataaggtaagagatgaggatccagtttcattcytctacatgtgacttgccaattatcccaggtccatttgttgattagggtgtcctttccccactttatgttttggtttgctttgtcaaagatcagttggctgcaagtatttggttttatttctgggttctctattctgttccattgatctatgtgcctatttttatgccagtaccatgctgctttggtgactatagtcttatagtatagtttgaagtcaggtaatgagatacctccagatttgttctttttgcttagtcttgctttggctatgtgggctcttttttggtttcatgtgaattttaggattatttttcctagttctgtgaagaatgatgatggtattttgatgcgaattgcattgaatttgtagatcgcttttggcagtatggtcatt

SEQ ID NO: 791440 - DNA, 636 bp, Homo sapiens
ggagtatgccagatgaatagaaagaaatattagccaccaaggccctctcaagtgtacgtgtgtatacatgtggcctacgtgctctatgatacccacatgcatccagagacatttcacattttaaaacttatattttattcttaaaagtggaatggggaggaattataacaataaactgcgtttacttccttaggacacggtccaaaattcagggcttcaggtttgtaggatggaccctggccacagaatgtttggtcacaaatgtgtgaataaacggctcaaagtgtgatttgtaccttttacttgcagcacgcttctatcattgccctgaggtctttagaaaaaactttttgaagtacccttcattagagaggaacatgcagaaataagaaatagacacttctgtaattttcttttggaagaaattgaaaatgaatattcttaatgtgtattctccaccagcttagtcaccagrttgctagacagacatctggctcttaggtcagccagttatgaggcctctttgctgtttgggttcataggaaaagaaaattcttacttaaaattctcattattctccagccatattccagcttatatattggaaaatttttttaatttaattttaatttaaaa

SEQ ID NO: 791441 - DNA, 519 bp, Homo sapiens
aggacatgcatgtgagaaaactacccaaagcttgggaaagaccacatagaaggagcagaggaaataatccctgcagcttacacagactcataagtagttcatattcccatcagccagagtggaaagccacataattcacggagtatcaggaaaagtacttaacaaggtaccttagcatagtaacccagcagcaaggaaaaattagaytaaaggttgtactggtaacaccaaaaaaaaaaaaaaaaaaaaaaaaaaaaacttaaaagcaaaccttaaaatcatcaaagcatttctacatattctgcatctcagaacaagcctcaagactatttataagaatacaaatatagcaatcatccaaataaataaaatatataatgtctgatatctaatcaaaaattaccaggcgtgttgcatacccacttcatagcagcagtattcacattagccaaaaggcagaagcaatataagtgtccattaatggacaaatggaaaagcaaaatgtggtacatacataca

SEQ ID NO: 791442 - DNA, 519 bp, Homo sapiens
aggacatgcatgtgagaaaactacccaaagcttgggaaagaccacatagaaggagcagaggaaataatccctgcagcttacacagactcataagtagttcatattcccatcagccagagtggaaagccacataattcacggagtatcaggaaaagtacttaacaaggtaccttagcatagtaacccagcagcaaggaaaaattagactaaaggttgtactggtaacmccaaaaaaaaaaaaaaaaaaaaaaaaaaaaacttaaaagcaaaccttaaaatcatcaaagcatttctacatattctgcatctcagaacaagcctcaagactatttataagaatacaaatatagcaatcatccaaataaataaaatatataatgtctgatatctaatcaaaaattaccaggcgtgttgcatacccacttcatagcagcagtattcacattagccaaaaggcagaagcaatataagtgtccattaatggacaaatggaaaagcaaaatgtggtacatacataca

SEQ ID NO: 791443 - DNA, 645 bp, Homo sapiens
attctgcatctcagaacaagcctcaagactatttataagaatacaaatatagcaatcatccaaataaataaaatatataatgtctgatatctaatcaaaaattaccaggcgtgttgcatacccacttcatagcagcagtattcacawtagccaaaaggcagaagcaatataagtgtccattaatggacaaatggaaaagcaaaatgtggtacatacatacaatggaatagcatttagccttaaaaggaagtaaatcttgtcatgctacaatgtggatgagccttgaggatattatgctaagtgaaataagacagtcacaaaaaggcaaatactatattagttcacttatctgaagtatctaaagtagtcaaattcataacaacagaaagtagaatgatagctgcccagggttgcgagtaaaaagatataatggagagatgttattaatggatatagagtttcaattttgcaagatgaaaaggctgtggagatctgttgcacaacaatgtaaatatacttaacactactgaactgtaatatatatatatatatatatatatatatatatatatataaaatcaggcatgcaaagaattcatactgaggagaagaaacaatcaatagaaacaaacttgaaagtgatag

SEQ ID NO: 791444 - DNA, 548 bp, Homo sapiens
aaagtaccatagactgggtggcttacataacaagcattgatttctcacagctctggagcctgggatgtccaggatcaagatgccaggagactcggtgtcaggctgccttactgctgtgtggtcacttgcagagcaagagcaagctctggtctgttccttttctcataagggcactgatcccatcatggagaccccactctcatgacctyatccaaacttaactacctctcaaggtcctacatacaaatgccatcacactggggattaggttagagcttcaacatagaaattttgggatgacacaacattcactccttaaacacaccacacgttacattggtttgtaatgtgtcttgattgtcttttaatacagagcaggcccccgttcccgcttcatgtccttgttgcagaaactgggtcggttgtcctggagaatgccccacattctggatctgtttattggctctcttgtgctatcatttaacttactcctgtacccaccgtgtttcctggaaatggaagttagttccagaggatgtatcaggttc

SEQ ID NO: 791445 - DNA, 638 bp, Homo sapiens
agcaaatctgataggttcacaaatccctcacaaaggaaggttaatagaagccataattctgacaccttctcaaattgtgggaagcaagtcagaggccacacaacaaacccagctccattattaatttcacacttgagtagtaccacatagttaagcattcactgcatgaattcaaatcacagcagactattggtttcagtaataatcaaaaaggaaagttaagtttaaaaaaaratgaaaactgtagaatgcaaggctttctgtcattaaaagtcacttttaccaaaatatagatttatcagatttaatcataatgttagtgtacataataaaaactatcaaagaggccaaaatttttattcaccatctgagtgaataaaagtatgaaagtaattttccagataattctataagtgactattcttcttgcctgaaatctgaattagggtgaaagtactctcctccctttttctatccctaattgtcatactattttggcagtttgctcaattctttactttgatagtgcaaatttcttgcagttattaaatgttctcaaatgatttcataatccctagaaagctcaggaaagcattgtatgcttagaacaaaatatcaccattcaacagcagccagaa

SEQ ID NO: 791446 - DNA, 621 bp, Homo sapiens
ctggattctaaagcctgggaaaggccgggtcatggattattccacagagcctatagaaggaatgcagtcttccaatgctttgattttaaatcagtaagacctgtgttgaacctctaacctggaatactgctagacaataaatttatgttgttttaaactactaagtgtattgtaatttttataacagccacaggaaaataatacatttggcaaatcagtgcatgtttcatgatggtcaatgatatgccccagggtccatcttagtcatgatttctatcccttcaaaaaccaaaacaaaataaaaaagtaaaacaaaaagaccaattttaccatataacttgatttttaamaatattttatatttatttaatccattatatccaaaatattgtcatctcagcataaaacaatattaaaattattcagctttacattttttaaactaaatctagtttgtattttacatatagcgtaaatcaattcaaattcaccatatttcaagtgttcaatatctacatgtcactagtaatgactgtagtggacagaattgatccagatttccaggtgtattggtataaaactaaccatatttttatcttattaaaacaaaacaaaacaaaa

SEQ ID NO: 791447 - DNA, 621 bp, Homo sapiens
ctggattctaaagcctgggaaaggccgggtcatggattattccacagagcctatagaaggaatgcagtcttccaatgctttgattttaaatcagtaagacctgtgttgaacctctaacctggaatactgctagacaataaatttatgttgttttaaactactaagtgtattgtaatttttataacagccacaggaaaataatacatttggcaaatcagtgcatgtttcatgatggtcaatgatatgccccagggtccatcttagtcatgatttctatcccttcaaaaaccaaaacaaaataaaaaagtaaaacaaaaagaccaattttaccatataacttgatttttaaaaatattttatatktatttaatccattatatccaaaatattgtcatctcagcataaaacaatattaaaattattcagctttacattttttaaactaaatctagtttgtattttacatatagcgtaaatcaattcaaattcaccatatttcaagtgttcaatatctacatgtcactagtaatgactgtagtggacagaattgatccagatttccaggtgtattggtataaaactaaccatatttttatcttattaaaacaaaacaaaacaaaa

SEQ ID NO: 791448 - DNA, 558 bp, Homo sapiens
gcaacaatgatcatattacttttatttactatgagcttcagctgaaagtccaaaagaaactttaatttcagatatttaatgaaatcattatagctgtggtaatttcctttagctgggtgtgagtgtgtgatgtgagcgtgtgatgtgtgtgtgtgtgtgtgtactctggcagcatattccaaataattkctgtaaaatttcagtttgaaattaatagaagacatattaagttgtttaaactctttgttatttaaattctatattactttagttgattactctgtattattacggcaaagctttgatatgttgccctgaatttaaatgaaaaggctgttcggcataaaaacaggaatattttattaccaaaaagaattaactaccatatgtcatttacagaaaagagtaaattcttcagggcatagaaaatacacatttccttctgtttgtgtggaaataagcaaaatacctgttataatagattcctcacagaattttgtgaagcttcaggtaaacttgaaagagaaaaattaaaattctagagtttcataattacaa

SEQ ID NO: 791449 - DNA, 558 bp, Homo sapiens
gcaacaatgatcatattacttttatttactatgagcttcagctgaaagtccaaaagaaactttaatttcagatatttaatgaaatcattatagctgtggtaatttcctttagctgggtgtgagtgtgtgatgtgagcgtgtgatgtgtgtgtgtgtgtgtgtactctggcagcatattccaaataatttctgtaaaatttcagtttgaaattaatagaagacatattaagttgtttaaactctttgttatttaaattctataytactttagttgattactctgtattattacggcaaagctttgatatgttgccctgaatttaaatgaaaaggctgttcggcataaaaacaggaatattttattaccaaaaagaattaactaccatatgtcatttacagaaaagagtaaattcttcagggcatagaaaatacacatttccttctgtttgtgtggaaataagcaaaatacctgttataatagattcctcacagaattttgtgaagcttcaggtaaacttgaaagagaaaaattaaaattctagagtttcataattacaa

SEQ ID NO: 791450 - DNA, 548 bp, Homo sapiens
atgtaccctaaaacttaaagtataataaaaaaaaaaaaaagaaaagaaaaaaataaataagttgtatggctgaagtttgaacatgggtctatctaaatttaattaaccctctgaagcactatatcaccctaaacaaagtggagtattttacrtatatcctgattgcatgatgaaataatgcccggaaaacaagaaatatgcatacacacacacccacattcagaagttagcattaataaaatgttaactagaatttttttttctcattcctttgttcatgcattcaactacttattcattcatttatgctattatgcatctactttacaatagtagctgctatataaattctggggatagaaaggcaaacaaaacaagtttcctgcctttgtggattattattctaatgattaatacaaaacaaataataaaatagtgtataatgtctgatcttaaaaatgtcataaagaaaaataaactcaggtaagtagatagagaataacaagagaatattttaaataggtgcagtaaaggcagtaattgaggcc

SEQ ID NO: 791451 - DNA, 589 bp, Homo sapiens
gaaaaattaagtgttcttaattttgtgcttgaaatacagaaatacattttttttgcacacagatgtctacttctaaaactgataagcccatgtgtcttttttctaacctaaatcagcttataatatcgttgatcataccacattgctaaaggtcaaagcactttttaacagatgtataggtactttaatgtcaagtcagaaagaaacatgctcccttattataaaatatttactaacagataaaatataacacccacacagatactgaaatgttgttctaatgattagccrtccttttattaattagtttatttttgaagccctttgtataaagatggctagatccctggaaagctggtaaactttttagatttatttttatctataatcacatccaaaaacattgccagatgtattaggctgttgttgcactgctataaagaaatacctgagactaggtaacttataagaagagatatttaattggctcacggttctgcaggctgtgtaggaagcatagtgatacctgcttctggagaggcctcagggagctcttagtcatggcagaaagtgaggcaggaccaggccc

SEQ ID NO: 791452 - DNA, 559 bp, Homo sapiens
aaaatgtttggattactagaaacaatatatttttttttacttgacaaactgcatcaactaaaacttaacatcgcttcagaaataaaatgatagaactaatctcattaagttaaagagtacaataaactgacctagaatcactatttctctctgcatcatctaggagatcctaggcacccaaaattaaaagaaattagcaagatctgattatccagtgatgtattrgagtctgttgaaatgggttaacattaataaatgaaaagaatatgtttatctgaagtaccgtcttatttctggtcagaaaatgagcaaatcacgtaggtgcttacacttgctaaactggacaccacagaccaaagctgggacataaatctagtagaacaaaatgtcaatattcattattggttatagcttaatatagaagtacagacacccgctgattttactctctgcaccagcacatcctcaacaaagaattcagggcacactgtcacaatggaagctatagccattgaagttgtgagcaatacctatgactcagcggagagttgaagatttg

SEQ ID NO: 791453 - DNA, 627 bp, Homo sapiens
aaaggaatagtgactcaggttttagagagagctgccaggtgaagcaaacaagcaaaacaattgcatgtttaaaaaattaaacaagtagccaacatttggaaaattatattatggaaaagaaaaacctttccaaatttgcaggataaagtctctgaaagtgtcgaaagggacttaaaatgagaagctacaaatatgttcattatcgaacaatggccatgggtaaaaaagcaaggagtgctcaagaagggaagaaaaacaaaatggaagagacagactaacaccacatggataaagagactttattatattttaaaattatatacagtaattattatatacattcattcataaattctatataagtaaacattctaatcacagtgtttcaattccatttttctcaaaacrcacacacacacacacacacacacgaaaagcctgtaacctttgaaagcctaaaatgtaggagttcctccaggtactcacttcatagttcagatggatcttaccagattattagcaacaagaattcagtgcctatatcacagttaaaattatagttaaaatatttaatagagggacacccaccctcaatgcgggtgggcaccatccaattggtcaggggta

SEQ ID NO: 791454 - DNA, 593 bp, Homo sapiens
aaacatactgtaataatttaatccaatggctcatctacagcacctaaaaagattacagcagattctcattattcagtgtagttacggtctagaaagttccatgaacaaataaaaagttaggtttcagcaagctactggtcacatttttgtaagcttaccaacacctacttttgttgtatgtgtgcttatttaatatatattgttggccaggcacagtggctaaygcctgtaatcccagcactttgggaagccaaggcgggcagatcatttgaggtctggagttcgagaccagcctggccaacgtggtgaaaccccgtctctactaaaactacaaaaaatatatatatatattagccaggcatggtggcgcatgcctgtagtcttagctacttgggaggctaaggcaggggaatcgcttgaacccaggaggcagaggttgcagtgagccaagactgcaccactgcactccagcctgagcaacagagtgagactctatctcaaaaaaaataataataattaattaaatgaagaataaataaataatatacattgttcattcattaacattgaactcacagccaatggcactacag

SEQ ID NO: 791455 - DNA, 545 bp, Homo sapiens
cagcagattctcattattcagtgtagttacggtctagaaagttccatgaacaaataaaaagttaggtttcagcaagctactggtcacatttttgtaagcttaccaacacctacttttgttgtatgtgtgcttatttaatatatattgttggccaggcacagtggctaatgcctgtaatcccagcactttgsgaagccaaggcgggcagatcatttgaggtctggagttcgagaccagcctggccaacgtggtgaaaccccgtctctactaaaactacaaaaaatatatatatatattagccaggcatggtggcgcatgcctgtagtcttagctacttgggaggctaaggcaggggaatcgcttgaacccaggaggcagaggttgcagtgagccaagactgcaccactgcactccagcctgagcaacagagtgagactctatctcaaaaaaaataataataattaattaaatgaagaataaataaataatatacattgttcattcattaacattgaactcacagccaatggcactacagcactcac

SEQ ID NO: 791456 - DNA, 591 bp, Homo sapiens
acatactgtaataatttaatccaatggctcatctacagcacctaaaaagattacagcagattctcattattcagtgtagttacggtctagaaagttccatgaacaaataaaaagttaggtttcagcaagctactggtcacatttttgtaagcttaccaacacctacttttgttgtatgtgtgcttatttaatatatattgttggccaggcacagtggctaatgcctgtaatcccagcactttgggaagccaaggcgggcagatcatttgaggtctggagttcgagaccagcctggccaacgtggtgaaaccycgtctctactaaaactacaaaaaatatatatatatattagccaggcatggtggcgcatgcctgtagtcttagctacttgggaggctaaggcaggggaatcgcttgaacccaggaggcagaggttgcagtgagccaagactgcaccactgcactccagcctgagcaacagagtgagactctatctcaaaaaaaataataataattaattaaatgaagaataaataaataatatacattgttcattcattaacattgaactcacagccaatggcactacag

SEQ ID NO: 791457 - DNA, 505 bp, Homo sapiens
attcccctgctgccaagcaggcgaggggagcctttgatgatgccacctcccttagagctggggtaccgggtcacggctgaagacctgcacctggaaaaacaggcggcattccagcgcatcaacagtgcactgcacgttgaggacaaggccatctcggactgcagaccctcacggccttcccacactttgtcctcacttgcaacaggggcttcgggtgggcctcccgtttctaaagcacccactatggatgcacagcaggacagacccaagtcccaagactgcctgggcctagtggcccccctagcatctgctgcagaggtctcctctacagctcccgtgtctgggaagaagcasagaccaccaggacccctgttctcctcctcagatccccttcctgccacctcttcccactcccgggactcagcccaggtcacctcgatgattcctgcccccttcacagctgcaagcagggatgccggcatgagaagaacaaggtcggcccctg

SEQ ID NO: 791458 - DNA, 605 bp, Homo sapiens
tatcattttgccagttatatcttaacaggtataaatattgaaacctccttagcgaaaattataacggtgagcaaattatgacagcggaggagatctgacctaaccatctccttcttgccttttaatctctaaactgtcctgggtcattttggggcatgggtcaagctaactttaggagaaatttagtttatagtttaaatgatgatagaccttcccaaaactaagtcatctttgtaaaactaatgaaaggccaccaggtcaaaagaatgagaggggcctgaattctgctgagatgtagacatagttaagcaatcaccagccgttattctggaggtcatgaaatttgcaactttctcaattactcctataattaacatcactmctctagaccctaaaattggccttttcagattccttttcagacttttgtatttctgaaaccaggtgactttacctggacccacgacccctacctgtggtccctgacctagaagcaggctcagcatatgaggaccattttttccacacccctatgattgcatctccaaccaatcagcagcatctgttctctagccacctgcctaccaaactatcttttaaaaacc

SEQ ID NO: 791459 - DNA, 639 bp, Homo sapiens
cagacgtcttcttaggaagcattggaagatatgagagagtggtgtggggtgggaagcaaatggttggggagacatagcatctggcttttttgggaagccctgctgggtttagacaaatctgcagacaggaggaagaatgagatgaatggcacttaagtgttattcctctccagatcatgattctcccagtttgaattaagactcktctctgagttttggaggagagatgcttggaaaggatgattgaagagattcattcacccattagactccctactattgattaaggatgtaatgaagtgatataagtcatccaataagctatgcttactatgtttttttttaaacatagtaaatgcaagccaaatagagccctctcccaccttagccagtagagtgacatcttaggatcttaggtgaagtctttttttttttggttcttttagtttttaaatttggaggattaggatgacaaaaatgacacctatgggtgaaggggtatggaaggactggaatgacattcagacttttttttcagtaggtttgctggtttaaaaactgtatctgaggacaaaatgcttggattcaaatcttggctccctaactaactgagatctgtcttctctgttctttgtcatc

SEQ ID NO: 791460 - DNA, 597 bp, Homo sapiens
taggacactaaggttttgttgagttagatcattaactcacacaaagcaggggttaatatatgcccaggctgtctgatgtccaggtccatgctgcctgcgcagaatgggtgtaagacagtcatggggctgagcaggttgagaatggaagcagtaggacttgactgactccagtgagcctttccataggagcaggagrtgataacccccccacttttttttaagagacaggaactcaatatgttgcccaggctgatctcgaactcctggcctcaagcgatcctcccatttcagcctcctaaagtagctaggattacagttgtgagccactgtacctggccaagaggtgataaacctttttacctgtttcttcatggctttatctgctggtgcaaagcagggaataatgccacatacctagtcattgatatctaatattgatataatataatgcctaatattgtaccagcaccatttcctcaggctttggttctctctgcctattttgggacaggcctatccagaaacagttggtgaagttcttaggttctttcacttgagcagacctgtgataggcacatcaacaccaagtccagacac

SEQ ID NO: 791461 - DNA, 550 bp, Homo sapiens
ctcctctccagcctgtgcacaggcagcctgggaacagctccatccccacccctcagctataaatagggcatcgtgacccggccaggggaagaagctgccgttgttctgggtactacagcagaaggtaagccgggggccccctcagctccttctcggycttgtctctctcagatgtaactgagctgtgggctaggaggaaaaggccgggaggaggcacggtgatgactgaaaaacctctcccctctcataagaccagtcatccggacgcgggctttcccccactcggtgcccacctggggtcttacaggaggagctgctcctcctcagcaataggacaagatggtcaggtcttcctgcttccgctgagaaaagttagggtcctcaggaacggagcagactggtacaggaacagagtcatcatggccaagagtccaccgggtcctcttgccatcaggaggaatagcagggcttgtgcaggaattggggctggagggaagggccgggctcggtcagtctccagctgggatccccagagtggtcaccctacccc

SEQ ID NO: 791462 - DNA, 640 bp, Homo sapiens
atggaagtaactacagaaaatagaaaccacaaaaaataaaaccaacacttaacaatcttcattgaaaatagaaaacaaatggcactgcaagaaataaacaaatttgaattaaatattcaattgaatgcagaaagaaaggacctaactgaatgcaagaagggctaaacagatgaaaataatgtgtgaaataactgataaggtggagcaagtaagaarttcaaaatcaaataatagtgtttcttagcaagagaaccagagcacataaaaaatagaaaataatcaaagatgtggtataagaaaacatttttaagatgaaaagggcacaatgtttagggcatattacccattatttttatattatttatattacatgaaagaaaacaatgagaataaatctatccccaaatgaattttacaaatattttgaatctcaacaattaaagaaataatctttctacaatctggagagaggaaaatgttccttacaaaggaacaaaagtcaggattgctttcttcttcctctttattacaacatggccagaaaataattggtcagagtccacagttttgaggataagtaacacaagtgaggagaactaacgcaaaagctaacacttgtgttaacacagacttaaatacc

SEQ ID NO: 791463 - DNA, 640 bp, Homo sapiens
atggaagtaactacagaaaatagaaaccacaaaaaataaaaccaacacttaacaatcttcattgaaaatagaaaacaaatggcactgcaagaaataaacaaatttgaattaaatattcaattgaatgcagaaagaaaggacctaactgaatgcaagaagggctaaacagatgaaaataatgtgtgaaataactgataaggtggagcaagtaagaagttcaaaatcaaataatagtgtttcttagcaagagaaccagagcacataaaaaatagaaaataatcaaagatgtggtataagaaaacatttttaagatgaaaagggcacaatgtttarggcatattacccattatttttatattatttatattacatgaaagaaaacaatgagaataaatctatccccaaatgaattttacaaatattttgaatctcaacaattaaagaaataatctttctacaatctggagagaggaaaatgttccttacaaaggaacaaaagtcaggattgctttcttcttcctctttattacaacatggccagaaaataattggtcagagtccacagttttgaggataagtaacacaagtgaggagaactaacgcaaaagctaacacttgtgttaacacagacttaaatacc

SEQ ID NO: 791464 - DNA, 612 bp, Homo sapiens
aaaaaacacaattacttttgtaccaacctaataattagaaaaccatgagtgatagcacgcttttaaaaatmtcacaagcaagtagaagtagaatataaaatggttgacaacttctgaactagtttgatgaataaaggtagagactttttcaaaagatataacaaaaaaatgaagatcaaacttaccagttatcagcagtaaattcaattttagtttaatatttcttggtgcaaaaagcaggagtcagaattgcaagaaaacattcttggaaacacaattgtgaaaattttgacgcatcactattaaactattggaccaaatagctaatactcatttaagagcagaaaggattgaacataaatatatgaattttgtatgttaatggaagagactaagtctttataaatgccaatttttattattatatatcagagaaaaaacctctataaaatattaaaatgtaaaaatttttagattatattttcttacttcaatgggaacaaaatatttgatgatgaggattttaaaaaataacattttcccaataaaactacttatttaaataacaatgggaattagaaaaaaaatttaaatgtatactgtgaatgacat

SEQ ID NO: 791465 - DNA, 589 bp, Homo sapiens
atgttatgtgttatatgtgtatgcatacatatgtgtatatatatagttttacaagtttaaaataatatcagtgacttgaaaattgtaagggcttaccagataatctctttgtaggccttggagtagcattgttttttttttttttttcctttggttattgatgggtaataatgctctggtaaatcagtcttttttttttttttgagatggagtttcgctcttgttgcccaggctggagtgcaatggtgcaatctttgctcactgcaacctctgtctcccgggttcaagtgattcttctgcctcagcctcctgagtggctgggattacaggcatgtgtcaccacgcccagctaaatttttttttttttttgaratggatttttgctcttgttgctccggctggagtgcaatggtgcaatcttggctcactgcaacctctacctctcaggttcaagcaattctcctgccgtagactccggagtggctgagattacaggcacccgccatcacacccgactaatttttgtggttttagtagagacagggtaataccatgttggtcaggctggtcttgaactcctgacctcagg

SEQ ID NO: 791466 - DNA, 624 bp, Homo sapiens
tggctatttacaaaatcacttccattgttttgaccaagaaaagcttcatacattttaaatgaatatacactttgtttataccagttggaaataagcctttagtttactagctgtgaatgtgattttgttaaaagccattatgatcattctaattcctattacaaaccttgtgtgtttccaccaagattcccaatagcytaaatggaatttatgagaaatattaaaattcttcacaaataagtaagaaacttgcccataattcaaacacaggtgctgagtgccccttaaaggaagtgaacagagctacatgcaatctgtgctgagcacaattaaaacattagtaaagggaactttattcatgtattcagtgtaccaaactcacaattagcctatgtctcttcttccctctctaaagtctaatttatccttttaaagaaaatgattgctcctctctgccaaaaccaaaaaaattttgaaaaataaatgagaatgctccaaaatgccatgatttgtttaaaaatatgcagtaggctactaaattttattttgtatcattcaattttcatcctatttaatgccatgtgtcatctgaaaatacattaaatataaactgaagtcattcta

SEQ ID NO: 791467 - DNA, 644 bp, Homo sapiens
ttttaaatttacattatgaattaattttatgaaatataaagttggcctgaaaagaataaaattataatccttttttgtattatttttaaaataaaacatcccttttattttaaaacattagttgaaagaatgtactaagaaacagacagggggatagggaaggaggatggaggctagagtagcccaacacttagactgtcattaaaaaaaactgaactgctccactacacatatacatttgtctagttcaacacacttcccagaacaccawcacagagttaaaaggaacaaaatccaaatgtccattacaataatacttaatatgaaccatattcttttctgacttgtaaaaaaataaaaattcatttaaaaaattaacagcttatgtagaaaataatctggcaaatattaccaaataaatttctaaagggaaataattcttaacacaggaagggaagaaaagatgttcttaatttttattctcatgaagagattaaaacagtaaaaaaaattttaaataagaagaacttaagaatgttaagatttatagtagacattggagatacaaaaagtggcagggtgggtgaggggtgaaggttgaaaaattacctgttagctacaatgttcactattcaggtaatggg

SEQ ID NO: 791468 - DNA, 627 bp, Homo sapiens
ctcccatgacacgtggggattattacaattcaaggtgagattcgagtggggacacaaggccaaaccatatcagtgctctctataggtataccattcttaatcttttaaatactattttttactgtaccttttccatattaagtatatttagatgcacaaatacttaacgtgttacaactgcctacagtattcattacagtcacatgctgttaaggtttgcagcctgggagcaataggctactccttrtagcctaggtatgtaagtaggctagaaaatctagttttgtgtgagtacactctatgatgttggcataacaacaaaatcacctcatgatgcatttctcggagcttatctgcttgttaagtgacacatgactggagatcagctttgagcacttactgcatatttttgactgtgctggttacaatagaacgagacatggtcttcccacccaaggagcttactgtctactgggattgataaagcaataaagaccaaatgttgaagacagtgtataaggactaaattgagtgtgggacttgattgcgcttactatagaaaaggcttcacgaaggaggaagggataaagctgaaggatctggaaaggctcagttagacccccttac

SEQ ID NO: 791469 - DNA, 485 bp, Homo sapiens
ctggaaaggctcagttagacccccttacaacagctggcagcttgggggtggaatggatcttggaacacactcttctccatttaagatcagagtctttggtaaatgagcagagagaaaccatgtaccttctcttttaccttcggccaattgtcaaaaagtaagatataacaaatattacctcccacccccaaaataagtaatttagaattgtggaaaacatggaattgtttggctgtttctttcagagaaggagaagcccattcaatcattttgagtcccagaataaagcccacttcacatggctggggcctggagaacctgaaratgtggtctgctgtagtataatggctagctttcttatagctgactgctaaagtcactgatagggtatgccaggccactctactttgtggaagaaaaacaataatctttctcagaggcctataatactgctgaaaaaacaccaaaattagaattaaaatcct

SEQ ID NO: 791470 - DNA, 248 bp, Homo sapiens
cactcctcattttgtggtatacctcctttgggtggtgtgtctcaaacacaaattgtatcctatctctctactgcttacaatccttaaatattcagaatccttatgatctggcrttgcttatctcttgaagctcattcattcctctgtctccttacaacctaccattcaactatattgaatttatttcagtcccgtgaacgattcagctctatttcacttataggacattgtacaaagatctcctctgc

SEQ ID NO: 791471 - DNA, 625 bp, Homo sapiens
gggcagaggatctatctgtgccaggcatagtagaccacctcacctacaaggcagagattttatgccacaatagacaagctgaaatagcagaggttaacattactgcccagagccctgtttgtaaaccaggagtattattcctgctttcagctctggagcatagctctgagttttgtgtaagggaagaggtaatacaaaagaacagagaactctgaggctctccccaaaagaaactgattttatctgaaacagtgtagggaagttcaagcctaaaggcattctaaaagacaatggagactttagtggtatgcagttaagaggaagctgctagctccatgagagcatcaagtaaatcacaggactgctagtttaccagagagaaccaaaaaaaaaataaaaaaaataaaaaaaatwaaaaaacccagcgagtcctcctgggattaaaagaaaccccaaagactggcctcaaaatttgcccctgaaaacggccctgagtttaactggactagcttgggggaaaatttaagcccaagagcattgccaaaagcaacagagcaatttggtggaaattagtgaagcctaataatgtaacaatgaaaggatccatgaagatttaactattaga

SEQ ID NO: 791472 - DNA, 610 bp, Homo sapiens
cctaaatccgtactaaaattttaaattctgagtatagtttatttactatgtcttccttcctctttaccagaacatggtgtttgcagtaatgcattcaaagagatatgagatggtcgcatttcactccatcagtactcacatcaaagcctctgaatgggagatgaaacatttaaaaaaatgtagaatgctggattctgtaatcccagttcacttttttttttgtaatttctacataccacattatacattctatcccaggtagttaaggtcccagcaagcctagaaattctgtgattctgtgattytcccaagttacagacttttttctcaaaaaatacctaccacttctccaatagttatcccactatttccctgatgaatgcttttgaaatctcatttaattttgtaagacaaaattgaaacatccctcaggcaacaaataatagcatgcacattatatgtttttttcctccactaaaagttatgtttttcttagggcaaaacttgatagaaaaaccaagatttttatgaataacttgaaggcaaattattatagctcacactttcatagcttcaaagcatctcaaagaaagtatatactatttttggt

SEQ ID NO: 791473 - DNA, 580 bp, Homo sapiens
gaaactcctaaacctggggactgcctaagctgtccctaaatctacttgtctataagtccaaagggaaaacattcatgtgaccactgtcaccatctgctgttggcagagagaggaaatatgatttttctctggctttggcccctgtttgcctccataaaattccacagttgaaaatcctgaaatagattagygtctttacaagcaaaagcagaatgtggatggacaaaaaccatgtgtggaaagtgagtgattcagggacctggatcttcctctcctttcaaagctctcatctccccaaaccaccattgcttagtcctctgcatgccaattaaagtcaacaaacacttactgagagctctcattaggccaggctctgggctaaacaccaagagaaacaaagaaaaagaagactcagtctctactttcaagaagcttcccatctagtagggaagtcagtcaaataattccaagtaattacatcttctgtgttacagattcccaacaggatgcaggagtcttgaagggtgattttgtttgcaaattgagaaaagtttggagaaatctccctttagcatttgaa

SEQ ID NO: 791474 - DNA, 644 bp, Homo sapiens
ccatgttaaccagcttgacaataaacaatacagcacagtatgtagaattgcttcaggttaacaaccaaccacttaacatctgcccccaacagtagaatccaagcaggacacaacagcacagcacagtggggctcctgcagcccacaytctgcaagtggaacttcttctagattctaatgaagcatcttcttccaagcttgcatgactttttggtcatggaacagttattttgtattgaattttctgacattgaaaaatcctgtggccttcttcatacatactgctattgaaacagatccctcagacccactatttgtatatctgattttgttttttcataatttaccctcatttcaatttcagcatataattggcagttatgctttcacctgttctagttgaagtcatttcatattcttgatgttgagatgcaaatattagctagccctcctctattcatttcatatgcaaattaatgcacatgtattgggggatggagaggaagcgccctgaataggacagatctctatagcatttctcaagtgctccgtggaacattaattcactagatgctcataacaaatgtatacaatatttccctctccctctttatacttcactaaataactgtgggaaatactagc

SEQ ID NO: 791475 - DNA, 608 bp, Homo sapiens
gtgtatatatatatatacacgatggaatactactcagctataaaaggcatgaattaacggcatttgcagcaacctggatgagattggagactattattctaagttaagtaactcaggaatggaaaaccaaacatcatatgttctcactgttaggtgggggctaagctatgaggacgtaaaggcataagaatgatacaatgaactttggggatgagtgggagggggtgagggataaaagactacaaatatggtgcagtgtatactgctcgagtgatgggtgcaccaggatctcacaaatcaccactaaagaacttactcatgtacccaaataccacctgtatcccaataacctatggaaaaataaawttaaaataaaataaatgtaacatcaaagttgggttcaatccaggaatgcaaagtttatttattatttgaatatgaatgtaattcaacacattaacagattgtctctataggcattataaaaacaattgataaaattaaactttcattcatggtttgaaaggaaaacaaaacaaaacaacatctttgggcaaactagaagacttggttagtttaagccttaagaaaaatcccaatttagaata

SEQ ID NO: 791476 - DNA, 597 bp, Homo sapiens
caggcacagtgttatgtgcctgtagtcccagctcttcaggagactgaggtggaagaatggcttgagtccaggaggttgaggctgcagtgagccaccgtcatgccactacactctagcctgggtgacacagctagacactgtctcaaaaaaataaaaataaagcagcaaratcagttaataatgttagcttgtgctggttgatattcccacaccccttaatttatctgttaaatggcaattagaagcacatgaaaccattggttaacatacacaattcccgagggttttacaattcaaataatgcaatgaaaaatgatttcaaagaaccaggctctacctcactcacctatttctcttataaacaatagctttatgacagttttgatctgtgttgaaaatgtgtatatttctgacccacaagaatttataaacctagaggtaaatttcttaaaataaataaacaaaacctaacagaaaaatttattggaggattcacatcctggggcacaaaatccgtgctcaaaatcattatgattagaatatggtcaaatgaaacagatcccaaaggatccccatgttccggatgtagccagagta

SEQ ID NO: 791477 - DNA, 583 bp, Homo sapiens
taaacttttattaaatatcagataagtaagaaatccaccgtgaagaacttgttcctttgggagcatactgtatgactgacaatattgtcaggtctctgggacacaaaagggtatgagaaatgtgttgggaatttttctgtaactgactcatcccattggttgagtcattccattggtcaacctcatgatttcttgtgagccagtagatcattctataccatatcccttctcttagagaaggcaatttatgaagtagctcataaatggtttccagatttagaatgttactattaaattttaaaaaggaaaaagaaattatatgtgtatagattatatgtatatacattcatacatatatgtgtacaggcatttatgtgtacatacatatatgtacgtgtgtatatgtgagtatacatatgtatctacatatatatgttgtgtatgyaaatatcactaaaaaccaatatatgttagtcaactttttctcttgctaagggcatttaaggatacccacctaatacttctaatgaccattattgcacaaaatagggaacatttgtaatatcataaaacaaaacagaag

SEQ ID NO: 791478 - DNA, 603 bp, Homo sapiens
catacatatatgtacgtgtgtatatgtgagtatacatatgtatctacatatatatgttgtgtatgcaaatatcactaaaaaccaatatatgttagtcaactttttctcttgctaagggcatttaaggatacccacctaatacttctaatgaccattattgcacaaaatagggaacatttgtaatatcataaaacaaaacagaagaaaaaccccagatctcaaaataaaatgtagatctttcagttgaacaaatttagctgactaaaaaaggcaatcayatgagtaacatttttctcacttctgtgcagacgtttgaaaacttgccacagatcactgattcttctagcacaccaccacacttgtcctgcatctttcttcctctttccaacaactttcgtcctcgtctcttttttttttcgtgagacagagtctcgctctgttgcccagggcagtggcatgatctcggctcactgcaacctctgcctcctgggttcaagcgattctcctgcctcagcctccagagtagctggggttacaagcgcccaccaccacacccggctagtttttgatttttagtagagacggggtttcaccatgttggcc

SEQ ID NO: 791479 - DNA, 678 bp, Homo sapiens
ccgtattctaagtcaaaggagatcgtaaacacagtcagtgcccagtgccctccattccggcctcagctggcgaaaatgccagaagaattggtcttacagtaacagccagtagggatatggattttttaaataagtgttttgtttttattttgagacaggctctctgtctgtcacccagcctggaatgtagtggcactatcatagctctctgtagcctccacctcctaggctcaagtgatcctcccacctcagcctcccaagtacctgggacaacaggtgcacaccatcatgcctgactcattttctggtattttttgtttgtagagatggggtttcgtcatgttccccaggctggtctcgaactcctggactcaagcaatccactcgtctcagcctcccaaatggctgggattacagttgtaagcccactgcccccaacttggaatttttaaataagygttttattgtttttgttgtttttgagacaggttctcactctgctgctcaagctggggtggagtggtgtgattacagctcactataatcctgaactcccaggctcaagtgatcttcccacatcagaccctcgagcagctgggactacgggcaggtgccatcaggcctggctaagcttttatttttagtagagatagggtctcactgtattacctgggctag

SEQ ID NO: 791480 - DNA, 678 bp, Homo sapiens
ccgtattctaagtcaaaggagatcgtaaacacagtcagtgcccagtgccctccattccggcctcagctggcgaaaatgccagaagaattggtcttacagtaacagccagtagggatatggattttttaaataagtgttttgtttttattttgagacaggctctctgtctgtcacccagcctggaatgtagtggcactatcatagctctctgtagcctccacctcctaggctcaagtgatcctcccacctcagcctcccaagtacctgggacaacaggtgcacaccatcatgcctgactcattttctggtattttttgtttgtagagatggggtttcgtcatgttccccaggctggtctcgaactcctggactcaagcaatccactcgtctcagcctcccaaatggctgggattacagttgtaagcccactgcccccaacttggaatttttaaataagcgttttrttgtttttgttgtttttgagacaggttctcactctgctgctcaagctggggtggagtggtgtgattacagctcactataatcctgaactcccaggctcaagtgatcttcccacatcagaccctcgagcagctgggactacgggcaggtgccatcaggcctggctaagcttttatttttagtagagatagggtctcactgtattacctgggctag

SEQ ID NO: 791481 - DNA, 678 bp, Homo sapiens
ccgtattctaagtcaaaggagatcgtaaacacagtcagtgcccagtgccctccattccggcctcagctggcgaaaatgccagaagaattggtcttacagtaacagccagtagggatatggattttttaaataagtgttttgtttttattttgagacaggctctctgtctgtcacccagcctggaatgtagtggcactatcatagctctctgtagcctccacctcctaggctcaagtgatcctcccacctcagcctcccaagtacctgggacaacaggtgcacaccatcatgcctgactcattttctggtattttttgtttgtagagatggggtttcgtcatgttccccaggctggtctcgaactcctggactcaagcaatccactcgtctcagcctcccaaatggctgggattacagttgtaagcccactgcccccaacttggaatttttaaataagcgttttattgtttttgttgtttttgagacaggttctcactctgctgctcaagctggggtggagtggtgtgattayagctcactataatcctgaactcccaggctcaagtgatcttcccacatcagaccctcgagcagctgggactacgggcaggtgccatcaggcctggctaagcttttatttttagtagagatagggtctcactgtattacctgggctag

SEQ ID NO: 791482 - DNA, 595 bp, Homo sapiens
gcttaccttcagaagaaagataaacgattctttatctggagctccacagccttttaaatcctggagagtatttcacagttacaaagttccctgtttttaaaattctttgactgtgcactgggagctagagaggattatttcagcccagaaaagttttcagttgctatggagagagctgctctgaaggtaacaatgaaggtggataaaagggagaactttctgtctggtagattttcaaggtaatcaaatcagtgtggttcatgaatttaactttttagatcaagaattaaccaattttcttaggctcacctactgtcactygcctttcaagggacagaatctaggtcaaaggatttcacctcgcagaatagaaagacttcagtgttagatgaagattttttcctctccagttgattctgtaataactgtttcatccaggctcaaaccaaagatttgttgaaaagataggctctttggaaccatatttgttttgcaagatgcagaagcctaaaagattgaagtctttcgtaatgagatgctttcaaatgaaaagtattggttgaaggaatgaaattcttaccagggatgtaggtag

SEQ ID NO: 791483 - DNA, 587 bp, Homo sapiens
aagacaatatttggtttagacttacagaccaaaaaaggagaaatgcccccaaatctttcaggcacccttaatacagaagtagctgtttggctaaatgtccttccaatgactccttcataatctgtctacatatagtcactaattaagtgctctgatggttatagtcctacttgtagcttttaaagatgactatggcaagggaattaagagggtcgccaaaggcaaacgtgtttaccaagcaccattcagaagcttttgtaacaaggagccggcactgcctgatggaatctgcactgccttgggtttgctcctggcaccttcaatatctctaagctctgccacgacagcactgagtgggcctcccacctcagacttttctgtcatcaacaacctgwgtaacatctcaagtttcttattgaaagttttaagtttggcagtgtctatgtgatactgaacgtgaccttcagctctttgatcagagcaggtggcacatatgctgttgactcaactcttcatgtcttggtggtgatcactgatttcttaggtatgagtctataggggcgatggcattgatcatccctgtggtt

SEQ ID NO: 791484 - DNA, 624 bp, Homo sapiens
gaattatcacaatttagaagtttggaggagggtatctctggggttgggacccatgaatttgagggggtggggacagacaattggtccagatatttcttagtgaatgtgatgggactggtctgcatgtgttaaaaaaaactgcaagttagattgaattgaattcaaattctgctgatagaacarttgcttctgaagtcgttgttaagatgatgctgatagcaacagaaaaccgaaaggaaacagacctcaatgaacatctttcttttcctctggcagaatttaatggggaggagagggcaaagcagaaaggtggtccacagaacctgagattgatcataatcttgaaagacacagtcctacaggctctgttcccaaatattgaaatcccaaagagcaaaatctctaaagtctaaaattcctggtgtctaaaatcccaataatcacagtcacaagatggttgcatcatgttaggcagagctattaccttgttatcgtcctaacacagaggaaaatggatttcacttggatcccctaaccctaatgacagatttggagccaggaatgaccaaggcttctaaaagagaatgtcaaggtattaccagtaaagtttgttttttcctttca

SEQ ID NO: 791485 - DNA, 624 bp, Homo sapiens
gaattatcacaatttagaagtttggaggagggtatctctggggttgggacccatgaatttgagggggtggggacagacaattggtccagatatttcttagtgaatgtgatgggactggtctgcatgtgttaaaaaaaactgcaagttagattgaattgaattcaaattctgctgatagaacaattgcttctgaagtcgttgttaagatgatgctgatagcaacagaaaaccgaaaggaaacagacctcaatgaacatctttcttttcctctggcagaatttaatggggaggagagggcaaagcagaaakgtggtccacagaacctgagattgatcataatcttgaaagacacagtcctacaggctctgttcccaaatattgaaatcccaaagagcaaaatctctaaagtctaaaattcctggtgtctaaaatcccaataatcacagtcacaagatggttgcatcatgttaggcagagctattaccttgttatcgtcctaacacagaggaaaatggatttcacttggatcccctaaccctaatgacagatttggagccaggaatgaccaaggcttctaaaagagaatgtcaaggtattaccagtaaagtttgttttttcctttca

SEQ ID NO: 791486 - DNA, 487 bp, Homo sapiens
aaatggctatgctcattactaaagggctggtggctggagggaagaactcacagcaagggatcttcaaagccaggcaagagactaagattgcttttccgaattgggggtggcaaatttaaaggcctacaggcaccaggcaggaaaygtaaatgaaagacgcaggccagctcggaaaatgtgagagcacatatgaagtgtttataaatgaggctgctgcaattcagtccatgaatcttcccattttctttttttttttttaattgaggtagggttgccaaataaaaattgatgttttgatatacatacacattgtgaaatgattaccacaatcaagctaattaatatatccatcatcacaaacagctaccactgtgtgtatctgtatgtttgtgtgtgtgtatgcgtgtgttgtgaaaatagttgagatctattccattagaaaattttaagtatacattattaactcaaatcaccatgctgtgcatta

SEQ ID NO: 791487 - DNA, 601 bp, Homo sapiens
ggatgaagggcagggagagaagaagaaaagcatttttttttccttaaacacagaggggctgggcgtggtggctcatgtctgtaattccagaactttgggaggccgaggcgagcagatcacgaggtcaggagattgagaccatcctggctaacatggtgaaaccccgtctctactaaaaatacaaaaaattagccaggtgtggtggcggccacctgtagtcccagctactcgggagcctgaggcaggagaatggcgtgaacctgggaggtggagcttgcagtgagccgagatcgtgccactgcactccagcctgggtgacagagcgagactccgtttcaggaaaaaaaaaaaaaaaaaaaamaaacaactaacacagaaaacagataatagagactatgatgaggccattatttatggctaagcaagaagaatatgcctgcctaacacattggttcccttgaacagcccctttcaataatggtaacattaaagaactgaggcacaaccaaagacgttggaaaggcaagtcagtgaatacttgagagaaacatttctactcacaagtcccagactatgtagtatggtagtttgaatgtgaggc

SEQ ID NO: 791488 - DNA, 638 bp, Homo sapiens
atgttggtcaggctggtctcgaactcctgaccttagcctaagaggtgaataacattcccaatgccatttaactaacaggaagcagaagctgtctaactccatttgtcccaaattaaccaccactctccagtgcgtttactttttctttattttgctttgagcccacatcaaaaacaaaaaacaaaactctggttcatcgacctgactgctgattgaaagagctgacagtggtagatgagcaggagatctctttcagaagaccagtacctttggaaatcttgaggaatcctcattgagaggaaaagttaagacytaataggttattttaaaagaatacattgattccaatgacttatgttttagaatgtctttcgtatcataaattacttaattttaataaataaagtgtataaattaaaaaaagaatacatcgtttcaaatgaaattctcttaaacattttcatttgatatgacagtagtttgtcctcaaaatgatgaaagtttgttatctgatattggaataattaatgttcagccacttaagaaaaaaataaaaactcaaagcattgaaagaaattgaatttatatttgcagagtagactcctgcagtgtatttatctttactgagctcaatgtca

SEQ ID NO: 791489 - DNA, 583 bp, Homo sapiens
gtatttgttgtttctattcagcacaagaggattcagcatttggtgggtaacatcagcccttttaacttcctatgatagaaagaaaactaaaataaaagttacaacatctttcctagattagtcctttataggaggcatgaataatataagtagcttcctatttagttaacctatatcagaatcactgcyttcatatttctttactttgcagggttgggcttttccttcttgacttggaaagttggcctccaatgttgtatattattttatttttttgagatggagtctcgctctgtcacccaggctagggtgtggtagtgtctacacagttcactgtatcctcaaactcctgggctcaagcaatcctctggcctcaacctcccgagtagctgggaatacaggtgtgccaccaaacctggctaatttttaattttttttttttgggacagagtatctgtatgttgcctaggctatagtgtactttttaataaacagttttagggcacagatgaaggtttatataatcagaatcaactaattaagtcagttagtatttaaaacgttgctttaatctttaaaaatt

SEQ ID NO: 791490 - DNA, 502 bp, Homo sapiens
aatgtgcattgtgctattctagtatcccttattgaatccaaatatcttaattgggctgctactgtaaaaatggtaatttttccaatttttcatactgttaccatatatgtttttagaaacctaattgctatataaattttgtggcaatgtgcatttaaatgtttttgtgattatccacattaggaaggagttcaacctatcttaaagaggaacatccaaattgcaacgttggtgtcatgtgcacagttcctgtttaataaatatttatctttcttactgcaaaattaacataaagcccagagggtaaatgctttataactatatttcattcyggaaatatattattgaaacaacttaaccaacaagagaaaagacaagaacagcaagagttctaaacactgatataactacttcagtagtcgccttttggattccattcaaaacccataacttcaattaagtagatgtattagtccatttttgtgtggctatatagagatac

SEQ ID NO: 791491 - DNA, 653 bp, Homo sapiens
ggtacccactgctgttattcagggagcttcttcagtggtgaagaaaactttaatctcaattaatctgaagtcaaactctgttgatgaacacatacagacagagggaagatgaccagaaccatttttcattaggaaatgactttcttgatccctaagagtaatggttacttcaaaatctactttgcttaaaagtataggcatttcagctattaaaaaaaaaatttcaacttttattttggatccaagagtgcatatgcagatttcttataagggtatgttgtgtgatgggtaagatttggggtacaattgatctcatcatccaggtagtgagtatagtgcctaataggtcgtttgtagaacctcccccctctagtagacccaggggtctattgttgctgtctttatgcccatatgaatccamtatttagcaccgactcatatgtgaaaacaagcggtatttgttgtactattcctgcattaatttgcttagaatcatggcctccagctgtcatccatgttgctgcaaaggacatgagtttattcctttttatggctgcatagtatttcggggtgtatacataacactttctctttattcaattcactgttgataggtatttatgttgattccatgcctttgctattgtgacgag

SEQ ID NO: 791492 - DNA, 635 bp, Homo sapiens
catttatgaggtgaatgaccaactctttacattaaaatccttctagtcatttttctgtgcatatgaaactcacttcaaatttaatgacataaggaggttgaaagtaaagaataggagaagatatctcatgtaaatgttaatcattacagaatagaatttactatattagtatgtgaaaartagacttcaaagcaaggaaaatcactagatgcaaagagagatgttacataactataaaataatcagtccacagtgaagacataggaattccaaatgtgtgcacaccaaacagtagaaccacaaaatatatgaatcaaagcctgatagagctgaagcaggaaatagacaattccacaatcatagttgggatgtaaaaacctctatgtaagtaactgacagaacttctagagaagaaatcagcattgatacggacaaactctacaccaccaacaaccaactgtgtctaattgaagtgtattgaacatccaaaaaacaacagcagaatatacacttttttaagggcttatggagcattagccaaaatagactataacctaggccatacagaaatcttcacctatttaaataattgaagtcatacagaatatatactctgaccataacagaatgaaacc

SEQ ID NO: 791493 - DNA, 552 bp, Homo sapiens
aataacaggatctggcaacacagggcctcaaggataacaactggatggagccgggtagtagctgctgccctgtaaatggccaaggctctccgattcatctccctaacgccaaagctgagtgttggctgccattgatcccagttgcatgcactggtttttctcttacaaaagataaatatttatctatcaaaaacaggaaaatgaaaggtcaagagtcttatgtttccagaaaaaaggaagaccacaacatttttgtgagtgcggagaacattcctaacagtttggtcttcaatctcttacccttcatctcgtgctacctgcctgacctctgaagcatttgaggtttagactcccagactctcttttggaccaaatttcktactatgtcagcaaataaactttaaaatcaaaccactggaaaagaacacagcttaagtacacaacatctcattctcccctaagtatgttggttctttcatctcacctttcctgagaacacaggatcccgctctcagccatcaaaaggaaaggttccaccccttatgcaagatc

SEQ ID NO: 791494 - DNA, 552 bp, Homo sapiens
aataacaggatctggcaacacagggcctcaaggataacaactggatggagccgggtagtagctgctgccctgtaaatggccaaggctctccgattcatctccctaacgccaaagctgagtgttggctgccattgatcccagttgcatgcactggtttttctcttacaaaagataaatatttatctatcaaaaacaggaaaatgaaaggtcaagagtcttatgtttccagaaaaaaggaagaccacaacatttttgtgagtgcggagaacattcctaacagtttggtcttcaatctcttacccttcatctcgtgctacctgcctgacctctgaagcatttgaggtttagactcccagactctcttttggaccaaatttcttackatgtcagcaaataaactttaaaatcaaaccactggaaaagaacacagcttaagtacacaacatctcattctcccctaagtatgttggttctttcatctcacctttcctgagaacacaggatcccgctctcagccatcaaaaggaaaggttccaccccttatgcaagatc

SEQ ID NO: 791495 - DNA, 605 bp, Homo sapiens
cttcacaataaatcttgctgctgctcactctatgggtccgcactacctttatgagctgtaacactccctgcgaaggtctgcggcttcattcctgaagtcagcgagaccatgaacccaccgggaggaacgaacaacctgcgtgccacctttaagagctgtaacactcactgtgaaagtctgcagcttcactcctgaagtcagcaagaccacgaacccaccagaaggaagaaactctgaacatctgaasgaacaaactccgtacacaccatctttaagaactgtaacactcaccgcaagggtccgcggcttcattcttgaagtcagtgagaccaagaacccacgggaaggaaccaattctggacaaactaggaccagacctaaagggcctgttaagcaaatcttagatttttaaactaagggcaatgagataatcagcaggatgactgaagaaggcctggggattgctggctagagttaaaaagaccagaggcatggagacagactaggaagccgtggcaggcatccaagcaagagatgctgtaggtctgagtgagggagtaaaatcaggaggtcttggttattgattagatgtgtgtagtgagaaa

SEQ ID NO: 791496 - DNA, 624 bp, Homo sapiens; identical to SEQ ID NO: 741723

SEQ ID NO: 791497 - DNA, 615 bp, Homo sapiens
catggtacatggaacgataattgtttttgtgcatcttttctgacctactttgttgtaaagttgtgaacagggtttgcatgttctttatctttctacctccaatacttagcacagtgtctggcaacaaaccagtagatgtttgctgaatgcacatagaaatggttataaaagaatgctttgacaaagagcatttcaaattcagaatacgcttttagactctgttatcccatggatggactatgggcatcactaaaggyataaggtattttcagtattcatgtcttatttgggaatcctcgggtctggaatcattctcaaaaacatccagtaaagagtcattagctattcttagagcacctcttttttcacagagagaattggcaccaagcaagagcgaggaaccagacaccagttatggaaaatgtatccccacatcacatcgggagcctagctcacagacactgccaatggaaattgcagaaatagatcaactgcaaaaggttacatagggggcccatatgttacattaattctcagtgaataaattacacgtaaaatttgagaacatgttttcatcaaataagtatttgtgaagataaattttagcttatgcca

SEQ ID NO: 791498 - DNA, 629 bp, Homo sapiens
tttgtccatgttaaaatgcaaagtccccctgggaaggcttccattaaacctgaacttgcttcgaagccctggcatcagtgagttctgaggctgtgtctggggaagtttgatggaggagagagagagagagcctgaccatactgcttggagtggtaatgagggatagctctgctggtggaaatgtggcagaatgaggtagaaatcatgtaaaaaggaaggatgaggactcgtctatcttacaccttttcccagctgttaaaatgatctgtatcgcataggacctcattagagytcattcttggagcacttttttcatgaattgttttagggctgttatgtgttgggaatcacagactaatagggcttctttgacagatgaggaattcaaagtatggctaggtcacaccgctaggcagtaaaaaatccagagccagcaccttagaatcctgcctctctgtatgaataccatttattttcctattctctgataagctttacaagaagctatcgtatatgacctttgcaataaattttaaaatttcaatgttgatttttcttctcggcctcagcttagcagtaagggtgaggagttcttccttgctggttttggcaccaaggctgagactttc

SEQ ID NO: 791499 - DNA, 460 bp, Homo sapiens
gtgggagccaagcccatgctggtgccccttctctaggtcacgtctatactgcttgtttggattccttggcaaaaactgactatgcaaagacagtaggatgcctgactcaaattgggtcaatcagatcctttttcttggaatttaaaaaaaaattgcatgaaaacgtatagttaaatgcacaggtcttaagtgtacaatttagagttttracaaatatatacattcatgtaactgaaccccaaacaagatatggagcatttccatcaccctagaattttcgttcatctccacttccagtcagtctccatccatgatggccaaccaccattctgatttctatcactatacactagtttgatctgtgtttggacttcatgtaaatgaaatcatacagtatatattcctttgtaactggctttttttaacctaagaatgtttttcaggcttatccatattttta

SEQ ID NO: 791500 - DNA, 460 bp, Homo sapiens
gtgggagccaagcccatgctggtgccccttctctaggtcacgtctatactgcttgtttggattccttggcaaaaactgactatgcaaagacagtaggatgcctgactcaaattgggtcaatcagatcctttttcttggaatttaaaaaaaaattgcatgaaaacgtatagttaaatgcacaggtcttaagtgtacaatttagagttttgacaaatatatacattcatgtaactgaaccccaaacaagatatggagcatttccatcaccctagaattttcrttcatctccacttccagtcagtctccatccatgatggccaaccaccattctgatttctatcactatacactagtttgatctgtgtttggacttcatgtaaatgaaatcatacagtatatattcctttgtaactggctttttttaacctaagaatgtttttcaggcttatccatattttta

SEQ ID NO: 791501 - DNA, 460 bp, Homo sapiens
gtgggagccaagcccatgctggtgccccttctctaggtcacgtctatactgcttgtttggattccttggcaaaaactgactatgcaaagacagtaggatgcctgactcaaattgggtcaatcagatcctttttcttggaatttaaaaaaaaattgcatgaaaacgtatagttaaatgcacaggtcttaagtgtacaatttagagttttgacaaatatatacattcatgtaactgaaccccaaacaagatatggagcatttccatcaccctagaattttcgttcatcyccacttccagtcagtctccatccatgatggccaaccaccattctgatttctatcactatacactagtttgatctgtgtttggacttcatgtaaatgaaatcatacagtatatattcctttgtaactggctttttttaacctaagaatgtttttcaggcttatccatattttta

SEQ ID NO: 791502 - DNA, 574 bp, Homo sapiens
attgctagcttctatttttaaaataaagcaacataatactttttcttccaatttatctaccttcaaaagtcccaacaaatgttgttcgtagtactgaaatctatcatttccctttattttttccattcttcaaattgagctattaagtcaaatgctaattacatgaaacattgttctctgttaataaacgttttgagaagttctgccgcctcaaataaacaactaaaacattaagtcagtgtggcatttcagttgaatagggaaaaactagattacttaataaatggtacagcaatatttggctaaccatttgggaaaaaataaaattagatgcctacttcacaaattaaatttcagatttgttaaagatttatatataattaaattaaagacagatccttaaaattcaataaaatttwaaaaattgcaaaataaaatatgtggctatttagtgtatttgggtattgggaagtcttttgactagttataaacactaagatataatctacaaagagataaatcaacttacaaaaaacttaaaacttcatggatatatagaaagcagcactataac

SEQ ID NO: 791503 - DNA, 528 bp, Homo sapiens
ggggtattgtgggttatgaagttgtcatgtctactagctggataaatgggtctggaagttcaagagaaagatctggggtaatgtcacataatggggagtctttagcatagttggcctttgaaaccacaggaatggatgaaattgtccaagaagcgtgcataaagtgggaaagctctgaggaactctgaataaacagaggaggagaaaacttttytttttttttgagatggagtctcactctgttgcccaggttaaagtgcagtagtgcagtggcacgatctccagtcactgagtagctgggattacaggcgcccaccatcacgcctggctaatttttgtatttttagtagagatggggtttcaccatcttggccaggctggtcttgaactcctgacctcgtgatccacccaccttgacctcccaaagtgctgggattacgggcgtgagccactgcgcccggccaagaaaacattttttaaggtagtgaaaaaaaatttaatgaacagcagtaaatcctgccaagaaga

SEQ ID NO: 791504 - DNA, 572 bp, Homo sapiens
acaaataatatttgttagacacttgcccagggctgagattcagtgggagcactatcctggcacgactggttatttatgactgacatccatgccagtgcctgatgtgaagatgcatgtgccatatctgatgttgagtggtttgactaccctccctaaatgtttcctaagtgtagtgcaacagtacaacttccttttctttcttctgtgactgagtgagatcaacatatttttttatttttgagacagggtttcactcccatcgcccaggctggagtgcaatggcacaatctcggctcactgcaacctctgcttcctgggctcaagcaattctcccgcctcatcctcccaagtagctgggagtacaggcaygtgccagcatgtccagctaatttttttggtattttttgtggagacggggttttgtcatattgcccaggctggtctcgaaatcctgggctaaagccatccgcccgccttggcctctcaacatgaacattttccacagttaacactactgaaacaatattagaaatatattagaaccaagatattcagatatattgccatcgatt

SEQ ID NO: 791505 - DNA, 735 bp, Homo sapiens
ttacaggcgtgagtcaccgccccccggccaatgtctccatttttgagggcactcaaagaagtaaaaattgtattctctgctctagaggaatttgcagaaggatatgaactgagaaaaagaaagatgggttccagttctggctctacctccaattcttgtattatttatttaatctccacagaactcaatttctccctccataaaatatgagggctagactaagtaaacactaatttcccttcttatacaaattctgtgatcccgttttcctcggatcaagagttgtcgcttgatgaggagctgggatgaaggtgaggtgctgatagttaagcatgccttagaagaacaactctcaattacttcttctttgcccttcttcctcctcctagttcaagttcctcctcctccaagtaaccctacccttactcatctcccttctaatggattcccacagcattcagtcagataagaatkgtccagcacacaggctgggctctcttgcattggattcattaagcccatgaccccaccttttcttctctccctctggacttccagaaggctatgaccgaatgtgatatctctctgaatcaaccaatgcctatcataaggctggatgctgactcaaactgtgcaagctggctgacaagacctggaaaagaagggtctaggtccaacagaagggcttgggcacacggcaagagaagcctggctgagctccaggttaggtgtgta

SEQ ID NO: 791506 - DNA, 625 bp, Homo sapiens
ggccattttcacaatattgatttttcctatccacgagcatggaaggttcttccatttgtttgtgtcctcttttatttccttgagcagtggtttgtagttctctttgaagaggtccttcacatcccttgtaagttggattcctaggcattttattytctttgaagtaattgtgaatgggagttcactcatgatttggctctctgtttttctgttattggtgtataagaatgcttgtgatttttgcacattgattttgtatcctgagactttgctgaagttgcctatcagcttaaggagattttgggctgagacgatggggttttctagatatacaatcatgtcgtctgcaaacagggacaatttgacttcctcttttccttaatgaataccctttcttctttctctgctgatgccctggccagaacttccaacactatgttgaataggagtggtgagagagggcatccctgtcctgtgccagtttcaaagggaatgcttccagcttttgcccattcagtatgatattggctgtgggtttgtcataaatagctcttataattttgagatatgtcccatccatacctaatttattgagagtttttagcatgaagggctgttgaatttt

SEQ ID NO: 791507 - DNA, 625 bp, Homo sapiens
ggccattttcacaatattgatttttcctatccacgagcatggaaggttcttccatttgtttgtgtcctcttttatttccttgagcagtggtttgtagttctctttgaagaggtccttcacatcccttgtaagttggattcctaggcattttattctctttgaagtaattgtgaatgggagttcactcatgatttggctctctgtttttctgttattggtgtataagaatgcttgtgatttttgcacattgattttgtatcctgagactttgctgaagttgcctatcagcttaaggagattttgggctgagacgatggggttttctagatatacaatcatgtcgtctgcaaacagggacaatttgacttcctcttttccttaatgaataccctttcttctttctctgctgatgccctggccagaacttccaacactatgttgaataggagtggtgagagagggcatccctgtcytgtgccagtttcaaagggaatgcttccagcttttgcccattcagtatgatattggctgtgggtttgtcataaatagctcttataattttgagatatgtcccatccatacctaatttattgagagtttttagcatgaagggctgttgaatttt

SEQ ID NO: 791508 - DNA, 630 bp, Homo sapiens
tcaaatctttcttaaattctaacaggtcttttgctattagtaggttataacgaaggagtttttgaaataacttatttctgagtgtgcctggtaacacccattcattactcactaacacctggaacaaaaactcctcccacccttattgtcattgtgtgcccatctcagctcatttgtctcattgtcagagaaaacaaatgaggaacctcacgttttctaagcatgggttcacgattaatttggtaggaactggcagagggtttactcaagttgattacttttaatcaacttgaattgtcctaataagtctaaagtaaaaaacaaaaagttttatttatttataattgttctaataagtctgaagtaaaataaagtactaacacagagatatagytattccataaaatgttggtatcccagaaattagctgggtgtggtggtgcatgcctgtagtctcagctacagctaatgtggggagacagaggtagcagtgagctgagactgtgccattgcaatccagcctggaaacagcaagactctgtctcaaaaaaaaaaaaaaaaaagtgacattcccccacaaaaaccccatccaaaggtcagtagccttaaagacaaaagatagagaaagtc

SEQ ID NO: 791509 - DNA, 560 bp, Homo sapiens
caacctgatcacagcagaaggcttggtgcctttttttccccaagaacaggatggcgagggttatttttacagcctctcacaactgggcacatatgatccaaattcagagcattactgtagcattccagttttccacttgcgctccttatgtcttcctgttcatcttctggttttattgattcgtggacagtgagtgctctggccatttctattggtgtggacttgccctggaaagggactcccaccctctggaagaggccycagcatgattaaactctggagaagtgggtcgtgttttggaaagcatgttagctatgcttatttatatgccacatcatatatgggctaaaaccagcacatgtggtctttgtttcattgcttcctattgaacgtggattcgatccagcgtgctggagaggaatgatgattttggagaaatggatgcagtgagcaacactggcccacaggctgcaaagtgctaaggttgagagtgcgtttagaagtgcgtatgtaaaataattcaaactgcagtatcccggcgaggtgcttcggctctttat

SEQ ID NO: 791510 - DNA, 604 bp, Homo sapiens
ttgcagaatccaagcctgggctattaataaaaatatcttagattgtgtttgtattttttttttatctggagtctcgctctgttgcccaggctggagtgcagtggtgcaatctcggctcactgcaacctctgcctcccaggttcaagcaattctcctgcctcagcctcccaagtagctgggagttcaggcacgtgccaccatgcccagctaatttcttgtatttttagtagagatggggtttcaccatgttagccagaatggtctcgatctctgacctcgtgatccacctgcctcagcctcccaaagtgctgggattacaggcrtgagccactgtgcccaacctgtatttgtatttttgaccattgatagaaaatctttaagaagtatggagtgaattaggacaaatacaacctaataaaagtgatgtgttaaatagtctggggcagtgtaggcctatggtctttggagtcaatgacctgcattggatgtctgaatttgccacagtaggctggctatgtcaccttaagcaagttgccatcctctctgagccttggtagagcgagacttcttgcctgctaggagggcagcagggatcaaaacaaga

SEQ ID NO: 791511 - DNA, 626 bp, Homo sapiens; identical to SEQ ID NO: 777717

SEQ ID NO: 791512 - DNA, 551 bp, Homo sapiens
tcctgggtggatttgaaagagattaacatttactctatgctgtgcatagcttgacctagtgtcctggtacctgcagcaaccagctaacgaaaatcccaacaggaatccagttaaataaaaagggaagatctgatgcaatacttcaaatggcagaaaacatatacaaaaaaaaaaamaaaaaacaaaaaaaaaacagagaaactcaagactcgtgttcaattggctgggatgagagtggggtacaggaccaagttaaccgggttaatttagctgtgccccacacatccccttcaatcagaccccgtgttcctcctgtacaatgagagtgctgagctcgttcattcctcatatgtgaccatcagctttcgctgcagaggtcaaagcacttcgggcattcatgccatcatatacacttgtaccagaggacctaggatatgccaaaatcccacttacaaaatgtcactgggagcaactacattgtcgaaataagctgttaagacagcaatcacaatttaccagaagtagacacatcccagctttatggcttcttg

SEQ ID NO: 791513 - DNA, 551 bp, Homo sapiens
tcctgggtggatttgaaagagattaacatttactctatgctgtgcatagcttgacctagtgtcctggtacctgcagcaaccagctaacgaaaatcccaacaggaatccagttaaataaaaagggaagatctgatgcaatacttcaaatggcagaaaacatatacaaaaaaaaaaaaaaaaaacaaaaaaaaaacagagaaactcaagactcrtgttcaattggctgggatgagagtggggtacaggaccaagttaaccgggttaatttagctgtgccccacacatccccttcaatcagaccccgtgttcctcctgtacaatgagagtgctgagctcgttcattcctcatatgtgaccatcagctttcgctgcagaggtcaaagcacttcgggcattcatgccatcatatacacttgtaccagaggacctaggatatgccaaaatcccacttacaaaatgtcactgggagcaactacattgtcgaaataagctgttaagacagcaatcacaatttaccagaagtagacacatcccagctttatggcttcttg

SEQ ID NO: 791514 - DNA, 527 bp, Homo sapiens
tgaacaccagattttgaaggttttatacaaaaaatatgtatatataaaaaataccttaatttttctatttattacatgatgacatgaaaatatattagatttattggtctaaataaattatataaaatatctaatatatataccttaaartaatttaatataaacatattattagaatcacttttaactattcctttttttgcctttgcatattgatacataatatttgtacatattcatggcatacatgtgatattttgatacatacaatgtgtaatgatcaaatcaggacttttagggggtccatcaccttgaacatttatcatttctttgtgttgagaacatttcaaatctaggtattttcaaaaatataatgttgttggctatcatcaccctactgtgctatcaaacagtagaacttatttcttctatccaactgtaggtttgtacccattaaccaacctctcctcatgtcccctctccaacacacctctccaagcctctggtaagtattatgctactctctg

SEQ ID NO: 791515 - DNA, 617 bp, Homo sapiens
tggatcacgggatctgtctgagcatcagtttccttttctgaaaagtagggatgataacagcctaggacggtgggtgaatcagtgaggtaatgcacaggaacacgcatagtagatagtttttgccagagtgggtggttatgagtatttagagtggcctgagcctcccaattgaaatatcctggccttttgtcaagtcctaagagaggatgtgtgggggaagctacagactaatgaagaggtgaccggatcgtcagagggtgcagacatgcttagcaagctggtggtgcgactcagggctagctgcccctggtcacgctccccctgtgcatccgcggcagcaggaaacatttgtcctcaggaaacagcccctcgaagagcgtcyggacgccgggacccagcctggatggcagagggggcgttaactcgtcccacaggtgccactgacccaacacgattttttttctggtgtatctttctgggagatgtatctttctgggagatgttggaactgggcccagagaaaagcatacgagaccacaatccccaagacactgcttggtggggtaccccacatgtctgcttcaagtgccacaggtacagcaaggaaagcctgcagg

SEQ ID NO: 791516 - DNA, 602 bp, Homo sapiens
cttgtcacgagtgtgcatgtgtttcttccccaccagattgctagctcctagagagcagaacctgggtctcagccattgcaattgccacagcacctggtacatggaaggtgcccagccaaggtgtgtggttgttgaacaaagggatcctgccatgaatccctttgtaagtgcaatgttcttttgaaacagagagtactaactccctagtgtaatttattgaggactgggatccccaggatgagggaactaaagagcactgaggccctcctcttattcactgaggttaagtgaaatttcagatcagggtacttagaaggagaaagaacaaagagagcatgtttggaggtggaggatctgataagattccccaatctctctgtctctctctctctctctctctctctctctctstctgtctgtcacacacacacacacataaacacacacacacactcccataagaaagaaacactctccttgcttgcacctccagctctacccctaaacttctgcccttgagactccccagacacattgcaaagttatcacaaaggatgattgatgctgacaggcaagctctttggcttgaacagacccttgtt

SEQ ID NO: 791517 - DNA, 512 bp, Homo sapiens
cctcctctccccatccttttagagtaacccagcaaagccagtcctcaactatgctgatagagagtttatggggcctgcatggggagctctgccaccaaagactaacccggcttcgcctctggctactcaaagtccacagacctctgattacagggctctcttcaagctggctcctaaggctccctcccgcaggttcctgcrgaccccatgcagcctgggagctccacaagctttccattccagcaaccacctcctcccctccctttctcctgggtcatgctgagccccaaccctgccttgaccaagaggctatgaaatgaacaagtgaggccaaaataaggccctgcccacatgatgcactcccttagcccaggtataggggttgcttgggcccaaaatggccttttgatctaccaatgggcaaagaagtaccactcccgggcaacccgctcgggtccccttccacgctgtggaagctttgttctttcactcttcacaataaaccttgctac

SEQ ID NO: 791518 - DNA, 456 bp, Homo sapiens
cctgctgccagacttcttggctctcagctcatggctggtgctattctcaggatggcttgctacattcagcctcttcccacctgcactgatggtggtcccactaccctgacccctcagggcctgaaggcagagtcttaacacctgctcttgattcatccccatcctggtgagcctccaatggccccaggctcatccatcctccctgcagctgcaactagagcaaaagcagaagggatagtactgaaagtrgggagtggctcagagttgggaagaagcctgtgctgaggccaataggagccacagtttgatggtgggagaggaaaaagaatatgtactcagacacatgctaaactgcccccttcccttcccccatgacaatgttgcaatcattgcaacatacaaatgactgcacatatcgtgcgggcccagtacatggaagctcagaggactcctgag

SEQ ID NO: 791519 - DNA, 617 bp, Homo sapiens
tgcctcctgaacttgattgatcctcccacctcagcctcctgtgtagctgggaccacaggcgcacaccaccactcctggttatttcttgtatttttagtagagacagagttttgccatgttgatcaggcttatctcgaactcctgggctcatgtgatctgcctgccttggcctcccgaagagctgggattacaggcgtgagccaccgtgccyggcctgttatttgttattgtctgagcacatattatgggatgaccccaaagttatgttatgtagcttgattctcacaaccatcccatggggaagacatttttcttttttctttcttttgtttttgagatggattctcgctttgtcaccctggttggagtgcagtggcacgatctcagctcactgcaaccttcggctcccaggttcaagcaattctcctgcctcagcctccagagtggctgggattacaggtgcgcaccatcatacccagccaatttttgtatttttagtggagatgggatttcaccctattggccaggctgttctcaaactcctgacctcaagtggtccatctgcttcggcctcccaaagtactgggattacaggcatgagccaccatgcccgccca

SEQ ID NO: 791520 - DNA, 641 bp, Homo sapiens
acaaaagagaaaagctgggaaaagataaagctgttttagttatattaatagccaaaaaaaataagaactattaccagggataaagaggaatatttcacaatgatggagtcaatgaatcaataaggcataacattcctaaatgtgtattcacctwataactaaacctcaaaattcattaagcacttgacagatctggaaagataaaaagataaatctacaattataattgcaaatttcaccactccttttagtaattaatagaacaagtcaacaaatagaaatatggaagaattaaactaatcatcaacttgaactaattgacatttttaagaacatgtcacttaacaaatgcaaaatatacattcttttctagtgcagtggagcatttaccaagatagaccacatgcttagccattaaacaagtctccagaaatttaaaaggattgatatgatatagagtatgttttctgactacaagggaataaattagaaataagcaatagaaagatacatagaaaatctcaaaatacttggaaattaaatagcatacattgaagtaattaatggtttaaagatgaaataaaaaggaaagtagaaaatatttgggggtaaatgaaaagaagacacacatatcaaaattt

SEQ ID NO: 791521 - DNA, 567 bp, Homo sapiens
taatgtctcaccaatatttgatcccacattcttttgctgtaggattttgataactaaggctaaagaagttccttcaattcatttttttttttttgctaagtgcttattttttaacattatagtatttgatacctacaaaataatacacatgcaagttatggattataatattgtggaatcacaaatacttgtgagtccacaaccaacttaagaaatagtttgttgagtctatatgtgaactgtttcacctactatctctttgatttctttccctgcaaagktacccatcttcctgaaagttgtgtttaatcatccttttgctttttaaaaagtctttactgcatatgtgtatcctcaaacaatactgttgagttatacacacacacacatgcacacacatatatacacctacatatgtatgtatatataaacacatatatatttatatgtatggtgtctttggtgactcacttcttttactcaacattatgtttataaaatttttaagattcagccacaaaaatatatatagtagtacttcattaattttcactattgtacaatatg

SEQ ID NO: 791522 - DNA, 514 bp, Homo sapiens
tcgtcccagaggggcacctgccaggtgccagccagagctctcctgtatgaggtgtctgtcatcccctgctgggaggtgtctcccagttaggaggcatgggggacagggacccacttgaggaggcaggctgtcccttagtggagcttgagcattgtgctgggagatctgctgctctcttcagagctggcaggcaggaatgtttaagtctgccgaagctgcacccacagctgccccttcccccaggtgctctgtcccagggagatgggagttttttctatacacccctgactggggctgctgcctttctttcagagataccctgcccagagaggaggaatctggagaggcagtctggctacagcrgctttcctgagttgcggtggtttccacccagtccgaacttcccaatggctttgtttacactgcgaggggaaaagtgcctattcaagcctcagtaatggtggatgcaagctcgagggtcccaggttgacttcagactgctgtgctggcagtg

SEQ ID NO: 791523 - DNA, 560 bp, Homo sapiens
ctattgtggcatatttcattatttatccagacagtatgaagaggtaaggcaaaactgagactcaaaagagtccaccgcgctgaaagtatcacctatcatacaccttttgttgtgacacatgtagaggctttctattggccaaaacctatcctcaagcctgtatacaaatcctataaaataagcatgactttaacattttttttcctacctgatggtaatcccataaagcactgaatctccccctcttctcactcaccatccaagcattcagtgctggggcagaagagggcaggttggcaaaatgagaagacttattggataatttctaaatgctgaagcttcttcagggaagcaaacttcctgcccagggcaggttacttcagctagttacagcacagggctaatgaggccaaggtcatgagyttgtttaccctgagggccaattaactttgatctactttatggccacatcctgtatccctcaatccaaacagctgtttcaaaaatggatgcccttgacgacaaggaggactgctccaaagtaaaatagatgtaacagt

SEQ ID NO: 791524 - DNA, 577 bp, Homo sapiens
ccaaatctgtccataaattctcagttctcacttcatgggacccatcatcagcatttgacactcttgatcactccacttactctccaaggctcgcgctctcctggctttcttcccatctcaaaggccacttctcagcttcctttctgtgcccccgtcattgtcctgactatctcaaactccctatcagtccttttcaaccatggtttctcatctgaaccaaggacacaaaaaatgattccagagaatattttctcaactttttccaaggaaaataactagttctaggtgcataggaaggaagttaatccatcacatacaatgggtgccttagggctttgtcttaatgtttcttcacataacctcagttgacaaaggttgccagsctcaatccacaaacattaggcatctgatgcattttcatgaccttaactccatctatatattgacaactcccaaatttatatctccagcccaggcctctatctgaacacaagataatgttctctccaatttgatgcaacctcttgtaaatatctgacatctcaaacttctcatgttcaaaaacaaaacccgatct

SEQ ID NO: 791525 - DNA, 680 bp, Homo sapiens
tttctgcttattgtctttggctactttgtcaaaactctaggtatgtcaactctagctatgatacctgacacaaaagaagcctgaacattacttgaaagcaacaaggaagagaatgaaagtttgttttttatctcactaaagtaggaccattgtttacaaattctggtatgccaaagtcatctatatgctatatgagaaacaaacaagaagtttctggaccctagtgaacagttttttttttctgtgartcatggtgaattacgcccaactgcattgcttccagccttgaattcacctagatgactcaggacaacactgccactgcagattaccagcaaagtgggaggtggtgatgggactttttgataaatagtagaatatgtattccttcttctattttaaaatgaagttaataaggctttatttccttcctttgacccatgcgactgccattttatacctagtagatccatcagatgaacgctggttgcaaagtcattgcatatttcaagacataggtcttgattcacatggaaggtggtgacatggctgtctatgaggctaccagtaaggttgggctgaggcattgtactggctgtcaggcgtgtctgtgtctgtgacagtcccttcatacagtggggatcctagagctagtagatggattggtgttatgactcatg

SEQ ID NO: 791526 - DNA, 680 bp, Homo sapiens
tttctgcttattgtctttggctactttgtcaaaactctaggtatgtcaactctagctatgatacctgacacaaaagaagcctgaacattacttgaaagcaacaaggaagagaatgaaagtttgttttttatctcactaaagtaggaccattgtttacaaattctggtatgccaaagtcatctatatgctatatgagaaacaaacaagaagtttctggaccctagtgaacagttttttttttctgtgagtcatggtgaattasgcccaactgcattgcttccagccttgaattcacctagatgactcaggacaacactgccactgcagattaccagcaaagtgggaggtggtgatgggactttttgataaatagtagaatatgtattccttcttctattttaaaatgaagttaataaggctttatttccttcctttgacccatgcgactgccattttatacctagtagatccatcagatgaacgctggttgcaaagtcattgcatatttcaagacataggtcttgattcacatggaaggtggtgacatggctgtctatgaggctaccagtaaggttgggctgaggcattgtactggctgtcaggcgtgtctgtgtctgtgacagtcccttcatacagtggggatcctagagctagtagatggattggtgttatgactcatg

SEQ ID NO: 791527 - DNA, 680 bp, Homo sapiens
tttctgcttattgtctttggctactttgtcaaaactctaggtatgtcaactctagctatgatacctgacacaaaagaagcctgaacattacttgaaagcaacaaggaagagaatgaaagtttgttttttatctcactaaagtaggaccattgtttacaaattctggtatgccaaagtcatctatatgctatatgagaaacaaacaagaagtttctggaccctagtgaacagttttttttttctgtgagtcatggtgaattacgcccaactgcattgcttccagccttgaattcacctagatgactcaggacaacactgccactgcagattaccagcaaagtgggaggtggtgatgggactttttgataaatagtagaatatgtattccttcttctattttaaaatgaagttaataaggstttatttccttcctttgacccatgcgactgccattttatacctagtagatccatcagatgaacgctggttgcaaagtcattgcatatttcaagacataggtcttgattcacatggaaggtggtgacatggctgtctatgaggctaccagtaaggttgggctgaggcattgtactggctgtcaggcgtgtctgtgtctgtgacagtcccttcatacagtggggatcctagagctagtagatggattggtgttatgactcatg

SEQ ID NO: 791528 - DNA, 633 bp, Homo sapiens
cctatgcttaaagcctactagtggtttccatttgtaacaagagtcacactgagccctctgtgtggctgacaagcacctgcatgacccagccctgccgacttcttcaactttcctctcaagctacactcccctagctcaccccgctccatgatcctggcttttagttcttcaaagacactgaactctgcttcttcagctcatctgcaagctccacaggatgggcactgggctctttgatttttcacagtacctgaattgatccttagcacatgtaggtgctcaattcatattttcaagtgtctgaatgagcaacgtccacattgacgcattgatgtgaatggaagtgagaaatcactaggtatattatgaggcacaggaaggaggctcacctggacagactgaaggggtcaagggcaacgtgaggagaccaggctgaagggaacgtgggtcagtctgtgaggctttaaatgccaggcctaaagtctgcctctgacccygtaccttgcagtgaggggctggaaagccttgctgaggatggagcaggaatcattcagaaagagacctttggcaggcaccagcaggacagatggaagcatgataaacttggaagctgggacccaggttgggaggctt

SEQ ID NO: 791529 - DNA, 461 bp, Homo sapiens
cacttgctggacttggctaatcacttaatatctctgtacctcaatttccttatctgtcatatgggaataataatggttctagttgtgatgattccctatgataatgcaggtagagcacacagcacaatgcccaacagccagtcagacctcagttaaatattaacaactcttttgaaattaatattatgcataaaataatgtatgttacacaaactggagacctagaaagactcatgcttggagatgtaggcacaagagctcatttgcagaacaggagtttccaggagtaccagttgggccacgggtacactgtggccygtgtctgggctctcaggaaggtcactaagcttcttgatgggagctgaggcagctgaaggttggcctctcaggccagtgtggcttgagggctgggtggagcaagtctgcagatggtgatgttgactcagctgtgaggagctggg

SEQ ID NO: 791530 - DNA, 593 bp, Homo sapiens
aacagagtgagaccctgtcttaaaaaaaaaaaaaaggatagcaaaggagttgaaaatttgtggtggaagaagactctagaaaagaaagtagttaggtcttattaataatcagaaatcattaattctaatgctgctgagagggccatgagaaaaatggattcctagatttgccaggacacatttgagtccccagattcagtcctgtaaagtcagctttcccttacctttgtccggggtccctatgagactcctgtytcctcattaccccagcaactttcaaaaaaactcttcattatctgaagccagctgcaagagcttattctgttgcaacctaaggtagagctctgtccaactctgttcctcattacagtggtagctggtggcctcaggttccaaaaagaggaaggaaaacagatatgcaccaggtgctgtgatgggacacacactttcacaggtcacacaggttatcttatgtaattctcatggttactccaagtgacaggcagggtgaccctattgtatggatgaggagcctgagccccacaggatgacacaatgtcttagactgcgtgctcagccctgctcttgatgta

SEQ ID NO: 791531 - DNA, 583 bp, Homo sapiens
agaaaccagcataaactttgccctaaataaacagttcaggtaaggaaaggatttttccttagtaaaattaatgttttgatactattgtattatggttctagagagaaacagaaccagtacaatgtgtgtgtgtgtgtgtgtgygtgtgtgtgtgtgtgtgtgtgtacacacagagagagatttattttatggaattggcttacaagatgatggaggctcggccaggtggggtggctcacacctgtaatcccagcattttgggaggctgaggagagtggatcacctgaggtcaggagttcaagatcagcctggccaacatggtgaaaccccatctctactgaaaatacaaaaattagccaggcgtggtggtgtgcacgtgtaatcccagctattctggaggctaaggcaggagaatggcttgaacccagggggcggaggttgcagtgagcccagatcgtgccactgcactccatccagcctgggcgacagaagaagactctatatccaaaaacaaacaaacaaacagaaaaaaccagggagactggcaagtccaaaatctgcagggtgggcagcagactggaga

SEQ ID NO: 791532 - DNA, 667 bp, Homo sapiens
aggtcttttgtaactagaacttagtcctttgcagaacataataagtgtggctaataagtgtgtgtgtgtgtgtgtgtgtgtatgtgtgtgtggttttatttcagagttgctttattttaatttatgatgaatttcagtttctattagagtagtgcttttaggttgagatacatttttttatccatcaatctttgtaccaacactgtgaattaatttaatatcatgactgcttttcaaatgaagagattggggactgatatttgaagtgatttatccaatgtcacagagctctttaagggatagaacaaggattccaagccaagtcagttaactccttgtccggaattacttttyactgtaaaatagttacccattttagaattaaacacttcagatttaagtagtttgatctcaataatatctgtacagattaaattaatatcttagggggaagtaatacttaagaggagcatttaaaaaatgtagttattgacctaattatttccccacccaccacactccctgtaggattttcataagcagagaattatattctaagattgtgttcttatttcattagcactgtgataagccataagaattgtgttttactatctttaatctgttctactccatatcaaaacattcattgacaagaggagattgt

SEQ ID NO: 791533 - DNA, 608 bp, Homo sapiens
gcatgttttatgcatcacaactatcagtagtaaaaaacaaatttggatcagctgttcacaggaaaagcaacattatagaaagtaaactgaaatttttacatgaagagacactcatagactatgtcgctaaaaatattgaagtattagaaaggaatatcaggcaattaattaaaatgctttagttttctggattttgttggttgtggttcttgttggcttttacaaatttatttcttgtgatttytttttctaaataaccattcactttggtatctaattttctatatgtaatttttctattttgttttttatagaaggacccttaaattttacaagttttagaccccacaaaacttgaattcacgcctaccttttttatttatcaggtgatagtttcaagaagttggcatagcattcccctggacattcacaggttgatatgtacattttaggatatttcattgtatctttagatatcttctttgtatttcagagatttaggatttgggagaagagagactgaaagattaaaaattaaacaaattcattttttaaaggacattatttaagtttataaactaaaacatttatttatttagtaaaagctt

SEQ ID NO: 791534 - DNA, 577 bp, Homo sapiens
tttaaatacttactctaatttttgtaatcagcaaatatattggtaggaagtaaattaataaactattaatcttcaaaattatttgttacacttcagcttttacagatgcatatttggcttcattccagaattgaaccattgaaaccctcacccccacacctgtagggtagaaagactacagggatgagtttttaaaccatgagtaaaattcagtgttttgggccagacacggtggctcatgcctgtaatccctgcactttgggaggccaaggcgggtggatcacctgaggtcaggagtttgaaaccagcctgcccaacatgatgagacctcgtctctactggaaaaaaaataaaaataaaaaaataaaarttagccaggcggcgtggcacattcctgtagtcccagctactcaggaggctgaggcaggagaattgcttgaccccgggaggccaaggttgcagtgagccaagatcgtgccactgcactctagcctgggcaacagagcgaggctttgtctcaaaaaaaccaaaaaacaaataaacaaaattcagtgttttgtcccatttaaactagttt

SEQ ID NO: 791535 - DNA, 627 bp, Homo sapiens
tccagcagtttctacaaccaaaattccacctataacaaatatttttcccctgccagagagattctgtgaagcattagactccaaggggataaagtggcctcagacacaaaggggaatgatggttgaacgaccatgccctaagggaacaagaggtattttctataaactaccatgcatacatttttcaatttagtaagtaggttctrtattacagtgaagtgattttattcaaagaaagcgatgtttacagtagctaactttatttttgtactttggtaatataacatctatggacaaagttttttaaactgtaaaagtcatttaagatcaggcactataaattacctctccctttcagagacctaggtcaagcctgagatttttgccccaagactctagtgagtcttccttacagctgcctttctcattataagcatcactttggatgaatcccaagaaaattaagggtttttgtttgtttgctataaatatatgatatttctatgctgacttcatatttaccatttataatctgcattataccctactttttgtcacttattgtcaaatacttgcattagagtttattcaaaatttaacacgcagagcaggatcatcatagctgat

SEQ ID NO: 791536 - DNA, 634 bp, Homo sapiens
ttttttcattagtttactgatcacgtttgacacagctgttaccaagtattgtgtttaaaaaaacagttgaggagatgtgattcctctgctgtgccttaaaatgcaagttgatacttacgtaactacactgtattggaagattgtctacagaatgtttggctgttgtgataagtagagtgaataaatgcccacagataaaaaagtggatctccaaataggcaaagaaaaataaatttgtgtggttatggtactcatatctgcttcagttgattgactcttttttttttttttttgagacagagtctcgctctgttgcccagtctagagtgcggtggcgcgatctcggctcactgccagctccacctcccgggttcacgccattctcctgcctcagcctcccgagtagctgggactacaggcgtcctccaccacrcctggctaattttttgtatttttagtagagacggggtttcactgtgttagccaggatggtctcgatcttctgaccttgtgatccgcccgcctcagcctcccaaagtgctgggattacaggcatgagccaccgtgcccggcctatttgattgactcttaagagcttgtaggtactaacaatatgatttacattgctgctagt

SEQ ID NO: 791537 - DNA, 691 bp, Homo sapiens
cccggaagtctctcctgactgtgagtcaacattctgtgaaatggaggctgaggtgtgggaagaagacacctgctgagggaagggggtttggccaagaaccttgcccttgtggaaggggattcagggagacaaaggcctctagagaaagagaggtctcctcccagggagagctgtcctcctgcccatggagatgttcttccaagcacaattcccacactggaaacagcacaaagagaaatctgggacacagacatgagcactgagaagcacaggcctccaaccggccttcctgttctccgtagtcccctcaatcaggggacaggaaagtggcactctcaattccctagaggtcttttatattccctttcctgggttcaaattccatccttgcctccgattggctaacaattacctcattgtcttttcacttgcttagaaaatcacatctgccttctccaccccctttcctcctttcccaatgcctcttactccaaaatgacagcatcttccccttgttgtgtattcctgccctcaagttcacaactccccrttgtcttcgacctgatgtcccagggctttcagcttctctttcctgactgcattagccatgcagatttatgcagtgcttctctcagtcctcagccatcttccctgctatgttaatattcaatgttttcctttccctcaactc

SEQ ID NO: 791538 - DNA, 537 bp, Homo sapiens
tggatgaatactaagttgcatagacttgggattaaaactgcacaaggactggcaataaaataatcgttgaagatctgtaaactgaacaattcccagtgttcacacaggaatgataactgttagtattccagtcagctaaggtggagagttatcactgaacacctgagcattcagtasagtccccagaaagatcatgccttagtagtaagattatacagccctagagtaaaggctatctcccttaacaaagcttaaaaacaatcctcaaaataattaagctgatatgaaggtaactacccatgcaaagctcatcactctttaaaggaagacagcaaaatctagatactcaatagtataatagtcataatgcctagcatacaatagataccaaaatatgtaaagaagcagaaaaaatgtgacccatatgagaagaaaaatcaatggaaacagacttaaaagtgacaatcatgatggaattttctaaaaaataatttaaacagctattataaatatgtttaagagttcaaggtaaaatat

SEQ ID NO: 791539 - DNA, 537 bp, Homo sapiens
tggatgaatactaagttgcatagacttgggattaaaactgcacaaggactggcaataaaataatcgttgaagatctgtaaactgaacaattcccagtgttcacacaggaatgataactgttagtattccagtcagctaaggtggagagttatcactgaacacctgagcattcagtagagtccccagaaagatcatgccttagtagtaagattatacagccctagagtaaaggctatctcccttaacaaagcttaaaaacaatcctcaaaataattaagctgatatgaaggtaactacccatgcaaagctcatcactctttaaaggaasacagcaaaatctagatactcaatagtataatagtcataatgcctagcatacaatagataccaaaatatgtaaagaagcagaaaaaatgtgacccatatgagaagaaaaatcaatggaaacagacttaaaagtgacaatcatgatggaattttctaaaaaataatttaaacagctattataaatatgtttaagagttcaaggtaaaatat

SEQ ID NO: 791540 - DNA, 537 bp, Homo sapiens
tggatgaatactaagttgcatagacttgggattaaaactgcacaaggactggcaataaaataatcgttgaagatctgtaaactgaacaattcccagtgttcacacaggaatgataactgttagtattccagtcagctaaggtggagagttatcactgaacacctgagcattcagtagagtccccagaaagatcatgccttagtagtaagattatacagccctagagtaaaggctatctcccttaacaaagcttaaaaacaatcctcaaaataattaagctgatatgaaggtaactacccatgcaaagctcatcactctttaaaggaagacagcaaaatctagatactcaatagtataatagtcataatgcctagcatacaatasataccaaaatatgtaaagaagcagaaaaaatgtgacccatatgagaagaaaaatcaatggaaacagacttaaaagtgacaatcatgatggaattttctaaaaaataatttaaacagctattataaatatgtttaagagttcaaggtaaaatat

SEQ ID NO: 791541 - DNA, 587 bp, Homo sapiens
tacttagccatcagttcatttctcttttctcagcacccaccttccttgacttttctgcatgtttgacattgttgttcatttttttcaaacaaaggcatatagtaggagtctgctttagatattgtgcaggatgcagatatgggtaggaaacagctcctgctttaaaggagcttgcagtctgccaggagcaagtagatgagtaatgttcataaagaaacagtaagtgttacttcaaaccctttcttgaaattcttgcatcccttggctgctagggcataagcctttcctggttttcttcctaactggttactatttcttttttctgtgctgactctttttcttctgctcatgccttaaacataggactttgctgtggttttgtcccattccctcttttctrtacagtaatctgtctcccgatggtgtcatcgactcccacgtcttcactgctgggcagatttcctttttaccccccactccctccgtgcatgtgactccacattgatgttaggctcaaatatcttctaggggtttccattccaactgtccggtggacatttctactggtcaaaatcttactataagaa

SEQ ID NO: 791542 - DNA, 618 bp, Homo sapiens
gtttatggcaaaattctagtaggaaaacttacaaaaaatatacaaacttaacagtaaatttaaaggtattccatccaaaccatggtccatcattcagctgtaacaagattgagacagatcctgtctctgtttggaaaggcagtacggtagagtggttaggagcacagggtctgaagacagacagccagggttcaaatccggatcccaccacttacaaactgtgttgcttgaccctctggccattcacactcctctttggtaaagtagggattgcaatagtgcctgtcctttaagcttgttaggagcagtaactgagttaattatgtgaggtgcttataactgtgcctggtacaggataactgctcacaacctattggcctgtagcctagaaagactgtccatgaggaaggccgagtgctgaggaatgtacataggrtgataccatttttagaaaaacaaaaattgagcaggtgcagtagcacaagcctgtaatctgagatactcaagatgctaaggcgggaggatcatttgaagccaggaattttgagaccagcctgggcaacatagtgagactccatctcaaaaaaaaaaaaaaaaggctccccatcttccccactt

SEQ ID NO: 791543 - DNA, 628 bp, Homo sapiens
ggtccccagagactcacctaagccaactcacttgttctgtgaatggagaatgaggcactaagcctcaaaatcccctggcccctgttctctttcatccactccatgagacacctctccctgggcctaaatattttctactgcaaaaaaaaaaaaaaaaaaaaaaaaaaaaaccagattacctttaaaggcctttccagccctctgactcttctgactctgttctccttgcacctactccttcccagctatcgtcactgcaattcattatatagatatatagtcacttgatatagctctacaagtaaaactatgtttctgtctgttatagcatcaagtgaaattgagttggtgaactttcacygaatacaaagggcatacttggcctaggttaaaatgtaagttatacggtatacatgaaattcacgtgggggcagtccctggggaaggaatctccaatagaaaattcctctgccagtgttgttacaggcactggtttataattttgctccttctcacacaggcaactcaggatagttgcttaggatgaccagtaacagagatttaattacttaatgactctttatggctttcctaagcaacccttaggaggacagctagtggaagtgta

SEQ ID NO: 791544 - DNA, 628 bp, Homo sapiens
ggtccccagagactcacctaagccaactcacttgttctgtgaatggagaatgaggcactaagcctcaaaatcccctggcccctgttctctttcatccactccatgagacacctctccctgggcctaaatattttctactgcaaaaaaaaaaaaaaaaaaaaaaaaaaaaaccagattacctttaaaggcctttccagccctctgactcttctgactctgttctccttgcacctactccttcccagctatcgtcactgcaattcattatatagatatatagtcacttgatatagctctacaagtaaaactatgtttctgtctgttatagcatcaagtgaaattgagttggtgaactttcactgaatacaaagggcatacttggcctaggttaaaatgtaagttatacggtatacatgaaattcacgtgggggcagtccctggggaaggaatctccaataraaaattcctctgccagtgttgttacaggcactggtttataattttgctccttctcacacaggcaactcaggatagttgcttaggatgaccagtaacagagatttaattacttaatgactctttatggctttcctaagcaacccttaggaggacagctagtggaagtgta

SEQ ID NO: 791545 - DNA, 546 bp, Homo sapiens
aaggacaaagacacaagaatgagaaattacaatacagtaagatgtctacactactataaaagcatcagtaatggagccactaaactaagcttgataggggcatccgcccctaatttgagtctggaagaaagagtatgaggttccctaggcagagagaaaagtattctaagaagataaatagcaagtttaaggccaagagatataaaccctacatagccctttatgaccagaccattgagaaagcttgagagaggaggaagagggagcttgaaagagaagtggagaccacattatttaactgaggtaatttgattgggatggaaaaaatagatccgaatcctagagggatttattagagagaataaacrattaagaggaaacaatccaactttgaaaataagaaaactgaagaagacctaactacattaataaaaacatcatgatattttggaaagaatagccacattaacagaacaaaaagaagtcccagaaacatattcaagcatatataaaaatacggtatatgaaaaaaagaaaaattctaag

SEQ ID NO: 791546 - DNA, 550 bp, Homo sapiens
cacatacacatttatacatataaatgaaaatatatttatatctttttccctaaatttgccactgccaggtagggagtgctgatctttagtcctaaggggtgtcaggaaaggcctccctgaggaagaaacatttaaactgacagaccctaaggcatgaatggcaagtagaacataaagaaggaagggaaaagaatattccaaatatatgaagtattggattggaaaattctaaatgtacagaaccactcattgtttttcagaaacagggagaaakccgggcatggacgcttagtgtgctagagggcaaaggcccacgtggctccgtcatccggggcttttcatatcttacgctgacccgcctgacttctctgatcctcagtttccacatatggatgctaagacaatacattcctccgaggcagatgtggagaattaatctgagaaatgtaagcgtaagactggatacagaaccttggctgactcttttctctttcttgctgtaactcccctgactacctatggaggtttttgtattgttttgtgagagaca

SEQ ID NO: 791547 - DNA, 669 bp, Homo sapiens
gccaatttgtccacagtaagtttagctcagagcctaatccaggtgggctttcagttggctgtccttgtcacacatgccatttttgagagcagcagcatggatgggcagtgtcatggcagctagtctgtgggccactggttcccactcaccaaaacccccctactttctgtcttgggcactgggtccctgctctgctcacccactgtgtattaagctcacacttcactttccttgtccccaaggagcttatggttcggtaggaagaaatggatgtacaagcaaaaacaaagcttaatggagaagctgaggaagcaaagaaaaatgacaagtgagaggggacttgaaggattaatgartttatctagtggagaaagaatgagggatctttctgttagattgtccaaaacttggaggtgtgaaagattatggggcaattatcctgtatggctgtggctaagagaaatggtgctgttttttgtgttcctctgttcccactgtttgctgttactcaatcatctgtgctttataccccaatctgctgctgcacatgtcatctgcctaactcagaatccaatgaatagatttcaacttaaaccccctttcaggagttactaacatgcatttatctgaagtgactgtcttcctttgttgtactggaaatttttggta

SEQ ID NO: 791548 - DNA, 553 bp, Homo sapiens
taacaattgactttgttgtggcaactgtaatattctggagtctccattgccacttagtgtggttgacccctttgaaaggtgcacagtgactcaagtgacaaaaattaccttaattaaacaggattgcctacacccgtgttgggctaagaccaagaattattaaagccctttctttagccaaagcctattatgctgtctgggacttcaataaatggtcaaatcatgtttgctaaycttcctggtttgccaggagcccacctgcctcccacactcactgccaggtcatctcctgctacatgatggacaaggaaagaaaagagagatttgccaagaaagtgccttggcagcctcatgtccagctctaggtattgtactatggtgaggatggctacactgagctaacgtagataaaactggctccaccttcaacagagagtacttgctcatgtgccagaaatcctttcttaaaaacagctttatgcaggtaaaattgataagcaatgaattgtacatatttaaagtctacattttgagacatcctaactcaaattta

SEQ ID NO: 791549 - DNA, 622 bp, Homo sapiens
tcctaatgtttatgttatagtcaaccaaggggaaatactataattttcttaatcattgaacattcaagttgcttccaattttccagtattagaaatatgcaataaatacatatgtacataaatctttacttcttttgaatcctttgcacagaaaagtattaatcagttaaaagtatgcacatttttagagttgccaatatgattaaatttattttcaaagtgatcatatatatttgtattacctcagcactctcaccagtggggcccataacragaggtactggtactcgttcatcactagtcctctaacaaattgtctatcatctataaatgttcactaattgagttcatgagtgaataaatgagaatgccattttactgaaacctcaatatcactgaatcttattttgtttgctagtttaagacagctggtacattttaggctattttaaaactgtttaaaataattaaaaacttggccattgaatcagaaggtccataaaaaatgaatctccttgccagcataaaggtctttcttggtatttaaacatttttctatacattgccaagtgtaatgtaatttcattctattataatttttctttctaaacacaaaaatatt

SEQ ID NO: 791550 - DNA, 553 bp, Homo sapiens
ataaccataacaacactgtaagcagaaacaggacacaacacaaactattattcctaatataagcaataagcttctgycaccaagtttcccaggatccaaacccaccactcaactgattgattaacgaaggttttgggtgtgacagatatctgggttttcatatcagtcataagtcagattatgttcttcaattcatctggaatataaacacaacattccatttttatgatggtgcaggtcctcccttgtgctgccgtgagtctatgtaaagccatacggttttgcagcacagctttcctcataagcatgacttccttgtttagcaaggaaatactcatgcagctatcattcaggaccttttgggagtaattcactaaagcctctatatgccatataacatcttcagtacctatctgtggtacaaagattgaagctaagtggtcataccattagaataccaaatgtgtccaacaagattgtaaatgaaaaaggtttgctggttttggcaggtctgaattactcgtccttgtgcccaggcataacatagggaaca

SEQ ID NO: 791551 - DNA, 553 bp, Homo sapiens
ataaccataacaacactgtaagcagaaacaggacacaacacaaactattattcctaatataagcaataagcttctgtcaccaagtttcccaggatccaaacccaccactcaactgattgattaacgaaggttttgggtgtgacagatatctgggttttcatatcagtcataagtcagattatgttcttcaattcatctggaatataaacacaacattccatttttatgatggtgcaggtcctcccttgtgctgcygtgagtctatgtaaagccatacggttttgcagcacagctttcctcataagcatgacttccttgtttagcaaggaaatactcatgcagctatcattcaggaccttttgggagtaattcactaaagcctctatatgccatataacatcttcagtacctatctgtggtacaaagattgaagctaagtggtcataccattagaataccaaatgtgtccaacaagattgtaaatgaaaaaggtttgctggttttggcaggtctgaattactcgtccttgtgcccaggcataacatagggaaca

SEQ ID NO: 791552 - DNA, 611 bp, Homo sapiens
ttcacaggggctcgactgctccagggactgctttcttcagacctttcttttttctttttcttttttcatttttagacagggtctcactctgtcacccaggctggaatgcaatggcataatcatagagtacactgcagcctcaacttcctgggctcaagtgatccccttgcctcagcctcctgggtagctggaactacaggtgcatgccaccacaccctgctaattaaaaaaaaaaacaattttgtagagatggggtttcactatggtgcctaggctggtctcaaactcctggtctcaggcagttctcctgcctcagcctcccaaagtgctgggattacaggagccactgtaccaggccccttcagacctttttactgtggatcccatgaactcatctggtattgaagagaacaaaactcctccctatttcaattgctgtaaattggtctccacacattccrgtgaatatttgttgactgttctggggctctcctgttttcaggtccatcagatgctgccctgacacttccttcttctcccacatgaataccatgcaggtcttgtgttgatggtggtttatctctaccaacttcttttggagcctatagagc

SEQ ID NO: 791553 - DNA, 487 bp, Homo sapiens
aaaaggtttatggtgtaatgttgcctagctcctgtcagaaaagaaaacacatcaaattttctagaaaattgaaagatagttcatgatcatttagtattctgaggtactccaagaagattactaatcctagcccttctgttttctggcccatcctcagaatgggtcactaaaactttctcactccaacacatacaaattctctagaaccttgtatactgtgacttatttatttgttagctttcactgaaaaatgttttttaaaatagtcctatgagaccagtactgcatttactctaaagatgttgttgaggatcttatctgtcctatctctctgtgccytcatttgaagggccacatgaaaaagcacttatagaaataaatgtagaaaaaacatttaccgctaaggaaaagttatgttctgctcactgacaatgagtgtattagtctgaactctgctactaataaagacatacccaagactgggcaa

SEQ ID NO: 791554 - DNA, 606 bp, Homo sapiens
ggggaaaaaatactgtactttgaaatggtgtagttctgtctgctcaccaggggagggagccctgttcccagttcctctgtgagcgattcatacgaagatgcattgtctttgtctttagggctgtgtgaaagacatctactcttcagtttgcagttaatgtaggtatgtaaagggacttcttaaaaagaatttgagttagatttaaaatgttttagtttaatttaacccctgtatactgagcagcctgggttttagagtcagacctggattctgccccagaggtactacttatcagctgacttttagcaatttacgtaacctttatragcctccgtttttctcaagtataaatgaggacagttaactttcttcagagggttttgtgaggatcaaatgagaatacatgagaagttctcagcttatgatattcagtaaaggttagttttctgccctactccaccccaccccagcctcaccaccctgtatttattttctagggtttatcttccatgaggatatgggacagttctggtttcaaatattctgcccttttgtcagatgactatatgacttcatatgtgataaattttggtttagaaactgcag

SEQ ID NO: 791555 - DNA, 606 bp, Homo sapiens
ggggaaaaaatactgtactttgaaatggtgtagttctgtctgctcaccaggggagggagccctgttcccagttcctctgtgagcgattcatacgaagatgcattgtctttgtctttagggctgtgtgaaagacatctactcttcagtttgcagttaatgtaggtatgtaaagggacttcttaaaaagaatttgagttagatttaaaatgttttagtttaatttaacccctgtatactgagcagcctgggttttagagtcagacctggattctgccccagaggtactacttatcagctgacttttagcaatttacgtaacctttataagcctccgtttttctcaagtataaatgaggacagttmactttcttcagagggttttgtgaggatcaaatgagaatacatgagaagttctcagcttatgatattcagtaaaggttagttttctgccctactccaccccaccccagcctcaccaccctgtatttattttctagggtttatcttccatgaggatatgggacagttctggtttcaaatattctgcccttttgtcagatgactatatgacttcatatgtgataaattttggtttagaaactgcag

SEQ ID NO: 791556 - DNA, 606 bp, Homo sapiens
ggggaaaaaatactgtactttgaaatggtgtagttctgtctgctcaccaggggagggagccctgttcccagttcctctgtgagcgattcatacgaagatgcattgtctttgtctttagggctgtgtgaaagacatctactcttcagtttgcagttaatgtaggtatgtaaagggacttcttaaaaagaatttgagttagatttaaaatgttttagtttaatttaacccctgtatactgagcagcctgggttttagagtcagacctggattctgccccagaggtactacttatcagctgacttttagcaatttacgtaacctttataagcctccgtttttctcaagtataaatgaggacagttaactttcttcagagggttttgtgaggatcaaatgagaatacatgagaagttctcagcttatgatattcagtaaaggttagttwtctgccctactccaccccaccccagcctcaccaccctgtatttattttctagggtttatcttccatgaggatatgggacagttctggtttcaaatattctgcccttttgtcagatgactatatgacttcatatgtgataaattttggtttagaaactgcag

SEQ ID NO: 791557 - DNA, 525 bp, Homo sapiens
tctccctgataaaagctgaggcaaaagaggttcattcagcaaaccttatgtgaataattcctttttgtcaagtgctatgtcaggcattgggaatacagaaattaacttcacacattcctgtcctcaaggaactcttagatttgcaggagaggcaaacacaatgttggatgccatgcaggtggcagccaagaagagagagcagtgcgctgccctgtgggaatctcagcccctcggagagggagcagtgagggagcagcacgtgggcagcagctcacattagggagcagcaaagaacctcatccagctggtccatgggctcgagaagggaggtcctgacagattttgggaactgtgaatgtctractgaatttgaaggtgtgtgaagagttttagtggaagaaagaattggagaaataagactttgcatgtcatgaagaggcgtgaaagactttatttcttgagctgtgaggagttagtaatgcagggttaaacagaggcatcaaaatcagaattggtaactggttt

SEQ ID NO: 791558 - DNA, 665 bp, Homo sapiens
acctctgaaggcagattgaacctagatgtgttagaagtgtggcttgtacagactacaatgtttgatctagaacttatgctggttcgtggtctttcctgggtttgatactcagtgactagtcactgggctcttcagggcatttcgtaataatttacagacatgaagaattcttttcactccagtcagccagttcagatccttccagatgccagggttgactcacactgcattctttgtgactactctgccccccatcttcatcagcacgagtgctagaagagagaaaagacgatttactttcacttgttgtgtggccctgggagaaacaggaacacttggagctctttcctttttgaaaatcaactctgggtcccatgtgcacagactgcayaccagagacaccaaggaagagaaccaggagcaaggaagatgagcgccccctcgcagggctcccctgcctagtttttcggaagttaccactcttattcattttttactgtatctgctagatcagacaactgtgtatcaagtcaagatagaggcttcctaagagaggtgataaaagagatggataaaagtggtggttggatgtatttttatgagcagggcaatgaaacattctgtgatttaagaagtgcactcagtgatgaaattccttttcctgg

SEQ ID NO: 791559 - DNA, 587 bp, Homo sapiens
ttttactagcatacagtagttccccctgcctaatccacggttttgcttttcactgtttcagttacctgaggtcaactttgttccagaaaaattcaatggcaaattctagaaataatttgtaaattttaaattgtaggccattctgagtagcatgatgaaaccttgcrctgtcctgctccgtcctgactagacatgaaccatctgtttgtccagcctgtccatgctgtccacgctacctgcttgtcagtcacttggcagctgtctcagttatcagatctactcttgcttatgatgtatacatagggttcagtactgtcatggtccaggcatccactgggggccttggaacatatccccccatggatgaaggtgacttctgtataatattcttctggtttcttaatctcttttccttcttaaattctatttgtctgatattaaaattgctaacttgattttctttttacttataacagcattataacttttccatttctttattttcagtcttgaagcattcattggttttagctatcttgtgtggactgcgtacctctggttcttgttttttattcaatctaacaatt

SEQ ID NO: 791560 - DNA, 588 bp, Homo sapiens
ggataaaagaagaaatcactagagaaaattaaaaatattttgaaccaaaagaaaaaagaaaactgcaatacatccaaactgtggtttgcaactaaaacagtgcttaaagggaaatgtatatcattaaaagccttttaaaatgcatttttagcattcaaagtgcattcatctctccaattagaactgatacttcttttgtactgtactctgtacagctgtttttcactatatcaataatattttaatggatctattaaatatttgctaacattatcaacctcttcttttctaaaccataaaagtcctttaaggacaagtacagtcgttctcaattttttgtctgtgatttctaacacagtgcatgcttcttagtgagttctcagtagattttgaaagaaagattggactggatcttaycttcatgagaaccctgtggagataggcaaaataagtataaccccattttacagttgaggccacccacttaataaacaagtgacaaagccaagtttccagtattcctcaagtgttttcctttcaggctctaaattgctgacttaaatgtcatcattagagagagttgtctcc

SEQ ID NO: 791561 - DNA, 660 bp, Homo sapiens
aaaacagagtggcagagaacaagcagcctgcaggcagtgtgtggccaccaaagtgagctctccacggtcatatcttttttggtcccatagtatattctatctagaccaatactgagcagccaccagacatattcaccaatctgttgatcatgataactgcaacatttaatggagaatttataacccaggatcttatccttcagctattaagttgagatatttcatacattgaaatttgtgttggaaggcctttgtgtctcataatcaaaaaataaaaaatatataaaactatatgaatatatataaacaattacccaaataggcaccatgatcaagtctataacaaaagagaagcattttatttctttatttccctaatgcaggagcacgctctakgatataggcgcaagtcacagaataaatgttttaatgtctcttcctttctgccacttaatttgcctaaattttacctgtcttgcttaataaaacacatgtaataacattgttaccttccaagggacttatgtaaattaatgaatatggctgtaaaacattttgtaaacatgaagtgttacataaatacttacaaattcctcaaatgtgctcattatattgcccattttgaaccttaatattatttacttaaaactctacatttga

SEQ ID NO: 791562 - DNA, 615 bp, Homo sapiens
aactatatcagatgagatgctctagaagataatacgtgaagaagtcttgctccgtggctggcccgggagagggttttagcttatgtttactgaatattatgctttcttacttttaaactcctttttgagccatttaggttggctccctcattttatagattagaaaaccgaagcacagaggagttaagtgacaagtataagaacactcaactaattgcagtacatcagagacagcaatcaagttcccttgcctctcagcctggagcccttttctccatatcacactgcccgtgacttgattggtgtacttgctcctccctgccatctatgaagaagcttctaaaaacagtaatgtcacacaatgaatggatttccaggaagccatcaagttcaggtcaacatctttgagcaagatttaccttaaaacactcgaaaggaatagaatatatacattttcartcctcagagatggaaattctaccatatttctcagtagtctactccaattttgcttgttagtagatacttccttatgcctatcccaaatccctcatattgcagtttaagcctcttgtgttgtcctcaggtgaggcagaaaacactggtcactgtgtt

SEQ ID NO: 791563 - DNA, 611 bp, Homo sapiens
caggggcctttgtggaaaagacatgcagatagagctatgggagtaggtagaaagcatggcaatcattgtatttgacatggatgtgcacaacaaattccatatttcagggcagacatggaagaaccagtaggacagaacttgtctagagttgtcagctagtctctgtgctcacttgccccagggcttatgcaatgggctcacagacagagtggccaaattgcagagatggaagttttgggctaacagcatgggctttctgtcatctaggctgacctagctactactgctgccaaagttctgatgtgtcagagatagggacccaaactgagtccccaataaagtattgtgacttaaagaaatgaacctgccatttcatggcaattttacttgaatggattcraccccgggaagacaggcgattcatgcttatcggacataatatattctgaatacaggtttacctttcctttccatcccaaatgcctttgccagtaccattactcagtggttcagagagagtctgatttacagacatgaactccttcataacgctgtttgggaccaaagaattcacttgctgaataggatatgtgacactgagcatatagctt

SEQ ID NO: 791564 - DNA, 575 bp, Homo sapiens
ccagattcaattatgtatgggctgtcctataatccttatttctcccccttttttgtttttgccatcagttgtttatctgtatgaaatagtaactgagcattttcaattaactgtgtggaatggaccacgtataaagaatcagaaatcacattaataggcatatcaaaagcagtcaatacctcaattacagctacaatctctgctttttgagctaaagtrtagggtgtctggaaaactttactttttttttaccagaataaaaagctttaccgttactagacccatctgtgaaacaatgaaaatgcttagcaggctgcagcttgtttactgcaggaattgtaaatgcaaactgttcataggcttgctcagctaaggggataataaagaaacagtcttttaaatctatgactattaaaggccaattttttggaattatagcagaagaaggcaatcctggctgtaatgctcccataggttgtataactgaattgatggctcttaagtcagttaacattctccatttacctgattttttcttaattacaaaaactggagaattccaaggggaaaatgtt

SEQ ID NO: 791565 - DNA, 634 bp, Homo sapiens
ttttcactaagggaaaaagacagaaaattgcctcccatttcatggtattcttctcaaatgctgaatatggcacaatctacttacctaattatatatgatttatgaccatttccactgaagctacagagaggaagcttgtttccaaagacaatattcagttttatgaaactcagcaggtaccgcataagtctgctttttactgcaaaaggcataattacttgtttagaaatgagagtgtgagagaactgatgagaaaaaaattaaagtgaaaaacttttgaaacatagtgatttacagatactgttaagcacatttataaatgtggccaaggtgaatagactgtgtgtaaacttcaaacacagacacttaaagaagaacaatgagaactccaaatgccttcrccagtgactcgtctttgagatgttgccaactggggaaggtcagcatctctgggcttcccttcttgcctgggtagcaaatcaaagcctcccttattgagctggcattgattgtatagaaatagctctgtagatgctctttggcttcgcactttctcagctgttttcttcaggaagtaaacacttttgttttaggactcacatctatttcccattacaatgttccagagaaaccc

SEQ ID NO: 791566 - DNA, 634 bp, Homo sapiens
ttttcactaagggaaaaagacagaaaattgcctcccatttcatggtattcttctcaaatgctgaatatggcacaatctacttacctaattatatatgatttatgaccatttccactgaagctacagagaggaagcttgtttccaaagacaatattcagttttatgaaactcagcaggtaccgcataagtctgctttttactgcaaaaggcataattacttgtttagaaatgagagtgtgagagaactgatgagaaaaaaattaaagtgaaaaacttttgaaacatagtgatttacagatactgttaagcacatttataaatgtggccaaggtgaatagactgtgtgtaaacttcaaacacagacacttaaagaagaacaatgagaactccaaatgccttcaccagtgactcgtctttgagatgttgccaactggggaaggtcagcrtctctgggcttcccttcttgcctgggtagcaaatcaaagcctcccttattgagctggcattgattgtatagaaatagctctgtagatgctctttggcttcgcactttctcagctgttttcttcaggaagtaaacacttttgttttaggactcacatctatttcccattacaatgttccagagaaaccc

SEQ ID NO: 791567 - DNA, 582 bp, Homo sapiens
gcatttggagctttttccgttggtggattgctggtctggctagcctcaagagtgaagctgcagaccttgcagtgagtgttacagctcatagacacagcacggactcagtgagcagcaacaagatttattgcaaagaacaaaagaacagagcttccacactgtggaaggctatctgagcagcttgccactgttggctagggcagcctgcttttattcctttatctgaccccacccacatcttgctgattggcccattttacagagagctgattggtccgttttgacagggtgctgattggtgcatttacaatccctgagctagacacagagygctgactggtgtatttacaatcctctagctagaggtaaaagttctccaagccccgaccagataagctagatacagagtgctgattggtgtatccacaaaccccaagctagacacagagtgctgattggtgcatatacaatcctccggctagacataaaagtactccaagtccccaccccactcaggagcccagctggcttctcctagtggatcccgtgccagggccataggcggagctgcccaccagtcca

SEQ ID NO: 791568 - DNA, 457 bp, Homo sapiens
caccccactcaggagcccagctggcttctcctagtggatcccgtgccagggccataggcggagctgcccaccagtccagtgctatgtgcctgcactcctcagtccttgggtggtcaatgggaccaggcactatagaacaaggggyggtgcccgtgggggaggcttgggccacacgggagcccaggagttgcggcgggggcggtgttgcttgggcatgggggtgctgcaggtcccaagccctgcagcatgggaaggcggctgaggttcggcgagaattcaaccacagcgcgggtgggccgtcagtgctgagggacccggcgcaccctcctcagctgctggtctgggtgctaagccccttactgcctggggccggcggcaccagccggctgctgggagtgtggggcccgctgagcccgcgcccaccaggaactcatgctggcctgcgagcactgtgcac

SEQ ID NO: 791569 - DNA, 602 bp, Homo sapiens
tcacaataagcacacccagtgcccacatcttggtttctaatgcctttctccaataaaaggaatcagaaatccttagataaatggctgattctagggctggggtaaggattatacaaaagaaggctagagcatcgtgtagtgccaggaagtaaagaagcgtttaaaaaccccacaagaatgagattatgccggagggacacaggaaccactgaaagagttcccagtagccaaagctggaataatctgagcaacaaaataaagcacatgcaatgcaaaataggagatcgagaccatcctggccaacatggtgaaacctcatctttaccaaaatacaaaaacaaattagccaggcgtggtggtgcatgccaccagctactactaatacaccagatgggagtagtcccagctacttggaargctgaggcaggggaatcacttgaacctgggaggcggaggttgcagtgagctgagattgcaccactgcactccagtctggcgacagagtgagactctgtctcacaataaataaataaaaataaatgttcacgaatccttactgatatatataatatgtgcatatatgtatatatatgttatatata

SEQ ID NO: 791570 - DNA, 486 bp, Homo sapiens
ctttttagaaacatcagcaatttaccaaaggtcaatcattcttctgatttacaatatgtatttgtccatcccaggttttgctggactaagcacgcacaaaattaaactgagatttcaactagtttacatgttctgaaacctgcagagttgtgataagcatttgacaagattttgatctgcagggttcttccttctctgttaatttattagtcaaggtggaaaatagctggtccacatgyttcagagaaaactctgtgcaatggttgactaaaatcataacaactaaggtgagtgatcacttgctacctgccacacttccttccattccctcctccatggcactatgaggaggtgctccctctagcctcaggttacagatgagcaaactgaactgagagaggagtgttttacctgcgatcacacaggagaatgtagatgcagctcagaaaatgtttccttactgatggtgattaatggttcataatt

SEQ ID NO: 791571 - DNA, 603 bp, Homo sapiens
aacccaacattgagtcatgattaaaagccctcacaaaaccagggataaaatgaagagtcctcataggatgcaggccatctacacaaaaatctatgtcttcctaaaattgagaacaaggtaaagatatctactctcatcacttttattaaacattgtactggaggttctaactcatgaaataaggcaagaaaaagaaataaatcatctagaytggaaagagtaacactttccttatcatttgtgtacaccagtccatggaatccatgaaataaaagctattagaactaataagtgagttagcaaggtggcagagttcaagattaatatacacaaatcaagggtatttttatataaaacaatcagaaattgaaattttaaaaatgttatttccaataccattaacaaatataaaattgttagccataaaccaaataaaacatgtggaagacttgtacattgaaaactgcaaaacattgctgagagaaattaaagaagacctaactaaatggaacatgtaccatgttcatggacaggaagacttgaagttgttaagatgtcaattctcccaagttgagttatagatcaattgaatatcaatcaaaa

SEQ ID NO: 791572 - DNA, 552 bp, Homo sapiens
catgttcatggacaggaagacttgaagttgttaagatgtcaattctcccaagttgagttatagatcaattgaatatcaatcaaaattccagaaggcttttaaaagtgaaaatcaataattgaactttaagttttatatggaaaaaatgaaggacctagaatagtgaaaataactttgcaaaagaagaayaaagttggaggacttacttatctgatttcaaggctaaatataaagctatattaaaacagtatggtattgccatacatatagacaaatagatcaatgaaacacaataaagattccagaaatagactcacatatatatggccaatagattctcgacaaagtacatagacacttcaatggagaaagtattgtctttccaacaaatgatgctgaatccccaaaaaagtgaactttgattcgtacctctacagcatatacaaactttaattcaaaggaattcatagaccttaaactataacatttttagaagaaaatagagcagaaatctttgtgaccttggatacaacataaaaagcataattcata

SEQ ID NO: 791573 - DNA, 478 bp, Homo sapiens
  misc_feature 474, 475, 476, 477, 478: n = A,T,C or G
gccacggagccccctcgctgttgtccgcgttgctcagcctgtaggccgaaggccctggactcactcgccctggagatgcgccgagtcccccgcaaccccggtgcacctgccgtcggggcagccgggctcaaggacccagccgcagctcccacccacgctcgctcactgctccggcccgaggcgctgcgggaccccagacccagcgaggagggcgccgcctcccccctgcacacccgcacctttgccgcctcgaactcggcccatcctcggcaacggagcaccccagcgcrgcctcgctaactccactccttgagggagggacagccgtccccgcccgccgcccatagccttgtctctcccggctcctcccaacgctcctcttcacgaggacgggccagccgcacagcccagccctccctgtcaaaccgcctttccaaccacgccctgctcctccccttccctccgcagctcctnnnnn

SEQ ID NO: 791574 - DNA, 518 bp, Homo sapiens
aataaaaatacaagaaaattagtcaggcattgtggtacacgcctgtaatcccagctactcaggaggctgaggcaggagaattgcttgaacccaggaggcagaggttgcagtgagccaagatcacaccaccgcactccagcctggatcacrgaaggagactctgtctcaaaaaataataataattttaatgttttatatatcatatgatcacattgcttgtggctaattaaagagtacatcaagctccccaagctttatcagcctacagacaaacatggggttacaatgatgacaataatccacattttactactggctatttcccttacttactccgatgggaccccggcctccttcctcacccaagtatttcctacagaatgtctcacatatgctcatattcgcctctcccttcaactacccccagtccaccactgtacaggaaagtaaagttcctgtgactcacctgttcactccagaccctcaattactccacacaccctggggccttaaggcaa

SEQ ID NO: 791575 - DNA, 518 bp, Homo sapiens
aataaaaatacaagaaaattagtcaggcattgtggtacacgcctgtaatcccagctactcaggaggctgaggcaggagaattgcttgaacccaggaggcagaggttgcagtgagccaagatcacaccaccgcactccagcctggatcacagaaggagactctgtctcaaaaaataataataattttaatgttttatatatcatatgatcacattgcttgtggctaattaaagagtacatcaagctccccaagctttatcagcctacagacaaacatggggttacaatgatgacaataatccacattttactactggctatttcccttacttactccgatgggaccccggcctccttcctcacccaartatttcctacagaatgtctcacatatgctcatattcgcctctcccttcaactacccccagtccaccactgtacaggaaagtaaagttcctgtgactcacctgttcactccagaccctcaattactccacacaccctggggccttaaggcaa

SEQ ID NO: 791576 - DNA, 591 bp, Homo sapiens
atggccatgaaaccactaccatagtcaagatactgaacatattcgccacactcaaaactttccttgcatccctttataatcactacctgtccccaggcaaccactggtctgctgccaacagttgcttcacatcctcaccaacattcagtcagtcactttaattttaggcattctaataggtacatagtatctcattgtggttttaatgtgcgtttccctaaagactactgactttgagcattttcctctgcttatttttcatgtgcacatctycactggtgaaatgtctgtttgaatctttagtgcatttttaaaattgaactgttttcctatttttgcatcttaaatgccctttacatattctggatgcaagatatttatctaatatgtgatttgcaaatatttcttcccagtctgtgacttttttttttccattgtattaatggcatcttttgaagagcagaggatcctgaatttgatgaagtcctatttatcaatttttttcttttatgaatcatgtcaaatctaaaacagctttgtctaacccaaagtcacaaagattatcttctatgggaaaacattatttgcaca

SEQ ID NO: 791577 - DNA, 601 bp, Homo sapiens
aactgtttttagtccaatgtcttaaagctgcagaattgctcatttcatgccctttgcttaaagaaaataaaagtaatttctcttttaaattatatacacacatggatgctccaggatgtcacctaaattttcagaaacgcctctgtgtcacaagtggaagctccttagatggaaaaccactttaatgccccaaggagaatgcaactttaaaaacagcccttcgatgagccttttgtaaagctaagaatccttgaaaaatcargcactgcctgatttatccagtaggtatacactttcatatgcgatgctggcttttagaggagtgttaaacaggtgtgtaaagtgcaaaggtcagtgaggatgcatgtcttttacagatgccttcaagaattccagaagaacctctagcttctaccagtcatgtcccagcatgacctccacttctcatctaaggaatggaatttggcgtcatgggagagatggatcaggggagatttcaacactctacattttatttgtgtcacttctttcctgtctcttctaactactatctattgtgtcctctcaaacaatttttctttggcctatatatttccttatt

SEQ ID NO: 791578 - DNA, 472 bp, Homo sapiens; identical to SEQ ID NO: 790542

SEQ ID NO: 791579 - DNA, 540 bp, Homo sapiens
agaagagtcctttcagtggatccctctctcgatttgaatctctttgacttctgcaaccagcaggagaaaactctctggttttaagaggcccgtgtgactaggttaggctaacctgggtaatcttcctttcttactgtcaactgatgagcaaacttaattccacctgccatcttagaattctacctaccacaggcagacttttgggtaatgatgctgaacaaggagcagttttggatgcctcgttttgaatagatgttgacacttaatggatatctacaagaaaraaaactatatgttaaaggactaaaaactacataaaatgaagtctgttacttaagcaaaactgaagtgttttccctcaagcaaaggagacaaattcaaattttgaaagtgacaaagaggatggatttgatttatctgtgtagcagctgatggtgagcagaagtcacaaatggagccagtacagtgctatacagagaagaatttgaattttccacattctttgtgtttttttttaaatattaattcttgaacctcacc

SEQ ID NO: 791580 - DNA, 599 bp, Homo sapiens
gccccgtagcccagtcaacttgacacataaaattgaccataacatcatataaattaaatcatacagtatttgtccttttgtgactggcttatttcacttaacatagtgtcctcaagattcttccatgttgtagcacatgtcagaatttccttcctttttaaggctgaataatatttcatttatgtgtatactgcaatttgtttatccattcatatgttgatggacacttgggttacaaacattttggctattgtgaataatgctgctatgaacatgggtgtacaagtatctcttttagtttctgcttttaattcttttgggtacatacccagaagtagaattgctgtatcatatggtaatactatgtttaattgttttaggaacacaccrtactgtttttcatagcagctgcaccattttactttcctaccatcagcgtgtgagggttctaatttctccacatcctcaccaacatttgttattttctgtttttttttttaatcgcagactttcctaatgcatgtgaggtggttattagtttctcttgcacttaaatgttagtcattttctgtcactttctgtccatttttgtcatgtac

SEQ ID NO: 791581 - DNA, 631 bp, Homo sapiens
tgcttagaaatgccttggctatttggactcttttttggttccatgtgaattttaaaattggtttgtctagttctgtgaaatatctcaatggtagtttaatagaaatagcattgaatttgtaaattgctttgggcagtatgaccattttaatgatattaattattttcttttccatgagtatggaatgtttttccatttgttttgtcatctcccatttctttaagcagtgttttgtaattatcattgtggagatctttcacctccctgattagctgtattactatgtatttcattctttttgtggcaattgtgaattggattgcattcctaatttggctaagagattggctcttgctgttgtataggaatgctagtgatttagatgttgattttgtattctgaaactttgctgaatttgcttatcaattaaagaacgtttagactgagacyatggggttttatagaggtagaatcatgtcatttgcaaacaaagatagtttgattttctctcttcctttgggataccctttagttctttctcttgcctgattgctctggccacgacttccaatattattttgaataggaatggtgacagagggcatccttgtcttgtgccagttttgaaagg

SEQ ID NO: 791582 - DNA, 536 bp, Homo sapiens
ggattatctacacatttagccatgctcctctgaaaaccgccagagaactcccactacacaaacacttcatgtcagaggccaggaacaaggcagggacatattcagagagtggaaggccaggagaatcccattcacccaaaacttccccaggtgttgtcctgagcaggcaacaggaacctagaatgacttaragaaaccaggtgaaccagagtctttctcctttgggaattcagtgaattcagaactcctctattcagaaaccttagagaaggcccttgaccttcagacactcatattaacaagtagcaactgcaccaaaaaactattggctgcttgctatgagacaggctaggtacatgaagtacactattgcattaaatcctcactacccattgaggtatgtactgtcatctccatcttacagataagtaaactgaggcccagagaagttaagatactttcctgggttcacaaagatgagatggcagaagtgagattcccctggtttggccccagaccctgaactctcagcacta

SEQ ID NO: 791583 - DNA, 526 bp, Homo sapiens
ggggacaggtactgttaaagagagggatctaggatgcttcggggcttggggcttgtgcaaacatctggtttgttagtgctacttacccattggaaaaggactagcctctaggggagacagaaatcaagagttctgctttaaagatactataatttgaaatgccctttagactatttgatacttacaacgattaacactagagaggtcttagactgcatcagcattcattaacagcaaacatttatttgacaaacactgtatgtcatgcatcatgccacaccgtgaactgtgacctgggcacttactatgtacctagtacaggtgtgtgttagggtacaagggttggttagrgggacacagaaaggaaaagacataacgcttattctcagggcactcaagtaatcacgtgggaaactgacatacaattctctttacattataccataaaaataaactgagatgatggactacaaatctaaatatgaaagataaaataataaagcttttagaaaaacatctttttgac

SEQ ID NO: 791584 - DNA, 632 bp, Homo sapiens
acagtgagctgtggtcatgccactgcactccaacctaggcaacagagtaagaccctgtctccacaaaaaaaaaaaaaaaaaaaagtttcttttcacaagtgatacaaatgtcactgtaaaaattgtttaaatacagactagtatttatatgtgtgcattcattttcatggaggataggtaccaaaatgttgactgtggccattgttttgcatgctctcattttcctycaataaacatctattacttaagaaatgtttcaaaaaggagaaaaaaagtcaagaaaatataaacaaaaatctccatgttcccatcacccagaaataaccaccatttagactttaaatccatctccaagttgtttttctatgtatatgttttttctcatacagaaaagatcacaaagaatagtggtttttttttttttggtgatgtattccactcactccttccctgtcaataaatataacatttataattggtacatggcatttcactgtaagactatacaatcatttctttaaccaacccccatgattaagcacaatgtcttttggatgcacatcacataatatagggtcttagaaaactgttggtaaacgactggatgcaaatcatctggttgaccttccttc

SEQ ID NO: 791585 - DNA, 632 bp, Homo sapiens
acagtgagctgtggtcatgccactgcactccaacctaggcaacagagtaagaccctgtctccacaaaaaaaaaaaaaaaaaaaagtttcttttcacaagtgatacaaatgtcactgtaaaaattgtttaaatacagactagtatttatatgtgtgcattcattttcatggaggataggtaccaaaatgttgactgtggccattgttttgcatgctctcattttccttcaataaacatctattacttaagaaatgtttcaaaaaggagaaaaaaagtcaagaaaatataaacaaaaatctscatgttcccatcacccagaaataaccaccatttagactttaaatccatctccaagttgtttttctatgtatatgttttttctcatacagaaaagatcacaaagaatagtggtttttttttttttggtgatgtattccactcactccttccctgtcaataaatataacatttataattggtacatggcatttcactgtaagactatacaatcatttctttaaccaacccccatgattaagcacaatgtcttttggatgcacatcacataatatagggtcttagaaaactgttggtaaacgactggatgcaaatcatctggttgaccttccttc

SEQ ID NO: 791586 - DNA, 632 bp, Homo sapiens
acagtgagctgtggtcatgccactgcactccaacctaggcaacagagtaagaccctgtctccacaaaaaaaaaaaaaaaaaaaagtttcttttcacaagtgatacaaatgtcactgtaaaaattgtttaaatacagactagtatttatatgtgtgcattcattttcatggaggataggtaccaaaatgttgactgtggccattgttttgcatgctctcattttccttcaataaacatctattacttaagaaatgtttcaaaaaggagaaaaaaagtcaagaaaatataaacaaaaatctccatgttcccatcacccagaaataaccaccatttagactttaaatccatctccaagttgtttttctatgtatatgttttttctcatacagaaargatcacaaagaatagtggtttttttttttttggtgatgtattccactcactccttccctgtcaataaatataacatttataattggtacatggcatttcactgtaagactatacaatcatttctttaaccaacccccatgattaagcacaatgtcttttggatgcacatcacataatatagggtcttagaaaactgttggtaaacgactggatgcaaatcatctggttgaccttccttc

SEQ ID NO: 791587 - DNA, 632 bp, Homo sapiens
acagtgagctgtggtcatgccactgcactccaacctaggcaacagagtaagaccctgtctccacaaaaaaaaaaaaaaaaaaaagtttcttttcacaagtgatacaaatgtcactgtaaaaattgtttaaatacagactagtatttatatgtgtgcattcattttcatggaggataggtaccaaaatgttgactgtggccattgttttgcatgctctcattttccttcaataaacatctattacttaagaaatgtttcaaaaaggagaaaaaaagtcaagaaaatataaacaaaaatctccatgttcccatcacccagaaataaccaccatttagactttaaatccatctccaagttgtttttctatgtatatgttttttctcatacagaaaagatcacamagaatagtggtttttttttttttggtgatgtattccactcactccttccctgtcaataaatataacatttataattggtacatggcatttcactgtaagactatacaatcatttctttaaccaacccccatgattaagcacaatgtcttttggatgcacatcacataatatagggtcttagaaaactgttggtaaacgactggatgcaaatcatctggttgaccttccttc

SEQ ID NO: 791588 - DNA, 595 bp, Homo sapiens
caagacagcagctccaaggaaggggctgctagtcccattttacagaggagaaaatggaggcgcaaagtggtgatatgactcctcagaaccacacaggcggtccagggcagaggctgggtacgactccaggcttctgacttccaggccatacccttcccttaaccacactgcctggaggaggctgagccaggcygggccacgcctctgcgcaaagatcttcaaaaacctgcccactgctctgagagtggtgtctggggagtagagggtaggggctcagcgtataacctctagggcaactgcctagattcaaatgccagccctgctacttcccagccgggtggctcaagcaagacacttgacctctctgatccttggcgtttctccctggaagtggggtgctagaagatctggccagattggaccgtgggctcatgggccaggtactcagtctccttgggcctcaacaagctcctttgtaaaatgagacaggtatattttacattcgtactttaaaaaagtgaatcttatttcataaaagccaagtaagtgttattttctgttttctttttttttttttttttcttttgagacagag

SEQ ID NO: 791589 - DNA, 643 bp, Homo sapiens
cacccaagggtttggatttggccaagctgcatgaccttaggcgaggcacttgatctggctgagcttcagtcccctgatcttcacaatgaagtaacccagaacgcactaagcaggggcttttgtaactttgatgacttgctggatggtttaagcagagagtaaaagcttagcgttaccacccttggtggatgggagctgacttaggacagagccctcataatgcacttccctctccaggctccaacagcctattgccctggccggttgggctggttggctccagtcagccatcctacagggcaggggccaccccaccttctgctcagctgctggactgcattgctagccagatgttcaacagctgccrcattccacccggcagcggccccacctctggggccagagaatagatcagcacatgcaccaggcatgatcagactgcgtgagtcacaacatgtcaggcccgagttctccacccgtcggggatgctgggactgagctgagctggatcccacggcttgagtggataaaggctgagtgccaagagcaggcaccaggacgactgtgtgccatcggctgagaaactggagggaggcgggagggggacatcagaccctatcccagaggtcttggaagaactcca

SEQ ID NO: 791590 - DNA, 523 bp, Homo sapiens
agcccactgcctagggctaaggtcaaggatagaagagacagtgcctgctcaatgtaacgcctgacacacagtgggtgctttacaaacccaggcggagcccaggacggagggggcggggcactgtcactcccagctggccttgaagagagcccacccccgggaaatcacctccagcagcttcactgctcacaaggcggttcagggctctggtccctgtcctttccacgagagggacgtgcagctctggccctgttcattgagcacttgaacttgtcacctcatttccaggatagcattcctaccctcacagagcaccctggccaggctgtcggggtgaygagagtcgggaaatgaaacagacatctcaaaagtgaatatcgtccctacatataaactgggtagtgcagtaattatctgatggcacaagaggtgcagaaggccctgtgactgtcagagggacagaaggttttgtgggggccattagttcatggaagggagaggccatttcacatggtgaagaggc

SEQ ID NO: 791591 - DNA, 562 bp, Homo sapiens
agcaacaaacctacggtacaaggagtattttttaaatttttaaacttttcttactttacctgaatataaaaaatcattaatatcatttctaaaagccaaatggaaaaaaaacctcacaccaaataaatgttaacagagtttatttatcatgtttcactctccccaaaggtaaagttatattaacgagcttgatgaaagaaatatttcctattcataaaacacaccgttttagcagcttcgcgagacccccgaattygaggcggacggcgcagtcctgcgggaatgctgaccgtggcagtagcagtgacatgcggtgaagcatcggggagtcctctgtggaaggatcattatgaaaaacctgcgcaatcttaggcttccctcgaatttagcaggatagggttttgtctctcgtgatgatgacaatctcctgtctttcccaattcctcacgaggcaccggtttggaagcaccccattgtttgaaggaatggctgccccggcacccagagaccgaggcggcatcaggctctgacctccgcacacgctccagcgcctccctgggtg

SEQ ID NO: 791592 - DNA, 516 bp, Homo sapiens
tgaacgtgaatataaatctgtgctcccggatgccgcgccactacaccaacgtaatgctttcgctgtgaaaggagaattcactaagaggctcccaccgctcctgccctgaacgtgcctgagggtccggaccactgctcagaatcgagggggtaattccgttacagttcagaaaactatgragcctactgacaaaccagcacgcaaagttccaggtttactattaggtcactgcaaacaggcagagataattcaaacgctaagttctgacaaacgccccagtcctctggatatccacctggagaagcattactggtcccgtggggttagccattccttggtaactcacattatggacgctggtgcagatcttagacattgccgtggagtgggaaaggaggacaaccagccaatcgcttcacaggcggccccaacgtgcaagtcctgtctttaaaacctgcttcgtcctggggaggccacggaaagtgccaaggaagcctcacctctggagtcctctgg

SEQ ID NO: 791593 - DNA, 601 bp, Homo sapiens
cttttcttgaccatttgcactgaaaaataaacacgtcacacaaatgagccagagtaagtgagcaagagcaacacgtgggtcccacacacctaaaggacacaggagatgctttccaaacaaaaaacagcagggctcttccggcactgatgccgccccactaaagagaaccgagctgtgcacctatcctcaagtggggcttcgcacagagatgcctgcaggggctgctgatgcccagcctggggtggggtggggggaagatatgaagaaacgtgccagcctgccrcctgtgagccccatgcccccatgtgagagcagctgcagggaaaccactgtcaccacagatgctgatcagggagctcgagacacacggccgccctcggctggaccacagggaagacttgagcagccgtgcccagccaggcgtcctggacagtgggtgacctgcccaccccaacagtgtgtgtggtctctcactgatccccaccacccaccgatgcctctcacccaccgatgccgttcacccaccgatgcctctcacccaccgatgcctctcactgatccccaccacctagcagagccaccgaacgtagagcttgagctc

SEQ ID NO: 791594 - DNA, 601 bp, Homo sapiens
cttttcttgaccatttgcactgaaaaataaacacgtcacacaaatgagccagagtaagtgagcaagagcaacacgtgggtcccacacacctaaaggacacaggagatgctttccaaacaaaaaacagcagggctcttccggcactgatgccgccccactaaagagaaccgagctgtgcacctatcctcaagtggggcttcgcacagagatgcctgcaggggctgctgatgcccagcctggggtggggtggggggaagatatgaagaaacgtgccagcctgccacctgtgagccccatgcccccatgtgagagcagctgcagggaaaccactgtcaccayagatgctgatcagggagctcgagacacacggccgccctcggctggaccacagggaagacttgagcagccgtgcccagccaggcgtcctggacagtgggtgacctgcccaccccaacagtgtgtgtggtctctcactgatccccaccacccaccgatgcctctcacccaccgatgccgttcacccaccgatgcctctcacccaccgatgcctctcactgatccccaccacctagcagagccaccgaacgtagagcttgagctc

SEQ ID NO: 791595 - DNA, 649 bp, Homo sapiens
aaacactgaattttgccatgaaaggaacaataaagggtattctttaaagtagagagaaatagcaatggtcccagacatcctcaaaattcttctattatagaaacctgctggagttgaaaccagggtgaacaaaaaaagggaaaaaaaagctaatatttggttgtctcttaggtcaaatattgtcttggttaacggaagatgcaggtgaagctacaaaagtttagcttggacaaatcacttacttctatctaaattaaagctcagactcaaacttactytagtagccccttaccccaacccctagacagaggaaataacttgcattattttacaagtaaataaagcaataaaaactaaattatatagcaatctccatcatcattttatacacaacctccataatgtaataaaaaattataagacatacaaagaaaatgtgactcacaatcaagaaaaaacatagcaattagaagaaaacccacagttaacccagttaagggcattagcaattattttaaaaccaattttctaaatatggtaaagaatctgcagaaaaatacatatataacaaataaaaagatatggtatttcagaagagatatgagaactatataaaataaacaaaagacattataatatttaaaatcca

SEQ ID NO: 791596 - DNA, 647 bp, Homo sapiens
ctgggcaagtcacttaacctgtctcagtctcaatttcctttttagtaaaatagggatgctaataataaaaaagcagcactgtcacaaggattagcaacataattaatgcaaaatgcctagctcatagttgagactaaataatgatgacaatkatttttatgcaattcaaatgcctctaatctctttgctttggggggtctatttttccctaaacaggatgattgtattatacaatcctagagagcactactcacattgcgttctaattattggctccccctgaagtgcaagtccaatgtgacagttgtgtttaaagttgtaatattgtaagataccattttaaaagaccagcaagaattccaaatatttgtctttgtccctgtcttgttaatggcagaaaatccaattctctgctacttttcctttctcatataattttgggaattcttgctacacaaatatttaacatgttacacaaacccatgatggctgttgctttgatggtctaaacaattgctgccacagaatttcacggaccttcctctatctgctatggtctgaaagcttttgttactccaaaattcgtatgttgtaacttaatccccagtgtcgtggtattaagaggcagagtctttgagatgtgacta

SEQ ID NO: 791597 - DNA, 537 bp, Homo sapiens
caaatctagtacctagaaggctgtcaactagctcagcatctaacaatgggaagccccaacttagaacctagaatcaactctcttaggacccagaggaaaaatataggtcattttctactccaagccatgacttctttcctgcaggaggaattctcttccatgatgttgacagcctcaattacagcagaagctaacaggggaagtagtaaamctgaacagcagtaatcctggctggaaagtcactgatggtcaattatgaaagatctgtcacaggagaagccttcaatagaagcaagtgagtaatagaagacagaattgattgggctctagtgtcagcatgggttgaatctcagatctatcacttattaatactgtgactgtgaggaagtcactacaactctgtgcctgagcttcttcataactgaagatgacattagcatctgtatcataggattgttatggagattgaatgagataatgcacatgaagtacttagtataatgtctgcctactctaagcactcactacaagtatttg

SEQ ID NO: 791598 - DNA, 603 bp, Homo sapiens
gaatatctagaccattttcttctattcatcccctgcaattcaagcaaggagcaagaactaccacttttggagggtcatttcccctgggtacaggcctggagcctctgcaaaaagtgacctgagatccttgtagccatcctcagagtcagataggtgcatactgaatggtaagtaccctgataatgtcttcgaaggccactatatgagacatcttctgagttttcccaagtattccagagagactggagcagaagctagaagtgtcattacggataacaattctgaagatgagagccgaaccagtaaaaacagcttgtttcscttatggtgacttatataacttctctaggttgatgcagtctggaaagactaattagaaacctaaattattttcaatatttatatttatttagaactaatttatagcacatatttgaaaattagttattttatagttattttttggcactggccaaataaaaatactttaatcaaccactctttccaaaagacttggttccagagacttgtgctgatccacaaatatttgctgctatgtctcaatataaaataaatattttgaacttacagaagagaaaaagt

SEQ ID NO: 791599 - DNA, 603 bp, Homo sapiens
gaatatctagaccattttcttctattcatcccctgcaattcaagcaaggagcaagaactaccacttttggagggtcatttcccctgggtacaggcctggagcctctgcaaaaagtgacctgagatccttgtagccatcctcagagtcagataggtgcatactgaatggtaagtaccctgataatgtcttcgaaggccactatatgagacatcttctgagttttcccaagtattccagagagactggagcagaagctagaagtgtcattacggataacaattctgaagatgagagccgaaccagtaaaaacagcttgtttcgcttatggtgacttatatamcttctctaggttgatgcagtctggaaagactaattagaaacctaaattattttcaatatttatatttatttagaactaatttatagcacatatttgaaaattagttattttatagttattttttggcactggccaaataaaaatactttaatcaaccactctttccaaaagacttggttccagagacttgtgctgatccacaaatatttgctgctatgtctcaatataaaataaatattttgaacttacagaagagaaaaagt

SEQ ID NO: 791600 - DNA, 616 bp, Homo sapiens
tggatttcaatatgaccagttttatttcttcttacagagaagtgatatattcctctttgaaagtcatacaaaataagacactatactttataatgaaatcacataggagttttactggccttttattaggaattagttgcttcttgatatattttaaagttttttattgtgagtttttatcattagataataataatgtggtaccaattattttaataatataaggataaacttgaacactcaaagttagctcctcaatgtctcataagttacatattggctcaaagttgttggctataaaacagtatgttgggtcaatgggtaaagagcaggattctgtattttggcatgtaagatgcgcacaaattgtcaaacatgggaagtccagttggaaaatgtatatgaatggccaaaaatttaggctttctcactaaaaagaataattttgtccccaaactcyatatacttttttgttgaacatagaatgtttgtaattatagtagtaatagcactgaagataagaaaagattgtgacattaacagagaaaaatggtattttacctagaaaacaatttccctatagcagcttctgctttgtaatattttacagaatcct

SEQ ID NO: 791601 - DNA, 541 bp, Homo sapiens
aatagaaaaaattgtagcactaaatatccacattaaaaagttagaaagatcccaagttaacaacctaagatcacaactaaacgaagtagagaccaacagcaaacaaataccaaacatggcagaagacaagaaataaccaaaatcagatctgaactgaatgagacagagatgcaaaaaaaaatcattcaraagataaacaaatccaggagctgtttttttgaaaaaaaaaattagtaaagtagatagaccactagctagactaataaagaacaaaagagaagattcaaataaatgcaatcagaaacaacaagggcgtattaccactgacactagagaaatacacacaacgatcagagaatattatgaacacctctatgcacataaactagaaaacctagaagaaagggatgaattcctggacacatacaccctcccaagactgaaccagaaagaaattgaaatcctgaacagaccaattacaagctctcaaatagaggcagtaataaatagcccaccaaccaaaagaagcccaggaccagat

SEQ ID NO: 791602 - DNA, 541 bp, Homo sapiens
aatagaaaaaattgtagcactaaatatccacattaaaaagttagaaagatcccaagttaacaacctaagatcacaactaaacgaagtagagaccaacagcaaacaaataccaaacatggcagaagacaagaaataaccaaaatcagatctgaactgaatgagacagagatgcaaaaaaaaatcattcaaaagataaacaaatccaggagctgtttttttgaaaaaaaaaattagtaaagtagatagaccactagctagactaataaagaacaaaagagaagattcaaataaatgcaatcagaaacaacaagggcgtattaccactgacactagagaaatacamacaacgatcagagaatattatgaacacctctatgcacataaactagaaaacctagaagaaagggatgaattcctggacacatacaccctcccaagactgaaccagaaagaaattgaaatcctgaacagaccaattacaagctctcaaatagaggcagtaataaatagcccaccaaccaaaagaagcccaggaccagat

SEQ ID NO: 791603 - DNA, 541 bp, Homo sapiens
aatagaaaaaattgtagcactaaatatccacattaaaaagttagaaagatcccaagttaacaacctaagatcacaactaaacgaagtagagaccaacagcaaacaaataccaaacatggcagaagacaagaaataaccaaaatcagatctgaactgaatgagacagagatgcaaaaaaaaatcattcaaaagataaacaaatccaggagctgtttttttgaaaaaaaaaattagtaaagtagatagaccactagctagactaataaagaacaaaagagaagattcaaataaatgcaatcagaaacaacaagggcgtattaccactgacactagagaaatacacacaaygatcagagaatattatgaacacctctatgcacataaactagaaaacctagaagaaagggatgaattcctggacacatacaccctcccaagactgaaccagaaagaaattgaaatcctgaacagaccaattacaagctctcaaatagaggcagtaataaatagcccaccaaccaaaagaagcccaggaccagat

SEQ ID NO: 791604 - DNA, 471 bp, Homo sapiens
cactgaaaaatttctatacacaaaggaacaaacacaaatttacaaaattacatacaaacaaaactacaaaaccaataaaataatgaagtatattagattgtatggttttgttgcccaaaatgttaccaaactcaggttcttttgagtttggtatcactagaccatgtgtcatatgaggcctcaattctccactgcttttctctcttcgaagaattgattcaaccaaacctttgttcatccagagctccatttggccatccctgagctgggtacatctcaggcatatgaagtttrcctttgccattttgtcaaagctttttttttttttttttttttttgagacagagtcttgctctgttgcccaggctggagggcaatggcatgatctccactcactgcaacctctgcctcctgggttcaagtgattctcctgcctcagcctccccgagtagctgggcttacaggcgccct

SEQ ID NO: 791605 - DNA, 573 bp, Homo sapiens
aatattggaaaaggttattggggctaaatatttgttaactatgttgcaaaaacattattcccaatcagttacacatttcctttcttttctttcgcttgagacagagtctcactctgtcactgtcacccaggtggtgtgatcgtggctccctgcagccttgaccttcagggctcaagcaatcttcccacctcagcctcccaagtagctaggactacaggtgtgtgccaccatgcctygttaatttttgtattatttttataaagatggggtttcactgtgttgcttaggctggtctcaaactcctgggctcaagtgatcctcccgccttggcatcctaagatgttgagattacaggcgtgagccaccacacccagccagtcacacatttcttagctttgtctatagtatatttctctgggcaaaaaagtcccatttttatacaaatgatttgcttaagatttttcatccatttataagtgggatgggcataaatttccttctgagtgtgctcactgtgtcccttgttccatgattgtctttcagctccaagcctacccttccatgctttgattt

SEQ ID NO: 791606 - DNA, 516 bp, Homo sapiens
gccctgagcatgtgtggatagatggacctgggctattaagagatgaaataatgtgttttttatgttgatttccagagacctcctgccagggtggaatattttcatggcatttcagcctaaaagtttgtacaggttataaatagacttttatctctaaaaagtagatagccagcttctcttgaaacaatttgaaagcctagcatttctgggcacacattccagtgcagcagcaatcagttgrggcccacatgtgcctattctcaacagtcctcctttcacactgttggctcatacatggcccatttcatttctttgttatctgtgctcagcatttataggcatttgggttggatggggagaagttccctgaaattgttcattcattcactcatcaaactcatgataagtgcttattttatagtgaactgttaagtactgggacagtccctgtcctcagggaagaaagtcaagtaatgaagaaagaaatagaaccagttaattataacacaagagcaa

SEQ ID NO: 791607 - DNA, 652 bp, Homo sapiens
taggccatatttcttcattatacacctcaaaattttatttttccaacattttcttactcctattgtgttctatatttttagaattcaggacagaaggtaagtataagaatgaaataaaatgcgatatgtaaagtgcttagcactagaggtggcatgtgttgggagatcaatgatgaaagctataatttacaggttcttctcaaatgaactctacctggctagcatggtagtgtgcatatttgtaatttacaatcattaaaatctttattgatgacaygtgcatttctgtgtactgagagcttatactctcagccctgtgggagaaaacaagagaacataaggtctggctggcctctctctgaggccagagagactctccctacttgggagtcgagaccgagagccatgaaacagggataataagggacagcactttatcgagaggtaaatggagtcataataatagcaacacctcattattttatggagttgatatagtcttttatttgctcttctcaacattgcaaaatcactctatagatgaagaaactgaagtcctgaaatctgattctcccttcaaaagcgacagtgtctaagttcaagcccattattctcgctttgggttcagtgcccttgtcaatacagttttcat

SEQ ID NO: 791608 - DNA, 652 bp, Homo sapiens
taggccatatttcttcattatacacctcaaaattttatttttccaacattttcttactcctattgtgttctatatttttagaattcaggacagaaggtaagtataagaatgaaataaaatgcgatatgtaaagtgcttagcactagaggtggcatgtgttgggagatcaatgatgaaagctataatttacaggttcttctcaaatgaactctacctggctagcatggtagtgtgcatatttgtaatttacaatcattaaaatctttattgatgacacgtgcatttctgtgtactgagarcttatactctcagccctgtgggagaaaacaagagaacataaggtctggctggcctctctctgaggccagagagactctccctacttgggagtcgagaccgagagccatgaaacagggataataagggacagcactttatcgagaggtaaatggagtcataataatagcaacacctcattattttatggagttgatatagtcttttatttgctcttctcaacattgcaaaatcactctatagatgaagaaactgaagtcctgaaatctgattctcccttcaaaagcgacagtgtctaagttcaagcccattattctcgctttgggttcagtgcccttgtcaatacagttttcat

SEQ ID NO: 791609 - DNA, 579 bp, Homo sapiens
aactgagagaaggggccaaggttagaacgaatgctgctccattaatgaatttaggaatcattcattaatgatttaggagctgctgttatgtgtagcatttggactaggctctaaggacacagaggcataagactgttactgccccaaagggtttatagtttattggggagattgacaggtaaatcattaattgccacaccttttgataagcrctaggtcagggtaagctcctgggctatgggagccccaagcatcacactgcccttcttccatggacatcatgctcaggtatcaggtccacactccctgaacctcttacacacccctgtgattgcaggaatcacaatatatcatgatgatttgttcatgagtctgggttcctgaccagattgtgagctatgcaaaaatgggtatctctgcttagccaacagtacccaatgacctgagccaaaggaactggaaattttgaggtgcttaggaagatggccttcaccttgaggtgtatgaggttatggaaataagaagagcaaagacaaggaggggaccaagcacattacattcagttcaactacaaactgg

SEQ ID NO: 791610 - DNA, 579 bp, Homo sapiens
aactgagagaaggggccaaggttagaacgaatgctgctccattaatgaatttaggaatcattcattaatgatttaggagctgctgttatgtgtagcatttggactaggctctaaggacacagaggcataagactgttactgccccaaagggtttatagtttattggggagattgacaggtaaatcattaattgccacaccttttgataagcactaggtcagggtaagctcctgggctatgggagccccaagcatcacactgcccttcttccatggacatcatgctcaggtatcaggtccacactccctgaacctcttacacacccctgygattgcaggaatcacaatatatcatgatgatttgttcatgagtctgggttcctgaccagattgtgagctatgcaaaaatgggtatctctgcttagccaacagtacccaatgacctgagccaaaggaactggaaattttgaggtgcttaggaagatggccttcaccttgaggtgtatgaggttatggaaataagaagagcaaagacaaggaggggaccaagcacattacattcagttcaactacaaactgg

SEQ ID NO: 791611 - DNA, 702 bp, Homo sapiens
aacaagtttctgttcttctagtctttctatatgtaagaattattataaatatttatattataaagaaatatatataaatatgatatattataatatatacatatgtgtttctcaaatccaagcccatggaccgtatatcaagcaaaatttaacagtgaagtctgaacaccgtaaaagattgtaaacactcytttagagtgccttataatggagtttggcctaacaaaaatggcacagaaatactttgtgtcccttctttgcaccttggtaatgttctctgcagccaggttttgactaaatatattatatgccaaggtcagtgtgaaaaaatattagaacaggcatttttggggggaatatatttagaaaaatgagaattccactgattttcattgaaacaataactggggaagatattccagagaattcctgtgctgtacatagttttattaaccttatttatttagttacagtctcattgtttttgcagtttttcactcactaaaacaaatgtactgccagtgcagctatgagatcttgaagtggtggccagttttgggttactgcaacagtatcaatgtccgtgccagctgggtgccttcagaagggttttggagcgtgctccaacccacttgcctatgtggccatgaaggagtcttggcctggctgttttgtgaatcttgatagagatcccacgacctc

SEQ ID NO: 791612 - DNA, 601 bp, Homo sapiens
tcccctcaaccacagtgaaaatctgcccaaaaatgtatcacgcacacttgtgacacaaatcctttcatagaagttttcaaattgtactgacaatatttaacattgtgtagctgtttaaatgccattgaagtgtacaaatgttaaatcacaaaatttggggtaaacagatggactatcataaaaatgaagacttctgaattttttattgtgataaaacctacaaaaggtaaaatctgtcagtttatccctttttcagtgtatagttcagtatgattatttmttttataaattagaatctgttgttatactgtctctaaataaatcactgttaacatggacttctaagaataggaaatagcttcactggttagcatgggttgatataatgtacttaaacaaaaattctacttgtcacattaaaattcattgatagatctgttttgagctactctggcattactatagaaaagctaagtaggcatgcccatctgtacctagactgggcagccaataagtgtttttgaatgaacctttaatggcttgggagccattaatatcttgtgcctaaaacactagccaaagtgtaggttggttcctggtt

SEQ ID NO: 791613 - DNA, 553 bp, Homo sapiens
atcatttccatcccacagatgaggaaatggccaaaaagatgattattgtgagttagcaccccagctggattggaatccatttctgatctgtagtctcgggtgttccccgggggtgcctgcagcgggagaaactcctaggagaggcatcaactgacaggagttaacaaaggaggagcagatgggactggggcttgagtggcgttcaggagagccagttttaagaccacctggatcagcctccctgtaagccagttatcagtatccaagtgctttaacacaggcttctcagaagaaatcatttttattcctaccattatttcataccaaagcatcattatgtgctacagttccaatttcttacacaagaatgaaaagggttaccaatgcagcaagttaaaaaaaaaaaaraagaagaagaagactgaatgatttaagctgtttctgaattgttcctgccataaaaaaaaaaaaaaaaaatcaaggcaccagttttgaaatgggagaagcattctaaatgagactgttagcttgccctttgacatcgatttctgat

SEQ ID NO: 791614 - DNA, 637 bp, Homo sapiens
cctctgggtaaaaactgaagtgactaataaatgacaccaatcctgttgttccagttatgacagcttaactacagaattagtaagaatgcctaagttgccctggttttattatattgagttccatgatgaggcatctaaagcacagggcagttaagagattcccatggtgattatggaatgagataactgatttctagatttttaatcctgtgtagctgttttaatgctgattattttataatgaatatccttcttggtttaaaggagcatggggagtattttaagcagagtttggttttctcagatctgtttttagctcctttatccaagtgattaggccagggagtttctttgtgactccaaatacataagcatgtgcttcttaggttccttttgcttgtctgtttctggtggtcataggaatgaayaatgaatgccttgtaactgagaaggctgctggttgtctcttggttctttttccaacacttaaacgtgcacttgggtcatattgctgtgtggcaccgtctccaagtctatggcacagtatagtaggaccattataaggcttatataggactatagtaggacaataataaggcttgtttctgcatatttcttgacatagcataacaacata

SEQ ID NO: 791615 - DNA, 623 bp, Homo sapiens
taagatgggaactgcatttaatcaggctaaattgattatccaccattccaaaaagtcccaattggcttaaaccgtggcaaagacccatagggtcagaaaagatttttctgccagaggtataggtaatcacaggaaaggtgttaaaacttgcactgtgagtcacaagttttcccctaaagtgattcatctttttaccctcatgcttaaaaaacaaatgttagagtcactatgggcatttcagttttctatcataagcaaaatccttcttagtttccaaatctactgaagatatagtgccatatgtaagcactaccatttcctaattaagcacaatttaaattgatagcagttgttccaaactaaaaataagttctcaatttaccaactcacagttttacrttcatgtcttgcaataagggaataatcaaacctactaattaatttttaaaatcattttaaaatttaaagatgctttatgttaaagtaacaattgcaatctttagatattcctaattctttaagtaattattgtatagtaagggaatgtaacagtttcagagtgccatactatgataaaattttcagcatttgtgtatatgtttacatatacatatcactccaac

SEQ ID NO: 791616 - DNA, 418 bp, Homo sapiens
tagcaaatatcaggatgggagaatactccagagagaacagcatgaacagaaatagagagctgagaaacataatgtttcaaaatgcagctatttttactttttcactctatccattctagacaagacttaaagtatccccaagaatacataaattacaacaaagtaatatgattaacaattatattaaagaacactacaggtatttcttagtcgagttcaggctactattatgctagtagtaagaaccaaagttggaaaagtraattgggatcagaatttggtgagtttgaaacgctgaactaagagttttgttttattcttagggaatcaaaaggcatagaaattgggtgagcagaagttgaggggatattgatgggcacttgaaagagcacacaggcagcaggcttgaagatgggtt

SEQ ID NO: 791617 - DNA, 614 bp, Homo sapiens
gtttaatatgtttctgcttatgtgtatatacaggtgttgtgatgtgtgttgtatctaacatgctatcaaattgaattataaaaaaatggctctgataaactaaacagataagaccaaatacttctcaagttcacataacttggtaatctttgggtgaatgggactagtctaaacttattagtttgttggtaacattgtgtcttttaaaatttaactttaaggttcttacctaggtgagatgctaaagtttgcaggctttagaattgctaacagaaaagtggctttacatagtgattggctatacatggcattttagttgtaaaaartaaatgaaccagtcggtagaaaagagagatgtggaaaaggttatagatacaaaaatgtatttttggtaacataggatatagaaagtaattttaaatgagggaaaatcttgtatggtaaatcttatcctagaataaactgactggtatttaagagaaaggtggtataagacaagtcagaaaggccaaacatgtcatagatgatctgtgtatgtcatgataaggtttgtgaagaggaatttatgaaaaaaaattgtgtgtgattaaactagctataattaacatggaatt

SEQ ID NO: 791618 - DNA, 647 bp, Homo sapiens
ctgtttaaatgggtattaaatcatggcacctctctgcacaaaacctgctaggagtctcttatttcactcagaataagagtctagcaatggtacaagaggttctacatgattggagcccacatacacactttctctgatcccatcttctgttattctcatctgaattacgtgattcataccaattgccttgctgtctttaaacacttcagttatgctctcacctcagggcctttgcacttgcttttctctctgcctgctgttcccaaagatatactcttgatgtgctctatcaaatttactttgggtcgctgctcaaacaccaccttatcagtaaagccaacgcttagcacattatgtaaatagtaatcaaactccaactctcatgttctttgtttcccttgtctattttattattctattctgttttaccattattcwttattttccatattattaaccacatctgacattctagaaatgtgctttcttattgtatttttccttctgaaaggcattgtttcctgatgctaagtcagtacctagaacagctcctggttcatagtaggcccttttcttagtccatttacactgctataacagaatatcactgtattagtccgttttcatgctgctgataaagacatacc

SEQ ID NO: 791619 - DNA, 616 bp, Homo sapiens
caagatggagcattttttaaaaagctccccaggtaattctaatgcacaatcaaggttgagaactactgctttgcttttaatgaggactgcagtggtctctggatttagctaccactttgtatttctgtaagttctctgcttcaatagcattaacaattagacttgctgagcatggggagaaaatattctagaagggyagacatcagagagtcctgcaatgttgatgagccccatgagtgcggggtcagcgtctgctttttcaccactgtatctgcagcctggcatctagaggatgctcagtagtgtttcctaaattaatgaataactggcagtgtggtaggcatatggcaaggttttcttagttctttaggcttttctgtatttaccaaattttaaaataaaaaaaacacatatgttcagaacagagtaagcttccttaaatataaaatgaaaccccagtgtagaatgaataccaagttttaggtgtatgttcccgtgctattggcaggagggctctgggacataggaagaaggaattcatgctgctagttatggaatgagtggggcaatgccaagcttgaagacaagccctgtcattacattttcctatcaccaa

SEQ ID NO: 791620 - DNA, 616 bp, Homo sapiens
caagatggagcattttttaaaaagctccccaggtaattctaatgcacaatcaaggttgagaactactgctttgcttttaatgaggactgcagtggtctctggatttagctaccactttgtatttctgtaagttctctgcttcaatagcattaacaattagacttgctgagcatggggagaaaatattctagaagggtagacatcagagagtcctgcaatgttgatgagccccatgagtgcggggtcagcgtctgctttttcaccactgtatctgcagcctggcrtctagaggatgctcagtagtgtttcctaaattaatgaataactggcagtgtggtaggcatatggcaaggttttcttagttctttaggcttttctgtatttaccaaattttaaaataaaaaaaacacatatgttcagaacagagtaagcttccttaaatataaaatgaaaccccagtgtagaatgaataccaagttttaggtgtatgttcccgtgctattggcaggagggctctgggacataggaagaaggaattcatgctgctagttatggaatgagtggggcaatgccaagcttgaagacaagccctgtcattacattttcctatcaccaa

SEQ ID NO: 791621 - DNA, 595 bp, Homo sapiens
cgctttctgatcatctgcttatgtgacctgaaatttaaattttgtcttctacttcagactgtgttcttatatgcggcagagaacctggctactagcagctgcagcttgcaactgcatatattcaccatctggaaggaaaaagctcttcacctccttgactcttacagcatggtgccctcatccaagctcctgtttgaaaagcttcagagaacaatcttgactggcctttttctagtcatgttctcatcctatttaccaattacagagttaggaatgtgagatactatgatggttccagcttggagctcttgctatgtggcctctgaagccagcatgctgtaactggtagctctgcctagatccatgtgcttggtgtyagggaaggaacagtttctctgccaaaagggaataaatactttgatcagaggtagaggaggaggggaacaggctgataaaaacactgaactgcattatctaccttgtgtgcctatactaataaaggtttccttaatgtcacattgatatgatcaaagcaagaaactaaaattatgaacaagatactgactatgtcttttatgactcattagttcagaat

SEQ ID NO: 791622 - DNA, 552 bp, Homo sapiens
tgaaaacacggaagtccaacacaataatgaataatcattttgaacatcaattatagtattaacttgtaattcagtaatgttcttgaaaactgatgtttaaggctatctttcccctttaattagtggtctcaggcttctttactttttgagtttctaatttttataattctcttgtctttttttttttcacctttcaaaatgattattttcttgctactttttttttttttttttttttttgagatggagtctcgcactgtcgcccagactggagtacaatggtgcgatctcggctcagttcaacctccacctcccaggttcaagcaattctcctgcctcagcctcccaagtagctgggattacaggtgcacgccactacscctgtctaattttttgtatttttaatagagacagggtttcactatgttggtcaggctggtctcaaactcctgacctcgtgatctgcccgcctcggcctcccaaagtgctgggattacaggcatgagccaccgcacctggccttttcttgctactttcaatttacccactttg

SEQ ID NO: 791623 - DNA, 588 bp, Homo sapiens
tgacatatattgtcatggaatgtgcaaaagaaatcaatttttaaaaatgaaaaaatatatttacacgtaattatttagcacagcttgttattcaacccccccacctccacccctgtgccctcaatttttgcaattttgcctacactgcacttcctgtcctggagcctgaaacagtctgagtctatttgtttgaattgtgttgaggaaggaagtgggattgtgggagggtacagctgaacattgactgtacttctatatccatgatctcactggcccattttctccaacatcagagaaagattttgcaagggtgtacaattggtatgcaagtttttatcctccttacattgatggcaaaaatcagatctatttaatmtactgtcctccacaaattggtccatagactcatcagattaggaatgggatttgagggcttccaaattcccatggcttttggttgcaggattccatgacgactttgatcagccttgccatcttgtgggtaccttagcattagattgagttatgttgctaggagatgattattcatcagctgatcattaagcatatggggcttacttggccccc

SEQ ID NO: 791624 - DNA, 630 bp, Homo sapiens
atttttaactaaaatattaagtcctctgaaatgttccaaaaacatgaaaatctgaaattgattcttactcttgaattcaaggattagcatttcatgagcttctgccccctcttggtgaatctttccttactaacattagttatcaagacacttggcattttttcacagcatgcatgagtcacaacacagacacccttatcctcaaaataaatggatattgaactttgaataaaacatgcctcttctatcttaatctmaaatttctgagtgtgctcctctctcttagtctgttgtcagattgccttcaagtgatagtttattcttttatgcattccaggttgaagaagggtgaaccaaggatttctttgggaaacgtctgtccagaaatgggaaaggattgggaaagatgcactgagattcttatagggccccaagtcacttctattaggctaaatttctaagagatgctaggttcttagaaatttcacaaaaatacttgtctgatggtaatacaattaaatgttctaaagtaaaatgattttcacttcactgaaacacgtcaatcagaaagcttatttcaaaaaagggaactatcttagttaagtaagaaaatgctccatttcattttga

SEQ ID NO: 791625 - DNA, 629 bp, Homo sapiens
atatacaaacacattttagattagcatttgaattagtaaactgcataaaaaagatccaacatgagctgacatcatccaatccattgagggcccaaatagagcaaaaaggcagaggaagagcaaattctctattcttgagctggagtatccatcttcttctgctctcagatatctgagctcctggttctcaaacattcggattctgggacttacacctccagctctctcagttcccacagttcccaggactttgatttcagactgggagttccaccactggctccaccagttctcaggcatttggattcagactgaattacaccaccagctttcctggctttacatctggcaggtggcagatagtgagacttctcgccctccaacaccacatgagccacctcccataacaaatttccttagtttttttttaawtttattttttttatgttggttcagtttctctgaagaacgctgactaatacaaattggtcatctcaatagatacagaaaagacatttgataaaacccaagtccttccatgatttaaaaaaaaaaaaaaaaaaaaaaaaaaaaacccaaaaacacttaaaccaggagtagaaggaaattacctcaacatagtaaataca

SEQ ID NO: 791626 - DNA, 629 bp, Homo sapiens
atatacaaacacattttagattagcatttgaattagtaaactgcataaaaaagatccaacatgagctgacatcatccaatccattgagggcccaaatagagcaaaaaggcagaggaagagcaaattctctattcttgagctggagtatccatcttcttctgctctcagatatctgagctcctggttctcaaacattcggattctgggacttacacctccagctctctcagttcccacagttcccaggactttgatttcagactgggagttccaccactggctccaccagttctcaggcatttggattcagactgaattacaccaccagctttcctggctttacatctggcaggtggcagatagtgagacttctcgccctccaacaccacatgagccacctcccataacaaatttccttagtttttttttaattttattttttttawgttggttcagtttctctgaagaacgctgactaatacaaattggtcatctcaatagatacagaaaagacatttgataaaacccaagtccttccatgatttaaaaaaaaaaaaaaaaaaaaaaaaaaaaacccaaaaacacttaaaccaggagtagaaggaaattacctcaacatagtaaataca

SEQ ID NO: 791627 - DNA, 568 bp, Homo sapiens
ctttttattatctatcaaggtgtctgaataatgtctttaatgcacagcttaccctaactacacagattttgttttcttgcagaagagaaagccattaaatatgactcagatactagaaaagattacttcgtattactgggaaaaactgatgttgaagaccagtgaagtctaatgcacatgggcaattacactggagagtttacaaagcacatgggagttgttttaatcggaaaccagaatgaataaattaatggactcttggtctactaattttttttaaaaaaagggaaacaaaatataaagctacacattctttttccttttttaatggagtaacattttaattttttatttgaactccaacttttgttttagatttagggawacatgtgcaggtttgttatatgggtatattgcgtgatgctgaggtttggaatatgaatgatgatcccatcatccaggtaatgagcatagtaagcaacagttagtttttgatgtccttaaacataaagacctaccaaatttgctttgaatgaaataccctcacttcagcatatgtaaaggattt

SEQ ID NO: 791628 - DNA, 638 bp, Homo sapiens
agtgacttttcccagagtggttgggttactacatttaccaggtaagattgtagtggaactggaactccctattcacacaatgattgatactcctgaaaccacagtgaattctaacagcttgggcatgctttgctttaaaaaaaaaaatcataaacaacagggaatcatgtttcatttttccacaagactgcatgagcctggaatcaactccactcctaaaggtggaacccacagccaagcacaatgcccaggaccttcttccatgatgctcagtaagtgacagagacagggtgctccctcccactgaaggacaaagaagattgtccaagcaatcgcttttacttagcaaggtggcaggggtccagttctctccagcatcaagctcttaccaggaaaaaaaagatagaaaagaaagaaataaggaataytgacaagagattgaataactcaccattttccagctctactgctttgatggcaagtgaaaatgggcctaaagcatgaaatggttacatgctggttattatggaatttgtagcattatgcttgcctgataataaatgtggttgttcctgggtaatagaaggggtgtaagtgcccgagtctatatctggcaggggagcaagaaggtggagtgg

SEQ ID NO: 791629 - DNA, 601 bp, Homo sapiens
caccaatgcacagccagaggctgacaattaaaactaatacataaccacatgaacatcatatttatagagttaacattttttaaggatggtcagtgctaacatatagtattatacatttggcactaatgtttgccattggtccagcaattggcaaaatttgtttctatgtataaatttatttttgaacattaggtctggctagacgtatcttcactatttataaaaaatatttagacagtaagctcacgttgaataactaggtctactgtgttctggaaactcttcagtagtaatacagctttttcatgttccatatgtacaaaactgtgtccatttgcctgtaaatacacaaataaaacagggcaatcaatgtaaactattatcactgtatcgttgtttctattcataaaattcacgggagcactgagcaacaaaaagttrtcagtttttataattcacaatggaatcgcaattatggaagtaactaattttatccagattcaaccaaatttatcaattcaacaaatatttattaagtaccgattatgtctttgccactgtgctaatcatcaagataccctggtcaataacagatagatgt

SEQ ID NO: 791630 - DNA, 654 bp, Homo sapiens
tttaatctatttacatttaaagtaattacttatagagaaggacttactattaccattttggcatttttcctgtatgtcttatagctttttataaccctaatttcttcctttactacctgcctttgtgtttacctgagttttgtaatttttttttttttttgagataggttctccctctgtcacccagactgaggtacagtggcatgatcagagctcactgtagctttgacctcctgggcccaagcaaccctccctaccttagactcctgagtagcttggactacaggtgtgacaccacacacagctcatgttttcttacattttgtagagatgaagtcttactatgttgcccaggctggtcttggactcctagactcaagcaatcctcttccctcaacttctcaaagtgctgggagtccaggcatgagacactgcwcctgaccttgatttctttctcactttcttctatattctatatacagttattgtggagattatggtatatctaacatcctaaagttataacaacatattttaaactcaaaccaacttaattttaatcacatacaaaaactctactcctttacaactcctcatgcctgtactttgttattgatatcacaaattacatctttatatattatatacccatta

SEQ ID NO: 791631 - DNA, 571 bp, Homo sapiens
tttaaaggtctatctttttaaaaaattagaaaagcttattctgttttttatttttaatagaaaagtcggctgggcatggtgcctcgagcctgtaatcccagcactttgggaggccgaggtgggcggatcacaaggtcaggagatcgagaccatcctggctaatccggtgaaacttcgtctctactaaaaatacaaaaaaattagtcaggcgtggtggcgggygcctgtagtcccagctactcgggaggctgaggcaggagaatggcgtgaacctgggaggcagagcttgcggtgagccgagatcgcgccactgcactccagcctgggcaacagagcaagactccgtctcaaaaaaaaaaaataaaattgaaaagtctagagaagcctgggctcaacatctggcattcccagactgtggcagttttgtgactattgagctgatgggtccatctaaggagaccagatgttgttagttggctgtttctgagcccaatagagccaaagattatatatagtcaattctcattatttgccgtagttttgttctatatatagctgcagtgaacactga

SEQ ID NO: 791632 - DNA, 635 bp, Homo sapiens
atttactaactggatgactgtgggcctcggtttcctgacttgttggatttttgtgagtgttaaatgaaaaaagtgtacatggaactcttagcacagagccccacacataggtggctagtgcttcccagctcaactccgcaggccagtgcacctgcagagcttttaaaaatcacctgtgtctcagtggcagtcagggttacttggttgtaaacatgaaacttatkttggctaacattaaacaagcaagaaatttattggaaagacagagtgctcacagaagtggaggaaagctgaggagccaggcctgggaacagacgaggcagggtggcgctgggcatcaccatgggcagaaaggacttcgcgaggcctcaccagagcaatccactccaataaatgtccattcttgcttttcttcatccagagttctcattctgggagagactgggttatggactgggtgtttgtgtccccctcaaattcatatgctgaaattgaatccccagtgtgatggcatttggattggggccttcgagaggtgattaggtcatggggcttgttctcttctgcatatgagtatacagtgagaagttagcagtctaccacctggtagagggccctcaccagaacctgaccat

SEQ ID NO: 791633 - DNA, 635 bp, Homo sapiens
atttactaactggatgactgtgggcctcggtttcctgacttgttggatttttgtgagtgttaaatgaaaaaagtgtacatggaactcttagcacagagccccacacataggtggctagtgcttcccagctcaactccgcaggccagtgcacctgcagagcttttaaaaatcacctgtgtctcagtggcagtcagggttacttggttgtaaacatgaaacttattttggctaacattaaacaagcaagaaatttattggaaagacagagtgctcacagaagtggaggaaagctgaggagccaggcctgggaacagacgaggcagggtggcgctgggcatcaccatgggcagaaaggacttcgcgaggcctcaccagagcaatccactccaataaatgtccattcttgcttttcttcatccagagttctcattctgggagagactgggttatggactgrgtgtttgtgtccccctcaaattcatatgctgaaattgaatccccagtgtgatggcatttggattggggccttcgagaggtgattaggtcatggggcttgttctcttctgcatatgagtatacagtgagaagttagcagtctaccacctggtagagggccctcaccagaacctgaccat

SEQ ID NO: 791634 - DNA, 615 bp, Homo sapiens
tgttttcctgggagcaaacatttggaaatgatttaaatatctatcaatagaaatgaataaatttcaatatattttctggaatggaatatgtttaatggaacacttaaaataaatgtggaaaacttcaaattgagagaacaacaaatactaatattgataaaacacacactgcagaatgatacagacataggaccattcagataaaatcttaaaatgtgcaaaattttgctatttacagtttagggatgcatacatagatagtaaaagtataaaataagcatgagtactcagaagagaagcagaagaataggaccggcgcaatggtaccctgtggtctccaattgtatctttcrttgtaactctgtttcccaaaaagaaagaaaaactctatatattttctatgtttgaaatatttcacaattattttaaaatctaaaaggaaaactaaaattaaagttttaacagatttcttttcctttttcatcgttgtggttgttcagaaaggccaattcatttttttctgaatataaaataattaggctttctttttatctgaatattgtgtgactgtgtgtgtgtgtgtgtgtgtgtgtgtgtgtgtggtgtagcacttaa

SEQ ID NO: 791635 - DNA, 619 bp, Homo sapiens
ttgcaattttcatcagcacattgaaccacacattgataatgagagatagcactttgaacacatcgcctattgtctgtaatatcaataaaacatttgttatatatatttttctatgtttctagcctttatgaacaccctgtagaagagcacagtacccagagaaaataaataattcctatgttctttttccctccatctctagagtttctcacccaccatgttttaatgcttgctcctaccttatttatatagtgaatatattgaaataaaagaaatgccacgaataggagaacaatcaagcccatcatttttcccacytgaaagaaaattatatggtcattaaaaataacattaaagtagaagaagactgagagcactaaggaggagatgaggcatcttggccaggaatacagacagatttaagagcagagctcaggttttccctggtgagtcatttggttggtatccttaatgctttatcccaactgcatacctctaccaatcctttgggaattccaaatggccattgacaatagcaggtcacgcatggagaaaaaaaagaaaataaaatatgttttcaaaactgatggggtaaaggcatagagatttgtagaggtat

SEQ ID NO: 791636 - DNA, 636 bp, Homo sapiens
aaaaggaacatgcagggccctttgttcaaaacttacgaagaattttaagatggcaacagcagagccttaaaccaaacatggaacctttctaagcatggggccccgtggaactgcacaggttgcacactcgtgacatcagccatctccaaagggtcagtccccacttttgccttcacctgtacccatgtttcattaccgtgggtgggcaggggatctcttctgtctttgttccatgcactacctcctgaggtcattgggaggattaaactaaacatgacattgaacaggactgtaaccacctggcttacagcaggcaytcaacaaattaccattatcattcttattatcatcttcattatgccaaagtcccttcacaactccaaggctacccataggcaggaacatatgggaagatcatattccccttttggcagagaacatctatcaactggcgctgttcagaagtcatttcgttagtcgtgtgtgagagaatgctgtaaatgaggtgttcttaacctttcatctgtacgatggatctgttttgtaatctagtgaggcctacaggcctcttctcaaaataatatttttacatgacaaattaaaatattataagatttaaaaaaatttatattaaaa

SEQ ID NO: 791637 - DNA, 592 bp, Homo sapiens
aatcccagctactcggggggctgagttgggagaatcacttgaacctgggaggcggaggttgcagtcagccaagatcatgccactgcactccaggctgggcgacggagacttcatctcaaaaaaaaaccaaaaaggattgtttgaattgaacaaataggtgctttttaaccaaaaaaataacaaatacaattgaatttgagccttttcataacaaacgaggcctgaatcaaacacgtcaccctacccacactaccttgagaggtcttgatgaaggctaccatcttrcgcagtcatgtaagagaacttacagcacagctgttccctcaaagtgactttcatttaaaatgcctctgtaaaatattttggaaacacggtgaagtattgtctccattacatttattattttttcaagttcaactacagacctccaaatgactcccaattcacattccatcatggtttttaaataccattagccatttgtgtgaaaatggtgttgtctacatgactccatattataagaagatggaattggtgagttatttcatcatcccagaattttaggtcacaaaaagaggaaaagtggatcctc

SEQ ID NO: 791638 - DNA, 592 bp, Homo sapiens
aatcccagctactcggggggctgagttgggagaatcacttgaacctgggaggcggaggttgcagtcagccaagatcatgccactgcactccaggctgggcgacggagacttcatctcaaaaaaaaaccaaaaaggattgtttgaattgaacaaataggtgctttttaaccaaaaaaataacaaatacaattgaatttgagccttttcataacaaacgaggcctgaatcaaacacgtcaccctacccacactaccttgagaggtcttgatgaaggctaccatcttacgcrgtcatgtaagagaacttacagcacagctgttccctcaaagtgactttcatttaaaatgcctctgtaaaatattttggaaacacggtgaagtattgtctccattacatttattattttttcaagttcaactacagacctccaaatgactcccaattcacattccatcatggtttttaaataccattagccatttgtgtgaaaatggtgttgtctacatgactccatattataagaagatggaattggtgagttatttcatcatcccagaattttaggtcacaaaaagaggaaaagtggatcctc

SEQ ID NO: 791639 - DNA, 622 bp, Homo sapiens
ttacctcatttacctaaagattctgggtgggaaatccaatagctgtggctgatggaggggaggcagcaggctgcaatctcaccagctcctatagggatggggcaccacgggcgttatcaagtctgagccctcatcagagtgaagataaatgcatataacaataattttaaatcattttgtaggatgttaagcaataagccaccaaccgggaattccctaagtcacttccccctcttctgattggctacccagccctttaaaaaaataaaataaaggattacaaacaytggctcatttgcatttggccaactcacacgttagtgttcaaacaaaacaggtctaaccaggtaatgcctgtgtctcaagaacagagagacaacctgttaatggatgaggaattgatttggtggtgactgttcttttcagctcagaggctgtttcaggtgaaaagcaccctgctcaccaaagacaccatcgggaagagggaatgtaaaagcaaagtgagtagaagtccaaatctggaggagatgatggtatggaggggccctcttgagcacctgtctcatttattagtctgtatttagtccaccctgctttggcatcaagatcttttccctagctc

SEQ ID NO: 791640 - DNA, 558 bp, Homo sapiens; identical to SEQ ID NO: 787131

SEQ ID NO: 791641 - DNA, 558 bp, Homo sapiens; identical to SEQ ID NO: 787132

SEQ ID NO: 791642 - DNA, 646 bp, Homo sapiens
cctttcactgattagataattatgtctctcaaataaaattgtgttttcctatgtatgtatttttcctttatgccaacaatagcacacagtaccagaactatcctttgtgcttactgagtattttccgaacatgggatttttttctcaactctttattcttccccagtgcatatgaggaatacattaacagttccacgcgtccatcaattacaacaaagtggctatttttaagtaaatgtgtgtttcaaatatgtgttgagtttggaggagagataagagaggaatgtaggaatytgacaaacttttccaagtatatctggctctcccaatcccaggaaaagtgattgttttatacttttttatcaacatctcaattccagtgaaactattcttggtttccaaaatattttgaatcttgtttctgcctcaatacctagtgtatccttcactcataagttttcctaaaacctgaattacaataacaaaatgtatttatttgtatcaagcaccattggcatttctgtgtgtctactgactccttaaatcctttgaggtagccactattatattccccaaaattcagatgaaacaactgaggcgcagtaaggtcatggaaggttggatcctagccgactctctgcagtgc

SEQ ID NO: 791643 - DNA, 607 bp, Homo sapiens
gtaaaagagaattttgtcgcctgcgggaataccagggaagttaccgtgtctgataataagctcaggagtccttaatgtagcctattttaccaattaatgacatttccttgttcatcatggataacagtcaggttgcagtttgttctgtgaactcagggttgttaaagggcaattgaattttttttttttttttgagacggagtctcgctcttgcccaggctagagtgcaatggcacgatcttggctcactgcaacctctgccttytgggttcaaacaattctcctgcctcagcctcccgagtagctgggattacaggtgcctgccactatgcccagctaatttttttttttttttttttttttgtatttttagtagagatggggttttaccatattggccaggctggtcttgaactcctgacttcaggtgatctacccacctcagcctcccaaagtgctgggattacaggcgtgagccaccacgactgggcaattgaattttgaataaaccaaacacgtgtgaaaattatggttgtacataaattcctacacttaagtcagggctcacacattgactgacttattcacgatttgatgagttcaacga

SEQ ID NO: 791644 - DNA, 585 bp, Homo sapiens
ttacaagcaacagaaattcgactttggctcacttaagcaaaatgagaatattggataattcacagagaagaaaaagtaaagtaggctttgaaaggataggaactaagtctgttctgtgtaacaggaactaacagctcagtgaagaatcggttccaactgatttactatcttttgtgactcagggagtcctgggaaagttggttaggggaccactaggcactttaattggcagtcctaacagtaytttatttatttatttatttatttgagatggagtctcgcttggtcacccaggctggagtgcagtggcgtgatctcggctcactgcaggctctgccccccgggttcatgccattctcctgcctcagcctcccgagtagctgggactacaggcgcccgccacctcgcccggctaattttttgtgtttttagtagagatggggtttccctgtgttagccaggatggtctcgatctcctgaccttgtgatccgcccgcctcggcctcccaaagtgctgggattacaggcgtgagccactgcgcccggccctaacagtactttcaaatgcagaaggggtgaatctca

SEQ ID NO: 791645 - DNA, 585 bp, Homo sapiens
ttacaagcaacagaaattcgactttggctcacttaagcaaaatgagaatattggataattcacagagaagaaaaagtaaagtaggctttgaaaggataggaactaagtctgttctgtgtaacaggaactaacagctcagtgaagaatcggttccaactgatttactatcttttgtgactcagggagtcctgggaaagttggttaggggaccactaggcactttaattggcagtcctaacagtattttatttatttatttatttatttgagatggagtctcgcttggtcacccaggctggagtgcagtggygtgatctcggctcactgcaggctctgccccccgggttcatgccattctcctgcctcagcctcccgagtagctgggactacaggcgcccgccacctcgcccggctaattttttgtgtttttagtagagatggggtttccctgtgttagccaggatggtctcgatctcctgaccttgtgatccgcccgcctcggcctcccaaagtgctgggattacaggcgtgagccactgcgcccggccctaacagtactttcaaatgcagaaggggtgaatctca

SEQ ID NO: 791646 - DNA, 585 bp, Homo sapiens
ttacaagcaacagaaattcgactttggctcacttaagcaaaatgagaatattggataattcacagagaagaaaaagtaaagtaggctttgaaaggataggaactaagtctgttctgtgtaacaggaactaacagctcagtgaagaatcggttccaactgatttactatcttttgtgactcagggagtcctgggaaagttggttaggggaccactaggcactttaattggcagtcctaacagtattttatttatttatttatttatttgagatggagtctcgcttggtcacccaggctggagtgcagtggcgkgatctcggctcactgcaggctctgccccccgggttcatgccattctcctgcctcagcctcccgagtagctgggactacaggcgcccgccacctcgcccggctaattttttgtgtttttagtagagatggggtttccctgtgttagccaggatggtctcgatctcctgaccttgtgatccgcccgcctcggcctcccaaagtgctgggattacaggcgtgagccactgcgcccggccctaacagtactttcaaatgcagaaggggtgaatctca

SEQ ID NO: 791647 - DNA, 421 bp, Homo sapiens
ctgattttaaagataaaatcagatctttatagtttctgattgttcttatttgaatcctctctcttcttttgtttgcctaccaattttgtttgtctttgccaagaatcaacttttcatttcattgatcgtgtgtgtgtgtgtgtgtgtgtgtgcgcgcgcgcgcacgcgtgcatgtttggtctcaatttcattcagttctgatctcttttctgctagctttgggttttgtttgttcttgtttttccagttccttgaggtgtaacattagtgttaatctgaaatgwcttttttatgtagacatttaacactataaacttccctttcagcctgcttttgctgtatcccagaggttttggtatctattttcactcgtttcaacaaatattttgattctgccttgatttcactgtttacccataga

SEQ ID NO: 791648 - DNA, 554 bp, Homo sapiens
aggccacaaaagtatcaagaaaggtagttttggggtgaggagaaactgacagagaaatcaatgtcacataaacctcttggtgggcacatctggcaggtagaccccaccactactgcaatttcagactacctaattttaactcgtttttaaatactaatcttgccataattgatcatctgacttttattcctgttctgagawatttttagaaaaagtattgaatgagaaagcagcagcaagattaaaaacatgaataaaaagcatatcttttcatgtaaatcaagcttgtccaactcatggctcgtgggccgcatgcaacccaggagcactttgaatgaagccttacacaaattcataaactttcttaaaacattatgagtttttttttgcattttttttttttagctcatcacctatcttagtgttagtgtattttatgtgtggcttgagataattcttcttctgatgtggcccagggaagccaaaagattggacacccctgatgtaaacgaaagtgaactgtaaaacagtaacactagcctctaagaaagcca

SEQ ID NO: 791649 - DNA, 600 bp, Homo sapiens
cttggtagctctttttctaaaaattaaaagtggtgatttatttcccatttaaaaaactaaaacaaaaaaatgttaaaataattattaaataagttctcacatgatgtggttgccaaatggtaattttattattctttttttttttttcttgtagtaaatattcccctgtagatcagagcatttttttcctccccccttttttttaagagcagttaaagactttatttaagaccatgtttttagagcagttttaggcttatgggaaaattgtttggaaagtacagagctccagcatacgccttctttcctccccttcttagtttcccctattagtgcatcttctattagtctgattacacttgttgggattgrtgaattaatattcatagattattattaactaaagttcgcagtttatgttagggtttactgtatgtgttgaacattctgtgggttttgacatgtataattacgtgtatctacctttactgtatcatacagagtagtttcactaccagaaatccccattgctccacctatacctccttccctgccaccacccccaaacccctgatctttttaccatatctgtagttttgc

SEQ ID NO: 791650 - DNA, 504 bp, Homo sapiens
acctcatcaacccaccactaccctggatttaaagcgtctcatttaaaaatgtacatagcccccagggcaattccccctttaagtttctcagtgagcacctgaggcggttcagagtcaggtaagctggggggtgaacagagattatccagggcaagccctcaattcacagattggggccaacagatcctctagaccctgggactaggtcagccatggctagggctgcccatgaaaggtctctaagtggagctatgtggatgtaacctcttctgcagcacaggcagacaggaggggatgctgcccaggactgggtgagaaagaacttctgaggcccagaaacagccagcaggcctggtrgtgtccttgccgcgaagcaggagtactgccttacttggctgcatgagtggtttctggaggctgacagtgctggcgttacaggacagcaaggccaaggtctggggctcccccagccctgtgttcatctcaccttgcacaggccaccaa

SEQ ID NO: 791651 - DNA, 504 bp, Homo sapiens
acctcatcaacccaccactaccctggatttaaagcgtctcatttaaaaatgtacatagcccccagggcaattccccctttaagtttctcagtgagcacctgaggcggttcagagtcaggtaagctggggggtgaacagagattatccagggcaagccctcaattcacagattggggccaacagatcctctagaccctgggactaggtcagccatggctagggctgcccatgaaaggtctctaagtggagctatgtggatgtaacctcttctgcagcacaggcagacaggaggggatgctgcccaggactgggtgagaaagaacttctgaggcccagaaacagccagcaggcctggtaktgtccttgccgcgaagcaggagtactgccttacttggctgcatgagtggtttctggaggctgacagtgctggcgttacaggacagcaaggccaaggtctggggctcccccagccctgtgttcatctcaccttgcacaggccaccaa

SEQ ID NO: 791652 - DNA, 523 bp, Homo sapiens
tagcatttgtcatcacttgacattattttatgtgtattcatttgtttattttcttccacaaatatttgtggaacacccactatgtatcagacactgttctaacttctgggaatatagaagggaacaaaataaggtccttatatcccccactgtaatataggcatgcttatacaactacaaattgctagttattatttcatgttttttaatttattcattccttcaagagacctaatccccaccatcaacagaaggctccttgccatatcccatgacttaaatgcaccctgaacattcccccttctcttttagagagaacttttcaatgtgcttttgtgctgtgctaagtttaacttcttttcagtcctaatgaawtgccccagtacagcttccctgcagtggaaatttcccttatttgatataagtctcccactgcatagctggtgtttatcttattcctatgcaatttatctaaacctaaaggatcccccaaagtgagaccaaaaaaaaaaagtgttatcat

SEQ ID NO: 791653 - DNA, 571 bp, Homo sapiens
tgggctattgctggggccaatctaggagggcttcttagggagttagcatcattgctgactgggggctggatagcaaacctatggtcagagctcttcaaatgcagttaaccatcaagtctggagaataagttggaaattgaaatatatgcaaaaaatatagtgtgtgcctatacctgggggaagaaaacagggatactggatgggaggatgtatagaattggtcagtacacagtgtttaagatcataagacctggtcttagctggggctgggtttgaattctgactccaccacttacaagcaatgtgcccttgggcaagttyctgaccctcactaagactcaattgccttatctgtgagtagaactagtaatagagcctcccccataaagaggttgtatgccagaaacaaatatgcatatcaaagcaagcactgaaaattggcacaaggaaagtcctcagtaaatgggagcccttgtttttcactgagatgggtcaagaaggctctcctgggggtatgttaaggctgcaagagtctggacaatgatctcggagttggagtggagaacactga

SEQ ID NO: 791654 - DNA, 534 bp, Homo sapiens
cccaaagtcttcttcccctgatgtgatgccaccaaagtaaagagcttgcccgtggtgttattttcgtcaatgcacagaattactgtcagtaatttccctcttcttgtctgagcactgtatgtcttagagcaatgcatgtcttagagcaatgcatgaatcacatgaccttttgatgctttggtgaaataaagctcctctccttggtcatcagaaaggaggcctggcttggagaagtgcctcwgggtgaagcccaagacagggactagactctcctagagccttcctatagcctgtatagactctgccaaagtcatcttcatgtttatcatctaccattcctcctttaggtactgacaccattctgtctttcttcttatcatccaccccctccaattatcccaatcccctctcaaaaaaacaaaattccatcccagaagttcagactagaaagtcaaaaatctaaggaaagtgttgcaagaatgatgaggactgtcagtggctgctcacggtatacagattccatctcacaagcac

SEQ ID NO: 791655 - DNA, 555 bp, Homo sapiens
tttcctgattgttcctttcccttaggaaaattaacacatagtctctctctggtctctcatagtctctcatttctctttaattttctgttcctgctactccacgcctggtcctattcctatttttcagtgaaaattattcacagagaaggaatccaatgggtccatcttatcctatgtgggaaagagctttttgctggccagcacatggagtgactgtctttgggtcaggtgcacattgcagtctgggttgggtacagtagacctggtggtctacaaggtgaaccactacctcaraaagaggtcatgggcatgactgagggtgactgctcacagtactgtcacagagttagagacactagcatgctttctcatatttctttgaaaagaaaagcaaaaacctgggactaacacagactcttcactttctttttatctttgggcagatccattcctaaatttttccagacaccatcttgaaagtcccccaggataatagaatgagtaagaaacagactacagaatgcagtgggtgaggaaaaacttttgattaagcca

SEQ ID NO: 791656 - DNA, 590 bp, Homo sapiens
tattttaagaagactaagcacttgctttctaactttatttacattattaattaacttagcagttcctttgcttttctgaaacacaaaagcatatctagtgtctgtctaatgatcacagatatcaatttactgggattccaattaaagaaatttaactacatttctaggaaaaaaatgattttaacaattaacttacaagagtgggtttgtatgcaattaagactatctatcaaatccccctgactgagcatttttctaactcacagggaaagggtcaaattccttccatatacacaccctcggctggcattgtgctaacacttctcaaggaagaaaaaaaaaatctcaagtaacaagaagactatagagcatttcccaacataaaagtgttaaatcccyataaaccatgaaagaatgcaagatttctaagtagaagccacggtgacctgaaacccttgccatggggttcaatcacttgaaatacgttgagtctcaaactgcccttaaatttgttataaagggccctcaaatgaatcaggaacccatctcaataccaatgaaacactcaaaaagccaagatcagctcaaca

SEQ ID NO: 791657 - DNA, 551 bp, Homo sapiens
ttcagtaaagactataggaaagccttgggctctatgctttacttgccatattgctttgttttcagtaggcactctatgaatatgggcttttgctgtggtctgaatgtttgtatccctgcaaaatgcttatgttgaaaccccacyctctaaggtgatggtatcaggaagtgggtcctttgggaggccacgagggcattctgcaaggattaatgggcagagccctcttgaatgggattaatgcccatatagaaagagactccagaaagctagctagctccttccaccacgtgaggacacacggagtgggtgctgtccatcagccaggaagtaggctctcaccagacactgcatttgctggcaccttgatattcgatttcccagcctccaaaactgtaagaaatacatttctgttgtttataagccccctagtctgtgatatttttggtatagcagcctgagaggactaaggcagctttaaaatgacaatcagaaaatgtaattcctctgactagaatgctccactggcttcctacagtacccaaaagaaactc

SEQ ID NO: 791658 - DNA, 551 bp, Homo sapiens
ttcagtaaagactataggaaagccttgggctctatgctttacttgccatattgctttgttttcagtaggcactctatgaatatgggcttttgctgtggtctgaatgtttgtatccctgcaaaatgcttatgttgaaaccccaccctctaakgtgatggtatcaggaagtgggtcctttgggaggccacgagggcattctgcaaggattaatgggcagagccctcttgaatgggattaatgcccatatagaaagagactccagaaagctagctagctccttccaccacgtgaggacacacggagtgggtgctgtccatcagccaggaagtaggctctcaccagacactgcatttgctggcaccttgatattcgatttcccagcctccaaaactgtaagaaatacatttctgttgtttataagccccctagtctgtgatatttttggtatagcagcctgagaggactaaggcagctttaaaatgacaatcagaaaatgtaattcctctgactagaatgctccactggcttcctacagtacccaaaagaaactc

SEQ ID NO: 791659 - DNA, 572 bp, Homo sapiens
gagggcattacagccaggaataactagctgagtggcgctaaatgaaatgtattctaagcctcccattaagccacccatcctcattgtgcttatggtaccttatttatagggactcctgtaattggataacatctctccccttagttctcttcctttcccttcaagcagaagccagctggggtcagaggagaggcygctttcacctgcagtctccatcactccgtctggctttccagatctcagtcttatagggggacacctgtgcaaatgattccagggcatttagtcatgcctgcccttgccctgtttcccaagacacaactgccggaggcagccatttaaaaatgtggtatgtagtcttttagactccttcatacatttcccttttttacatacatggggtgatactacatactgtagtcttctctgtttatgtactcctatattgatggcatttttcatgttctcagctgcatgaaattccatcgtataattctagcatggtttacttcaccaggtccttattgactgttgttcctgttgctacaattttcagatgttgtgaacaacgg

SEQ ID NO: 791660 - DNA, 588 bp, Homo sapiens
atgcctcagggcaaccagagtaattgcagcgtgcagaaatgaaagtccttttaaacttctgttgacagcctacaatgtgcttgggagttgctggaaataaaaaaactgaatcaaacatagccctgcctcttaggagtttaaaatttggagggagagacaggtatgtatgccactaaccgagctatcctttagtttgcaaatggcactaaaacagcggttcaaatcaagtgctgtgggaacacagaaaattaaatatggttgaattaaatctgataggaaggataaggaaagacttgataatggaagtgatatttaaactgggccttgagaaatgagtaggaacatcaggtggaatgctaggggagggtagaaaggacagcacatgcagaagagtgagagaatgagatggtacgatgtgtctgccacccagtgagaagccgagtgyaactggagtggagggagcactaggtaagtcgtagaggtaaagccagaagacacactgcccctggatggggaagggctctgactcttaatttaaagaatgtgggccacaatccagtaagagactggatggtgtcattagtatca

SEQ ID NO: 791661 - DNA, 676 bp, Homo sapiens
tatggtttgtgttttatcgcattttacattaaaaattcttctctgcctccaaatcacaaatatagttccatatatttccttgtaagatgaagttcaattcctctatgtctgtttattcaactttattttttaaatgataactaatgttctaaataccattgagtgcaattacagttcagtatcagacattgaacttcaaaatatgtctggatattttcctgggctccattttctattcaattaatcttttatctctttccaagccagtactgcactcatagttcttgtagctggattcaggaaaaaaaaatcactttgtcttattaatctgaatggtcttggctactttgataatttggygtcttagtttgttttgtgttgccataacacagtacctgaggctggataatttatagagaaatgaggctaatttggtttatgattctggtggccagaacatacctgtctgagttgttgcttctggtgagggacttatgctgcttccaatcttggtggaaaaaggaatgggaacaggtgtgtgcaaagagattacatggccagagagggaaaaaaaagagaaaccaaggaagttaggctcttttaacaatccactctcaaagaaataagtcattcctgagagagcaagaactcactcactcccagggaaggcattaat

SEQ ID NO: 791662 - DNA, 628 bp, Homo sapiens
ctgtcacaacttttcttattcatgttactttcctgaactggacaaacactcatgatggaaatgatgacctagaaggaaacagaaagacagggaaaagcatagttccttttccttcctgccccttcttacttatcagtaaactgaaagtaagtggtattggtagagcatgtgcttgaaataaagacagctgagygaggtagtttcctacagtgatatccgctatccttgtaagaacaaactacatctgcatgtattaactacaaaatacaaattttgtaataattttggtggttctgcatagaagctaaatgctcaaatatttgcatctaaaactgtcattgcataatataaaaaagaatagttaaattcatattaataatttttatttgattattttattttcctttcaaatagtattaaataacaaatgaaaaaacacactatgacaagtcaaaggagagattatggaatatcagaaaaagcttcatagttaagtacctttagctacacttacttttggctttttgaataaaagactccacattttcattttgccctagaatctgcaaattatgtatctggttctgcctgtggaaaacaggatccaactcagagagttcaataaact

SEQ ID NO: 791663 - DNA, 523 bp, Homo sapiens
gccccgtcttattttattttaataagttgcaactaaggaaactttactgaaacagaccctttactttcagtttctcattgaatttagtaaaaacaatttaaaaactaaacaactaaaaatcaaatacaacaatagaaaatcaaaccattamgatcattttacacaatttaaaaaaccaaataaacagctgttttaatcaaacaataatcagttaagcctcatttgttaagctccaatgatttagttacttaaaacaacaaaaatatttacattatactaatgaaagtatttacttccaggatgctcaaattttaggtaacgaaactgaaagtttaaacaaaatcctttgccgaacctcaaaatacaaaaatgaattaaatatagcatttaattagtctacacttttgatttcacttatataatatttatacatttctaattacagcaatgctaacactaagcccttttgatacccaaacatatttaaaattttaaatttaaatagtttaattgatatttaggg

SEQ ID NO: 791664 - DNA, 623 bp, Homo sapiens
caatggagactaatatttttctgtgtcatatgtatatatatatatttgtctacatatctgtgcatctgtctagctagctagcaagaatacttcacaggtaggatgcattctttgtcaaaggcagataacatttgacacccatgagttactattactgaaaagattatgaacaataaatgtcgatgagactgtggggaatcttaaactttcacacaccactggttagaatgtaaaatggtaaaacccctttgataaaaagttctgatagtttccaatataatkaagcacacggttaccttgggaactagtaatgacactcctagaaattcacccaagactgaaaacatgttcacaaaaggacttgtacacgaatatttatagcagctttactcacaacagtccaaacctggagaaatcccacgtgaccatcaacaggagaaagaataagtaaaccttgtggtattcataccaaccaatcataccaaccaatcataccaaccaatggtactccgcagtaaaaagactggagaaacacgtgatagcaaggtggaatttaaaaacattctgagtgaaagaagctttacgaaaggaggatatttggtgtgattttgtttgtatgaact

SEQ ID NO: 791665 - DNA, 643 bp, Homo sapiens
tctaccatgttttcttcaaataatttttctaccctttctttgtctgttgaactccaatcatatgtatgtttagatatttagtattgtccttcatgtttcaaatactgtgttcatttttcttcaatatattttgtctgttatttggactgtatgatttttgttattctatactcaagctcttgattttttgctatgtcaggtctgctyttgcactcatctaatacatttcttgaaatttttattattgttctttttagatctaattttttgtttattttttatagtttccacttctctgtgacaagttctcatttattaacttatcattgtcataatctctttaattatttgaacatatttttctttaattctctgtacataattttaatgtgtgcattgaagtgttcatctgcacagtccaaaatattgtcccacttagactctgtttctattgccctcttattttcatagcatgggaaatacttctctgtgtttttacaagtcgaattgttttttattttaagctacactttttagacaacagattgttgcaactctggattctgttttattcttccagggactgttaatgtttttctttgtaggcacatactttgcctggtctcacactgtaaagtctgtc

SEQ ID NO: 791666 - DNA, 646 bp, Homo sapiens
ctcaaactccaacatggtggtgatggaatccattgtttgtgagagcaatcttatctccatggcaacagagtatgatgtcaccactttcaaagatgtattgctatggcaacacagatgctgtcacaggcagcaagttttaacagaaaaaaaaaaagcaggtctccttgacagcaaagattccattttaatgccaaacactgcctctcttgcccttctctactggaattcagttaaaattcatggaatcaagtatagtcccctccttttaataatttgctgtaataaaagtaaactgaggcccacagaaagattagtgctacaatgaaggtcacaaaagtagccagcggaagagccacrtctagctagagccccaataaccatcctccttaggcccttggtccattttcattatttacttgctgaatcataagatgttaccaagaaccagtctatctgagagtacatgagatagcatgaagctcagaaactaaaaaagtctgggcaatggagaatgggataaaaatgctctgaatgggaagatgaagtgtaaatgggctaaccaacccaacatactatggcctgtgagccggtgacccctggatcaagccccaaccacccaaatgtaatcagagccccaccaggtggc

SEQ ID NO: 791667 - DNA, 608 bp, Homo sapiens
ctataggacagagatgaggaagatggaaaaagggaaaggaaacaaatagtgcttctgagccaaaaaagaggtgaaagctgttgtggcaggagccagggcacccacagaggtcctcctggcagaccatctttacagagccccgcaccctgccagactaggcaaggtgctcagttacacgaccccaaatccacctcaacctcaaggacctcccttgggcccctggacacagacctgtatccaacttggtgagatgccacaggaatccaaaggaaagggctagggtatggggtgagggtgggaggtaaggcttttagctgagaagtgcaaattcctgggcaactggccctcagaatcacatgaggtttggaatgaaaccgtgttttagacctgcctcctctactgaccagccccaagaccttagcaagctgttcaatctctgtgaccttcattagcytaatgtgctgcccaaatgtaaggaatttcagtgctatttatgaaaggaaatgtactgcactcaccccacacccagggccacggggaagaaagtgtcgagagaagctgcacgtgaggctgtgaaaggagcctggggaggggaagaatccccatgc

SEQ ID NO: 791668 - DNA, 537 bp, Homo sapiens
aattggagccgcctgtaatcccagcactttggaaggccaaggcgggtggattatgaggtcaggagatcgagaccattctagctaacacagtgaaaccccgtctctactaaaaatacaaaaaattagccaggcgtggtggcgggttcctgtagtcccagctactaaggaggctgaggcaggagaatagcatgaacctgggaggcggagcttgcagtgagctgagattgcgccactgcactccagcctggccracagtgtgagactccgtctcaaaaaaaaaaaaaaaaaaaaaaaaaaaagaatcggagcctctcccatgggcaggccccgtggggaaagggccacatgcagagatgcattgcagaaggtctcagaagaccaaggctcgttgggagcagggtttggggacttcccttggggataggaggaaccaccagcaagtgcaggaggcttcacgtaggcatctagcttgtgaggaaggagcaactgatgagtggatacatgtgcctcctcacttggcatcatgttttccatgtc

SEQ ID NO: 791669 - DNA, 626 bp, Homo sapiens
aagatatagccaaaaattattcagaaaatagtggagagagacagcacagaaaatatagaagagggattgagagacatttcagaagatgtcttagttatttattgctgcataacaaattacctccgaaattaaggttcaaaacaacagcaatcacttctcatttctcactgtttctgtgcataaggaactgagaatctcrgttgggctgtgcttggggtctcataaggttgaaggtagttgatggctggggctgccattatccgaaagctcaactggggctaaggatccactcacatggcaggaaaattgttgtaggttgcttgccagggctcttaattcctttccacctgggcctcttcatgcgctgcttgggtgtcctcacagtggcaggaaggcatggtgcccagcttccttaaagtgagagattcaagtgggtgtgtttgtgtggagggggaaagctgcaagggtttttcagatccagtcttggatgtcacacactgtcactcctgccacactgtgttggtcatacaggtcagctctgattctggtgtgagggtccccccatcatggaggccagctaccatagaaagagagaagggggaagatggatacagcagtaattaaag

SEQ ID NO: 791670 - DNA, 626 bp, Homo sapiens
aagatatagccaaaaattattcagaaaatagtggagagagacagcacagaaaatatagaagagggattgagagacatttcagaagatgtcttagttatttattgctgcataacaaattacctccgaaattaaggttcaaaacaacagcaatcacttctcatttctcactgtttctgtgcataaggaactgagaatctcagttgggctgtgcttggggtctcataaggttgaaggtagttgatggctggggctgccattatccgaaagctcaactggggctaaggatccactcacatggcaggaaaattgttgtaggttgcttgccagggctcttaattcctttccacctgggcctcttcatgcgctgcttgggtgtcctcacagtggcaggaaggcatggtgcccagcttccttaaagtgagagattcaagtgggtgtgtttgtgtggagggggraagctgcaagggtttttcagatccagtcttggatgtcacacactgtcactcctgccacactgtgttggtcatacaggtcagctctgattctggtgtgagggtccccccatcatggaggccagctaccatagaaagagagaagggggaagatggatacagcagtaattaaag

SEQ ID NO: 791671 - DNA, 625 bp, Homo sapiens
tgtacatttagttttcctgattaataaaatgtaagacctgattcctccagatgacagcttactatggtactacatatctttttttgttttagtcttattgaacatcaaaaatatgagggtaattggaagaatatgcttgtttcattgatttaacattgggggttataaactgaggagcttttaaaaacatacacagtgcagtagcagtrgcaactgcttttcctttttttgttttttttttcattttgttttggttttgtttttgttttttgagatgaagtcttgctctgttgcccaggctggagtgcaatggcgcaatctcagctcactgcaacctccacctcccgggttctcctgcctcagcctctcgagtagctggaattacaggcacgcgccaccatgcccagctaatttttgtatttttagtagagacggtgtttcaccatgttggccagactgatcttgaactcctgacctcgtgatccacccccctctgcctcccaaagtgctgggattataggcgtgagccaccgtgcctggctgcaactacttttcattactctcactgcttcacctccacttgtgatcagtgacgcatgtttgagagacacctggctttggagac

SEQ ID NO: 791672 - DNA, 607 bp, Homo sapiens
tctgtctcaaaaacaaaaaaacctgaggtcacattggtttatctgtctcagaggtgaccttttttcaacctgatattttgatgttaactattctgtatcaattataggttcagtatcccttacccaaaatacatgggactagaagcgttttaggttttttcaaattttagaatttttgcatatacgtaagatatcttggggttgtgacccaagtttaaataagaaactcatttatgtttcaaacataccttatacacagctggaatayaattttatacatcattttaagtaattgtgtgcatgaaaggaagtttggtgcacgcctgtaatcccagctactcaggaggctgaggcaggagaatcgcttatacctgggaggcagaggttgcagtgagccgagatcgcgccactgcactccagcctggatgacagagcaagactctgtctcaaaaaaaaaaaaaaaaaaagaggtcaagaacttatgtgtgcaattttccaccggtgtcacgtcagctctcaaaagtttcagattttgtggcatttcagattttggacttgcgatgctcagtctatattctgatacacagtacatacttatgatgatata

SEQ ID NO: 791673 - DNA, 625 bp, Homo sapiens
cgtgaggcgggcggccagggcacggtgcgtggggtgcgccgcgggcggaggggcgtggcgagtggacggtatgtcccacgggaaccgccaggcactgacggcgtggacggctgccaccgaggcgcagggcgggtgctgcgcgtctcactgctcggcgtttggcgttagcgtagctcccgggcctgtttatggtttattcctaggaacccttgtcgcgtgtccgttttagacccatgtacaaccccamggctctcttgagataatgaaagtagcactattacgttataaacagagacagcagcacttaagaataagaacctaaattaacagattgagctcataatacatatactaatttatacgtgatatgctttcgtcacatacaatatgtgtgcttgtcagtaaaataccatgtaaacctaaacagtttctcttagaatcaagctatttaacgttctttacacaatactttacacatatagtgacttttttctcactcacgtggtccacagttgcagtaaacctctgtgtttttcccgctaaaccatgttgccaacacaaacactagtactcaacagtgctggggtttaaaaaaatatgtgtatataaataaagcaaaattcac

SEQ ID NO: 791674 - DNA, 651 bp, Homo sapiens
acagaaattcaggaccgtggattgctttgctaatcctggtatgtccatgggcaggtcttgcatgtgagtgagcattgttcaaggtgcaaagaacaccgctaagcagcaccacagagctttcaaagggggctttgcatatttgcacaggccgctgcagacatgagagtggcgctttgagtgggagmcccaggatgatttggcccaggtgtaacatgtcccctcctcagccaagtggcagccccagagagcagagtggaagagcttattgctgtcttgctctaccatgttttccaaagacatgaaatttagtccatatgtttaaatctctctttggctgattgccttgtgcagttgatacatacagtacaacaaaataaaaattaaaaaataaatccgtttgggagcaaacttgaaggggagaaaatgctgcagccctgtgcagagagcgcacgtgagcatctaaacacgccattgtgtgtgcgtgtaagtgcgcacgtgtcaagctgtgctttcagagagccgtttataaaatatttggcatagcttcactgatgaggttcaaaaagagcctttgttatagaaaaggagccaaagcactttgctaatttaggaggccatcgttgggttacaagaatgaggacccaggtagac

SEQ ID NO: 791675 - DNA, 648 bp, Homo sapiens
tctagtaaatgcctcctaagaatgcaacagtgcttcttctaccatgccctagttccctcatattgcaaaggcatgaaaatgagaaggtgtcggctattttttcttttttttttttgagacagagtctcactctgtcacccaggctggagtgcagtggcacgatctctgctcactgcaacctccatcttccaggttcaagtgattctcgcacctcagcctcctgagtgatgggattacaggcatgtgccactacacccagctaatttttggatttttagtagagacgaggtttcaccatgttggccagactggtcttgaactcctgacctcaagagatcygcctgcctcagcctcccaaagtgctgggattacaggtgtgaaccaccccacctggccagtatcagctattaaagggccattttatttttgtattaattatgtaacaatttacttaacccttccatgctagactgaaaacttcccaaagtcaggcactaggtccatcttgctagttctcagtgcccacccacccccaactgggcccatggtaggatcttgctaagtagttgttgagtaagtaaatgactatcaggtacttgttacagtataccctctttgaagatttcctgtgatacaagtgttggtggc

SEQ ID NO: 791676 - DNA, 578 bp, Homo sapiens
tctttttcaaaagaaaatttcttcaaacaaagcagttacaagtccttagtccgttgaagtttgaaaacaaagatatctttgagttttctaaacacatactaaaataaaggttattttttcactttcaaaaaagacagatcgattcttttggcgttcaaatacagccaggcagaatttaactaaaaactttcccgagtactatttttgcaacagaggccagccaccaatattttttaatctgaaagaggttattttttctttcaaaaaaagaaaaagacatcattggaagacaatgaacaaaggagctaaataggaaaggcttgccaaccatataagtgcctaatattaagatawcatcaaatgaattgttcataccttctcgttagatgtcattttgggatccagatgataatgttagtggaaatcactcacacttccttgaggtagaacagccactaaatctcttcccatttcagagatatattgtaccattctcctatttttagtgccctaccctgcctctttttcagcataatccgggtgggtgagggggagaatgtttaatctccctccacagg

SEQ ID NO: 791677 - DNA, 685 bp, Homo sapiens
gaatgatctgagccattcagcatagccaagcagtcctaggtaacgccatggcctggagggacagccctgctttacagcacagcaaaaccagtaaatgtaaagatgccccctaatccctgagataaggctacatcatgtgtgtggaagccattcgagaaggcaagagtttaaaacattttaggaaaatcgccattcagaatgatgaaaacaaactaaagtttgacgctcaaagaagtgaygtcagtgggctggaaaatgtagttatgtggaacactaaccccggatgaggctggatgaatgaagtgttaccttattagtaatagtaataagagagcagcacaatggagatgagcaacattagtcaaactgcaatggctggacaaattggtgcaggagagaagggagaacctgagaaacgtagaagtcatttgtctctggaacagcttcacagagatgtggaagacccaggctaccccagccacttcctaccacagtcactgactgctcagaatgtgacgctggaagccaggtgcacacctgtagtcccagctattcaagaggcgaggtgggaggatcgctggagcccaagagttcgaggccaacccttagacaacatagcgagacccctgtctgttaaacaaaaaaaaaaaaaaaaaaaaaggaatgataaaaagaccagagtggg

SEQ ID NO: 791678 - DNA, 685 bp, Homo sapiens
gaatgatctgagccattcagcatagccaagcagtcctaggtaacgccatggcctggagggacagccctgctttacagcacagcaaaaccagtaaatgtaaagatgccccctaatccctgagataaggctacatcatgtgtgtggaagccattcgagaaggcaagagtttaaaacattttaggaaaatcgccattcagaatgatgaaaacaaactaaagtttgacgctcaaagaagtgacgtcagtgggctggaaaatgtagttatgtggaacactaaccccggatgaggctggatgaatgaagtgttaccttattagtaatagtaataagagagcagcacaatggagatgagcaacattagtcaaactgcaatggctggacaaattggtgcaggagagaagggagaacctgagaaacgtagaagtcatttgtctctggaacagcttcacagagaygtggaagacccaggctaccccagccacttcctaccacagtcactgactgctcagaatgtgacgctggaagccaggtgcacacctgtagtcccagctattcaagaggcgaggtgggaggatcgctggagcccaagagttcgaggccaacccttagacaacatagcgagacccctgtctgttaaacaaaaaaaaaaaaaaaaaaaaaggaatgataaaaagaccagagtggg

SEQ ID NO: 791679 - DNA, 685 bp, Homo sapiens
gaatgatctgagccattcagcatagccaagcagtcctaggtaacgccatggcctggagggacagccctgctttacagcacagcaaaaccagtaaatgtaaagatgccccctaatccctgagataaggctacatcatgtgtgtggaagccattcgagaaggcaagagtttaaaacattttaggaaaatcgccattcagaatgatgaaaacaaactaaagtttgacgctcaaagaagtgacgtcagtgggctggaaaatgtagttatgtggaacactaaccccggatgaggctggatgaatgaagtgttaccttattagtaatagtaataagagagcagcacaatggagatgagcaacattagtcaaactgcaatggctggacaaattggtgcaggagagaagggagaacctgagaaacgtagaagtcatttgtctctggaacagcttcacagagatgtggargacccaggctaccccagccacttcctaccacagtcactgactgctcagaatgtgacgctggaagccaggtgcacacctgtagtcccagctattcaagaggcgaggtgggaggatcgctggagcccaagagttcgaggccaacccttagacaacatagcgagacccctgtctgttaaacaaaaaaaaaaaaaaaaaaaaaggaatgataaaaagaccagagtggg

SEQ ID NO: 791680 - DNA, 556 bp, Homo sapiens
aaatagaaaaatatgactaaatctaatatgtcagttattttgaattttacgcagcttataaaaatcatttgtcatgacaagaaaaaatacttttgctatcatctgataccacagtaagcttgaggattaacggcattcctcaattgtatgytgccacccttttttttttttttttttttttttgagatagggtctcactctgtagcccaggctggagtgcagtagtgccatcacacttcgctgcagcattgaactcccaggctcaagcaatactcccacctcagcttcccaagtagttgggactatagggacatgccaccacgacagttctttctttctttcttttttttttttttccagggagtgcatctcgttatgttgcccaggctgtttgccaactccttgggctcaagcagtccttccactttgttctcccaaagtgctggtataacaggcatgagccaccccaccaggccagcagcaggattcttgaagaatgtgtaggcactctgcgattttccatattgctcctttattgcagtttaatccttcactt

SEQ ID NO: 791681 - DNA, 530 bp, Homo sapiens
tggccttctgcccattttctaattgcattggttgtttgctaattattgggttttgagagtcccttatatattctggatgtaagtcctttatcaaatgtatgatctgtaaactcttaacagtgtcttctgaatagcataagctcttaatttgattaagttaatttatcacatttttctcttatggattgtcctttcagtcatatttaagaaatctttgcccaatataaaaagtacaaaaattttctgttttcttctaatttttttttttttgacagagtctcgctctgtcacccaggctggagtgcagtggcacaatctcrgctcactgcaacctccacctcccgggttcaagcaattcttctgcctcagcctcccgagtagctgggactacaggtacacgccaccacacccagctaatttttgtatttttagtagagacagggtttcaccatattggccaggctggtctcaaactcctgacctcatgatctgcccaccttagcttttcaaagtgctgggattacaggcgt

SEQ ID NO: 791682 - DNA, 530 bp, Homo sapiens
tggccttctgcccattttctaattgcattggttgtttgctaattattgggttttgagagtcccttatatattctggatgtaagtcctttatcaaatgtatgatctgtaaactcttaacagtgtcttctgaatagcataagctcttaatttgattaagttaatttatcacatttttctcttatggattgtcctttcagtcatatttaagaaatctttgcccaatataaaaagtacaaaaattttctgttttcttctaatttttttttttttgacagagtctcgctctgtcacccaggctggagtgcagtggcacaatctcagctcactgcaacctccacctcccgggttcaagcaattcttctgcctcagcctcccgagtagctrggactacaggtacacgccaccacacccagctaatttttgtatttttagtagagacagggtttcaccatattggccaggctggtctcaaactcctgacctcatgatctgcccaccttagcttttcaaagtgctgggattacaggcgt

SEQ ID NO: 791683 - DNA, 464 bp, Homo sapiens
taatttaccagatacaggcatacctcgctgaattgtgcattgcagttattgtgttttatacaaactgaaggtttgtggcaaccctgtggtgagcaagacgatcaggtccattttcccaacgtcaggtgtgcatttcatgtctttatgtcacattttggtaattmtcagaatatttcaaactatttcattgttatatatctatcatggtgatcaatgaccagtgatttttgatgttgctattgtaattgctttgggataccacaaattctgcccataaaagatggtaaacctagttgatacttgttgtgggttttgaaagaatagtcaaatatacaatcatataccccaacctagattcaaaattgttaacaatttgcacgtttattttttgtatatttgttgtaccattgagaataagttttagacatcatgacactttaccctttatttaatcaacgtgtgta

SEQ ID NO: 791684 - DNA, 614 bp, Homo sapiens
tgttattgtttcaccctttaggatataacagaatattataattaatacaggaatttttcaaacattacataatttcagttaccttagtattcataccttttcgaatttgtactactttggacaatatattatatattcagctattattgakttctaatttaattccatttttgtcaaagaatatgctttgtatgactcgaatcctcttacatttattgagacttgttttatggcccagaatatggcctatactggtaagtatcccctgtccacatagatgaattttactgtcattgaggagagtgttctcaaatataaatgagatcaagtaagttgatatgtagctcaaatctgctataccctgttgcttttctgtgtttgttctatcaattaccaagagagatatattgaaatatctgactataattgtggatctgtctccttttcgatctaatagatttttcttcccatacttagaagctttgcttttaggagcaaaatttatgtttgtttttttctactcgatgagctatctcctttatcattattatgcccttctttatctctggtaatagtctatgtccggagtctactttgtttttaataaagccact

SEQ ID NO: 791685 - DNA, 462 bp, Homo sapiens
ttgttatgtgggagtcccgcacacgccagctcccctgtggaaacgtgcagggaaggcagccacgggtgacatttccagcactggttaaatatggacaaacctcgcagcttcccacccaggtagggcagtcctgtacaaatggtaaccggcagggtttattccgaaggacacgagtgtgccatgatatattcagtarttgctgtacttttaaaaagggagttgtaaaaattatctttaaaatgcttgttgatgccctgtgggtatgagtcactttgtgaagcaggatcaaaatggattctctattacgggtttctgctggctctttgattctaaacaactttattaatgttaataggagttatatacacatcaatgagagaataaattcccagggtttagtggagcttccattaatgatctgtaataagcaacgtaaaatgctttcaaattttctttcaagta

SEQ ID NO: 791686 - DNA, 595 bp, Homo sapiens
acccatgggggctgcagcagacagacaagtataaatggcaaatgactaacttccatgatttaagaaaagaatagagcaaaatttgaatctaaaagtctaatcactatttgctcgttcatacttagtcaccttacacttccttacatttcatcctgatgcttcacagayagtagaaggacctctgccaacaaattacaagtccacaacattaaggattagatgcacagtgggagaagaatggggatgtgtacatttagccactgagagtctagtttcatacctgagagatctggaaacactgtgtgcaccgctggcgatgctgcaggtggccaagcaacgctcaaaccactggcaacaacagggtagtatcttgatcttctggctcagtggtcacttcccacacagcagattttagagcacttcaggtttaagggggtactgaatttacatattccaaggtaaaccatggccatcatcatcaaggcagagctccatacaccgtgtacattttatttagaattaggtggcttttcaaaggagctccccatttttcttttatcacctgcctagttgccaggaagcagaataaatgcca

SEQ ID NO: 791687 - DNA, 630 bp, Homo sapiens
gaaaacctgtcattcactatctcgaatctcagctgagatatggagtgatactcatgggttaaacatccagtgaatgatggttgcctaatatttacatgcaaataggcctcagatattaactgatttgggctttagcccccaaaagaaaaatttttaaattatatttccaacaacaacaacaacaacaacaaaacaaatgctaggctgtgcgcggtggttcatgtctgtaatctcagatctttcgaaggtcraggtgggaggatgaattgagcccaggagttcaagaccagcctgggcaacatagggagacactgtttctacaaaaataataaaaaatattagccaggcgctgtagcaggcacctgtagtcccagctgctagggaggctgaggtgggaggatcgcccaggaggttgaggctgcagtgaaccgtgactgtgtcactgcactccagcctggttgacaaagtgagattgtgtctcaaaaaagaaacaaagaaaaacaacaaatgcttttttctgaacggacacattttgctctgttggttctgaaatgagccaagaacattatatagtatttgttgttgttattaaacagtatcatctagaaaacacaaaagcctaattatatt

SEQ ID NO: 791688 - DNA, 630 bp, Homo sapiens
cgactagaggtcacttttgtcaccatcttggttttggtggattttggtcagcttcattattgcaacctattttatcagcaaggtcttgtgccgacctcctatctcatcctggaacttagaatgcctaacctgtgaatgcagcccagtaggtctcagccttattttacccagctgtattcaagatggagtcrctcttgttcaaaagcttctgacaacaggattaagaggtgggacctttaggaggtgatcaagccatgagggctcttcctttgggaataggattaaagcccttataaaagaggcttcagggagcagtggctccatagccctttgacaatccatcatgcaacaaggcatcatcgtggaaggggagagcagccctcaccagacaaccaaatatgcccaacctgccagtgccctgatcttgtacttccctgcctctagacctgttctttatacattctcctctttataaattacctaggctcaggtattttgttatagcagcacaaaaagggactaagaaaggaaaagtcaaggaacaaaatgtgtttagctcagcttaaaacaaagtctcacatgaagataagcacaccacatccttttaaatccgtttcccaaaccattgca

SEQ ID NO: 791689 - DNA, 583 bp, Homo sapiens
ggcttctacctcagctttggagtggagcatcattctcctgtcccagaactgagcaggaggccaggcactaagaggcgctcaggccatgagagaagagaacgaagccaagggagaggaacccatcgtgagggagggcctgacctgccctccaccccatcaggacacagctccagggggactgccccatagtatggaggggtggttctctcttaacctctcactttctaggaggacaaacagcacaggtgaccctcaaatccggggcaygtgtctgacaccctctgggtggccccacctcggtataaagaaccatcctatggtagaagagtcctagatcacttctcccatggcctgtggagacacttgagtgggtcaagtacagcaggaagctgctgggtctctggtcctcacttctcttcagtaataagcactttcctggagatgggagaagaaagcacctgcaggttaccctccctctccaggggaaggaggatggtgcagcggctcatcctctattcaagcccaggttggctgcatgtgggctggagagtagtggtggatcccaagtgtcaacagggtgcct

SEQ ID NO: 791690 - DNA, 614 bp, Homo sapiens
ccattacattttttaatgctttttttcatgagcagaagttcttagatttgatgcattcataattatcaatcattttctttatgttttctcctttttgtcattttagaacttctctcactatacagatgtcatgaagttattctcttttattagtccattcatttccctttgtgctgtaaagataactttattgtggatctagcgttcatgccagtaaacctgtttctaatttctcctcattctgtatcattgatttacttctttatatagccagtattacaggattttaatgaratagttgtgtactatatcttgaaatctgataaaacaattcttctcaccttgttcttctataatgggtcttgactcctcttggccctgtaaactttcatatcaatctaacaacattttagttccacaaataacctgttcagattttttttgtaatatcctttcatttatatcccagtgttagaattgacattggttttcttggtggttctcaccatttattaagtagactttcactaaataatcctgttttatgccctaaaccccctccctctgttgtgtccccttagaaatatatgttaaagtaatttctaaaataatgt

SEQ ID NO: 791691 - DNA, 523 bp, Homo sapiens; identical to SEQ ID NO: 791590

SEQ ID NO: 791692 - DNA, 555 bp, Homo sapiens
gtgacttgaacagcattctgctttagagttgttttgaaaatactcccggccgggcgcggtggctcatgcctgtaatcctagcactttgggaggccaaggcgggcggatcactaggtcaggagtttgagaccagcctgaccaacatggtgaaacctcgtctctactaaaaatacaaaaattagccaggcgtggtggcatgtacctgtaatcccagctactcagaaggctgaggcaggagaatcgcttgaacctgggaggcggaggttgcggtgagccgagatcgcgtcagtgcactccagcctaggtgacagagcgagatttcttgtctcaaaaraaagaaagaaagaaaatactcccaagtcagatttttttttttttgagacatagcctcactctctcccaggccggagtgcagtggtacaattaacagctcactgcagcctcaacctcccaggctcaagagatccttccatctcagcctcctgagtagcagggactacaggcatacactgcaatgccaggctaattaaaaaaaaaaaaatttgtaggccgggc

SEQ ID NO: 791693 - DNA, 642 bp, Homo sapiens
tagcattaacacagcaaaagctgactgatacatcgtatatgaatctctgtctatcaacttttctattctggcaagctgtattgagcagtgcagaaggaaacctcagagtgttcattactttcctttccctaaaatcctagaccaccggttaagcagtcagctcctcatttgttttttcatattgcttttagaaaattagtcaaaagggttttctacactgaaggcactctagtcctaaggaaaatcccaaatcatgatattctaagtggttctcaacatctaatggcttataactccaaaaaggaaartaagcaaaacaagcagctattttctctcacttaagagtgaaccacaatttcacaatatcacaaaggaaggggaggaagtccgccatctttttcctggaatctggggaaacatttgtctttccttgttctatttttctgctagatgctgatttcaagcccctttcgaaaggaggtagagggcaggtaggaagaattgagggctcaaatcctgggttgaacattggtaagataggcaactaccaaacttccctcatgaattccataatattgactgcactttagtttcatccttaggcaaaatttcatcgtgtgcaatgtaaatatttgcaaaatc

SEQ ID NO: 791694 - DNA, 599 bp, Homo sapiens
aaatcctgtcatttacatatacatacattatatgtaatctatatatgtgtgggtctgtgcatgtgtgtatgtgtatttataatggcaggcagcattctatcattgcctctaatattgcctggtgcacatgctgtatgtaattccttccccttgagtgttgccaaaaacctggggatatcatgggacatctctcccataatcatgttacattatgtaacaaaagggactttgaagatagaattaagtttcctatcagctgactttgagtcaatcaaaagggagattatcttcaatgggctgagcctaatcaggtgaactcacagaagagacaagcaccagatgcttttgtatggcctagcagacatgaagagccttggtgcgaaaggggccaygtagcacacacctaagtgcagtgtccaggagttgagagtaagctacagtcaacagctagcaagaaaacggacttaagtcattcagtcacaaggaaataaattttgccaacaaccaatgagcttggaagaggaccttgagtttcagatgagagagaagcccccactgacaccttcaatttcagcctgatgagaccttgaccagaggcc

SEQ ID NO: 791695 - DNA, 613 bp, Homo sapiens
taggtgatagggataccacaatgaacaagacaggcaacgttcctgtctagaaggaacaatttctacttccaggtaccataaaatgaatgagatgattaaggttttctgactttcattgaagatttgacccacaaaggtttgatcttctcactaggtgttaaggacttttatatcaagaaacaaaaagtagttcaactgggagtttaagagtgatgaggccgggtgtggtggctcacacctgtaatcccagcamtttgggaggctgagacaggtggatctcctgagttacctgaattcaggagttctagaccagcctggccagcctggtcaacatggtgaaaccccgtctctactaaaaatacaaaaaaaaaattagccaggcatggtagtgggcacctgtaatcccagctactcaggaggctgagacaggagaatctcttgaacccgggaggcggaggttgcagtgagccaagattgcaccatcgcactctctagcctgtgcaacaagagtgaaactccatctcaaaaagaaaaccaaaaaaaagtggtgaatgcagaaggaagaagggctactgttttatctttgaagaagaaaaacctgggtcctggagtt

SEQ ID NO: 791696 - DNA, 619 bp, Homo sapiens
aatattttctcttctctgcatttgcatttatttataacaatgtgagtgagaataggttctgagaaggggtgggagaagaaagtatctatgctgaacattttttttttctttgagacagggtcttaatctggttgtccaggctggagtgtagtggtgcaatcttgcctcgctgcagcctcaacctcccagtcgcaggtggtcctaccacctcagcctcccgagtagcggggattacaggcatgtgccacaatgcccagctatttttttgtatttttagtagagatggggttttctatgttgcccaggctggtcttgaactcctggactcaagcaatccacccgccttggcctcccagagtgctgggattacaggcgtgagccaccacgtctggcctacgctgaacgttttggacatgggaagtgcatatattggaagagtaggtataaaacacttggwgcctatactaatagagctttacattctttctggggagtatgggccctaaatgtacaaacaaactcatgagaaatatgatcgctcatcttggaaagctgctgcaagaataatcctagacagtatctattggcagatacttaaagggtgtctgtggtggaagct

SEQ ID NO: 791697 - DNA, 635 bp, Homo sapiens
cctcctctattgcgatcttacattagtatggtatatttgttacaatgagtgaaccaatactgatacattctcattaattaaaatgcatagcttcttcatactgccttaggttttacctaatattaattttctctttttgaaaaaaataatttcaactcttattttagactcaggggtacacgttcaggtttgttacctggatatattgtgtgatgctgaggtttgggatatgattgatcctgttacccaggtactcagcatgatacccaagagtcagtttttcaaccctttcttccttcctgcctcccttctttagtagtccccagtgtctactgctgccatctttatgtccacgagtaccctctatttagctcccctttataagtgggaatatgtggtatctaattttctgtttttgtgtttatttgcttargataatagcctccagctgcgtacatgttgctgcaaaggacatgattttgttggtttttttatggctgtgtagtattccatggtgtacatgtaccacattttctttaagcagtacgctcttgatgggtgcctggattgattccatgtctttgctattgtgaatagtgctaagcctcaagtcttgaagggtatactggaatgcc

SEQ ID NO: 791698 - DNA, 620 bp, Homo sapiens
gtagtccccaaccgtttcagcaccagggactggtttcatggaagataatttttccatggatggggtggagacagggatggtttcaggatgatccaagtgcattacatttattatgcactttatttctattgttattacattgtaatatataataaaataattctacgactcaccataaagtagaatcagtgggagccctgagcttgttttcctgcaactagacagccccatctgggggtgatgggagacagtgacagatcatcaggccttagattctcataagaagcttacaacccagatccttcgcacacacagttcacratagggttcatgctcctgtgagaatctaatgccatcactgatctgatagggggcgaagctcagatggtaatgtgggccacggagagcggctgtgaacacagatgaagtttggcttgctggcccgccactcaccttctgctgtgaagcctggtttctaccaggccatggaatgctacatgtctgtaggccagaggttagggatccctgctttaaatactcatcaatgaggtgtttcaaagagaattcgtccctggaactgtgtatttggtaactagcataagaagacctgccggtagatt

SEQ ID NO: 791699 - DNA, 609 bp, Homo sapiens
catatcagtgagaacatacaatgtttgcttttccattcctgagttacttcacttagaataatagtctccaatctcatctgggtcactgcaaatgccgttcattcattcctttttatggctgagaagtattccattgtrtatttctaccacagtttctttatccacttgttgattaataggcatttgggttggttccacaattttgtgattgtgaattgtgctgctataaatctgcaagtatctttctcgtataatgacttttcgtatgaatctgcaagtatctttttcttataatgacttcttttcctctgggtagatgcccagtaatgcgattgctggatcaaatggtagttccattttagttctttaaggaatctccacagtgttttctatagtggccatactagtttacattcccaccagcaattagaagtgttccctgatcactgcatccacgccaacatctactgttttttgattttttgattatggccattcttgcaggagtaagttggtatcacattacggataaaccccagtttttgaacttcacatactgcacaatgctggtgatgtagcagccctgttgggattttgttagggatcctt

SEQ ID NO: 791700 - DNA, 560 bp, Homo sapiens
gacaaaagtagcacataaacaatcagagacaatatgggacagaatgagacagtccccgggtccagatgcaaggtgatgcattgaaccttataagtccagcgttgataattcagacaacaatctgctaatgccttggactggaaattgttaccaaaacaccaggcattctaagttctgctgctcaccgcacagaaagccaatgactgagatgacgagaattgccaaggaagaaggctttagttgggtgctgcagccgaggagatgagagctcagtctgaagtccatctccatgaccaactaaaactagggatttatatagcagggaagaaatgtaactttgtatgagaaaacaggaactygggaggggtaagtaagcaatcatgatgaaccaggggcctggcgcttcagtctctggatgccatgatctggtgagtttcagttctttaatattttttttgagaggtgtggggatcctttcttgaggaagaaactcagataaaacaaatgtaaattccaagctttaagatcagaagggtccatttctataatcagccaaaaac

SEQ ID NO: 791701 - DNA, 606 bp, Homo sapiens
tgattgggttagattaaacattttggggagaaagaatactttgtaggtgatcttgatagattaatttcaggttaaacatttgcagggaggaatatgatttttttttttttttttgagacaaggtctcaattggtagcccaggctcgtgtacagtggcgcgatcatggctcactgcaaccttgaccttcccagctcaagcaatcctcctcctgcctcagcctcccaagtagctgggaccacaggtgattgccaccatgcctaattaacttttttatttgtatagagatagggtctcmccatgttgcccaggctggtctcaaactcctgaactcaagcactcctcctgcctcggcctcccaaagtgctaggattacaggctcaagccaccatgcccagcctatagtattctttataggtgatcttgtatatctcatatagcatcatataaggaagccaataatgtttggtagtacttaaattgagtaaaggtgacagcttgtaaataatattagaaagtattattttcccccttgtaagagcaagtgagtattggggtaatacttagaaatcatacctatatatctagtttcccattaaccttttacc

SEQ ID NO: 791702 - DNA, 593 bp, Homo sapiens
ccaaaatccctgtccttgataagtgcaaataatagaagaatctgttctaccttgtggttcctgttaaggttacacctaaattgtctctgaaaaataattgcctattttgttaaaggaaatgtttaaacttcctttgacttgtgtgtctaataaaccctcagcagaaggaagtttatttttaaatacaaattactgtggccacttaacgcctcatttcctttttcattctgctaattggagatgggaaatggctggtcagcctatttcatgctatcaacttgagtacatttaaaaagataatcagaggctttgcagcagttttaagtctggctttgattcaatatctggataaaaagcctccacatgcccttatgattaagaattcttgtttatgttttcatgttctccagggtgcatgcagacctcatcttttggggttttattgytaagtacatagatatggtgttgtttgggtttataaacgtgagtagtttgctaaataattctctgtgttctaacaggaaatgaaggtcaggactaaaagatgggatgctctttgcttaatctgtcatcacactaggttttcataaatt

SEQ ID NO: 791703 - DNA, 613 bp, Homo sapiens
aagtgccgggatttcaggcatgagccaccgcgcccggcccagttgagttttaagaagagtaaataatagccttaaataaactcaagtgtctaagctgagattaataccaaaatactgaaataatttatagatgtattaatatttggggactcactgttgagaacctctgaggtatcatggagattggtagaggagtcagaaggcagaaaaataagcaaatatatttttttaagtggagaaaagtctttagaaaacaatagattaataagcatttccaacagattatgataggaagtaggtggtttgtgaacatgagacgaggaagtggtgatccctcaagccaaaaataactgcttaatcctaactcctcttttgctagggttattagtgcctattttgtagacatattgtagttgattatgatctgaattatccctggatccctagttcaaagtacacytaaatctaaagaacatttaagtagcaagttgaggagcttatcttacgtggatttggcctgttcaaaacccatgtccattatttatagctgtcacaccctgggcaatgcattcagtaatagaaccagagtttaaatatatgttcagtgggttga

SEQ ID NO: 791704 - DNA, 585 bp, Homo sapiens
gcatgtctgtatctgagtttttaaatttttttttcctcttttctcactcccagaataacaccctgtgccaaggagtagtagatacttgttgaatgcataaaagagcttagcagctagagttagtgtggatgctgtagaagatgtctgatacacatatggcagtttgatgctgaatagtttttggaaattaaaaaacaggtagaaatttcaccaacgtcagtgactaacatagctgtaattagtaaattatcaaaatgtttctttttttttcttttttacagagagggtctctctctgttgcccgggctggagtgtggcggtgtgatcatggttcagtgcagcctccgagtcctgggctcacacggtcctcctgagtagctgggactacaggtgtgtgccaccacacmtggtcaatttcttttattttgtagaaacagagtctcattatgttacccaggctgacctcagattgctgggctcaagagatcctcccaccttggcctcctgaagtgctgggattataggtgtgggccactgagcccagttaaaagcatttctttaaaaaagaaaaaaaagttctgttta

SEQ ID NO: 791705 - DNA, 512 bp, Homo sapiens
ctgggttcatggaggcttcgatccatgcttcctgtactcctgcctcctgcccaatcctggcgctgcctgggcagccctgtgtggcatgccaatgctcctttttcttaggaactgtaagaaacaagctcttatttcaaaggcagttgttcctgtctgtgtctatcactttaccatacctgaattaaacaaatcctgaactcaaatcataaaacatggggaatgcaagcatattatatgagcagaaggagtggaatatctgtggacagtcctgatggctcagacccttagttcccacagtgttctgagaatgcccgctgatctctgctgacactgacttccrtgcatggtatttgcctgccgtccctggcacgataggaggttatggttgttgagtgtagtcattccttaaccactttgctatcctgccttattattgtcaataaatactataacatatgctaaattttagcattctgtgaaatgagagagggtgtatgatattgtttctaagg

SEQ ID NO: 791706 - DNA, 512 bp, Homo sapiens
ctgggttcatggaggcttcgatccatgcttcctgtactcctgcctcctgcccaatcctggcgctgcctgggcagccctgtgtggcatgccaatgctcctttttcttaggaactgtaagaaacaagctcttatttcaaaggcagttgttcctgtctgtgtctatcactttaccatacctgaattaaacaaatcctgaactcaaatcataaaacatggggaatgcaagcatattatatgagcagaaggagtggaatatctgtggacagtcctgatggctcagacccttagttcccacagtgttctgagaatgcccgctgatctctgctgacactgacttccgtgcatggyatttgcctgccgtccctggcacgataggaggttatggttgttgagtgtagtcattccttaaccactttgctatcctgccttattattgtcaataaatactataacatatgctaaattttagcattctgtgaaatgagagagggtgtatgatattgtttctaagg

SEQ ID NO: 791707 - DNA, 512 bp, Homo sapiens
ctgggttcatggaggcttcgatccatgcttcctgtactcctgcctcctgcccaatcctggcgctgcctgggcagccctgtgtggcatgccaatgctcctttttcttaggaactgtaagaaacaagctcttatttcaaaggcagttgttcctgtctgtgtctatcactttaccatacctgaattaaacaaatcctgaactcaaatcataaaacatggggaatgcaagcatattatatgagcagaaggagtggaatatctgtggacagtcctgatggctcagacccttagttcccacagtgttctgagaatgcccgctgatctctgctgacactgacttccgtgcatggtatttgcctgccgtccctggcacsataggaggttatggttgttgagtgtagtcattccttaaccactttgctatcctgccttattattgtcaataaatactataacatatgctaaattttagcattctgtgaaatgagagagggtgtatgatattgtttctaagg

SEQ ID NO: 791708 - DNA, 593 bp, Homo sapiens
ctctatacattttctatgctgtttcctctatactgaatgatccatactatccgtttaactttgtatctttaaaggcttgtgtgtgtgcccatctattttggtgaggttgttaccaaaacgccatgggtttggtctaggtcctgcttgctgctyactgcacagaaagccaatcactgagatggtgagtgtttccggggaagaagctttcatccggtgctgcagctgaggagatgggagctcagcctcaaatccatcgccctgactgactaaaaatggggttttatacaacaggcaagaaatgtaacaatgtgtaggaaacacgaactagggaggaacaaggagtcatctggtggcctcatctggtgagtttcagttctttaatgctttttttttttttttttttgagaggcctgaaggtcctttcctgagggaagaactcagatgaaacaaatacaagtttcaagctttaagagcggaagagtcaatgtctatgtttatacgaaagaacacgctataggagtattgggccggcttcagggtcagtaggatctattccagaattacaaacatcgtatataaacccctaagtctaa

SEQ ID NO: 791709 - DNA, 593 bp, Homo sapiens
ctctatacattttctatgctgtttcctctatactgaatgatccatactatccgtttaactttgtatctttaaaggcttgtgtgtgtgcccatctattttggtgaggttgttaccaaaacgccatgggtttggtctaggtcctgcttgctgctcactgcacagaaagccaatcactgagatggtgagtgtttccggggaagaagctttcatccggtgctgcagctgaggagatgggagctcagcctcaaatccatcgccctgactgactaaaaatggggttttatacaacaggcaagaaatgtaacaatgtgtaggaaacacgaactagggaggaacaaggagtcatctggtggcctcatctggtgagtttcagttctttaatgctttttttttttttttttttgagaggcctgaaggtcctttcctgaggraagaactcagatgaaacaaatacaagtttcaagctttaagagcggaagagtcaatgtctatgtttatacgaaagaacacgctataggagtattgggccggcttcagggtcagtaggatctattccagaattacaaacatcgtatataaacccctaagtctaa

SEQ ID NO: 791710 - DNA, 466 bp, Homo sapiens
ggtgttaagcttctaaaaaacaggcactgtgttgggctttgaacatatagaatagcatgaattctcaccatgactacctgcagtagccagtattattcccacttcatggatgaaagattcaatcttagagagtttacgtamcttataacagcagaaaagcaagattttaattacaaatcctatgttctcttctctatactaaatgtatgaactcaagcaagttatttatcctctttattcttcatgttttaatgggcataataatggtttattcactagaatattttaagaattaaaaaagttaataattgtaaaaattctcacagaattttttttatgtttgttgaatatgaaagtatgataattacttttgttgagcaactatcagcatagcagatgtttaaactgtttctgcagagggatttgggcaagacaccttttattcttatacctgggttttattgtg

SEQ ID NO: 791711 - DNA, 484 bp, Homo sapiens
  misc_feature 277: n = A,T,C or G
tacaaactgacttggggtctatagggtgacggtggttgaaggttgacagcagtgctgtaggaacaagacttgaatcacagagggagtctacatggagcaatgtggtgatatatttccaagcacacaatttctacaacaggtcaactgcaatccccacacagctracccagccctaaagtgaatattgagtaaaagcaatcatatctttattccaaaccatctgaatttgctgatttttataaatatgttattttattctatcaaataaatctaactnctggattccctaaaacaactccgtgcattactttgtaggtcaagctatcaaaaaatttgcataattacttcatttgaagttattaaactgctaaggcagcaaaattcattaagctacattttactaaattctaatcattaagtgaaacaatatttttccctcaaaaaaggtaatagtttcccggaaatattcttcatggctttattt

SEQ ID NO: 791712 - DNA, 609 bp, Homo sapiens
  misc_feature 181: n = A,T,C or G
gcaatgtggtgatatatttccaagcacacaatttctacaacaggtcaactgcaatccccacacagctaacccagccctaaagtgaatattgagtaaaagcaatcatatctttattccaaaccatctgaatttgctgatttttataaatatgttattttattctatcaaataaatctaactnctggattccctaaaacaactccgtgcattactttgtaggtcaarctatcaaaaaatttgcataattacttcatttgaagttattaaactgctaaggcagcaaaattcattaagctacattttactaaattctaatcattaagtgaaacaatatttttccctcaaaaaaggtaatagtttcccggaaatattcttcatggctttatttcctctgctaattgatccaggtcatttaattcaataatttttataaaggtaaaattataggagtttaattgacttttgcttagcttccaattatgtctaatttgtttctgttcagtctcattagatccagttatgtttggactgatagtaattactcccaatagttaatgtactttaaaataaggactctcttctgttattttcaagtaatttttcatcagg

SEQ ID NO: 791713 - DNA, 618 bp, Homo sapiens
ccctgacaacacaagacccttctggtttctcccactcagcagtgcaaggttcggggttgaggagctctacttgccaaggtcacagacgtggaacatgaggtaacagctatttgaaagtaagcctgtaggtcaccaaaacatatgccatctgcaccccaccagactgcctcctccacagcacatgaagacatgagtctatcaactctgactcattagtacccagcaatatttcctcccccacttcgcttcccactgccactccagtatctctgcccacagtcccagagccacctctgcttaayggggaggtcaggacagatgctccgttccacccgatgccatcttccagggtgcagcctcctcacagagaagaggactaccatggctagtggtgacatgggtggctctggcccccaggacttctccccgggacctctgctcaggacatggtatggacagaggtgaggttaccataaactgccttggaaatgactacaaaccaggtgagaccattccagcacctaacacactgacagcccagggtgggcccacagaaggggaagggctaggaagaccagggccgcaggagttccccctccctgagtccttgagcacagc

SEQ ID NO: 791714 - DNA, 618 bp, Homo sapiens
ccctgacaacacaagacccttctggtttctcccactcagcagtgcaaggttcggggttgaggagctctacttgccaaggtcacagacgtggaacatgaggtaacagctatttgaaagtaagcctgtaggtcaccaaaacatatgccatctgcaccccaccagactgcctcctccacagcacatgaagacatgagtctatcaactctgactcattagtacccagcaatatttcctcccccacttcgcttcccactgccactccagtatctctgcccacagtcccagagccacctctgcttaacggggaggtcaggacagatgytccgttccacccgatgccatcttccagggtgcagcctcctcacagagaagaggactaccatggctagtggtgacatgggtggctctggcccccaggacttctccccgggacctctgctcaggacatggtatggacagaggtgaggttaccataaactgccttggaaatgactacaaaccaggtgagaccattccagcacctaacacactgacagcccagggtgggcccacagaaggggaagggctaggaagaccagggccgcaggagttccccctccctgagtccttgagcacagc

SEQ ID NO: 791715 - DNA, 592 bp, Homo sapiens
ctcatcctgtatcacatattgtaaaaacaaggaaactgaggcctagagagggaaggggcttgagcagtatcccaggcagttagagacagagcccaagttagaatccatgtttgtctcatttcttccccctaggtctgtctctgactagctatgtgaccttggaagtgtcactccacctctctgggcattgaaggtttacaacttctgacatgttcattccagagggttgtcaggacctgaaagcacatcatctaaataaaacactctacggtctgcaaatattcatatatctcttctgttgtctgaactctgtaatacccctaggaggctgtgaaaattggtgcttgtgtcctattatgcagatgmaaatactggactcagaaagacaaagatcacacagaaagtttgggacagggctggaactagcacccaggtctcccaaagcagagtccttgctatcactaaggctaggaatacattaagactccaaaatatggagagttgctcaatgcatgccaccaaggttagagctgaccaaccccagaatgctcagcagctctgagaccctggagtggaggactcaaggcagagg

SEQ ID NO: 791716 - DNA, 473 bp, Homo sapiens
atggttaaaccccgtctctactaaaaaatacaaaaattagctgggtgtggtagcgggcacttgtagtcccagctactcgggaggctgaggcaggagaatggcttgaacccaggagggaaaggttgcagtgagctgagattgcactactgcactccagcatgggtgacagagggagactccatctmaaaaaaaagaaaaaaaatcagatttggcatataaccatgtttatcaacctctttttctccccctccctcctttatcaacgctaaaaaaaaatacaagaaaatttgtcttcacattgtcttttcaatgcttgaatcttcactaacactgtgaaaagcacgacagttcttaaattcactaaaccagctactatttgcactaaatgaaaactaaatgcagaatgttcaaatattcttaagtcttcatgtgttgtgaagcctttttctttcattatgagacagcatactcct

SEQ ID NO: 791717 - DNA, 594 bp, Homo sapiens
gatctttggtgaactaccaggactttcatgatacattaatgtcattctcccactatatgcatatgagcaaatttgtgttacagaaacatatataacagaaaaagagattacattttgaatcagcagacttcaaaagtgctcctcaggtgattctgatgcatctgatgcatcagatgcaaagattaatattctgatgcaaagaattaatattacaaatgaatattttccactgacttcctttctaaatattaaatatttaataagaaaccaaatcctcaagtgcctacttatataacaggaatagggtggtggatcaaaacagacaagatatctcccttcatgaagtttacaatcttgggttgaaacagcaagataccaatcctgaagaaaaaagagttagattcttacctcatatcttacatwaaaaaagccaagtaatagcaaacatttataagaggcttattagcaaatcacaaaaagcctcaaattaaaaaaaaaaaaaagattcacattatcgtgggttcaggaaagccaaaagcaaaagataaaaaatacattagtttttaaaaaagaaaaattgatggataaaataaa

SEQ ID NO: 791718 - DNA, 618 bp, Homo sapiens
aaaaaaagcaggactagagtcaggggtcctgggttaattccagctcaggaggtactacctaggtcacttaatttttctgaacacccagtttctcaactataacatggaaatgggtcacattaccacacaacacatctcattttaatgaatgagtttttaaaaacacttgtctgctaaaaaacgaaagttctataaattacatttttggtaatgtattcagccatggaagatgacctttattcactatatttttaatttcttttttttaatgcagcagaacacttcttataaaccccacagactactgtagsataaggatatttcaaatgataaggtgggtcacaaaacacctagaagcttagctaatttctagcttatggcaaagaatatttccccatccaacttactattttgaaaaatttcaaattcacttaaaagttgaaggaacagtataatggacactcatttatccttcatctagattcaccagtagttaacattttaacatatttactttctgtgtgtgtctgtgtatgtttataaaacttcattttggctgaactatttgaaaataaattgtagatacatttattatcttttaaattactcttcattgca

SEQ ID NO: 791719 - DNA, 724 bp, Homo sapiens
ccttttctgttctgggatctcattcaggatcccaagaaacatttagctgtcaagtctcctgaggctcctctggctgaggcagttgctgggacattttctgctttgtatgaccttgcaggtttggaagagcaccaatcaggggtacagtaggatgccccatactgaaatctttatgttgttattctcatgattagactggggtcatggcttttagggaggagaaccacagaggtaaggtgccatcgtcatcacatcatctgaagggtacatactgtcaacatgactaatcactatggtgaccttgttcaccttgccaaggtggtgtttgttaggttttctctttccatagtgcactctttagaaggaggctactttgtgcagcccacacttaatgagtgagaagttttgctccacctcctgagggtggagtatccagacaaattatttagaattcttatgcataatttgtctcatatctcccatttaaatatttactcaattatctattagtaccagtatggactcatggatatttatttgrtactttgagttaaaattatatattattctatttattttattgctcaaatttttccagttcaaaaattacccactacaatagttatgtagtggtactttgttgtcattttaagttgcaattctctgttgacaaacaatattgagcattttttcatatccttatttggcatctgtttaccttctt

SEQ ID NO: 791720 - DNA, 594 bp, Homo sapiens
tatagaaaaaatccgcaattgaggagcattctacaaaatacctgactaatactcttcaaaagtgtcaagttcatgagtaacaagggaagacagtgacgctgtcacggattggcagagactaagaagacataacagatgaatgcaacgtggtattctggattggatccttgaataggaaaagggcattattggaaaaactgtcaaaaagccaaataaagtccatagtttagtcaatagtgtagcaatgttgatttcttagttttgataaatgtgtcatggttatataacacgctaaaattaggggagacwgggtggaaggctcactggaaccctttatactatccttacaacttttctataaatcttagtatttcaaagttaagtaaaagtgaaaaattgtgaagtcccttctttcttaaaacaaatctaggatgcttgttatgtgttaacaattcttgtaaatgcaaatcactttggagaacaataaatattacccagaaaaactgaccactttcaatccccatgacctagcaattttattgattgtatgtttttaaaaatgtgcctgtgcccaatatcactaattaataggga

SEQ ID NO: 791721 - DNA, 474 bp, Homo sapiens
ccaattccttaccattcttactacttttgcaagcagaaaagactcagtattagcaaagactattcagatagtttgttcttatgccagtagttgtaatttcctggaggtctatgtgacatcaattatgtacttcaatacctctcacaagtacttttcctgtttggccattttctgcagtatatccatgctcccattttctctattcttttatttctatcctagacttttctttcatcctataawtctttatcctaaaaatattaatttaaggataacatcacaaaataatatatttcttcagatgatactccaaattgatacctaatatacagaaatgactatcatggatgtaacccacaacatgtgaaatgtatggctcattctactgacattataaaggaaagttaatgacaactgaatttctagtcattttccacccaaccagttgcttataaactggcaaggaattgtagg

SEQ ID NO: 791722 - DNA, 474 bp, Homo sapiens
ccaattccttaccattcttactacttttgcaagcagaaaagactcagtattagcaaagactattcagatagtttgttcttatgccagtagttgtaatttcctggaggtctatgtgacatcaattatgtacttcaatacctctcacaagtacttttcctgtttggccattttctgcagtatatccatgctcccattttctctattcttttatttctatcctagacttttctttcatcctataaatctttatcctaaaratattaatttaaggataacatcacaaaataatatatttcttcagatgatactccaaattgatacctaatatacagaaatgactatcatggatgtaacccacaacatgtgaaatgtatggctcattctactgacattataaaggaaagttaatgacaactgaatttctagtcattttccacccaaccagttgcttataaactggcaaggaattgtagg

SEQ ID NO: 791723 - DNA, 569 bp, Homo sapiens
atctgcagtgcataagatacccagaatccctgcccctgtgtagctctcactgtagtagagcagaacagatgatgaataaataagcatgcagggtgtgagatgggtgggagagctgcattgcggaaccgggcagtgtgcaaagtggacactcaggaaagaacctgagggttgaactatggatatgatggagaaaattcacccctaacatgagtgcagacactcyagctacaataacaagcgaaggtggagaaggaagcacagaggcaagcagctggggagatgtgggggtgggatccagggaaggttctctctttattgcatctattttcaaattgaagtgggaagcaaggcagcaggtgtaaggaaggctggggaaggttttagaggtttaaggaggaaggagaaggcacgatactgttgcttggggacagggcagcacttccagagctgggtgcctgggctccagggcaagtcacttcatctcttcctgtgccagcatctcctcagctgtgaaatggtgattattatagaacagattcatagagttttatcataattaaatcagttgg

SEQ ID NO: 791724 - DNA, 569 bp, Homo sapiens
atctgcagtgcataagatacccagaatccctgcccctgtgtagctctcactgtagtagagcagaacagatgatgaataaataagcatgcagggtgtgagatgggtgggagagctgcattgcggaaccgggcagtgtgcaaagtggacactcaggaaagaacctgagggttgaactatggatatgatggagaaaattcacccctaacatgagtgcagacactccagctacaataacaagcgaaggtggagaaggaagcacagaggcaagcagctggggaratgtgggggtgggatccagggaaggttctctctttattgcatctattttcaaattgaagtgggaagcaaggcagcaggtgtaaggaaggctggggaaggttttagaggtttaaggaggaaggagaaggcacgatactgttgcttggggacagggcagcacttccagagctgggtgcctgggctccagggcaagtcacttcatctcttcctgtgccagcatctcctcagctgtgaaatggtgattattatagaacagattcatagagttttatcataattaaatcagttgg

SEQ ID NO: 791725 - DNA, 503 bp, Homo sapiens
  misc_feature 478, 479, 480, 481, 482, 483, 484, 485, 486, 487, 488, 489,490, 491, 492, 493, 494, 495, 496, 497, 498, 499, 500, 501,502, 503: n = A,T,C or G
gattttcccaggagggcccccagcctggaattagcactgccaggtgggcagggaggactgctgtcccattacaggggtgaggaaacaggctgcggatggtcccacagggaataaggagcagggtctagctccccactgcaggcagtgaagaytgaagttgctccctgggaagaggaagggaggcattgactggcactccgtgatttaaatgagaagcccaggctcagcccggtgacttgagcttcctgatgtagaaggtgaaggatgcagagcagacagaaggcaggaggaagaagataaggaagagagcagcaaactggagtcactacaggacactagctgctccaggctgctctgtcccattctaagagaaaagaaaaagtgggagaggggatcacagatcatgcccagattcctcaccagcatagacgctgctatggaaacatccctgatggtccaggttttgtggtggaagagnnnnnnnnnnnnnnnnnnnnnnnnnn

SEQ ID NO: 791726 - DNA, 604 bp, Homo sapiens
tagctttccttttcttgcttaagatggctttgttgattctgggtcttttgtgatttcatatcagttttaggattttttttctatttctgtgaaaaatgccattgggattttgatagagattgcgttgaatctgtggatcactttagataatatggacattttaacaatattgattctttcaatccatgaacatggataactttccatttatttgtcttcttcaatttctttaatcaatatcttatagttttcaaggtatagatctttcacctccttggttatatttattcctaagtgttttattttttgatgctattaataaatgtgatatattgggatatatcacaatatataaatgggatattttcttaatttctttttgggatagtttatttttagtgtatagaaatgcaactgatttttgtatgctaactttgtatctyactgaatttattagttctaacagtttttgtgtggagtctttagggttttctgtatataaggtcatgtcatctgcaaacagagaccgttttacttcttcttttccaagttagagttccttttgtttcttttccttctctgattctctcattagtacttttag

SEQ ID NO: 791727 - DNA, 624 bp, Homo sapiens
tctatgcctgaaaatggaattgctctggttttttgagtgacttttcactagagggccttccagttactcctgtaagctgcctaacctggcacaccacgcccaagtgtaaccgtgaatccaaatgagtgggctgacctaagggaatgccaccaggcctcatcctgagcccaggctcaygctttgccctcctgggaaccttggcctgtgcatctttccttatctgtggagtcacgtctttggagcacctgggcttaggaagaatgattagtgaatctgtgtaagccaagcaaagttcaaagacctgcccagtcttcatttccaaacaatctcgtatctatgagacagtggccggcagcgtgactcagcctgaccccagcctcagtaacaaactctggcaaagacacgcggggagaggctgcagcgcttagaacttggagccatggtcacctgaccccggaatgaaacccgataaacaagcatttactgaacacccactggaagtgcttacaaggcactaagctaagcaccatcaagaaccttgatctcaaaggctgcaccacctctgtggcaggtgacggaagggaatgcttttcccatgcaactgcctaggaaagaaatcccaga

SEQ ID NO: 791728 - DNA, 607 bp, Homo sapiens
atgtctctgggatttctttcctaggtagttgcatgggaaaagcattcccttccgtcacctgccacagaggtggtgcagcctttgagatcaaggttcttgacggtgcttagcttagtgccttgtaagcacttccagtgggtgttcagtaaatgctcgtttatcaggtttcattccggggtcaggtgaccatggctccaagttctaagcgctgcagcctctccccgcgtgtctttgccagagtttgttactgaggctggggtcaggctgagtcacgctgccggccactgtctcatagatacgagattatttggaaatgaagactgggcaggtctttgaactttgcttggcttacacagattcactaatcattcttcctaagcccaggtgctccaaagacgtgactccacagataaggaaagatgcacaggccaaggttcccaggagggcaaagcrtgagcctgggctcaggatgaggcctggtggcattcccttaggtcagcccactcattcggactcacagttacacttgggcatggtgtgccaggttagacagcttgcaggagtgactggaaggccctctagtgaaaagtcactcaaaaaaccagag

SEQ ID NO: 791729 - DNA, 612 bp, Homo sapiens
tagacaaggtcttgctatgtggcccatgctggtctcaaactcctgggctcaagtgatcctcccaccttggcctcccaaagtgctgggattacaggtgtgagccaccacacctggccttaaccttttatttatttatttatttattttgagatggagtcttgctctgtggctctgtcgcccaggctggtgttcagtgaatggcgcaacctccgcctcccrggttcaagtgattctcctgcctcagcctcccaagtagctgggactacaggcgcccgccatcatgcctggctatgttttgtatttttagtagggacagggttttaccatgttggccaggctgatctcgaactcctgacctcaggcgatccacctgcctcggcctcccaaaatgctgggattacaggcgtgagccacggtgcccagccagccatttttaagtgtacagttcatgggtatgaaatagcactgaataatgttgtgcagccatcgcaccatctccgtaactcttgtaaaactgaaactccatactcattaaacaataaatccccatttccccctctccccccagcccctggcaacgaccattctattttgtctgtatgattttgacta

SEQ ID NO: 791730 - DNA, 612 bp, Homo sapiens
tagacaaggtcttgctatgtggcccatgctggtctcaaactcctgggctcaagtgatcctcccaccttggcctcccaaagtgctgggattacaggtgtgagccaccacacctggccttaaccttttatttatttatttatttattttgagatggagtcttgctctgtggctctgtcgcccaggctggtgttcagtgaatggcgcaacctccgcctcccgggttcaagtgattctcctgcctcagcctcccragtagctgggactacaggcgcccgccatcatgcctggctatgttttgtatttttagtagggacagggttttaccatgttggccaggctgatctcgaactcctgacctcaggcgatccacctgcctcggcctcccaaaatgctgggattacaggcgtgagccacggtgcccagccagccatttttaagtgtacagttcatgggtatgaaatagcactgaataatgttgtgcagccatcgcaccatctccgtaactcttgtaaaactgaaactccatactcattaaacaataaatccccatttccccctctccccccagcccctggcaacgaccattctattttgtctgtatgattttgacta

SEQ ID NO: 791731 - DNA, 651 bp, Homo sapiens
tgaatgcctcattgaaaacccccaccagggcctcacctcccaagtcatttggaatgggtatttgggctttatggaacgctgattgctctttatagaaactaggcaccatcagggggaggagagaggagggagggagcacttcttcggtttttcaagttataatgatcccagtaatcgagacaccgaattgcacatttaaatcgcttgcaagtaaaaaatatcgttttgtaatgctggtgttaataatgtaaacattaaaaaggaattaaatacttagcttcattgtggagcacaactgcgtgagttttcttctttcaccttattcaactggaggaaacgattggctgcaatacccagatatgttacccaaaaagtgggtctggacttgcatcagaatagtgagtcatttcatgcctcctgttaaaggtagctggaagggtcactctggtaatagactgctgccttattctggaggtgagctttttttaaagrcatgtaagtgtttgaggtgtgctgggataggctcaatggggacctgaagtgcagccgaatatatccaaagcccctcagttctgctgagatgcctgtcatctgccccagggatctgctgcctctctgcatctgttccgtagtagatgtcacctgagagca

SEQ ID NO: 791732 - DNA, 566 bp, Homo sapiens
tttctaacaaaacattaacagacatgtagggccagctggggaaaggagactgcagacaggatgcagacgctcatgggtagttgttcatttgttagtggacagtgggttatgtgaggacctgctgaggactttgtgcaggggagaggcgtgctgtgatgtcagaacactctagctgtagcgtattcaatgaaacaaatacgacaaaactcgggccactgctgaaatcaggcgcaggatgtacaagtgtgcatgagatcattccctctatttgtatgcttgaagtttttcataataaaaggttaaaaaataaatgggtagctttttaaaaatgtagaaggcagagtccctcyctatgggatcagaatttcaggggaaggggcctggcatggggggtttaaggcccccaaggcaagctcagttctcaggttcactagggtacctagaagagtcatgggtgggggccaagactccaccactgcccagggcatcagggaccaccgtttggtggagacatgtctcccacccccatgaccgccatcccgtggtctaccaccaccctgcaccag

SEQ ID NO: 791733 - DNA, 591 bp, Homo sapiens
acacacaccgccatttctcatttgcacaaattgttgcatacccagttacatgttcactttcatgaaagtcacagtcatgtgacacacctattcccacactcacaggaatacatgcacacaatcttacgcatgcacacatacacacgcacacatacacacacacacatacacccacaacgtaaggacaaccacagaggctgaacattccactgagaatcccaacctaagatatgagataaagattcccagagacctggcctcagcaacmacaggacatgctccctgtatgtcttccccctatacatgaggtacactaggtgggctccaaatgcaggtgtttactctgcttccaaagaggggacagtagcttgaggtatgaccctctaatctccagcttgtcagagaggaggcagagcatccctagaaaaggacagcagaaataaaaatcaggaaaggacagtggaaataaaaaccaggaaactgagaacaacaataatggctaatcagtgatggacatttgccattgcatctgtgctaagacctttctccttgcaacagcatcacaaggatggggatactatcatcatcatt

SEQ ID NO: 791734 - DNA, 508 bp, Homo sapiens
tttttggccttgtattcactttctttttcttgaatacattctcgagcagttcctttagagtctgtgagtaataaatttgtttagagagaatctgtccaaaacatcttcattttcatctcacttttttttttttttttaaattgagacagtctggctctgtcgcccaggctggagtgcagtggcaccatstcagctcaatgcagcctccgccacccgggttcaagcgattctcatgcctcagcctcaccagtagctgggactacaggtgcacgccaccatgcctggctaatttttttgtatttttaatagagacaggattttgccatgttgacgaggctggtctcgaactcctgacctcgggtgatctgcccgcctcggcctcccaaaatgctgggattacaggtgtaagccactgtgcggggcctcctctcacttttgaagtctagttaggataggtatatgatcttaggatcaaaatcatttcctagagaatttgaatctctttttc

SEQ ID NO: 791735 - DNA, 508 bp, Homo sapiens
tttttggccttgtattcactttctttttcttgaatacattctcgagcagttcctttagagtctgtgagtaataaatttgtttagagagaatctgtccaaaacatcttcattttcatctcacttttttttttttttttaaattgagacagtctggctctgtcgcccaggctggagtgcagtggcaccatctcagctcaatgcagcctccgccacccrggttcaagcgattctcatgcctcagcctcaccagtagctgggactacaggtgcacgccaccatgcctggctaatttttttgtatttttaatagagacaggattttgccatgttgacgaggctggtctcgaactcctgacctcgggtgatctgcccgcctcggcctcccaaaatgctgggattacaggtgtaagccactgtgcggggcctcctctcacttttgaagtctagttaggataggtatatgatcttaggatcaaaatcatttcctagagaatttgaatctctttttc

SEQ ID NO: 791736 - DNA, 508 bp, Homo sapiens
tttttggccttgtattcactttctttttcttgaatacattctcgagcagttcctttagagtctgtgagtaataaatttgtttagagagaatctgtccaaaacatcttcattttcatctcacttttttttttttttttaaattgagacagtctggctctgtcgcccaggctggagtgcagtggcaccatctcagctcaatgcagcctccgccacccgggttcaagcgattctcatgcctcagcctcaccagtagctgggactacaggtgcrcgccaccatgcctggctaatttttttgtatttttaatagagacaggattttgccatgttgacgaggctggtctcgaactcctgacctcgggtgatctgcccgcctcggcctcccaaaatgctgggattacaggtgtaagccactgtgcggggcctcctctcacttttgaagtctagttaggataggtatatgatcttaggatcaaaatcatttcctagagaatttgaatctctttttc

SEQ ID NO: 791737 - DNA, 390 bp, Homo sapiens
ttgcaacatttaccttttttggttttgcttccagggaaatttacatcattgcatggaaattagccgtgaggggatgcaattagctatagtgtattttgttataattgttctttcagaaaaatctgatctgacagatttatattgttgacaatgtgatttaagcaggacctagatacatactttctgcaccctaatcaataatggtaaatccttttgmtgaggtgaacaatctctgacctagtattcatatttcttttaccaattccctgtaataaaattgaacattttgtcaccactttgagaaacactgccaaacaccttaaaacacatgtcacatgccagcagcccctcatttccctcctccgggagtttctacatctggaatcataa

SEQ ID NO: 791738 - DNA, 602 bp, Homo sapiens
ctgttcttgtcatctgcatatgcagcaccaactgtatctttagaagaagacaaaaattgaggtatataaacagtatacctacccagaaagagttgatagtatctccatttttgttaagaaggcaagaaaatgcacaattagcttagcaatgttttcttcccaaaccagtcttgattacaattattttgaaagtgtgcttgtccagaacttgttgttttccatgattcttgaaaactgtatttctggaccttcatttcatttttaacattctttttaaggcagaggtgtttgagttactaaatatatcaatattaaaacactgaatagtgaccttcatttgtcccaatgttaatgtattcaacttgttgagaggagaggagatggttcttaatctgggtcattctaaacaagtggartttttatctgcatagcaatggtatgagtagaaatctacattttctaaaatatgtgaaaatatattttaaataacattagacttttaatataaaaatgttttctggctgaagtttatttttaaaatctttgctgacttacccatactcatgaaaaaatatgtatatgtgcattacttctaatgttag

SEQ ID NO: 791739 - DNA, 583 bp, Homo sapiens
tcttttatttgcaattttagaatgccaataccttattctttaaaataccacaagggctccagtgaactaagagaggtagttggctttctaggcagaaaaggactaaggaaagcagaaacagaaccaagagtgggttggtcgtttcaaatttactttccttatagggttaaaagagaggagacttattacccagactcagattgactggaatcttttattttttttttttaaactkatctctttcaagataggtttgattatgttacttagtgtaggtgactccattctgatttggtctagtctgctggggcctagtgcaggaggctggtctaaaccaatggccttgcataaactttaacaacatagtaaaatccattaaattaagtgtctgttaattttttaaagctttcactagaaaattaaaatgatttcccccaatcattatcgtttaaaattatatgaaaataactccacttacaagtatgtaaggtgattttttaaaataacagtgagataaaaaggattatttctttcgtgggataatcctgatatcaatgtctgttattttggctgtttttatggg

SEQ ID NO: 791740 - DNA, 583 bp, Homo sapiens
tcttttatttgcaattttagaatgccaataccttattctttaaaataccacaagggctccagtgaactaagagaggtagttggctttctaggcagaaaaggactaaggaaagcagaaacagaaccaagagtgggttggtcgtttcaaatttactttccttatagggttaaaagagaggagacttattacccagactcagattgactggaatcttttattttttttttttaaacttatctctttcaagataggtttgattatgttacttagtgtaggtgactccattctgatttggtctagtctgctggggcctagtgcaggaggctggtctaaaccaatggccttgcataaactttaacaacatagtaaaatcmattaaattaagtgtctgttaattttttaaagctttcactagaaaattaaaatgatttcccccaatcattatcgtttaaaattatatgaaaataactccacttacaagtatgtaaggtgattttttaaaataacagtgagataaaaaggattatttctttcgtgggataatcctgatatcaatgtctgttattttggctgtttttatggg

SEQ ID NO: 791741 - DNA, 635 bp, Homo sapiens
tacagaggtagattttaatacacctttatcaattatttttgtcaagcaggaaaagctggtaaagattaatgatttatacaacacatttaatagggtaaatggaataaacatatatagattcctgtatctaacagtttagaaaataggcattctttcaaggacatgtagtaattgcaaaaatgtatcacacaatgtacaacaaagcaagcttcatcaaatttctgaaaatttctgtcacaaaaaccatgttttctaaccactacacttaattagaagacagtaaaatttaaaaatacattttgagatttgacatttttctaagttacccatgagtcagtcaaaaaatcatggtggaaattttcaraaatattagaactatatcgtaatgaaaataaatttgcaggaagctgtcaaactggtctttgtaaccttaaaagagaataaatgtacatattagaaaagacaaaaagctcaccatgggagttcatgttattatgcttcctaacttatattaattgtattcttttgtatatttcaaatattacaaagtaaatctgttcaagttcttttttttttagtattgattggcgagtgatcttcctaatttggcaataactactacgttcttttcactt

SEQ ID NO: 791742 - DNA, 585 bp, Homo sapiens
  misc_feature 1, 2, 3, 4, 5, 6, 7, 8, 9, 10, 11, 12, 13, 14: n = A,T,C or G
nnnnnnnnnnnnnntccaagggctattcctagttctctcagttttactaagttttcctacattctgttttcctgaactctttctgtcccaagacataactgtccattgcatttattttcattttatcttattttattttacttttatgagacagagtctcattctgtttcctacgccagggtgcagtggtatgatctcggctcactgcaacctttgcctttcaggttcarccaattcctgtgcctcagcctcccaagtagctgggattacaaggcgtatgccaccatgcccggctaatttttgtattcttcgtagagacgaggtttcgccatgttggctaggctggtctcgaacttctgacctcaagtgatccacccgccacagcctcccaaagtgctgaaattacaggcgtgagccactgtgcctggtccattttaattttattttctctctctgacattctagggcactggtatccttgctcagtgggttcacctctcagcaaaacttcctagtagcacacaagttgccatatatacgcttccatttagccaacaaacctaatccatagttttaaaaaacact

SEQ ID NO: 791743 - DNA, 623 bp, Homo sapiens
gagatacatccatgttgttgcatatgtcaatacattataccgttttaatcaatgagtggcattatatgtatataccaagatttatttaatcatttacctgttgaaggacatttgggttctgtttaatttttgactattacaaactactatgaatatttctgtatgtatttgtaaggacatatgcttttccttttcatgagtgaatacctaggtgatgaatgacctaggagataaacataataggaatatgtttaattttstaagaaacctccaaatatttttcaaagtggtggtatcattttacactcccaccaccactatgtgagggttcctgttcccttacatccttgtcaagccttaatatcgtttgtgtttataaattttcacattctaactgtgtaatggtagcacattggggttttagtttgcatttccttaataacaaatgaggtttgtcttttttatgtgcttgtcagtaacatattttcatttgtgaagtgtgcaaacaaacgtgaacctaaaacagccagtccttcaagatggattttgagtggctaacaggacctaaatttaaaatacagccaagcggccatttgctgactagagatcacacaggtactctt

SEQ ID NO: 791744 - DNA, 543 bp, Homo sapiens
ttatgagctgtaacactcaccacaaaggtctgcagctacactcctgaagccagcaagaccacgaatccaccgggaggaacaaacaactccggacgcaccacttttaagagctgttaacactcactgcgaaggtctgcggcctcactcctgaagtcagcaagactacgaacccaccagaaggaagaaactccagacacatctgaacaccagaaggaacaaactccagrcacaccatctttaagaactgtaacactcaccgcgagggtccgcggcttcattcttggaagtcagcgagaccaagaacccaccggaaggaaccaattccagacacattttggcgacccagatgggactatcaactatcaccaagcagtgagtaccatcggacccctttcacttgctattctgtcctattttaccttagaattcgagggctaaagaccaggcacctgtcggccagttaaaagcgactagcatggccaccggactaaagacacaggtgtcagggtttctgggaaagggttctctaacaatccctgactc

SEQ ID NO: 791745 - DNA, 587 bp, Homo sapiens
tgacagggaaagcctaaattcccttggacagactggtagtagacgtcagctggatatccaaactgctttggaactcctcttttctgccttctgttttctcctgtataaaatagaatgtttatagatgttatcctatgcccgtcccatcattgtatgtggtggtgttgggggaagatagcttgtcactttagtgctgatggtccacakttggagagggattttgccctaggagttttactggataggatcatacccaggaatctcatccgttcatgattcagatgatgaaattcagatgagcttttggaattgagctgatgccataatacaaagaaatttggagactgtgggatggattgaatgtattttatacgtgggaaatactggatcactgagggccagagggcaggctgaggcaggcagaattctaagatgacctctaatgacctctggtcttatatgaacttctcttgagtataagagcagcctgtgaatatgatgagataccactcctatgataatgttacacaatatggggaaagagattttgcagatgaattatgctcccagatcagtgaacctcgaaa

SEQ ID NO: 791746 - DNA, 648 bp, Homo sapiens
tcagatttttaaaaataattgacactataataatcacctttgagcatataacactgtaaagatatgagtatattttttagaattaatgcctggagaggaattatgcatttcatataagactttttataggtatcatcatatcatcaaattttcatcttggaaggtgctatgaatttataattctatccagtagtatatatgagagcttgttttgttataatagcttaaaacctgwttaaacataattcttttcagaaatacagtagctatatttgcttagtacaagagtgatatatgctcattgaaaccattcagaagatgaagtatgaaaagaacgaaaaaccacactttcagatttttttaatgagtacatagatacatatatacttttaaatggaacagaggcaaagagaaaggtgaggatattgaagacaacaatggagttaaaaagaggggcttctttaaagtttgagatcttggaggatagcaaaacaataagtagaagacatatatattcctttaaagagagcaagggtagatagcattttaattattactaagtcagggaccacgactaaggcccacggagattcaagaaaggaggaaaactctcagggaatagattgaaatgactcccaagtggaaaag

SEQ ID NO: 791747 - DNA, 479 bp, Homo sapiens
gtatgcaaattgcaattccccttgtcatgagatttgactcacaagaaaaatttgtgttagcgtcttccaaaaaaaaaaaaaacaaaaaaaaaacgatatctcaaagctttaaaaagcaggttacaagtggctaagttgggccatttagatcttctctctcattgggaggaaaataaatcacmaataagtttcacgctatcctttgtatccacagaaaagtaaaccaaatctctagcatttcatatcttttccttctggcaattcccgtaaggataacatagtggaatgaacagttatagacgggaactcaaggagccatatgctttagcctcaaatctgctattagcctgctgagtagcatgagcctcagtttccccagctgtcaaatgggagtgagagtgttattctcaactctatggatttttaaagacttaacagtatctttgcccatcatgtttaagagatagaaacctttcttt

SEQ ID NO: 791748 - DNA, 603 bp, Homo sapiens
gacagttctggtgttgatgaaatccctcagcttttgtttgtctggggaagtttttatttctacttcatgcttgaaggatatgttcactggatattttgttctaaggtaaaagatttttttcctttagcactttaaatatgtcatgctattctctcctgggctgtaaggtttccactgaaaaatctgctgccagacatattggagctccagtgtacattattttcttttctatttgttttaggattctttccttatccttgacctttgggaatttgattattaaatgtcttcaggtagtcttctttgggtaaaatctgcttgatattctataaccttcttgtacttgaatgttgatatctttctataggtttgggaaattctctgatattatccctttgaataaactttctaccacagtctctttctctgtctctctttaagacaaataactcttagattcrcccattttaggctattttctagattttgtaggtgtgcttcatttttaaaaaattctttttccttttgtctcctctcactgtgtatttgcaaatagcttatcgtcaagtcactaattctttgttttgcttgatcaattctgct

SEQ ID NO: 791749 - DNA, 544 bp, Homo sapiens
atcccagctactcaggaggctgaggcataagaatagattggatcctggaggtggagattgcagtgaactgggattgtgccattgcaccccagcctgggtgacagagtgagactctctcaaaaataaataaataaataatttttgaggctgggcacagtggatcaggcctgtaatcccagcactttgggaggctgaggcaggaggatggcttccaacttccttgagaccagggagttcaagaccagcctgggcaacatagtgagaccttgtctctactaaaaataaaaataaatacgtggtgcatggtggcgcatacctatagtcccagctacttgtgaggcgaagtaagaggatmacttaagcccgagatatccaggttgcagtgagccatgattgaaccactgcactgtagcctgagcgacagactgaaacagtatctcaaaaatacagcacagtggctctcgcctgttgtaatcccagcactttgggaggccaaggcgggcggatcacttgaggtcaggagtttgagaccaacctggccaac

SEQ ID NO: 791750 - DNA, 657 bp, Homo sapiens
ctataattaatacagaagttaaaatccttttcaacacaaattattctttatggtgaacactattttaaaagtagtgaccagatattagaataagccacctactataatatcttatgtttctcagatcatttgatcctgtaggtgagataaatatctttgacagaatgacaccaacaaaaatacttttttttttttaactatggaggatgacacatcaaaactttttcttaaaaaagcatttaatgctttaagtctatttctgtatttatttaggctcatctaaagggtcttgtgtgttatggggagagggtcagaaatgaaaacaaaattataaaaggtgaaataaagaaaaatcaaagaaaggttgcagaacacagggtggaaggaaaggaggtgggtggggtaaggactggtaaaytgaaaaaagttaggcggctttttcctttggcaaagaactagtttgaggaacagtagacaaaagttaatttcataaactaaaaatgaaatgagagatgaagggctgaacttccacctaaggaagttgtttcttaggcatctgatttctggacattaaacacactcagttgagtagatacaaatgcgtaaggtatgcaaataactattgattgctgtggagattaaagagataccaacaac

SEQ ID NO: 791751 - DNA, 529 bp, Homo sapiens
ggcctaacaaaagctattcctgaagctaggatatgggaagcctcagaaattgtatccttcctattcatataagtgaggacaaaaggtgtcactcttccaactctggagatcccttccctccctcagggtatgggcctccacttmatttttggggcatgacatctctataggacatgggtaaggtcccaatactaacatgagaatgcttaggactctaaaaagttttgaagaatgcatcagtcagggccattaaatccgatttttctcagtcctccttgtggtctaggaggacaggcaagggtacaggtttttgagaatgcatcagtaagggccactaaatccgacctttctcagtcctccttgtggtctgggaggaaaactagtgtttctgctgctgcgttggtgagcacaactattctgatcagcagggtccagggactgttgtgggttcttgggcaggggttgtttttgctgctgcattggtgagcgcaactattccagtcagcagggtccaaagaccattgcgggt

SEQ ID NO: 791752 - DNA, 529 bp, Homo sapiens
ggcctaacaaaagctattcctgaagctaggatatgggaagcctcagaaattgtatccttcctattcatataagtgaggacaaaaggtgtcactcttccaactctggagatcccttccctccctcagggtatgggcctccacttcatttttggggcatgacatctctataggacatgggtaaggtcccaatactaacaygagaatgcttaggactctaaaaagttttgaagaatgcatcagtcagggccattaaatccgatttttctcagtcctccttgtggtctaggaggacaggcaagggtacaggtttttgagaatgcatcagtaagggccactaaatccgacctttctcagtcctccttgtggtctgggaggaaaactagtgtttctgctgctgcgttggtgagcacaactattctgatcagcagggtccagggactgttgtgggttcttgggcaggggttgtttttgctgctgcattggtgagcgcaactattccagtcagcagggtccaaagaccattgcgggt

SEQ ID NO: 791753 - DNA, 630 bp, Homo sapiens
aaggagaaagagaggaagagacagacaaagagggagtcagaaagagagagacaaaggagtcaaagagaaagagagatggaagtagtaaagaaaaaacagtgtaccctattcctttaaaagccaggataaatttaaaacctataattgataattgaaggtcttctccatgaccctataacactccaataccacyttgttgtcagcgcaaacaagggcatagccaaaaagcactgaggccactgacaacccgtagccttcctatcaaatatccttaacccagcaggtttcctaacaggggatctaaatttgaaggtctgaccagacctagtaggaactcccttcaggagaggatgatagatggttcctcctgagcgattatggaaaaagacacaatgggcattcagtaagtgataaggaaattcttatagaagcagagttaggaaaattgcctaataattggtctgctcaaatgtgcgagttgtttgcactcagccaaatcttaaagtacttacagaatcaggagggagacatctataccaattctaagttaatatggactgaacaaggttttattaatagcaaagaaaaattaaaatcccaaacttacaaggttttcaactaaagtaaagt

SEQ ID NO: 791754 - DNA, 630 bp, Homo sapiens
aaggagaaagagaggaagagacagacaaagagggagtcagaaagagagagacaaaggagtcaaagagaaagagagatggaagtagtaaagaaaaaacagtgtaccctattcctttaaaagccaggataaatttaaaacctataattgataattgaaggtcttctccatgaccctataacactccaataccactttgttgtcagcgcaaacaagggcatagccaaaaagcactgaggccactgacaacccgtagccttcctatcaaatatccttaacccagcaggtttcctaacaggggatctaaatttgaaggtctgaccagacctagtaggaactcccttcaggagaggatgatagatggttcctcctgagcgattatggaaaaagacacaatgggyattcagtaagtgataaggaaattcttatagaagcagagttaggaaaattgcctaataattggtctgctcaaatgtgcgagttgtttgcactcagccaaatcttaaagtacttacagaatcaggagggagacatctataccaattctaagttaatatggactgaacaaggttttattaatagcaaagaaaaattaaaatcccaaacttacaaggttttcaactaaagtaaagt

SEQ ID NO: 791755 - DNA, 563 bp, Homo sapiens
gtaaagaaaaaacagtgtaccctattcctttaaaagccaggataaatttaaaacctataattgataattgaaggtcttctccatgaccctataacactccaataccactttgttgtcagcgcaaacaagggcatagccaaaaagcactgaggccactgacaacccgtagccttcctatcaaatatccttaacccagcaggtttcctaacaggggatctaaatttgaaggtctgaccagacctagtaggaactcccttcaggagaggatgatagatggttcctcctgagcgattatggaaaaagacacaatgggcattcagtaagtgataaggaaattcttatagaagcagagttaggaaaattgcctaataattggtctgctcaaatgtgcgagttgtttgcactcagycaaatcttaaagtacttacagaatcaggagggagacatctataccaattctaagttaatatggactgaacaaggttttattaatagcaaagaaaaattaaaatcccaaacttacaaggttttcaactaaagtaaagtttgctaaaagttaacag

SEQ ID NO: 791756 - DNA, 574 bp, Homo sapiens
tgactgtgtcacttggtcctaaaaatattcctctaagaaatcattagcattatctggaaaactttaaaaagtgatacccaaagcccagtttaattgaatcagaatctctggaggaagggcttagccattattattattwttttttttttttctgagatggagtttcactcttgttgcccaggcttgagtgcaatggtgcgatctcagttcactgcaacctccacctcccaggtttaagtgattcttctgcctcagcctcccgagtagctggggttacaggcgcatgccaccgtacctggctaatttttgtatttgttgtagagatgaggtttcaccatgttgttgcacaggctggtctcgaactcctgagctcaagtgatccgcctgcctctgcctcccaaagggcagagattacaggcatgagccactgcacatggcccttttagacctcttttaatctttgggtttcttcaaaaccatttgcttcccttgcaatttatttttgggataaaccagttgatactgtagggcttcccacagtttagattttgctgattataactttatggtgtta

SEQ ID NO: 791757 - DNA, 524 bp, Homo sapiens
taagtcttgacttgtgaaaggtaaagcattatttgggaaatgaaatcacatgctatacctgctagatttgtttttggcacagtaactgggggtccttaattaagtcgttatttattaagtcagttcctcaaattctatcttcaggtttgcatttaaaatggtgctaaattaaaatactatattcattttaattaacaaagtttgtaaaactgaaacaaatgttcccaaaaagacattcactgaaaaagctttactstggttgagtaaaaaaataatactgcaagtcctcacctcccgcaaataggatttttaggagcatatacgacacaaatattcccattttaaatattttcaccaacacaatttcggggtataaaatgatgtaacagtaaacaacaggaactatggttgtagttctaatagtattccaacacaaaataataatcctatctccacactgactcatttaaagcacagaaaaccactttgatgtcagataaccatataaatccatttgtagccac

SEQ ID NO: 791758 - DNA, 600 bp, Homo sapiens
ggttatacacaaacactatgtcattttgtatcaggtacttgagcatctgagggacattccagaaccaatccccccagataccaaaggatgactgtatttcacagtaagaataacacacagttgtttaaaaaatatatttttttgttaataggtatttagtttccaacttttttgaaatcacacagagtgccgtagtgaggattcttttatctgattctctgtactcatgggtgaatttctcaagagttaagatttcgaggcaaaattgctgttcatgagataaattctattgatggattttttttgagatggagtttcgctcttgttgcccaggctggagtgcaatggcacgatctcggctcactgcaacctccgcctcctaggttcaaacgattctcctgcctcagcctcccgagtagctgggattacaggcatgtgccaccaygcacagctaattctatatttttagtagagatggggtttctccatgttggtcaggctggtctcaaactcccagcctcaggtgatccacacacctcggcctcccaaggtgctaggatcacaggcatgagccactgcacccagcctattgatggattt

SEQ ID NO: 791759 - DNA, 612 bp, Homo sapiens
aattactaaatttcacgcaaatcacaatcatgtaaaggctatcacaaacatcgatgctgtttctaatcccacttagtaaatcagaattatcaggggataaagcccggaaaacttaattacttttaaaataattcaggtgacttagagataatcagttcatcagtatcaattccacaaatcagtatatgggaaccaaggactacaccctcccatgttttgaaacaaggaccttgaggtctaatatattaactgaaaaatgaagtattttgaaaccctttttaaaagtgacaataatacatataattagagaatacataggccgggcacggtggctcatgcctgtaatcccagcactttgggaggccaaggtgggcgtatcacaaggttgggagttcaagaccagcctggccaacayggtgaaaccctgtctctactaaaaatgcaaaaaaaaaaaactagtcgggtgtggtggcacgtgcctgtaatcccagctactcaggaggctgaggcgagaatagcttgaacccggaaggcagaggttgcaatgagccgagatcacaccactgcactccagcctggaacagagcgagactccgtctcaaaaaaaaaaaa

SEQ ID NO: 791760 - DNA, 599 bp, Homo sapiens
gattgagaaccgattccaaacagaaatgaagaaaaccaggagacaatgagacgacagctcacccatgctgaaagaaaataatcgccaacccagaattctgtagctaatgaaaacatccttcaagaaagagaacatgatcaagacatcttcagagacgcaaaggccgaggcaatgtgtcaccagaaagacagcaaaaagtaaatactaaaggatattctttgggcaaaacaaaaatgggccaggcacagtggctcacacctgtaatcccagcactttgggaggccaaggtgggtggatcgcgaggtcaggagatcgagaccagcctggccaacatggtgaaaccccatctctacagaactacaaaaattagccaggcatgatggcgggtgcctgtaatcccagctacttgggaggctgaggcaggakaattgtttgaacctggaaggtggagtttgcagtgagccgagatcgcgccagtgcactccagcctgggtgactgagtgagcctccatatcaaaaaaaaaaaaaaaagactcagacaccccaaaagctatatcgaagttgaatcaatttcagaatggtgtcttttattgtcagtt

SEQ ID NO: 791761 - DNA, 539 bp, Homo sapiens
cctaggtattttattcttgttgtgactattgtaaatgggattgagttcttgatttgattctcagtttggttgttattggtgtatagcagtattactgatttgtgtacattgattttgtaacctgagactttactgaattcatttatcaaatctaraagtcttttggaggagacttcagggttttctagatataagatcatgtcatcagcaaacagagatagtttgaattcctcttttccaatttgagtgccttttatttatttctctttcctgattgctctagctagaccttcagattctttccatggtaaccactgtagtgtctcctttttttgtttcagattgtatttatttgggtcttctctctctttttcttggttagtctagctaatggtttcttgattttgtttatcttttcaaaaggcaagcttctcattttgttaatcatttgtaattttttttagtttcaattttatttctttttgctctgatacttattatttctttccttctactaattttgggtatgaattgttctt

SEQ ID NO: 791762 - DNA, 579 bp, Homo sapiens
ttaacagagacaagtatttggaaaaggtaggagtatttttaattatcttttcaaataattacggctattcttctttgatactacaccagaattccgtaagtgatagtttagtaaaagttagtcgcaatgtggaatctgaaatcatattaatgaaccttttgtactctgtgacattaaaatccaatggtctttcttgcgattaaaatagattttttacctatgtatgattttataacatcatgcattggtcatttggaatatattggttcactgagttaattacttcttccaaatgtggacacattttacttcaaaatatcaaaaaaaaaaaaartgtgtcagtatcacccccagtctcagtaagtgctgggaaagtgttgaactcacagtgacagactcaagtatctaattttatcttgaaaactgaaactttatgattggcaaaaaactgtcggttgttttcttaaaagttgcaggctcctaacaggcaaataacatgtgaagggggaagcacatagcaacttatattatgaaaatagtcttgaccgcaaggatcccctgaaagggtcttggacaacc

SEQ ID NO: 791763 - DNA, 465 bp, Homo sapiens
accagaattccgtaagtgatagtttagtaaaagttagtcgcaatgtggaatctgaaatcatattaatgaaccttttgtactctgtgacattaaaatccaatggtctttcttgcgattaaaatagattttttacctatgtatgattttataacatcatgcattggtcatttggaatatattggttcactgagttaattacttcttccaaatgtggacacattttacttcaaaatatcaaaaaaaaaaaaagtgtgtcagtatcaccmccagtctcagtaagtgctgggaaagtgttgaactcacagtgacagactcaagtatctaattttatcttgaaaactgaaactttatgattggcaaaaaactgtcggttgttttcttaaaagttgcaggctcctaacaggcaaataacatgtgaagggggaagcacatagcaacttatattatgaaaatagtcttgaccgc

SEQ ID NO: 791764 - DNA, 591 bp, Homo sapiens
tctctttgcacagcaagtgccaagcagtgacatctactatagtttctaggacacgatggtctctgctctacagggaaaaagagcgagcgggacagaaagaaggcgggtggtgagggagaaggagcacaagcccagctatgttcccagaggaggagtcacttcctcgcaataatcytgagatgctgtttatggctgttctgctgatatgaagcctggagccgcaggatgcagcctccccctggctgtccattaatcacgaggggctgttacagagtgtacagagtgggagttctgcctacaagtggcctctaactgtctccagctcaatgaaatgaacctgtgtgaaaacttgttttatgagagattggtttatttgtaactaaactacttcctctgttatttgataagctcaaatatttgctactgatagtctgagagtgtcacatttattatcctgtttcagccgttgcctaactcctttggaactgactccgttaactctttgagggacagcagtaggttttagaggaccggtttctattttctttcagcaaagccaatgctatctttcagacactgagtcagcattat

SEQ ID NO: 791765 - DNA, 601 bp, Homo sapiens
gaaaggagaagtcaggcaccatactggtaggccactgccctgcccaggcaatctcttctcctgagtcactgcaccaccagatccctcacaaacctaccccacagccttctctgactgtggcaaaatacaggggaccagcaggtcactgggaggtacaggacacctggagatcttaccctcaatgggggtcacccctaagtgagaggggtgtgcagctcaccaaagctccccttgggacaaaaaaaaaatatggatgcagtgctaatcatgccattcactgaaaagggcagcaccagatgccaggaatagacatggaaaattgtcatctcctcactgcctcccytcactgttgccaaagcaatagaggttctctctcctgggggcaggtgaatgtgtatttggagaatgcactttttgtgcttttgtcaatagcttcacccctgttaaaagtgagcctgcactacttgggcttgcaggaagagcaggggtcaactacctccctacacagaaacacagagcagcaacatcctagcaacaaagagcagacaagccacagagttgtccaccgaggactggatgaagaggctctgcctggggccca

SEQ ID NO: 791766 - DNA, 608 bp, Homo sapiens
gaaaatatatcttatatttttgctggttgttttcagtgcctagctactagaatctagcataatgctggccatatcttatttgagtatcccaaaaccttaccgattatttgataattagaaaagttcttatttttcaaatgtaacgatgaattaatttctttaaaatattagatatstcccttacaatgttaaggataagttagcacctacagtaaaatattgaggataagggaagttgatctatagcaggagttcaaaacttggttccaaatcttaactccaactctaagctgtgcgaacttagaaaattttagtatcttctttgaatcccagttctacattgataatgcagaaatatattaatactgttttgaaaattgaatgaagttatgtgtgaaaagcatatgatatttgatatggtttggctctgtgttcccacccaaatctcatatcgaattgtaatttccaatgttgttggccgacttcccctttgctgatctcgtgatagtgagttctcacaagatctgattgtttaaaagtgtgtagcacttccctcttcatgctctctcttttgctctgtcatggtaagatgtgcttgcttccccttt

SEQ ID NO: 791767 - DNA, 543 bp, Homo sapiens
gcacaaagtaccctatgaaggaggcagctctggcaggaccaatgaggctagagtgaaggcaaaccattttagggaagatctgttctagtgatattaggtttaggaacatctgtctgtttttcctgccagattgtgttatgaggacatagacaatttaacagatgagtcctctgacccattagcagtgggttgtgatgagagcagggccctaggtgggaaaaaagcaaactctttagaaaataggttrcaacccagcttatcactctgtcttgatttttttctctacctgtatactcaatagacagggggcagtcatcaaggatgttcatcaaggatattggtctaaaattctcttttttgcttgtgtctctgcccggctttggtatcaggatgatgctggcctcataaaatgaggtagggaggattccctctttttctattgattggaatagtttcagaaggaatggtaccagttcctccttgtacctctggcagaattcggatgtgaatccatctggtcctggactctttttagttggtaag

SEQ ID NO: 791768 - DNA, 543 bp, Homo sapiens
gcacaaagtaccctatgaaggaggcagctctggcaggaccaatgaggctagagtgaaggcaaaccattttagggaagatctgttctagtgatattaggtttaggaacatctgtctgtttttcctgccagattgtgttatgaggacatagacaatttaacagatgagtcctctgacccattagcagtgggttgtgatgagagcagggccctaggtgggaaaaaagcaaactctttagaaaataggttacaacccagcttatcactctgtcttgatttttttctctacctgtatactcaatagacagggggcartcatcaaggatgttcatcaaggatattggtctaaaattctcttttttgcttgtgtctctgcccggctttggtatcaggatgatgctggcctcataaaatgaggtagggaggattccctctttttctattgattggaatagtttcagaaggaatggtaccagttcctccttgtacctctggcagaattcggatgtgaatccatctggtcctggactctttttagttggtaag

SEQ ID NO: 791769 - DNA, 671 bp, Homo sapiens
aaaattacaaacttcttgctggcacaatggctcatgcctataatcccagcactttgggaagctgaggcgagtggaatatttgagtccaggagttcaagaccagtctgggcaacatagggagaccctgtctctacaaaaaatacaaaaattrccccggcgtggtggcgcgtgcctgtaatcccacctactcagaggggctgaggcgggaagatcacttgagtacagggaggttgaggctgcaatgagccgagattgagccattgtactccagcctgggtgacagaacgagactgtgtctcaaaacaaaacacaaatttacaagcttttatacaacaaaataaatcacaatcaaatttaaaagacaacacagtgggagaatatacttgcaatactaagaaaaattggcatttagattctttaaagaactcctataaatcaataataaaatatttctactctcatgatactactgataacctgcaggcagcaaccaatcacaagacagcaagattaatttgaatgaacatttttaaaaagaggcttctctggtgcataccagctgaatattctctaaacaacctaaaaaaatcaacaaaatattatgtgaacccagaattatgcaaaccccctctcagcaaaagtttttagaaaaaagtcaaatttgaaatcct

SEQ ID NO: 791770 - DNA, 671 bp, Homo sapiens
aaaattacaaacttcttgctggcacaatggctcatgcctataatcccagcactttgggaagctgaggcgagtggaatatttgagtccaggagttcaagaccagtctgggcaacatagggagaccctgtctctacaaaaaatacaaaaattgccccggcgtggtggcgcgtgcctgtaatcccacctactcagaggggctgaggcgggaagatcacttgagtacagggaggttgaggctgcaatgagcygagattgagccattgtactccagcctgggtgacagaacgagactgtgtctcaaaacaaaacacaaatttacaagcttttatacaacaaaataaatcacaatcaaatttaaaagacaacacagtgggagaatatacttgcaatactaagaaaaattggcatttagattctttaaagaactcctataaatcaataataaaatatttctactctcatgatactactgataacctgcaggcagcaaccaatcacaagacagcaagattaatttgaatgaacatttttaaaaagaggcttctctggtgcataccagctgaatattctctaaacaacctaaaaaaatcaacaaaatattatgtgaacccagaattatgcaaaccccctctcagcaaaagtttttagaaaaaagtcaaatttgaaatcct

SEQ ID NO: 791771 - DNA, 671 bp, Homo sapiens
aaaattacaaacttcttgctggcacaatggctcatgcctataatcccagcactttgggaagctgaggcgagtggaatatttgagtccaggagttcaagaccagtctgggcaacatagggagaccctgtctctacaaaaaatacaaaaattgccccggcgtggtggcgcgtgcctgtaatcccacctactcagaggggctgaggcgggaagatcacttgagtacagggaggttgaggctgcaatgagccgagattgagccattgtactccagcctgggtgacagaacgagactgtgtctcaaaacaaaacacaaatttacaagcttttatacaacaaaataaatcacaatcaaatttaaaagacaacacagtgggagaatatacttgcaatactaagaaaaattggcatttagattctttaaagaactcctataaatcaataataaaatatttctactctcatgatactactgataacctgcaggcagcaaccaatcasaagacagcaagattaatttgaatgaacatttttaaaaagaggcttctctggtgcataccagctgaatattctctaaacaacctaaaaaaatcaacaaaatattatgtgaacccagaattatgcaaaccccctctcagcaaaagtttttagaaaaaagtcaaatttgaaatcct

SEQ ID NO: 791772 - DNA, 671 bp, Homo sapiens
aaaattacaaacttcttgctggcacaatggctcatgcctataatcccagcactttgggaagctgaggcgagtggaatatttgagtccaggagttcaagaccagtctgggcaacatagggagaccctgtctctacaaaaaatacaaaaattgccccggcgtggtggcgcgtgcctgtaatcccacctactcagaggggctgaggcgggaagatcacttgagtacagggaggttgaggctgcaatgagccgagattgagccattgtactccagcctgggtgacagaacgagactgtgtctcaaaacaaaacacaaatttacaagcttttatacaacaaaataaatcacaatcaaatttaaaagacaacacagtgggagaatatacttgcaatactaagaaaaattggcatttagattctttaaagaactcctataaatcaataataaaatatttctactctcatgatactactgataacctgcaggcagcaaccaatcacaagacagcaagattaatwtgaatgaacatttttaaaaagaggcttctctggtgcataccagctgaatattctctaaacaacctaaaaaaatcaacaaaatattatgtgaacccagaattatgcaaaccccctctcagcaaaagtttttagaaaaaagtcaaatttgaaatcct

SEQ ID NO: 791773 - DNA, 601 bp, Homo sapiens
tctgcctcccaggttcaagtgattttcctctctcaacctcctgaatagctgggattacaggtgttcgccaccatgcccagttaattttttttatttttagtagagagggggtttcactatcttggccaggctggtctcaaactcctaacctcaggtgctcctcccacctcagcctctgggaggctgcactctggagtgcagggattacaggcgtgagccatggtgcccggccaaggtactaagatcagatggtggattgaatgtaagtaagggagaagaaggttaaaaataattccaaatttctctctttagcaattacgtagattgtactgccatttactaaaatgagaaatgatgaggaaatactagttttgagaattgtgttctgtggtcttcatagatttaatttttatatgaaacataatctgccaacttgattttaatgycacttctacctgttctgtttattgacctaatgaacaagctttgtttctattctataactattaaattttctatttccttgttgtctttgctttttaaaaaatcatgccttatcttctctttatttttatttcccaaggttaactataataccctt

SEQ ID NO: 791774 - DNA, 597 bp, Homo sapiens
atattttgaatgatacttatggacacatgtgcatgtaatagtgataactttgttatgtttttccctggttaatctcttttttgttataggggtgtaggctgtaaacttttacaatggggagagaagggatcacaccctctcagcccccatagttctagaaacaaaggtaggacgactgagacacctgacttgcttccaagcctacaattgaggacctaggacaactgacaaaaagctracaaagaaagataagaatttttaccaagtttagctctcctggatctctacctggagtacctgatggagaatggaaggtaaacatttctctttatccctttctccctaaattcaggttggcaggagaaaatcatttgtttaggttgtgactcttgtgtaagtttggtttggaagacctatttataattatctttctccttttcatgggcagttatttctttcctgtctgtcttgttttgtgtcctgagatcttagcttggcctgctgcctgtcggggtcatgcaggttgttgggtcatgcagatggtcaactgaaagaggttgaggcccacatataaaactaacatatcaacttgccagc

SEQ ID NO: 791775 - DNA, 597 bp, Homo sapiens
atattttgaatgatacttatggacacatgtgcatgtaatagtgataactttgttatgtttttccctggttaatctcttttttgttataggggtgtaggctgtaaacttttacaatggggagagaagggatcacaccctctcagcccccatagttctagaaacaaaggtaggacgactgagacacctgacttgcttccaagcctacaattgaggacctaggacaactgacaaaaagctgacaaagaaagataagaatttttaccaagtttagctctcctggatctctacctggagtacctgatggagaatggaaggtaaacatttctctttatccctttctccctaaattcaggttggcaggagaaaatcatttgtttaggttgtgactcttgtgtaagtttggtttggaagacctatttataattatctttctccttttcatgggcagytatttctttcctgtctgtcttgttttgtgtcctgagatcttagcttggcctgctgcctgtcggggtcatgcaggttgttgggtcatgcagatggtcaactgaaagaggttgaggcccacatataaaactaacatatcaacttgccagc

SEQ ID NO: 791776 - DNA, 535 bp, Homo sapiens
ggttcaagggattctcctgccacagcctcctgagtagccagtattacaggcgcccaccaccatgcctggctaatttttgtatttttagtagagacggggtttcgccatgttggttaggttggtcttaaactcctgacctcaagtgatccacccacctcggcttcccaaagacatttttyttaaatttttttttacatatttatatacatgcatacatacatagttttaatataaaattgtgagaaggttcaaggttttttttgcttgtcgaaccctctcccttattgttaacccatgttaacaacttagtatgtgccttttatatttttgttaatttttttctatgattataatttatatggttggagagtcatgtgttgcataatgaatgatgttttggtcaacgacagaccgtatatatgttggtggtcccataagattataatggagctgaaaaattcctgtctcctagtgacatcatagctgtactgttatcatagcacaatgcattacatttttttttttcccaagacag

SEQ ID NO: 791777 - DNA, 644 bp, Homo sapiens
caaaaaaatggaaaagaatacgtggggagagcgtggagaagtcagaacccttggattgctggcaggagtgtaaaatgccacagctgctacggaaaacagttggtggttccttaaaaagttaaacatagaattatatgatccatatggtcataccacatacccttctaggcatatacccaagagaaatgaaaacatatgtccgtgaacaaacttctacacgaatgtttatggcagcattattcataattgcccaaaggcagaaacaatccaaacttccacccgtgggtgaatgaagaaatktatgcgcgggaacattcgccacgtgccacagcatggtgagccttgaaaacgtggtgcaaagtgaaaagcggtcacaaaggtcacgtattatgtgattccatttatatgaaacacccagaataggccaattcatagagacagaaagcagatgagggattgccagtggctgaggtgaggaagtcagtggtgattattaaaagggtgttttctggggtgataaaaaccttttgaaactagagaggtgatgggtgcacagcaccgtgaatgcagaaaatgcctcagaatcataccctttaaaacagttgttcgttatatgaatttatttgaaaaaagaaaagggaaga

SEQ ID NO: 791778 - DNA, 613 bp, Homo sapiens
tccccccgactccccgccctctgcccaccctggcgcccaccgttctaccttccatctgtatgaacgtgacggctctcaggacctcgtgtcggagactcaagcaggacgcatcctttggtagctgggttgtttcactcagcatgatcttgccaacattcatccgtggctgtagcctasatccgaatttccttcctttttaaggctgaataatattctgttgtatgggtggaccacatttggtttatccacgcctctgccaacagacacctgagttgctgccgtctcttggccgctatgaacgtgggcgtgcaagtatctgtccgagtcccaaatttcagttcctttgggtaaggctctgatgaggctgggggtaccgagtggaagctgacatcctggacagtgaaggcccctcccttattcagctcccagggcagagggcagcaaggcccacacccccaagctgaaggtaggggcttcatctgtggaaccctgaccacctgggaggggagagccacggagcattgttggggtcccagcagaggatcccgtcccatgggcccaggccccctaagcctcctaccgtgctcccacgttccggcaaatattcagctat

SEQ ID NO: 791779 - DNA, 597 bp, Homo sapiens
cacaggggttggtaatggtactgcattttttcaaatcgtgcttttatgttatactccctttttgcatttacaaatgctttctttcagcctggccctctgacaatttatttccacaagttgtagagggataactggattggaaattgggatacagtagtactggtcccaggtctgcgtttagttattctcttctagttaagttggttcaccttaggtaggtcatttcatctttctggctctctgtttacttatctgcaaaatgttggagattgaagttggtgatctataagttctcttcaaacactaacaatttatcattgcagctaaatagaattcctgatgctggccaggcacggtggctcacacctgtaatcccagcattttggaagactgaggtgggtggatcacctgaggtcaggagttcgagaccagcctgmccaacgtggtgaaaccccgtctctactaaaaatacaaaaatcaactgggtgtggtggcacgcacctgtaatcctagctacttgggaggctgaggcaggagaatcagcttgagcccaagaggtggaggttgcagtgagccaagatcgcaccactgcactcc

SEQ ID NO: 791780 - DNA, 608 bp, Homo sapiens
tttttagcatgataatacctacctttagtgatcatttttggataaatctgaaggatttggaccacatattttccccatgtgtctgaattcattccagttgtatatgtggtggagggggactatcttgagaaagttctccactattatttacatcattagaatctatatatatatatatatatatatattgcactttgtgatttaaattatgctgcaataggtaaggagggtgagagggagacaaacctcacaacaaaatacctgttcccctgtcccattattcatgtctccgttactcattctgtcctargagctcattctgtctctccatctcactgtcacttaggtgataatctactccattatccactgatctccttgcccaccatctaacctactgccaatttaggcaaaattacccttgtctttccctcctaatttctcaagctcaccatttgtcagatatatgccttgtctgtgcctctcaggtaactcagtatttgaggaaatctaggtctacagctgacctcacaaattccacctgtgcagtactgtgtgcacatcaagtgttcaaatgctatttcctgactaaaacctatattgaggca

SEQ ID NO: 791781 - DNA, 425 bp, Homo sapiens
tgtccccagcaactagaacagggcctggctcattgtaagctctcagtaataatgtgttgaacgaatgaaaggaggttagggagggaatcgtggataacttgggggaagagtgtttaaggcccaggaaacagtcagtgaaaaggctctgaggaaggagagtatctggtgagttcctgaaacaacaaagagaccagagtggctagagctgagtgagccccaggaagagaagagacagacagctcagrgggatagaaggtatctctgggcccattttaaaggcttcagcttaactcagtgaaatggagagccactgaggggttttgagcagagaagtgaccagaatctgacttgtgttttcatagcatcattctggatgatgttggagaacagacagaaggaggcaagtccagaagcaggaagaccaa

SEQ ID NO: 791782 - DNA, 588 bp, Homo sapiens
aaggggaataaacttttcctgggaacctgctgacaatacaaaggaccaaggcatttctatgccaggccttgttcccttatctgagtgagctggaggtttgtgcaagtttttatccaaatgggccgtaggtttttccatctgtgcagtcatgggcatgtctccaggcacaacaccctgtgctagttccyttattggtgcctgcagcttttttcccaggctgctttttatattatctggggataaggcactgactcatgagccaggggctctccaggacccttctcttgttacctacctaaggtaagctaactaaccggatccccacactcttgctgtgcctctcttcatgggatgaaaaattgaggagccaagggactatgcctacttggaatccatgttcctttacccacagaattctatactatgttatcagccagaaccccaggattccttgcctcatcagcctgaagcttgcttccaggatatgtgcaggccttttgtccaaatccatcctgaaaaaagactactacagatgtatatacccctatggctggcagtttgtgggaagtacagatgaagcttggatgt

SEQ ID NO: 791783 - DNA, 588 bp, Homo sapiens
aaggggaataaacttttcctgggaacctgctgacaatacaaaggaccaaggcatttctatgccaggccttgttcccttatctgagtgagctggaggtttgtgcaagtttttatccaaatgggccgtaggtttttccatctgtgcagtcatgggcatgtctccaggcacaacaccctgtgctagttcccttattggtgcctgcagcttttttcccaggctgctttttatattatctggggataaggcactgactcatgagccaggggctctccaggacccttctcttgttacctacctaaggtaagctaactaaccggatccccacactcttgctgtgcctctcttcatgggatgaaaaattgaggagccaagggactatgcytacttggaatccatgttcctttacccacagaattctatactatgttatcagccagaaccccaggattccttgcctcatcagcctgaagcttgcttccaggatatgtgcaggccttttgtccaaatccatcctgaaaaaagactactacagatgtatatacccctatggctggcagtttgtgggaagtacagatgaagcttggatgt

SEQ ID NO: 791784 - DNA, 358 bp, Homo sapiens
aataactctggagctccaggaagactgggcagctggtatagccctttgcaaaggtgaaagccctaaaatcacacatgacagctggtcaaggtgtccccaagagctggtcaaggtgtccccaagagctggtcaaacacaaactagaccaaggrtgtctgcacatcagaaaagctccacttagaaaacaaggaataaaaacaacacgggagaataaggtatatatgtggctcacgttacatttcccttggatagcgccgctcttgcggcagacttgccaggtgccaagctctctcccctcccctccctgtgtgtttcatgagctatttcccactggtacatcctcctctttactctctgg

SEQ ID NO: 791785 - DNA, 581 bp, Homo sapiens
ggtttaaaaaattaaacattttaaaatagaaaaaagcttatagaatagggatagaaagaaaatatttttgtccagctatacaatgtgtttgtgtcttaagcaaagaattattataaaagagtaaaaatgttttttaaaaaaatttaagtttagacagtaaaaatgttatggtaggctaaggwtaattaattattaaagaaagaaaatttttaataaacttagtgtagtctaagtgtacagtatttataatgtctgcttgagtatacagtaatgtcctaggccttcacattcacccccactcactgactcacccagagcaacttgcaaccctgccagctccattcatggtgagtgtcctatacaggtgtaccattttttattttttagactgtatttttactgtaccttttctatgtttatattgtttcaatatacaaatacttgctattgtattacagttgcctacaattttcaataaagtaacatgccgaacaggtttatagtctaggagcaataggctatattagacagcctaagtgtgtatgcagctaggtttgtgtgagtacactatgatgttcgca

SEQ ID NO: 791786 - DNA, 559 bp, Homo sapiens
tcacccaggtttccaccggctccttcacccggcacctaaaggactcaccacccaccccctattggggtcttgcttcacccatcaacaagcaagataatgtcaggtggcctcgaagggcctttccaatatcactagggacttttgatcttaaatcatcttttaatcttttccatcccatggatcctcggcctcctctgtgacttccaggaaagaagcargcctccaaaagcattttctaccacaggcacttgtgcctagggactttcctgacaaggacatgaacaggcacatcagggttggtgaccacaccataagatgctggcaggaacaaggcctaggccaagggttgaggaaactatctataagggctagatggcctctcaggctctgctgtgagctcaccactattcggctccacccctgaagcacaaagagccacagatggtgtgtgaacaaagggtgtgactgcgttccagtaatattcacttcacaaaaacaagcgttgggccggatttggcccacaggctgtagttaccggagagcagtgcttctcaaactt

SEQ ID NO: 791787 - DNA, 498 bp, Homo sapiens
gtctgaattaggaactacatgttaaattatgtatgacagagaaatagcaagcaggaagaaaaaagatgaaaattagctaaaagtccagtggtttgaactgtgtggtagacagagcctgaggaagaagacacaagatgcatgagaaatggctagtccctgtcttcaaggagcccacagatcaagaggtgatcaataggtccaaaatcaataggtgatcaataggtcaaaaatcaataggtgattttggacaacaatgtctccttcaacactgcaactcccactgttgcacctactacaaataataaacatagcacccttttcccaatttcccaccaagattcagtaccctatgggctygttttacaccctaccctgcctttcgattcttccctccccttacataaaaatgtctttaaaggaaaggacacatcagtcaatgttcaaagccaacgttattatacctgataaataaaagtattaacagtaaagctaaaaaca

SEQ ID NO: 791788 - DNA, 569 bp, Homo sapiens
atatatatatatatatggctaaagaaataactttaatgcatttagaaacctcaaaatcaaaatttccctgctggcactgcagggtcccctccctttggctggccctcctctcagaacactgagcactcccgggcactcaaagtctctcttgcccacatgtgggtaggagggacacagggagaccctgcattgtccctaataattgcaacggtgccccttgtgcctgtcagtccgggtgaggttgccccatgggtgcagtgtggaagtggtggygaccagaagctgagagaggcctggccagcaaatgggactaggctggactccctggaagcagcagggagatatatatatatacacacacacacacatatatatatacacatacatacatacatatatacatagatatatatacacacacatatacatatatatacacacatatatacatacatatatatatacatacatatacacgtttatatatatatatataaagtctgtgtgtacatatgacaacatataaacatttaggcccacacaacactatttaattgcatagttaaagt

SEQ ID NO: 791789 - DNA, 577 bp, Homo sapiens
acccaggttccatgccatccccagcagctggctggccactggctccaggccagtccccacggttccaggctccagtggccccagggtccatgcccccaccagtaaatcctcgtatcaggccagaccctaaggaccaaaactccaggatagcctctgcagacccaggcttatctcagggtctatttagaagactcatgtgtagccttactctagcaccaggtcagtacccacagaagttcctgtggacccaggcttcagttcagactttatggatacaggctccagccagcctcaaggaaccagtctccagacacaccattacagacccaatcaaaacttctggcacagtttacccaggctctaaggccatctctgcataccygggtgccaagcccactcacctattgaccttggtactgggccagcctgcctgatgactccagcagcaagtccatctatgaatcatggcagatagtctgcccataacctctggacaagctgaatgataaagggctttcccagacaaagccagtctgcaaagactgaaatgagtccctacttcttcaaatgtgaaggt

SEQ ID NO: 791790 - DNA, 635 bp, Homo sapiens
caggatattgtcaccttgtcctcatgtcccgggagtcaatgatttcttctgtgtctccaaattcaggtatcattaccttaaaacataaaatgttagaaatagaaagaactttgaaaatcaagactctgggaaagagaaaccagtaataagtatcaccagttcaactaagatctgatttggtcagttagaaaattaactaaaaatatcagtgcatttagatcttgttatggggctatgcagactgtatcatcgaatttatttttccttgacagcacactataaatcctttatttcacttaacttctaaatcagattaagtggattacaaacagaakttttaaaaaatgaaacagaatataacacaaaagtcaaagtgcatcataagtagaaataatatttttaggagtgtgtgtgtgtgagtgtgtttgtgtgtgtgtgtatactatcatgtatttactgaactgtaatgtgaaatatattgttatttattctggatcacagcaaacaatatttgaaagccactgttttctatttcatattaaaagccataattgaggatgataattctgaacaaagagttgacattaaataattttaaatatgatataaatttttaatatatatatactactctg

SEQ ID NO: 791791 - DNA, 625 bp, Homo sapiens
tataaagtccttttgaaactccaggtgtttattagtcatgcacatatgcataattgtgtcttatctgcactcatacaaacttgaatgcatttcacagactcattactcactgaatcttaaagtgaattaaaagttcatgtaatggtatgctatcaagacatgaaactagctgtcaaatattaaagacaaagtaattcagcaaatatggattagaatgcattgcagtttggtgatcagaaacacatgctccagagatatctggggtttaaatcaaggtatcactgcctcctaacgtagtagttcattctcacattggtataagaaaataccccaaacggggtaatttataaaggaaggaagtttaattgactaacagttccacatggctgggaaggcctaaggaaacttacagtcatggtgaaaggggaagcaaacacgtccttcacaaggtggcaggagtgagaattgcaagcaggggatatgccagatgcttatataatgatcagatcttgtgagaactcactgtcatgagaacagcatataggaaacygcccctatgatccaattacctccacctggtcctgcccttgacatgtggggattatggggattataattcaaggtg

SEQ ID NO: 791792 - DNA, 529 bp, Homo sapiens
ccaaaacctttgggatatggtgaaagcagtgttaataggaaagtttatagtgataaatgcatagtgcaagaagatagaacttaacttaacaacttaatgttgcacctaaaggaactagaaaaaggaattaaatccaaaactagcagaagcaaagatcagagctgaactaaatgaaattgagaccaaaaaaccatacaagaataaacaaaatgaaaaattggttcctggaaaggaaaaacgagattgctagaccagtagctagcttaatcaagtaaaagaaagaacatctaaawaagcttgatcagaaatgacaaaggtgacattgcaactaatgttacagaaatacaaaagatccacaaagactactatgaacttctctacgtgctaaactagaaaacttagaggaaatagataaattcctagatacatacaatctgccgagattgaaccaggaagaaatagaaatcctgaatagaccaataacaagttccaaagttgaatcagtaacaaaaagaaaaatctaccaacc

SEQ ID NO: 791793 - DNA, 623 bp, Homo sapiens
tgttctcaatagaaatccagactccagtccttgtacttgaacatttaattgtttgaaagtaacacattttattatgaagaaaaataatctatattcaaaatttagcaagtataccctggcaaaaaaatatataaagttgttttcaaattttcccattcaagaatggtgayatttaaatatattttctccttgactttttcccgtatctattaattatattaattaatatattaataccatattattacatattatatcatgttataataacatatcttataatccccatgcctttaaaaatgtcttattgttctgtcactcaaacagttattttggactctcatttgctgttttgacttctaatgttgcaaaatcttcttgagccaataacatttataattaagggagcagagttcttaaaattgaaaatgaaacctgtttggttatgaaatatcagagagttacaactttttccttaaatagatgtgagttgactttcattaaagggggaataaaagaaagaacaaacattttaagcaaacgttctaaacaaaggttgcaaaatcttactatctaaggcatggctcctcaattggatcttactgagatttactgataggtca

SEQ ID NO: 791794 - DNA, 555 bp, Homo sapiens
aagtaaacaacaaaatatgtatagtttaaaaaaataaaatcaggctggcgtggtggcttacgcctgtaatcccggcactttgggaggccgaggcaggtggatcacctgagttcgggagttcaagaccaacctggccaacatgatgaaaccttgtctctactaaaawtacaaaaattagacgggcatggtcacgagcacctgtaatcgcagctacttgggaggctgaggcaggagaatcacttgaacttgggaggcagaggttgcagtgagccaagatcacaccactgcactccagcctgggcaacagagtgagactctgtcaaaaaaaaaaaaaggggggattgaaatggtgtaccctaaaacatacttcacacaaaagatgatacaatagaagcagaggttaaaaaaaagacaaaaatagcaaaatagcataaagtccagctatatcagtagttatattaaatgtgaatgtaccatctattcaaaaggtagagatggttagcctgaataaaaaggcaaaacacagctctatgctgtcagttcaataatggacat

SEQ ID NO: 791795 - DNA, 555 bp, Homo sapiens
aagtaaacaacaaaatatgtatagtttaaaaaaataaaatcaggctggcgtggtggcttacgcctgtaatcccggcactttgggaggccgaggcaggtggatcacctgagttcgggagttcaagaccaacctggccaacatgatgaaaccttgtctctactaaaaatacaaaaattagacgggcatggtcaygagcacctgtaatcgcagctacttgggaggctgaggcaggagaatcacttgaacttgggaggcagaggttgcagtgagccaagatcacaccactgcactccagcctgggcaacagagtgagactctgtcaaaaaaaaaaaaaggggggattgaaatggtgtaccctaaaacatacttcacacaaaagatgatacaatagaagcagaggttaaaaaaaagacaaaaatagcaaaatagcataaagtccagctatatcagtagttatattaaatgtgaatgtaccatctattcaaaaggtagagatggttagcctgaataaaaaggcaaaacacagctctatgctgtcagttcaataatggacat

SEQ ID NO: 791796 - DNA, 690 bp, Homo sapiens
cagctccacctgcagccctggtgcgggatccactgggtgaagccagctgggctcccgagtctggtggagacgtacagaacctttatgtctagctcagggattgtaaatacaccaatcagcaccccgtgtctagctcagggtctgtgaatgcaccaatcgacactgtatctagctactctggtggggccttggagaacctttatgtctagctcagggattgtaaatacaccaatgggcactctgtatctagctcaaggtattgtaaacacaccaatcagcaccctgtgtctagctcagggtttgtgaatgcaccaatcgacactatgtatctagctgctctggtggggccttggagaamctttgtatccatactctgtatctaactaatctgatggggacgtggagaacctttatgtctagctcaaggattgtaaacgcaccaatcagcaccctgtcaaaacagaccactgggctctaccaatcagcaggacgtgggtggggccagataagagaataaaagcaggctgcccgaaccagcagtagcaaccctttaggtccccttctgcactgtggaagctttgttcttttgctctttacaatatatcttgctactactcagtttttgggtccgcactgcttttataagctgtaacactcaccgtgaagacctgcagctttgctcctgagccc

SEQ ID NO: 791797 - DNA, 647 bp, Homo sapiens
gaaaacaagaaagtactgagttctcaaagagacttttcagcattgatgcacccaagaaatttataagacatcgaatcatttccttgcctctaaaaaataagcatttccttgacaatcgttcagtactttaattggaataaacacaagactatcaatgtamaccacccaaacggactcgaggagagcacttgagggatcacctttttggctgctaagttagagtaggggagaacttccaatgatggtcctattttatgccctgaaggagatgtactcagttgtcacatctgaatgcttgtttgccgtatattttgctaaatgattttttggttttactatagtttctaacaaacaagcatacgagagaaatgttagaaaatatgtagtacaagtagaaatattgctagtgttttatcctgccctttgcttccatttcatggctgcaatgaaaaggacggtcatcaaacttggctataaaagaattatgcaaatttaaccatattaatatcatttttcttttctttttgaacaaaatctttcaccccctgctcaaatatctgttttttgcatatatgagaattttcccagatgctggcatgaaaagtctatgtaggtattttggctttctgtttaaaatcacattcaga

SEQ ID NO: 791798 - DNA, 538 bp, Homo sapiens
ttgtgtatatttaaaaaatttttcttctctccatttctctttcctttttggaatctctattattttgatatttaccttccttgcctagtcctctaattaaggctttatcttttctccattttctattcatcaactttgtcrtttaacccttctcttggtaaaaagtcctcacatttttaacttttgagaagttctatcttattctttgcatatttctattacagtttcccatttttatttcataggtctagtagcttctcttatgtctctgagataatgtaagtttcatgaggtataaactttatttggtttgttcattactttatgttgaatgcctagaacaatgagtgcctactgtagtaggtgttcgataagtatctttgaattaatgagactatttactgtagcttattgtgtattttcttctgctccctgaagtttctgtttcccacaagttcctttttactatatttgttctggcctggttttcatatcacaggcctttctaaaatatctggtgatctttggtgtctgttaa

SEQ ID NO: 791799 - DNA, 641 bp, Homo sapiens
cctttttgccagcgtgggaaggggcagtctcctggccataaaggatggggaacggtgtttgcagatataactgcacctttaagattttcagtcaagcttcttattttcagccccttcttgtgcctctgctctattggttttctattgtaggctgtaacaaattaccacaacctttgtgtttccaaataacatacatttattatcttacagttctttaggtcagaggtcttgtatgggcgagttctttcctggagactgtatcatgtttatatagaattggatcttattttttaatctgagattaaatttcacttaataaactagtttattcattttagttgcttgaagtatgttttatctaaaatttgtcatctcatatgatatttatgtttttaatgcttcatcattttctttcatttgttcttttatataataaattacacttgtatttgctgatttgtcaatgttagtagtattgatttgttgctaaaaacaaggccatttatgaacttaacattctttcttaaaattcctttcccaactktatagaacaaaataattcctacagccatagttagccttagtcctttactgaataagttgcataatccatctgcttcttccaaaataagattttctta

SEQ ID NO: 791800 - DNA, 645 bp, Homo sapiens
ctaaagtaattcttcttctgtatattatttatctgccttctgcatgtgatgtttctttcaacgcctgccacgttctgtgtttatctatttggtagaatccatattgtgtcctttactcactcatcttttactgtggtaagttctctacatgcctgcacttagctcatgaagtttggagaggaatgggaggtaaggaatgaggtggagtcatctgaaatacctgtcagcttaaaatcagcttaaaaccacagataacataaaatctatagatcctctgcatgagccagatcttgccttaacttttagcctcctctaactgcagtgagaaagcacatctagatgagctcacagcatggctcgtaatgaagtctaatagattgcagatgttttgtgtttaataatttggtgtttatttctattcagtccactttggtcaccactataaatatgcttaataygctcccctctctccatcatactctgtttttttaattggcatattcatttctttgggctgcctcaacaaatgaccacaaacttggtggcactgaacaacagaaatttattccctcacagttctggaggctaggaatctgaaatcaagcatggttaaggctccaggggagaatccttcattgtctcttt

SEQ ID NO: 791801 - DNA, 568 bp, Homo sapiens
catatcacgtagttgtggtgtatttttttttattatatattgctggatcccatttggtaacagtttgttaagaagttttgtgtctgtgctcatggagaatattggtactattttatattcctaccagcagtgtataacttttaatgtctttgtctgattttgatatcaaaggaatccttgacttacaaaatgagttgcaaagtatttccttctcttctgttttctagaagaaatggtgtagaattggtattattttttacttaaattcttggtgcaattcatcagtgaaattacttggaccttcagttttcttttttggaaggactttaactacaaactcaatttctttactagwtacagtagtatatccagattgcctgttttttctcaagtggtagtttttatctactaaagaactggtctatttcatctaagctacgcaaagctaagcattagcaaactgaagcccacaggccagccacctctttttatgaataaagttttattggaacacagccatgcctgttcatttgcttattgtccatggctacctttgcactataatggc

SEQ ID NO: 791802 - DNA, 608 bp, Homo sapiens; identical to SEQ ID NO: 785621

SEQ ID NO: 791803 - DNA, 608 bp, Homo sapiens; identical to SEQ ID NO: 785622

SEQ ID NO: 791804 - DNA, 522 bp, Homo sapiens; identical to SEQ ID NO: 785623

SEQ ID NO: 791805 - DNA, 615 bp, Homo sapiens
tttccagtatttataatgggttatcacaattttagatgtcctttacccaaggtgtatatatttaaggatttaatctaattcataaattatttattcttcccaaagtcatttttgctttgcctctgaatttcctctaggtcttttcgaacatcctggttttgagatacccagctgaatgtatttcagctcatttacacacatgtgtattttatatattgcttcctgccctgtagctctttgttttggttatgtttattcctaaactatgggaagggttatgtagctgcccagtaaacaacaaaaggcaggcatgcattttctaagacagacagtgacaaacaaaccctttgcttactctgaatcccaggttaatattacaaaccaagtaatatccaatataagaaattaaaaaattaaattatagccgctagctaactcaggcataatcaaatcattatgtagaaagatttcatattrtattcactggagctctcaaacaagctttatttgatatcaaactatattttcacaaatatttgttgttctcatttgaccaaataaaatatgaaagttgagctcaaacgttgtttataatagaatgacctctacttggga

SEQ ID NO: 791806 - DNA, 587 bp, Homo sapiens; identical to SEQ ID NO: 791423

SEQ ID NO: 791807 - DNA, 506 bp, Homo sapiens
ggtttggaaaagcaaaaacaaaaagcaaaaacaatttatagaaaaatctatctacgtcaagataatacctatggacaacaacaaagtgtgtcttgctggatttgtcttcagttcttaatgtcacgtggtttcctttggcagcctccatgtcacagtctatactctcattaaattcaaaattgtgaaagtagtgaatttatccctttttcacatatttcaacatcaagtctattgtttattactcrttaattctctttgcaaatacagtgaaattttatattttagattagagatttggaagtagtaaatttagtggcttgcccacttaataattcaaacaattatttttatttgtattatttgagtgtcattttcaaggcattggagatctctgtatgaagggaacaaatctaaacttcaaaaataatgcattttatatattttactgttccaatttcaaattttaaatatgctactttttctatcaatattcttctggaactatg

SEQ ID NO: 791808 - DNA, 583 bp, Homo sapiens
ataatcagtcttcccacatagtatcaagtgaatgaaatttactagataactgtatctggacaattagacatcagacctctcatggatcatgattgcttaactaaccacttgtttttctgttgaaccaacttctcttctttacccctccctaattcctgtttgcctgtgtgtagttacatttctgctacataagcycctaattttagtcaggtagatggatttcagactgatctctcatcttcttgactgcaacaacctggttcaagccttcttccctgatgataatcactgtatcagtgattgactttccatgtagggagtagcaggacctttaacaaatccctggtgctttggtgagcagcaggacctataacaaatccctggtgtttaggtaacagactttggtcccctgaccaggaatgcattcgttgttgctccactgtcatgtcaaggagagttttagaagcccccctaagtagctgcctgaaccttttttggtaggaggtgagtttcggtctctctctggtttcactgctgtaggcctcaaacacgttcctaatttcctaggaagaatagcctttga

SEQ ID NO: 791809 - DNA, 583 bp, Homo sapiens
ataatcagtcttcccacatagtatcaagtgaatgaaatttactagataactgtatctggacaattagacatcagacctctcatggatcatgattgcttaactaaccacttgtttttctgttgaaccaacttctcttctttacccctccctaattcctgtttgcctgtgtgtagttacatttctgctacataagctcctaattttagtcaggtagatggatttcagactgatctctcatcttcttgactgcaacaacctggttcaagccttcttccctgatgatamtcactgtatcagtgattgactttccatgtagggagtagcaggacctttaacaaatccctggtgctttggtgagcagcaggacctataacaaatccctggtgtttaggtaacagactttggtcccctgaccaggaatgcattcgttgttgctccactgtcatgtcaaggagagttttagaagcccccctaagtagctgcctgaaccttttttggtaggaggtgagtttcggtctctctctggtttcactgctgtaggcctcaaacacgttcctaatttcctaggaagaatagcctttga

SEQ ID NO: 791810 - DNA, 644 bp, Homo sapiens
gctaaaacattatttatctcagctttttatttacaatattgcttttagggaatattgcttccaatattgcttttggaaaccactgatttccaaatgcattcttttatggttctctttctaccttccgagttatcctttgcctgatcattcttcttctggtccctgaccctgactgcactgccctttacacaaaccttcatttctaatggcatatgggccactttcccctgggatagccatgcatctccaaaaacctcttaacatctcacagtatctctccaaactgcttctcccatttccttccatggtgtcrtcttcctctagtgctctggatcattttggtcttttctttcccttccttctctgaaatccaaattagatattgtgctctactcactgcaaaatgagtcagatttgtttcttcctcattaatataaccaccactataaccatcaaaattagcttctttgtaatctgtcacctatattacttcaagcacctcctaaaagatatcctcttccccaatcagatttttttctgcatatcatcatcagctttatttttctaacatgccaattgtatcaagttattttctggccaaagatcctacaaccattccgtgaaaagcaaaaatgcagggctgg

SEQ ID NO: 791811 - DNA, 648 bp, Homo sapiens
agaaataaatcaatacacatttccagctgcctaatgcaaagaaataaagtcacctactgaaatcaattcaccagagaaaagccaagtcattgactgcactagcaataaccccacttcattcccttccaaccaggatatcgtaataagaatcaatctcccacagggccccttccatcagaattcatatgtctataatgaattctttcctcattctttgtgtgtgtgtgtgtgtgtgtgtgtgtgtgtgtgtgtgtgtacttggtaaaaatattgatattacaattcytctctatgagactccattaactttactgctcttttacttctttttaattcaacatatgtttattgggtattaaaattttaatttgtggtcttttagcctaggtttaatattaaccaaacaatacataaaagttttgtacataaattaagcattaccataatttgctaagtgggatgtaaggagaataatgcttttctaagattaaagcaaataggtatctggaggccagatggacacaaaattggaaaaaaaatataatcagtaatcagaagagaatggagaatctaatcttaaatgtgaggaggtttcccctgaagactttcgtatgctctctgctgatcctagagcagaaggtgggcacg

SEQ ID NO: 791812 - DNA, 486 bp, Homo sapiens
ccgagtagctgggattacaggtgcatgccagcacgcccagctaatagtttatgtattttttgtagagacatgtttcatcacattacccaagctgttttcgaactcctgagctcaagcgatctacgcacctcagcctcccaagttcctgggattacagatgtgagcaaccacaaccagccgatttcyattgagttttttctgctgtttctatcttgtctcttcgtgtatccagttacctctgatcatttgcgagatactgaattttaaaattattcacagatataatctgaggccttaggaggatgttagctttcttcaaagaagatttggaggatttgagagtattagaatcatccaagttgaagatttaagattttctggacccaccagaattctcaaaccttacctatagtctaggacaattggtttatgtacagttcacctttattaacacagtgtagtcctttgggggtcctagctcttggc

SEQ ID NO: 791813 - DNA, 576 bp, Homo sapiens
tttactcaagggcttgaaagtacacagcaaacaagaaggtaacttcaacatgagggatatgtgacagttgtaagagagagtaaggagttggggattatggcaaaacttgatgcattcccatgactgagtgacccagatgagttgatctttgctacccatttttattttttaattaattagggttttatcccaaatcaatcattttatctttctgggctttagtttttcaactcttaaataataatgaggggtaagggtgagtgaatagttaacaaaaacacaacagggaaggaacagttgccatacattttgtccatgaaatcactagagcttcccaattaatatattatttgatagtgtaggaaagaaggaaccaatayttacccttgcaatgtgatttccaatgctcaaatgtagaaattaaggcccaagatcacccagccaggaatcacaatattgagatttgaacccacaacagagtgagtctcttcagaagcctgttatttccacaacttcaacttgcccttctaatgataagagaattcaaataacattttattactaatatctcttaga

SEQ ID NO: 791814 - DNA, 516 bp, Homo sapiens
taaccacccagcaatgtgctaacattttggtgtctatcctttccagtgtttctcgaattttaatgctcatacaaatgccatacggaactgtcaaaatacaaattctgatgcagcaggtctggggtagagcctaagattctacatttctacgagacaggcacattaccacttggcmaccgtgcctgagttagagtctactttttttttttttttttttttttgagatcgagtcttgctctgtcgcccaggctggagtgcagcggcactatctcagctcactgcaaccttgcctcctgggttcaagtgattctcctgcctcagcctcccaagtagctgggattacaggtgcctgccaccatgcctggctaatttttttgtatttttagtagatgaggtttcaccacgttggtcaggctggtctcaaactcctgacctcaagtgatccacctgcctcagcctcccaaagtgctgggattacaggcatgagccaccacaccctggcctagattctacatt

SEQ ID NO: 791815 - DNA, 563 bp, Homo sapiens
gtcactgcacccgaggccacagggggagatgtgctcacaccctaatacccacccaccgcctcagatttctgaagcttgagctaaggtaccatgcaggcagccatccacccagcgtgtggacaggcagcgttatggacacactcaatgcactcactcacccgggcatccgtgaccttgaactcacgcaggatatactggggcatgttgtactcagccatcgggtcaacaacaaagtactggtagcgagcagagcgctctgctggccagtactggtggcatttctcctgtggacagagggtcgggcccccataatcaggtgagaaggaatrggggaggggtgccaggcttcacaggattctgggacagatgcctcaggtagtaataacgggcgcctgaggccatgctgacaagcagctggggtgtcaaaggagacagtaacataggcggcagctcccccaagggtggctggtgttctcccaggtatgacaggggccctgggggaaagggtgggctcaccctgcccatctcccgaagcttggtcagcatgacgatgatggtggaat

SEQ ID NO: 791816 - DNA, 638 bp, Homo sapiens
acccccatatccgagcgtgcagccagctggaagcggtagagtgtgtcaggcttcaggtcctctagtgtgtaggaggaggttgggtcgaaggtcaccttgtgctgggaagagcagggagcactcactgacagctctgagctcaaagtcactcacaggttgttccccaacatgggctgcaatgtgacacctctggayccaccacggctccaggactggctccacaccataaggccacatggagcacaaaaggaactcagggcttagcccatgccacagacacctcacagaccacatggaccacaggagccatctgggacgcatggcttctggggaaacttcagggctctgccagtcatatgagccacagagcctaggaaacccaaggcagaccctggggactttgcccctagcacagggtgacaatgactccagattcatacaggctgtgcgggccacatgacacgcatgcaccactaagcctccagcagaaaccttagaggctgtgcccacataagccacagaatccagaaaatccctcctgggttaagcccatcacagaccctcagggaccaggagaccccctcagtgcttctctgcccgctgcacacctgttggtcttcgtcctctgccgcccagta

SEQ ID NO: 791817 - DNA, 609 bp, Homo sapiens
tattttaacaatattgattcttccaatccatgcacatataacaagtttccatttcttgtctcctcttcaatctcttccataaatgttcagtagtttttattttaaagatcttttacttatttggttaattcccaggtatttaatttatttggagctattgtaaatgggattatgttcttgatttctttcagaytgtttattgtcagcacataaaaattctatgaatttttgtacgttgattttacattctgcaactttacagaatttatccattatagtactgttttttgatggagtctttagattttttttccaaatataagatcatatcatctacaaatagggataatttgatttttgacttcttcttttccaatttagatgccctttatttcttcattttttttctgattgctctagctaggacttccagtattatgtcgaataacagtggtgaaagtgggcatccttgttgtcttccatatcttagaggaaaagctttcaggttttccccattcagtaggatgctagctgtgggtctgtcatatttggcctttattatgttggggcatgtttcttgtatacccactttttaaggatttttatcac

SEQ ID NO: 791818 - DNA, 479 bp, Homo sapiens
tcactccaccccccaagcagccactaccccttggtttggcacaacacaagataagaccgattttccagtagagtggcagagaatagggcctgagaagatgggatctggggacagagagatgtgctttgcgtgtcacatctgccattagtagtggtgtcaccttractgagtcacatttcctgaggacagcctcctcatctgtgaaatggggatgaagatattttgtgggattgtaaggattagatgagattatgtgaggagagtgactggcacagacagttgctctataacggtaggttaaatgaatgaataaaccaaattttacagaggggttttcaaggctgggagtctcatttgaaccccatgacaaccccaaaaaagtaccattgcccccatcttacaggtgaggaaatagcaattcagagagaagtcatttgcccaggaggtaagtttaaacacaggactctgtggccacagcg

SEQ ID NO: 791819 - DNA, 479 bp, Homo sapiens
tcactccaccccccaagcagccactaccccttggtttggcacaacacaagataagaccgattttccagtagagtggcagagaatagggcctgagaagatgggatctggggacagagagatgtgctttgcgtgtcacatctgccattagtagtggtgtcaccttgactgagtcacatttcctgaggwcagcctcctcatctgtgaaatggggatgaagatattttgtgggattgtaaggattagatgagattatgtgaggagagtgactggcacagacagttgctctataacggtaggttaaatgaatgaataaaccaaattttacagaggggttttcaaggctgggagtctcatttgaaccccatgacaaccccaaaaaagtaccattgcccccatcttacaggtgaggaaatagcaattcagagagaagtcatttgcccaggaggtaagtttaaacacaggactctgtggccacagcg

SEQ ID NO: 791820 - DNA, 479 bp, Homo sapiens
tcactccaccccccaagcagccactaccccttggtttggcacaacacaagataagaccgattttccagtagagtggcagagaatagggcctgagaagatgggatctggggacagagagatgtgctttgcgtgtcacatctgccattagtagtggtgtcaccttgactgagtcacatttcctgaggacagcctcctcatctgtgaaatggggatgaagatattttgtgggattgtaaggattagatgagattatgtgaggagagtgactggyacagacagttgctctataacggtaggttaaatgaatgaataaaccaaattttacagaggggttttcaaggctgggagtctcatttgaaccccatgacaaccccaaaaaagtaccattgcccccatcttacaggtgaggaaatagcaattcagagagaagtcatttgcccaggaggtaagtttaaacacaggactctgtggccacagcg

SEQ ID NO: 791821 - DNA, 479 bp, Homo sapiens
tcactccaccccccaagcagccactaccccttggtttggcacaacacaagataagaccgattttccagtagagtggcagagaatagggcctgagaagatgggatctggggacagagagatgtgctttgcgtgtcacatctgccattagtagtggtgtcaccttgactgagtcacatttcctgaggacagcctcctcatctgtgaaatggggatgaagatattttgtgggattgtaaggattagatgagattatgtgaggagagtgactggcacagacagttgctctataacsgtaggttaaatgaatgaataaaccaaattttacagaggggttttcaaggctgggagtctcatttgaaccccatgacaaccccaaaaaagtaccattgcccccatcttacaggtgaggaaatagcaattcagagagaagtcatttgcccaggaggtaagtttaaacacaggactctgtggccacagcg

SEQ ID NO: 791822 - DNA, 649 bp, Homo sapiens
cctaagaactaatcacaacgctagctgcacatcacattatttccttggaagagtcaagctgaactttctcagcagagtgtgaggaaatgacatctctgccaagggctcttccatccatagtttgcaccgtttcagtgatgggcagctcattacctctcgaggcagcccattccacctttgcccagatccaaatkttttttcttcattcgaagcttgggtcaaagccttcttcctccaggaaacctttcctcagaggctgaactgtatcctctcttaaaatgggggagcagagtggtctctgcctacttcccagagtggccacagggacccaggtgagaccatggatgggaaagagtcataaagccttgagccccaagctctcattgggacttgtggctgctactgctattgctgctgttctctgatcctctcaacaccctggggaagtgggttgtgattaatttcccatcttgcagatgaggaaactgaggatcggaacttagaaagcaacctacccaaaaatcacccagcaaactattctaacagcagggttgtggccaaactcctaccctctctgccacatgctggctgtcccaaccccagagtctggcatgtggagggctccctgggaccagacaaggcctactga

SEQ ID NO: 791823 - DNA, 635 bp, Homo sapiens
acaccagagtgggaacttatggtgtattttctgggcttgcctatagccacccatggaccaatcagtatgcacttcctcctctctgaggctcatgaaagcttcaggctcagccagagctgggcagacattggatgaccagctgccgagaggagctacccgctccagggcctcctctctgctgagagctgcagagatggcagaacaacttgcctgcagaaaggagcttcccattccagggtcttccctcttctgagagctggaaagtcgacaggatgacctgcctgcagagaggagcttcccattccagggtctcctctctgctagsagctgaacactcatcaggacaccctggctgtggaaaggagctgccccctgagggaggctctgcaggaggctgagctgttctatcgctcagtaaagctcctcttcgtcttgctcactccccacttgtctgcatacctcattcttcctggttgcaggataagaacttgggacccatcaaatggtggggctgaaagagctgtaacacaaacaaggctgaaacatgccccttgcttgccatgatgcaggtgaagggaaggaaagaagagctgcggccctctggggaacccagacctgggagctccccaagctgg

SEQ ID NO: 791824 - DNA, 635 bp, Homo sapiens
acaccagagtgggaacttatggtgtattttctgggcttgcctatagccacccatggaccaatcagtatgcacttcctcctctctgaggctcatgaaagcttcaggctcagccagagctgggcagacattggatgaccagctgccgagaggagctacccgctccagggcctcctctctgctgagagctgcagagatggcagaacaacttgcctgcagaaaggagcttcccattccagggtcttccctcttctgagagctggaaagtcgacaggatgacctgcctgcagagaggagcttcccattccagggtctcctctctgctagcagctraacactcatcaggacaccctggctgtggaaaggagctgccccctgagggaggctctgcaggaggctgagctgttctatcgctcagtaaagctcctcttcgtcttgctcactccccacttgtctgcatacctcattcttcctggttgcaggataagaacttgggacccatcaaatggtggggctgaaagagctgtaacacaaacaaggctgaaacatgccccttgcttgccatgatgcaggtgaagggaaggaaagaagagctgcggccctctggggaacccagacctgggagctccccaagctgg

SEQ ID NO: 791825 - DNA, 647 bp, Homo sapiens
tacggctgcttggcattctgaggaatccaagctgccagtcttccatatcttgttatggtgccgtctgtgtccttctcagctgcctagcagaaaacagcctgcagaatcttgtgtgtttggtgcttctactaagaggtaaaaagcatcacttctgctcacatgttattgtccaaagtgaagtcccatggccatgcctaatttcagggagccatatgcccagaaagaaggatgaatggggactcttgatgatcacttccataagcagcaacttagataatctcattctgtttacttggtttggtccaacgtactttcattctccccacacttactrtcttcttcctgattcccactctgagtcaaggcctaggagatgatgtatgttgaggcaagacgaggcccaggtagcatcttcacctggttttaccctttttcaatctttctccagttcctcacacagcactgaaaggacttttttgtcttcttcatggggctggaacttcagtgattccattgaggaatacagtcctccctgttctatagtttatgctctcgtcaatcctctaagctttagtgtctgatatttaaaggaatatttttaggattcagaaaatctatttcttaagtaaaactagctttcaggacta

SEQ ID NO: 791826 - DNA, 639 bp, Homo sapiens
actaacatgagaacagtgtgggggaaacaacccccatgactcaaattatctaccactgggtccttcccacaacacatgggaattatgggagtacaattcaagatgagatttaggtggtgacacagagccaaaccgtatcaactgtatactccataagggtttaaaatctttattcacttcactgatgtatatcaygcacctgtttccttgtagatagggcagaataaatattttttcatgaatgaatgcactgaggcacttcagaatacatcaatctacagtgtttaggaattgactatgacctgaattaatatgctttgttcacctcacatccccagatcctggagtgtagtaagtacgacatgtatagtagaatgaataaaaaataatggattcaggcacaacacagcttcctatgaggctagggaattacccagactcaggcaaaattcattactatcattctcctctttatgaacctgacaaccaaacataatggcttaggaattttttctgttaaatatatttgattgatattatatacccagaaggtcaagataatgtggaaaatattatctactgcccttgagtcaaggactctgatgtatatcgtggtgaatatttatgcttactatgtca

SEQ ID NO: 791827 - DNA, 661 bp, Homo sapiens
ttttttctttatactttcttcttttctgcaactgataattaaagctataagaaaattaaattactattattattattagaaagctcccatgctagccagttctggttggatataggtcagctgtgtacaaatggacacactgtgaggctttgtgcaataatataaccactacttgagaccaaatgatgggtgatacatatcctaaacctctccctcatcatttttatggttaaattacaatgattgagcatcaagcttgcctaagatttgactactctacttctttgccttattttctgtatattaagttgcaggraaggtttttactttgcaatttatttttcctcttgaatagtgattatgtgaagttctaagcatcacaatgctgcagtgtataattcttcaaagcaggagaatcagagtgtagcaatggaatgcagaaaaaagcaatacgagaaaggattatttgtttgcatctgtaagaggataaagatggtttgaacatttgcttcatatggcactgatatgagcatacttacctcatttgaggtgaggtttccccagaagcagacagtgagaccagtgaatgcatgtagttgattttggaggtgatgctaggatgcactgataggaaaatgaggaagtgatcatgagaatggca

SEQ ID NO: 791828 - DNA, 612 bp, Homo sapiens
tcaagtgagaacaatcaaagggagaactacatcaaggatggcagaactggcattttaactcatcacttgatcttacgcctttgtttttttttttttttttttttaacatttcttcaccttgtgttttaaaattagaagtctgttctttcacaaaacaacaacaaagcaatgcaaagtaagtatctagcaaaaaaaatctgagaaattaaaacatcaaaagtgcatcttggggatcactttatccattatatcccaggtctacaatctctttcagagaaagacttaccttccttccatgatgtcctcagctcttctagaggttaggggctgaagacatttcagtgagtgtaggagggtgatgggtagtgttaarattaaaaacaactggttttgttgagatttggggagagaaaggtggcaagaagggagatgtactaatggctgcaacaacagtcaagccatcaggtacactgaggtacctgcaagtgatcctttgggaagcgccacagtgcatattccctaggtgaatggatgcagcagagcctcattcggtgctaatataagccttttgctatagctaatatgtcaacatattcctatattggcaagaag

SEQ ID NO: 791829 - DNA, 571 bp, Homo sapiens
tggacccagtagcagagaatgatgaagatgtggatgaagaagccccacaaatttcaccaaatcttcttcccactgggcatttgtgcctcaacccagttccaagagaaactgcaggaaatcctttaggaaaacagggaccagctccccagacatgtccacatgattgatcctcttctgccctgttttcctcccttcttccacactgggttccctgaaactctgttgcattctgctgagttccttctcgttctgaagccattgggtggatgtgacagcatctcctcctacacagkggaaccagtatgaatcccagcaaagatcagacaggatgttccagcccagaaaagccaagatcctgagcgcctgctgaggtcacacacagtaagagacaccccaagacaattctaagagggcagcatctggcctctccaccacagtgtggtacatcgcagcccttgggccagttggcaaacatcgcagccctgactgtgtgtcctctaacaggaagagaaaaactttctctcttctggacacttgcaaagactccagcaagcccagtgatctgtgaggt

SEQ ID NO: 791830 - DNA, 586 bp, Homo sapiens
ttgtcaattcgaagttgattacttttctgaaatagaaactctttgattgctcctattctcactgggacattgagtgtaagtgtgtgcatgttagaaatcagttttggttggttttgtccttttctctttgtttttgtggcaaacccggaaggcactgagcatcaattctggctagatggtagggaacaaaaaagtgtgttgtgagtgggagcctcaaaacagaaataatgactgtgctcctcatcccmaaatcccgaaacacttgaagagggctttgaagttcttcagagaatgaaataggaccccaaggcttttcaagaagagtcagagggcaccaaggccacagctccatgcctgtttccacgcaggagaggccagtcatcatttcatttagaagtgctatatcaccagagactaagaaaacttccagataaccacagaacctccaaaatatagttttaaataaatgaatatgtatccttaacagagtttccttcttctgcatatagagtgaataatttaataaagttgctgacagtgtgtgtaacctcagccctagctcccaggagtggcacttccatccttt

SEQ ID NO: 791831 - DNA, 595 bp, Homo sapiens
tgggtggatcacaagttcaagagattgagaccagcctggccaacatggcaaaaccccgtctctactaaaaatacaaaatatcagctgggcgtggtggcacgtgcctgtagtcccagctactcgggaggctgaggcaggagaatcacttgaacccgrgaggcagagattgcagtgagccgagatcgcgccattgcactccagcctggcgaccgagcgagactccgtctcaaaacaaaaacaaaaacaaaaaatactctgtccagtgccgagtgcagaatttttttaaaaataaaacaaaaacaaaaaacagcacgttcctgtgaagggtgttattgtctctgtccccgtcaccagctgctccccaacagactgtaatgtgatcaaagctgattgcaggtaattctgttcatacctgaaagcaaaaacatctagagaaggcgcagctgagttctcaagcttcccaggacaggactgaacaggggagtggattaaaagaggccaagccaagcatctcccgagcagctgtgggatcggggtgcggagccggacgcccttcccaccccactactgaccaaagcacatgatgtcatctttt

SEQ ID NO: 791832 - DNA, 503 bp, Homo sapiens
agttgccaaatatttgaatttttaaaaattaagtcacttatttataaagcttgtaagttgcagatgctactaaaagtagcagtccagacttgaaccaggcaagttcaagacacaggaagcaccacattccaagtagcctgctgtcagcaacaggaagagagtactacagcccagacctttaacccaggaaccatgtcttctttcagtagcagcctcttccttcctatcgtgggcaaccaggtcttcccatcagcaagtacttctaattgtgttaatctttggaaataaatatcagagccttagaaatagaactatctttggtgaatagggagctagcaaatgcataactgaaactgactgcccttaycttcagtgcatgaaagggaaaatgggtttcctctgcggtggccatggcaatcccgccataaacactgtgccttcatcagtgaatgtaggtttgtccttagctcggaagccctctctagtgtcctgagtggaaggac

SEQ ID NO: 791833 - DNA, 499 bp, Homo sapiens
tatattgaattcctctctccccacttcagccttaaaatattactagtgtctttgtaatttggcccaaatgtcaggaattaggaaggaagctcatgaaataaacgaatccagattttatgcagccgggcctgtcagcacacaaacccgaytgtgggcccaggcttttgtcattgtttcccctctttagactcgaagagtgaagtattttgatgatgctatttttaggggaaatctacatgggaaattgcttcatagtgataataaaaccttacatgtgcgaggaaagcttggtgtcaagtcccgtggcactcagatggttaacgccgtcgtgacgctcggatttggcggaatgcggttgctgagctagaaatctggaggattttcactgggatgggacaaaaaagtgtcaaactccggcattttgaatatgttgccaacaagcatacctttggatcttagggaaggagaaaggaagatgaaaacaatgctaaggcctttt

SEQ ID NO: 791834 - DNA, 499 bp, Homo sapiens
tatattgaattcctctctccccacttcagccttaaaatattactagtgtctttgtaatttggcccaaatgtcaggaattaggaaggaagctcatgaaataaacgaatccagattttatgcagccgggcctgtcagcacacaaacccgattgtggrcccaggcttttgtcattgtttcccctctttagactcgaagagtgaagtattttgatgatgctatttttaggggaaatctacatgggaaattgcttcatagtgataataaaaccttacatgtgcgaggaaagcttggtgtcaagtcccgtggcactcagatggttaacgccgtcgtgacgctcggatttggcggaatgcggttgctgagctagaaatctggaggattttcactgggatgggacaaaaaagtgtcaaactccggcattttgaatatgttgccaacaagcatacctttggatcttagggaaggagaaaggaagatgaaaacaatgctaaggcctttt

SEQ ID NO: 791835 - DNA, 620 bp, Homo sapiens
atatattgaattcctctctccccacttcagccttaaaatattactagtgtctttgtaatttggcccaaatgtcaggaattaggaaggaagctcatgaaataaacgaatccagattttatgcagccgggcctgtcagcacacaaacccgattgtgggcccaggcttttgtcattgtttccyctctttagactcgaagagtgaagtattttgatgatgctatttttaggggaaatctacatgggaaattgcttcatagtgataataaaaccttacatgtgcgaggaaagcttggtgtcaagtcccgtggcactcagatggttaacgccgtcgtgacgctcggatttggcggaatgcggttgctgagctagaaatctggaggattttcactgggatgggacaaaaaagtgtcaaactccggcattttgaatatgttgccaacaagcatacctttggatcttagggaaggagaaaggaagatgaaaacaatgctaaggccttttctcatctattctaaaaaaaacactacttttgttgagtaaagagtaagtatatagatttggttcctctcaaaaatgaagctatagtttgactaattaaaggggaaaacttctaggagcgtt

SEQ ID NO: 791836 - DNA, 498 bp, Homo sapiens
tatattgaattcctctctccccacttcagccttaaaatattactagtgtctttgtaatttggcccaaatatcaggaattaggaaggaagctcatgaaataaacgaatccagattttatgcagccgggcctgtcagcacacaaacccgaytgtgggcccaggcttttgtcattgtttcctctctttagactcgaagagtgaagtattttgatgatgctatttttaggggaaatctacatgggaaattgcttcatagtgataataaaaccttacatgtgcgaggaaagcttggtgtcaagtcccgtggcactcagatggttaacgccgtcgtgacgctcggatttggcggaatgcggttgctgagctagaaatctggaggattttcactgggatgggacaaaaaagtgtcaaactccggcattttgaatatgttgccaacaagcatacctttggatcttagggaaggagaaaggaagatgaaaacaatgctaaggccttt

SEQ ID NO: 791837 - DNA, 498 bp, Homo sapiens
tatattgaattcctctctccccacttcagccttaaaatattactagtgtctttgtaatttggcccaaatatcaggaattaggaaggaagctcatgaaataaacgaatccagattttatgcagccgggcctgtcagcacacaaacccgattgtggrcccaggcttttgtcattgtttcctctctttagactcgaagagtgaagtattttgatgatgctatttttaggggaaatctacatgggaaattgcttcatagtgataataaaaccttacatgtgcgaggaaagcttggtgtcaagtcccgtggcactcagatggttaacgccgtcgtgacgctcggatttggcggaatgcggttgctgagctagaaatctggaggattttcactgggatgggacaaaaaagtgtcaaactccggcattttgaatatgttgccaacaagcatacctttggatcttagggaaggagaaaggaagatgaaaacaatgctaaggccttt

SEQ ID NO: 791838 - DNA, 650 bp, Homo sapiens
atgcatagccagtttcctgaggcttgcatggatatattgaattcctctctccccacttcagccttaaaatattactagtgtctttgtaatttggcccaaatatcaggaattaggaaggaagctcatgaaataaacgaatccagattttatgcagccgggcctgtcagcacacaaacccgattgtgggcccaggcttttgtcattgtttccyctctttagactcgaagagtgaagtattttgatgatgctatttttaggggaaatctacatgggaaattgcttcatagtgataataaaaccttacatgtgcgaggaaagcttggtgtcaagtcccgtggcactcagatggttaacgccgtcgtgacgctcggatttggcggaatgcggttgctgagctagaaatctggaggattttcactgggatgggacaaaaaagtgtcaaactccggcattttgaatatgttgccaacaagcatacctttggatcttagggaaggagaaaggaagatgaaaacaatgctaaggccttttctcatctattctaaaaaaaacactacttttgttgagtaaagagtaagtatatagatttggttcctctcaaaaatgaagctatagtttgactaattaaaggggaaaacttctaggagcgt

SEQ ID NO: 791839 - DNA, 597 bp, Homo sapiens
attaccccagggcacatgctagttagcgacagagtggagcttagaactcaggtcatctgctgtaaaagccctgatcttaaccccacagcctctttgacaactccgcccctctcccagtcctgtgctagatgacacagagcagatgataacactgctgtctaagatctgggaggaggaaggagaaatagggctgggaggaggaagaagttaacctttaaagcaacatacaataaccwcacacggaagcactgagcactgaaaatccaattgcctgtggccaggctgcaagagatgtggcttgacagccatctacagaaaaagtgctgggcattttcagagagtgaccaccagaatggagctgaacctccaaaatcaagttttagaaatagatttcaatctcccaaatgtaaaagttcttggtttgacctcctccacccctagaaaattcctaagtaatgactgaagagcatgatattttgggtgtgctgatcaataaaaacaaaacaagggtcataccatccaaggacaaagtgagaccatttgacaagtgtcttatagtcacactgcttataatggaggaataaactgcttgctggt

SEQ ID NO: 791840 - DNA, 597 bp, Homo sapiens
attaccccagggcacatgctagttagcgacagagtggagcttagaactcaggtcatctgctgtaaaagccctgatcttaaccccacagcctctttgacaactccgcccctctcccagtcctgtgctagatgacacagagcagatgataacactgctgtctaagatctgggaggaggaaggagaaatagggctgggaggaggaagaagttaacctttaaagcaacatacaataacctcacacggaagcactgagcactgaaaawccaattgcctgtggccaggctgcaagagatgtggcttgacagccatctacagaaaaagtgctgggcattttcagagagtgaccaccagaatggagctgaacctccaaaatcaagttttagaaatagatttcaatctcccaaatgtaaaagttcttggtttgacctcctccacccctagaaaattcctaagtaatgactgaagagcatgatattttgggtgtgctgatcaataaaaacaaaacaagggtcataccatccaaggacaaagtgagaccatttgacaagtgtcttatagtcacactgcttataatggaggaataaactgcttgctggt

SEQ ID NO: 791841 - DNA, 568 bp, Homo sapiens
catgtccttcctgccgccttgtgaagaaggtgcttacttctcctttgccttctgccatgattgtaagtttcctgaggcctccccagccatgctgaactgtgagccaattaaacctcttttctttataagttactcagtcttgggcagttatttttagcagtgtaagaagagactaatacagtagggatctgtctggattagtgccatgtccacagcttctagaatagtgcctggaacccatggttgttcaataacatttgcaagatgggttgatggttgaatgagcaagagggaagggaaggctcaggagaattttttgtggggaccaagattcaagttwggatgtgattggcctccagatggagatgccagtgtggccaactggtaacatatgagtctggagctcagagaaatggtccagggttaacagagaaatggaatcagttctgaagccaaaggagtggatgagaatgacctgtgagaaggttagacagggaagaggacctaggccttcatcctggggcagcccaggtggacattcagatgcaggaggtgggacctgccagag

SEQ ID NO: 791842 - DNA, 536 bp, Homo sapiens
acaaaaaaaaactgtaacaagtaaagcaggacgagatggaagcagggggagagggaggaagagagattgctctattgatctcaaatggccgtctcagaagtgctgtggatgggacaggcagcatacgcttgtttgggagcagatgctcacagggtccttggaagccagctccgtatttgtcctcatggtgcgttctcccatgaaagtaattgctccatcctacccttgaggactccggggctcgggacgatagaggcctgcagacmaccctgtgatgaagggagaaggaggctcaggccaggaggaggaagtgctgagggggtttccctcccagctggtactggctgtgcggggccctctgattagtcccaggaaggtccagggcggccgtggtgtttggcctgcaagggaaggatcaggaagcgtccgttgctgttcttcctggaagcatctcatggtgactgttgcgggcatgggcaaagctcaggccacgtctccctgggtgtctgtggggagcaggaaagggcatcagatgt

SEQ ID NO: 791843 - DNA, 636 bp, Homo sapiens
tctcattaacctccaaccctgctctctccctggctcccaggacaccatccctgcctttcttcctgccatcctggcccctcttccctgacccgcccctaaaggtgagcaggcccaagcttcctggctccttcctttgctggctctgtgctctctcttgaggctcaacctcacatctgtccccatacgtggatcatcacaaatctccatccctggctccagctctttctgatgctaaaaccccacatgtccatttgtccactgtccctgcagaggccctgatgcaccctgagttcagcagagccaaagctaaccttgtcctctttcccaggaaacccgctcaacttcccagatcctcatactcagctaatgtcatctccrtgtttccacatcaaagcccaggcagtcccctcctccaacatcacagccccactcattcagaaaagatgtgccatgatgtatgtgtcaggcatggcagggagagtttgccctcaagacccccagagtctggtgtcggcatctataacagtgtcactgttgtttcagaaaacgtcaggcacttctgcctctggccatgatgaagcgatggtagctgccctcccactaaaatcaaacgagagactggacaaaatgaatgag

SEQ ID NO: 791844 - DNA, 514 bp, Homo sapiens
atgactaagtcctcaaaagcaattacaacaaaaccaaaaattgataagtggggcctagttaaactaaagagctcctgcacaacaaaagaaactatcaatgagtaaacagacaacctacagaatggcagaaagtatttacaaactatgtgtccaacaaaggtctaatatccagaatctataaagaacttaacaatcaaaaaccaaataagcccattaaaaaatgggcaaaygacatgaacagacacttctcaacagaaaacatgcaagtggctaacaaacatgaaaaaatgctcatcatcagtaatcctcagataaatggaaatgaaaactacaatgagatataccatgtcacaccaattaggatggtattattaaaaaggcaaaaaataacagatgcttgtgaggctgtggagaaaagggagcatttatgtactgttggtgggaatgtaaattagctcagccattgtggaaagcagtatggtgatttctctaagatcttaaaacagggctacca

SEQ ID NO: 791845 - DNA, 534 bp, Homo sapiens
gtggcatatcacatttattgacttgcgtatgttaaaccgtccttgcatccctgatatgaaacccacttgattatggattatctttttgatgtggtgttggattcagttagctagtactttgttaaggattttagcatctatattcatcaaggatattggtctgtagttttgtttgttggttatgtcctttcctggttttggtgtagggtgatgctggcttcatagaatgaattagggagggttccttctttctctatcttgtggaataacgtcaaaaggattggtaccaattcttctttgaatgtctggtagaattctgctgtgaatctgtmtggtcctggacttttttttattgataatttttaaactaccatttcaatctggctgcttgttattggttttttcagagtatctaattcttcctgatttaaactaggagggttgtatttttccagtaatttatctgtctcttctaggttttctagtttatgtgtgtaaaggtgtccacaagtagctttgaatgatcttttgtct

SEQ ID NO: 791846 - DNA, 653 bp, Homo sapiens
actgtatctttccttcatatatgatgcttagtttcgctggatacaaaattcttggccgataattgttttgtttgaggagggctgaagatatgtccccagtcccttctagcttatagagtttctgctgagaaatctgctgttaatctgataagttttcctttataggttacctggagcttctgtctcacagctcttaagattccttccttccaaatggacttaactggtataaacagaacacttcatccaacaaccacagactacacattctattcaacagtgcctggaactttctccaagatagaccatamaataggccataaaacaaaccttaataaatttaaggaagtaatgctcttaactttggataacctgatgacagtgtgcctaggtgaagatcttttttgcgatgaatttctgaggtagtctttgtgcttcttgtatgttggtgtctaggtctctcacaaggctggggaagttttccttgattattcccccaaatatgttttccaggcttttagaatccttttcttcctcaggaacaccgattattcttaggtttagtcatttaacatagtcccagagttcttggaggctttgttcatattttcttattctttttgtcttggttggattgggttaatttaaagacc

SEQ ID NO: 791847 - DNA, 693 bp, Homo sapiens
aaataatgggtcacagacttgaggcagaaggatgtatagtaggaacagatctagagaagaagccaaaactcttgggtaaaaacactaatatgattgcatagttacatgttataggagagattgtgttctctgaccccctgtattcaaatattgaactcctaacctcyagtacctaagaatgttactttatttgcaaacggagttgttataattaattaagatgaggtcatgctggagtagagtgtgcctctaatccgttatgactggtatctttataaaaagggggcatttggacacacacacacgcgcgcacacacacacacacacacacacacacacacacgggagaatgccatgtgaagactggagttatgctgtcataaactaaggaacatcaagagctaccagaagctggaagacacaaggaagaatcctttccctacaggcttcatagggaatatggccctgtcaacaccttgttctgggacatctagcctccagagttatgagacaatacatatctattgtttaagccactcagtagtactttgttatggcagccctagcaaactactactttatgcaaaggctgctaactcttggataatgcctgctatagcattaatcaagcgtcacatttgttatgtgatggacaaagactgtggatggtggatccatgacttgcccttggaa

SEQ ID NO: 791848 - DNA, 693 bp, Homo sapiens
aaataatgggtcacagacttgaggcagaaggatgtatagtaggaacagatctagagaagaagccaaaactcttgggtaaaaacactaatatgattgcatagttacatgttataggagagattgtgttctctgaccccctgtattcaaatattgaactcctaacctctagtacctaagaatgttactttatttgcaaacggagttgttataattaattaagatgaggtcatgctggagtagagtgtgcctctaatccgttatgactggtatctttataaaaaggggrcatttggacacacacacacgcgcgcacacacacacacacacacacacacacacacacgggagaatgccatgtgaagactggagttatgctgtcataaactaaggaacatcaagagctaccagaagctggaagacacaaggaagaatcctttccctacaggcttcatagggaatatggccctgtcaacaccttgttctgggacatctagcctccagagttatgagacaatacatatctattgtttaagccactcagtagtactttgttatggcagccctagcaaactactactttatgcaaaggctgctaactcttggataatgcctgctatagcattaatcaagcgtcacatttgttatgtgatggacaaagactgtggatggtggatccatgacttgcccttggaa

SEQ ID NO: 791849 - DNA, 574 bp, Homo sapiens
tgacattttggggccactgagaagcaggtaccatttcacagatgtggtgaggggtggacattaataagaaatactatttttttaactacttattcattggctgaataaatacgtattgagtgccatcttggtggaagacactgggccatgttctgtgaggggatagagagacgtaagaagatctgtgctctcatatttgttggggtttattttagggattttaactgtatacattcctccttgagattctgaactagttgagaaataaatacagaattaagtttaggataaaatatatcagttttgttgctggccaggctgtaactacatggctccatgtagttattaacacaatctagctccctaattttactcatagtcttactcagtagayacaagtggcagacactgaagccctatctcggtgagattactctccactgggagcacacataatgcaagtaggttggtcccagaaagagatctcagaagggatcacaagtctttgagtctcattgttgagatagatggtcactctgtttcccttggaagaggagtgagcgggagtagaggg

SEQ ID NO: 791850 - DNA, 626 bp, Homo sapiens
gagggagcaagctgactcccagacactctgaaaaccaaaattggatcaaaccaacccatctgtgtgcataaaaaagtggccaccttggcacactctgtcaaagctcaggatgctctattttaatagcttattttgacctaaaatagtttttcctttaaacataaacttttatttgggcttttcaaatttcctgctttttctatgtatgcaagtatccttagagtcaatcttgtatgtgcttaaggagtgcacaggttaaaataaaaattctactgatatattcatctattttctactgtaatcagaatggcaggtgccatgatttaggatttttttggtttcrccatttaaataaaagtataaaacacttaaataatacaaataatagtgggaaagggacacaattccttctctatatgcttgagcatagaataataaacccagcaaatgtctagcattttagaatttacagggtacctttaaatgtatcatctcatttaactctcacaaaactttatggggatggtattattaatcctattatgtcaataaagtgactgaaattcagagaagttaaatgacttgcttaagggtcttttagctaactgatagacttgagatgaaaa

SEQ ID NO: 791851 - DNA, 627 bp, Homo sapiens
tactgtcaatgcctcagtaaatgtacatgtcccctttgatattattcctaatatccagcccagtatcgcaaagggtgtacaccccctttattatattgttccaaatatgcagggggaaagaagatgttatttctcccaaaatcacagggaatgtacaacacctctgagatattgtttataatatccagagggggagaggatgatatcactcccaatatcgcatggtgtgtacactccctcatgatattgttcccaatattccggtggcggggagaggatgatattacttccaatattgaagtgggtatacacctttcctgtgatattgttcctaatatccagaggagagaagatgatattactcccaatatcgcaggggatgtatagccttcttgtgatattgttcctaataaccagggtgggagacaacaatattacttacaatatcaaaggggctgtacagccccrctgtgatgttgtttccaatatccaggacgtgagaggataatattaatcccaatatcgcagcaggggtacacgtaccttgatattgttcctggtgtccagtggggaagaagatgctattgctcctaatatcctaatatccccctttgatatcgttaataa

SEQ ID NO: 791852 - DNA, 563 bp, Homo sapiens
atctgcccgcttcggccttccaaagtgctagattacaggtgtgagccactgggcctggcctggcttttgtttttttaattgaagttttggtattttttctcaaagatttgtatgaatattctgtacatcaagaaaagtaatccttgaatgtcatactagttgattgacttagttttgtattgtaaagtgttgagaataatctttaatcacccggacaattaatctcttgcaagttcaggagacttcgtgttcattctgattataatatatgtggtgtcgagtttcattaagatgggcagttttcatggtccatcttaatggaaatgtagatctgtgttagtttaagtttatgatttatawctgaaagcaaaacaggatgaatgcattaaaattataagataacacatggctgtcaatctagcaacatgtggtactagggatgaagagaagtataaatcgttatacttatgttacaaatgctgttgatacagacaggaggcagggaaatattaggtagaaaaggtccgggtccctggtgagggatccaccctcaagcgtggacc

SEQ ID NO: 791853 - DNA, 563 bp, Homo sapiens
atctgcccgcttcggccttccaaagtgctagattacaggtgtgagccactgggcctggcctggcttttgtttttttaattgaagttttggtattttttctcaaagatttgtatgaatattctgtacatcaagaaaagtaatccttgaatgtcatactagttgattgacttagttttgtattgtaaagtgttgagaataatctttaatcacccggacaattaatctcttgcaagttcaggagacttcgtgttcattctgattataatatatgtggtgtcgagtttcattaagatgggcagttttcatggtccatcttaatggaaatgtagatctgtgttagtttaagtttatgatttatatctgaaagcaaaacagratgaatgcattaaaattataagataacacatggctgtcaatctagcaacatgtggtactagggatgaagagaagtataaatcgttatacttatgttacaaatgctgttgatacagacaggaggcagggaaatattaggtagaaaaggtccgggtccctggtgagggatccaccctcaagcgtggacc

SEQ ID NO: 791854 - DNA, 674 bp, Homo sapiens
gtgatgctgaagtttgtgcttctaaggatcctgtcactccagtagtgaatatagtactcgataagtagttttataagccttgcctctctctctcccttccctcttttggaatccccagtactaattgtttccatctttatgtctgtgtacccartgtttagcttccacttataagtgagaacaagcagtatttggttttctgtttctgtgttaatatgcttagaataacggcctccagctacatccatgttgctgcaaaggacattattttgttcttttttatggctgcatgtattccatggtgtgtatgtaccacacttgctttatctaatctatcatcgataggcacctaggttgataccacgagtttgctatcgtgaatagggctgtgataaacatgtgagtgcaggtgtgtttttggtagaaatatgtatttcccattgggtatatactcagtaatgggattgctgggtcgaatggtaattctgtctttagtttttttgagaaatctccaaactgctttctacaaaagcagaactcatttgcatttccaccagtgtataagtgttcctttttctctgcaacttctccaacatttgctattttttgacttcttagtaatacccattctgactgatatctcattgtggttttgaattgcatctctttgatga

SEQ ID NO: 791855 - DNA, 674 bp, Homo sapiens
gtgatgctgaagtttgtgcttctaaggatcctgtcactccagtagtgaatatagtactcgataagtagttttataagccttgcctctctctctcccttccctcttttggaatccccagtactaattgtttccatctttatgtctgtgtacccagtgtttagcttccacttataagtgagaacaagcagtatttggttttctgtttctgtgttaatatgcttagaataacggcctccagctacatccatgttgctgcaaaggacattattttgttcttttttatggctgcatgtattccatggtgtgtatgtaccacacttgctttatctaatctatcatcgataggcayctaggttgataccacgagtttgctatcgtgaatagggctgtgataaacatgtgagtgcaggtgtgtttttggtagaaatatgtatttcccattgggtatatactcagtaatgggattgctgggtcgaatggtaattctgtctttagtttttttgagaaatctccaaactgctttctacaaaagcagaactcatttgcatttccaccagtgtataagtgttcctttttctctgcaacttctccaacatttgctattttttgacttcttagtaatacccattctgactgatatctcattgtggttttgaattgcatctctttgatga

SEQ ID NO: 791856 - DNA, 579 bp, Homo sapiens
catatgataatcatgttagtaattttttctttcagttggaagaactccctttagcatttactgtatgacaggtctggctgtgataaatttcctcagcttttgtttgacttggagagtgtttttttctctccttcatttctgaagaatagcttttctgagtagcmcattattcttggttggcattttcttcccttcattaatctttgtaaatcatctcactccctcttggcctgtaagatttctgctgagaagtctgcttccagctgtatttgctctttcttatatattatttaattctttcctcttgcttctttctatagcctgtctttatctttgaccattgagagtttgattataatatttaataagaatattaaatgtttttatttgggttgaatataattggtgatcttttaacttcctgtacctggaaagattatctatatctctctccaggtttagaaagattttggttattatttctttggataagctttgtactcttttgcctcactcagttttttctttaactccaataacccaaatattagccatatagggtttcatagatcccataaa

SEQ ID NO: 791857 - DNA, 509 bp, Homo sapiens
ccccaacagactactttgacctcatcttctaatgctctcccctttgctttatccattttggacattttacgggccacatgtacaacagctctgtgccttagagccattgtacttgctcttccctctgctttcaaaattctctcacaaagagttgaaggactggatctttcactccatttggatatttcccagtttatttctcagtggtgtcttctctagccagcrtatttaacacagaatcccccatccctgccacctgctaaaccacaccttatattgattttctgcttttctttttcttcacagctatacatcttattgtccatataaattattttctgcccccatcctcccaacacactcaaacccacatatatgcttggaaagtaaattccatgaggacagggcatattgtttttgtattctgtttcatttgtttgtttgttttattttcaatcccagagttttgaaaagtgtctctaacatcaaaggttctcaataactatttg

SEQ ID NO: 791858 - DNA, 624 bp, Homo sapiens
gacgagacacacaataagaaattatttagcttggcaaggatatagagttaaagaaaattttatgctgttgaaagaaatcaacatattcatatcatccacagcaaaattcttaccccagatcacccagcaaatgttgaattacgtaactgaccttttggttgacattatcccacatagttaaaatattcttccaaatataatttctytgcaagtgtgtgcacatgcattcatataagtgtataaatcaatttgattgccctggcaaataaatatacagtcatgtgtcacttatggtgcagatacatttggagaaatctatcattaggtgattttgtccttgtacaaacattatagggtgttacttacatacacctagaaggtgtagcctactacacatctagactatatggtatagcccatggcttctaggctataaacctgtacagcatgttactgtactgaatactgtaggcaattgtaacacaatggtaagtatttgtatatctaaaaacatctaaccataaaaaggaacagtaaaaatgtggtataaaagataaaaaatgatacacctgtatagggcacttaccatgaagggtacttgcaggacaggaagttggtttgggt

SEQ ID NO: 791859 - DNA, 632 bp, Homo sapiens
tgtacaataatgtaaaatctgcacaatgttatgatcatatattaatattcactaaatcaatcatggaaatatttaataatacatgtgaactgacttagaagaattagaagtggggctttggggggaggatttttaaattgatatttgttaaactacaaattattatagatggtttttgccaacttgaaaaattaatcactcaggacctgaaagcttatctacttaaagtayacctgaaccataacacaatagtcctacagaaattctaactttacaaaattttccttccaagtagagcaaatccactcagctagaagtactgattaactgtttcctatgtgcaaagccctctgcttagatctctgggaaacacagaagaggaaacacaaagaggaataaaagaccgtcttcactctcaagcaagaagaaccactaatgtgagataaacatttactttaacaccaagcactgtgctaagtactcttgactgcattatctcaattaaccccacaacaattttgcaaggtggatagaatcttttaaaaaataataataataactagagatgaggtctcactatgttgtccaggctggtctcaaactcctgggctcaagctatcctccttggcttc

SEQ ID NO: 791860 - DNA, 587 bp, Homo sapiens
cagattatttcgtcacccaggtactaagcttactatccaatagttatttttcctgatcctcttccttctcccaccctccaccctcaagtaggtcccagtgtctgttgtccccttctttgtgtccatgagttctcatcgtttagctcccacttataagtgagaacttgtggtatttggttttctgttctygcgttagtttgctaaggataatggcctcctgctctatccatgtttctgcaaaggacatgatctcactcttttttatggccgcatggtattccatgatgtatatgtactacatggtctttatccaatccaccattgatagacatttacgttgattccatgcctttgctattgtgaatagtgctacaatcaacaaatgtatgcatgtgtctttatgatagaatgatttatttatattcctttgggtatatacccaataatgggatttctgggtcaaatggttctaagtttgtttgttttttttgtttttgtttttgagacagagtattgctctgtcgcccaggctagagtgtagtggtgcaatctcagctcacagcaacctccgcatcctgtgttcaagt

SEQ ID NO: 791861 - DNA, 627 bp, Homo sapiens
gctggcaggaattcaaaatggtttagccactttggaaaatagtttggcagtttcttataaagttaaacaaattcgtggcacatgacccagcagtcccacccctaggtatttggcccacataaactaaaacatgtgtccacatacagaaaagtctaaaagtgaatgtttacagcagctttattcataatcaccaacaactggaaacaacccaaatgaccaccaactggtgaacagatcgatcttttcaaaatgttgtacatccataaaakggaagcctgctctagaataaaaaagaactaagtgttgatgcacgcaacaacacagatgcatctcaaaagcagtatcccaagggaaggggacggagacaaaaggctaagtcctgaatgattccatttctatggcattcaggaaaaggctaatctgtacagatggaaaacagataagcgtttactaggtggtgggtggaggtaggtgactgcaaagggacctaagggaactttttgtgaattaacttgattgtggttgtacttagatgactgtataggttgtcaatgccataaaatgtatgttgaaagtgatgcttttgactgcatgcaaatataaataatacctcaataaatctgattt

SEQ ID NO: 791862 - DNA, 593 bp, Homo sapiens
cttacgtagatgtagcaagaagcattatttaacatttagaaaccaacctgtggtgtataactaggaaattcagagctgtacctacttaagaccagattaacttctgtctaaagtctttgtaggaactgtctttttaacagtctccattactccaagatgtttttagttactcttgtattatgatgttagaaaaccaaacccaagaaattcatctctgttagattacctgcagtacctataaatgtgggtaaattcctttgttttcaaggtctcaaaagtcktctgaaaccatgggcctgcaagaaagcgaccttacttcctgtaaggctgggtctctataaaccatgaaatagacaccagaacagcttcctaggaggctttttagcattggtttcatatgtgaagtacaactcttgctttttaatggttgactagtcatacatatttaaataaatttattggcactctaaaaaaataatttggaacttgtcaattaatttgtaaaattaattgtctgttaaaaaggttttattgaatctatgtaggtaactacattgccactgaaagaaaagggattcggtaaaaataattgt

SEQ ID NO: 791863 - DNA, 547 bp, Homo sapiens
tacaattttaaagcaaaaaaagagaaagcattgaaattaatgcaagaagtttacggtcactcagtgagtaaattaaaaacaagtgaggacctgtaatcccagcactctgggaggccaaggtgggcggatcacctgaggtctggagttygagaccagcctgaccaacatggagaaaccccgtctctactaaaaatagaaaattagccgggcgtggtggcacatgcctgtaatcccaggtactctggaggctgaggcaggagaatcgcttgaacctgggaggtggaggttgctgtgaaccaagattatgccattgcactccagcctgggcaacaagagcaaaactccatctcaaaaaaaacaaaaaaacaaaaaaacaagtgatgatacgtgtacacaaaggtgccacagccaacagagttagaatcatccccttaggggtgatggggaagcaggcatattcttcttcagggctggaaaaatgtccttctgagctagacttcttcaggccaactgagactaatctatcagattaaacttactaaacatt

SEQ ID NO: 791864 - DNA, 639 bp, Homo sapiens
aattgcttgaacctgggaggcggaggttgcagtgagccaagatcaggctactgtactctagcctgggtgacagagcaaaactctgtctcaaaaaaaaaaaaaatgcaaatgatctgaatagacatttcmctaagaagacataaaaatggtcaagaaatatgtgaaaatgtgctcacatctctaaccatcagagaattgcaaatcaaaactacaatgaggtatcatctcgccccagttcggatggctgttatcaaaaagacaaaaaatataaaatgctggtgaggatgcaaagaaaagggaattcttatacattgttggtggaaatgtaaactagtatagccactatggagaacagcatggaggttcctcaaaaaactacaaacagaactacaatatgatccagcaattccactactggaatttatccaaagcaaaggaaatcattatattgaagagacatctgcacctccacatttattgcatcagtattcacaatagccaagatgtgagatcaacctaggtgtccaaaaccagatgaatggataagaaaaattatacacacacacacacacacacacacacacacacacacacacacacacactggaatactattcagtcatgaaaaataatgaaatc

SEQ ID NO: 791865 - DNA, 614 bp, Homo sapiens
gttttaaacgattccgagttgaatattcagtgctgggaatggtctgtggaatcaggcactttcctacactgtaagtggaaatgtaaactgtgatcacctttgtccaaggcagcttggcagcatatatcctgacacacccctgggtcctgtacctggcatagattacatatgggataattatttgttcacttagtgcaggattagtttcacaaacggaaagagcatggactttgctatgagacagagagggctttcattcctggctttgccatttatttactaaataacctytaagcaattgactgtaacttccctgtgttccaacttcttatctaaaaaaaaatggagataacttcctaccttgtaggctgtgaggaatactgaaacaatacatgaagtgtttcatctaggctaccaacttataagtgctcaatgaagaaaagactttattctccccatatgattttcctgacaacccaagagaaatccatttcctcagaaaactttatcagcttctttttacgttctccttcctcctcatccaaccttctcagaattgcccttaggctcttgtcttttgccaacacagtttattagactcttgctactgagga

SEQ ID NO: 791866 - DNA, 643 bp, Homo sapiens; identical to SEQ ID NO: 782664

SEQ ID NO: 791867 - DNA, 643 bp, Homo sapiens; identical to SEQ ID NO: 782665

SEQ ID NO: 791868 - DNA, 493 bp, Homo sapiens
gtttcttaatcctgagttctaatttgattgcactgtggtctgagagactgtttgttatgatttttgttatttcgcatttgcgaggagtgttttacttccaattatgtggtcagttttagaatatgtgtgatgaggtgctgaaaagaatgtatattctgttgatttgggttggaaagttctgtaattstctattaggtctgcttggtccagagctgagttcaagtcctgaatatccttgttaattttctgtcttgttgatatgtctaatattgacactggggtgttaaagtctcctgctactattgtttgcgagtctaagtgcctttctaggtctctaagaacttgctttatgaatctgggtgctcctgtattgggtgcatatttatttaggatagttagctcttcttgttgtgttgatccctttacctttatgtaatccccttgtctcttttgatctttgtgggtttaaagtatttcttattagaggctagga

SEQ ID NO: 791869 - DNA, 617 bp, Homo sapiens
ctaatattagcattcttcggttgattttgcctacagtaattcatactgtaatattctaatggtgattttctaattcctcactccttcttatatttattaattggaattatttataagaaacagttgtttttacacctccatttattttattatytgtttataaaaacagactaatagatatttattatattctttgggtattagtcatattttacctttattttgtttgtcgctcaaattgttccaactttggccattagaatctctttcagattggtccttgtgacctttcaacattcctgacccatccttttgttgttgttgttgttgttgagcatttctttttacattcatcaccacaagatgcatcaggtgcccattttctgtttttccttctccagccccagaatcaaccagtcagtcatttattggagaatatctttcaaaaccataatctatgccataaatgtgcttgctattgagactatcactacttctagcccctcttgatgcagaacaggtgagctccaaattggggcttagcctatgacgattcttggatttccaagaaatgattcagtggtgatctgttgttagggtagaagaacatctttatt

SEQ ID NO: 791870 - DNA, 657 bp, Homo sapiens
gcctctcgcgttggtggcggcgcagtatgcgctgctgttcactcttcggatcatccatgatgttgaatggcaagcgggagttgaaatttgctggcagttcaagtaccgaacagaccagaagtcctcagcctgtcctaacggtcgctctctttcacctcaccggctctaaccgccgctctaggctcacctcagcctccgcttcccctcccccattcgcattcttctctgcctttggtcactgtgtctccatggccacgcccccgcaagtkctaggccacttgctgggccacccgcaaatgcccagtgctaggattggctgttgggagaccggaagtatgagcccattggaccccacagcaaaggtttttggcgggattcaaatatggccttcctgcaatgtgtgtggcagttgggcctgtagagtctttcgctgattgagagccgacttcatttccaagtctgcacacaatgcaggcagtagccatgcctgacagccacatgacagatactacaccgctgaatgtgctctaaccctggacttggcattgcccctactgttgaggaagcagtgcgtttttctccagtctttcaggtcccttcaccagggaaccattaacttgtgcatcagaacaaggacatttccttacattcctgcaa

SEQ ID NO: 791871 - DNA, 624 bp, Homo sapiens
gctccatgacatttgtctgggcaatgatttcttggatcagactctaaagacacaagcaacaaatgctaacgtagacaaatggaattgcaccaaactaaaaagcttctgcaaagaaatggaaacaattaacacagtgaggggacaacccacggattgggtaaaaacattggcaaaccataaatctgataaggggctgatatccaaaatatagaagtaactcaaacaactaaataacaagaaaacaaataacccaagtaaaaaatgggtaagaaaatatgagcaaacatttctccaaaaaaagagacactggaatgtgtgyacttcagaaagagagagtgcagcaattgtgagacactgcattgaactccgtgctaccctgtcacatggaagaaagcaaaatcaggctgaactcagctaaggacaacccacacagggagcatttaaaccagccctagctagaggggaatcacacatcctagttctaagccttgacactgcaggctaaagtgctctggatccctaaataaacttgaagggcactctaagccacaaggactgcaactcttatattagtcctagtgttgaactgggctcagagccagtgaatttgggaggcatgcaacc

SEQ ID NO: 791872 - DNA, 614 bp, Homo sapiens
agtaatgaactgaggcgtagaagtgagttcccacccttctgatctacatgttattccagtcctcaaaatatcagatcccgtaatgaaggcttatgtggaacaagattttgtaatcagggatggggactgcatacctgtagcctcaactttcatctccaggaagtctgccttgagaactgtggataaagaaagacgtttcactaagattctagaaatcaggactggaaaggtaaattgggggaatgggggacamttctaggccagtgctaaagaggccatttgaaaaatggagaagtgattcagcccagatgtttcaaaacatttagctccatgcttatagttggggctccttctctggcaggcttaaagagatgtgaagacatctttcaggtgccagaacaattctctgagtaccagactatgtgaagcttggagaacccagggaagctggctgcagaccacgaactacattctgtgatgatctctaacagggataagggtgaggacacagacaagtaccatgtgaaagatgaatcctcctttgcctagaagaccaaaccaaccttgtccagcctcttgatgtgcttggattagttctaaattacccatgtctg

SEQ ID NO: 791873 - DNA, 601 bp, Homo sapiens
tatactatgagtgctcacctgatttttggttctcatgaaggtgctttttttgtgtagatacttgttaaatttgtgtccttcttgttgtgaagatcggtagagccttctattctaccatcttgctctgcctcctgattctgaagcttgattcctttttctctttgtaacttcaaaaatattgaactttcctcagggctcaattctgggccccttctacctcttctataaacaatcttcccaaggacttcttacacactcatggctttaaacagcccttttttttttgccaacaactcttatcggggatcctaccccattattcgtgtaggttctttctattttccctaagcgtyggccagcttgagaaataaagggacagagtacaaaagagagaaattttaaagctgggcatccgggggagacatcacatgtcggtaggttctgtgatgtcccacaagccacaaaaaccagcaagtttttattagggagtttcaaaaggggagggagtgtgcgaataggtgtgggtcagacatcaagtactttacaaggtaatagaatatcacaaggcaagtggaggcagggcgagatcacaggaccacag

SEQ ID NO: 791874 - DNA, 500 bp, Homo sapiens
tatatatttatatatatttatatatatgtagagagagagagagagggtgttgtcattctgcaggcagcaatgaagtagaaaatggtaggtcagtggggatgtgtgtgcctcagtgacatttcagttcttaattacttgtgtgtaactgcccatgtgcctaacttctctgtgccttaktttccttatttgtttaatgagggacttgttcccaactgactttgttcatcacaataatttgtcatcttaaatttacttttaattccagaaaaccgttactaattgaaatgcttactactgctctttttaattataggagaatattagttagctattgatacatggcaatagtatcataaatttagtggcttaaaacagcctgacgtttttatatcaacttctgtgggtcaaggatttgtgggcagcttaactgagtcctctgctttttgagtgtcagacaatatgagaacactaagaggtggggttcctggggccacctggag

SEQ ID NO: 791875 - DNA, 500 bp, Homo sapiens
tatatatttatatatatttatatatatgtagagagagagagagagggtgttgtcattctgcaggcagcaatgaagtagaaaatggtaggtcagtggggatgtgtgtgcctcagtgacatttcagttcttaattacttgtgtgtaactgcccatgtgcctaacttctctgtgccttagtttccttatttgtttaatgagggacttgttcccaactgactttgttcatcacaataatttgtcatcttaaatttacttttaattccagaaaaccrttactaattgaaatgcttactactgctctttttaattataggagaatattagttagctattgatacatggcaatagtatcataaatttagtggcttaaaacagcctgacgtttttatatcaacttctgtgggtcaaggatttgtgggcagcttaactgagtcctctgctttttgagtgtcagacaatatgagaacactaagaggtggggttcctggggccacctggag

SEQ ID NO: 791876 - DNA, 602 bp, Homo sapiens
gcaaaacttagaatatggtcctaagacaactaaaaagggccttgattcagctgtactcttgaattccaaaggcatgatatgcctgtgattttttttccttggtgccaaatcagctctgcttatcgactgctattttaatgaaacctcctggtaccagctcaggaaggatatttttattagatacgactgggcggattctcatgttgaaagcatttggtgtaaaacatgaactcattcagtcctcagatatccttccaaatatttcctttgaaattggaaaattaccaaggaacttgtgataagaagatgaaaaaaggaattaaaaagcagggatgacatgcttctcttctccccacaatcctgcatgggtggggcttttgggatttggaaatcaacaaaattagaaggttagttggtgagagacctggaattgggcaaccctgaccctggctgtgstcggtgggggtgggtcagatggtcagtattgttgtcttctgcttttctgtcttctctaacttcccctttggggcaggagtcacacagagaagataagaacaggtctgactcacataagtcaaccctattaattcatcaagcccctg

SEQ ID NO: 791877 - DNA, 491 bp, Homo sapiens
tttgacccactggctactatgttaatttccacatctttgtgaatttcccaaatttgcttccgttattgatttctgattccattccattgtggccagagaagatactttgtatgatttcagatattttaaaattgatggagacatatttgatgggctaatgcacagtctatcctagataatgttctatgtgtactggaaaagaatgtatagtctcctgttgttgagtggagtgttctacagatgtctgttaggtctagtyggtttctagtgttgcccaaatctaccttctctttctttaatgatcttctgtttagttgttgaatccattattaagtcaggtattgaagtctccaattattattgctgaattctctatttctccctccaattctgcctttttctgtttcatgtattttggagctttgttcttaggtgcatatgtgtttataattgctaaatcttcttgatggattaatgctgctattgttata

SEQ ID NO: 791878 - DNA, 612 bp, Homo sapiens
gctgctgaaaacgtggagaggctcacaggtacctaaccctgtatttcctctaggagaaatggttcagtattcactaactaaatgtttacattgactttacagagcataactaccatgaataacaagaattgactatatgtggtagttggaattttatcagcaggcraagggacattacttaggagctgggagcttggaatgaggtcccttcatgaggtctactggcatatgacactgtaggaatacactagagagtctcccattgtggtaaaataagttatccagaaccacaagcttttgctaattagagttcaagtttatactgctcacaaaggtttctaaaagttaattttaaaactaatcctgaaccagcaccacgcaagctctaagaagaggaaaaaaaaaatagcccataagaacacctctataaccagggcacataagggaatcccaaagaaacaactgccacccagaacttcacagttgaaaattataaaccacactaggaaaccaatatgagagccaggcagcagtcaaggcaaataagtgggttctcttctgtaagatctaggattatattacactccaaaaagtaatttttaaatatgaata

SEQ ID NO: 791879 - DNA, 625 bp, Homo sapiens
tatgtattgatggctgctgaaaacgtggagaggctcacaggtacctaaccctgtatttcctctaggagaaatggttcagtattcactaactaaatgtttacattgactttacagagcataactaccatgaataacaagaattgactatatgtggtagttggaattttatcagcaggcaaagggacattacttaggagmtgggagcttggaatgaggtcccttcatgaggtctactggcatatgacactgtaggaatacactagagagtctcccattgtggtaaaataagttatccagaaccacaagcttttgctaattagagttcaagtttatactgctcacaaaggtttctaaaagttaattttaaaactaatcctgaaccagcaccacgcaagctctaagaagaggaaaaaaaaaatagcccataagaacacctctataaccagggcacataagggaatcccaaagaaacaactgccacccagaacttcacagttgaaaattataaaccacactaggaaaccaatatgagagccaggcagcagtcaaggcaaataagtgggttctcttctgtaagatctaggattatattacactccaaaaagtaatttttaaatatgaataa

SEQ ID NO: 791880 - DNA, 546 bp, Homo sapiens
aatcttagagttaactttagagtcacagaaaacagacaatttttgtagaggcttattcaggttgatttgtatcctagaacattttttccccacccaccccatttcctcccccaattccccagttatttcagattgaaataagtcaaattttctctacttcaaaaaaaaatctgatccaaaatataagtaagctaatgctctcttgcctttcactactaccaagtaaatatacctgggttataaatggattgtaccacttgttagaaaataataagttccaggagkccttggtactgtgaatagtctatgactttgagctagtcattttcttcctctaattttccttttattaatctacaaaataatagaagattctagaatctataaaatttacaagatgcttctaggatctaagaatttgtgttccattttctttcttttttttattatgctttaagttttagggtacatgtgcacaacgtgcaggttagttacatgtgtatacatgtgccatgttggtttgctgcatccattaacttgtcattt

SEQ ID NO: 791881 - DNA, 633 bp, Homo sapiens
aactcatacctatatgcaatcaccactttataaagtaattagtttccaaaggcattgtttactttagtaattgaaatgtagaattatttttcctatataaaaataatatagtttccaaggtcagataacaaaaatccatataatctatataactcagcaatgaattaaagcaattgagaccgccactagatggaatgggttatggattattttaaaaataaaaaaaaactttaaatgttttatgtccaaagaggttcatcaaggtgttgtttataaaagatacaagcaagaatgctaaagcaaattaaatacatctgtatgcagccctcaaatggttcatacaaagttcctgataaactggggaaatgtttgttataataactttaaagtaaataattgcagaacacaaaagcacgtagtagtggtggtggtggtactggtgatggtatwattagtagtaccagtggtaatagcagctaagtattcattgagttcttactcaaagccaggcatggatcatttcatttaatcttcacgattatatggagaagtagatgatatttttctaaccttacggatgagaagaataaagcacagagagcttaaatgacttgtcgaaaagtcacacagcta

SEQ ID NO: 791882 - DNA, 507 bp, Homo sapiens
tagtccaaagcaacaaagctggtggcgtcataacgctggggttgggaaaggatttgtgggcaaagctggactttctggcttggaaaagtcaatgatgttcctaaacctttggtttatattctagtaacaacagtattttcctcatttatgcattgagggtgatgatgcctatgttttggggttattgtaaagatcacacatataagccattaataccttgcttgtcacrtggtaagtcctacagaaatggtagctcctgatgctgttctttcctttactctcccttgttggccacaggtctggaattatgtgtcagctattttctggagaaaggggatttccgagggatgggggaggacagatagcagcagaagctgtctaaatggcttcatctcgatagtcccttctctgctttgcctctcgctttatcagaaagtgtcctggcatgaagcagagcaggcctgacagccatcctgccaccagcttatagtgtggctttttgttata

SEQ ID NO: 791883 - DNA, 507 bp, Homo sapiens
tagtccaaagcaacaaagctggtggcgtcataacgctggggttgggaaaggatttgtgggcaaagctggactttctggcttggaaaagtcaatgatgttcctaaacctttggtttatattctagtaacaacagtattttcctcatttatgcattgagggtgatgatgcctatgttttggggttattgtaaagatcacacatataagccattaataccttgcttgtcacatggtaagtcctacagaaatggtagctcctgatgctgttctttcctttactctcccttgttggccacaggtctggaattatgtgtcagctattttctggagaarggggatttccgagggatgggggaggacagatagcagcagaagctgtctaaatggcttcatctcgatagtcccttctctgctttgcctctcgctttatcagaaagtgtcctggcatgaagcagagcaggcctgacagccatcctgccaccagcttatagtgtggctttttgttata

SEQ ID NO: 791884 - DNA, 531 bp, Homo sapiens
ggagaaagtgtttgaagagaagtctgttctgcttgttaatttggaagaaagggaaggaaaagggggtggaaggcataattttatacataagtagtaagaataaagggatctaaccttaacaagtcttcagttttaaggaactcaggaagagataaaggagagaagttaatagagtatggcaagcagtttcctgaatgtatttgaataagtgtaaaagtaaggccatgaaaaggccgtttcatgtcagatagactgtgttgttctgtgacagattcaataaatatgagcgtcatccacttaacccttggaattaactctacatcttctagaactgattaagatttttttttttttkcatatactcaataaagatgatgtcctcctgctgctgctttaatgataaagggaaagtttcatttttttttttttttactagattcacttaagaagatttgaatctgatagtctcattctgatagtctcaactattacagttgctctaattaactgttagtttaaccctctacagtt

SEQ ID NO: 791885 - DNA, 577 bp, Homo sapiens
catagatttctggcctctatgaactggggagtacagggcctggtggagggtagggagggatcagctttgtgtgtggactgtgattctgggctcttccatatggacatttcctaccagttgcaagttcaccataaccttcaggaacctgtgtatttaatgaactgttcaggtgagtcttatggtcaggcyagctggggtgacgctaggtctgccaggcgagaccattagaagcctgtgcacctgcactgcggttcatccacagaattgctcttcccaaggtactcttggactgatgccatcgccctgtgatgccattgtccttgttgtgtttactgtgcacacttccccggccaccttatttaatattgccttctgccaaatatgtacaaatactgtcatacccacagttcttccccgtctgtgttgtttgctttgtttacattacatagcacttttcaggaataaaattaatttatttatctagtctctatctataccactagattgaaatcctcctgagggaaggatttttatttttattttttttcatttgagtgcaatattcccagcaccaaga

SEQ ID NO: 791886 - DNA, 585 bp, Homo sapiens
agcttgctgggctccatggggctgggatctgctgagctagaccacttggctacctggcttcagccctctttccaggggagtgaacgattttgtctcactgactttccaggcaccactggggtatggaaaaaacctcctgcagctagcttggtgtctgcccaaatggccgcccagttttgtgcttgaaacccagggccctggtggcgtaggcaccaaagagaatctcctggtctgcggattgcgaagactgtgggaaaagcatagkatctgggccaaagtgcaccgttcctcatgacacagtcccgcacggcttcccttggctaggggagggagttcccaaccctttgtgcttcctgggtgaggtgatgtccctccctgctttggcttgccctccgtgggatgcaccccctgtctaatcagtcccaatgagatgaactggttacctcagttggaaatgctgaaatcacccgccttctgcgttgatctcactgggagctgcagaccagagctgttcctagttggccatcttgccagtaatccaaaaaatttaatttttaatttgttctctattatgtatttttgtta

SEQ ID NO: 791887 - DNA, 589 bp, Homo sapiens
cttttgaaaatgtaaattggatcatatcccttccctgtataaagtcctttgactgcttcccttctcccttaaaataaaatccaaagtccttaccgtgccctgcagggctctgtgtggcctggccgctgtctgcttctctcaccggatgatgtgctgttcctgccttgctcatcacactccagccctgcacggcagcttctccgttccttggaactgctggtctggttccagctcacgccctctgcacaagaaggtccctccrctgagaacactgtctctcttcttctcttgtcctagctcgctccttctcatccatcaaatctcaacctcaatgtcaccccctcggagaagacttctccaacccccctattgaaattaagcaccaccaccctatatattttctttacacggcaccgtcttcctttgcagcacttgcctcaatgcgtgattacttctccatgcgcatggcttccttgtttattgtcactcttgtcccaccaggctgcaagttccactgaaaaaggccctgtcttcttcactactgtttctccagcacctagaacaaggccctgtacataaaggctactca

SEQ ID NO: 791888 - DNA, 589 bp, Homo sapiens
cttttgaaaatgtaaattggatcatatcccttccctgtataaagtcctttgactgcttcccttctcccttaaaataaaatccaaagtccttaccgtgccctgcagggctctgtgtggcctggccgctgtctgcttctctcaccggatgatgtgctgttcctgccttgctcatcacactccagccctgcacggcagcttctccgttccttggaactgctggtctggttccagctcacgccctctgcacaagaaggtccctccacygagaacactgtctctcttcttctcttgtcctagctcgctccttctcatccatcaaatctcaacctcaatgtcaccccctcggagaagacttctccaacccccctattgaaattaagcaccaccaccctatatattttctttacacggcaccgtcttcctttgcagcacttgcctcaatgcgtgattacttctccatgcgcatggcttccttgtttattgtcactcttgtcccaccaggctgcaagttccactgaaaaaggccctgtcttcttcactactgtttctccagcacctagaacaaggccctgtacataaaggctactca

SEQ ID NO: 791889 - DNA, 589 bp, Homo sapiens
cttttgaaaatgtaaattggatcatatcccttccctgtataaagtcctttgactgcttcccttctcccttaaaataaaatccaaagtccttaccgtgccctgcagggctctgtgtggcctggccgctgtctgcttctctcaccggatgatgtgctgttcctgccttgctcatcacactccagccctgcacggcagcttctccgttccttggaactgctggtctggttccagctcacgccctctgcacaagaaggtccctccactgagaacactgtctctcttcttctcttgtcctagctcgctccttctcatccatcaaatctcaacctcaatgtcaccccctcggagaagacttctccaacccccctattgaaattaagcaccaccaccctatatattttctttacayggcaccgtcttcctttgcagcacttgcctcaatgcgtgattacttctccatgcgcatggcttccttgtttattgtcactcttgtcccaccaggctgcaagttccactgaaaaaggccctgtcttcttcactactgtttctccagcacctagaacaaggccctgtacataaaggctactca

SEQ ID NO: 791890 - DNA, 563 bp, Homo sapiens
cacacattcgcacaggcaggggatctgagctggtcacaaggagagtggcagtgtgacagcagcaccacaaggagacattatccctcccaggaaaggctcttgtcattcattccttcattcattcataagagacgatatgttacaaatgtgataatacccagtgctcactargatgaatcaatattgatattctcatatgctgcttatggaaatggaaatgagtaaaattatttgaaaagccaatttagcagaatgtatcaaaatgtttatatgattcgaccccgtaattctacttctctgaatatattcttagtaaatagtcagggatgtgcagtattgcttataataattataaatgtccaaaattagggactggttaactgactaacctactgtatattttttcagagaatattctttagtcattgaaaagtatttgtgatttatcatatggggaaggggccaggggacaatcagctttcaaaacagtgtggataatttgtagatcattatcccaaaatgtttaaaactaaatttgcagctgggcgtggtggtgcacatct

SEQ ID NO: 791891 - DNA, 655 bp, Homo sapiens
gtgaggagttgtgatcctttgggggagaagaggcattctggtttttggaattttcagcctttttgcactgtttcctccttaccttcgtggatttatctacctttaatctttgatgttggtgacctttggatggagtttttatgtgggcatgctttttgttgatattgatgctattgctttctgtttgttagttttccttctaayagtcaagcccctcttctgcaggtctgctagagtttgatggaggtgcattccagaccctgtttgcctgggtatcaacagaggaggctgcagaacagcaaagattgctgcctgctccttcctcgggaagcttcatcccagaggggcacctgccagatgccagctggagctctcctgtatgaggtgtctgtctacccctgctgggaggtgtctcccagccaggaggcctgggggtcagggacccacttgaggaggcagtctgtcccctagcagagctcgacagctgtcctgggagatctgctgctctcttcagagttggcaggcaggaacatttaagtctgctgaagctgcatccacagccaccccttcccccaggtgctctgtcccagggagatgggagttttatctatagacccctgactggggctgttgcctttctttcagagatgccctg

SEQ ID NO: 791892 - DNA, 655 bp, Homo sapiens
gtgaggagttgtgatcctttgggggagaagaggcattctggtttttggaattttcagcctttttgcactgtttcctccttaccttcgtggatttatctacctttaatctttgatgttggtgacctttggatggagtttttatgtgggcatgctttttgttgatattgatgctattgctttctgtttgttagttttccttctaatagtcaagcccctcttctgcaggtctgctagagtttgatggaggtgcattccagaccctgtttgcctgggtatcaacagaggaggctgcagaacagcaaagattgctgcctgctccttcctcgggaagcttcatcccagaggggcacctgccagatgccagctggagctctcctgtatgaggtgtctgtctacccctgctgggaggtgtctcccagccaggaggcctgggggtcagggacccacttgaggaggcagtctgtcccctagcagagctcgacagctgtcctgggagwtctgctgctctcttcagagttggcaggcaggaacatttaagtctgctgaagctgcatccacagccaccccttcccccaggtgctctgtcccagggagatgggagttttatctatagacccctgactggggctgttgcctttctttcagagatgccctg

SEQ ID NO: 791893 - DNA, 603 bp, Homo sapiens
tcaaaaacaaaaaaaagaaaagaaaaagagcttgaagttttgttttaattgtactgaaaagggactggaaagtttaagcagaaaagttgtatggtttgattcatgttttagcaagatcacgctggctgccataaaactgtagtgagggaagagtgaaagtcagaagaccagttagtctgtatagtagtccagccagagattatggtagcattagatcatagcaacagagatgctggtgagatgyaggggtagatttggagtcagagctgggtagctctaactctgagtagggaggtgaggtcatgtataccagtgctaattcagtatcattccaactgcttcctcccattgtggccatacatttactatgctcaacaatcattatagtactaaatcactcatcagatgatacataatctcaaatgtatggaatataagttgtataaggaaaaaggcccctgaacagtcaaaatagagcctatgcatgcattccaaggtgagcttctcagaacattattcaagtttctgcccttgaacacagttctgatgagcttaattacctatgcctagaaggcaaataaaatggcaaagaagaaagaggga

SEQ ID NO: 791894 - DNA, 535 bp, Homo sapiens
ttctcatctcatcttcttctccctgatttctttttccatgacatacctttccttttcctcagagtttaacacactttgctaagcaccaactctgggctccaaggacacagggatgagagcctagtccctgctatcagggagctcacagtctaattgggaaacagacacatcccmcagcaaatgacagtgtgtcctaccacagttatgaagtccaggttctgaggaatctccagctcttctccctcatttggccccttccacagtcagcacccagtgattgctctatttattcgtaatcttctctcattgaggcatttgcaaaggtcttctaactggattatttaaatctactctggtctctaccaatccactttccacacaacagctaaaactattgttatattgcctataaaacttcagtataaactgatatatatgtataaaattaacttaaatctgtactcttggggcagttagataacatttaaaacacccaatcataaatccaccctccagaagtggccatccgaagtat

SEQ ID NO: 791895 - DNA, 583 bp, Homo sapiens
cttctaactgatcttttgtcttgctgaaaaactgatcttttgttttgctgaaaaaatgatgggtgggaatacaaaagaaagtgaccaagagaagactaaattgcatgacatgataaaggatgaagaaatcctaagggacaagatctggctaattggctggagaggcctgggatgaggagacacaggagmaaagggaaggaagggaaagaaaagggaggcaggtcacatttcagctgatactcacaatctcaggaagctattcccactgcctgagctaactcccatcctcccttctccctcaaagcacacagcacagctactattacttatccaaccctggtgctggtaaccttgactttagaaaacccttcctcgaggatgtcagaaaagacccctttctccctaaaggctgtgggacagaaaagggaaacagaggaaaggctttcagaaatcaaggatgttgcaatcacttctcagggaccatggcaggaagcagaagtgcaagaccttcttcactgcaggttctcctcaaatccccaccatacctcaattcccagaagcagcttgtagcgatcccaccctc

SEQ ID NO: 791896 - DNA, 583 bp, Homo sapiens
cttctaactgatcttttgtcttgctgaaaaactgatcttttgttttgctgaaaaaatgatgggtgggaatacaaaagaaagtgaccaagagaagactaaattgcatgacatgataaaggatgaagaaatcctaagggacaagatctggctaattggctggagaggcctgggatgaggagacacaggagaaaagggaaggaagggaaagaaaagggaggcaggtcacatttcagctgataytcacaatctcaggaagctattcccactgcctgagctaactcccatcctcccttctccctcaaagcacacagcacagctactattacttatccaaccctggtgctggtaaccttgactttagaaaacccttcctcgaggatgtcagaaaagacccctttctccctaaaggctgtgggacagaaaagggaaacagaggaaaggctttcagaaatcaaggatgttgcaatcacttctcagggaccatggcaggaagcagaagtgcaagaccttcttcactgcaggttctcctcaaatccccaccatacctcaattcccagaagcagcttgtagcgatcccaccctc

SEQ ID NO: 791897 - DNA, 641 bp, Homo sapiens
gggtctgccagccggtaccgaccaccctccttttctgagaagcttctgtgagcttccagtgggcgctagctactaaccacccctcatgtcctggctgtacacttaggacattacagcctttccctgggattttcttttctttcttttttttttttttgaaatggagtgttgctctgtggcccaggctagagtgcagcggcacaatcttggctcactgcaacctccgtctcctggggtcaagtgattctccagcctcagcctcccgagtagctgggattacaggtgcatgccatcacacccggctaatttttgtaattttagtagagaagaggtttcaccgtgttggccagtctggtctcaaactcctgacctcaggtgatccactgcctccgtctcccaaagtgccgggattacaggcgtgagccaccacgccctgrccaatgcttttgttttccctgggattttctgagtcgaaaataagagaagaaggcagttcctcttgggtggcaaagctttgagaattggaggccaggagctgccacctgtggctacagtgggaagcttgagttcaaagaataaagtcacaggagatggagagatagcatcttggaaaagatctgtgcctggatcctgctgtgcct

SEQ ID NO: 791898 - DNA, 562 bp, Homo sapiens
gtacccgaagtctgctggcaacaaaggaatgagaagagacaggttaagagttcatgaaggtgggagccaggggccagttgcaaaatggaggctgcaaaaggcgcagagttctggtctccacactattgagtgcagtcacttagctctaagaagcasatgttcagggcgaaacagtgaaagggaggcagtgcctcataggaggcataatctatagcaatagcagtttaaatgaatctcctttgtgctcaaacagcgtgtctttaacttatcggagagtagctggtgggagcgggcttaactaggagcctgcacatctgtccacttcccagtgtttcaaaggagtgtctttctccttgaacacagtgtttacagataggagagcgggtctcgctctgagcatgggaacatgatggcaattagtaggctttcctcctccgtggcctcttctggctttccacaacttattgtcccctatttttatggccagtttatacaggcaccccacaagtccttttcccaacattcccccggcatgctgggccccgcacagccatgggcagac

SEQ ID NO: 791899 - DNA, 635 bp, Homo sapiens
ctcaactttgggactgaattctggatccaactcacatgtgctggggtcctgagaacagaagctgggtcccagaggtcaccaggaaggctgcagatgcccgccagggaactgctggccacaactctccccagtccaaaggccccctgaggaatcaggatctaggctgcctcctctccctgggtccagctcacatggactctcaaacacttttccccaatacctctcactccctgaatcccccagccccgactgcccactccctctgagggggtctctgggccaaagcacctaccaagaactcacctccccttcctttatcccaacagatgtgagcaaggcccctctccttcctctccctcctgactagaaggacaagccccctcctctctgcccaagatgcaccatcctccggcgcttgttagsggggagatctttttattcagtttcctttctttttttttcttattacaaaagtagtatgtgggatatggtagaaagatttaaaaatcaaatacgaaaaacataaagcaaggttaaaactgacccgccactactttttcttttgtggttcagtaatgttagggtttttttttttttttttttttttttgagacggagtcttgctttgttgccca

SEQ ID NO: 791900 - DNA, 590 bp, Homo sapiens
ttttttgtatttttagtagagacatcgtttcaccatgttggccaggctggtctggaacttctgacctaaggtgatccatcagtcttggcctctcaaaatgctgggattacaggcgtgagctaccacgcctggccaggcaaaggtttcttakataaaacaccaaaagcatgatccataaaagaactaattgataaattagtcttcatcaaaattaaaacttctgattttcaaaagacactgtgcagacaatgaaaaaggctaaccattggctggaaagaaatatttgcaaagcagatatctgataaagaacttatatcccaaatatagaaagaactctttatatagtttaacagtaacaagaatactaacaacttatttttaaagtaaacaaaagatgtaagcaaaattttaacaaataagatatttggatggcaaataagcacgtgtataaaagctcaatacaattatttattagggaaatgcaaataaaaaccacaatgggataccagtaaacacctattgtaatggttaaaattaaaaactaaccatattttttgttgtcaaggacgtagaggaactagaactctgat

SEQ ID NO: 791901 - DNA, 644 bp, Homo sapiens
attagctggtcagtcaatatggatccattaaataaaaagagaagctcagaaaagtcacactataaatatgtcagtttattttgtgtctatcagaatcaatacatcatcatatgtagcaattccaagggagctatagttcctgacttactaactggtgatgcaataaacctttccaaattctacagtacagcatggtatggaaagaccaaacaatgagctgcctctgccatttgctgcctgcataacctggggaataattacatgacttygctgagcctcagtttccttatatgtaaaataaagataacaatcagtgacctgctgctatgatttgaatgtgtctcctccaaatttcaggtgttgaaacttaatggccagtgtaacagaattaagagacaagacccttaacaggtgatgattaggcaatgagggctcctcccttgtgaatgggattgaggtctttgtaaaagaggtttcacgcagcattcgactctcttgcctttatgccatccaccatgtgaagacatagcgttcctcccctcaggaagatgcagcccttgttagacaagcaaacttgttggcaccttgatcttggacttaccagcctccaaaactgtaagaaataaatttctgttctttataca

SEQ ID NO: 791902 - DNA, 606 bp, Homo sapiens
gctagctgtctattttcaggctaatatgaagtttcctatttgaataaacgtactaaaaatggaatctatttaaagaaaaacattaaatgaataatagtacaaatatggacaggcaaaaaaatatcacaaaaacttttgtatgactaaagtttgggaaacatttgtagaacaagtcattctagtagaacaacaataaagaccaaaaagcaaaccaaccaaccaaatccagccgcaccacctggctcctatttaataacataataaaggtacgtgtaacagatggatagtgacttgcatcaaagtgggatggatgctgcaggatttgacaaactatttcctgccgccatttacttcagtagctctatcctggcagaaacagaaagttttctgacatagatgctacttacagtagtcccctcttatctgtgatcttgctaagggcaaaaagccrtggtctgaaaatattaaatggaaaattccagaaataaataattcaaaaattttaaattgagtgcagttctgagtagtgttatgaaatctcacactgtccggccccatccttctccatcctacccagcatgcgaatcacccatttcactagcatca

SEQ ID NO: 791903 - DNA, 612 bp, Homo sapiens
ttattaaatgagcagatctcatgagacttattcactaccaccataacagtatggggggaaccaatctcatgattcaattctctccacttggccccacctttggcacatggggattattacagttcaaggtgagatttgggtggggacacagccacaccatatcaccttctatctgtgacaytgtgaagaaggaaaaagaaatttatgctagttttgctgttgcacgtcaaactgcaaaagttatggccacagtacatgataagtatttagtgaacatgaaaaaggcattaaatttgtgagtggaagacatgaaaagaaaacatgttccaattgatgacaaaatgttgcaacagaaagcattgagactacatgaagacttcagcaagggatcccctgaaacaagtgacaccaagccatttactgcaagtaagggatggttacatagattcaaaaataggtttggactgacaaacataaaaaatactgaagaggttgcatctgctaatgaagaaggttctgctacctttccagcagagttgaagaaataattagaaaggatgccatctaaagcaaatcttcaagtcttctggaagaagataaaacctgcattca

SEQ ID NO: 791904 - DNA, 612 bp, Homo sapiens
ttattaaatgagcagatctcatgagacttattcactaccaccataacagtatggggggaaccaatctcatgattcaattctctccacttggccccacctttggcacatggggattattacagttcaaggtgagatttgggtggggacacagccacaccatatcaccttctatctgtgacactgtgaagaaggaaaaagaaatttatgctagttttgctgttgcacgtcaaactgcaaaagttatggccacagtacatgataagtatttagtgaacatgaaaaaggcattaaatttgtgagtggaagacatgaaaagaaaacatgttccaattgatgacaaaatgttgcaacagaaagcattgagactacatgaagacttcagcaagggatcccctgaaacaagtgacaccaagycatttactgcaagtaagggatggttacatagattcaaaaataggtttggactgacaaacataaaaaatactgaagaggttgcatctgctaatgaagaaggttctgctacctttccagcagagttgaagaaataattagaaaggatgccatctaaagcaaatcttcaagtcttctggaagaagataaaacctgcattca

SEQ ID NO: 791905 - DNA, 434 bp, Homo sapiens
gggccattactggtgcatctcttgctgatataatggccaagaggaatcagaaaccttaagttagaaaggctcaacgagaacaagctatcagggctgctaaggaagcaaaaaaggctaagcaagcatctaaaaagactgcaatggctactgctaaggcacctacaaaggcagcacctaagcaaaagattgtgaagcctgtgaaagtttcagctccccaagttggtggaaaacgctaaactggcagattagatttttaaataaagattggattatatttaaaaaaattacagartatgttttcaaaactaaaaaaaagtgtcacaaaaagttttaggaattaagtaggacaggaaacaaataatggaatatgcataacatgtgagcatatgtcattatgttatttaattctcacaattctgtagcataggtattaa

SEQ ID NO: 791906 - DNA, 611 bp, Homo sapiens
caaaacgaagtcttttcttctaaatatggtattacctaattagttgcagctgcatcttttactcatcattactcacatacatctaagagcttttgccttaagcctctatttaacagtgagcatggtccagagtaagttttgtttttttaatgcctctgcctccatcactgcattgatgcaaaagaaactgagagacttgatcctcagtcctgggtctcccccaggtcctctcatgtgctayagaagatgtccatcctagatgttctctatcataaaggaatctgggcagcaataggaaacacccttttaaattctagtaggtaggggctgaacagccagtctagcctggagaaccacacctgccttctgatagccacagattttacctgcctaccatgagccaaagctccagaaagctgtgggagatgataacgttcagatttctgactgttcttaaaattgctctgtagaattctcaagtgtgacctccaactaaaggcacaccttcctactcattcttacttctggctgataaacctcctggaccagcactctgcgtctttaaccactggctgccttgtctaaacccagatcttcctgggaagggatat

SEQ ID NO: 791907 - DNA, 604 bp, Homo sapiens
tgattagaaagtgtgtggttttgctcagcgtttggggggatagaatgggacttggtcctgggtaccaaggacttgagttttaccatctgccttcttccctccctttcaggccatgaaggttcacttatttactttatgaatttgccaaaagcaaaagtaatatgccctcagttagagacggtctcacagggttctattacctgcaccttgttccaatttcttgtggcaccattatcaaaagcttggagtaaagccaaaaaagagaacayagaagatagttgttatggtctaaatgtttgcatcccttcaaaatttatatgttgaaacttaacccccattatgatggtattaggaggtgggggctttgggaagtgattaggtcatgagggcagagcccccataaataggatcagtgcccttacaagaggctacagagatgagttcttcctctccaccatgggaggacacagtgagaaggcactgtctatgaggatgtaagccctcaccacacaccaaatctgctggttccttgatctcccacctctcaagctctagaactgctagaaataaatttctatttttataagccacacagtctatggta

SEQ ID NO: 791908 - DNA, 602 bp, Homo sapiens
tgaacttagcagtatttttttttacaggcatcatctctatttttaaaggttttaaagattgtgttttattcttgtgaatatgctactccagggtttttgttactgaatttaagattgccatttatacaggtttgactaatgtaagtttcatcttttgtttgtaaaaaaagaagttatgtggagctcttcgatttckagatgtgattgtacttttctctttttaggcacctgaaagtcagaaaaatgacttcttgagctagattgtaccagatactatgttgagcatttctactgagtgagaaaggccatatctaggaatataaagtaaactttgtaacagaggaaatgaatcaacagttttgactttgctactatcatgtgggaaaagctctactatatcttaattctaatacaggttaaagtgagttaaaattattgcactcaagtccaaaaaattaaacagttactaagatcagataaaggttttaggacttgattagatctgattctgaaaaagcgttgccattggtcattttaaatgttacggggaaaaggaattgtagatattatctagacaagccccctcattttattgttacaga

SEQ ID NO: 791909 - DNA, 619 bp, Homo sapiens
tttttacatgtatttatatttacattcttgcataccctggtgacataaaaaaagtcattctggatagagaaaatatggcacatatacaccatggaatactatgcagctataaagaaggatgagttcatgtcctttgcagggacatggatgaaactggaaaccatcattctcagcaaactaacacaggaacagaaaaacaccacacattctcactcataagtgggagctgaacaatgagaacacatggacacagggagggaaacatcacacaccagggtctgtcaggggatggagatagcattagaagaaatacctaatgtagatgaygggttgatgggtgcagcaaaccaccatggcacatgtatatctatgtaacaaacctgcacagtctgcacatgtatcccagaatttaaagtataattttaaaaaaatgatgctttaaaaaaaaaaacagtcattaacctcaaagagtttacaggaaccaacttttcccaaaatgtccttccctataataccagtttttagtaaactaatccttgtatgggacacaaaggtgatatgtggtcaaataaactggggaaactctgcattaaagaaagctaaacagatttctttattt

SEQ ID NO: 791910 - DNA, 616 bp, Homo sapiens
ctccagcctggaccacaaagtgggaccctttctcaaaaacaaaaagcaaacaaaaaactctctatgttttgcctattcacctctccttcccccaaacccgtggcaattactgttctttttactgtccccatagttttgccttttcaagaatgtcacatagttggaatcatagagtatgtagccttttcagactggcttcctgcactttgtaatatgtatttaagtttactccgtatcattttgyggcttgatagctcatttcttcttagcgctgagtgatatttagttgtctggatgtaccacagtttatgtatctactcacctactgaaggacatagcttggttgctttcaagttttggtgcttatgaataaaacttctgtaaactttcacgtttttatgccaccttccaccccctcccacacatctaataactgagttaagattctcttgcagtcgcccaagagcactgctttaagattcatttcttcttctcccctctctagctgggacaaagaatgaaaaaaaaggaggaagggggaagattcattcctgatgaggaattcactgacctactgttttcgtgcatggcacttggcagtgccaccccatttcct

SEQ ID NO: 791911 - DNA, 645 bp, Homo sapiens
ggcctaacttgagttcccattaccaattatttaactcttacaagtagttatagtaatacacacacatgcacgcatgtacacacacacatgcacacacatacaagcaaataccagagtcccacaatcaggggtgcactagaaagtaatggaatcttcgttacactctatgtcctattttgctgatttttttaaaggaggataaaataagcattttatttattcatttggctttgatttaattawttatttatttatttattcattcgttttctttactcaaccagtgtttattaggtatatgctcagtacaaggaatataaaaatgaatgaggctcagatcctacccttgaagaagaagagatcacagatgatagaagattaagatatgtaagcaactaactaccatgcaatgtcatgtaaagcccgcagaagggctacataaaaagacagaggagtagttttaccagttgctgtaaaaaataatgacaaatagagacccagctgagccagtgtttagacggttaaaattcaggccatgctgtattctagaaaactcctgctcatcactccactcacctcccccgaccctactttatcctctgttaacaacatgagttgtttaggaatctgcccattcctttatag

SEQ ID NO: 791912 - DNA, 645 bp, Homo sapiens
ggcctaacttgagttcccattaccaattatttaactcttacaagtagttatagtaatacacacacatgcacgcatgtacacacacacatgcacacacatacaagcaaataccagagtcccacaatcaggggtgcactagaaagtaatggaatcttcgttacactctatgtcctattttgctgatttttttaaaggaggataaaataagcattttatttattcatttggctttgatttaattaattatttatttatttattcattcgttttctttactcaaccagtgtttattaggtatatgctcagtacaaggaatataaaaatgaatgaggctcagatcctacccttgaagaagaagagatcacagatgatagaagattaagatatgtaagcaactaactaccatgcaatgtcatgtaaagcccrcagaagggctacataaaaagacagaggagtagttttaccagttgctgtaaaaaataatgacaaatagagacccagctgagccagtgtttagacggttaaaattcaggccatgctgtattctagaaaactcctgctcatcactccactcacctcccccgaccctactttatcctctgttaacaacatgagttgtttaggaatctgcccattcctttatag

SEQ ID NO: 791913 - DNA, 539 bp, Homo sapiens
cctcatgtgtaccctgtaagccaggaacccctgtcaaggcttcagagatcaagagttttccagagctatgacacccaaacctacgctactgttttccacatgtggtttctgtccacagagagtacatgtttctccaaaattcttgccattgagaaaggagttttaagtcacagagcacccaaataagcatacggccaacacttgtcaggtgtcacagtctgtctggaagcttcatattggctgttgtgggtggtttaataactcagtattgactttacttccaaactgatgacagtttaacagatttttytgagcctattgagcttagcatacattttgtattagttggaatttctaatgactgagtcctgaaatgaacttgctggaacttctagaaggttcagagttcaacctgggtcagaacaaggcacaagctggctgtttatcaagtacctactttgtgctgggcagcacatgctctcttgttcagtccttaatacgctacagtaacaccaaatttaggtgaagaaactgaagtt

SEQ ID NO: 791914 - DNA, 697 bp, Homo sapiens
gctcaaaggcaatgcatcatataaagttcttagcatataaagttcttagcatagtacccacacatatcatttattaaatttagctgagcagagagaaaaagactaatgaatgtttttttcttagtcctgatccccataaggttttatagacaacatctctttaatacgtggataattctacacctgatttttgctctgaagttctttaaactaaaaatcaggtyagaattaaacctttattttaataagatgatactttcttaaagaaatggctgcttttatacaattataaacagtttacaataataaaactttatttaatgttttaagaaacgttttgaaaaaggatgaatcatgaaatggtcctctggatctgtttttcctctttatgaaatagagagcaggtaatcaacagttacattgagactttcacacattaaggaggataatgaggagagagaacaattcagtccaaaacacttttcctaaaggccaaatattaggaaagactagagagtgattgtcagaaattccataacaatggacacaaacattagcccttatatattcaaatccttagtttatctttatgcttggtcacccatggtagcatacatattagatcctgcaacgccttctggcctgaagctagcctttcctttaacaaagatcgttcagtggtctgttaattagaagc

SEQ ID NO: 791915 - DNA, 655 bp, Homo sapiens
gtcattatgcagtgtatgactgtatatgtatatatataaacatatatgtgtgcatgcataatacacacacacacacacacacacacacacacacgtataacattaccctggaaaggtgaggatgcaaggaaataaggattatcatgtgctcttatatgagggtaaattggcacaatgttttaataacaatttaattacatgaataaaaaaggaagcgctcaaacatgcatactttattacataacaattctacatctagggatttatcataaggaaataatcatggttatgcacaaagatttagctataatcgttcattccagtaatatttataatactgagagagtggaaactaccatattgtctgttattaggrgttggttaaataagtgtggcataggttaaaaaggggtaagagttatgtaagctttaaactgcagctcttcttcacttcatggatctacactttggcttgggaatcaatgaaaatcaggctaattgcctctatgtctcagaggtgggtagggcaaagtcagcattcttattagcaaaggattgctaaaagtgcttgctgtcttcttcaggcccaggaggggttcatctagagcagagtgagcccttgagaggcaagaggaggacctagattcttcctttt

SEQ ID NO: 791916 - DNA, 596 bp, Homo sapiens
agtagtgctgaggtagcaatactctgttgtggattttaaaaagcatgtatactatgtatttttagtatagtagagagtaagttaagtaatattgttgatccctccttgactgtatttaaaattatttctttgcaaatatgtttttacagctctcctttcattgcctgtttgtgtttccagtctaggcagatttcctcggctatgaatattctccatcaggacaaacattttaaagtattatcagaacctaaggactgggatcttgagtacatggagacattgatttacataaatttaatttgtcyctaacttttaagagatttgcataaaatcaggaatacctttctaagggatatcactttacttggcccctcatcttctttccccttcttttttttaattaattgtttttgagagacagggtctcactctgtcatctaggctggagtacagtggcgtgatcatggctcactgcaggctccaactcctgggttcaagagagcttcccgcctcagcctttcaagtacctggactacaagcgcacacagctaatttttaaaattcttttgtagagatggaacctctctatgctgccc

SEQ ID NO: 791917 - DNA, 596 bp, Homo sapiens
agtagtgctgaggtagcaatactctgttgtggattttaaaaagcatgtatactatgtatttttagtatagtagagagtaagttaagtaatattgttgatccctccttgactgtatttaaaattatttctttgcaaatatgtttttacagctctcctttcattgcctgtttgtgtttccagtctaggcagatttcctcggctatgaatattctccatcaggacaaacattttaaagtattatcagaacctaaggactgggatcttgagtacatggagacattgatttacataaatttaatttgtctctaacttttaagagatttgcataaaatcaggaatacctttctaagggatatcacttwacttggcccctcatcttctttccccttcttttttttaattaattgtttttgagagacagggtctcactctgtcatctaggctggagtacagtggcgtgatcatggctcactgcaggctccaactcctgggttcaagagagcttcccgcctcagcctttcaagtacctggactacaagcgcacacagctaatttttaaaattcttttgtagagatggaacctctctatgctgccc

SEQ ID NO: 791918 - DNA, 476 bp, Homo sapiens
gcagagccggtggcttacagatgcttgtgtctcctagtttccagcagtaaatatttattagatgaaagcttgactgagactgcatatcaaagagaggaggaaggggcatctcttggcagattttatcctcaaggcaggttaccttctcctgtataattgaaaggagacctggcctggcttgaaggctgtcttaccccttcaaaagggatcaaatagcagtggtggcccatgggtgtcagataaagggcttcatagtttaagaaagacatgagaaattaagagacagttcagaggacagctgtcatgatagagtttaraaaagaatgtgtaggaagacgggttagggatgggggatattgggatcattcaaacctgacaagaggagcctgaataaagtatgacaggcagttggtatttggatatttgcacgggtaattatatagaatatagagcagttgttctcaagtttttttgga

SEQ ID NO: 791919 - DNA, 492 bp, Homo sapiens
catgtaactttgcctttctctagtttagcaggaattgagagtaggatacacaaagtggttctcagccagggaaaaacaaaattaagctggtaaaacatagacaaagattctgagcttctttgggagaaaaatcatatgtttcatttactgcctgggtccatcacgactaccatttattgaacacctgctgagtgaggtgggtgataggtgatagtaccaggtgatttggatwttcacatagtgtccctgacctgcaggacaactccatttcccaagtggagaaaccaaggcccaaacgaggagcctcagttggggcaatgttaagtgacttggccaagcccaaaccaaagagctgggaagtgggaaggcaggtctgacccatgcacttccttacaagatgtgatccctttctatctgtggtttgctgtttccattgtgcacctgatatggcttattaaatggtgcccagtgggagaaaacaatttgtggttg

SEQ ID NO: 791920 - DNA, 659 bp, Homo sapiens
gttcaattcaaatcctagagtttcatccaaaatagcaggcacagtgtttgtttgtttgtttgttttcccttgggacagggtctcgctctgttgcccagactggagtgcagtggtgcagtcatagctcactgcatccttgaactcctgggctcaagcaattgtcttgcctaagccccccagtaggtgggaccacaggcacatgtaccacacccagctaatatttttattttttgtggaggcagagtctatgttgcccaggctgatcytgagctcccagcctgaagcaatccgctcaccttggcctcccaaagcgctgggtgaaatttttttaaagggaggtacaaaattgaatacagtattatatcaattatataaatgtgcatatgcacagagaaaaaaactagaaagaaatacaaccaaattgaataatttttgcctttttgtggggaagatatcatagattactgtaattttattattaatatgtttctgtattttcaacatcaaatatgtatttatttgataagttttttatctaatacatattcagaaaaatttaaatatataaacaggctgaatctaacttgagtaaatttacagcccttaatacaaagctctgaatttttgtttttcaaaaaagttacaaggatgatataact

SEQ ID NO: 791921 - DNA, 659 bp, Homo sapiens
gttcaattcaaatcctagagtttcatccaaaatagcaggcacagtgtttgtttgtttgtttgttttcccttgggacagggtctcgctctgttgcccagactggagtgcagtggtgcagtcatagctcactgcatccttgaactcctgggctcaagcaattgtcttgcctaagccccccagtaggtgggaccacaggcacatgtaccacacccagctaatatttttattttttgtggaggcagagtctatgttgcccaggctgatcctgagctcccagcctsaagcaatccgctcaccttggcctcccaaagcgctgggtgaaatttttttaaagggaggtacaaaattgaatacagtattatatcaattatataaatgtgcatatgcacagagaaaaaaactagaaagaaatacaaccaaattgaataatttttgcctttttgtggggaagatatcatagattactgtaattttattattaatatgtttctgtattttcaacatcaaatatgtatttatttgataagttttttatctaatacatattcagaaaaatttaaatatataaacaggctgaatctaacttgagtaaatttacagcccttaatacaaagctctgaatttttgtttttcaaaaaagttacaaggatgatataact

SEQ ID NO: 791922 - DNA, 659 bp, Homo sapiens
gttcaattcaaatcctagagtttcatccaaaatagcaggcacagtgtttgtttgtttgtttgttttcccttgggacagggtctcgctctgttgcccagactggagtgcagtggtgcagtcatagctcactgcatccttgaactcctgggctcaagcaattgtcttgcctaagccccccagtaggtgggaccacaggcacatgtaccacacccagctaatatttttattttttgtggaggcagagtctatgttgcccaggctgatcctgagctcccagcctgaagcaatccgctcaccttggcctcccaaagcgctgggtgaaatttttttaaagggaggtacaaaattgaatacagtattatatcaattatataaatgtgcatatgcacagagaaaaaaactagaaagaaatacaaccaaattgaataatttttgcctttttgtggggaagatatcatagattactgtaattttattattaatatrtttctgtattttcaacatcaaatatgtatttatttgataagttttttatctaatacatattcagaaaaatttaaatatataaacaggctgaatctaacttgagtaaatttacagcccttaatacaaagctctgaatttttgtttttcaaaaaagttacaaggatgatataact

SEQ ID NO: 791923 - DNA, 532 bp, Homo sapiens; identical to SEQ ID NO: 787324

SEQ ID NO: 791924 - DNA, 613 bp, Homo sapiens
gttctgctgctaacatgcccagattaaatatcatttctaggcgtgtctgtgaaggtgtttctggatgagatgaacatttcactctgtggactcagtcaagtagatcgcctttcccatttgattgggcaccatctaatccattgagtgcctgaatagaaaaaaargcagaaggaggagttcaccccttttttttcctgtctcactgtggcaactgaatatctcatctaatctgtattctgggacagggatttataccatcagctcctttggtttttagcctttggacttggactgaattataccaccggcttttctgagcctatagcttgagatggtagattgtggaacttaacctccataatcctatgagccaattcctcataataaacacacacacacacacacacacacacacacacacacacacacacacacacacacacaatcagttctgtttgtccagagaactttgactaatatacccaccaatagtccgcatggtttctgcctgacctgtagtcagacattgcctgccccagaatctacaatttaagttgctatctaatttaaagtgccagtagatcatgttgttcctcagaggataccatgacct

SEQ ID NO: 791925 - DNA, 543 bp, Homo sapiens
ggctgtattttgttttcttttctttttgaaatagggtctcactttgtgtgaagtggtgcgatctgggctcactgcagcctcgacctcccaggtttaagcaaccctcctgcctcagcctccccaagtagctagaactacaggcatgcatgaccattcctggctaatttttgaatttattttattattatattatttagtttttagagatggtgtttctccatgttgctcaggctggtctcgaactactgagctcaagctatctgcccacctcagccttccaaagtgctaggattataggtgtgaggcatcrcacccggcttttttggctgtatttttgtttttatgattataaatgacaaagatcaacaaggtttggaagttaatggactatgagtaaatttattggaaagtagactcataagcatgtaagactggccaagaaagtgaatgtcaagagaaagaaggaggagtcaatggctgagggatgcctacggtagtgaagagaaccactaggagaatcaagatctctttcatcctttctgc

SEQ ID NO: 791926 - DNA, 552 bp, Homo sapiens
attataagtaaatgtcctttcttcagtcattcattcataaaatatggagaaaatgtctgctaagcaagtagtaggcacttgataagcactggtccttgtccagagagaacaagagaagacaagtaaaatacgtctttccccttagggagctctcttggtaagttaagagtaagagctggccagcagaatacacttattagcaatctaatgggaaagaaaattatgaaacaaatcaggattaaaacaagcaaaaataaaactcaataattgaaaaccaactccccatagtttctgcttgctgatataagaacacgttactccttttcaggactatgctgaattagcagtgcctgactgcactaacaaactagtcattacatttacttmcttgtctaaaagcttaagcctccttccctatcacgtcggtggtcccagtattccactcagggccaccttttcatgttgcgtgtcttctgcagtgttattttttcctcccgtgagtatttttcaatgatgacttataaatctctatcttcatctaaatgcattttc

SEQ ID NO: 791927 - DNA, 588 bp, Homo sapiens
tctcttatatctctctaaacttaggttccttctctatttactcccctctgccctgtcaatttatttgtcttggacactgaaaaactgggtcattggtcctgtatctgttcccacagatagaattttgccacttgcttcactgtggtgtctctgacactgtttgttggatttagaggcttgataakttccgtattcattttgtgtgtgtgtggtggaggtgggagagcacaaaatgttttcatagatggggttgttcacccatccagagacacataatgtctggttgtctccattttttgtgacttcagcagccatggatgatcataacttaaatccattaattcttaggagttgtgaattctgctatttaaattctattttatcactattaactgtaacttcccctcatctactgtttggttatctagtcaaacaggtagcactggaaagacaattcttcctcttgagttgtctgtttttaaaataatgagtttgttcataagcatcctttaagagattctaatttttttaaaagtatcattataagcctagtgtcatttatgacctatttgatgtgtttcagtccat

SEQ ID NO: 791928 - DNA, 588 bp, Homo sapiens
tctcttatatctctctaaacttaggttccttctctatttactcccctctgccctgtcaatttatttgtcttggacactgaaaaactgggtcattggtcctgtatctgttcccacagatagaattttgccacttgcttcactgtggtgtctctgacactgtttgttggatttagaggcttgataatttccrtattcattttgtgtgtgtgtggtggaggtgggagagcacaaaatgttttcatagatggggttgttcacccatccagagacacataatgtctggttgtctccattttttgtgacttcagcagccatggatgatcataacttaaatccattaattcttaggagttgtgaattctgctatttaaattctattttatcactattaactgtaacttcccctcatctactgtttggttatctagtcaaacaggtagcactggaaagacaattcttcctcttgagttgtctgtttttaaaataatgagtttgttcataagcatcctttaagagattctaatttttttaaaagtatcattataagcctagtgtcatttatgacctatttgatgtgtttcagtccat

SEQ ID NO: 791929 - DNA, 605 bp, Homo sapiens
gcacctggaaaatcgggtcactcccactctaatactgtgtttttccaacaggcttaaaaaacagcaaaccaggagattatatcccgcacctggctcagagggtcctatgcccacagagtctcactcattgctagaacagcagtctgacatcaaactgcaaggcagcagcgaggctgggggaggggtgcccaccattgccgagacttgattaggtaaacaaagcagccaggaagcttgaactgggtggagcccaccacagctcaaggaggcmtgcctgcctctgtaggctccacctctgggggcagggcacagacaaacaaaaagacggcagtaactctgaagacttaaatgtccctgtctgacagctttgaagagaataatggttctcccagcacgcagcttgagatctgacaacaggcagactgcctcctcaagtgggtccctgacccccgagtagcctaactgggaggcaccccccagtaggggcggactgacacctcacatggccgggtattcctctgagacaaaacttccagaggaatgatcaggcagcagcatttgcggttcaccaatatccgctgttctgcaccctctgctgctgatac

SEQ ID NO: 791930 - DNA, 605 bp, Homo sapiens
gcacctggaaaatcgggtcactcccactctaatactgtgtttttccaacaggcttaaaaaacagcaaaccaggagattatatcccgcacctggctcagagggtcctatgcccacagagtctcactcattgctagaacagcagtctgacatcaaactgcaaggcagcagcgaggctgggggaggggtgcccaccattgccgagacttgattaggtaaacaaagcagccaggaagcttgaactgggtggagcccaccacagctcaaggaggcatgcctgcctctgtaggctccacctctgggggcagggcacagacaaacaaaaagacggcagtaactctgaagacttaaatgtccctgtctgacagctttgaagagaataatggttctcccagcacgcagcttgagatctgasaacaggcagactgcctcctcaagtgggtccctgacccccgagtagcctaactgggaggcaccccccagtaggggcggactgacacctcacatggccgggtattcctctgagacaaaacttccagaggaatgatcaggcagcagcatttgcggttcaccaatatccgctgttctgcaccctctgctgctgatac

SEQ ID NO: 791931 - DNA, 603 bp, Homo sapiens
ctggataccagactcaagagggacgcagcggccagctgtcttccgggtctcccaggctggcttcaggacccgagcctattctgtttttgtggctcctctaacttacctgtaaatcctttctgcattccctggatgccacctcttgttccctataaaaacctacaagtgtcctctgtccagtacagaaatccaaagcctctatatctgtgtctttgggaaaaatttcagcaactcctagcccagggatcatgagctcaaatgctacaagaatcaggcagtttatgggaatgagccaagtgggctccccaaagtacaaaacatacatggcacaacagccgggggccctgtctacagggaagcctgccgcgtacctgcagccaagctctgcagaacaagacrcaggcttgccatgaccacagtctctgccttttcaggagaaacaaggtatccaatgtgttagctcaaacgtttttttagtaacaccaagtgagccaaagaaaatacataatggaccagatacagctgccaagtaacccccacccacccctacatcaccaccccaccacacacacacaccagtccctgaaggcactgggtcattgt

SEQ ID NO: 791932 - DNA, 633 bp, Homo sapiens
aagacacccactgcagccatgctgagtggagatgaggtggctgcttagctccgtggagagagccaccagcagcccaagacctgcagcttctgtgcccagccatgtcctgggccagtttcgccagcattcaacaacacccagtggtgaataaagagtcacyggagctttcatcctaccagcaaactttacttcttcattaacatatgactcatttgagtatctgcatagccaatgaggccatttaaaaatggcacaccaaggtttgggtggtagaaactggtccacctggtacaggcaataaggaggcgccttgtctttagagaagtgaaacacaataacaacttatcatcagtctgggattttgttctttcatttaaaaaaaaaaaaaaaaaaaaaacactggccagctgcggtggttcatgcctgtaatcccagcactttgggaggccgaggcgggccgatcacaaggtcaaaagttcaagaccagcctggccaacatggtgaaaccccatctctactaaaaacacaaaaattagctgggcatggcggcgcgtgcctgtaatcccagctactcaggaggctgaggcaggagaatcgcttgaacccagaaggtggaggttgcagtgagccgag

SEQ ID NO: 791933 - DNA, 633 bp, Homo sapiens
aagacacccactgcagccatgctgagtggagatgaggtggctgcttagctccgtggagagagccaccagcagcccaagacctgcagcttctgtgcccagccatgtcctgggccagtttcgccagcattcaacaacacccagtggtgaataaagagtcactggagctttcatcctaccagcaaactttacttcttcattaacatatgactcatttgagtatctgcatagccaatgaggccatttaaaaatggcacaccaaggtttgggtggtagaaactggtccacctggtacaggcaataaggaggcgccttgtctttagagaagtgaaacacartaacaacttatcatcagtctgggattttgttctttcatttaaaaaaaaaaaaaaaaaaaaaacactggccagctgcggtggttcatgcctgtaatcccagcactttgggaggccgaggcgggccgatcacaaggtcaaaagttcaagaccagcctggccaacatggtgaaaccccatctctactaaaaacacaaaaattagctgggcatggcggcgcgtgcctgtaatcccagctactcaggaggctgaggcaggagaatcgcttgaacccagaaggtggaggttgcagtgagccgag

SEQ ID NO: 791934 - DNA, 581 bp, Homo sapiens
catcaatcatcttagctagatattttggataacttgctgcagcttctccatcagcacctgctgtttcaccttgcactgttatgttacagagatggcttctttccataatcctcatgaaccaacctcttctcacttccarcttttattgtgcagcttccttacctctcagctttcatagaatcgaagagagttagggcctggctctggattcaattttggccaaggcaatgttacagctgtttgatcttctatccagaccactaaaactttctccatatcagcaataagtctatttcactttcttatcatttgtgtattcactagagtagcacttccaatttctttgaagaacttttcttttgcatttacaacttggctatttggtgcaagaggcctagcttttggctgtctcagctttttacatgccttcctcactaagcttaatcatttctagcttttgatttaaagtgagagatgtgtgactcctcttttcacttgaacattttgagaccattgtaggattattaattggcctaatttcaatactactgtgtttcaggtaatagggaggctttaaggag

SEQ ID NO: 791935 - DNA, 539 bp, Homo sapiens
tcttgtaatgaaattttgcattcagcttttttgtggtgatgggagaaggaccagaaacaaccatcccagctgttactgcgtattttctactgcatcttcaaatttcagctttttgtctcttagatttccttgcaaaatagtaaagggtcttatggatcaaaatcaggtgatgttaagtgtacacacattatttagctcaaataataatgatgatggatatgtgaaaatgtcartttattccagcacctttggaataaatggagatcaattaagaatgcttacactgttaatttaatcattaatattagtgagtgaatttgtgagttcataaagtacagtgagtacagccagcattatacaaaacgtagaaagtccatcaaaggaaagtaaaacaaataatttcaaataggtctgtgttaagagaactaattagaataatttatgattttcatagggatttattgtccggtttgttttaacgtggcagaatatttatcattctcaataagtatgataaatttatttagcaattattccat

SEQ ID NO: 791936 - DNA, 618 bp, Homo sapiens
tgcttgacccagccagctactgagggaactgcagcatgacacgatgatgcgcagacttgccttgaaaggaggaatcttaggaaagtttccgagttactattaaggccacagcatttttctgtttaggagcagaaccatcagtcaaccatgagctctaagaaacacaacataacccagtgctaatagcagaatggtatattcttagccwcctcagaaaggcacagcatacataattcaaacagcaaatctgtggtggccatcagaactttggcagggttacgtaacatttgtcaaacaatgtggacttctagccatttcatacatttttaagatctggtcatatacattgggggtaaaaatgtacacacacacacacgtgcacacacacacatttttcaccaataaaacatatatgctatctagagcccatttactctatgtcagctttggcttcttggtgatcaaactgtggcaaagctaaattagatatacttatatatccattaatttggcttagaaagttaacacacaaaaagaaccaagtgtttaaaaaaaatctttggtggcatgttaaaggagtcacccttcagcatgaggtgagaaacacaattaaaaatg

SEQ ID NO: 791937 - DNA, 618 bp, Homo sapiens
tgcttgacccagccagctactgagggaactgcagcatgacacgatgatgcgcagacttgccttgaaaggaggaatcttaggaaagtttccgagttactattaaggccacagcatttttctgtttaggagcagaaccatcagtcaaccatgagctctaagaaacacaacataacccagtgctaatagcagaatggtatattcttagcctcctcagaaaggcacagcatacataattcaaacagcaaatctgtggtggccatcagaactttggcagggttacgtaacatttgtcaaacaatgtggacttctagccatttcatacatttttaagatctggtcatatacattgggggtaaaaatgtacacacacacacacgygcacacacacacatttttcaccaataaaacatatatgctatctagagcccatttactctatgtcagctttggcttcttggtgatcaaactgtggcaaagctaaattagatatacttatatatccattaatttggcttagaaagttaacacacaaaaagaaccaagtgtttaaaaaaaatctttggtggcatgttaaaggagtcacccttcagcatgaggtgagaaacacaattaaaaatg

SEQ ID NO: 791938 - DNA, 665 bp, Homo sapiens
accagctatgccacttggggatgttatttaacctctgtgtctcggttctgtcatccctaaaatggcaataataacagtgtgtacctcacagaattgaattaatatctgtaaagtgttgaacatgtctggcacaaagtctgtgttagataaactgcaatttacacaactcctgccacccaactccgtgacaagcctgtagcgcagataatccagccaaattagcatcaagtgtagccaccatgccgatgagggygttcagggggctcccgcgtgagaatgaaaagaaatgatccggaatgactccaagtggatgcaccacagcgaagcacacattaaaatcagccagagtatcttggctctgggctgccctgaggctacacgggcaaatgctttgtttgtcctgaggctttagttgtctctgggaggttcatcccaatgcagaccagtgaactatattcagagtcctgccttaacattagagtagagtgaaatagaaagagcaactagtacttgctgagctctgacacaggctagacactaggtcagatgtctctgcatcatgatgtaggatgattatctgcttttaacggtagagaatattttgccatcatgaagctattaggttttgcaaggtaggaggaggttatagaactcacacccagatc

SEQ ID NO: 791939 - DNA, 559 bp, Homo sapiens
ccaccagctatgccacttggggatgttatttaacctctgtgtctcggttctgtcatccctaaaatggcaataataacagtgtgtacctcacagaattgaattaatatctgtaaagtgttgaacatgtctggcacaaagtctgtgttagataaactgcaatttacacaactcctgccacccaactccgtgacaagcctgtagcgcagataatccagccaaattagcatcaagtgtagccaccatgccgatgagggtgttcagggggctcccgcgtgagaatraaaagaaatgatccggaatgactccaagtggatgcaccacagcgaagcacacattaaaatcagccagagtatcttggctctgggctgccctgaggctacacgggcaaatgctttgtttgtcctgaggctttagttgtctctgggaggttcatcccaatgcagaccagtgaactatattcagagtcctgccttaacattagagtagagtgaaatagaaagagcaactagtacttgctgagctctgacacaggctagacactaggtcagatgtctctgca

SEQ ID NO: 791940 - DNA, 665 bp, Homo sapiens
accagctatgccacttggggatgttatttaacctctgtgtctcggttctgtcatccctaaaatggcaataataacagtgtgtacctcacagaattgaattaatatctgtaaagtgttgaacatgtctggcacaaagtctgtgttagataaactgcaatttacacaactcctgccacccaactccgtgacaagcctgtagcgcagataatccagccaaattagcatcaagtgtagccaccatgccgatgagggtgttcagggggctcccgcgtgagaatgaaaagaaatgatccggaatgactccaagtggatgcaccacagcgaagcacacattaaaatcagccagagtatcttggctctgggctgccctgaggctacacrggcaaatgctttgtttgtcctgaggctttagttgtctctgggaggttcatcccaatgcagaccagtgaactatattcagagtcctgccttaacattagagtagagtgaaatagaaagagcaactagtacttgctgagctctgacacaggctagacactaggtcagatgtctctgcatcatgatgtaggatgattatctgcttttaacggtagagaatattttgccatcatgaagctattaggttttgcaaggtaggaggaggttatagaactcacacccagatc

SEQ ID NO: 791941 - DNA, 665 bp, Homo sapiens
accagctatgccacttggggatgttatttaacctctgtgtctcggttctgtcatccctaaaatggcaataataacagtgtgtacctcacagaattgaattaatatctgtaaagtgttgaacatgtctggcacaaagtctgtgttagataaactgcaatttacacaactcctgccacccaactccgtgacaagcctgtagcgcagataatccagccaaattagcatcaagtgtagccaccatgccgatgagggtgttcagggggctcccgcgtgagaatgaaaagaaatgatccggaatgactccaagtggatgcaccacagcgaagcacacattaaaatcagccagagtatcttggctctgggctgccctgaggctacacgggcaaatgctttgtttgtcctgaggctttagttgtctctgggaggttcatcccaawgcagaccagtgaactatattcagagtcctgccttaacattagagtagagtgaaatagaaagagcaactagtacttgctgagctctgacacaggctagacactaggtcagatgtctctgcatcatgatgtaggatgattatctgcttttaacggtagagaatattttgccatcatgaagctattaggttttgcaaggtaggaggaggttatagaactcacacccagatc

SEQ ID NO: 791942 - DNA, 620 bp, Homo sapiens
ggatgcaccacagcgaagcacacattaaaatcagccagagtatcttggctctgggctgccctgaggctacacgggcaaatgctttgtttgtcctgaggctttagttgtctctgggaggttcatcccaatgcagaccagtgaactatattcagagtcctgccttaacattagagtagagtgaaatagaaagagcaactagtacttgctgagctctgacacaggctagacactaggtcagatgtctctgcatcatgatgtaggatgattatctgcttttaacggtagagaatattttgccatcatgaagctattaggttttgcaaggtaggaggaggttatagaactcacacccagatccctgattgcaatttatgggctttctcctacacagccctctctcttgttcataaaacctaayatagagtacttcaaagagaatggggaaacttattcaattctttaattcaaccaaataatgaatcagacaatcaggagttactaaatttgcgcaaagttccctgttaaaagctggacctgcaaaaaaagatagactgactgtcctcccggaactttaaaagcagtaggaaaaggttttggagaaggaatcagtatatgtagcc

SEQ ID NO: 791943 - DNA, 501 bp, Homo sapiens
ataaataacctgaatttccagcacagttcccaagtatttgggtagcacaagctggtttttcaggccctaatcacctgctggataaaccagccactgtggtcccagattgggtattaaattctgcagtccagagagrtgggagtggctttgagactttctcaaatttctctgcacccttcatttaaccgcaagtggtcacagtgtgtggtttatgcgttgagtgttgaatgcagctatacatacattgttgcctcattcacagattgctttatgtctgtatggcttgcctcctcagttacactgtaacagttttatgggcaagagtctatagtttgtttctctctcgctgcaatcactgagtagatactcaataaacaagattgaatgggtagagcaaatataaaaggccaatgttaaaactaagtctcagcctgtaatcctagctactggggaggctgaggcatgggaatcacttgaacccaggaaggatcccaggaggca

SEQ ID NO: 791944 - DNA, 624 bp, Homo sapiens
aatgtgtaagaaatgctcttctgtgtgaaaggcaatgaaggccttgacataataaagaaatttttacaaagagactagtattgttcttagctgactaataagcttaacaattataaatgaactcatttactattgaaaaggatttctgttttgaggtgtgattcattttatttttcttgaagcacatccgaaataacatattgtataaatttgtcctcaaaatatactaattgattctgttgagctagcacgttttcctgtggtatataatttgttttggtattcacttttttwaaaaataatacaaattacaaaaaaagtacacaaaattagcaaatgtatttgtaatagaatatttgaatagtaatatgaggtgcttccatatatttaaatatgcatcagtaagagagtgttaagttttttaattcatctagtgtttatgaatgtaaatacatcatgcatatatttatatttgggggataattttttttcccttcagttgacagaataaattctggtacagaatgttattacagtcagacttcattgctgccaacatactgatgtgtactaggtaaccatttaaaaattaactcaaggtcattttaaacctgatatggtcag

SEQ ID NO: 791945 - DNA, 624 bp, Homo sapiens
aatgtgtaagaaatgctcttctgtgtgaaaggcaatgaaggccttgacataataaagaaatttttacaaagagactagtattgttcttagctgactaataagcttaacaattataaatgaactcatttactattgaaaaggatttctgttttgaggtgtgattcattttatttttcttgaagcacatccgaaataacatattgtataaatttgtcctcaaaatatactaattgattctgttgagctagcacgttttcctgtggtatataatttgttttggtattcacttttttawaaaataatacaaattacaaaaaaagtacacaaaattagcaaatgtatttgtaatagaatatttgaatagtaatatgaggtgcttccatatatttaaatatgcatcagtaagagagtgttaagttttttaattcatctagtgtttatgaatgtaaatacatcatgcatatatttatatttgggggataattttttttcccttcagttgacagaataaattctggtacagaatgttattacagtcagacttcattgctgccaacatactgatgtgtactaggtaaccatttaaaaattaactcaaggtcattttaaacctgatatggtcag

SEQ ID NO: 791946 - DNA, 622 bp, Homo sapiens
tattttcgtttcaagtaaataaatagtaattatctatagagaagtaaaagaaaggcttcaaaccatttaataaagatatattaattcatttagttatttttttcttcttgagagggctctaaacaaaaatatcatcttcctaaggtaaatatgttagtaaaagtttataaaagaaaggtgcaaagggtgaagctggcatttcctgaagcttagggtagtttcaggagatgcaacatggttgcagtaaaagctatcacctggcttaaaataataggattctgtccactttttaagcataccaattctgttacagttattcttagaaagaaagggaaacttataactagctttgaatgaycagaaaaaaactgcaaatttcttacttttaaaaattattgatgctggcaattctactggtaaattcatgtttcttccaaattgaatattaataaagctaccaccaatgttgaaaacctgtttattatttaatgtgagctgaataaaaatcaataactatagaagaacagggttacttcagaaaataagattctaatatgttttatattgagtctaaaaatcacacttctttaattggttaaagcacagcctttaatatagaaaa

SEQ ID NO: 791947 - DNA, 584 bp, Homo sapiens
catggatactcaaggctggattttggagcttcctgggctgatggctgtgttacccccggggcaggatccttaaacccaggaaaaagagattcagaggaagatacttctgagcttgatgctggaatagcagctgatctcaactttgggagttacatcaatgttcatctcaacagaatgaatccctcctgcccagctcccayggacttgcttacaaatgctaatgagttcatttcatttgtctctacccagcaacccaggtagtaccagcctcccaaagggaattagggaagacttggaatactaggaaaaatacaggactaatgaatagtttccatgtgggacccagccccgcctccagctcctttgtcagaggtggcagagatcttcaacctgttctgactttgcactcagattaacaaaacatgcactgctaggggcacatagattctttcaccaggcaaaggtgtttgggttcagcaagcttacaccctaattataaaggaggagaaaatggggcagagtctgcagtggggatgggaaggatttttaggaagggcatggataaagaaaaaaaaaggttaata

SEQ ID NO: 791948 - DNA, 540 bp, Homo sapiens
acctgaaaaagccaggtgaagtatatgcaacaacagttttcaaaacattgacaattgggtaacatagggcagttgatccccaagggatgagaaataaacgaggtgaccactatgacattgcccagcttggggacataggagagtgtctcaactgtggcacaaagatgaggagctcatggtgtcgctgggctgagaaggaaaagctaggagagaggggaggccaaggtggtgggagtttgcaaaatatcaaagaggagagaatttcacagagagaactcttgaaatctggagagggtctccctgragtcttcagctaagtcctgattagcacatgtgcatgaagaaactatgcgagaccagaaaaagaaccagcaaaaggaacagagagaactcacatagggtcaggtatagttcctgttctcatcaatcagagtagaaaacctcataatccacagggcataaggtagagtactctgaataattttgtctcagtagttggaaaaatttaggttgaaactaactgctgctctgttctcaccc

SEQ ID NO: 791949 - DNA, 595 bp, Homo sapiens
acagaggccaggaagagcagccaatggatcagagttagttagtgggggctgattagggagtctctactcagggctgccacataccattgtccagtctgtgcactgcacaaagtgctgcctaaggggacaaatggcaattaaattcctgctagaagtactctttccaagccctgcactctgctgcagtcttctgtctagaagagatacctttttytaatttgtctatccaaaggcggtacctttttccaatttgtgccaaagccctgtagagactagtggcagttccacgttactccatctgtgatgctgaccttaaaactggttttagtacctagccagcaaataagacgaggctgcactgaatcatcacggtgaacctccatgaacccaacaccacaatacacggggtacctcgacatcactcaatgtcctcacaatgacccattgcaaatcccaaggactgtttaggctcagggagcttttccttttgagtaggttgtcactttccccagtccaagccagtacactgcttgatttggaggactctctgaaaccctgacttccttttgatggaggctacaagctctgcagtaaa

SEQ ID NO: 791950 - DNA, 595 bp, Homo sapiens
acagaggccaggaagagcagccaatggatcagagttagttagtgggggctgattagggagtctctactcagggctgccacataccattgtccagtctgtgcactgcacaaagtgctgcctaaggggacaaatggcaattaaattcctgctagaagtactctttccaagccctgcactctgctgcagtcttctgtctagaagagatacctttttctaatttgtctatccaaaggcggtacctttttccaatttgtgccaaagccctgtagagactagtggcagttccacgttactccatctgtgatgctgaccttaaaactggttttagtacctagccagcaaataaracgaggctgcactgaatcatcacggtgaacctccatgaacccaacaccacaatacacggggtacctcgacatcactcaatgtcctcacaatgacccattgcaaatcccaaggactgtttaggctcagggagcttttccttttgagtaggttgtcactttccccagtccaagccagtacactgcttgatttggaggactctctgaaaccctgacttccttttgatggaggctacaagctctgcagtaaa

SEQ ID NO: 791951 - DNA, 595 bp, Homo sapiens
acagaggccaggaagagcagccaatggatcagagttagttagtgggggctgattagggagtctctactcagggctgccacataccattgtccagtctgtgcactgcacaaagtgctgcctaaggggacaaatggcaattaaattcctgctagaagtactctttccaagccctgcactctgctgcagtcttctgtctagaagagatacctttttctaatttgtctatccaaaggcggtacctttttccaatttgtgccaaagccctgtagagactagtggcagttccacgttactccatctgtgatgctgaccttaaaactggttttagtacctagccagcaaataagacraggctgcactgaatcatcacggtgaacctccatgaacccaacaccacaatacacggggtacctcgacatcactcaatgtcctcacaatgacccattgcaaatcccaaggactgtttaggctcagggagcttttccttttgagtaggttgtcactttccccagtccaagccagtacactgcttgatttggaggactctctgaaaccctgacttccttttgatggaggctacaagctctgcagtaaa

SEQ ID NO: 791952 - DNA, 634 bp, Homo sapiens
caagttcttcccacattaaaaaaaattatcttaccatataaaacctttggagcttgatttttcccccttactaaagtatctatgacacatcttcttatgctaataaaagatacatcttcgccagtcacggtagctcaaccctgtaatcccagcactttgsgaggctgaggtggggagattacttgagccaaggagttcaagaccagtctgggcaaaatggtgaaaccccatctctactaaaaatacaaaacattagtcgggcgtggtggcacatgcctgtagtcccagctacttgggaggctgaggtggaaggatcacctgaacccaggaggtcgaggcttcagtgagtcaagaatgcaccattgcactctagcatgggcaacacagtgagactctgtctcaaataaataaataaacaagtaaacaaatgaatatatgcatctttgtcacagctcttaatggctctgtatatctacatccattatgtagatatacctttgtcttaaaaccattttcttattggtatgtattttggttatttaaatcttttgttattataattaaactgtaataaacatccttgaccaatcttgtgcccttgtttaatcatttcctttggataaattaagcagaa

SEQ ID NO: 791953 - DNA, 634 bp, Homo sapiens
caagttcttcccacattaaaaaaaattatcttaccatataaaacctttggagcttgatttttcccccttactaaagtatctatgacacatcttcttatgctaataaaagatacatcttcgccagtcacggtagctcaaccctgtaatcccagcactttgggaggctgaggtggggagattacttgagccaaggagttcaagaccagtctgggcaaaatggtgaaaccccatctctactaaaaatacaaaacattagtsgggcgtggtggcacatgcctgtagtcccagctacttgggaggctgaggtggaaggatcacctgaacccaggaggtcgaggcttcagtgagtcaagaatgcaccattgcactctagcatgggcaacacagtgagactctgtctcaaataaataaataaacaagtaaacaaatgaatatatgcatctttgtcacagctcttaatggctctgtatatctacatccattatgtagatatacctttgtcttaaaaccattttcttattggtatgtattttggttatttaaatcttttgttattataattaaactgtaataaacatccttgaccaatcttgtgcccttgtttaatcatttcctttggataaattaagcagaa

SEQ ID NO: 791954 - DNA, 637 bp, Homo sapiens
aaagattctcttatatttggtggtggaagtatgaattgtcacaacctattgagaaacaatccaataatatccattaaaattcaagttgtgtgtgtgtgtgtgtgtatgtaatttgttttagcaagttctagggatccatcccatggaaataaaataaacacaacaatctataggaatatatgatcagggagattttacagcaatattgtagagatttttagaaaagaaaatgccaatcaataggaaaatggctgaaaacatattaatacctccataccatgtacaattgttcagctattaaaaatgagttatggccaggcatggtggctcatgcctgtaatcccagcactttgggaggttgaggcaggaagataattaaggccaggagttcaagagcagcccaggcaacatagtgagatcccacccctactaagaatttwaaaaactttaaataaatttataaaataaaattttaaaatgagttagatctaaatagatcaaatcagaagaatttttcaatgtattattaagtgagaaagctaagatatggaggaatttccataatatgatttcattttagtaaaaaaaaaagttaaatcacattgtgtctgtgtttatgcttgtacaaaagcatgaa

SEQ ID NO: 791955 - DNA, 614 bp, Homo sapiens
aacaatttttttttagagcaaccctgtcaaatagaacaggtgagaaagcttagatccacagaaattgtcaccttttatcaacattgctaatgccggagagagggctccttcctcctaactcagtgttttcatcacgacatgctgcctccaaaaaaatgtccacaaaatttagtgaaaaaagtaaattctagctccatggtcttttaagcccttcagtcacttggttttacatttcsccatagtcaattactcaaaaaagcatgctgtcggggccaggcgtggtagctcacacctgtaatcccagcactttgggaggctgaggctggcagatcacttgtggtcaggagttcaagaccagcctggccaacatggcgaaaccctgtctctaccaaaaaatacaaaaattagccgggtgtggtggcaagtgcctgtaattccagctactcaggagtctaaggcatgagaattgcttgaacccaggaggcggaggttgcagtaagccaagatcatgccactgcattccagcctgggggacagagtgagtctccatctaaaaaaaaaaatagcatgttatggaatacttggttcaacaaagttaaacaagtttctttccc

SEQ ID NO: 791956 - DNA, 558 bp, Homo sapiens
cttttcaagctaattaaaagaacagtctcggtcagtgctcctttgaagagcttacagcacctttctctccctcatgaggtgacatgtccggtctttccccaagagcacaatcttctcataactttccataagaagtaaagtaactagtctcctctttctccccacagttaatactcatggatgttactggctaggtatcacttcatttacatgtaaaactttttttttaactttaccacttcctccaggatatacagaacccgtcttccacattgcgtgtggcagctcatgcctgtaatcccagcactttgggagatcgaggtgggtggatcgcttgagcccaggagtttgagaccagcctaagcaacacgktgaaaccccatctctacaaaagtataaaaattagccaggcatggtgccgtatgcgtgtaatcccagctactcaggaggctgacgcagggggactgattttgagcctgggtggtcgaggctgcagtgagccatgattctaccattgcactccagcatgggtagcagaatgagaccctgtctcaaaac

SEQ ID NO: 791957 - DNA, 621 bp, Homo sapiens
atgaatattatctttacttttacccccaatgataattattgaactaaatattagttataatccttgatataacattgggtctctgtcttcgtccctttttctccaaatttactgttttatgaattcacaaatgatttaataatcagagattttctcaaatgcaagttttcttattgatattgagaaagtattttaaatgactacttgcaatgctgttctaagtcaactctgatgagttggagaattcggaaaaacagcaagagcattttaaaattattctcacatgtgcccttcaactaaatttactaacttgtactttagaaaattaattttattgcacaaattgaagacamtacccacagtgccttgaagtctcaaatctcactcataagtaaaaatatggacccaaaatcagtcagctttgctctcaaactttcattatacatttgtattctctggatttaaaaataagtatcttaaattgagataacaaataatctttgcaaacgttcccactgtatgtactagagggcctcaacaaaactgctttacatggatcacctggggaggcacttatttaaaatgcggattacaagttctgcagccagatatgctgattct

SEQ ID NO: 791958 - DNA, 604 bp, Homo sapiens
ctagtgtttgaggacagggatggacggtgttaactgccaccaagagaagacccttgcagaagaaacagccactgtaaggacaggaacttcatgccagactccccgccaagcacccaacagggatcactgcatcctctcaatactcatatgaggagtttgttattagacccactttgcagagggggaactgaggctcagagatatagggtagcttgccacaaggactccccacactgggtagtgcagtgggacttcagagcagcagtcctcgaaaacaaggcctgttttactcccctctacctgcctcrctcctccaattgggctcggactctgaaatgtattcaggacaagcttgctgggtgcctgacgctaatggtaactgaacacgctaaagatgtttttcttgagctaattcctgttcagtgagccccagagaaaatgattgatctctaatactcagatatgttaaatcagtgttttcaggttttctttttcagcgtgccaattggaaacacacctgcctttcaccaggtgaccctaggtctgcgatgaggctaagcatgtgtgtgaagggcctggttggtgatgatcttgacactcggct

SEQ ID NO: 791959 - DNA, 589 bp, Homo sapiens
ggtatctttttctaatgagcagctgggcaatgtgtagcaacagcttcagtaacattcacagactttgactcacttctagaagtctaaccaaagaaataatcagagatatggacaaaggtttatgcataaggatgttcatgcattgttcttccttaatcataattttaagatagaaacaacataagtgtccacagtagtagagtatgtgtgtacgtatctccaataatttattgaacaaatgtttgctgagtgtcttctctgggccaggctctttgagagttccctggaatccagtggtacacaaaacaaacatgtccacctcccggagcatgtcatctagttacaataacggaaaagacagatgatcagctarttccacaaataagttaggtgttaatgaagaaaagtagaggatgaagtaattgcgtttttttgccattaaaagtaaatgtaacttttaatggcaaaaactgcaattacatttgcaccaacttaatattatattactaaataatcaaagaatacagtaaaaagcggtatggaaaacatgctatgaatgtctatttatcatctcaagaaatgatctttt

SEQ ID NO: 791960 - DNA, 614 bp, Homo sapiens
taatctcagcactttgggaggccaaggtgggaggatagcttgagcctggggattcaggatcagcctgggcaattttgtctctacagaaaaaaaacattaaaaattagctggtcatggtggtgcatgcctgtagtcccagctactcaggaggctgaggcaggaggacttcttgagcccaggaattcaagattgcagtgacctatgatcacaccactgcastctagcccgggtaacagtaaaagaccccacctcaatgaataaatacataaaataaaataaaacaacaccgagacacattttaatcaaatttcttgaaaacagtgataaggagaagattttaaaatcaactagaggaaaagggtacatcaccaaaactactgataataagcaataaaggatgaatctcaaaaagagtttgctgcctaaaataaattagaaatgagatactatgtgattccatttatatgaagatacagagcaggtaacactacctatggtgatagatttcagaataatggccatctttggcaagagtggggagattctattgggggaagagacatcaaataactttctacaatgatggaaatgtttactgccttgagatgggtatg

SEQ ID NO: 791961 - DNA, 593 bp, Homo sapiens
ataatctcagcactttgggaggccaaggtgggaggatagcttgagcctggggattcaggatcagcctgggcaattttgtctctacagaaaaaaaacattaaaaattagctggtcatggtggtgcatgcctgtagtcccagctactcaggaggctgaggcaggaggacttcttgagcccaggaattcaagattgcagtgacctatgatcacaccactgcactctagcccgggtaacagtaaaagaccccacctcaatgaataaatacataaaataaaataaaacaacaccgagacacattttaatcaaatttcttgaaaacagtgataaggagaagattttaaaatcaactagaggaaaagggtacatcaccaaaactactgataataagcaataaagratgaatctcaaaaagagtttgctgcctaaaataaattagaaatgagatactatgtgattccatttatatgaagatacagagcaggtaacactacctatggtgatagatttcagaataatggccatctttggcaagagtggggagattctattgggggaagagacatcaaataactttctacaatgatggaaatgt

SEQ ID NO: 791962 - DNA, 593 bp, Homo sapiens
ataatctcagcactttgggaggccaaggtgggaggatagcttgagcctggggattcaggatcagcctgggcaattttgtctctacagaaaaaaaacattaaaaattagctggtcatggtggtgcatgcctgtagtcccagctactcaggaggctgaggcaggaggacttcttgagcccaggaattcaagattgcagtgacctatgatcacaccactgcactctagcccgggtaacagtaaaagaccccacctcaatgaataaatacataaaataaaataaaacaacaccgagacacattttaatcaaatttcttgaaaacagtgataaggagaagattttaaaatcaactagaggaaaagggtacatcaccaaaactactgataataagcaataaaggatgaatctcaaaaagagtttgctgcctaaaataaattagaaatragatactatgtgattccatttatatgaagatacagagcaggtaacactacctatggtgatagatttcagaataatggccatctttggcaagagtggggagattctattgggggaagagacatcaaataactttctacaatgatggaaatgt

SEQ ID NO: 791963 - DNA, 575 bp, Homo sapiens
agttccgtgcacacaggccctctttcctgtgtaggggaggggcatgctgtctgcacatggcatgctccctcctgcccagggaagccaactgccatattagcaaagatggtttgaaaatgaacaagaatcccaacttaaaatatatatatatatgcagtcattccttggtatccgaggaggattggttccaagacccccatggtaacaaaatctgcagatgctcaagtccctgatataaaatagtgtcgtatttgcatagaacttacacaatccttttgtgtrctttaaatcatctctagattacttatatatatctaatacaatgcaaatgccaagtaaatggttgttatactgtctttttagaattggtattatttttcattgttgtattgtgatttttattgttttttaaagtatttttttatcctggcagggtgcagtggcttacgcctataatcccagcattttgggaggctgggtcactagaccctaggagttggagactagcctgggagacaaagtaagaccccatctctacaaaaaaaaaaaaaaaaaacgctggatgtggggtcggg

SEQ ID NO: 791964 - DNA, 476 bp, Homo sapiens
ctaatgccctctaatgaaacccatacagacgatcacctatctatgctccaaatcgcaaaagataaacataatgtcttaactttaatataaagtggaagtataagaacttaaagaaaagtagcttttatagcatggaacttgtcttgcaatgagcttgacctrcactcaccagaagcaatttcttaaatacccactcagaggtgacactgcttccgctgagaaacgctcgtggaaggtcgggctggccagccttgctgtaaagggccaggtggtgcatacgcatggctttgtgggccataagctcccagccacacctacacagccctgtcattgtgacgcaaaggcagctgcagacagcagcaagtgaatgggcatggccacattccaacaaaacatcatttgcaaaaagaggcagttggctagatttggcccagaggttaatgatttgtggatccctggtctagagcatccccttc

SEQ ID NO: 791965 - DNA, 601 bp, Homo sapiens
ctagtaagcatgttctgggcggtcctcttcgtgcatttgcgcagtagctgtacatggatgttcatatgtcgcatgtctcattagcatcttaaatctccacccaggtgtgtgttttttattattataatgagcaaagcgtgagtttgaggacaggtaaagtcaaaatgcgcatgttccctacaggggaaattcccttctggagacagctttgtttgaatgagctggccttcagtgtgaatgctgaggctcatcgtgttgactggccagtcaccatagttgccgtaccccgcrgacacagttgcttccttgcctacctatcctgcctcatatgcaacattgttgagtgtctagactatgtgtcttcctttaaagagtgttgaatttcttttccaaccagctaagtttattctgatcagcgtaactcttaaactttgttagtgaagttctggagtagtttttagggtagggctagtttagtcccactaccaaggcataactaagcatccagtgtctcttttgaatgtgctgaggattcagcaaggtctattcccttgggctagtcagaaatcaaatgtcttccagccccgcgaggtctgtaatt

SEQ ID NO: 791966 - DNA, 635 bp, Homo sapiens
gagcaccgtttcgtgcatcccgccaactatcaacaaacaagcaaaagacataagagttttataaaaacaaggactccaattatgcttcacaatagtttaaaaattctattgcctcctaagttccaggagtggaagaaacacggttgtgatatacagggtcctgtggttgcttcccaggcccttacttaatctctgacgtaaggacttcccacctgaacaaatctgcagtaaaatgggagagagggaggctgaccatactgcacacacgcgcccactgaacgcttctgaacctgcccttgcttctgttgagggtaggtgaaccagcctcagcctcattytacgtgaagggttggcaaactttttccaaaaagggccagccagtaaacattttaggctttgcatggggaggggtgacatggggcctgtgttgcgacaactcagttctgctgtcttaatgcaaaagctattgacaatagttcacaaatgggcatggatatgtttcaataaaactttatttacaaaaacagggctgggcatggtggcttacgcttataatcccagcactttgggaggctgaggctgggggatcgcttgagcccaggacttcagcctgagcaacatagtgggtccccatc

SEQ ID NO: 791967 - DNA, 635 bp, Homo sapiens
gagcaccgtttcgtgcatcccgccaactatcaacaaacaagcaaaagacataagagttttataaaaacaaggactccaattatgcttcacaatagtttaaaaattctattgcctcctaagttccaggagtggaagaaacacggttgtgatatacagggtcctgtggttgcttcccaggcccttacttaatctctgacgtaaggacttcccacctgaacaaatctgcagtaaaatgggagagagggaggctgaccatactgcacacacgcgcccactgaacgcttctgaacctgcccttgcttctgttgagggtaggtgaaccagcctcagcctcattctacgtgaagggttggcaaactttttccaaaaagggccagccagtaaacattttaggctttgcatggggaggggtgacatggggcctgtgttgcgacaactcagttctgctgtyttaatgcaaaagctattgacaatagttcacaaatgggcatggatatgtttcaataaaactttatttacaaaaacagggctgggcatggtggcttacgcttataatcccagcactttgggaggctgaggctgggggatcgcttgagcccaggacttcagcctgagcaacatagtgggtccccatc

SEQ ID NO: 791968 - DNA, 612 bp, Homo sapiens
ccggatttggctttggtcagtcagagaaatcaggtttgatggagaaggacctaggaattaacctaaaaggaagaggggataaacttctttattgtgaaaggctgacttagggtacatggttgccaggtcagaaggaaatggaaacaatttaaaagtaattatgggctggcggggtggctcatgcctgtaatcccagcactttgggagtccaaggcaggtgaatcacctgaggtcaggagttcgagaccagcctggcaaacatggcaaaaccccgtctctactaaaaatacaaaaattagctgggcatggtggcgcgcgcctgtgatcccagctactcgggagtctgaggcaggaaaattgcttgaacctgggaggcagaggttgcagtgacctgagattgtgccactgcwctccagcctgggagacagagcgagattctgtcccctccaccaaaaaaaaaaaaaaaaaaaaaaaaaaaaagaaaaaagtaattatgggggctgggcacagtggttcacgcctgtaatcccagcactttgggaggtcgaagcgggtggatcacctgaggtcagcagtttgagaccacctggcccacatggtgaaactccgtct

SEQ ID NO: 791969 - DNA, 517 bp, Homo sapiens
cacagcattgacttgaaagttactgtatggaaaagcattaaggaaacagccttcagttgccttccttccctggaccgtagagtggccggttttccctgatggtggcactgaatgaccaaagtgacaggcagcatctaggcagggctgtgcacagtcaccaccgctggatttcaaagttcctgaaycaagatcgtctgacctgttctccggctctttggcaggttctgtctccggcaggctttgaggatgaaggctgcgggcattctgaccctcattggctgcctggtcacaggcgccgagtccaaaatctacactcgttgcaaactggcaaaaatattctcgagggctggcctggacaattactggggcttcagccttggaaactgtgagactctttctttcctgctctccttctgtccttgacctttcccctgagatgttgaaggtcctggccacactccctgctgtgtcttcccaactacccctgctctgccctcaccgcactcaggggtggctg

SEQ ID NO: 791970 - DNA, 517 bp, Homo sapiens
cacagcattgacttgaaagttactgtatggaaaagcattaaggaaacagccttcagttgccttccttccctggaccgtagagtggccggttttccctgatggtggcactgaatgaccaaagtgacaggcagcatctaggcagggctgtgcacagtcaccaccgctggatttcaaagttcctgaaccaagatcrtctgacctgttctccggctctttggcaggttctgtctccggcaggctttgaggatgaaggctgcgggcattctgaccctcattggctgcctggtcacaggcgccgagtccaaaatctacactcgttgcaaactggcaaaaatattctcgagggctggcctggacaattactggggcttcagccttggaaactgtgagactctttctttcctgctctccttctgtccttgacctttcccctgagatgttgaaggtcctggccacactccctgctgtgtcttcccaactacccctgctctgccctcaccgcactcaggggtggctg

SEQ ID NO: 791971 - DNA, 657 bp, Homo sapiens
ctccacctgcagccctggtgtgggatccgctggtggggacgtggagagcctttatgtctagctcagggattgtaaatacaccaatcagcaccctgtgtttagctcaaggtttgtgagtgcaccaatcgacactctgtatctagctgctctggtggggccttggagagcctttgtgtctagctcagggattgtaaatacacckgtgggcactctgtatctagctcaaggtttgtaaacacagcaatcagcaccctgtgtttagctcaaggtttgtgaatgcaccaatcgacactctgcatctagctgctctagtggggccttggagaacctttatgtctagctcagggattgtaaatacaccaatcagcactctgtatctagctcaaggtttgtaaacacaccaatcagcaccctgtgtttagctcaaggtttgtgaatgcaccaatcgacactctgtatctagctgctctggtggggccttggagaacgtgtgtgtcgaaactccgtatctaactaatctgatggggacgtggagaacatttgtatctagctcagggattgtaaatgcaccaatcagcgccctgtcaaaacagaccactgggctctaccaatcagcaggatgtgggtggggccagataagagaagaaaagcaggctg

SEQ ID NO: 791972 - DNA, 601 bp, Homo sapiens
gagtgaaagcattcaagtatatgctttaaaaataattttttagcctaaaaatttaaaatttgcacccaaagttttgtttcacaggttgatcaaccaattatcggagtccccttcatataagttatttcacaattgaccctgtcataaaggaaaactttcaccaaaaatacccttttttttctttttgaggttttccctttatatggagttgtggaaaagtagagtttctgacggaaactgtcttgctttatagctaaatataagagcaaatccaagtacagcagaaaacaattatccagaagtggccagggaagcattcctggcttgtagtcatgtggtctcaggaggcgggcaagccctttgcacaaaacccaaaccttacagtatgaatggcagggktgtcaaatcagggttaataattcaacacaagaaccaagcccaaaggccacccaaaactaagttcagtggctgaaacagaagcccaataggggtgtggcactgtgcccatattcaacataaaaataaataaatgggccactgtgggcagatgtgaggacatcccaagttgtcccctggggacagacctccccacccccaggtc

SEQ ID NO: 791973 - DNA, 633 bp, Homo sapiens
ggggaaaagaaataatcattgcatattaactttttctttatttctttatttttttgagacaggatctctctctgtcactcaggctggagtacagtggcacaatcacatttcactgtagccttgaacccccaggtgcaagcaatcctccacttcagcttcccaaatagccgggaccacaggtgcatgccaccacacccaattaatttttatttttttatttttttatttttttttgagacagagtctcactctgtcacccaggctggagtgcagtggtgctatcttggctcactgtaacctccacctcccaggttctaagggattcttttgcctcagcctcccaagtagctgggattacaggcgtgcgccaccatgcctggctaattttgtatttttagtagagacggggtttcaccaygttggcaagcctagtctcgaactcttgacctcaggtgatccatacacctcggcctccccaaatgctgagattacacgtgtgaaccactgcacctggcctatttttaaatttttttgtagagatgagtctccctatgtttcccaggctggtcttgaactcctgggctcagttgatcctcctgcttcagtcttccaaaatgctgggattaaaggcac

SEQ ID NO: 791974 - DNA, 633 bp, Homo sapiens
ggggaaaagaaataatcattgcatattaactttttctttatttctttatttttttgagacaggatctctctctgtcactcaggctggagtacagtggcacaatcacatttcactgtagccttgaacccccaggtgcaagcaatcctccacttcagcttcccaaatagccgggaccacaggtgcatgccaccacacccaattaatttttatttttttatttttttatttttttttgagacagagtctcactctgtcacccaggctggagtgcagtggtgctatcttggctcactgtaacctccacctcccaggttctaagggattcttttgcctcagcctcccaagtagctgggattacaggcgtgcgccaccatgcctggctaattttgtatttttagtagagacggggtttcaccatgttggcaagcctagtctcgaactcttgacctcaggtgatccatacrcctcggcctccccaaatgctgagattacacgtgtgaaccactgcacctggcctatttttaaatttttttgtagagatgagtctccctatgtttcccaggctggtcttgaactcctgggctcagttgatcctcctgcttcagtcttccaaaatgctgggattaaaggcac

SEQ ID NO: 791975 - DNA, 633 bp, Homo sapiens
ggggaaaagaaataatcattgcatattaactttttctttatttctttatttttttgagacaggatctctctctgtcactcaggctggagtacagtggcacaatcacatttcactgtagccttgaacccccaggtgcaagcaatcctccacttcagcttcccaaatagccgggaccacaggtgcatgccaccacacccaattaatttttatttttttatttttttatttttttttgagacagagtctcactctgtcacccaggctggagtgcagtggtgctatcttggctcactgtaacctccacctcccaggttctaagggattcttttgcctcagcctcccaagtagctgggattacaggcgtgcgccaccatgcctggctaattttgtatttttagtagagacggggtttcaccatgttggcaagcctagtctcgaactcttgacctcaggtgatccatacamctcggcctccccaaatgctgagattacacgtgtgaaccactgcacctggcctatttttaaatttttttgtagagatgagtctccctatgtttcccaggctggtcttgaactcctgggctcagttgatcctcctgcttcagtcttccaaaatgctgggattaaaggcac

SEQ ID NO: 791976 - DNA, 561 bp, Homo sapiens
tgacccactgctgtcctcattccctttgttggagctggagctctgtggccctgtcttcaaagaacccatacacctagctggggccccctccagccatttcttttttcttttcttttctttttctttctttctctttctttctttctctttctttctttctttttctttctttctttcttttctttctttctttctctctctttttttttttttgatggattctcactctgttgcccaggctggagtgcagaggtgcartcttggctcactgcaacctctgtctcctgggttcaagcagttctcctgccccagcttacccagtagctgggattacaggtgcgtgccaccacgcccagctaatttttgtatttttagtagagatggggcttcaccatgttggccaggctggttgcgaactcctgacctcaggagatcctcctgcttcggcctcccaaagtgctgggattacaggtgtgagctacagcgcccagccccctccagccatttctattgcacccaaacccaaagttggggggtctctttgcctcacagcctgttttc

SEQ ID NO: 791977 - DNA, 551 bp, Homo sapiens
ggagccagttctggggactcaccctctactgtatccaggccaaatcccaaggagaggaagatcacaggcaggcatgctccccagggccacagactaggcactgccattgtcccagccctggcttgtgtccagtcccggctctcctcccggtgactctggggagaacggtgtgataagccctaagggacacagagaccagggttcagataggagagggagggcaggggcagagagacaaggaatcccacacagagacagcaggagacagaaaaaaagaaatgagagtcacaragacacaaagacagtgacaggcagttggagacagagagactcagcatgagattgagagatggggacagagatgcagacagtgacagggagagtctcgggcctccagagggagaaaatgacacagggttctgagcaaaaggcaggccgagaggccagccaaccctgagggcggagcagcaggctggggaccgctcccaaggagggcagcgggggtcccggggcgcgtgggactccgcagggagagtctccctggatccctc

SEQ ID NO: 791978 - DNA, 410 bp, Homo sapiens
ggaatgaatgctcattggtaagtggttgtatcatctcctgctatatatattttatttatcttagtagtttcattatttttagataatatttttagaaaaaagattttgtcttggatatgtttataactctatatctcctttataaacatatgcaakacatatacacatatgcatgtcttacatatatttataatactacatctctttttcttatttcatcccagagagatgcaaaaaatctatttactagcattgattctattagtcattatatataccatctactcacaaaaaatgtttctgttgctttaaaatagataattgagctttaaaataaaattgtattcagtactaggtaactaacactaaagattaaataactctgagctttaaaatataattgtattcag

SEQ ID NO: 791979 - DNA, 606 bp, Homo sapiens
actgtttggcaagatctcccaagcagtggtttacaaattgtgtggcttcactactattaggctgttcaattaattcaatgggctatgaacagatttataattgaaatggaagagaataaaatacatcagattgaactttataatttttatgttacactgcaaatgaaaaacttgcaaaattttcagtgtttgtatgaatgtgtatgtatatgcttgtggtaaatatattacttttattacttactctggtttttatttgaaaagttttaaagcctagagcaggatttctcatgcaagagttaccaaataatccatttaaaacataggtaataataataataataataataataataataataaaagtatgcatagtatttgcttatatcgatttatgtaataaaatatacacgtacaaagatatgcaacaatmatttataaagattaggaataaatttattattcattttactttacgtagtaaaaatgccagaaagttccagttaaataatacaatttaaataacattaacatggcacatgcacctgctttcctgaatttaaactgaccaggttgtgtttaataatatgaagctgtattagcacc

SEQ ID NO: 791980 - DNA, 609 bp, Homo sapiens
tggaagttaggacaaagaggcccagaattggcacagataccaacagaccattcgttgaagaagaaatccaaatggccataaggtgtgtgtaaaaatgctcagttgcaccaacagctaggggaagcaagtgaaaacaatgatacrcaattttatactcatcagattgggaagaattgacaaatgtgatattatcaagtgctggctatggtgccgctaggaatgtaaactggcacatccattgaagagagtattttaggaatgactggtaacgttgaaaatgtgcatgcccctcatctgacctatgcaatatgcttacaaaaaacatttaacctgataatcatgaggaagcaataggcaaatccaaattggtgagtattctgcaagacaactggtctgggttcaagagcatcaatgtcattttaaagaagaaaccagattaagtctggccgtggtggctcacacctgtaattccagcactttggaaggctgaggcaggtggatcatttgaactcaggagtttgagaccagactgggcaatatggtgaaacccctttccacaaaaaatacaaaaaattagccaggcatggggtggcatgtgcctgtggtccc

SEQ ID NO: 791981 - DNA, 609 bp, Homo sapiens
tggaagttaggacaaagaggcccagaattggcacagataccaacagaccattcgttgaagaagaaatccaaatggccataaggtgtgtgtaaaaatgctcagttgcaccaacagctaggggaagcaagtgaaaacaatgatacgcaattttatactcatcagattgggaagaattgacaaatgtgatattatcaagtgctggctatggtgccgctaggaatgtaaactggcacatccattgaagagagtattttaggaatgactggtaacgttgaaaatgtgcatgcccctcatctgacctatgcaatatgcttacaaaaaacatttaacctgataatcatgaggaagcaataggcaaatccaaattggtgagtattctgcaagacaactggtctgggttcaagagcatcaatgtcattttaaaraagaaaccagattaagtctggccgtggtggctcacacctgtaattccagcactttggaaggctgaggcaggtggatcatttgaactcaggagtttgagaccagactgggcaatatggtgaaacccctttccacaaaaaatacaaaaaattagccaggcatggggtggcatgtgcctgtggtccc

SEQ ID NO: 791982 - DNA, 609 bp, Homo sapiens
tggaagttaggacaaagaggcccagaattggcacagataccaacagaccattcgttgaagaagaaatccaaatggccataaggtgtgtgtaaaaatgctcagttgcaccaacagctaggggaagcaagtgaaaacaatgatacgcaattttatactcatcagattgggaagaattgacaaatgtgatattatcaagtgctggctatggtgccgctaggaatgtaaactggcacatccattgaagagagtattttaggaatgactggtaacgttgaaaatgtgcatgcccctcatctgacctatgcaatatgcttacaaaaaacatttaacctgataatcatgaggaagcaataggcaaatccaaattggtgagtattctgcaagacaactggtctgggttcaagagcatcaatgtcattttaaagaagaaaccagattaagtctggccrtggtggctcacacctgtaattccagcactttggaaggctgaggcaggtggatcatttgaactcaggagtttgagaccagactgggcaatatggtgaaacccctttccacaaaaaatacaaaaaattagccaggcatggggtggcatgtgcctgtggtccc

SEQ ID NO: 791983 - DNA, 629 bp, Homo sapiens
ggggcctgctactgcagtggcattttccaggggttctttagtctggggcatgttgagatatccctttcaaaaggtagggcaagtcacagcatctggccctcccatctattgagaaggaagcacagtgccttgtgggcacttcagattttagagagtagctcatgtttcaggtcaaagtaccactgaagtaccatttaccagtgataccaatgaagtaccacttcaacccacttaccaatcgaactgaatagttgcttgttttgagtggggcccagaacaaaaaggtccaggctgccatgcaagtggctctgccacytgggtgtatgacccagcagatccaatggtgcttgacgtgtatatgcacatagagatgctacatggaagctcagaggggcatctgtgggtaaagcatagggcagaccttaagggttttggagcaaagccatgtcatcaactgcagaggactactctccttttgagaaacagtatctggcttgccagcaggtcttggtagacactgaatgcttgacctcaggttaccaagttatcatgagacctgagttgcctatcatgaactgggtgttaacaggcccatcaaaacaaagttcagcatggatagcagcaattgc

SEQ ID NO: 791984 - DNA, 625 bp, Homo sapiens
tccctttggatccttgtcaaaaataaattttccacatttgtaagtctgattctcaatcatctattctgttccattgacctatttgtttatctttatatcaataccatactatcttgattacagtaacttttttttaaggcagagtctcactctgtcacccaggttggaatgcagggcacaatcatagctcactgaagcctcgacctcccagactcaagcaattctcctgcctcagcctgctgggtagctgggactacaagtgtgtgccaccaagccatgmtaatttttgtttgtttgtttgtttgtgaagacggggtcttgctatgttgtccaggctggtcttgaactcctgggctcaagcaattctcccaccttggcctcccaaagtgctgggattacaggtatgagttgccatgcctggcccactttataagtcttaaaatcaggtagtgtaagtcctgcaatactattcatcttttcatagttgatttggctattctagatcccttgaatttccatatgaattttgggatcaccttgtcaatttctacaagaaaagtctgttaggattttgattgagagtgcactgactaatgagcaaatgagaattgacattgtaacaata

SEQ ID NO: 791985 - DNA, 559 bp, Homo sapiens
tgctttcagaacactaattatattgaagcatgaagaaatggcagagaatttcaacccaaatattacgcagtagaactgcaaaaattaggataggaaagtctaggaaatgtgtgttatcttttgaccccaagagcttagggacagggacttcaaaggyataaatgacatgtcatattatctataggtgctacactctatcatgttgatgtagtttaatttctatggtagttcttatatggtggaatttgtagcggtgttagaaaaatatgatcagacaaatttcctgtataatagtctgagaaatggctagaacatagagaaaaacgacttaacatatgacctgaagaagctggcgtttcttagaaggttaagaatgatcctcttcagcctgaagagataagtagggatcccaaaggaagagagacacagggttaacccaaactttgacttttgaagattgcaaaagagagtaattagttccaagtagacacagcacctctctcagcagggcacatgggccaacaagcagagtggaggctggatgtcatccctccagcca

SEQ ID NO: 791986 - DNA, 559 bp, Homo sapiens
tgctttcagaacactaattatattgaagcatgaagaaatggcagagaatttcaacccaaatattacgcagtagaactgcaaaaattaggataggaaagtctaggaaatgtgtgttatcttttgaccccaagagcttagggacagggacttcaaaggtataaatgacatgtcatattatctataggtgctacactctatcatgttgatgtagtttwatttctatggtagttcttatatggtggaatttgtagcggtgttagaaaaatatgatcagacaaatttcctgtataatagtctgagaaatggctagaacatagagaaaaacgacttaacatatgacctgaagaagctggcgtttcttagaaggttaagaatgatcctcttcagcctgaagagataagtagggatcccaaaggaagagagacacagggttaacccaaactttgacttttgaagattgcaaaagagagtaattagttccaagtagacacagcacctctctcagcagggcacatgggccaacaagcagagtggaggctggatgtcatccctccagcca

SEQ ID NO: 791987 - DNA, 559 bp, Homo sapiens
tgctttcagaacactaattatattgaagcatgaagaaatggcagagaatttcaacccaaatattacgcagtagaactgcaaaaattaggataggaaagtctaggaaatgtgtgttatcttttgaccccaagagcttagggacagggacttcaaaggtataaatgacatgtcatattatctataggtgctacactctatcatgttgatgtagtttaatttctatggtagttcttatatggtggaatttgtagcggtgttagaaaaatatgatcagacaaatttcctgtataatagtctgagaaatggctagaacatagagaaaaacgacttaacatatgacctgaagaagctggcrtttcttagaaggttaagaatgatcctcttcagcctgaagagataagtagggatcccaaaggaagagagacacagggttaacccaaactttgacttttgaagattgcaaaagagagtaattagttccaagtagacacagcacctctctcagcagggcacatgggccaacaagcagagtggaggctggatgtcatccctccagcca

SEQ ID NO: 791988 - DNA, 609 bp, Homo sapiens
gagttaacattgtgtgccctgtttaaaaccttgcccacattttgggggatttctagttaatgaaaccactgcttagagataaacattgggatttcctatcagcatccctttctacccttatactgacattagtgaccaagccggttgtcaggggtaggaggggaagagggcaagcactgtatttgacaatccaggggagcagagaataagragaaataattgtaggcaaaaatcatggtccagtttcctttccaagaggacttaggagagctgtgggagttagaggaaaaactgggcttggcaataagaagagtcaaggcaatctggaaccctctttgccatcttggaccttttccctcatctctaccctcctggtcccattttgaaattcattggtatatcgtaagtgcctaataaaaagtgaaagtattgtggaaatgttaataataatgtctttatgtactaggactcagggataaacaatctctgtttccatttctttgttttctttccctccttctttgcactttcccagactctccttaccttgcctggcattttttcatcttggcactgcatttcttcacagatagttgttcacaatccttc

SEQ ID NO: 791989 - DNA, 583 bp, Homo sapiens
tcctgcactgggcggaaagagacaggcctaaagaaacccactaagcttggtcattctctaagaactacctgataaggtgaattctgaaggtggagtctgttagctaacttcattccttgccgcagaaccacaaggtttttattgaagggaaactcaaatagcatacctccctggctactatggaacattaaatagtttttaaatctttgggaaaagagtggaatgttgaatgaaaccactctttcaacctccattgtagccagtgggggtgaggaggragggctacaatcgaaagataatttaaaataatcctaatatagtcagtcattctgttaatcagcataattttttaatcatttgtggtttaggtgccctttctggaggttttacttgtcattgtgtttatgggaaattgacagttattaattgtttttaagcttgaaccagtccttattagaattcaaatgtatttcccactactgggtccaatatctatgtaatcatttatcttatagtgaattttactgtaagcgtaatatttacaagaagcaatttgtcattcctgggttaagtatagaaactt

SEQ ID NO: 791990 - DNA, 584 bp, Homo sapiens
gggttcaagcgattctcctgcctcagcctcccaagtagctaggattcaggcgcctgccaccacacctggctaatttttgtatttttagtagagttggagtttcgccatgttggccaggctggtctcgaactcctgtccttaagtgatctgcctgcctcrgcctcccaaagtgctgggattacaggtgtgagccaccaggcctggcccggcctgtgcattgttgagtgtttagcaacatccctggcttctacccactcgatgctctcagcagttctctcccactcaagctgtgatactcaaaattgtccccagatgttaccaaatgtcacctgaggggcagaatcgccctggtcaaggcccccgtcttggtggtgctcgcccttctcctcgaacaggcagtaaggccgcagctctaaggccgaatcttaatggcaaagctcatacaggtgagggaggaagaattagaatggagaatggaaatgcgtggggtgatttttaaagataccatcctgatttatatatactgtaagtaatggaataatgatgagattgtttgaccctaacactggtatcctactttttaa

SEQ ID NO: 791991 - DNA, 625 bp, Homo sapiens
tctcttaccccattctctctctcagcttctacctttactggaaaaatttaagtaaccagataagttccaaagacagtcactgccacctttactcatccacctttctttgcaccttcacttctgccttcttgcctctttcrcaaagtaacaccacctttctctctagtgcacgaggtctcagctttgttagggattctaccctctctctcctacgttgccagctgttggctttgtattggatcattcccatcactcaacaagcttatataatttctctcatctgaagatcactctcatgacccttcttcctccagcttatgtacatttctttgctttccatttgagacaaaactctgaaagatgtcacttgctgtcattaattcattgcttcccactttcttttgattccactctcatcagactagaatccttgaactcaactaactgctcttgtcaagatcaccttgacctccatgttgctgaagccaaaggtccattctcagtcctcatccgatttgacccttcagcagcattggaaaagatttattgagtgcttccaactccttgaaacattttctgcatttggcttctaggacaccacacactgctttgttttctctgtcac

SEQ ID NO: 791992 - DNA, 625 bp, Homo sapiens
tctcttaccccattctctctctcagcttctacctttactggaaaaatttaagtaaccagataagttccaaagacagtcactgccacctttactcatccacctttctttgcaccttcacttctgccttcttgcctctttcgcaaagtaacaccacctttctctctagtgcacgaggtctcagctttgttagggattctaccctctctctcctacgttgccagctgttggctttgtattggatcattcccatcactcaacaagcttatatmatttctctcatctgaagatcactctcatgacccttcttcctccagcttatgtacatttctttgctttccatttgagacaaaactctgaaagatgtcacttgctgtcattaattcattgcttcccactttcttttgattccactctcatcagactagaatccttgaactcaactaactgctcttgtcaagatcaccttgacctccatgttgctgaagccaaaggtccattctcagtcctcatccgatttgacccttcagcagcattggaaaagatttattgagtgcttccaactccttgaaacattttctgcatttggcttctaggacaccacacactgctttgttttctctgtcac

SEQ ID NO: 791993 - DNA, 625 bp, Homo sapiens
tctcttaccccattctctctctcagcttctacctttactggaaaaatttaagtaaccagataagttccaaagacagtcactgccacctttactcatccacctttctttgcaccttcacttctgccttcttgcctctttcgcaaagtaacaccacctttctctctagtgcacgaggtctcagctttgttagggattctaccctctctctcctacgttgccagctgttggctttgtattggatcattcccatcactcaacaagcttatataatttctctcatctgaagatcactctcatgacccttcttcctccagcttatgtacatttctttgctttccatttgagacaaaactctgaaagatgtcacttgctgtcattaattcaytgcttcccactttcttttgattccactctcatcagactagaatccttgaactcaactaactgctcttgtcaagatcaccttgacctccatgttgctgaagccaaaggtccattctcagtcctcatccgatttgacccttcagcagcattggaaaagatttattgagtgcttccaactccttgaaacattttctgcatttggcttctaggacaccacacactgctttgttttctctgtcac

SEQ ID NO: 791994 - DNA, 625 bp, Homo sapiens
tctcttaccccattctctctctcagcttctacctttactggaaaaatttaagtaaccagataagttccaaagacagtcactgccacctttactcatccacctttctttgcaccttcacttctgccttcttgcctctttcgcaaagtaacaccacctttctctctagtgcacgaggtctcagctttgttagggattctaccctctctctcctacgttgccagctgttggctttgtattggatcattcccatcactcaacaagcttatataatttctctcatctgaagatcactctcatgacccttcttcctccagcttatgtacatttctttgctttccatttgagacaaaactctgaaagatgtcacttgctgtcattaattcattgcttcccactttcttttgattccastctcatcagactagaatccttgaactcaactaactgctcttgtcaagatcaccttgacctccatgttgctgaagccaaaggtccattctcagtcctcatccgatttgacccttcagcagcattggaaaagatttattgagtgcttccaactccttgaaacattttctgcatttggcttctaggacaccacacactgctttgttttctctgtcac

SEQ ID NO: 791995 - DNA, 716 bp, Homo sapiens
cttgttgctgcaaagatcatgatctcgttctttttttctggctgtgaagtagtccacctctagcctgttcttaaaattcatagaatcttacatacagtgtgtgctctttcctgtctgatttcttttgctcagattcctgcctgtagactctgccatgattttgcaaatgttgcagttgtcatttttttttgtagtacttcattggtgaatgtggttttattttgctgtctgtattgatatggattgcttctatgctttggctagtactaataatgctgttatgaacatttctgcccacgttttctggtaacatagcactcccctatgaaatgtttcgacctcagggtaggtacactttagctttcggaaatgtccccaagtaattttccaaagtgtatgaattccacttgtcacacatccttatgaayactatgttatctttttgttaaagcccattttgatatagagtaaaaagattatccccttgattaaatttaaggtaggctcctctgagttctcctttctttaaattttttaattatactttaagttctagggtacatgtgcacaacgtgcaggtttgttacatatgtatacatgtgccatgctggtgtgctgcacacattaacttgtcatttacattaggtatatctcccaatgctattgggaaaactggctagccatatgtagaaagctgaaactggatcccttcctta

SEQ ID NO: 791996 - DNA, 716 bp, Homo sapiens
cttgttgctgcaaagatcatgatctcgttctttttttctggctgtgaagtagtccacctctagcctgttcttaaaattcatagaatcttacatacagtgtgtgctctttcctgtctgatttcttttgctcagattcctgcctgtagactctgccatgattttgcaaatgttgcagttgtcatttttttttgtagtacttcattggtgaatgtggttttattttgctgtctgtattgatatggattgcttctatgctttggctagtactaataatgctgttatgaacatttctgcccacgttttctggtaacatagcactcccctatgaaatgtttcgacctcagggtaggtacactttagctttcggaaatgtccccaagtaattttccaaagtgtatgaattccacttgtcacacatccttatgaacactatgttatctttttkttaaagcccattttgatatagagtaaaaagattatccccttgattaaatttaaggtaggctcctctgagttctcctttctttaaattttttaattatactttaagttctagggtacatgtgcacaacgtgcaggtttgttacatatgtatacatgtgccatgctggtgtgctgcacacattaacttgtcatttacattaggtatatctcccaatgctattgggaaaactggctagccatatgtagaaagctgaaactggatcccttcctta

SEQ ID NO: 791997 - DNA, 529 bp, Homo sapiens
tccaatggacctccaataccttcagtagcaggcttttcagcagaaatcctataggccaggagagagtggcatgacatatttaaaatgctgaaaaaaattaaaaaagttttaccctagaatagtatatgtctggcaaaaatatctttcaaacatgaaggagaaacaaagatcttcccaaagaaaagctaaggaatttcatcaataccagactgtttacaagaaatgctaaagggagttattcaatctgaaagaaaaggatgttaatgagcaagaagaaattatccgaaggtccaaaattcatgggtaatagtaagcacacagagaaacacagaatagcataacactggcattgtggtgtgtgaacttctcttgacttaaataraaagactaaattatgaaccaatcaaaaataataactacaactttttaagacagtacaataacactaaagagaaaaaacaaaaagttaaaaagcaggggggattaaatctagagtttttattagtttccattttgcaagtttgtttgt

SEQ ID NO: 791998 - DNA, 508 bp, Homo sapiens
agaattaaagtgagcttgaagacaggctattcaaaaatacacagtcagaggagacaaaagaaaacataataaaaaacaacaaagcacacctataagatctagaaaatagcctcaaaagggcaaatctaagagtatttggccttaaagaggaggtagagaaagaaataggagtagaaagtttcttcaaagggatagtatcaggccagatgcggtggctcacacctgtaatcccagcacttygggaggccaaggtgggtggatcatttgagatcaggagctcgagaccagcctggccaacagggtgaaaccccatctctactataaatataaaaattagccaggcatagtggctcacgcccgctatcccagctacttgggaggctgaggcaggagaatcgcttcaacccaggaggtggaggttgcagtgagctgagatcacaccactgtattccaacctgggggacagagtgagactccgtctcaaaaaaacaaacaaacaaacaaaaaa

SEQ ID NO: 791999 - DNA, 567 bp, Homo sapiens
ggatggctaggtagatttagaatggaagatgacaggtactatggcagaggtggcagaggaaaaatttgctctatgaggtgaccctggggcagcttcgattctggttatgtaacccctgactcagataggtcctctctgtgagtctcttgatatggagcagatgasgtccctggctgccctatgtcacaaagaagtttcaagaaataaacactgattctgtctgtcttatgatttggtctaacttcggataatgatgtacactgtcagcagatccttctgctgcaattttaccatgtaatttgctaaggaatatttacctttgcactcaatgcatccagaaagtagagatagaaggttgtattttcatgctcttgctagggtaaaggaaagtttactgacctcaaagccatgtgtttttatcttagagtgggaaaatacacagaatcaaagaactgaagtgttctagatctgcctctgcctcaagaagtttcctggttccccgtctcatttcacaaatgaggatacggaggcctagaggcttaaacaatatgcccaagacagcaagac

SEQ ID NO: 792000 - DNA, 647 bp, Homo sapiens
atattctatatatatattctatatatattctatatatatattctatatatattctatatatatattctatatatattctatatatattctatatatattctatatatatatatatatatatatatatattctgaacaattttagatwtacagataaactctaaaaatggtctggtccagatagttcctgtgtatccttcactcagtttttcctaatgttaagatctttttttgttttgttttgagacagggtctctctctatcgcccaagctgtagtgcagtggcacgatcacagctactgcagcctggacctgccaggctcaagcgatccttccatttcagcctcccgagcagctgggactacaggcaggtgccaccatgctaggctaattttcttactttttgtagagagagaatctctacacaggaagactgacctgaaggctcaccagtgtctttatccaccaggtatcatgggatatcacattgtgttaaaagggtggtaaaacaacatccattctgaccctactgtctaattgagaatttgtaagttttttacagtggccagatttacctgatcattaccattataatggtcagattaatcatgatctcatagcaattttttgaattctacattttaagta

SEQ ID NO: 792001 - DNA, 611 bp, Homo sapiens
ggagccagtcccctgtgcataccaagggatgactgaagacaaagtatctagtcctgcttatggtcctggccagttgtttggccttataaaaaccatgtgaactcttctgagtcttggagatcaattagatgaatgccgmtgccctctcacaaactaacatcaataaatatgtctgattgcattcttctattaaaagagaattcaacaaaatacagtgaaatataaatgcagccaattcttgtttatctcttttaatagaggaaagtattactgtaaatcatccagaagctatgtctctgctggtttaatgagaatgcgatgaagctacaatcagtagatccaacacaagatctgagatctttctcaatcattcaaaacattagtctgaactgaactctgttgtcctcatttctttctttttttttttttatagttcttacctaatcaggagggaagcagtgtgtaagagggctagagaaatacatggatattttgctttagaaattcttcctcattagctgagttgagtatggacagcctcacccttctttctaattttctaatggattacagattgcactaacagataatcaaccaataaatggactact

SEQ ID NO: 792002 - DNA, 630 bp, Homo sapiens
gtgtcttcacgcatgtgcctggaggttgatgcctgtcagcctggtcctcagctggagctattaactgtaccatctgcacgtggcctgggcttcctcatagcatggaagtcttagtagagtcagatcttttgcctgaygactcagaactccaaaactaagagtgatagagcagaacctgcattgcctcttaacacctagaattggaagacacatagcatcccttctgccataattgtcacaaatctacccaggcatagaagaatagaatgtagactccatctcccaatgggggtcaaggccacagtttagagggtgatgtggcctggaggactgttgcagccatctttgggaagtgtcatgccataagccctcccctaaagtttttgtttttgtttttgtttttgtttttttgagacagagtctctctctgtcacccaggatggagtgatatggcacgatcttggctcactgcagcctctgcctcccaggttcaagcaattctcctgcctcagcctccctggtaactgggattacagatttgtgccaccacacccggctaatttttgtatttttttttttttttttttttagtagagacagggtttcatcatgatggcaaggctggtctca

SEQ ID NO: 792003 - DNA, 615 bp, Homo sapiens
tacctgctaaggtttgaatggtggtgtccccttcaaaattcatgttgaaacttaacctccaattcaacagtattaacagctgtaacctttgggaggtgattaagtcacctcaaccgtcacaagtgggattagcaccattataaaagggatccaagataawgagagcaatgttgaggacacagcattcattccctccagaggatgcagcaatatggcgctatcatggaagcagaaagcagccctcaccagacatgcagcctttcagcaccttgatcttagatttcccagcttccaggactgtaagaaataaatttctattatttatagattatccagtgtgtggtactttgttacagcagcacaaagatagcacctaacaacaaagcccaaaaatgcgtgaagtaaaaactgattgatggaattgaatagagaaacaggcaattcaacaatcacagttggagataaaaataacccacttttcaataacagataaagcaactagactgaacatcaacaaggaaacagaagacttgaacaatattactgtgaagtaaaagcacaaactgcatttcttctgttctcataatacaatgtatgaagttttttcccccacac

SEQ ID NO: 792004 - DNA, 615 bp, Homo sapiens
tacctgctaaggtttgaatggtggtgtccccttcaaaattcatgttgaaacttaacctccaattcaacagtattaacagctgtaacctttgggaggtgattaagtcacctcaaccgtcacaagtgggattagcaccattataaaagggatccaagataatgagagcaatgttgaggacacagcattcattccctccagaggatgcagcaatatggcgctatcatggaagcagaaagcagscctcaccagacatgcagcctttcagcaccttgatcttagatttcccagcttccaggactgtaagaaataaatttctattatttatagattatccagtgtgtggtactttgttacagcagcacaaagatagcacctaacaacaaagcccaaaaatgcgtgaagtaaaaactgattgatggaattgaatagagaaacaggcaattcaacaatcacagttggagataaaaataacccacttttcaataacagataaagcaactagactgaacatcaacaaggaaacagaagacttgaacaatattactgtgaagtaaaagcacaaactgcatttcttctgttctcataatacaatgtatgaagttttttcccccacac

SEQ ID NO: 792005 - DNA, 591 bp, Homo sapiens
ttgttacagcagcacaaagatagcacctaacaacaaagcccaaaaatgcgtgaagtaaaaactgattgatggaattgaatagagaaacaggcaattcaacaatcacagttggagataaaaataacccacttttcaataacagataaagcaactagactgaacatcaacaaggaaacagaagacttgaacaatattactgtgaagtaaaagcacaaactgcatttcttctgttctcataatacaatgtatgaagttttttcccccacacagcaagaaagcaatcagttckgcagcagacaccagctgggtgtccttcagttcaatactgacactatctacctggagatagcatcagatcccacaatttgaggcctcagttttacaagacagccccccacttctgatgccaatcataaaccccaggttgtttttgatctgtgcttctgaccaactagctataaatcagggttatcacaatttcctccttgggtttcattagtttgctaaagtggtttacagaactcagggaaacactttcatttaccaattggttataaaggatattataaaggataaagatgaagagatgca

SEQ ID NO: 792006 - DNA, 591 bp, Homo sapiens
ttgttacagcagcacaaagatagcacctaacaacaaagcccaaaaatgcgtgaagtaaaaactgattgatggaattgaatagagaaacaggcaattcaacaatcacagttggagataaaaataacccacttttcaataacagataaagcaactagactgaacatcaacaaggaaacagaagacttgaacaatattactgtgaagtaaaagcacaaactgcatttcttctgttctcataatacaatgtatgaagttttttcccccacacagcaagaaagcaatcagttctgcagcagacaccagctgggtgtccttcagttcaatactgacactrtctacctggagatagcatcagatcccacaatttgaggcctcagttttacaagacagccccccacttctgatgccaatcataaaccccaggttgtttttgatctgtgcttctgaccaactagctataaatcagggttatcacaatttcctccttgggtttcattagtttgctaaagtggtttacagaactcagggaaacactttcatttaccaattggttataaaggatattataaaggataaagatgaagagatgca

SEQ ID NO: 792007 - DNA, 613 bp, Homo sapiens
ttttttcccccacacagcaagaaagcaatcagttctgcagcagacaccagctgggtgtccttcagttcaatactgacactatctacctggagatagcatcagatcccacaatttgaggcctcagttttacaagacagccccccacttctgatgccaatcataaaccccaggttgtttttgatctgtgcttctgaccaactagctataaatcagggttatcacaatttcctccttgggtttcattagtttgctaaagtggtttacagaactcagggaaacactttcatttaccaattggttataaaggatattataaaggataaagatgaagagatgcatagggtgaggtatagaaaagggtgtggagtttccatgccctcccccrgtatgccactctccaggaacctccatatgttcagctgtctggaagctcctcgtactctgtcctcctgcctcttttatggagacttcattagaaaggcacaattgaagcacagacaaccaggtagaaatgtgattgaacaaaaagttatgatctaatactaacagactaagtgggcaaacccaggcaggtctatgtgttcagattcttcttggcctctctgtgcatcat

SEQ ID NO: 792008 - DNA, 629 bp, Homo sapiens
ttgaaaagattaacagaatagatagactgctagccagactaataaagaagaaaagagagaagaatcaaatagacacaataaaaaatgataaaggggatatcaccactgaacccacagaaatacagactacgtcagagaatactataaacacccttatgcaaataaactagaaaacctagaagaaatggataaattcctggacatatacatcctcccaagactaaaccaggaagaagtcaaatccctaaatagacctgaaattgaggcagtacttaatagcctacaaaccaaaaaaaagcccaggaacagatggattcacagtcaaattctgccagagttagaaagaggagctggtggctgggtgcggtggctcacgtctgtaatcccagcactttgggaggccgaggcgggcagaacacgaggtcaggagatcgagaccatcctggttaacacggtgaaatcccrtctctttttggtatttttaataccaaaaaattagccaggcatggtggcgggtgcctgtaatcccagctactcgtgaggctgaggcagaagaatggtgtgaacccagaaggcagagcttgcagtcagccgagattgtgccactacactccagcatgggggacaga

SEQ ID NO: 792009 - DNA, 468 bp, Homo sapiens
aatattgttatgtgtgaatttgatcccgtcatcatgatgctagccagttattttgcagacttgtttatgtggttgcttcatagtgtcactggtctgtgtactttagtgtatttttgtaatggataatatagtttttcctttccatatttagtgcttctttcaggagctcttgcaaggcagaccttgtggtgatgaatttcctcagtgtttgtttgtctgaaaaggatcttatttctcctttgcttatgaagcttaatttggctggtaatgaaattctgggttggaaattcttttctttaagaatgttgaatattggcctccaatctcttctggcttctagggtttctgctgagaggtctgctgttagtttgatrggcttccctttgtaggtgacctggcctttctctctggttgcccttaacattttttccttcatttgacctcacagaatctgatgattatgtgtct

SEQ ID NO: 792010 - DNA, 589 bp, Homo sapiens
gcagtcagagttttctgatcttggatccccttcatctcctttcaggtgccgatgatgccagaatttatcttaccacaaatgtaagaggcaatattagtcataacattttggcttctcagtgaatttctttgctttccacagcgtgatctttataggacgctatcctttcaagtcccatgcttctccctcttccactaaaaagagttcataattcttgtccygatttgccaattctgctatcctaaatttccaattaagatacacctacataagtgttgtcataggagtttagaaagagcttgttcaactcttgcttccaagtttgtctctttcctacttatcattttcctcctctaataaatgctaattaaaatacttttcttgctggtttagagccttctgttttaatattcttctgtgtaaagaggctaaatttagttttccctgaattcttcagaccattttaaacagaaatgaatatgtaaaaccactttagactgtggtgtctgtgttttctcaacaagatagctgtaagtactatagaaatatggttatatattttaatagaagccagcagaataaaccagat

SEQ ID NO: 792011 - DNA, 657 bp, Homo sapiens
accctcaacaaactaggcatcaaaggaacacacctcaaaataaaaagagccatctatgacaaacccacagccaacatcatactcaatgggcaaaacctagaagcattccccttgagaactggaacaagacaaagacgccaactttcaccactcctattcaacatagtactgggctccctagccagagcaaccagccaagggaaagtaacaaatggcatccaaataagaaaagtataagtcaaactatctctctttgctggtgatatgrttctatacctagaaaacccttaagactctgtcaaaagcttcctagtactcttcaattacttcagtaaaggttcaggatacaaaatcaatgcagaaaaatcagtagcatttttatacaccaatcatattcaagttgagagccaaatcaagaatgtgatctcatttaaaatagccacaaaaaataaaatacctaggaatacatgtaaccaagaagtgaaagatttctacaaaaagaactacaaaatactgttgaaagaaatcatcgatgacacaaacaaacggaaaaacattccatgctcataaattggaagaaatcagaaacttaaaaagctaccaaccattaatatcaatatcattaaaataaccatgctgctcaaagcaatctaccaa

SEQ ID NO: 792012 - DNA, 661 bp, Homo sapiens
actttgtaggttggtagatactgctcagagcaacctatcaactactaacatcattgttcatacaattagaaaaaaaattctaaaattcgtatggaaccaaaaaagagcccgaataaccaaagcaatcctaagaaaaaagaataaagctggaggcatcacattacctgacttcaactatacaacaaatttacaaaaaccaaaacagcatggtactggtacaaaaacagacacagagaccaatggaacagaatagagaacctagaaataaaactgcacacctacaaccatctgatctttggcaaagtaaacaaaagtaagcaatggggaaacgattccctattygataaatggtgctcgtataactggctatccatatgcagaggaataaaagtggacaccttccttatagcatatgcaaaaattaactcgagagattaaagatttagatgtaagacctcaaactataaaaattctagatgaaaacctagtgaacaccctttcaacataggtgtgggtaaagaatttgtggctaagtcctcaaaaacaattgtaattaaaaaaaacaacatgtgggaccttattaaactaaagaggttttgcataacaagagaaatgatcaacggagtaaacagacagcctacagaatgggagaaaatattca

SEQ ID NO: 792013 - DNA, 573 bp, Homo sapiens
agagtctgtttcttccaattttcaatcaaaggaagaaatctcttctactytaatctgaacactgactgtcccacatctctttagacacatatcctttagctctttgactcctgactcatgccgtcttgcctctcaaatctaatcatacttgagaaaaatctgtttgcaatttctggctaggtcagctgggtaaaaatgcaaacaaaagtataattttttaaaaaaattttgagctcttggtgttagtggatgcttctcaagcaagagaacctgctattggtctctgtgacattcaatatgactcgcttcattttgtccagaagttagaaagctcctatgactcctgtggacttttcgggttgcttcatgctcaggcaggccaggcagctctgtgcagtttctgcaggcatctgcgttgtgtgccagagcagggttctcctgactcaagcagcaagtgtttgcagagagcggcagttaaagtgtctgtcactcagctcaggaagagactcctaacacttgatgcactggtcattgcttagagtaaatggattattccattttgagattgctatt

SEQ ID NO: 792014 - DNA, 585 bp, Homo sapiens
agaactcttataattcaagaagacaatctaaaaatgagcaaaagatttgaacagacactgcacaaaagaaggtatacaaatgggcaataagtacatgaaaagaagttcaacatcactagttattagggaaatgtgaattgaaatcacaatgagatatcactacacacctactagattggctacagttggaaaggttcacaataccaagtgctggaaaggatgtggagcaagtagatctctcatacattgctggtaaaaatgcaaaatcatacasgtacttgggaaagcagtatagcaatttcttacaatattaaaggtacatttaccatatgactctgcaatctattcctgtttgcgcaaaggcaaaaccacaatgacaaaaatcaggtatgtggtaaagggagaaggtgacttggtgactttttaagatgaggaaactgttgtatatcttgatagtggtagtggctaaacaattgaatagccaaaattcctcaggccacacccttaaaataggtgaattgtattgtataaatatactttaataataaataaaagtaaaaattacataaatgttcctatttatcc

SEQ ID NO: 792015 - DNA, 557 bp, Homo sapiens
acaaatagcttgtatctacaatatacgaagaactcttataattcaagaagacaatctaaaaatgagcaaaagatttgaacagacactgcacaaaagaaggtatacaaatgggcaataagtacatgaaaagaagttcaacatcactagttattagggaaatgtgaattgaaatcacaatgagatatcactacacacctactagattggctacagttggaaaggttcacaataccaagtgctggaaaggatgtggagcaagtagatctctcatacattgctggtaaaaatgcaaaatcatacaggtacttgggaaagcagtatagcaatttcttayaatattaaaggtacatttaccatatgactctgcaatctattcctgtttgcgcaaaggcaaaaccacaatgacaaaaatcaggtatgtggtaaagggagaaggtgacttggtgactttttaagatgaggaaactgttgtatatcttgatagtggtagtggctaaacaattgaatagccaaaattcctcaggccacacccttaaaataggtgaattgtattgtat

SEQ ID NO: 792016 - DNA, 557 bp, Homo sapiens
acaaatagcttgtatctacaatatacgaagaactcttataattcaagaagacaatctaaaaatgagcaaaagatttgaacagacactgcacaaaagaaggtatacaaatgggcaataagtacatgaaaagaagttcaacatcactagttattagggaaatgtgaattgaaatcacaatgagatatcactacacacctactagattggctacagttggaaaggttcacaataccaagtgctggaaaggatgtggagcaagtagatctctcatacattgctggtaaaaatgcaaaatcatacaggtacttgggaaagcagtatagcaatttcttacaatattaaaggtacatttaccatatgactctgcaatctattcctgtttgcgcaaaggcaaaaccacaatgacaaaaatcaggtatgtsgtaaagggagaaggtgacttggtgactttttaagatgaggaaactgttgtatatcttgatagtggtagtggctaaacaattgaatagccaaaattcctcaggccacacccttaaaataggtgaattgtattgtat

SEQ ID NO: 792017 - DNA, 620 bp, Homo sapiens
tcacagctgaacccgggcatattccccaggaaataaaacaaatagaagctgtatgttgttcatcagacttcagagcacaagtcctgtaacaatgaagacaccaagagaatgagaaaggacgcagattcacttctgtggacctcacttggtggactcattatagttgtcttccttgaaaacatccaaggagaagagcctttaagagagtgaatggaagtgcgacttgtaagagtgctagtaagtgagaaggggaaggcatctcggattggatggaaaggaatcagtgatttttacttgttagtgtctgagtcctttctcctgtgcaatggccgggtagtatatatttgggaaatgatatgcacactcagccacaaggagaaggcatgtttctaaactactacgtctaggaccagggagatsagatggaaaaaaatgaatggagcgctagaggaggtgaaaatctcaggttctggtctctgctctgtcacagtttcctgtgtaattttgggaatacctgtctggagtatttatttctttcctgtgataacagatagaaaagaataaatgcattccatgtatcctatccacaccatcttctggagacaggataagaatcattt

SEQ ID NO: 792018 - DNA, 483 bp, Homo sapiens
atggagatttgtacacagaaaattcttttggtgggtgataggagaaggacaggtcagaaggagaagtcaaacgtcaatgcagtccaaataaaagcccctgccaatcttacggggagctttggacctgggatggccgttcagagttgctctgaaattaagcagaaagatcaactttgactgcccccaccccaccccaccaaacccacccaacacatacacattgaccaggtactggattggatactgtctgtctttgggagggaggtgtcactgggaaacgtggcccccttagcccatggacataacttaaaaaggaactcagctwagccaccagaagtcaacacccctggcagctgggggatgaatacttaggacctgatgagagatctggatggcaccctgcagcacttgccacagatacgattactgtttttaattcttttgcctttgtcttgtgtctagattccaagaaccaggaggttg

SEQ ID NO: 792019 - DNA, 590 bp, Homo sapiens
atgagactcaaaaaagggccatatggttaaggtttaaatgtcctcctcataggggagagaaaacttgggagctgtaacaaattttagaagggtagtaagtgattttcagaggaaatgaatgcacccaggaggcaaatattattttgtaaataattatcttaggaaactgaatgggactggcaagttaagggaaggagaggggyggaactgccttgtgaacaaaggttgtcttagtatgtagaaaaagtctcctaggtaatctctccaacctgccctcaaaagaatagatgaaaagtctaactgcatgtagtgatgacttttatagtcttttcttttctcaggtgggtaatctttctggattatttcatgagattcctggagagtgagtcttcagacaattgcatgtcttttgagaagtttccttagttagataaggaaattccagacagagtccctccttgctcttggagtcaggggagaagaaacaaaagagggttaaaatgttttgggttctgagacagcttctaaggtactccatcttcatttaattcaaagtgttcagtatgccaaagcaccattgtgtggggtat

SEQ ID NO: 792020 - DNA, 619 bp, Homo sapiens
gacacacagaagatatccagaaacggtcagagagaacacaatccctccgattcattcgctaagccatttgttaacacgctggtttggggtttttcttttccacaatttttcaacacttgaggaattgaaactgccagctgttctcatctttaaatgaaatagcctgaataattgggaatttaagctagttttcattattatagtccccttcagaaatacatatgaccaaaataatgagctaatgaaataatytggacatcctgaccatgcaaaacggacgtgtaaaacattaaatgcagagccagtcaatacttagtaaatgttgatgcagacttggtttcctaaggtttaaaatgtgtaactaaatgacatataacttctgaaatatcagggcaccaaggaggaattaacaaaaggccatcaaaaagcagactgcacatgatgtagcagagaggctgtggagtcagacatgcccacatttaaactggattccatgctggctgtgtcactggagctgaaggcatgttctcagcaagcctcagtgctctcacctctaaaacgggattcagaagaatagggcgccaatttagtagattggtatggagattaaaatttaaaa

SEQ ID NO: 792021 - DNA, 631 bp, Homo sapiens
aataatacaaagagatcctatggactctttcccaaattattccctaatggaaataacttacaaaactacgatacaatatatacccaggatactgasattgatacagtcaagatgcagaatattcccatcatcataggctcccccgtggtgcccttttatagccactcccactcccttcctgcccccactccctgagtaatccctggcaatcactaatctggtcttcatttcaataatgttgtcatttcaagaatgttatgtacatggactcatacagtatgcaatcttttagattggctttttatactccatataattccctgaggatccatccaagttgttgtgtgtatcaatagttcgttcctttttattgctgaataatagtccctggtatgccatgtaccacagtttaatcattcacccattgaagggcatctaggttgcttccaatttggggttattacatataaagctgttgtgaacattcatgtatatgtttttgtgtaagtatgagtttttctttctctcagaggatgcccaagagctcaattgctggattgtatggcagtgcatatttagttttcttaagaagctaccaaaatgttttccagagcagctataccattttaca

SEQ ID NO: 792022 - DNA, 593 bp, Homo sapiens
tttcactttaatctgctggataagtactttcttaaaagaggacatttcacattcccaagagcaatttatgagagctattttccccacagtctttttacttcttgttataaatcttttacattctggcaaataaaatccatgaaaatgatagcttatttctgctttaattcacatttccatcacaattggtaacgtttgcaccttttcatgtgtttattgcctgtctgatttcctcttctactacctgttgatatccgctgtccaatttgaaactggacatgagtttttaatttttcttatcagtttgtagagttcttaaaaatatataagaacattaagtcattgatgtyacatgtattaaaaatattttctccttacgtgattggttttcatctttgtttactgtgtctttttccaagcaaaagtctttatttatttctttttatattgtcaaatttgtcaatctccttggcttctgggtttcttgtcttgtttagaagttcacctcaaggttataaaaagaatgacctaggttgccttctattatggttaatgtcttatatttaagtccttaaatttgttttatttttatg

SEQ ID NO: 792023 - DNA, 593 bp, Homo sapiens
tttcactttaatctgctggataagtactttcttaaaagaggacatttcacattcccaagagcaatttatgagagctattttccccacagtctttttacttcttgttataaatcttttacattctggcaaataaaatccatgaaaatgatagcttatttctgctttaattcacatttccatcacaattggtaacgtttgcaccttttcatgtgtttattgcctgtctgatttcctcttctactacctgttgatatccgctgtccaatttgaaactggacatgagtttttaatttttcttatcagtttgtagagttcttaaaaatatataagaacattaagtcattgatgtcacatgtattaaaartattttctccttacgtgattggttttcatctttgtttactgtgtctttttccaagcaaaagtctttatttatttctttttatattgtcaaatttgtcaatctccttggcttctgggtttcttgtcttgtttagaagttcacctcaaggttataaaaagaatgacctaggttgccttctattatggttaatgtcttatatttaagtccttaaatttgttttatttttatg

SEQ ID NO: 792024 - DNA, 568 bp, Homo sapiens
tcaaataaagtggagaatcattaaaaaatggtccatgcatcccttaattgttttattttaccttaaaatatataaacatatgttcattcactaatcatgttatgtaagacaggagtcagaaaactttttctgcaaaggccagataataaatacttttgggtttatgggccatatagtctctgctgtaacaactcaactctgcctctgtatttagggaaaactgccatagacaatttgtatattaatgggcagactgtcttaggaaaatgttatttacaaaaactgcagaagtgctggatttggcctgtagacccctgatgtatgagtttttcttgcataaatcgctcatartgcattgtctgcaatttgtagtttgatttctagatcaaatcaaaatgagaacttatcctcttatcaagcagtcttagggcagacccttagtttttatgacttttccctggtcctttctttatagctgtcctttgcaagcctctgtagagtctttccaagcattaggcttaggtttttatagaaagaactctctctattcacaatagtctttcattgg

SEQ ID NO: 792025 - DNA, 511 bp, Homo sapiens
cttataaaatggccccacccctatctcccttcgctgactctcttttcggactcagcctgcctgcacccaggtgaaataaacagccttgctgctcacacatagcctgtttggtggtctcttcacatggacacgagtgaaagagaccctactgttacacagtaggaggacacggtactctctgtgtacagaaaacttacccaggttagaagaggagtgagtacaggacattttgaaaaagccctttcttatagtacttgtgatgcctgcggatatttcataccaacccacagaaagggtgtttttgatgacagaaatgagtaatgttgggccgctgactagggatgattttgttgtgagaaaataaaggtattytgtgaactataatttggacacttccccttgcttcagatagaacattttagtgtgagaaaaacagtgttcccaaagcgtgacatttcttgcttttgttttaaattgtatgcaaactttggattgtacttcataagagacc

SEQ ID NO: 792026 - DNA, 598 bp, Homo sapiens
catcatactttcctttgtgaagtgtggcaatggagtggcatcaggaacttttgggatctagctaaagggaaattgacttggagattcattaaggtttgggtttattaggatgaatttatgtcttgtgcaatctccacatgtatagccaggttattgctaggtgtcctggtgtaggaatggtttccagaaatactcctaccacccactgtgctaaccacctgccactctaactagaagatgyagaaccagaggtcgtattgaaacataaacatgtcttataacgcttgataccagaattatgtaggtagtagaaaagaaacaaggctggaaatacgtggagccagaagccagtctgtggaaaattattttaatactagccatgtaaaataacgagcagaatgtttcattattacaggtgccgggtcaaaatgggtgttttaatctatcaggaatgtacctgatgatgcagcaattaaaaaacacaccatagattcatagtctttttttaaaaatgggaatcacatgaaatagaatttctcagaatttccgggttgtaggatacaaacctatagcagcactagacatagcaagcatgtct

SEQ ID NO: 792027 - DNA, 636 bp, Homo sapiens
gcaaacttcgctgcaggcctccatcttgttttacatccttgagagcatgacctgtaaccatgtggcaatgttttgtttagcccattttacaatggcagctgggttcaatcctggcttagggaatgtatcctttctggtctgatgtctgtgcaacctttgctatttgttgattctcttcccctcatgaaccactttggattttcctttctctgagcctctagtaaagtttgaaagcaaataatatggccgcttggtatgtctaaagtcagataacaagggatttaaaaggattttagtaaagagcactcaggttaattaaaagtggatatctaagttatcagtatatttaaaaggcctttatgtttttcttttcttggatcttgttttgctggaaaaagrgttttttctcagtcgaccgaattatttttcttcattttgccttgtcactctcaatgcatgcatgacaagccccaagataactcctgggggcatgggactacttgggaaaaacagagaaggcaccactgactccattttgggaagaaacttgttttcctcatggaaccccaggaattaaaagtggttggatccctctcaaaatctgtttttgcccaacctatgcctgtttattaggcc

SEQ ID NO: 792028 - DNA, 522 bp, Homo sapiens
aggtatgtgcaaggcaatgattagacatctccagatgcccattgacctgcaacccctctttattagtctgctagggctatcataacaaaatgccacagactgagtggtttaagcaacaagaatttattttctcacaattctggaagccaaaagtccaagatataggtgtcaacaggactggtttcttccaaggcctctctccttggctagcccgtgtctgccttcttgccatattctcacatggtcttttctctgtgcacactcatccctggcatcttttcctcttcttawaaggacaccagtcagattgaattagggtctaccctaatggcctcattttaacttgatcacctctttgaagaccccatctccaaagcattcacactttttcagtacaaagtaaaaaatacattttacatttgacccagtgcacacatacctagatatttaagtgaaaaaagtttccacaagatgcacaatgcactttgatattttagatattttcttttctattaaaaaaaa

SEQ ID NO: 792029 - DNA, 544 bp, Homo sapiens
gagggcaatgatttgcatttaatgaaaataataattttccacagcctctgaaaaacacaatttggcttcactgtagtagaaagtgcttactttctttcacaccagcccaatgaagttttcaaagttcagaaaactttcctcactagcagtggattaataattgcaggtggaaatgtctttgtcagtggggttgaggtaaccagcatgtagaagattcttgccacctaaagcaagaggaactggttttctgtgaccggttttgtaacaccagtgggaaagctccrcagctggtttgttctggattttcatgcctgcctccttctcagtcctcaccttctgtcaaccatctctcccttggtttcaattccagaaatgcaatcttcctgacatggctcttctctgacaacctgggtaccccgctgcctctggccgcaccttgcttctaagacaaataaggaactttaatttgggctcccgagtggaaataacagatagttatcaagaacagagggctcaggctgggtgtggtggctcatgcctgtaa

SEQ ID NO: 792030 - DNA, 633 bp, Homo sapiens
ttagctgcctccccgcagggcagggctcaggacctgcagcctgccatgcctgagtctccccgcccccgccgtgggctcttctgcggcctgagcctccctgacgagtgccaccccctgctccacagcgcccggtcccgtcgactgcccaagggctgaggagtgcgggygcacggcggggaactggcaggcagctccacctgcaccccagtgctaaatccactgggtgaggccagctgggctcctgagtcgagtggggacttggagaacctttgtgtctagctaaggggttgtgagtgcaccaatcagcactctgtgtagctcaaggtttgtgaacacaccagtcagcaccctgcctagctagctcagggtttgtggatgcaccaatcggcactctgtatccagctaatctggtggggacttggagaatctttatgtctagctaagggattgtgaatacaccaatcggcactctgtatctagctcaaggtttgtaaacacaccaatcagcaccctgtgtctagctcagggtttgtggatgcaccaatcggcactctgtatctagctaatctggtggggacttgaggaatctttatgtctagctaaggcattgtgaatgcaccaatcggcactctg

SEQ ID NO: 792031 - DNA, 654 bp, Homo sapiens
tcttgcctgttgcaaagaaaaagccaatatacactgagacagaaggtgttgcaacaaagaaacagtttaataattgcaaggcagctgagcaagaaaatgggagatatttcttaaatctgcctccaagaatttggaggatagggtttttaaggacagtttggtgggcagcagttaggaaacggctattrctgattggttgagtcagggatgaaatcacaggtgtgtcaaaactgtcttccagtgctgagtcaattgctaggtgggtggggtcacagtgtgtccagaattggtgagttcttgatctcactgacttcaagaatgaagccacagacccttgtggtgagtgttacagctcttaaggtggcacatctggagtgtgtcccttctgatgttcagatgtgttcccagtttcttccttctggtgggttcatggtcttgctggctcaggagtgaagctgcaaacctttgcggagttacaactcttaagacagcgtgactggagttgttcattccttcccgtgggctcgtgctctcactgggctcaggagttaagctgcagatcctcacggtgagttttaccgctcataaaagcaacatggacccaaacagtgagcagtaccaagagcaaaagaacaaaccttccacaccctagaa

SEQ ID NO: 792032 - DNA, 617 bp, Homo sapiens
catagcaataatgcactcaattaatgttcccctcttcctctctttcatccttcacgtgcagttggtcacaatgtcctatctggtctgacgacatcccaggccacctttccacccactactctagctgaacccctcatctcttctcacctggaccactacattggctgtcagccttagctgcataatggaatggagctttgcaaaccacrgatccctgggacttgctccctgctattcctgtttaattcctgccacacctggtaggtgtaatggcagtgcgcagccagggctgggaatcactacctgtaaggtcttgcactcaagattctcctcttcacagccctcatgtttgcataatgatttttgtaaagtacaaatcatcaccatactgctgaccacttcatctttaaacactttattctcttggcttccattctcctgttttcttcccacctctctggttaattcctccaaggctccttgctcagctttccttcctccacctacccctcaagtgttagtatgtccaagctcagcttgggaccctgcccttccatgcctcaggtttcaattaccacttactcatgagcattccctggcttccttcagagatgtgt

SEQ ID NO: 792033 - DNA, 531 bp, Homo sapiens
cagcctccagaactgaggaatattaatacatttctgttgtttataagccacccactctacatacagtactttgttatagcagtcccagctaagacaatctgattaacacccatctccctgaccaaactgtaagctccatgagggcaaagatggtcacctatgctttgttcaccatattcacctactgtgtgtcaaatgaataaacaactatgtgacagctactcttcttaaaagtctccagtggatcccactatctagtgaaattgcaacccctgaacacagcatgcaaggtgcttcacacgctaagctctacctcgccttyctggactcatctccagccatgctccatgtttaccttactctcaaatgacactgcactgctcatgttccacaatgaaaccctgtattttcaggcaagatgtctttctgcatgctccttcttctgactgcaattcccatctccatccaatagtctatctggaacctgcctaattttcagataaggctcagctccaaagtcacctcttctat

SEQ ID NO: 792034 - DNA, 635 bp, Homo sapiens
aggtgcttcacacgctaagctctacctcgccttcctggactcatctccagccatgctccatgtttaccttactctcaaatgacactgcactgctcatgttccacaatgaaaccctgtattttcaggcaagatgtctttctgcatgctccttcttctgactgcaattcccatctccatccaatagtctatctggaacctgcctaattttcagataaggctcagctccaaagtcacctcttctatgttacttggcttggtcttactccatgcatcctaccacatctcctgttccccatccccagcacaattcattgctccactgtctgtatgtctctrgtattacatgctaacacacataattacaatattagaattatttgtgtatgtgtctgtttccccaactcattgtgaccttgaacgtccccacccttgacctgacacatgggaggggttcagttactgttagttgaaatgaactgaaatgaatacattacacattttaagtggttccggagcccatcggatatagacataaattcggaaggtataacttttaaatatatgccataaaacagggaagaggtattttctgatgttaaattatattgaaatcacatattcacattaaaataact

SEQ ID NO: 792035 - DNA, 567 bp, Homo sapiens
aatgttgtcccacatcatctagaccatactttcaacaatatattgcttccattttaaatatctaaagaagttaatttaaatatttaaatttaacaatctaaataaaaagaaacaattcacatactcacatatgacagtgagtttgtaaaacacaatgaactagtaacttataaaaatgctgrtctaaaagcaactaaaaggaaaaggagtttagaatcttcctacatacttacttttgtgcagtgcaaggaaaagcaccatactgtctttctcaaaacaagttctctctgaacactttttaatttgatgaatttatttaaacttatggacagatctgatatgaaaatgtacttcgcccaagttactaagacttgagaatcaaatccttagagttactgacttaagataaaacttaagtatcatctatgtcatacttcaatcaaatcataaaacaattcagaacacatttattggtttatgattggaattcatgttctttttttttttttttttttttgcaaaaaaatacaaaactcagtacaggagaacatactaaaagcacaggaa

SEQ ID NO: 792036 - DNA, 642 bp, Homo sapiens
aaaacaattcagaacacatttattggtttatgattggaattcatgttctttttttttttttttttttttgcaaaaaaatacaaaactcagtacaggagaacatactaaaagcacaggaaggacaaaaaaaggaggagatccataaatggctccttgatgcagccccaacaatttccttaaaattatgaggcctccgaacttgagcttcactcagattttcacctctccaaccttggatttaaacgcacttgtcaatcataggatccaatcwtaggatccaccatctgaccaacctggagttggatagactccagcatggatgaagtagggctattttactattgtcctatacatttttttcattattaaaaaaagccaaagaaaaatcttatgtttcttcttgaaactaagatcattagtcaagactagacaatgaaatataatagaataggaaaaattaagagaaaacaggtagctgaagatatgtttgaagtaaaaagaaagctagaacaatgccagcaccccccattattgccttctgatacagactctaggcaattcatcagatgtggtacccattcattcattcattcccaacatcagctcctaaccaaaaataatttatctttaaaacattaaaca

SEQ ID NO: 792037 - DNA, 594 bp, Homo sapiens
ttaaccaacctataagacaagtattattacctccacttaacagatgaaaagactaaaacacaggggaaggtttggtaacttgctcaaggcttcataggtagttaatatcaattctacctgctgtctcccatcaataaatgatttggggctcatgcctctaatcccgatgctttgggaggctgaggtgggaggatcacttgaggctaggagttcaagaccagcctaagcaacagagcaagaccttgcctctaaaaaaaatacaaaatattagcccagcatggtggtgtacacctgtagtcctggctactcgggaggttgaggctggatgatcgcttgagcctaggagyttgaggctgcagtaagctatgatagtgccactgtactccagcatgggtcacagtgagactgtatcaatcaatcaatcagtcagtcaatgatttgggaggaaaacaatgggagtaagagggctgaattttgctgaaagccaaagtcttgcttatatgcaacatgtaggaacaaagaaagcagcacaaggaggcagtgtcttcacctgcttatgtgcgccatctccaacaatgcttctggcatatctat

SEQ ID NO: 792038 - DNA, 611 bp, Homo sapiens
ttagactgaatgttaccaaaactgaactcttcatcaccccaccagcagcaccacaaacctctttattctttattgtttgtactagtacttctaaggcaaaaactagggtatatgtcatgtttcttctctcttacctccactttttaatctgtcaccaagtcataatggttatttcttcaaaatattccatgattttttcttctatctttcatttccaaaactctagtcccattccccggtttggaccctcaacatttttctcctgaatgacaataatagttttctaactgatctcctgcctccagtactgtgtactgactcttggcacagcctttagaatagcctctaaaataaatayctgatcacattgctcccctacttaaaatcctttaatgattttttgcttcctatgaaaatcctttaatgatttcttgctttctatgataatgtctaaagtcttagcatgacctaaaagattctgtatggcatacctcttaatcaagccttatctgttgccaccaattcctacacctcatcccaaactcacacaactttttttttttttggattttatgtgccactagggttttcttgaacatactattatttca

SEQ ID NO: 792039 - DNA, 575 bp, Homo sapiens
ggccgggcacagtgactcatgcctctaattccagcacgttgggagtccaaggtgggtggatcacttgaggccagcagttcacaaccagcctggccaacatggtgaaacctgatctccactaagaatacaaaaattagctgggcgtggtgatgtgcgcctgtaatcccagctactcaggaggcggaagcaaggggaatgcttgaatctgggaggcagaagttgcgtcgagccaagattgtgccactacactcyagcctaggaaacagtgtgagactctgtctcaaaaaagaaaaaaaaaataagattttagccatagtaaaaagttttccagcaaagaaaagcacaggactcaatagctacactgctgaattttactaaacatttgttttagaactaataccaattctactcaaactctttcaaaaaatagacaaggagataatactttcttttatttttattttaagttctgggatacatgtgcagaatgtacaggtttgttacatagttatacacgtgccatggtggtttgctgcaccgatcaacccatcatccagattttaagccccacatgc

SEQ ID NO: 792040 - DNA, 614 bp, Homo sapiens; identical to SEQ ID NO: 791872

SEQ ID NO: 792041 - DNA, 591 bp, Homo sapiens
gaactctttctctacattatcccagtcttcacattttgtaagctgcttatcaggttgggttttctagtaagatatcagaagcacagcctacacagggcagagtatgtccaacatgtggtggtgggcaatctgtgtcttaatcatctggaatgtttgttaaatatcctgggatctgagaatcaaaatttctgaagaggtagtgtrttagtctgtttttacactgctgtaaagatactacccgagactgggtaatttgtaaagaaaaaggtttaattgactcacagatccacatggctagggtggcctcaggaaattcacagtcatggcggaaggcaaaggggaagcaaggaccttcttcacatggtggcaggagagcagcatgggggaaactgccccctgatccaatcacctcccaccaggtctgtctctagacatgtggggagtatggggattacaattcaagatgagatttgggtggggacacaaaggctaatcatatcaggtagcttgagtatacaggttactatcatgtccactgaagtctgagagcaactgacgtaaatttttcattttcctttttttgtgtgccaa

SEQ ID NO: 792042 - DNA, 617 bp, Homo sapiens
ggttgcatgcctcccaaattcactggctctgagcccagttcaacactaggactaatataagagttgcagtccttgtggcttagagtgcccttcaagtttatttagggatccagagcactttagcctgcagtgtcaaggcttagaactaggatgtgtgattcccctctagctagggctggtttaaatgctccctgtgtgggttgtccttagctgagttcagcctgattttgctttcttccatgtgacagggtagcacggagttcaatgcagtgtctcacaattgctgcactctctctttctgaagtrcacacattccagtgtctctttttttggagaaatgtttgctcatattttcttacccattttttacttgggttatttgttttcttgttatttagttgtttgagttacttctatattttggatatcagccccttatcagatttatggtttgccaatgtttttacccaatccgtgggttgtcccctcactgtgttaattgtttccatttctttgcagaagctttttagtttggtgcaattccatttgtctacgttagcatttgttgcttgtgtctttagagtctgatccaagaaatcattgcccagacaaatgtc

SEQ ID NO: 792043 - DNA, 584 bp, Homo sapiens
tgaggtgccaaatagtttttagagttcaatctactttgaaaaatatatgatatgcttgcatattccaagttgcattttgtaggcatttaccagattcttacagaagatgtgttcgtgtctcctcaaaacctttatttagctgtctaaatagttattgaccttcaattgaatcttatttccccagagaagtcatataaatgccaagggttaactttacttttatcatgtaccttcccccttttatgtataaatttgtgtgtcrtacctaataggtctatgctttaaaaatttcatctatcaaaatgtttattgaatgtacattctgtataaaatccccaaataaattctctgaagaaagagctaaaaacagacttaaaatactgtatagtattagttacctaattctaattaaatttcatgatggtataataaaatggatttgacatcctagtaatgtgttcttattacatggattttaatacaccagatgacaaatcagatttttaaaagtaaaaagaatgttttaaaaatacatagatggtactttataggttcctttttgcaactggatattgccatagaaa

SEQ ID NO: 792044 - DNA, 615 bp, Homo sapiens
gataatgttatagtcagagttatatttatggagatttaggtatattttatagcagcagtgataattctataataaaagttatagtgaaatgattatagttataccagtgtggctatgatactagtgatacagtgttactgttacagttaaaattatgtagtgttatagttataattatggtgttacattaatagtcatacatattgtattatagtgttatagtggaggaatcatagtcataatgttatatttttaygattattataattataaagtttatttgtatttgtagtgttatacttttggagtcaaaatttgtaaaaaataaaaattaaaaatatatagtaatagtgatagtatattagtgatagtgttatgctatagtgatagaggtattggtatagttatagtgcattcattatagtattataatagcagtatcactatagttacagagctgtagttatagaatcaaagtgatagttataatgttatcgttccagttataagtcatagttctagtgatattcttagttatagttattcttatcaagttattatggagctagtgttattttattcatatagtactatagctatagtatggtgatagag

SEQ ID NO: 792045 - DNA, 642 bp, Homo sapiens
atccagaaaagtgaaggcacaagaaccacagggacagcctgtcaatcagagatgatgctggttcaacacagagacagcatccaatactccagtgaggtagagatgtttatctccttctggagaagcaatgggctccctcatttgggcatttccttaactgaatacaggattcatcagtctcatacttgcttccacttgaaaaagaaaaaagaaaaccaaagcaataaataactttaaaatataagaaaatgtagccaaaaatatatctctataatatatagtctgtttgtccagataacagaatattttcaatcttmcaatgaaatgtattcaagctcactgcatcctggattttgcaatcttagtagtactcctctagaaatttcaaaatgttgcacagctttatgtacaaatcaatgactgaatcacatgccaactattgcaagtaaattctgaacaagaatttaatgttgtatgagaattaattccctattttcccctagaaggtagagggagctgggagaaacatcttaatattccttggttaagggtatctccttttcctgcatgttcagtcttcactctggcagaattttgccaccccctcacctcttgtgctctctgtgaatggtagatgccaac

SEQ ID NO: 792046 - DNA, 607 bp, Homo sapiens
gatcctaatatctacattacagtgtggatgagaagatttaatgaagtaataaatttaatatcaatgtaacatcaaataagtgtaagtcaatcctcagcatgttagctgagtccaaatataattgtcacatgttttaaactgagagtaggagtcctttttcctgcatagccctggagttcttatttataccatatcatcttgagttcaggattttgtttgagacaaatttatttgaatttgaggagaaaagacagtacatggtgtcgcatcaaagcagtggtcattgacttatcttccatcagaacaaaaggcagaagatggaggaggtcttccaggctctgttttgtaggagtttgggattcttttctaaagaccttggaaakgtggtgatgcctgcaaagtcttccctagacatggaatttctctaaactaatttgaaattgaaaagtagctgactctcagaatttgggggatctcaaaccagatgatctggagttacggaattgtatggataatagttaggtttgcttacttgccatttggattctgatgtagcatttgataagtagatgccaacaaaagactcaacaaaaacattaccttaatt

SEQ ID NO: 792047 - DNA, 640 bp, Homo sapiens
ttgggaacctttcctctcttttacctgaagtaccttcataaatgagtgcctgcttaatttgttttttaaaaacggagtgaaaaacaggcaatgtttatgtctcaaagaagcgtttctgatgaaagcacaataaatgcagttttgcagtaccatgcaaagcaataaacatggagtagcttcatactgtgagtttaggtgtgaaaaactgtaaatactcgttaacaaratcacccaaccaaaatcacacgaaaaaagtgagctgtataactgcgtattggctatgacctgggtgtttgtataatctatcatccaaacaagaagctgtaggcacaaatcaaaccatctagaacacaggtcccactggctacagctaaacttgtcagaggttacatcagttgtcagtgttgtgatgtatagtagccagcagtgaactccatggaagtaataatgaaaggtgaacagcaagaacacagctgtatcatcataaagtcagcgttgtggctcagacacaataaagcacacctctgctcattctcctccacaagctactgacaaaacaccgaggacaacaggaaacaaatggcaatatgtggatttcacaaaagaggaaaccccacttccagtgacattgcttcctgtc

SEQ ID NO: 792048 - DNA, 640 bp, Homo sapiens
ttgggaacctttcctctcttttacctgaagtaccttcataaatgagtgcctgcttaatttgttttttaaaaacggagtgaaaaacaggcaatgtttatgtctcaaagaagcgtttctgatgaaagcacaataaatgcagttttgcagtaccatgcaaagcaataaacatggagtagcttcatactgtgagtttaggtgtgaaaaactgtaaatactcgttaacaaaatcacccaaccaaaatcacacgaaaaaagtgagctgtataactgcgtattggctatgacctgggtgtttgtataatctatcatccaaacaagaagctgtaggcacaaatcaaaccatctagaacacaggtcccactggctacagctaaacttgtcagaggttacatcagttgtcagtgttgtgatgtatagtagccagcagtgaactccatggaagtaataatgaaaggtgaacagcaagaacacagctgtrtcatcataaagtcagcgttgtggctcagacacaataaagcacacctctgctcattctcctccacaagctactgacaaaacaccgaggacaacaggaaacaaatggcaatatgtggatttcacaaaagaggaaaccccacttccagtgacattgcttcctgtc

SEQ ID NO: 792049 - DNA, 599 bp, Homo sapiens
ttcacctctcaaaatcctaggccaaaaactctatgtgactagagattaaattccttcattagtaggccaaggatcaaaatatattgtgtttttatttagatagtctgagagtattgaatttgtgcttttcttatcactaacattcatctctctggatcatccacttttctttgaacttgaaaaacagaaatttgataacataaaatatttaaatcaattaaaacaagaacccagacagaaccaagtaattctgggagttaacaataataactctttgatcttgataaagttcagtttaactgtttatttgaaaaatgaccagcatcaatactaactttccagggtgcataaatgtgtttttccacatttacaaatgctgtgttctgcttttctaagatgagaaatgaaccaaagtcatacaagtacttgttagcaaaagaaaaaagtcttcatttkcgagattaaaaatttgaaccaactttgcaaaattttctatcttatgcaggacaatttgcacatagtaggttttcagcaaagtttcttgacttatggtatggtcatggccatcaatgattgctgttgtgcattaaccaaataat

SEQ ID NO: 792050 - DNA, 561 bp, Homo sapiens
aagacgacctgtctccccagcgaaggggcaagggaaaaagaacacaagttacttttaccacatgacctttccagacaggagcagggctggagctttggggacaccacagaaagtctgttttgttgttgtcgggggtgcagggtggtgagcagagaacatctttgttttagagatgagggaacgtaggcgcagaaaagttagccggttcaccccagacactgagcaagtgccaaacttgagtcagtggacactaaatctttataaggggagaaaaatgctctggaaccctggtcctgacaaaaatcatttttattagaatgtcacttaaatatgtaaaaacctaaacctaagtgtgacctctgtagttgcaaagcttatgcaactgtaaactcaaaacatattcgcacatcaaakacaaatgaaactacaaagctaattaaattcaaattaacaaaaatactgtaatagagggcattttgctcaaactaaatcaagttgatttaattaatttggatttatttaatgtttaatttaattgtataaatatactttcatggtttg

SEQ ID NO: 792051 - DNA, 651 bp, Homo sapiens
gggacagagaaagccaaagggggctcactgagtctgatggctgtggtttctctattacttaacacagaccttaaagacacagagaaaggattaaactgcagcaggtatcaagctttatcatacattaaaaatcaccttggatgctaattaaaaatgctaattccgacgtgctgcttcccagtgatcctgtttcaccacacctggtatatggcccagggatctacattttcatccccaggagatactgatgcatgagtccttcaacctcacctggagaaacagtggcttagagaatattcatattcattcaataaatgtagaggctgctgcatgtgggaccctggggtggcactgggaaatacacacaaggatgtataaggccctacctgattcctgcccagctgagagctggggcttccaaggagaatatagggtctstgctgccacgctaggatatcagttaagaacaacagcccagaagagcaatggagaaaagccatacctgggcttctgcaccttcaatgttgtgggagagatttccattttgtacaggttctgaagcatcactggatggtgtcatttcaacatctgtgctggtgctgtttggaagctcaattttttctgtgatataatttaaacacacacacacac

SEQ ID NO: 792052 - DNA, 651 bp, Homo sapiens
gggacagagaaagccaaagggggctcactgagtctgatggctgtggtttctctattacttaacacagaccttaaagacacagagaaaggattaaactgcagcaggtatcaagctttatcatacattaaaaatcaccttggatgctaattaaaaatgctaattccgacgtgctgcttcccagtgatcctgtttcaccacacctggtatatggcccagggatctacattttcatccccaggagatactgatgcatgagtccttcaacctcacctggagaaacagtggcttagagaatattcatattcattcaataaatgtagaggctgctgcatgtgggaccctggggtggcactgggaaatacacacaaggatgtataaggccctacctgattcctgcccagctgagagctggggcttccaaggagaatatagggtctgtgctgccacgctaggatatcarttaagaacaacagcccagaagagcaatggagaaaagccatacctgggcttctgcaccttcaatgttgtgggagagatttccattttgtacaggttctgaagcatcactggatggtgtcatttcaacatctgtgctggtgctgtttggaagctcaattttttctgtgatataatttaaacacacacacacac

SEQ ID NO: 792053 - DNA, 385 bp, Homo sapiens
ccaccaaaaacacaggtcccartaactgaccccacttcacatggggtttttgtggagggagagggtcttggtcccgagcagccaggccccagctgggaccccgcctgggcttcttgctggagagcagcagcccagggcatactgctcgtctcactcagagggcagggacgctgtttactgtccatcactgcccagcagaacttcaggtgtacagacctacagacccgtgttcctttgagatggcagagcctcagtcccttgtggcccctattcaggagaggtaggggcactgactttgggatggaaccagagacactgtgttgacaccatccttttggcaagctccagtccactctccttccctctcttcccaggttgcctgccc

SEQ ID NO: 792054 - DNA, 596 bp, Homo sapiens
tggtgtcatcctagcatagcttctgcaaagaagcaagagagaatgcaggtaaaaacattttgcatctgcaccatttgataagcagcagccctcagggtcctgactgggggtgggtaagcaaaatttgagcttccggcctctgtcctgacagggcctcttactgagaggctggggagcggagcagccattacaggttggggcacttgttaggcyagagtgccctggaccttgttttggatatcaccctctaggcaaaaaagcacaacttgaccgtgaacctgaccacgttccgactgtggtgttacgcctgtgagaaggaggtattcctggagcagcggctggcagcccctctgctgggctcctcttccaagttctctgaacaggtaacctgtgtggtgggctctgtttggttgttggtgacactgtgttgaggatgaggcagtgtgacctgagcatccgtggagcatggggcagtaggtcccagaggtgtctgtttctgggtcagtatgttttcaggtgactttgaggagctcacatcagcacatgctcactgagcccaactctgtgccgaggcatgtgtgagaccatgagggtgc

SEQ ID NO: 792055 - DNA, 530 bp, Homo sapiens
cgagtactgcttttagtttttaagttgcagtatatacacacgtattctgtggggggaattatgaaaatatttaacagagagcaatcgaagaaccaaaaaaccacaaaagaaagtcacaatccaattgacccaccggaagttactctagtctaaatattttggcaattattaaataagcacatcgtagacacacacacacacacacacacacacacacacacacacacacacacamacaaaaaggttgaccggcattataaaaataaaacagctgcactgagttatgggcctaagaaaacagtggctttgcccacatcagatgggttgaaggagggcagtgtttgtgggcaagttggacagagttataaacagagtaggcaggaaaagcttctctgtacatattattaatctctaagtgtaactttcaaataaaaggagaaaattatataagtagctgagattttgctgcttttatattaacagacaactgctagaagataataaagtatactttgggtggaaatggaaat

SEQ ID NO: 792056 - DNA, 629 bp, Homo sapiens
aatccctcccaatcaatatatccaacacataacttattggagacaacactgagctcattgattaaggtgagttcagtagcaaagttttcaaaataaatgagacaagaatacagcattcaacccctttgtgtcaccagacaatttatgaaataggcaatttccaaaagggtttttcttcctaacaaaatatatgatacttcatgtaggaagaaataagagcagagggggcagggaggaagtgtgttagagaggcagttgcacaaatctttcagttatgcatacatgaagcagcagattgcatagtgtaatagaaaagtaacatctacaaagctctgcccacaagagacaccaagcctcagagtaygaaccaaaatatgaaattaacacacctaacgctggatacacttgcaaatgaaattcagaaatgaactcaagattcatttcagtctactttggattcacttcatccaattctaattctcatccggtcagaaggcccgaatttactccaatctggagaaattagattacattctgttgatactgagcctaagaacccagtaaagttttaaatgtataatattatccattatagaatcctatctggaagcaaaatctcgaagaccaaa

SEQ ID NO: 792057 - DNA, 629 bp, Homo sapiens
aatccctcccaatcaatatatccaacacataacttattggagacaacactgagctcattgattaaggtgagttcagtagcaaagttttcaaaataaatgagacaagaatacagcattcaacccctttgtgtcaccagacaatttatgaaataggcaatttccaaaagggtttttcttcctaacaaaatatatgatacttcatgtaggaagaaataagagcagagggggcagggaggaagtgtgttagagaggcagttgcacaaatctttcagttatgcatacatgaagcagcagattgcatagtgtaatagaaaagtaacatctacaaagctctgcccacaagagacaccaagcctcagagtatgaaccaaaatatgaaattaacacacctaacgctggatacacttgcaaatgaaattcagaaatgaactcaagattcatttcagtctactytggattcacttcatccaattctaattctcatccggtcagaaggcccgaatttactccaatctggagaaattagattacattctgttgatactgagcctaagaacccagtaaagttttaaatgtataatattatccattatagaatcctatctggaagcaaaatctcgaagaccaaa

SEQ ID NO: 792058 - DNA, 598 bp, Homo sapiens
tatgtacatatgagaccctcataactcaataagacaatccaataaaaatggacaaaagatttgaaaagagtattaaagaagatatacaaatggaaaataagtgcaagaaaaaatgctcagcatcattttagtcattaggaaaatgcaaattaaaactacagtgagaaagctcctacacccccaatagaatggctaaaattacaaagtctgggctgggcacagggcttacacttaggtgggaggattgctcaaggatacaggactttgagaccctacctttaaattaaaaaaaaattttttttagttgttgactaggatgtatgtatgtagaagaagaggacctgtggacctttttttttttttttttccgcttgagacagggtcctactctgttgcccggagtggagtggcaraaccatggctcactgcagccttgaactcctgggctcaagcagtcctcttaagtagctgtgcacactgccacatctgcctaatttttaaatttttggtggagactgggtcttgctatgctccccaggctggtcttgaactcctggcctcaagcgatcctctctcttggcctctcaaagtgttgagt

SEQ ID NO: 792059 - DNA, 599 bp, Homo sapiens
atcatgggagccttgcagtctgatctatcttacaagagcaccctcttccgagacctttggtcgcacagactgaattcagacttcacagtttttgcaatttgagctaactgtcttgattttctgggatccctatgtaaaggtaggttcttaaacmaatacaccaattggagtcacaaaatgaagtgtggcaaaaaaaaataagcatacaaaaattaagaacaaagtagatcaaagatctcctcaaaatgatatgactttttttaagcatttaaattacatacataaactgacaagcattatacacaaagatgttcactacatcatttataacaagagaactttggaaacaacctgaagattccgttataagtaaatgtagaacataaacatgatgtaataattcatagcaactaaaatgatttctgcaaatcaacattaataattttagggaaagcttaatgaataattggagagagtgaggaaaacacatatagctgagagttcagaaaaaaagtttttatattttatttacacacacattcacacacacaaaagaagacaataaggaagtaaatatactgaaacattaacagtagtta

SEQ ID NO: 792060 - DNA, 538 bp, Homo sapiens
attttggcaatgggatcctttaaacaaactggagcagagctatcataagccaacactgctcctctattcttgaaatgagatcggtttatcctcactttcaagtcatataacttccacttgtcttcctttggtaatccccctccattctccaaatctcccctttctttcagttcaagttccaacctcttcctagaaacctatctccrtctacactgatcttttctatgtaactcatttgggccaaatcaaaaccacaataaaataccactttacacaaagtggtacagctgctttaggaaacaattttaacagtttctcaaaatgttacatagagttaccaaaagatccagcaattccactcctaagtatatacccaagcgaaataaaaacatatgtccacacaaaatgttcatagcaacatcattcataatgatgaaaaggggaaacaacccaaatacctaacaactgacaaatggatgagtaaaatgtggtatgtccatacaatggaatattattcagcagtaaaaagtaatgaaac

SEQ ID NO: 792061 - DNA, 427 bp, Homo sapiens
taagggagatagaatttaagaaaatttcataagtaagctgttattaaaatttttcaaaaatacaggattcttttcaagtcaggatcctaccaatgttgatgttttagtatttaaactagctaagcattaaacaaaagcagatgaataaataatatgaactctgaaaaacccctgcttttgccttgtttttttttttttcttttaaaaaaaatataggcaacgcatgactttcaggrattaacaaagcctgtatttccaggtttaaagatagcaggcttaccagattttaaatgaaatattgagtgctacagtgatttaatggttttaaaccatagatgtcattgtggtctgagggtgtcacagacaacttaaggaggaaaaaaaatggggcacagagaaatcactttgtcagtaattacaatcaggc

SEQ ID NO: 792062 - DNA, 700 bp, Homo sapiens
ttagcattccatttactatcgattaggaaaacattcaatcatttctaataaggaaaagatttgattcctttgagacatgttaagggaagtgatcagaggtcagaataatatctatttgagaaatcatgtatcaattcaaaggcttatggaaaatcatagatttgagggtctcccgtctaacagtggtcacaatatatgctacccatggctacctttaaacaccatactaaaacactaatttacatccttgtgaaaatgaatccacgtaaaagttcactgcagtccatttcttcagtgaataatcaagaagggaaaaaactaagggcctattcacaaactactaggatcctagaaataccagttttcaagtcattaaaaccaatgtgtattattttttaaaacacaagactaataataaaagcaggaatattcaaaaggttatgccaaamatagagcctctcgaaatgagtggtgcaaaaaagttgaaactatctgcaagtgatttcaactcttgacgtgtattttgcttgacttaaaagctgggaatcaatttctttcttcaccctcatcttcaactactgggaaggaatcaatgatgtgcctagaccgactagagaactctggagtaatgcccctgcagtaccaactcagggcttccctgataggcagcagtttcttcacttgacctgtctttggcctg

SEQ ID NO: 792063 - DNA, 700 bp, Homo sapiens
ttagcattccatttactatcgattaggaaaacattcaatcatttctaataaggaaaagatttgattcctttgagacatgttaagggaagtgatcagaggtcagaataatatctatttgagaaatcatgtatcaattcaaaggcttatggaaaatcatagatttgagggtctcccgtctaacagtggtcacaatatatgctacccatggctacctttaaacaccatactaaaacactaatttacatccttgtgaaaatgaatccacgtaaaagttcactgcagtccatttcttcagtgaataatcaagaagggaaaaaactaagggcctattcacaaactactaggatcctagaaataccagttttcaagtcattaaaaccaatgtgtattattttttaaaacacaagactaataataaaagcaggaatattcaaaaggttatgccaaacrtagagcctctcgaaatgagtggtgcaaaaaagttgaaactatctgcaagtgatttcaactcttgacgtgtattttgcttgacttaaaagctgggaatcaatttctttcttcaccctcatcttcaactactgggaaggaatcaatgatgtgcctagaccgactagagaactctggagtaatgcccctgcagtaccaactcagggcttccctgataggcagcagtttcttcacttgacctgtctttggcctg

SEQ ID NO: 792064 - DNA, 630 bp, Homo sapiens
ttcaacaggaaaaaaatattgtatttaaaatatcttgctaataatatgtacgccctaatagagtccatgcatctcttaaccaaagaggcaggtagctctcagacaaggtttcgtatcatgtcattgtgatgtcacagcaccatggccatcaaagaggctgtccccacagaaaagtgtgyatcactttcactgaaggccacaagaagcatttccatatttgaacacacacatttcacagtataggactcccaaaagcacaatctcactcaggcacagaacatgaccatgcttaaaaagctatgtcttcacagcaggaaaaaactgatctcctaaacaaacatgtctaacattttttcttttaagaaaggctaatcttcttccatctcaacagtctatgttttccagtcttctactatacatacttttaaatctttaagatataccagattgccacagaatgtttaattaatagaataagagtgtgggcaagacttactggaaaggtgctataaattattttacacaggctccaaaaaccctgagttctgccttaggcttaaagttcctagaaaacgtggtagacagatcttttacaacagaaatgcaaaataattcataaaagtgctgtgg

SEQ ID NO: 792065 - DNA, 630 bp, Homo sapiens
ttcaacaggaaaaaaatattgtatttaaaatatcttgctaataatatgtacgccctaatagagtccatgcatctcttaaccaaagaggcaggtagctctcagacaaggtttcgtatcatgtcattgtgatgtcacagcaccatggccatcaaagaggctgtccccacagaaaagtgtgcatcactttcactgaaggccacaagaagcatttccatatttgaacacacacatttcacagtataggactcccaaaagcacaatctcactcaggcacagaacatgaccatgcttaaaaagctatgtcttcacagcaggaaaaaactgatctcctaaacaaacatgtctaacattttttcttttaagaaaggctaatcttcttccatctcaacagtctatgttttccagtcttctactatacatacttttaaatctttaagatataccagattgcyacagaatgtttaattaatagaataagagtgtgggcaagacttactggaaaggtgctataaattattttacacaggctccaaaaaccctgagttctgccttaggcttaaagttcctagaaaacgtggtagacagatcttttacaacagaaatgcaaaataattcataaaagtgctgtgg

SEQ ID NO: 792066 - DNA, 630 bp, Homo sapiens
ttcaacaggaaaaaaatattgtatttaaaatatcttgctaataatatgtacgccctaatagagtccatgcatctcttaaccaaagaggcaggtagctctcagacaaggtttcgtatcatgtcattgtgatgtcacagcaccatggccatcaaagaggctgtccccacagaaaagtgtgcatcactttcactgaaggccacaagaagcatttccatatttgaacacacacatttcacagtataggactcccaaaagcacaatctcactcaggcacagaacatgaccatgcttaaaaagctatgtcttcacagcaggaaaaaactgatctcctaaacaaacatgtctaacattttttcttttaagaaaggctaatcttcttccatctcaacagtctatgttttccagtcttctactatacatacttttaaatctttaagatataccagattgccacagaatgtttaattaatagaataagagtgtgkgcaagacttactggaaaggtgctataaattattttacacaggctccaaaaaccctgagttctgccttaggcttaaagttcctagaaaacgtggtagacagatcttttacaacagaaatgcaaaataattcataaaagtgctgtgg

SEQ ID NO: 792067 - DNA, 602 bp, Homo sapiens
ggggtttcaccacgctggtcaggctggtctcgaactcctgatctcaggtgatccacccgcgttggcctcctaaagtgctaggattacaggcatcagccactgcacgcagcccttctgtaggggtcatcattttggggtccctttcttatagcagtgatatggtttggatgtgtccccacccaaatctcatcttgaattgtaatccctatttgtcgggggaaggatctggtaggaggtgattggatcttggggccggttttccccatgctgttctcctgatagtgagtgagttctcatgagatctgatggttttgtaagtggaggtttcccctgctctccttcstcctgtcgccttgtgaggaaggtatctgcttcccctcctaccgtgattgtaagtttcctgaggcctccccggccatgtggaactgtgagtccattaaacctcctttgtttacgaattacccaatctcggatagtaactttatagcagtgtgagagtggactaatacaagcagttcagtttatacctgtaccaatatacagatgacaccaggaaagaagcagatttcttggttttaactactactgtttgtctatttagt

SEQ ID NO: 792068 - DNA, 616 bp, Homo sapiens
gacgttggtacattggacagaggcactattcattacggacaccagaccatcactcagggaactgcagtacagtttactaaatgggactgttgtggtcgtgtggatgactgggagactctgtcttattatgggctttctamttatatatttcctttgctatttttattcatcaacatgtaactggacatcccctcttccactgcatttcaggagtctgagatggaaaagtcatcggtgttcactcatatcacagctctaagtcactgtgtgtattgacagtgcattccaaatgaatcccataaatgtatttagatatgtacattgccttgaaaattatgtagtgctattttgtatatactttgtgtaatgacctgatgcttatttgctataaaaaaatctatcagtttttttcttctaaaatgtcgaaaattaagagtgtcacaaaagttttttttattttgctataactattctacagttatagcaaaactagacttgtattattttgatgccttaatccagccacagctgtgcaatatccaatttccagtagcggggaagagtcagactcaatgtcagaggatcatagctccccctcctggccctgtgcaatttg

SEQ ID NO: 792069 - DNA, 616 bp, Homo sapiens
gacgttggtacattggacagaggcactattcattacggacaccagaccatcactcagggaactgcagtacagtttactaaatgggactgttgtggtcgtgtggatgactgggagactctgtcttattatgggctttctacttatatatttcctttgctatttttattcatcaacatgtaactggacatcccctcttccactgcatttcaggrgtctgagatggaaaagtcatcggtgttcactcatatcacagctctaagtcactgtgtgtattgacagtgcattccaaatgaatcccataaatgtatttagatatgtacattgccttgaaaattatgtagtgctattttgtatatactttgtgtaatgacctgatgcttatttgctataaaaaaatctatcagtttttttcttctaaaatgtcgaaaattaagagtgtcacaaaagttttttttattttgctataactattctacagttatagcaaaactagacttgtattattttgatgccttaatccagccacagctgtgcaatatccaatttccagtagcggggaagagtcagactcaatgtcagaggatcatagctccccctcctggccctgtgcaatttg

SEQ ID NO: 792070 - DNA, 529 bp, Homo sapiens
gcctctcctctctgcatgctgagagagtgacctgcccggactctgtccgttttctgaaaatttatttctaattcataaataataattgcatatattatatacatgatgttttgatatatgtgtatattttggaatgattaaatcccackaattaacatatccagaaactcacatgcttttgttttatggtacaaacatttaaaatctacccttttagcaattttgaaatgtacattacattatcattaactatggtcaccacgatatgccatagagctcaaaaacttactccttttaacaaaaactctgcacactttgaccaacatctctttatctccatctcttccccacagcctctggcacccacctgagtccttctgaattggacttttttagattccacatgttggtgagaccctgtggtatttgtctttctgtgccagcttgctttacttagcacaacatcctctaggcccatccatgttgttgcaaatgacaggatttaggactctatcctttgttgaaaaat

SEQ ID NO: 792071 - DNA, 529 bp, Homo sapiens
gcctctcctctctgcatgctgagagagtgacctgcccggactctgtccgttttctgaaaatttatttctaattcataaataataattgcatatattatatacatgatgttttgatatatgtgtatattttggaatgattaaatcccactaattaacatatccagaaactcacatgcttttgttttatggtacaaacatttaaaatctacccttttagcaattttgaaatgtacattacattatcattaactatggtcaccacgatatgccatagagctcaaaaacttactccttttaacaaaaactctgcacactttgaycaacatctctttatctccatctcttccccacagcctctggcacccacctgagtccttctgaattggacttttttagattccacatgttggtgagaccctgtggtatttgtctttctgtgccagcttgctttacttagcacaacatcctctaggcccatccatgttgttgcaaatgacaggatttaggactctatcctttgttgaaaaat

SEQ ID NO: 792072 - DNA, 630 bp, Homo sapiens
ccgaaaggtcagagaacatgcccaaagtccaacagttagtaaatcagtgatgctccttttgtaaaatgaaagctatagagtctgaccacagaaaaatgctaagatacacaaactttacatataatatctggaattgtagacttccgaaagcccagttctgtaacttcagtttagaaacccctgtaataaatgaaaaacstaggattcgcacccccagttctagatgcaggtcttgcatacctgcccccagcccacgatgttccagtatctaagctcatgttcacttggtctgtgtccgtttatatatattttttcttttacaatgtccttgctcacttttttttttttttttttgagacagatctcgctctctcacccaggctggagtgcagtggcacaatcacggtttactgaagcttggaccttcaggggtcaaatgatccacctgcctcagccgcccgagtagctgagaccacaagtgcgtgccactacacctggctaattaaaaaaaaaaaattggggggggatggagtctcactctgtcaccccggctggagtgcagtggcgcaatctcggctcactgcaagctccgcctcccgggttcacgccattctcctgcctcagcctccc

SEQ ID NO: 792073 - DNA, 630 bp, Homo sapiens
ccgaaaggtcagagaacatgcccaaagtccaacagttagtaaatcagtgatgctccttttgtaaaatgaaagctatagagtctgaccacagaaaaatgctaagatacacaaactttacatataatatctggaattgtagacttccgaaagcccagttctgtaacttcagtttagaaacccctgtaataaatgaaaaacgtaggattcgcacccccagttctagatgcaggtcttgcatacctgcccccagcccacgatgttccagtatctaagctcatgttcacttggtctgtgtccgtttatatatattttttcttttacaatgtccttgctcacttttttttttttttttttgagacagatctcgctctctcacccaggctggagtgcagtggcacaatcacggtttactgaagcttggaccttcagggrtcaaatgatccacctgcctcagccgcccgagtagctgagaccacaagtgcgtgccactacacctggctaattaaaaaaaaaaaattggggggggatggagtctcactctgtcaccccggctggagtgcagtggcgcaatctcggctcactgcaagctccgcctcccgggttcacgccattctcctgcctcagcctccc

SEQ ID NO: 792074 - DNA, 608 bp, Homo sapiens
taaggatccctaacaaaatcccaacagggctgctacatcaccagcattgtgcagtatgtgaagttcaaaaactggggtttatccgtaatgtgataccaacttactcctgcaagaatggccataatcaaaaaatcaaaaaacagtagatgttggcgtggatgcagtgatcagggaacacttctaattgctggtgggaatgtaaactagtatggccactatagaaaacactgtggagattccttaaagaactaaaatggaactaccatttgatccagcaatcgcattactgggcatctacccagaggaaaagaagtcattataagaaaaagatacttgcagattcatacgaaaagtcattatacgagaaagatacttgcagatttatagcagcacaattcacaatcacaaaattgtggaaccaacccaaatgcctattaatcaacaagtggataaagaaactgtggtagaaatayacaatggaatacttctcagccataaaaaggaatgaatgaacggcatttgcagtgacccagatgagattggagactattattctaagtgaagtaactcaggaatggaaaagcaaacattgtatgttctcactgata

SEQ ID NO: 792075 - DNA, 600 bp, Homo sapiens
atgacaggagggtgggataagtaaatgggatatgatggccgtggaaagttctctggggcagtaatgtttaaggtgagaatttcagggcaagaagaaaccagctatgctggaactagcattgtagcagaggaaacagcatatgcaaagaccctgtgtcaaggcatttggatatttcttagcatatccaaggaataaaaagaagacctagatgcctgtaatcctagcaytttgggaaggcaaggtgggtggatcacctgaggtcaggagttcgagaccagacaggccaacatggtgaaacccccgtctctactaaaaatacaaaaattagctgggcttggtggtgggcgcctgtaatcacagctgctcgggaggctgagacaggagatattgcctgaacccaggaggtggaggttgcagtgatccgagatcacaccattgcactctagtctgggtaacagagggagactcaaaaaaaaaaaaaaaaacccaaaaacaataacaaaaacaaaaaacaagtgagctggagtatattgagaaaatgggagaaatgacaggacatgaacctaaggaagtatgtagatgacagatagtattgggact

SEQ ID NO: 792076 - DNA, 720 bp, Homo sapiens
ttaacttgctttcttctgtgatttggctgggcatactttaaaaagcatcttataataaagctatttataatgtacagtgatatcatatagatagtattgtgataatatattacacattgtgtattgatataactcacacaccataccattcacccgtttaaagcaaacagttgartgacttttgagtatattcatagggttgtgcaaccatcaccacaattaattttacaacattttcatcactccaacaaggaatcatgtacctattatcagtcactccttatttacccccaaacccctttacagacctaggcatacactaatctctactttctgtctctatatgtctacttattctggatattttatataaatggaatcgcacaacatatgatcttttgtgactgcattctttcacatagcgtaagttttcaagaggcaaccatgttgtagcttgagatagtgccttcttcttgattgtctaataacattttgttgtacagatataactcattttatttatcagtttatcagttgatggatattggagttgtttctactttttgactgttataaataatgcttctatgaacatttatgtacaggttttggggtggacacatattttcatttgtcttgggcctaaacctaggagtgcagttggtgggtcctacggtaactccacgctgagtattttgaggaattgccagagtgttcata

SEQ ID NO: 792077 - DNA, 598 bp, Homo sapiens
caaaattatggttttctaggccaaggtgtgcagattacttgaggtcaggagttgagaccagcctggtcaacatggcaaaatcctgtctctactgaaaatacaaaaattagctgggtgtggttgcatacacctgtaatcccagctacttgagaggctgaggcatgagaattgcttgaacccaaragatgaaggttgcgtgagctgagatcatgctgctgcacccaagcgacagagtgagactctgtctcaaaaaaaaaaaaaaaaaaaaaaaagaaaaaattacggttttctaatttcaggaaatgttgtgagatcttatataataaactcaatttctcagtagcatgataatttgactttttaaaacttagatttaaaatatttaatttttcttatattttgaagttttatgttttatatttcccagataaaacttacgaaaatgaaatatttaaaatggtaccggccgggtgcagtggctcacgcctgtaatcccagcactttgggaggccaaggtgggcggatcatctgaggtcaggagttcgggagcagcctggccaacatggaaaaacccccatctctactaaaataaatagat

SEQ ID NO: 792078 - DNA, 618 bp, Homo sapiens
ttcattttcctccctggctctgcaggcccaccatccccattcctgggcattgtcacactctgacaggcagctgggctaatgtcagaaaatgggacaggtggtatggcattctgcagaatttgggggatgtggtgtagctttttccctrgaagaagccagagctggccagactgaccaaatgtgtaccgcacccctaatgatggtccaccttcccaaaaggaaagcaagtgaaggatcatgcatttaaattacctctaggcttcataaacaaaaccaaaatcttttttctggaaataattttagatttacaaaagagttataaaggtagtacagaaaggttctcatacccttcacccagcttcccctaacgttaactacttacataaccatgatccatttgtcaaaatgaagacattatcattgacaccctggtgtggtggtgcacgcatgcagtcccagctactcgggagtctgaggtgggaggatcctctgagcctgggaggtggagattgcagtgagccactgcactccagcctggatgatagagtgagaccctgtctcaaaaaagcaaaacaacaacaacaaaaacattcccacaatactattagccaaactaca

SEQ ID NO: 792079 - DNA, 508 bp, Homo sapiens
acaatttccaatatctgtcatctggagacttttagtgctgttccagaagctagaccaaaaaaaagaaaaaaaaaagaaaaaaaacaaacaaacccaacccactatccttacccttgggctcttgagggctctttcactccatccctagtaatcacccagaacccccgttcctggtttctggccccttctgttggcccaggcaggctctttttattgggacatatcaagtagtcgtgatttcccactggacccagactctyttggggattagagttcattctggctcttcctaccctggtccttctcaacgtagaacactccaccctccctagggagccccagcctccaatactgaccaccagcattgatggctgttgtcccaccagacccattgcaacttccacaagacaagggatctaggcattgcagaaggccccagggtccgtagcagctccagcctctacttaactaccccagggttcctagtagctccaggctctacttaact

SEQ ID NO: 792080 - DNA, 541 bp, Homo sapiens
gggtgagaacagagcagcagttagtttcaacctaaatttttccaactactgagacaaaattattcagagtactctaccttatgccctgtggattatgaggttttctactctgattgatgagaacaggaactatacctgaccctatgtgagttctctctgttccttttgctggttctttttctggtctcgcatagtttcttcatgcacatgtgctaatcaggacttagctgaagactycagggagaccctctccagatttcaagagttctctctgtgaaattctctcctctttgatattttgcaaactcccaccaccttggcctcccctctctcctagcttttccttctcagcccagcgacaccatgagctcctcatctttgtgccacagttgagacactctcctatgtccccaagctgggcaatgtcatagtggtcacctcgtttatttctcatcccttggggatcaactgccctatgttacccaattgtcaatgttttgaaaactgttgttgcatatacttcacctggctttttcaggta

SEQ ID NO: 792081 - DNA, 586 bp, Homo sapiens
gttattaacctttttttttctttatccatgcccttcctaaaaatccttcccatccccactgcagactctgccccattttctcctcctttataattagggtgtaagcttgctgaacccaaacacctttgcctggtgaaagaatctatgtgcccctagcagtgcatgttttgttaatctgagtgcaaagtcagaacaggttgaagatctctgccacctctgacaaaggagctggaggcggggctgggtcccacatggaaactattcattagtcctgtatttttcctagtattccaagtcttccctaattccctttgggaggctggtactacctgggttgctgggtagagacaaatgaaatgaactcattagcatttgtaagcaagtccrtgggagctgggcaggagggattcattctgttgagatgaacattgatgtaactcccaaagttgagatcagctgctattccagcatcaagctcagaagtatcttcctctgaatctctttttcctgggtttaaggatcctgccccgggggtaacacagccatcagcccaggaagctccaaaatccagccttgagtatccatg

SEQ ID NO: 792082 - DNA, 641 bp, Homo sapiens
accatcagttattttacaaatcatcagtggtttacctggatccccacaagcaaatgcgaatccaggtttagtgaggcctcagctgaaacaatttcagagaccttatttaaggaaaatgatacaaagtaaaaatgcaaaattaggtaagggagtaaatgctatttaaggtgaggaaagaaatcacatattgtgacaattaagaagctgacaaataccaaaaacatgatagaattacaaaaaaaawtttattattaattgtttaacacacacttaacactgtttttcacagcctttttggttttctactctttttttcacttctccacatgaagacaattttataatttcatttcattttctatagaaaaatgtttgctcaatttttaaattataatagtacataaaagctttctgtggcttcataacttgtatttagtcacatcaagtaaatttttagggtagtcattctattcgttttccttcaaatatgagttataatatttgaaaagaaattctacatctagctcctggcttcaaatatttaaaattttatttctcttccacggattacagactttctatgatgagttttcaggacacattcctattatgacatgacctttggcccataccttcatact

SEQ ID NO: 792083 - DNA, 641 bp, Homo sapiens
accatcagttattttacaaatcatcagtggtttacctggatccccacaagcaaatgcgaatccaggtttagtgaggcctcagctgaaacaatttcagagaccttatttaaggaaaatgatacaaagtaaaaatgcaaaattaggtaagggagtaaatgctatttaaggtgaggaaagaaatcacatattgtgacaattaagaagctgacaaataccaaaaacatgatagaattacaaaaaaaaatttattattaattgtttaacacacacttaacactgtttttcacagcctttttggttttctactctttttttcacttctccacatgaagacaattttataatttcatttcattttctatagaaaaatgtttgctcaatttttaaattatratagtacataaaagctttctgtggcttcataacttgtatttagtcacatcaagtaaatttttagggtagtcattctattcgttttccttcaaatatgagttataatatttgaaaagaaattctacatctagctcctggcttcaaatatttaaaattttatttctcttccacggattacagactttctatgatgagttttcaggacacattcctattatgacatgacctttggcccataccttcatact

SEQ ID NO: 792084 - DNA, 506 bp, Homo sapiens
gagaattctgttaatacatccagcaaactgaccttacaaacagaagcaatacagttattttcagacaaacacaaactgagaaattattaaaaaaataaattatcatcaacagttagaagactaaaaagtcttctaacatgaatttcagaagaatgattcaagaaggatgagctgacattcaaaaatgaacagtaagcaatgacaaacatgtagggtaattcccagaggacgatgaygatttaaaacaataaaaatgaccagtttttaagattttaaaaaaaacgtaatagaagtacgagcgaggaaacaaaaatatatactatgagaagggatggttggtgttaatgtgttctaagttccgcgtattgtccaggagaaggctcgagaacataaatcaactttagattccattaagtaaccagtaaggttactcaatatgtacagaaataaagggcacaacttccaaattagtagaggggacaaaatggaataaagatggaaaacag

SEQ ID NO: 792085 - DNA, 613 bp, Homo sapiens
cacactaaaaactgtggaaaagatccactaaagctttgaagcttgacatctctggacccagactggccctgtcaaatctaatggctgattgtttcatatctatggcttcattttacatcatgatttctactatgttcttatccccaaatccaactaaatccttatgattactaaacaaaagtagcaaaactagacttcatcttaggtggtacagaggaaacagagagggtamtgcaaaggccaagcagcatattaattaccccatatttctgcaaagaacaaaaactcaaggccaaatacattgcttgctccatgaaaacagagaccttatttgcctttcgatcattaaacatagttaattctttcattttgcaagcactaactgggcagctgctagctctaagacactgtgtcaagaggcaggggaaggtgtgagcagcggagaggtgatcataatgcaacatggaaatcagtactcagcagacccaagagcaacacatcctgcaatccagaggacatgatgaatgctgaacattaggagaaaaaatggcctttttttttttttaagatggggttttgtcatgttgcccaggctggtcttgaactcctggcc

SEQ ID NO: 792086 - DNA, 627 bp, Homo sapiens
gtctaaaccagagagatttcatggtaatcagctgctaatgaaaacaaccagtctgctactgctagcctttgtttttcactaataatatcaaattaaaaaaatatttaatttagaatagtcttaagtaaaaaagcaaaaytgtatatcaagaaagtttggttattttattgatgacattagggatctcttcaaatttctgtgaggacatcaactaaaaggtttctaaaaacacacaacacttctaagaataagtatgagtgagaaagaaattgtatgtatgtaaatgggaccgtggatttaaagtttaccaagtttgttgaaagattgacaaaatctgcataatccttgttgatgagttcgaccatggctgttttaagaagtttatagtagagctccaggtcatctctcagttcttccagctggacccgcttcctacagtcagacacaaaatgatcgacatcgaaatcttcctgaaaaataaaaccagagaagaaaaaattatagcaatgatatcacagtgacatatacaaatgaaatggaagaaagagtaagaaagcccattcccgtcatttacaaggccatgctgctgcaggaagaaagtatcttggcttatacatgacagtatga

SEQ ID NO: 792087 - DNA, 556 bp, Homo sapiens
gtgccccacacactgttgtagcctctggagattcatggtgaacatatcaaggcctgctctaaggtggctgcggacatgtgtgcgagtcaccaagcacacaaaatggggcagtgtgagagagtgggtggcagtggagagaagtacctgggctgatgcaacacagccagctgcaatggggaacgcaggggactggggcagccctaaccggccaccttatacgtgggctggggggcgtgttagggaaggaggaggtgatgtctaaggtgacacttggaagacgagtgaggggtggccaggaggagagtgggctgaagagccgcaggtgrgacagagcagtctggaagtgagagtggatgtggccctgactgtcctggaggaagggggtcgctgagctggagagacctcagtgggggccaggttaccaagacctggccagaggcccagaagagaacggactttctcctggagcactggggagccgggtgcggggagtgttaagcagggaagaggctgcttcctatttgtatgtggggagtggatcgcatagggtcaagat

SEQ ID NO: 792088 - DNA, 556 bp, Homo sapiens
gtgccccacacactgttgtagcctctggagattcatggtgaacatatcaaggcctgctctaaggtggctgcggacatgtgtgcgagtcaccaagcacacaaaatggggcagtgtgagagagtgggtggcagtggagagaagtacctgggctgatgcaacacagccagctgcaatggggaacgcaggggactggggcagccctaaccggccaccttatacgtgggctggggggcgtgttagggaaggaggaggtgatgtctaaggtgacacttggaagacgagtgaggggtggccaggaggagagtgggctgaagagccgcaggtgagacagrgcagtctggaagtgagagtggatgtggccctgactgtcctggaggaagggggtcgctgagctggagagacctcagtgggggccaggttaccaagacctggccagaggcccagaagagaacggactttctcctggagcactggggagccgggtgcggggagtgttaagcagggaagaggctgcttcctatttgtatgtggggagtggatcgcatagggtcaagat

SEQ ID NO: 792089 - DNA, 511 bp, Homo sapiens
ttggagacgtaaagaattttttgttgatgtggagaaagcccacacatttgatgtcagaagtgaagtgttgggagagtatagaaaaatattgatttttcctcttttaataacagatttccaaagtgtgttcaccattttacgcacttaccagaaatgagarttccacttatgccacaactttaccaatactaggtattgtcaaactttttaattgtagtcattctggtggtggtataatggtaccgcattatggttttaatttacttttaattgactactaatgatgttgagacctttttcatgtgcttactggctatttctatatctttgtttgagaagtggctgtgcaagtcttttggccattattcatatttgattgtcttcttaatgagttgtaaaatttcttaatatattttgaattctcagaatgtatatgcaaatgttttctttcaatgtgtgggctgcttactgattttttaaaaaatatcttcaaagagcaaaagtttttatt

SEQ ID NO: 792090 - DNA, 577 bp, Homo sapiens
attttaatttttacacacatatacatagatttttcatattcattatatcatagatataacttagaatgttaatttccacatttccactctaatttttaccataaataatatttccatttggcaaaaatcacagtttatcgctctctttccagtgtttctcccctgccacactakaaccagtattaacagcctgagaacatctctctacatatttatctacattcactgaaaacaataataacagtaaacaaaaggtcttaatgcttgttataatacagacctgttttcacatattacctactgtagctcacttaatcctccaaacaaccttatgagagaagtactattgttatctgccatttacacatgaagaaactggggcccaacatacacagaatattcaaaaatgtaaacaaatctgtagaaacaaaaaaggaaggttttttggtcatttaagaaatacagagaaagccaggcatggtggtacacgcctatagtctctgctacttgggacactgaggcaggaggctctcttgagcccaggagttcaaggttgcagtgcactataatcacacct

SEQ ID NO: 792091 - DNA, 577 bp, Homo sapiens
attttaatttttacacacatatacatagatttttcatattcattatatcatagatataacttagaatgttaatttccacatttccactctaatttttaccataaataatatttccatttggcaaaaatcacagtttatcgctctctttccagtgtttctcccctgccacactagaaccagtattaacagcctgagaacatctctctacatatttatctacattcactgaaaacaataataacagtaaacaaaaggtcttaatgcttgttataatacagacctgttttcacatattacctactgtagctcacttaatcctccaaacaaccttatgagagaagtactattgttatctgccatttacacatgaagaaactggggcccaacatacacagaatattcaaaaatgtaaacaaatctgtagaaacaaawaaggaaggttttttggtcatttaagaaatacagagaaagccaggcatggtggtacacgcctatagtctctgctacttgggacactgaggcaggaggctctcttgagcccaggagttcaaggttgcagtgcactataatcacacct

SEQ ID NO: 792092 - DNA, 492 bp, Homo sapiens
aaagacgatagtctatgtaccacctccagtgtcccaaccctgcaaggtgtccctgagctggccttttagctgagacttcccgaagtcattctgccatttttttctctcgcaagttgcctctgggtgatgaggtacatggaagacgactttaacgactttatcttktggctttgagcccaatgtgtcatacctgttttttcctacagcgcttctgccagcgcaaccgtctgagggtggacagaatgccccaactgttgacatgataacccacgttacattgtcacagaccaaaaagcacattttactaccagccaggagtgacacaatgggatcaaaaccacaggatataatagtctgctgtgtacctcatcaccgagacagccggctttatagaaaaaggtgtgatgggctgatacagtctcagccgaagggccagcttgggacaaatgcaggatcaccacactggatgtgacacccacgctgaaccggaac

SEQ ID NO: 792093 - DNA, 611 bp, Homo sapiens
ccacatatgggaatttcctgggatcccagtgtttatcctgcattcattcattcgttcatttttttatccctccgctaacagctactaatgactcttaaatgttggattgtcttctaggccctaaagtcagagaaccagacacaggaggaagaagaaacttcagagaggtgaagcatgggccagtgcttgagaaaagcattaactgatgccaggcagaagcgagtataaagtcaccaaggtgggcaagggcttagcacgctccggggatggggctaggatgaaagtgggcccattctaatgtccagctgtagcagtgggcatcggcagacacttggttttcttacataaaaatctcttcaggacaggtctggaaggctggactgcagccctgggtctgaccccagccccytgtgggacctcgggtgagccttttaacctctctgtgctgactttcctgcacttacaaaaaaaaaacaaacagactccaaccttaggatgttcatctctgtcttgtccagtagaaaattctgactccatgtatgtatctttgagccaaagacaggattatttgtgtcaataataagtaaaagtaaataaatctctggtgttta

SEQ ID NO: 792094 - DNA, 612 bp, Homo sapiens
ttaggtgattatcagaattgcagtgactaacagcaagttagtccttccatgaacaaggagtgtcctaggctggtaataagctcaagaatgtatctttatcctcagcacccatagcagccttggtcggcaacaagggacagaggaacaaacaccacctgcccagacagcaggcacagaggaacaaacaccactctgcagaacatagctgcattacacggtgctgccagttgtattttttcttgaagctgtcaatagaaaaakctagattgtagaggctcccacagttcctccctccccaaccttccttagtcaaggacagactgcaccaggctagaatacagtagctcggttgacatcttccagaggatgtagcaaagcaaatgagatgcttttaaaataacttgatccaggatctaacatgcggacaaagttgcagacttgccagcttcctccattctttttgaaaacttgaatcagatttggatatccagacattatatggaaatgtggatctttagaacagagatcacaccagagactttaaatcttccacctcttcacttcccatgctggcctcagaagccctaaagcacaatgtccacccacaaagct

SEQ ID NO: 792095 - DNA, 612 bp, Homo sapiens
ttaggtgattatcagaattgcagtgactaacagcaagttagtccttccatgaacaaggagtgtcctaggctggtaataagctcaagaatgtatctttatcctcagcacccatagcagccttggtcggcaacaagggacagaggaacaaacaccacctgcccagacagcaggcacagaggaacaaacaccactctgcagaacatagctgcattacacggtgctgccagttgtattttttcttgaagctgtcaatagaaaaatctagattgtagaggctcccacagttcctccctccccaaccttccttagtcaaggacagactgcaccaggctagaatacagtagctcrgttgacatcttccagaggatgtagcaaagcaaatgagatgcttttaaaataacttgatccaggatctaacatgcggacaaagttgcagacttgccagcttcctccattctttttgaaaacttgaatcagatttggatatccagacattatatggaaatgtggatctttagaacagagatcacaccagagactttaaatcttccacctcttcacttcccatgctggcctcagaagccctaaagcacaatgtccacccacaaagct

SEQ ID NO: 792096 - DNA, 638 bp, Homo sapiens
ttcttttctttttttttttttgagacaggttcctacttttttgtccaggctagggtacagtggtgcgatcatagctcactgtaacctcaaactcctgggctccagtgatgttcccacttcagcctcccaagtagtgggactagagatgtgcrccaccatgcccagctaatattgtattattattattattattatttggtagagatggggtcttgctatgttgccagtgctggacttgaactcctggcctcaactgattctcccatcttggcctcccaaagtgctgaaattacaggtatgagccaccattctcagtctctttttttttttttttttttttgagatggagtctcactctgtcacccaggccagagtggagtggtgcgatctcagctcactgcaacctccacctcctggattcaagcgattctcctgcctcagcctcctgagtagctgggactacaggcgcgcaccaccacacccggctaatttttgtatttttagcagagacggcatttcaccatattggccagggtgatcttgatctcttgacctcgtgatccccccgccttgacctcccaaagtgctgggattacaagcgcaagccacagtgcctggccagaagggtgaacattaga

SEQ ID NO: 792097 - DNA, 674 bp, Homo sapiens
tgttctttactttttgtttggttgaggtttcacgctagaaggtggctcaggtaggtgggtgctggagagctggacggagaacactggcccgcttccgttgaaggtctagaagggtctgaggaccgggggctgcgagcgggtcgaagtcagaggcaggctcctttaggaccgtkttacctgcccttcccgaagctgataatgcgagcctttagaagagtccatatgtttgccctgacctctgtaatagtgagcgtttcaccaccggggcgtaatttacctttggggtgaaactgttcttcactagctccgacattaaattcccgtagctcttcccaggtcccatggcaactaaaaacgcccggttgagaacctctagtcaagcaagattaacgcattctggactttcaagctggaggaaacgccactcagccaaacaaaatttaggtgtgtgtggagccagggctgccttgcttgggatcccagcttcaccaccttttagatatgctaatgtgagcagttaattgacctcatctgtatgagagcgataatagttaactacctttcagggttattctgataattgtacctttaatgttgtcctcgctcgctctttctcttgctgtggatagtgctatcctgtatttaatacataagtcttaatttttcttcaatct

SEQ ID NO: 792098 - DNA, 674 bp, Homo sapiens
tgttctttactttttgtttggttgaggtttcacgctagaaggtggctcaggtaggtgggtgctggagagctggacggagaacactggcccgcttccgttgaaggtctagaagggtctgaggaccgggggctgcgagcgggtcgaagtcagaggcaggctcctttaggaccgttttacctgcccttcccgaagctgataatgcgagcctttagaagagtccatatgtttgccctgacctctgtaatagtsagcgtttcaccaccggggcgtaatttacctttggggtgaaactgttcttcactagctccgacattaaattcccgtagctcttcccaggtcccatggcaactaaaaacgcccggttgagaacctctagtcaagcaagattaacgcattctggactttcaagctggaggaaacgccactcagccaaacaaaatttaggtgtgtgtggagccagggctgccttgcttgggatcccagcttcaccaccttttagatatgctaatgtgagcagttaattgacctcatctgtatgagagcgataatagttaactacctttcagggttattctgataattgtacctttaatgttgtcctcgctcgctctttctcttgctgtggatagtgctatcctgtatttaatacataagtcttaatttttcttcaatct

SEQ ID NO: 792099 - DNA, 476 bp, Homo sapiens
acattccaaccttggaaggtagaattcttgttgaattagatgagacatctcaagggcttgttccagaaaagaccaatgttaagccaagtaagtaaaggtctgttgtaattttaagtactttgaagagtgaataatagttggtttaatgcctgtgtgagtaaaaaactctggccagaagagttttgaaataccattctataaataactttcctttttggtctttttccttttttttttttttttttttttaaatyacaagagacagggtctcactgtgtcacccaggcgggagtgcagtggtgtgctaactgtaacctcaaattcctgggctcaaggaattatcttgcctcagcctcccaaagtgtggggattacaggtgtgagccaccgcgcctggccccttaataacctgttatctacaactaactactgtctttaaggcaaaagcctttacctgtggagtattataacacttta

SEQ ID NO: 792100 - DNA, 476 bp, Homo sapiens
acattccaaccttggaaggtagaattcttgttgaattagatgagacatctcaagggcttgttccagaaaagaccaatgttaagccaagtaagtaaaggtctgttgtaattttaagtactttgaagagtgaataatagttggtttaatgcctgtgtgagtaaaaaactctggccagaagagttttgaaataccattctataaataactttcctttttggtctttttccttttttttttttttttttttttaaattacaagagacagggtctcactgtgtcacccaggcgggagtgcagtggtgtgctmactgtaacctcaaattcctgggctcaaggaattatcttgcctcagcctcccaaagtgtggggattacaggtgtgagccaccgcgcctggccccttaataacctgttatctacaactaactactgtctttaaggcaaaagcctttacctgtggagtattataacacttta

SEQ ID NO: 792101 - DNA, 590 bp, Homo sapiens
agaatgattctgaagtggccaaaattaaactaatgacaagtgctttcaatgaacccttctaatctctccaaaattatttcttaccttttatggacctaactgtgctacatggaatctttctcaaaccaacacaagatgcagagcaacatagacagaacccaagacaagaagctacagagatcagtgtagccaatcaacacctgtcagatgacagcctaaaagtacaggtatcactgcatttcctaatcaaaaacgcattcacccaataagcctgtgaggaaccagcccttcccatttatacccagatcgccccactctgccatccccacttccctcccgcatccctttccctctccctctccctctctgtaatttacaaggacactagtccatagcacgacaaatggcctacacagtttkgtttaaaaaaataaaaaataaaataaaaaaataaaatttttccataaagtcatgtccaggactttaagctttctatttctgttcttacagaacaaaaaagaaataacgttaggtaaattttgttttaaaattcctgctgggttgagactttagatttcaggctggaaaga

SEQ ID NO: 792102 - DNA, 607 bp, Homo sapiens
caaaatttcgatgtgaaaactactgtttgcacttcaaatagtgaaactggttaaaaagaaaagttaaatgaccagtctcagcaacatgaaatacccaccaatgccccattctgttttctgtcttcaaccaggactgcagatgctctgactattgtatgcatattgcagccacaggtggcagcccaaatctgtacattttgctgcattctgtattatttgctyagtaattgaaggagaattgcattcttcttctttcctttgttgtctttacagacaaagtatctaattgttagggaaagcaatgaaatgccaataaatatattggcataaccttgcaggtcattataaaggattttttgttgttatttctgagaaagaagctgcatagttcaggagccagttagaccaacccgtgtttgcttggcacctgggtcctagtgaaacaattcaactgacttgtaaacaggcatgatgccatccagccatatgggtgcacatagatgctgccaagtgaccatgtagaaaaatcggaagcgtttgttgagggcagcagtcccagtatgagacatccaaacagctgtctaccctgagattcatacgcctgtgg

SEQ ID NO: 792103 - DNA, 602 bp, Homo sapiens
tcacaaattcattaaactctctgaagaagtttctctagtagaaaaaccaacactacttcaattatctttcaagagatcctcgctatttgcaattctcttactgcagtgctcctattacatacttttgctacaaccagtgtactaaaaactgttaaagcctaattgttataattttctagcttgtagaatttrctaatggtttttggctgttggcaagtttgatgattctaatattgataaatgtttgttttcctcctccactcccatcaccatttacctgagtgcatattttaaataccagtggggctttggaatatatgttaagcatctgggtaaagataaaaaacaatatgcaaggcaaatgcacttatcaacctgatcgatctcttgacctaagattttgataatgtttgctgagaactttgggcatagaaattggcctttggatttcaactgacttcaaaaatctaattgttatatttcttttggtctgggaaaacagcatttttaaaatgtttaggataaatatggaaaaatgatacatgtagatcctgctaacatgaaaataattcattgaacaacaaaattagtaaaaattagct

SEQ ID NO: 792104 - DNA, 621 bp, Homo sapiens
atacaacactttctaatgccttggattgctaatttttctgaattctactctaagtatcttggtgtgatggttaatattgagtgtcaatttgattggattgaaggatgcaaagcactgttcctgggtgtgtctgtgagggtgttgccaaaggagattaacatttgagtcagtggactgggagaggcaaacacacccctaatctgggtgggcaccatctaatcagctgccagtgtgkctaggataaaagcaggcagaggaacatggaaggattagactggctgagtcttctggcctccatctttttcctgtgctggatgcttcctgccctcgaacatcagactccaagttcttcagcttttggactcttggaccttcaccagtggtttgccaggggctttcaggcctttggctaccgactgaaggctgcaatattggcttccctacttttgaggtcttgggactcgtactgacttcctggctcctcagcttgcagacgccctgttgcgggacttcactgtgtgattgtgtgagtcaatttgcctaataaactccccttcatatattcatctatccagttagttcggtccctttaaagaaccctgagtaatacacttgggagtc

SEQ ID NO: 792105 - DNA, 646 bp, Homo sapiens
aagacctctacaaagaaaactacaaaacactgctgaaagattcatagatgatacaaacaaatggaaacacctcccatgctcatggatgggtagaatcaacatcgtgaatatgaccatactgccaaaaccagtctacaaattcaatccaattcccatcaaagtaccaccatcattcttcacagaaagagaaaaaataatcctaaaattaatatggaacaaaaaagagcctacatagccaaagcaagactaagcaaaaggaacaaatctggacaaatcacattgcccaacttcaaactatactataagatcatagtcaccaaaacagcatggtactggtataaaaataggcacatagtgatggagcaggatagaggacccagaggtaaagccaaatacttacagccaactaatcaagtatagatgccagagggcttgtctcactcttctttccatacccctagtttttagcaatttatgtgcctcyagtgtgggcagcatcttgctctcctctttgtctctcctacagtggcagatcactgtggatcccgctaccagaggcaggctgatttcacttctaccctttacttggtagcctagggtgcaaggaggattgctgtgcctgcccttatggcatttgcttcctttg

SEQ ID NO: 792106 - DNA, 604 bp, Homo sapiens
atccttgccttaggaagagaggattaggtaaattatcttcaaaactcaattgaaaactgctaggttttatatgaaagactgaatttttttaaatgtggaaatgtggtcctttggaggggggagtcatcagatataatgagttatttctgtaaaacagttatgcttatgtccccctgagtaaagccacctgagagatgtctatttcaagaggtaatagagcaactgtcagatggatgtggactttgatgctttgaactacagcatctgtcacatttttaaacatcatttattctcatctcccatttttccattggagtttaaaatgagccctatctgcgagataaaaaaaaccagaagtgtatttgaattttgttytgaatgtgaatagaaccagtgcccacaatccaaggtctccatattcctcgggctcacattgtcccattagatgtgattgcttcttccctgagctgttatcttctgcagggggtctaggagaacctgagcatagttgtccctactagatctactccatggatgaagagtagaagaaaaaaaatagctctttttttgtaccacaaagccagtcgatattgtggcctgctct

SEQ ID NO: 792107 - DNA, 574 bp, Homo sapiens
tggtacataagcactgtactctagtggataaaggttatttttcccatggaagtacaaattgtttatgtatattgaaaatgagcaattaagtgcatggcaaatggtgggaacaaggtgtctcactgttgcactaagaagttacagaggccrggcgcggtggttcgcgcctgtaagcccagcactttgggaggcccaggcaagcggatcacaaggtcaggagatcaagaccatcctggctaacacggtgaaaccccatctctacgaaaaatacaaaaaattagctgggcgtggtggcagacacctttagtcccagctactggggaggctgaggtaggagaatggtgtgaacccaggaggcggagcttgcagtgagccatgatcgggccactgcactccagcctgggcgacagggtgagacgctgtctcaaaaaaaacaaaaaaaaaaaacaaaaaaaagaagttacagttgtgcaagaggagaagactagaatgatccatgtggtaatgcattagaattggaggcatcagtatgttggggaaagaaaatattttttcttcccactttaggttcatg

SEQ ID NO: 792108 - DNA, 498 bp, Homo sapiens
tttcttatagtcagatttcaccatgactgtcattttgcttatgatgttttacatattcactagtacattgtatttattatattatggtaaactgattctagttgagctgctcatgggatagagacttgtgcatctaatctagcaaggagtgaggaattctcaaatgagctctgcacagcatacagacactaataccaagaaatacaaacaaacagaaaaagacgcattttcctgaatcaaataaagtgtcagtgtgcaaaacagaaaaatagaatcgayagaataagattaaaaacagaacctatcaacagagataatgaaagcagaatctgactaaaatgccaaatgtgaaaatgtcctatctttagaacttttgtcagctctgcctattcaaaaataaaagcttggaacaatgtatgatacatgcatatatagcataataggttaacatataaatacacatacctacattatatatatattccatcctggctatta

SEQ ID NO: 792109 - DNA, 597 bp, Homo sapiens
aggttttatggagatgagctctctgttctggatctatcacctaagactatccaggcaattggcctccagagaggtcttctgtttttgttcctcttctgtcttcccttctttcacctgctaagcatccactaaactcttacccttctcttcctgcaaaaacttgtgggttgataatagattaactatcaatccagtgtatctaagaccctatattatatttcccaaggttagctgtatcttagaaaagtatggagaagtatatgtgcatgtttgatgtattctagtagattgtaagcttcctaaggtcasaaacctcatgatgtttatgtactgattggccaaatctagaacagcagataatttgtttcagcttgatgcagccccatgactaaacttccaagaagccacatgacatagcagggaggacaaggacttggagtcagaagagggtgcccgaggcttgttggctctgtcactggctcttatgaatttgagtaactactcaacatgctgagcttctgcctgaagtatttagacaggatgatcccagtggtgacacatagcaccaacattttatggtcctgaatccactttata

SEQ ID NO: 792110 - DNA, 618 bp, Homo sapiens
aagaaaatacttaacactatgataacttctaggttaatattaagatctctaattttatttacttttaaaaaaaatatggagtctcctgttgcccgggctggagtgcagtggctataaacaggtgtgatcccactactgatcagcacaggagttctgaccygcttcatttccacctgggccagtttacccctacttaggcaacctggtgatcctccactcccgggaggtcaccttattgatactgaatttagtgtacacacctgatcagcatagcacactacagcccagaactcctggcctcaatcaatcctcctgcctcagccttgtagctggaactacaagcatgcaccactacaccaagcttagtatgttttaatcctataaatcaatagagaaacaacccaaagacataggaatcataatatataggcaggcaattcacacaagaagaaatgcaaatgaccaagaagtaaatgaaaaaaaggctcaatctctctagtgacaagggaattataaattaaagcaataatgagggccgggcgcagtggctcaagcctgcaatagcaacactttgggaggccgaggcgggcagatcacaaggtcaatagatcaagacca

SEQ ID NO: 792111 - DNA, 572 bp, Homo sapiens
cactgttattggtcaggatcctggccaaaaaaaaaaaaaaaaaaaaaaaaagacagttgaactggaaagactattaatgaagcactttgagcagagttaagggaacgagcctggagtggtgaggcacccggaaccaggaatagtgagaagctctaatccccatgcccaatgtggggggtgaggacagaattgtcagcgtctgataagaaatgagcctccagcaggagggcagccrcctggtgacatagccaccagcagtccctggagaaccacaagggagcagggggaataatcgctcttacttctctcctctctcactttttgatttcctgatagtgcttccagttggccaatctggatggtccagtccagagagtttagcctccctgacccagagaagggcagagaatgatgtttatttgtctatttcccacactgcactgattcacagagaatagatctcgaatgaggcagggataaggcacaaacagaataaccaacatcaacctcttcttcattcctggatgttgaaattctcattaggctatcaatagatgagcaattctcagtag

SEQ ID NO: 792112 - DNA, 572 bp, Homo sapiens
cactgttattggtcaggatcctggccaaaaaaaaaaaaaaaaaaaaaaaaagacagttgaactggaaagactattaatgaagcactttgagcagagttaagggaacgagcctggagtggtgaggcacccggaaccaggaatagtgagaagctctaatccccatgcccaatgtggggggtgaggacagaattgtcagcgtctgataagaaatgagcctccagcaggagggcagccgcctggtgacayagccaccagcagtccctggagaaccacaagggagcagggggaataatcgctcttacttctctcctctctcactttttgatttcctgatagtgcttccagttggccaatctggatggtccagtccagagagtttagcctccctgacccagagaagggcagagaatgatgtttatttgtctatttcccacactgcactgattcacagagaatagatctcgaatgaggcagggataaggcacaaacagaataaccaacatcaacctcttcttcattcctggatgttgaaattctcattaggctatcaatagatgagcaattctcagtag

SEQ ID NO: 792113 - DNA, 564 bp, Homo sapiens
ttggcaataatgtaagtggccatcaacaggggaatggctaaataaattgtagtatgtccataacttaaaatatagccatacagccttttctcttttctccttacatttcctgtgacaggcatttttaaaaaatgtatgtatttattattattattattatttttagacacaagttcccactctgttgcccatgctggagtgcagtggtgtggtcatggctcactgcaacctcaaacccctaggctcaagcaatcctcccgtcttagcctcgtgagtagctgggactgtaggcatgcacaaccatacctggtaaattttttttmttttttgtaaagatagggtctctctatgttgaccaggctggtctcaaactcctggcgtcaatcctccagccccagcctcccaaggcactgagccactgtacctggctgccatgcagccttaaaaagaatgtagtctatttattgatttgaaatcatctctgaaaaatattgtttattaataaaaggaagttttattaacagtacttgtaattttttttaaatccaaaacatatttctgcat

SEQ ID NO: 792114 - DNA, 613 bp, Homo sapiens
gttgcccaggctggagtgtagtggtacaaccacagctcactgcagcctcgaactcctgggctcaagctgtcctcccacctcagcctcctgagtagctgggactacaggcatgtactaccacatctggctagttttcaaatttttttgtagagatggggcctcgctttgttgcccaggctggtctcgaattcctgggctcaagtgattctcccaccacagcctcccaaattgctgggattacaggcctacgccactgctccggcccatggcttcttttcttgctaaaaagacagagccgaagatgccccagatatttgttatctggccctttacagaaaatatttgctgactcctgccctaattcatccattagcgtctttcagtggagtgagtgaaacatcttcctaactgatgtctatgcctccagtcttgttctcctcccatctattttcctcackctggcctttgtaaagggaaaatctggttatggcacttggctgcttgctccgctgcctccttctgctctcttgatggattctaaacaccttctcatggtctgcaggattcttccactcagcccccgccctcctttcgccactgtgccacgttcagc

SEQ ID NO: 792115 - DNA, 610 bp, Homo sapiens
actcacttacttgctctttcattcatgaagttatccattcaaaaggcatttattgacctcatactgtaggccaggccccatgcaaggtgctggggactccactctgaagcatgaccttgcccttcccaaacagtagccacaagccctggagacagagcagcttagacactggatgtggaaataaatgacctctygatctctctacctggaagtcttttccctgagaagattgttgatggtcctccagagccccatgcattgaggccttattgggttatttggtggcaagcaacagaagccgattctgctaaattatggggaaaaaggtatttattggaaagatatgggagggctcccagaattggaggaaatggggaaaaccaggccttgggagggacagaaactcaggaaggtttgggcaatctaggtcaaaggaaaaatagtcccttcaaaatgccactgtaggaatgaatcaactttggctttaaaaacatttattgaaaaactcagatagatggcagagaattgagtgaagtctactcctcagctcatggcgccctgccctttggggtctgggcaaagccttgtcttgttttattttatatttttt

SEQ ID NO: 792116 - DNA, 610 bp, Homo sapiens
actcacttacttgctctttcattcatgaagttatccattcaaaaggcatttattgacctcatactgtaggccaggccccatgcaaggtgctggggactccactctgaagcatgaccttgcccttcccaaacagtagccacaagccctggagacagagcagcttagacactggatgtggaaataaatgacctcttgatctctctacctggaagtcttttccctgagaagattsttgatggtcctccagagccccatgcattgaggccttattgggttatttggtggcaagcaacagaagccgattctgctaaattatggggaaaaaggtatttattggaaagatatgggagggctcccagaattggaggaaatggggaaaaccaggccttgggagggacagaaactcaggaaggtttgggcaatctaggtcaaaggaaaaatagtcccttcaaaatgccactgtaggaatgaatcaactttggctttaaaaacatttattgaaaaactcagatagatggcagagaattgagtgaagtctactcctcagctcatggcgccctgccctttggggtctgggcaaagccttgtcttgttttattttatatttttt

SEQ ID NO: 792117 - DNA, 616 bp, Homo sapiens
aatgccattttctcagaagtgggttcattatcctgggagtgggttctttattaaaaaaacaagtcagggctcccctaccacctgccttctgccatgggatgactcaagaaggccttgccagatgttggcttctcaatcttggacttcccagcctccagaatcatgagccaatacattcctgtttattatacattacccagtctcagatattttgttattgcagcacaaaatggactaagacaatatgtgtaatgcaaatcatgctcccatcagtatcactttawttcttattcacattaaaaaatatgtaccatagaagctatatctatacatatggtcattactgcttctgtgaatcaaccagaaaattttttaaaaaaagaacatagagaacatgtttttgctctttctaatgtggcataccagtctttatgtcaaagtgtggcccctcaaaggacaggctgcaggaaaggatacacagtggacatcactgtgtaacatgatcctgggttctcaaagcagtctattctgtccagcggggaagaccaccttccatttgttagaactgagtgcttccccgagtgtgcccctttcatttagaggtgctgctaaaagg

SEQ ID NO: 792118 - DNA, 591 bp, Homo sapiens
tatatatatatatatatatatatatatgtaatatatatatcacataccatatatagatttatatctcgatgcaagctagtttaatccaaagtgtgaattagtgtggatatgagatatatatacatatatataatatatatatgtgatctataatatatgtataatgccttagcactctacgcatgctattaaaagttgcttaaacttttaatataattactaagaaggacagacaatattctaagatcaagtttaactagtgaaatagtatacaatttggagtaaaattaaacatagtttccctggatttgctaatgaaatgctctggcaagcataacaagtaagtcttgaaggtcgaatgcattatactaagggactgcccttggctgtaaactatgccttcttcacttttccagccaattttcaggaaatgtttgagatctctttctattgyttttttcctccttttacttccatatcataatacatgatatatacatacaccccctccattcataggcattcttcctctcccacgcttcaccttggaagtccagtgctccctcgtctctctcttgaccaggtgtataa

SEQ ID NO: 792119 - DNA, 610 bp, Homo sapiens
gaagacactcaaaatctactctcttagcatgtttcatatctttcatatcgtaactcaattagctttgacccaatttattctatctcttgaagttctggcctcaagtggtctttctgcctcggcttcccaaagtgctggaattaacagcatgagccaccacacctggccttctatctctgatagtgtgtaaggcagccatttggggtctgaactaccttcaaagaatctttagatgtgaagtatgatattaaagtagcagtaattttacctctgtgtcacacaaaatacaatattgtgaaaatagaaaccctataatttgcatcttattgaataacatacctgcttccagcactttagtgggatcaaaagtgggcagagtcccctccctgacatcaggaccatctccaggtgcatcctctatcttaagcagagccagttcctgttgaaaagcttccacatcagtcccttaragataaaaagtcgtcaatttacgaattaaaatatgaactatgaacgaggtaataatatttattccctcatcattgtgaaataaaaacctgtaggctaattatttcagaagtctgttgccagaaaagcaggaaagcagaaa

SEQ ID NO: 792120 - DNA, 488 bp, Homo sapiens
aaatgaagcggcacctgcccttcaaggtgaaggaagagtggagaataatgcttatgggtggtggaggtatatttatgcattatattttatgacataccagtaacaggaggacagaaaacattaggaaggaatcttaaacatttcttactgctgctgtgcggagaggtgggacaaggacacataaaaagccacaaaactttcctgccgttttgacagaggctttttattgattgggtatttgcatggttgccgtaaacctttgagtgttttccagagttcctgtatggtttgttcagtcattttctgtttttgttttgttttgttttgttttatgtttctgtggaagaawggcagcttgcagcttccgagtctgccatctacggacatctcatgtatttttaagaaactttttaacacacatttattaatgcttcctcatgctgtgtaatatactaagtgctggagatgtcagtgccaaatttttgcct

SEQ ID NO: 792121 - DNA, 402 bp, Homo sapiens
aaacattaggaaggaatcttaaacatttcttactgctgctgtgcggagaggtgggacaaggacacataaaaagccacaaaactttcctgccgttttgacagaggctttttattgattgggtatttgcatggttgccgtaaacctttgagtgttttccagagttcctgtatggtttgttcagtcattttctgtttttgttttgttttgttttgttttatgtttctgtggaagaatggcagcttgcagcttccgagtctgccatctrcggacatctcatgtatttttaagaaactttttaacacacatttattaatgcttcctcatgctgtgtaatatactaagtgctggagatgtcagtgccaaatttttgcctaaagctcatagtctagtcagactgactca

SEQ ID NO: 792122 - DNA, 714 bp, Homo sapiens
gatttaatgtgataagaataagaacaaatgagtacaaaaggaacaagtaagttgtctagggccagccttgggaaaggaaagcgcaatgtttgaacatctctgctttcctgttttcctggcaagagactcctgaaataattagcctataggtttttatttcataatgatgagggaataaatattatcatttcctcgttcgtagttcagtttttaatttgtaaattgatgacctttttatcttttaaggacctgatgtggaagcttttcaacaggaactggctctgcttaagatagaggatgcacctggagatggtcctgatgtcagggaggggactctgcccactttcgatcccactaaagtgctggaagcaggtatgttactcaataagatggaaactatagggtttctattttcacaatattatattttatgtgacacagaggtaaaattactgctacttcaatatcatacttcacatctaaagattctttgaaggtagttcagaccccaaatggctgccttacacacyatcagagatagagggccaggtgtggtggctcatgctgttaattccagcactttgggaggccgaggcagaaggatcacttgaggccaggacttctagagatggagaaaaattgggtcaaagctaattggattatgatatgaaagatatgaaacatgataagggagtagattttgagtgtcttcac

SEQ ID NO: 792123 - DNA, 522 bp, Homo sapiens
atgggaccctccaagccaggcacgggatataatctcctggtatgccgtttgctaagaccattggaaaagcacagtattacggtgggagtgacccgattttccaggtgccgtctgtcacagctttgcttggctaggaaagggaattccctgaccccttgcacttcccggrtgaggtgatgccttgccctgcttcggctcatacttggtgcgctgcacctactgtcctacacccactgtccaacaagccccagttagatgaacccaatacctcggttgggaatgcagaaatcacctgtcttctgagtcactgatgctgggagatgtagactggagttgttactatttggccatcttggaaccgcccaatgcagtttcttcatggtgtctttggtgtttatattttggtttgtttttgcagtggctggtaccagtttttcctttccataagccagcctggtggtaacaatatccctcagcatttgcctgtctggaatggattttatttctcttttgcttatgaag

SEQ ID NO: 792124 - DNA, 522 bp, Homo sapiens
atgggaccctccaagccaggcacgggatataatctcctggtatgccgtttgctaagaccattggaaaagcacagtattacggtgggagtgacccgattttccaggtgccgtctgtcacagctttgcttggctaggaaagggaattccctgaccccttgcacttcccgggtgaggtgatgccttgccctgcttcggctcatacttggtgcgctgcacctactgtcctacacccactgtccaacaagccccagttagatgaacccaatacctcggttgggaatgcagaaatcacctgtcttctgagtcactgatgctgggagatgtagactggagttgttactatttggccatcttggaaccgcccratgcagtttcttcatggtgtctttggtgtttatattttggtttgtttttgcagtggctggtaccagtttttcctttccataagccagcctggtggtaacaatatccctcagcatttgcctgtctggaatggattttatttctcttttgcttatgaag

SEQ ID NO: 792125 - DNA, 527 bp, Homo sapiens
ctgatcactgggttcatatacttgattctattaatgtaagggtgaatgacaattataaactaaaatttgccagatgggcagtgttgttttcattttaaaaagtatttcttttcattttagctaccagtataggtgcttagtagtaacatattgcattgatctgcatttccctaataatttatgatgctgagcatctttttatgtgcctattagccatccatgtcttcttttgtggtgtctgttcaaatcttcagccaattttttaattgagttattttcatttcttattgagayttgagggtactttttatattctggaaatgagtactttataagagatgtgttttgcaaatattttctccccatatgtgatgttttgcaaacatcttctcctgatatgtaccttgtctttctttctcctaaccatgtattttgaagagcagaagatgtttttagttttgaagtacaaagtacctagtttttctttaatggatttttttaatccaagaaatctttgcttcacagaa

SEQ ID NO: 792126 - DNA, 643 bp, Homo sapiens
cacagacaggcagaacaaaacccagttaccacaagatcctttatttgccaatctcctatttggaccattggccttttggtgcttttaattcctggggtcccatgcgaaaaacagaggactctccactctcatgtgttcattaaaagtgccaaggaaaaatggagaaaaataattcagttgactgaaaaaaaccctcttttttccaccaaaacaaggtccaagaaaggaaaaacataaaggccttttaaatataactataacttggatatccacttttaattaatctgagcactccttaagaaaatccttttaactcccttatcacttgacaaacggccaatatttctggctttcraactttactaaatattcagagaaaagaaaatccaatgcagtttgtggaggggaagggaatcaacaaatagcaaaaggtcatgcagatataaaatcagaaagggcacatttctgaagtcaggattgaatccctggctgtgcagaggctaaacaaagcctagacatagggttacagtccactcccccaggacataaaacaagatggagccctgaagcgaagtttgctacagacggtacagaaagacgtgcaaaacacaccagattggctacagcttaaaaccagcctcat

SEQ ID NO: 792127 - DNA, 643 bp, Homo sapiens
cacagacaggcagaacaaaacccagttaccacaagatcctttatttgccaatctcctatttggaccattggccttttggtgcttttaattcctggggtcccatgcgaaaaacagaggactctccactctcatgtgttcattaaaagtgccaaggaaaaatggagaaaaataattcagttgactgaaaaaaaccctcttttttccaccaaaacaaggtccaagaaaggaaaaacataaaggccttttaaatataactataacttggatatccacttttaattaatctgagcactccttaagaaaatccttttaactcccttatcacttgacaaacggccaatatttctggctttcgaactttactaaatattcagagaaaagaaaatccaatgcagtttgtggaggggaagggaatcaacaaatagcaaaaggtcatgcagatataaaatcagaaagggcacatttctgaagtcaggattgaatycctggctgtgcagaggctaaacaaagcctagacatagggttacagtccactcccccaggacataaaacaagatggagccctgaagcgaagtttgctacagacggtacagaaagacgtgcaaaacacaccagattggctacagcttaaaaccagcctcat

SEQ ID NO: 792128 - DNA, 674 bp, Homo sapiens
ttttctccacatccttcccaaaacaaatctttttattttactttttgaaaatagccattctaaatggagtaagatgatatctcattgtggtttaatttccatttttgtgataattagtgacataaagcatgttttcatgcacctgatggtcatttgcatgtcttcctttgaaaaacatcttcagaatttgtgcccatttttagtagggttgtttgttttttgctgttgtgttcttggagttcctcgtgtattctggatattaacatattgtcagatgtatagcttccaaatattttctcccattatgtaggttgtctcttttctccattgtttcctttgctgtggattagtttcttaatttgatgtaatcccatttgtctcatgtttgcctttgttgcctgtgcttttgatatcttatccaaaatatccttgaccacactaacatcatgaagcatttgccctcagtttccttctattaagttcacagttctgggtctttcayttaagtctttaatccatttggggttgctttttgtttgtcgttcaagataatgttccaatttcattttcgtgtgtgtgaatattcagttttcccagcaccatttactgaagaaactgccctttccccagtgtgtgcttctggcatctttactgagaatcagttggatgcagat

SEQ ID NO: 792129 - DNA, 629 bp, Homo sapiens
gcttgttctcatcatggctgggaactaagtttttaaggtgtttctggggtccccttggcccagaggggacaagacttaggatttcatttatagtttacacttcttatgcctgacactttttcctaaatattatacttaatataaattccccaaagagaaagwtaacaggcccagagaagcaggagtaggagaccttaatactgtggatgcattatgaaattcctgtgctctggtgcacgtagaaaggagtggaatagtttaagataacattttctgattcactgtttttcctgaggcttacattgtatcactgtgtagaatcataagtctcctaaggcattggaatacatgtttagaggaaatgatgccttgttttcaaagtggcagctccaagaattttctactctattttaggtgatagaactttgtagtcacttgatatgtacaattctatgtagaaaccagtgctttatttatagttgcagctgatccctccttcctagctgtgagaagcatgtgtagtttgataagggaggttagtattttttatttcaatactttttgggaaacaggtggtatttggttggatagaaaagttatttagtggtaatttctgagattttagtgca

SEQ ID NO: 792130 - DNA, 629 bp, Homo sapiens
gcttgttctcatcatggctgggaactaagtttttaaggtgtttctggggtccccttggcccagaggggacaagacttaggatttcatttatagtttacacttcttatgcctgacactttttcctaaatattatacttaatataaattccccaaagagaaagttaacaggcccagagaagcaggagtaggagaccttaatactgtggatgcattatgaaattcctgtgctctggtgcacgtagaaaggagtggaatagtttaagataacattttctgattcactgtttttcytgaggcttacattgtatcactgtgtagaatcataagtctcctaaggcattggaatacatgtttagaggaaatgatgccttgttttcaaagtggcagctccaagaattttctactctattttaggtgatagaactttgtagtcacttgatatgtacaattctatgtagaaaccagtgctttatttatagttgcagctgatccctccttcctagctgtgagaagcatgtgtagtttgataagggaggttagtattttttatttcaatactttttgggaaacaggtggtatttggttggatagaaaagttatttagtggtaatttctgagattttagtgca

SEQ ID NO: 792131 - DNA, 629 bp, Homo sapiens
gcttgttctcatcatggctgggaactaagtttttaaggtgtttctggggtccccttggcccagaggggacaagacttaggatttcatttatagtttacacttcttatgcctgacactttttcctaaatattatacttaatataaattccccaaagagaaagttaacaggcccagagaagcaggagtaggagaccttaatactgtggatgcattatgaaattcctgtgctctggtgcacgtagaaaggagtggaatagtttaagataacattttctgattcactgtttttcctgaggcttacattgtatcactgtgtagaatcataagtctcctaaggcattggaatacatgtttagaggaaatgatgccttgttttcaaagtggcagctccaagaattttctactctattttaggtgatagaactttgtagtcacttgatatgtacaattctatgtagaaaycagtgctttatttatagttgcagctgatccctccttcctagctgtgagaagcatgtgtagtttgataagggaggttagtattttttatttcaatactttttgggaaacaggtggtatttggttggatagaaaagttatttagtggtaatttctgagattttagtgca

SEQ ID NO: 792132 - DNA, 569 bp, Homo sapiens
tggtgcacgtagaaaggagtggaatagtttaagataacattttctgattcactgtttttcctgaggcttacattgtatcactgtgtagaatcataagtctcctaaggcattggaatacatgtttagaggaaatgatgccttgttttcaaagtggcagctccaagaattttctactctattttaggtgatagaactttgtagtcacttgatatgtacaattctatgtagaaaccagtgctttatttatagttgcagctgatccctccttcctagctgtgagaagcatgtgtagtttgataagggaggttagtattttttatttcaatactttttgggaaacaggtggtatttggttggatagaaaagttatttagtggtaatttctgagattttrgtgcacccatcatgggagcactgtacagtatacccagtgtgtagtcttttatgccttctttatttcccgactccttgtctctcagcttgctggttgggtaggaaagtgaggcgtcagggatgagaaaaaaaaagggagtcaggaaagtttttatttaattaatactattgtcagt

SEQ ID NO: 792133 - DNA, 559 bp, Homo sapiens
tttagtggttattctagagcaatagttcttaaacaggagtgattttgttacccagggaaatttgaccatgtctagagatatttttggctgtcacattttggggaaggtgctactggcatctagtgggtaggggccagggataccattaaacagcttaaaatacaaagattagccatacacaacaaagaattatccagccccaaaagtcaaaagtgacaaggttaagaaaccctgctctagaaacccttcatccttaatttattacaatcttccttacttagtaccttagcacttcataatgcaaaaaattaaacaagagtaaaggtccatttatctgctcccatcatttctactattatcatatattttacttctacatrtaactccacaaggcattgttattattgttactttaaataatacataatcttttatgtttatgtacatgtataccctttctgatgctattcatttcttcctggagtgctgttctttaatgtagtatccttttccttcagtctgaaggaaaaagtatttcttacagtgcagttttgatggc

SEQ ID NO: 792134 - DNA, 646 bp, Homo sapiens
ttgccttctgccatgattggaagtttcctgaggcctcccaggagcagaagtcactacgcttcctgtacaccctgcagaaccgtgagccgactaaatctcttttcttcctccatcacccagtcttaagtatcgctttacggccgtgcagtagtgaacacaatggtcttctaggagacactcttgaaatctggctgcctgtgtcgacccctaatgaacagaacacggaagagcagcctcgtgctcccggctgggccccgaccaccactctgtccaccagaggtctgaaggctcctccgcctctgycgcagggtctcagcaacacgggccatcagtgcccggtggcattggcaacccagggatgctgttctgcagccaacagcctcaggcatccagctggacctgaacctccttccaagggaccacgatgggtgctcagagccagtcctgatggccttgggcccctcaccaaagcccctggggtctgcccgccacccacagcctggtgtctgcacggcgcttgctccctggagcctcctaacctcctgcccacggcaggccctcctaagcctttgcctgaatgactcagaggaatgaatggaacattctggctggctgcgggggcggctgcatgcaggcacagggctgc

SEQ ID NO: 792135 - DNA, 593 bp, Homo sapiens
acaaagaatgggtgaaaatccatagctcaatctgcatgagctgcactgttttccaaccaggccaagtatacttgctattaatgcctaaagaaactttaaaaaccaaaatagcccatcacttgtgtcctctggtccaaacgtcttcaagattcgtgagcaggcaaggtcttccccagtaccctcccactcgcccccacagcacagcacagcaaaccacaccattgtatatcactgttgcatggactccaacatttcgaggcagtcccatawttcagaacaggcacaaaaaaatacatatggagacaagtcatttttcttgccattttcgtttaactcatcaggaaatggcaaaccacaacagcatgcacctggatcatgcattcagtaagaccaagacaaacaaattgaaaagtacctcggaagtcaccttgcaagacagtaacttagaagtgtactggcagagagggaaaagaccagggttagtacatggcagtgacacacttacagaacaccccctagccgggaacaggcaccacaccagaagaggatgggaggggaagtaataccaggaggccattctacacccatgccaa

SEQ ID NO: 792136 - DNA, 612 bp, Homo sapiens
agactacttcaatataaaatgaaaaggatttctcaaaattatacttaatatttatatcctaagtgtctcaaatgcaattttccgtaaggtttgactgctatgataacagattacggtttaagggaagaatggaagayaatcaagcagaatgaagacatttttaaaaggaaggaaaacttggacaagtgaatgcagacgaccaaaagaataaaagactgtaccacgggtaaacaaattaatgtatacaaaagaaggccttaactagcaaaatgtgaagacataggggagtggcggggcaggtgctggctgcaaacaacactgtgtgtttctaaggagactgtccttagaaacacacagcaaatttacataagtccagcagttgctctgtggacttgtcagctctctggctaagtcagcacacaatcagctttactggctcaagtatcaattactgaagctctcgcctgctgatgcataattcacggggctaacaaagcaaagaaatactgtaattaaacagcacaaataagtgtttcatcatcaaatttgataggaattggttttatttagcattaaagacgttgaagtaacatgtacggatgattctgaaaa

SEQ ID NO: 792137 - DNA, 612 bp, Homo sapiens
agactacttcaatataaaatgaaaaggatttctcaaaattatacttaatatttatatcctaagtgtctcaaatgcaattttccgtaaggtttgactgctatgataacagattacggtttaagggaagaatggaagacaatcaagcagaatgaagacatttttaaaaggaaggaaaacttggacaagtgaatgcagacgaccaaaagaawaaaagactgtaccacgggtaaacaaattaatgtatacaaaagaaggccttaactagcaaaatgtgaagacataggggagtggcggggcaggtgctggctgcaaacaacactgtgtgtttctaaggagactgtccttagaaacacacagcaaatttacataagtccagcagttgctctgtggacttgtcagctctctggctaagtcagcacacaatcagctttactggctcaagtatcaattactgaagctctcgcctgctgatgcataattcacggggctaacaaagcaaagaaatactgtaattaaacagcacaaataagtgtttcatcatcaaatttgataggaattggttttatttagcattaaagacgttgaagtaacatgtacggatgattctgaaaa

SEQ ID NO: 792138 - DNA, 627 bp, Homo sapiens
aactcttgagagaatgtgatgcctaattgcaagtcagttactttatctggcactcaactgaagaaacagtggtctgttccagcactacaggaaaaaatgattgtgctaatttattggatgtggcagagaagccctcccaatttccatctgccccttcttctttagcaataaaaatcctggttttcagattagaacattgtctccctgagaaaagaaatttcagtatttctctgtgtatttggaaaagggtataatgtaataataaaatgcagaactttggtgtccatcatttagaacagaatcaaatctggctgtgtgatttcaagaagctaagtcttgagacttagtcaccttgtctataaaacagagataatgacaaacttgctttataaagttgctttgaagattaaattttttaacctacactttacatttatcacagtaatctggcataggacacatggcmtttacatattagttattattatttaaagatgtaaacaaaagtctaaaatttgtagcagtggaaggctaagggtaagacattcaagtacagctgttggcttatagttctttggatattgcgctaatgtgtgttccagtaatccagtaatcaacggttttgaa

SEQ ID NO: 792139 - DNA, 606 bp, Homo sapiens
caggaaatgattaaccactggatctactgcctctgctgaagtttgtcttgtctatctttaaataagtttcatgaagttgttttacttttggaaatcttattaatttgtaaataattgtttgcagtgatttagcattttagttgggtaagaaaatatatattttgctgaccaaaactgaaagactagattgcccacagagtatgtttatagagaaaataaacaatttcttaygctttatgttaaaaatctggtttatatatcaacaatgactcaaactactgttgagctaaaacctcaaggaaaaaggcaaaggcaagtaggggcttttttcacttaatacaagggctcccttataattctcatcgtcattctaggatttattatttttactcttgggattcctctattaattctgttctttatgcaaaacctttgcatagagttctaagtctttgacttagatctagctagttttgtctttgtattctttgttctagtccctggatccacatgaaggatattataatttgctcttaaaataataagaatgctctccactatggagctagggatatgattcctgtaaatggtcactttgtgcctttg

SEQ ID NO: 792140 - DNA, 514 bp, Homo sapiens
tctacatgtggcttgccaatttttccagtaccagttattgaatagggtatcccttcctcaatttatgtttttgtatgcttcgtcaacgatcaggtaggtgtaagtatttcgttttatttctgtgctctctattctgttgcattggtctatgtgcctgtttttatactggtctcatgctattttggtagctatagccttatagtacagtcaaagtggggtaatgtgatgccttcagatttgttctttttgcttagtattgctttggctgcacaggctcactttggcttccatataaattataggagttttttctcattctgtgaagaatgatgatgatatttttrtgggaattgcattgaatctgtagaatgctttaggcagtgtagtcattttcacaatattgattctacccatccatgatcatggaatgtgtttccatttgtgtcatctattatttctttcagcagtgttttgtagtcttccttataaagatctttcacctccttggttaagt

SEQ ID NO: 792141 - DNA, 438 bp, Homo sapiens
gcatacaacaaacgccattatttattttgatgtgtttccaaaaatcaaaacgttttcaaacacaactaagatataaaatacagcataaaatgagatttagatctgtttcccacataaagcaaaaaaatcttagaaattgttttgccagaatcaattggtagatcccacttatcctcccctccctgcaaaggcatcttcccgaatcaggccctagcccacccagggccaggagaaacaggaacacccactaggacggaggcgctgctggtgcaraactggtgctgactgctcacgtggcctcctttggtccaccctactttccaccaatcagccaaccaaccttgaccacagagaaaccgtgacttggccaaggtcatttgatgggggctgtcatacggcactaacagggagcgaggtgtggaccaagagacagccctg

SEQ ID NO: 792142 - DNA, 409 bp, Homo sapiens
taaatatgcacatttaacgaatttaacacttaacacaaaagtactgcattctcgttatttggagaaaaagttgccaaataattacaaagggtccccccacccccgcagccctccagccctgccctgcccggccccrctgagcagctggctctgcctctgtggagcagtcaccccctgccaacgtggcctcagtgctttgggccctttttgcccatctgcttggtccttgtgcccctgtgcccagcacccaacctgccatcaccctgcactcagagacctaaaaaggcagcgtgtttgttgcttctcctctttgggtttccctttcttctcctgggaggggtgtctgagtcacagaagtgtggggaccatcaggtcgttgctccctctgcttctcttgtgtcctccctcc

SEQ ID NO: 792143 - DNA, 608 bp, Homo sapiens
ctccagcctcaagagcactttttccgcgcaagaaaccagttcctggaaggaggaagcaggcaagtcagttttcgtggacagtccccgggtccaggagcagttactcatgtgactcaatccagcagtcatggacaggaaactctttggagaggtctgattacccctcccgtttaagattgattttggcccagtcatagagatgggataataggcaggcaggagagcagtcttgaaaactatacacgtggagatcaaggtcagttccatacaaacatctattccagtcccccagacgtggtgcaccccagctgggggcttccacctggagggaggcctggtttgctgaaggcgctgctgtcactcaccaggctggaggtgaagcgctccttgatctcytggagcagggccttcatactactggacaccagctccggcaggatctcctctgcaggtggagcaggaaggtcctgaggccagagtccttcctgtgccccttgccagaagccccagaaggatgagagtgggtcacattcccccttgggcttggcatgcacagagccaccttgcagttccggagccccaagcgtcaccctcagccaggacaaccc

SEQ ID NO: 792144 - DNA, 644 bp, Homo sapiens
aaggcagaggatccattgagctttcaacacttaagctgtgcgctgagggcaaagctaaaagagcactgtaacactccctctggggcttcaggggtcataggcgctcccccagacactgctgtggggccgttacagagttcactcctgctggtccccaaaagcactcgccttggctcctgcacctgytcacctgtgtgctccttcccttgagaggtgaagcgtagtgggtctgagtgagtggagttcgcccctgctggcctctctctcatgtgccctctcccgtgaggagttgagagctgcaggctgagtgaatgaggcatccccttttgagtgctgtgaaggggtcagggaaatatcctgcttcaccatcagcagagaggctctctcctgatgagacccgtcaaccttggatttctcagcctctataactaagaaataaattctttttcttcaaaaattatccagtttcagttatcttgttataagcaacagaaaatggactgagaccatatacatagcctggataagcagaatcagagtcatgatttcatagcatttttgttttttactcctttaatgctagaactagaggaacatgcaagatttaggttagatacaaagaagtttctaaacatgggacttga

SEQ ID NO: 792145 - DNA, 643 bp, Homo sapiens
atcagcagagaggctctctcctgatgagacccgtcaaccttggatttctcagcctctataactaagaaataaattctttttcttcaaaaattatccagtttcagttatcttgttataagcaacagaaaatggactgagaccatatacatagcctggataagcagaatcagagtcatgatttcatagcatttttgttttttactccwttaatgctagaactagaggaacatgcaagatttaggttagatacaaagaagtttctaaacatgggacttgaagttccttttctgcaggcctaaccaaattagattattttgtatgaattatttagggctctcctaatccaatgtctgagtccacatctctccgttgaagtgatcagatacttggaagcacatgttgaccacgcaacacaaatgtcaacagacattgattgagctcccacatttcagtttgggtcctgaaattcaaggatgagaaaaacacattgtctgccctcaaggaacgaaagtcccttctccatctccttccaaaagttggctggtaaccttatttgtgacctctgtttccataaaacatttgagagtatggttggtgaagaactgaagttttagttggatccctgaataggcattaagctgtg

SEQ ID NO: 792146 - DNA, 449 bp, Homo sapiens
gccgtttaaagatttataaagggatcgtcagtttcttttttctttttttttttttgagacggaatctcgctgtctcccaggctggagtgcagtggcacgatctcggctcactgcaagatctgcctcccgggttcatgccattctcctgcctcagcctcctgagtagctgggactacaggtgcccgccacyatgcccggctaattttttgtatttttagtggggacggggtttcaccgtgttagccaggatggtcttgatctcctgaccttgtgatccacccacctcggcctcccagaatgctgggattacaggcttgagccaccgcgaccagcctaattgtcattttcaatgcatgttttctggttgtataaaagctctcccatgcaagagggctgttgttgtaacagtagattattatggtacagtgtattttccccaggtaaagaaa

SEQ ID NO: 792147 - DNA, 559 bp, Homo sapiens
ggttacatgtccaatgttcaaatatgcttacagatttatgaatacaagacaagcagccccaagagaaaaatcagtgaaggatatgaagaacagtgcatgggagagcaagcctcaatgatcaagatgagaagatgctcaaaagggaaatkcagtccacaaaagcaaagagatgaccctccctatctgccacactggccaaaaataaagaggtcgaaatatttgtagcattatgtctagagcaaaacgtgatataaagtgaaaagtggtatgaatgaaggtcagtcgttgatttaaaatttgacacatccatatcctatatgtttatgctgcgatcagaaaagtatgaatttgagctggttaacgtggaaagattcccacaatatattgcgtaaataatgtctaatgtaatcctatttttgtataaaaaggtcgaggtgggtgtgaattcgtgcttattcacttctgaagccagaatatctgggtttggtcctgtacgtagctcttattggctgtgggactttgggaacttaatgtaacctctctgtgttgctgatcttta

SEQ ID NO: 792148 - DNA, 616 bp, Homo sapiens
tcagcatatttcaatctccttctacaaaaagagaacacaaaaaactagcttggattttaaataaggcagaaacccagaggccacattctgtccttgatgcttagctttgcaccattccctggagaaagctcttatgtcttttaggttctgttgggatgcttctttacacatgcttacatggccttgttcccagtctttgccccttcaaaaaatgagctggctgttcattaagagtcatgcagctgagctcatacccatgaatttttcagggtatattactgagtgtcctttaatccctaagacttgtagatcttggagggctggatctctgaacagagaggcccaggttcccatccctgtagcatcagcaatgacagctgcttcccatttgctgcttagattcagytgaaactcatcggaaatcagatctgatggtggcctcagttctgatgactacactaacttcatccgatcagatttccagtgagtcaggctggttgctgagccctttgtcctgttgtttcctttagactagcttgggttggtggtgcttcatgaataatccatgcacattaaccagctgcatgcataaaggcatttccactgtgtctttgcc

SEQ ID NO: 792149 - DNA, 523 bp, Homo sapiens
atgcagtgtgataggagtccaactttattctttggcacatagatatccagttgtcccagggccatttgttgaagacactattctttttccactgattgtcttgggcatccttgtcagaccaaagccaattggccatagatgtatggatttatttctggactctcaactctattctgttgatctatatgtttagctctatgccaggagcacaatgattattttcggagatggggtcttgctctgtcccgcaggctggagtgcagtggcatgatcatagctcactgcatcactgcagccttgaactcctggactcaactgatccttccayctcaccctactacatagctaagcctacaggcatgtgccaccatgcctagccaatttttaaagttttttttttgtagagatgggatctcactttattgcctaggctggttttaaactgatttcaagcagtcctcctgactcagacccctaatgtggtgggattacaagcatgggtcactcacctggcccacactgt

SEQ ID NO: 792150 - DNA, 475 bp, Homo sapiens
tgcttgccattgaaaaactctaagattctgagtatgatatgttttaaatatgcttcattgtcttaaaaagttagcatttagtacattatatatgtacatatatatccattctatctatatctattatatctctatgtctatatctatatcatctatacctatatctatatgagacagtacgagtgacctctctcttttttatccagatgccttttgcctggtattccccttaaatgcgtatcttcttacaaaagtcaaatttgtttaaaattatccccctgaaggaatttttttttttgagaaagtrggcataaaccttgaaatgacaactgtttgtttttattcttattaattctgaaagttgaaactaaggattttaaggatatcagtacccaaaggctaaactaccacacacacacacacacacacaccccgctcccctccccaaccaaataccactcaccttgcaggacca

SEQ ID NO: 792151 - DNA, 666 bp, Homo sapiens
gcccaccaagcctcagcaaagctcacgcggagtctgggggcttttgttcatggtgctcactctgccacaattgttcagagacagccattgccccaaggtggctctatcttgtgctatcaaagccccacggagatatctgtgtttccttccttttaatgaagccatctcaattgaggacatggggcatgtgtccctgaggactaggtgggtaagatgagtgacaggcacatgttttattcagaaatctttccttggcttgctatcctggaaggaggcttacatcaattaaccttggttatttccctggtggttccttcgtccctcgtgtgtgcagcctctgttctcagccatgcccaggtatgcctgatatgcttgagagatgtctgaaactgagggtgggtacaatttaattagcacgactgtgtgcatttgacttgtgtagggcacaaatgtgaactaacagcatggcatyttgcaaatttgtccaacactctggttggaacaaggtctttgcttcacctacataggcaaggacaggcctatgtttatgagataaaatttctatagcctgtttcaacacttcttttgtggaatagctcacaaatctatgattactatctagatctttctcccatgcttctaattctcatctttccctcaaaatgg

SEQ ID NO: 792152 - DNA, 497 bp, Homo sapiens
ctgaatcatttatcattacggtagtcttctatccagaagaaaagggagtcagcagagaagagttgctaggaaagtcaaatgtctacattttacttccaaagagttgagaatcctcagactctttacaccatgcccagagatactaaataatttgcccaaatccacacaactagtaagcccaaaaactgggatttgaattttggcatctttgattaaaaaaatgtctagttttttccacagcgcccctgcaattaattaaagtgtttccctgtgtactgcaaatgtaccttatctrctctttattccaagagcccaaaggttcaaaaattgtttccgaactctcagaatttccatttggctcttggttggcattcaaagtccaatagtataataatgctgtctcatatttgaacaatatagtttattaaactttcccatgtattacctcatttggttctcacaataacttgtggataagaaatggttaaaattatctc

SEQ ID NO: 792153 - DNA, 575 bp, Homo sapiens
attccttttaaggcaggcaaaaagctgcttcccattcacccttccttctttctctattcacccaacctccacaactccccaaatccagtaggataaaaaaagggagggatctttttccctcccttgaagcatgtgtaaagcttaactgcatcctgggaagtgtagttccagcacttaggtggatccaagaagtaagatttatggcagaagtattctacatgctgggattgtagcttttcatgcacagggtgttgagtcagcrtctcaaagaatcagacaatgacggttaggagcaataccccacccgtgcagagctgcattagaatttagagttaggttagaagctgcgcaaacacctgttctgcagctgcaggtgtgagatcatcatacaaatggagggccggcattgatgaagccaaccccataccatgtatgactgctgcctcaaagtctcaagaaagctcaccttatttaaatatttatattgaagaagtaagttataggaaagactacttggaatcagtgaaaaaattgttgaagaccccaggatgtctatttcaggaaccaggagaaag

SEQ ID NO: 792154 - DNA, 629 bp, Homo sapiens
tcagtataggaaattggcagtgctcctggaaatactcatgtacataactaactataataaaagacagagattgataatttccctaagagaggtacaaagttctctgggaattcagaggcaagagaaacaacatccgtccagagraaccaagaaatatttcatggaggaggacgcatttaaaatgggcctaaaagattacaattaatcactggttggtttttgttgttgttgctgttgttgttgttgtttgtttgcttctctactgtcaccaatatcttacattctagcacctgtttataaattgcttgcaaaatttgttacaggtttgattatttttctaattctaaaaggtcttatattatgatggatgcatttgctggagactaaatgattcacactatcttgcaccttaaagaatcaccgttttgatgccatgttttctgagtttgtggtgattctggaattgattaatttttacatgtacacttacaaaacattctaccattctatgaaatgaagaaatgtgcaatgaagaaatgaggatacatcacatctaagtgtaagaggctgggaatagggttccaaaaatctgggttctataatgcataaatgactccatacatcaagaa

SEQ ID NO: 792155 - DNA, 558 bp, Homo sapiens
agaatgggtaaagaaagtttttgtgggataataaatttttgaattttgggccatgagaatatattaccttcttgaaagtaaagaaaaaatgaaatagataaatcaatggaaatacataaaaagttacatagataaatcaatgaaaaaaagagaaatctgggatctatcccttttctatcactaagtcttatgaccatagacaagcctatacmtttttggtgaaccttggcatgttttgctgtaaatgatgaagttgatctctaagatctagtaagctgtcgaagacctcgtgttggttttcttgagggctgaattgggaagtgaacatggattctctcttcatgatcaatgcacacaactgtacatattgcggactatcaaactctggggcaccatttatataacttgctatgtgatagacactccttggagttgtgcaatgcacagcttgaacttctgtatggggcagacctgcctctctctttgcctttggattttttcacaaaggactttgtgaccataggagacttttagtggtggaaaccgatggttacttca

SEQ ID NO: 792156 - DNA, 558 bp, Homo sapiens
agaatgggtaaagaaagtttttgtgggataataaatttttgaattttgggccatgagaatatattaccttcttgaaagtaaagaaaaaatgaaatagataaatcaatggaaatacataaaaagttacatagataaatcaatgaaaaaaagagaaatctgggatctatcccttttctatcactaagtcttatgaccatagacaagcctatacatttttggtgaaccttggcatgttttgctgtaaatgatgaagttgatctctaagatctagtaagctstcgaagacctcgtgttggttttcttgagggctgaattgggaagtgaacatggattctctcttcatgatcaatgcacacaactgtacatattgcggactatcaaactctggggcaccatttatataacttgctatgtgatagacactccttggagttgtgcaatgcacagcttgaacttctgtatggggcagacctgcctctctctttgcctttggattttttcacaaaggactttgtgaccataggagacttttagtggtggaaaccgatggttacttca

SEQ ID NO: 792157 - DNA, 558 bp, Homo sapiens
agaatgggtaaagaaagtttttgtgggataataaatttttgaattttgggccatgagaatatattaccttcttgaaagtaaagaaaaaatgaaatagataaatcaatggaaatacataaaaagttacatagataaatcaatgaaaaaaagagaaatctgggatctatcccttttctatcactaagtcttatgaccatagacaagcctatacatttttggtgaaccttggcatgttttgctgtaaatgatgaagttgatctctaagatctagtaagctgtcgaagacctcgtgttggttttcttgagggctgaattgggaagtgaacatggattctctcttcatgatcaatgcacacaactgtacatattgyggactatcaaactctggggcaccatttatataacttgctatgtgatagacactccttggagttgtgcaatgcacagcttgaacttctgtatggggcagacctgcctctctctttgcctttggattttttcacaaaggactttgtgaccataggagacttttagtggtggaaaccgatggttacttca

SEQ ID NO: 792158 - DNA, 606 bp, Homo sapiens
agcatatatagaaaaatagtattccctgacataatacaggacagctatgaaatatatcatttaaatagatagatagatttatatttaaattataaaatgatcatgcatgtgctatctaaaaataacctttcttaccacctgttgatgcccacactttaggagacactgacttagatatttcccagcccccactttcagttccattcctttgatctgcagcatgaaggctgggaaaagagaaaaccaaaggaaaatagacttgctgcctccaagtgtttgaagagctcccaagaagaaggaagaagggagcattcaataaatgcctgccatgtgccaagtaccatgatagatggttaaaatatattatttggcccaaactccacaatggcccaggtgatggggatcctgatcttcgtctaagagaccagaaagccaagattytgagagattctaacatgctctgctacttaagtgatggagcagagtcaaacccaatatctccatccattcatctggactgtgtggcccatcagggtgaaagagatttattctttgtgctttagaaagcaggactaggaccaaatgttgcataagcatatttcactt

SEQ ID NO: 792159 - DNA, 502 bp, Homo sapiens
ctgaataacacagtatttaaacttatcagatatgacaacccaatgagactggacatcacatattttcatttccatcttaatgtaaggaaactgtcattctaatctattatgtgatttgtccatactaccacaacaaaataaatgtagaatgatctctaaccatttggctctaattgattcccgtacactctccttatctacccagtttcctctagggactcatgttgatcaactgacattgccaaagctaaccaagagaaaaggaagtcatcacagtgaaatatwgatattcatttctagccagatttccaattgctcattttcaatctgctatgtaaagaccttagccactatataccttaagcaacattcagcctagtttatttttcacaatggtgctgttttctgacttctttctatcttcttgctccatggggactccctaaatgaatctatcatttggatcccatggagaaaaatagcatatacttgaaatcccatc

SEQ ID NO: 792160 - DNA, 599 bp, Homo sapiens
aggaatcttgagatgcagagaacatcctgtgctatccaggtgggccttaaatgcaatgacaactgtcttcataagagacgtatagggagatctgacagatagaaggggagaaggcaatgcgatcaccactaggtagaggttagagggatgcacccctaagtcagggaatgccagcagctgccagaagcttaaagaggcaaaggatgaattgtcccctagagcctccaaagggagtgtggcactgcttatgccttggctttggacttctggcctccagaactgtgagagaataaatatctgttgttttcgatgggcgtgatggctcacgcctgtaatcccagcaccttgggaggccaaggtgggcagatcacaatgtcaggagatcgagaccatcctggcgaacacagtgaaaccccgtctctactaaaaawacaaaaaagtagctggccgtggtggcgggcgcctgtagtcccagccactcgggaggctgaggcaggagaatggcgtgaacccaggaggcagagcttgcagtgagccgagatcgcaccactgccctccagcctgggcaagagtgcaagactccatctcaaaaaaaaaaa

SEQ ID NO: 792161 - DNA, 576 bp, Homo sapiens
actactggctttttcatgaatgatggatatctaaaatgtcctctgcttcactcatctaggaactcaaaaagcagcagttgggacttttcaaacagaactaggcaaagcaaataacttttatcaatgccctagtaaaagcctttaccttaaacaacaattaagaggctaaagacaggccaacagcctgtatctcttaacctgagagttcccaaatggaaccctstcaggctccacacaccaagctgatgagagagcctctgcccagctacactcacctttacactaacaagaactcggtgggatagcactcccatttatatgaactaaactccaagaaaatacacatagattctgataactgtggcttctattttaactgcatgacttaataaaaatttaaagatacatgaaggggaggcaatatttaatgtccctctgcttgcctctcaactgaccccctcctaactaccccatacctagggaggaaaattgctaacctgactggttagaaggcagaggtctgaccacaccatgcttaccactgggcaggtgccactcatttaaccaaagctgtgc

SEQ ID NO: 792162 - DNA, 591 bp, Homo sapiens
agggccatatagcccttaatcagtaggacgagggtttgcacccaggctggctgactcccaagcccatgttcctcccccctacaccctggctgtgcacatcacagtcagcgtgagcctttcttagaaaaggcccctgctggcacagtaagcataggtggggctgcaggcagagccaggtagccagagactggtgggtgcccaggtgsttttgaggtcgcctcccctcacaccagtccccgtgcctcctgaggggatcttctggagccctgcccgttccctgcatagttctgccctctctcttttctgcaccatcacagggctccagaaatgttgcacccaacacttgccacaacctagagatttagccccattttgattacaaacacctgtatttttaaaaaccctgtgacctctacctcagaacagtcactttttgcaaaagtggttctggtgaaagtatgtatcttcactacagagtttctcagtcaggcaaaaccccattgtgatggactggagattcagaatttggcctagcaaagctgcggttgggccttccgctgagggctgtgcggtcaaaagagcctcctcagc

SEQ ID NO: 792163 - DNA, 583 bp, Homo sapiens
ccgcccaccttggcatcccaaagtgctaggattacaagcatgaggcaccgcgcccggcctggagttttattattactcaaatcagtctcccggagcattgggggagcagagtttttaaagataacttggtgggtagggggaagccagtgagccaggagtgctgctgattggtcagagatgaaatcatgggagttggagctgtcttcttgggctgagtcagttcttgggtctgggggccacaagatcagatgagccagtttattgatctgagtggtgccagctgatccatcaagtgcaggttctgcaaaatatctcaagcacyggccgggcacgggggctcacgcctgtaatcccagcactttggaaggctgaggcaggtggatcacctgaggtcgggagtttgagaccagcctgaccaacatagagaaaccccatctctactaaaaatacagaattagccgggtgtggtggtgcatgcctgtaatcccagctactcaggaggctgaggcaggagaaacgcttgaacccgggagttggaggttgtggtgagccgagaacgcaccattgcactccggcctgggca

SEQ ID NO: 792164 - DNA, 583 bp, Homo sapiens
ccgcccaccttggcatcccaaagtgctaggattacaagcatgaggcaccgcgcccggcctggagttttattattactcaaatcagtctcccggagcattgggggagcagagtttttaaagataacttggtgggtagggggaagccagtgagccaggagtgctgctgattggtcagagatgaaatcatgggagttggagctgtcttcttgggctgagtcagttcttgggtctgggggccacaagatcagatgagccagtttattgatctgagtggtgccagctgatccatcaagtgcaggttctgcaaaatatctcaagcaccggccgggcacggkggctcacgcctgtaatcccagcactttggaaggctgaggcaggtggatcacctgaggtcgggagtttgagaccagcctgaccaacatagagaaaccccatctctactaaaaatacagaattagccgggtgtggtggtgcatgcctgtaatcccagctactcaggaggctgaggcaggagaaacgcttgaacccgggagttggaggttgtggtgagccgagaacgcaccattgcactccggcctgggca

SEQ ID NO: 792165 - DNA, 588 bp, Homo sapiens
attctattttttaaaatatctgtgattttaaaatattttttactagcccctacaaataaaaagttacatatcttacagcactgttatactgaatgataggtcactttggggtacagatctgtaatcaccaccatcctccagaatgtggaattttaatttgagaggtatgtttttggccaatgaaccaaagcaattccttratttggtgaaagttctattacataatctttaatagtgatttagtacctataagacttttatcaagtgtatatctaatgttataaaacaatgtcatagaacagtaccatctctctcagctaatttttgcttgtacaggttgcaaactgggagaagcttctgatttcattgtccgtcaagggacactaatccaggtgccatcatctgcaggggaagttggttgttataaaatctgttcatgtggacaaagtggactcttagaaaactgtatggaaatgcactgtatagacctccagaagtcttgtattgttggaggaaaaagaaaaagtgagtcttaagctctgattttgtttttaatatgagattagttatttttactttgtaggaaga

SEQ ID NO: 792166 - DNA, 618 bp, Homo sapiens
ttaatggctgaataatagtccactgtgtaattgagttattcgttttcttactgttgagttgtttttgttcctcatatattttggatctttccccttatcagatgcatgatttgtaaatatttcttcccttctgtcggcggtcttttatatttcttccattctgtaggctgtcttttcaccctgttgattcaccctttccttggctgtacagaagctttttagttttatgtaatctcatttgtctattttgtctccacctctttctttaaggcctacttgaacaatccagggtaatctctccatgacaagatccttcatttaataaaatctacaaagactcttttcctcagaaggtaaaatttacaggattcagtcattagaacctgctatattttgatagctattattcagcrttcaaaagtatagaactatccctgagaaacaatggttcagtcaattatacttccctaaccgctttacctctggatgtaataatgtgatgttattgtcaatagaatgtgagcaaaataataataataataataataataataataataataatgtgagctatttttaggcaaaagcttttctgaagtaggataacctccttcatgc

SEQ ID NO: 792167 - DNA, 475 bp, Homo sapiens
tttatatatgcagatgcagctgagaaggtctgatcaggttgcattgtttcctcttggttggatttctctggctggctaaagtgacccatctctggcttcgtaacagttttttaattgggaagaaactgctgtttgagggcctgatgtgtgctccagagagtttgggattgttgggtattatgcggagtgttctgttttcctraaatgcctgtattaaaaaaaatttctaaatactaggataatcctttatccaacccccacattgacactctgtttgatgcatcccttaaaaggcttaacagtctccccaggctagtaagctgtaggaagtaggaaaataaccaagagacttaagtcttttatttcactttatctttattttttttgacccaaactgcttctgtgtgagtatgaatacctatacaacaaaggaaagtaacattaggagacaaaaggaaatttccattttcaggaa

SEQ ID NO: 792168 - DNA, 605 bp, Homo sapiens
ggcaagaagagagaataaagttacataaagatagcatttaagaacaaccacaggctgggcatggtggctcacacctgtaaccctagcactttgggaggcctaagctggtagatggctcgagcccaggagttcgagaccagcctgggcaacatagcaaaaccctgtctctacaaaaaatacaaaaattagccagctgtggtggcttgcacctrtagtcccagctacttggaaggctgagatgggaggatcactcgaacccaggaagttgaagctgctgtgagcagtgattgcgccactgcactgcagcctgagtgacagagcgagactctatttcaaaaaaaaaggaacaaacccaataattttgggcataacgaccagagcacaatgagctacagagagctttctgagaagtatttgctaattttatctgcaaagataatacaagcataaaaatatatgtattcaaatgtatagatgtgtatctgcagtgagagcagagctgttcctcagtagtgggggtggctggcagagtgaggtagtgtgctttcaggaattgctttatttgtctgatgtgttctagaccaaagaccaacagaggggcttgg

SEQ ID NO: 792169 - DNA, 596 bp, Homo sapiens
tccatttgagtgagcaccaagtatgcatcacgacttgagattataaagttggcttaatgatgagacaggtttctcagtcgggttttccattggctcgaagttcacaaggcagttgttgcttgtctcagagtgtccttaggtggactacatctgaacccttggcgttattataatgcagattctagctgtgctcaaaccaatgaatcagaatctcaggagggtggcgctcagaaatctgcatggttgatcagttctttagcagattcttatttttgtaygctaaagtttgagggtcaccactggagagattccagaacagggcctgcaagggaattgttcaaagtttgctcaagttaactttgttgttacagcattagcttgaatatcaggaggttttgtatttaagttctctaaaaaaagaaaaagaaaaaaagagaacagtctcaatatataaaaggaaaggttttcatatatgtgcccaattataagtatcttgagtattctaggagtctaaacagaatgtctttagatcatccttataacgatcctgagactcttttgactgttttgagttgaagacaggtaataagaaagaa

SEQ ID NO: 792170 - DNA, 634 bp, Homo sapiens
tgatttcatgatgacaaaaatactagagttttgacataggacaacagatcttgcttcaaaatgaaagcaagaccctatccttcctgcctctttgatcctctcacagtgccactttctttcctgaacattttcagatattcttatttcagatagaccactctggtgtataataggaccagttttagagtggccatgaagctaagacatgttatttgagagctcttaggggaagacctggacacagcagtcgcaggagaagtcagtcttatctgtaaaaaggtcagcttgatcacagaaaaagkctttggcttggttgtgttggccctccatggcttatgatcctctttcaagtaagcaaataaatgattgcagtgttggtttgagtcctgtggtgccaaacacaagacacattgttgctcatgcaatatagacctttgttttggacagtggtctaatctgctggtttttaaaacattggtgactgtccaacttataattaaaatcagtctatcaagcacttggagacaaaatctgaggttattctttcattcctagttgtcacactaattttttgccttcacttttgtctctgtagaatatttacacgtacacctatctatatctatttagatat

SEQ ID NO: 792171 - DNA, 569 bp, Homo sapiens
agaaagaacatatttttgtacaaccatacaatgtatttgtgttttaagtgttattgtaaaagagtcaaaaagatttttaaatgttttacagtttatcaagtaaaaaagttacggtaaagctaaggttaattggttattttaaaaagaaaaaaattatagaaatttagtgtagcctaagtgtacacataaagtctccgctygtgtagagtaatgtcctgggccttcacattctttcagcactcactcactctgacacccagagcaagcttccagtcctgcaagctccattcattgtaagcatcctatacaggtgtaccattttttatcttctatactgtatttttactgtactttttttgtgtttagttacacaaataccatagcttacagtagtcagtacagtaacatactgtacaggtttgtagcttaggaacaataagctaaaccatatagcctaggtgtgtagtaggttagaccatctaggtgtgtgtaaatgcactctacgatatttgcacaacgatgaaatcacctaatgacacatttctcagaatgtatcctgtcgttaattg

SEQ ID NO: 792172 - DNA, 595 bp, Homo sapiens
atctagtcactagatgctttgcatgtggctagaagatgaaggaagcaagaaagaacatgcaagattacacagtagatttacataggctaggcctacccacacttcatcacccggaattaatcccatagcaccaaagcagtggaggtggctgagacaygtaacctagttagttgtgtgcccacagagaaaaggaaacagggtttaggaaacagttagaagtcctgacccaaatatgaaagaaattcagcaaagtctctaatttcatcttccatcagatactgcaacaaacatttattcaacaagtatttattgatccactacaatgccaacaaagtcactgataatacgatggtgaaatatgacaggtacagactctgtcctcatagaatctatggtctgggtccaagaaaggtggatatacagaggaaaaatatataatataaataattataaagagtggaccttattacagctgctataccagctacaccaaaattataagatgtcactacagattgtctgttattctctatttagctctactcttgaactcattatcacccatcatagcccacttgggttttttttaataatg

SEQ ID NO: 792173 - DNA, 601 bp, Homo sapiens
ccctatctcaaataacaattttttttttttttttttgagagggagtgcactccttttgagaggagtcacccaggctgcagtgcagtggcctgatctcggctcacttcaacctctgcctctcgggttcaggtcattctcctgcctcagcyttccgagtagctgggcttacaggcacatgccaccatgcccagctaatttttgtatttttagtagagacggggtttcactgtgttggtcaggctggtctcaaactcctgactggcctcccaaagtgctgggattacaggcatgagccaccacgcccagccaaaaacttttttttattattatttctgagtatcaaaagatacattttaacttcagaacaacttttaaattagccagaattaaacacagcctgctttaattttccctaatgtagttacatgtatcaaatgtatcaacgtcagcactaagcccttaggaaaggaaaaaggccaatttgttgagaattgttacaaagaactggctgcccctgttctcctcccttattcccaaagcccaactcggtcagaatctgggcattcttcaccccagggtgggcgtggctggtgacagctga

SEQ ID NO: 792174 - DNA, 555 bp, Homo sapiens
aaagagtttttaaaatctaacttgtcaatcttatcctaacaatcaaaagattttaaggccaggtatggtggctcacgcctgtaatctcagctctttgggaggctgaggccgtaggattgcttgagctcaggaattcaagaccagtctgggcaatgtagcaagaccccatctctacaaaaaataaaaaatcgggccaggcacggtggctcatgcctgtaatcccagcactttgggaggctgaggcgggcaaatygcttaaggccaggaattcaagaccagcctggctaacatctctactaaaaatacaaaaattagccagcattgtgacacacacttgtaatctcagctacttgggaggctgaggcactagaatcacttgaacccaggaggcggaggttgcagtgagctgagatcacgccaccgcactccagctgacagagcaagattccatctcaaaaaaataaaaaataaaaaatcatccggacgtggtggtgcacacctatagtaccagttacttggaaggctggggagggaggatcccttgagtccaggagt

SEQ ID NO: 792175 - DNA, 610 bp, Homo sapiens
tctttaaaactgggagagcggtgcatactccccacatgagatgcacctgtgagaaggcaggtgaagccttttgctcttcctgactgcagtgagtggcagtgtctgtccttgggctctgggtcacatcctgcaccctctcctcagtccctctggagccagttcaarggtgtttctattacagacacaagagttgtggttatttgtagactcataataaatacagtccctagtaagtgagaatgtaaaccctttaaaagatatgaaaaaggtgactgcttttagaatagacaataatggcaaacataagatgggggaaaggaaggaaaggatgttaacacctgtaccaagccctgagctaattcaggactttactcaaattccctcatgtaatcctgagactcatcctaagcagggaagaccatacacatgtctatgaaagccacagagagacaattatccccatgctgcaagtgaggaaacgggctgggagaaggtgagcaatctgtgcaacagcccagcaggaggtagagctgcccttccaattctaaggcacctgctaggccaggggtgtctcacttgacattgaagccctaggataattcataaagat

SEQ ID NO: 792176 - DNA, 609 bp, Homo sapiens
ccacctcatacctacattgctggaggttggctcatctccataaacgtgggttggctccaaggtcctcagtactgggagctccctgaccacaggaaggatctcaaataacacatttctgtcttctcagaatgtgtctgctcactcactgaggaccacaccctccttaccaggctatggaaacatttccaggctccagctcagcaggggtggcctcygtaacttgaaacaaccggcagtgatggctctgggccattacaatgttttttgtcttggaaagaatacttgaaaattacaaaaattatgccatttccattgcatgccaaaagcacccaaattgcattttaatcactgtacaaaggaagccctgatacttggcttgtagattcaaatgtgtctggttttaatcaaggcgtgtgctgttcttccagttccctcacatcgggctaacgcaaaagacaccagaatccatcaccagtgctacgtcaaaagagccccagagtccacacttgcctcggcaagcggaggggaagctgccgcccatatacaaagtccgggagaaggtgagtcctgaacactggccactgccatgtgctcctgtggacctcccag

SEQ ID NO: 792177 - DNA, 505 bp, Homo sapiens
aaaaggatccaagcggcaaatgagtggactatatagcctcaaagatgccttccaaccccaagaccgtagggggctaaggctgtctactcccctgaatagagacttaggatgttgatagagcgattagcaggtctgtgataacacggttatcaccacctacctaaaaacaagcaagaaataagaggtcaggatgtctttagctcctcttctatatgtagacttagccctgataaaagaaaaattttgactgaattaaatttaaaggagcttaattgagcaatgaacgatttgcgaatcaggcagcccccagaatcayagcagattcacagagactccagcacagctacatagtggaagaagatttacagaccataaaaggggaaatgacatacggaaattgaagtgaggtacagaactgctggattggttacagctgggcgtatgccttatttgcacacagtttgaacactcagcagtgtatgaatggttgaagtgtggccgctgg

SEQ ID NO: 792178 - DNA, 505 bp, Homo sapiens
aaaaggatccaagcggcaaatgagtggactatatagcctcaaagatgccttccaaccccaagaccgtagggggctaaggctgtctactcccctgaatagagacttaggatgttgatagagcgattagcaggtctgtgataacacggttatcaccacctacctaaaaacaagcaagaaataagaggtcaggatgtctttagctcctcttctatatgtagacttagccctgataaaagaaaaattttgactgaattaaatttaaaggagcttaattgagcaatgaacgatttgcgaatcaggcagcccccagaatcatagcagattcacagagactccagcacagctacatagtggaagaagatttacagaccataaaaggggaaatgacatacrgaaattgaagtgaggtacagaactgctggattggttacagctgggcgtatgccttatttgcacacagtttgaacactcagcagtgtatgaatggttgaagtgtggccgctgg

SEQ ID NO: 792179 - DNA, 633 bp, Homo sapiens
aatgagtggactatatagcctcaaagatgccttccaaccccaagaccgtagggggctaaggctgtctactcccctgaatagagacttaggatgttgatagagcgattagcaggtctgtgataacacggttatcaccacctacctaaaaacaagcaagaaataagaggtcaggatgtctttagctcctcttctatatgtagacttagccctgataaaagaaaaattttgactgaattaaatttaaaggagcttaattgagcaatgaacgatttgcgaatcaggcagcccccagaatcatagcagattcacagagactccagcacagctacatagtggaagaagatttacagaccataaaaggggaaatgacatacggaaattgaagtgaggtacagaactgctggattggttacagctgggcgtatgccttatttgyacacagtttgaacactcagcagtgtatgaatggttgaagtgtggccgctggcattggccaagacttagctattgttacaggtacatactactaagttaggttttcagttttgtctgcctattaagctggttacagttcaaccacaaggactcaaatatagaagtaccgagtcctcctcaggacatatttagtttgct

SEQ ID NO: 792180 - DNA, 639 bp, Homo sapiens
acataaaagttccaaatatctgagaaagaaacaaaattgtttttcagtaggagctgcagagtaaaaataaatacacacacacacacacatgcacacactcccacactcccaaaacacaatgaggtattgatgtaatagtttataaatagaatgctgatggggaaaaaaatgagatttgacttayaggaaccgataacaaagagtgtgagatctggactgatgtggaaattcaagaacacatcaaaaaagattaccataaattatcttctccttctacacagtaataatagtgatgatgcaaggaaaatgtatttaaagaaagtttttcccttaaaataatatattacaaaatatgttttcatatgaacactaaaatgagaccatgagttggaaaggtcaagccattcaaaaagcttataatcactcctggattaattaaggtgggggcaaccttctaaagtacaacctttagaagaaaagagaaactagggcagggaatctattgtctcccccaattcataagtgcactttgcaagagagagtttattaaactttgctattaatctcttaaccatgctggcatctagaattgttcactgaaaagaagtctccagattctatttcttccatagattgacc

SEQ ID NO: 792181 - DNA, 624 bp, Homo sapiens
ctctgtaagtcagcagcgcctcatccaggaactcagacgccttccggaaatgctgggaaatgtccacctcaggaaagtcatccacctctacacccaggtactggatctccaggccagtgtagaattcggggccagtgtaaacgccggtgccatgcgcagcattcagaatgtgggtgattcccagcctcttcagcctccccttgttcacagccacactcctgcgggaagaggcagggacctgtttgcaagagtcggaactagaaaggtgtgtcaccactgtgacggtgagcctgcctcagccagtctagggccacagctgggcaagtgcctccttttctgcccctggttgtctggggatcactgcaaataccattatagaaagagttgatgacttrgcctcagcaaaagggagaaaagacatgcagttaggcaaggaagggcgagatgaagaggccaacaaaatgatgtgtaaggaaacatttgaatgatccagagacttctagtttaaaaccccatgccttgggaatggacattcatcaaggcacaaaagtggtaggcacaaataataaaattaagtgtattccacattaatatggcatgctataattgtcaaaatcctttcac

SEQ ID NO: 792182 - DNA, 509 bp, Homo sapiens
gaaaagtgattatttggtttcattgagaactatatatttttggtgtggttgaaaggagatatagatgcaagattgataagtttaagtaggaacctgtagacctgtatttcatttggcatgaaatcatgacatttttmatcttaaaaacatattttctagttctgcctgctgaagaaatccagacagaatttctgactgtagtcaggcatccccaagaccaaacttaggttcagtgattctctagaaaaactggcagaactcagcaaatatgctgtactcatggttacagtccattacaatgaaaagatacagattaaaataagcaatggaaaaaggcacatagggcagattgcaagaaagacaagatacaagcttccatttttcctgtcccagtggagtcatatggacagccttaatttttcccagcaatgatgtgtagcagcgcatacaaggtagtgccaaccacagaagcctttttttttttttttttttttaaatctggggttagt

SEQ ID NO: 792183 - DNA, 600 bp, Homo sapiens
gtcaactggcatttaattcatatacatctgacacctacctttatcaaatgttagccaataggttctcctagctcagcagacctttaattccagttatattaatctacttatttgtcctcaacctcttctttactcttcatatatccctttattcattccacctttcctttaccctgtagcacatttacttagccatatatatttattaaaattcttctaaaactcaaaggcaaattgaatcccacagcctcaaagaaaaccttctagattctcataagaaatggtttttaccactgaatcattctgaagagtaagaataaactctcatttatctgtgyccatttatttattccctacacctcctcgccccaaaaggaagagtggcaaacaaactttacagttttcttttctttttttaacttttactttaggttcagtggtacatgtgcaggttttttagatgggtagattgtgtgtcacaggtgttcagtgtacaggttatttattttcccaggtaataagcatagtacctgataggtatttttttgatcctctccctcctctcaccctccaccctccaagtgcacatgtgtcaacgtg

SEQ ID NO: 792184 - DNA, 545 bp, Homo sapiens
tttttttaaatttttgatagacactggatttcatcattaaattgcaccatggtttcaccatgttgcagtgctgatctccatttgctggtatcaaggaatcctcctccctcagcctcccaaaatgttgggattacaggcatgagccactgagcccagccaacagttatcttgaaggttgctcaggaaaggactctattaatcaacagtcatatttaaacacaaacttcactgatgaaaagtaggaagccatatgaccacctggggaaaaggttttacagtacacgggagaacaccaagtgcaaaagccytgaagagtttctactacctatatttccagagattttcaagtattttaatactgtattggcgtttactgttttattgagaaatgcaaataacacttcttaagcaatgctaggcttaaattcaattacctcacctagacctcacatctgtgtgaggtaatgacatttttattctcattaaagatgagtctttagctactgtgccagtatcacagagatagcaagcactagaccagcaac

SEQ ID NO: 792185 - DNA, 624 bp, Homo sapiens
aaatctaatataatggtattttgtttattattaggttggtacaaaagtaattgcggtttttctgttggaatttgccatttgatattggaatacgttcttaaataaatgtgattatgttatacatcattttaatgtgcatttcttgcttcatggtttttttgctaatgacttattactgttacttgctgtttacttcatgtttattttagactaaggaaataatgttagacaaaaagcaaatttgagtgattttyttattcgagtttaaaatgggttgtaaagcagcagagacacctcacaacatcaacatcacatttggcccaagaactgctaaggaacctacagtgaagaggtgcatcaggaagttttgcaaaggagacaagagccttgaagatgaggaacgtagtggctggcaattggaagttgacaaggaccaactgacgctgatcctcttacaactacacgaagttgcctaagaaataaatgtaggccattctacggtcatttggcatttgaagcaaattggaaaggtaaaaaagcttgataaatggatgcctcgtgagctgagtaaaaaaaaaaaaaaaaaaaaaaaaaaaaagaaaagaaaaattgtcattttgtagt

SEQ ID NO: 792186 - DNA, 544 bp, Homo sapiens
tatgtatgataccttgaaaatcaatcagaagccataaaaggtttaaaaaataggacaagttaaaaatctaaaatatatacattaatgtcttgcttttcttaccgttttctgattcacactgacaactttaaaccctatttataagctgatgaatctcaactkggatacagtctttgaactccagacctatatatacaaccaccaatctagcatcttaatttagatagttaataggcatctgacatgctacaaatgcaaaactgagcttctgacttttgctaaataaagttcataaagtcttgcccttctttgctaatggttgctgtagccaaaatattggaatgacttttatttttacactttactcatatttcttatgcagtccatcagcaaatatttatggctctgctttcaaaatacaatttgaatatttaaactccacatcactctcactgctatcatgagttattgtctagcctcccaatgcatttgtccttgtctagtctgaacattgaagccagcgtgataacataaagtataattc

SEQ ID NO: 792187 - DNA, 604 bp, Homo sapiens
aatataatacaaaatggtattaaagtcaaatttaaaaacccaatgaaacactaaagcaaattcacacacagattatttccttatatgtatatatttaatatattcaaacagtagtaagttttcttagagacaatactctttttagtaaatgcttacattttgattttctattttgtcttatttatttattatagacagaagaaaactctccaagtacacacacacacacacacacacacacacacacacacacacacccctttatctaggaaaaaggagcactttgtataatattttttcatttaatatttcctcaagaatgaaagaaaaaatgcttgcagcactatcattgaaagtttaatggctagcgggaattacaagttagttttttcccacaatttatttcagaaygtattttttgaatctgtcgtcttgatttgtgacacttattgaatgaccaattgatgatacatagatattaataaaatcaaaatagaagacacaattatcttatgtgctttttcaactaataagccccaattaaaattactactacattatttgcattatttaaataatatattttgagattttttaatacaaa

SEQ ID NO: 792188 - DNA, 624 bp, Homo sapiens
caatcaagaatttcctttttataaattgtgtttcaagtttaccataaaactttgttatactaactcttttgataattctcgcttagtctctgcttctaaatgctttaccatctctccccaggtcgttcagattgagagatttaaatgatttatacttttataaaaccaaatgcgtaacagaactacagcattttaatactcacaattcatggtgttcccaaaggttaaaagtgccaatgttactttgatttgttttgacatcttaacagtaaaataaatactcagtaaatactttctgagtaggtattttgcatagaattagggtatagtctctactttttttttacttttattttaggttcggggtatatgtgaaggtttattacctaggtaaactcrtcatgagggtttgttgtatagattatttcatctcttaggaattgagcccagtacccaataattacttttgaagttgtggttccttcattatggcattttaataaaaaatccagattatatctatacatattcagagagataacagtcattaaaaacaaactgatcatcattaaataacattctactgaagataatttacaagtggacataatttaaaggtgattc

SEQ ID NO: 792189 - DNA, 614 bp, Homo sapiens
attatcctgataccataacttgacagagacagaacagaaaaagaaaactttaggccaatatacttggtgaacattaatgcaaaaatccttaccaaaatattggcaaatcgaatcctgcagcacatcaaaaagctaatccaccatgatcaagtcagctttatccctgggacgcaaggttggttcaccatacacaaatcaataaatgtgtttcatcacataaacagaactaaagacaaaaaccacatgattatctcaataggtgtataaaagtctttcaataaaattcaacgtcttttcaggttaaaaattctcaataaactaggtattgaaggaacatacctcaaaatartaagagtcatctatgacaaacccacagccaacaacatactaaatggacacaagttggaaacattccccttgaagactggcacaattcaatgagtattggaagtcctggccagagcaatcaggcaagagaaagaaataaaggacatccaaagaggaagaaaggaattcaaactatctgtttgcagatgacacgatcctgtatctagaatatcctgtatcatagtctctgcccaagagctcttcaatctgataaacaacttcagcaa

SEQ ID NO: 792190 - DNA, 614 bp, Homo sapiens
attatcctgataccataacttgacagagacagaacagaaaaagaaaactttaggccaatatacttggtgaacattaatgcaaaaatccttaccaaaatattggcaaatcgaatcctgcagcacatcaaaaagctaatccaccatgatcaagtcagctttatccctgggacgcaaggttggttcaccatacacaaatcaataaatgtgtttcatcacataaacagaactaaagacaaaaaccacatgattatctcaataggtgtataaaagtctttcaataaaattcaacgtcttttcaggttaaaaattctcaataaactaggtattgaaggaacatacctcaaaatagtaagagtcatctatgacaaacccacagccaacaacatastaaatggacacaagttggaaacattccccttgaagactggcacaattcaatgagtattggaagtcctggccagagcaatcaggcaagagaaagaaataaaggacatccaaagaggaagaaaggaattcaaactatctgtttgcagatgacacgatcctgtatctagaatatcctgtatcatagtctctgcccaagagctcttcaatctgataaacaacttcagcaa

SEQ ID NO: 792191 - DNA, 605 bp, Homo sapiens
ctagcaaaagaactttgtttttcaacaaaacaagttcaagccagggcaacaaagtgagaacctgtctctacataaaatgaaaaaattagccgggcatggtggcatgtgtctacagtcccagccaccctgaaggctgagacaggaggatcacttgagctcaggagttctcaagactgcagtgacccatgattgcatcattgcactccascctggggaacacagcgacaccatgtctcaaaaataaaataaaggccaggcacggtggctcatgcctgtaatcccagcactttgtgaggtcaaggcgggtggatcacctgaggtcgggggttcgagatcggcctgaccaacatggaaaaatcccatctctactaaaaatacaaaattagccctataatcccagctactccggaggctgaggcaggagagtcgcttgaacctgggaggcagagattgtggtgagccaagattgcaccattgcactccagcctaggcaataagagtgaaattctatctcaaaataaataaataaataaaataaaataaaaacaagttctagcaatatccctaggcccatacattcagatcaaatgtttacactgacagat

SEQ ID NO: 792192 - DNA, 605 bp, Homo sapiens
ctagcaaaagaactttgtttttcaacaaaacaagttcaagccagggcaacaaagtgagaacctgtctctacataaaatgaaaaaattagccgggcatggtggcatgtgtctacagtcccagccaccctgaaggctgagacaggaggatcacttgagctcaggagttctcaagactgcagtgacccatgattgcatcattgcactccaccctggggaacacagcgacaccatgtctcaaaaataaaataaaggccaggcacggtggctcatgcctgtaatcccagcactttgtgaggtcaaggcgggtggatcacctgaggtcgggrgttcgagatcggcctgaccaacatggaaaaatcccatctctactaaaaatacaaaattagccctataatcccagctactccggaggctgaggcaggagagtcgcttgaacctgggaggcagagattgtggtgagccaagattgcaccattgcactccagcctaggcaataagagtgaaattctatctcaaaataaataaataaataaaataaaataaaaacaagttctagcaatatccctaggcccatacattcagatcaaatgtttacactgacagat

SEQ ID NO: 792193 - DNA, 632 bp, Homo sapiens; identical to SEQ ID NO: 764989

SEQ ID NO: 792194 - DNA, 503 bp, Homo sapiens
agtaggtcagttgagactcagattgtctttaaattaaatctccggatttgtcacactttcccatctatttcccagtaatactgggctaagacaggcctcctcacgttggggcagatctgtgccaacaactagctcctgagaggaagaaaatgcagagaatgcccaattattaccaaatccatcagttggataagctcttccatatcccctggggagaaatgagtaaaggggagaaaagtagaaaaagtttcatggagtgttagaggtgtagggtaaccatgttcccttctacatagaattattggggattttgtccttcattgctcttgayggaccatgggaactccaaggccaggtaaaaagcaagggtcagcaagcttccactctgtggaatcacagataatagcaacattcaacacaacataccttgtttcaggtgagatcaaatctacagtgtttgctaagaggctatgatgggtatcatgataaggtattatgctggg

SEQ ID NO: 792195 - DNA, 605 bp, Homo sapiens
aaaaatggggctgtgtccatcagggatcctagacaggcatctggacccctggagtccagccctaagtcagcaacttctcagctgaatgaccttgggcaagtcacttctcctttctgagcctcagcacaaaatagcataatagtatcttcctccagggttgttacatgaattcagtgggattcattgaacaaacaataagtaaagcccacaatgggtccagcatgcctaaaacggctttgtggactgtcagtgggagagaggacctccttcccagtacaggtagtattttggacctcgagctaaggctcgagatgtgaaaaacgtctgcccaagaccatccagagggtgcctaagcccaggccagcccctgggaagctctgcagaaaggttttyactgttatttatcatcattggagacaactaagatgcttggactgagcctgggttctggtctgggctctactgctgacctgagtttagtccctgccctgttctgagcctgtttccccctcagaagaatgagggggctgggtgagaccaatgatttccatactctgttgagcttcaagaaaaagacagagctggggctggctgaactgccagga

SEQ ID NO: 792196 - DNA, 601 bp, Homo sapiens
ggggcccaggaccctagagaagtgggatcctctgatggcaagataagaacagtaaaaccagggctgggtgcagtggctcatgtccgtaatctcagcactttgggaggccagggtgggaaaattgcttgagcacaggaattcgaaaccagcctgggcaacataacaagatcccctctctacaaaaaatttaaaaattagcctagcgccgtgacgtgcacctgcrgtctcagctacatgaaaggctgaggcaggaggatcgcttgagcccaggagttcaaggctgcagtgaaccatgatcacaccactgccttccagcctgggtgaaagagtaagactctgtctcaaaaggaaaaaaaaaaaaaaaaaaggtaaaaccaccacaacccccctgttcttcacagcactttgcagtttaccaagcacttgctataggaagcagccccgtgaggtgagcagggacagatggcaattgtcattctatgtataaggaagctggtgcctcagagaggttgggtcacctgcctggcatcacacagcctccaggaagcagaggcaggagctgagcccaagcctgctgcctcccggtccagtgctcctttaa

SEQ ID NO: 792197 - DNA, 525 bp, Homo sapiens
gacatgatgggcaaagatgtcctagaaagtggccgctagtctggcctgtctgctggggagattagagagggcccaggccagccagcacccatgtttcatctatatttgtatagatggagaaactgaggtcccagagggggccagagagaatccttagaaagtcctttgwtggatgaatgaagccacaccctagttgtggcaggcatgagaccccagctaaggggctccttcaccttgtctcctctacccctgacctccagatactgatctctcttctgctgtccctgtgtgaggaccacccccactccaggaaggccaaggcagcttgagggtcagcctgagctggggttctagctgcagctctgccactgattcactgtgtgatcctgaacaagtctatccctccctgagctctatttcctcagctggaagatatggataattattcaggtgcctggaacacaggatcttttctttttttgagatacagagtctggctctgtcccccaagctagaatgcagtgg

SEQ ID NO: 792198 - DNA, 671 bp, Homo sapiens
aggatgtgcagaataattccttcaaaaatataacccagtttaaaaattgaaggtctttgtcctagggcatttcatctacctaggatttgggtgagataaaaatatttacaagttaaggtttcctaaaatttctactggaatgaatatgattaaaagctatttaacaggtcagctctgctaacagcaacagcctgaattctaaaatgatgttaaataaaactgctgcaggcattgattttatgagctttttcttcttctaagtatgaaaaaagagaacacttaaaaaatttcaaagaaccactaaaaagattaattcatctcagaatatttacacacatagaacacccacacacagacagtagkgctgtttaacacatcaagctctgactagaacagctaatacgtgctggacgtgattaaactttgagtttagctgccagctatgatttgtcccaattaaggcagttacaatttttagtcactaaagcttgcctcatcaagttaataccttattccacagtgccaaaattagatttaaagcctcaagaaactttagaaaaatttaaaaggaaataagaaagtataagaaataagagcatgcaaaatcattatgaaaaacagaacacttcaaaaaaccacacacagattcaacacaattctgccaccacctg

SEQ ID NO: 792199 - DNA, 671 bp, Homo sapiens
aggatgtgcagaataattccttcaaaaatataacccagtttaaaaattgaaggtctttgtcctagggcatttcatctacctaggatttgggtgagataaaaatatttacaagttaaggtttcctaaaatttctactggaatgaatatgattaaaagctatttaacaggtcagctctgctaacagcaacagcctgaattctaaaatgatgttaaataaaactgctgcaggcattgattttatgagctttttcttcttctaagtatgaaaaaagagaacacttaaaaaatttcaaagaaccactaaaaagattaattcatctcagaatatttacacacatagaacacccacacacagacagtagggctgtttaacacatcaagctctgactagaacagctaatacgtgctggacgtgattaaactttgagtttagctgccagctatgatwtgtcccaattaaggcagttacaatttttagtcactaaagcttgcctcatcaagttaataccttattccacagtgccaaaattagatttaaagcctcaagaaactttagaaaaatttaaaaggaaataagaaagtataagaaataagagcatgcaaaatcattatgaaaaacagaacacttcaaaaaaccacacacagattcaacacaattctgccaccacctg

SEQ ID NO: 792200 - DNA, 577 bp, Homo sapiens
tgatttttaagtattcctcttttttttttttctttgagacaaggtctcacttcgtcacccaggctggagtgcagtggtgtgatcactgctcactgcagcctagatttcctgggctcaagtagtcctcccacttcagcttcccaagcagatgggaccacaggcatgagccaccatacccagctaattctttttttctctgttagagatagggtctccctatgttgcccaagctgctatcaaactcctgggctcaaaggatcctcccacttcakcctcccaaattgttggagccaccgtgcctggccagcctcccaaagtgttggagccagcttcctaaggtgtgagccaccgtgcctggctgaccattcctcttataagaaaaacaatttatttattttggcagcaacaagtagggcgttatttgttttgttttgtttttagtgtggtgtccagaaattaatagaatatgctagatttgatgtgaacagcataaagcacactgggattattatgtcctttgatttggtgacagtataatatatcaatgcccctaagactgcatttgattttttacctg

SEQ ID NO: 792201 - DNA, 637 bp, Homo sapiens
aaataggaatggatgtgaagaagaatttgtgcccagttaaggttggaaaccatacacttgcgatatatatctaaaatgatatttgtgattatataattagtctactcacttaagccaaaagcttggagttatctttgactcctatctttgtctcacrttttatatttaatcaatcaacaagttctattggttataactttcaaatgtgtctgcacattgaccacattttataatctacacagccaccagcgtaatctaagtttctaatgccttccctctatattatcataacagcctttccctctcagtctcctaccgtgttcttcacacagatggaagccatagtatatcactccttcactccagggcctccaatggctcccatttctttcagaagaaaataaaaattccctgctatggcctgcaaatctctccacaaactctcattcttattttagcttttattgttgtagatcaacttcatttgctctgcaatttagtcttcttccaacataccaagcatacttcataccacagagcctacctactgccagtgatgcgttcctttagacatcctatggctccattcactactgcattcagctgtgtgttcagatatcacttagctttccttctt

SEQ ID NO: 792202 - DNA, 617 bp, Homo sapiens
taaaagctttagaaattgttgctttatttttaagtaagtgttgtcttttgagttaatttctaagtgaattatgaagtttaatttgaggtcaaaatgcctttagttgatactcatgtttgtaatcaaaattttacttagtatataactgacgtatatgcattttgcatcagcatttaatgayatttttccatcattttcttgaatcttttcttttgttcatagacactctgagaattagctctttatccttaatgtcttgaaatacaattacaatgtatttaggtacatagattaaaaaaacttgataagtgctaggtagataataaatgtaaggatttatgtttttttttttttttttttttttttagtttacttgagtgtatttactcacaacttctggaatacataatacctaatataaatcttttaacattttgggatctaacctccaaattttaaagtttcatttttgctatttatatttatattcccttgttttgtgttcagtacaagttctccactctgccttcttaatgctaacttatttttcattctgtgccctggacacattttgtccacatgtactgagatgaaatgtcaaagtttaatttgcataa

SEQ ID NO: 792203 - DNA, 590 bp, Homo sapiens
agagacttggatttacacaatataaataagtagcatattatcttcaggcgtttcaggatttaaattacatgacttagggctctgaggagcccattaaggcctcttaagaccatagaaaaactyaattggatcagaaaccccccatgtgggtcattattgctacgtggatttcttcagagtctgaaaaagtcctaggggagaaagactttgttactatgataatgtgtaatttgtagaatcagttgaaccatttttctctgtgtttgtcttggaagagtcagtgtctaaatccagttacacggagggatataacatggccaaaataatgccttcagattgtttcctggctaaaaagtgtctgtccgttcccctgttgtttaatttccttgaggtgttcatgtcacataaatttgtaggagaaaggtcctgctagcaatgaagtgaaccttaactcaaaattagtatttaatgtgtgtgtgcatgtataccagaattggatcagtagaattaatacaagaaaatatagataattatgcagacaactttctagtagatgaagattttctaagtatatctcaaatataagcacc

SEQ ID NO: 792204 - DNA, 575 bp, Homo sapiens
aagtgaacaaatgaatgaacacatgactagataaaatctagccctccttacccccaggcttgctgatctgatccccaaagcctggtctcatccacctacccaccacaccgtgtctgctcttctccgggatgtgcagggactatctgcagaatcaccagtggggcccattttctgacctggggacttcctgagtcactgggkccctcatttgcccttgtcctgggtcatctgtgaactgagcactgccttggccagggccctggtgtcttggcgggaagcaacagcctctgccacagggttccctgccctgctctgctggatttgtggtcagcaaggaggaatccaggacaccggctctgcaagcttcagtcctgacctggcatccacccagtgacatgagtggaaaaaacctttcacagggcaggttgagaatgaaatccctgccgcagggcacaaaccagccttcttgccaccaatacgtgccacctttcccttttgtatctgttagtatatgacctgaatgtttctttcatgtcactcctctgctcaagaatcatcaattaatcccccttgcc

SEQ ID NO: 792205 - DNA, 609 bp, Homo sapiens
aatcccccttgcccatcagaacaaatctgagctccgtggcaggaattcaagaagccccatggccaagctgcggcctccctctctgaccctgtcctccaccactccagccaggacagtctccttcttcctccttccttcccccaaggctttgcctatgccatgccctctgcctgagataccctcactccttcattctactgttttaagtcctggcttgcaactcccacctcttctgggttgcctaccagctrtccaatgtttgataactcatttaagaaaaacaaacaactaagcccttcagcacttaagaatcaccaggcttgcttatgcaaaacccaggccatcccagacttttctgaggatggttctaggacactagaattttaaagtttctcaggagagtctgatgccaccagcccagctgggtccattgacaggcacttggaagcactgacgatacaaagctcgaattatacatgtgcttggatgacacagtgcttgtaggcttgaacgacccaggtgcacatgggcacctgatgtctatacattgtaacatcatctctgcaggcaacactaacaatgataactgactttactgggggctcacca

SEQ ID NO: 792206 - DNA, 609 bp, Homo sapiens
aatcccccttgcccatcagaacaaatctgagctccgtggcaggaattcaagaagccccatggccaagctgcggcctccctctctgaccctgtcctccaccactccagccaggacagtctccttcttcctccttccttcccccaaggctttgcctatgccatgccctctgcctgagataccctcactccttcattctactgttttaagtcctggcttgcaactcccacctcttctgggttgcctaccagctgtccaatgtttgataactcatttaagaaaaacaaacaactaagcccttcagcacttaagaatcaccaggcttgcttatgcaaaacccaggccatcccagacttttctgaggatggttctaggacactagawttttaaagtttctcaggagagtctgatgccaccagcccagctgggtccattgacaggcacttggaagcactgacgatacaaagctcgaattatacatgtgcttggatgacacagtgcttgtaggcttgaacgacccaggtgcacatgggcacctgatgtctatacattgtaacatcatctctgcaggcaacactaacaatgataactgactttactgggggctcacca

SEQ ID NO: 792207 - DNA, 609 bp, Homo sapiens
aatcccccttgcccatcagaacaaatctgagctccgtggcaggaattcaagaagccccatggccaagctgcggcctccctctctgaccctgtcctccaccactccagccaggacagtctccttcttcctccttccttcccccaaggctttgcctatgccatgccctctgcctgagataccctcactccttcattctactgttttaagtcctggcttgcaactcccacctcttctgggttgcctaccagctgtccaatgtttgataactcatttaagaaaaacaaacaactaagcccttcagcacttaagaatcaccaggcttgcttatgcaaaacccaggccatcccagacttttctgaggatggttctaggacactagaattttaaagtttcycaggagagtctgatgccaccagcccagctgggtccattgacaggcacttggaagcactgacgatacaaagctcgaattatacatgtgcttggatgacacagtgcttgtaggcttgaacgacccaggtgcacatgggcacctgatgtctatacattgtaacatcatctctgcaggcaacactaacaatgataactgactttactgggggctcacca

SEQ ID NO: 792208 - DNA, 622 bp, Homo sapiens
aatttctttttttattttttagagatgggatcttgctttgttgcccaggctagttcagaactcctggcctcaagtgatcctcctgccttggccttgcaaagtgctgagataacaggcatgagccaccatgcccgtcctgtattggttttgttgttgttgttgttgttgttgttgttgttgttgttgtcaaacactaaattaatctcttgggtagaattataaagaaagcacccgtggctatgacaagttccttcttttatttactaatttttgtttcttcctttcccaggttattgaagatcctatacaagyagagcgagtcaaatttgtgtttgagacagaaaatggattactaggcaagtatgcctggtcttatgcacaaatgtctatagtaaatatgtggataatctattgttctggccagttctgcctcctgctactctcggtgggatctacagtgactgatacagtagaagtctggtcagggccactgggctccctcattctggtcagaaaaattaaaacccagggatcttctcaccctacacatttctcctcttttagtcaggaaggtgtagcttgggattcttttaccagataaggcaagattcaggggtgctgt

SEQ ID NO: 792209 - DNA, 620 bp, Homo sapiens
atcagtctggttctggggtgagggtaatgaagtagtgaagcaaagtccttgatggacatgtgaggtgagacagaaataaacctttgacatttcaagcccctgagatttggggcgtgcatgtgctggaagcagaacctagcctattctgatggattcctccagcactgctcgtgggaagacatcatcaatatagagcattcatgtgccctttatctcgaaattcsacttccaggaatttatgaaacagatactctcacatgtgcaaacagctatggataaggacagacatggcaacttggattgcaatagcaaaagacagaaacaaccaacggaaacaccaaccaataggaaattggctaaagacattgtgaaacatacatagaatgaaataatctgcaaccagaaaaataaggcagtagatgtatgtgtaccagtgtggtttttattccgagattagggctaggttaagacgtcagattaagttgtccctctccaccccaccaatataaataaaaagttaaaagtaaatcataaactatttttacaattttaaaaagtgggttaaagagcccatccaagtagttttataaaagtagactatctccgaaaagatacccaat

SEQ ID NO: 792210 - DNA, 366 bp, Homo sapiens
ttccagaaccccctagggaatcatggacatgggtatggagcatcagtggctgctgatatagaaaaggaggcagccagacctcatgcagtccttggtgggaaaacacaccacctgcgaaaaacaagccaaattgaacctgagtctgactaggactgttgatctaccaccaatatgtaggaaaccgagaggatagaggaacatgtaaaacatgtaaaacacagagctgmagtatattaaatacagagtgggaaactatgtgacaaacagcctgattccctcaacaaataaattgcaagaaataaaacttgcaatggaggggggcctatgaattagcatagtttttaaaaacatatcaccctatttgga

SEQ ID NO: 792211 - DNA, 633 bp, Homo sapiens
cctaggaaacgaaagcagatgatgtcacagtgtatgtacctactaaaactatgatgttgataaccagaatcatacattatatactatttttctatttggcttcatttactcagcatggtgattttgagattccatatagttccatgtatcaatagttcattcttttttatggctaagtagtattccattgtatggatatatctcattttgtttattcatttgcctgctatgcacattctggtacatgmctttgtgtggataatatttttatttctcttagctataaacctagagattgtctaagtcatatggtaggtgaatgttgacctttttaagaagttgccatgttgctctccaaagtagctataccattttacatttccatcagcaatgtatgagagttccagatactccacgttcttgtcagcacttggtgttgtcaaattttagtcactcttgtgggtgtggcatggtgtgtcgttgtgttttttttaatttgtgctttcctgacaattaattatgtttggtatcttttcgtttttttagtagccattagtatttctcctttttgtgaaatgttcaagctattataaatgtatttaaaattttgaaatttccagttgatcactgcaa

SEQ ID NO: 792212 - DNA, 633 bp, Homo sapiens
cctaggaaacgaaagcagatgatgtcacagtgtatgtacctactaaaactatgatgttgataaccagaatcatacattatatactatttttctatttggcttcatttactcagcatggtgattttgagattccatatagttccatgtatcaatagttcattcttttttatggctaagtagtattccattgtatggatatatctcattttgtttattcatttgcctgctatgcacattctggtacatgactttgtgtggataatatttttayttctcttagctataaacctagagattgtctaagtcatatggtaggtgaatgttgacctttttaagaagttgccatgttgctctccaaagtagctataccattttacatttccatcagcaatgtatgagagttccagatactccacgttcttgtcagcacttggtgttgtcaaattttagtcactcttgtgggtgtggcatggtgtgtcgttgtgttttttttaatttgtgctttcctgacaattaattatgtttggtatcttttcgtttttttagtagccattagtatttctcctttttgtgaaatgttcaagctattataaatgtatttaaaattttgaaatttccagttgatcactgcaa

SEQ ID NO: 792213 - DNA, 591 bp, Homo sapiens
atatttcttaaaaagaaatatggaaattttcttcttaattctttaatacagtgaattacgttgatcgatttttgaaaatgttcagccagccttatatctctggaatgaaacctaattggtcataatgcgttatctttctatatattcctaaattttatttgccaatatgttttaagaatttttgaaactattttgcaactatattcatgagggatgttgatayagaattttctgtttcagtaatgtccttgtaaggttttggtgttcgagctgtgttggccttataaaaaaattcgggcaatgttccctccttgtttattttctgaaaaagtttgtgcaagattggtattttttctttcttggacgtttgacagaattaaccagtgaaacaatctgggcatggagtttatattgttgaaaggcttttgataacaaattcatttttttaactagatataaggctactcaaattttctgcttcttctataaatttttgtaagttgtaatttttaagaaatttgtccatttcatttacatttgtcaaatttgttggcattaagtttttcacatattattttgttatctatttga

SEQ ID NO: 792214 - DNA, 604 bp, Homo sapiens
aatgcagaaaaatatttcaaaagccgagtagaatataaaatctatacctaatcccaccacccagaacctattttagatgattgcactatgaaatgaaaagaattgaaggggaactgcgatttcctcctagaaataagacctgcagcaagcttgcagacagcacagctctccttcctgggtgccaggcagaccctaactgcagccccgcacacctgtctcgtacaggtgaggcaagggagaaccagagtggccgggctttccacgtgccacaaccaagacagtggcaccaataggaccagaaccagagtttcctgrctttctgtcaagtttccttcatacaggacaaataggagtaggtttgccatcatgcaatgaccattctttagtaaaagcagttgttgtgtttgactcatcatttacctattataagaagattggccaaaaaaaaaattatgtttgggacaggagaataattttgctctctgataaaatacctcagaagatgcccaggataattcatgtgtggaggaagaaaatattagaacttctgtttataattttatctttaaaaaaaaacagaaatcatgttttattagtattcaaa

SEQ ID NO: 792215 - DNA, 551 bp, Homo sapiens
gcatgaataatccaccacttgtttagtgtatcatcaagaaataaccataaagtgggcaaccagcagcccttggggctgctctgtctatggagtagccattcttttattcctttactttcttaataaacttgctttcactttgcactgcggactcgccctgaattctttcttgtgcgagatccaagaaccctctcttggagtctggatcaggacccctstcctgtaacaatatgtatttttaaacctaatccatctttccctagcatgggtaacagagattcatgaagcatgactgcattttactcatgggacatggtcctgaagaacttacataattcagaacagattattccatagtctaaggatagagtatgcggaatgcacactcagaacacagacacgtgccgtcattgtgctgtatttctgctttactcatactttttaattctatcagcattaactctcatacttctgagtttatttcataaattaacagcatgtcatttcctggtatcttttatcacatctaatttcttttccaaagttactga

SEQ ID NO: 792216 - DNA, 733 bp, Homo sapiens
aataagtaccagatatttcctgccaagcgttctaaatgactctatttctcaaactagtattcagagaaactgggttcaacatgtatttatccagtatcaactatgtgcaaagctctgtgatagatggattacaagcatctttcatttttcttggtttataagccacaacattgtcatggtcacaccatcaacaggttaaaaaaacaaggaacttttttaaggtcatctatttatccttgacttagataaggaatatcttctgccttcttgtttgtaggtgacaattggattctcagtcttttccttttgtcttaccatgaaatagaaaactggcattgctcaaattaccagatgatttctttttatttttcaatggcaacttcatttagtttactttcaaaaatatttactgaacatacggtgaagtctgtgccacatccaagtgcaaaatgatagagaaacaaccccaggacattctcaaggagctcatagcctggtgagagaaagatacagatacatctttattctcatgcctttcttcaaaaggatttacagagggkaacaaaaagaggtacaatattagaatagaaacaagtccattagaaacaagtgagaaaggcaaagggaaagcaatgatgggatcatagactagaggcagggtaatacacaaaataaacgcaatgaagacctgcatgtatttgctaaggatccaccaagaatttggatctaagct

SEQ ID NO: 792217 - DNA, 555 bp, Homo sapiens
tgatactatctggcagtcctcatggttggtttcccgagaaaggaactcagataagacaaatgttaactttctcaagttttaagggagattaatttttatgtttattcaaagaaaccataaacatctgttccatgggacaactggggtggtttcagttccaccagataaaaacagaccaaatgctcaggaaaagcatacctattcctaacgtaaggccaaacaaacaaacaaaaccctcaaggatcatccaaaggcaaatactctctctyttttttttttttttttttttgagacagagtcttactctgttgcccaggctggagtgcagtggcacattctgggctcactgcaacctctgcttcctgggttcaagtgattctcctgtctcaacctcccgagtagctgggattacaggcatgccaccacgcccagctaatttttgtgtttttagtagtgacggggtttcaccaagttggccaggaaggtcttgatctcttgacctcgtgatctgcccacctcggcctcccaaaatgctgggattacaggcgtaagcca

SEQ ID NO: 792218 - DNA, 609 bp, Homo sapiens
tagcaaagcaataataaattattttctccagtatgaactactctctgataataaagaagaattgtcttaatacactagatacatagaagttagaaccataatgtgtctgaagcaaagggcccagagttacaaactcaagatcatcctttaggcagtcacggaactcatcacatcatggtgtagggtgggtggctgactgctggctgtctagcagaaggaaagggggtgtgacctcaaggaatcaagccaaggcctctaattctatctgtgcctcattcaccacacagagccttgaggggaacaataaataatacttgaagctgtgcactgttcacatcatctgctacatgcaatctctactcctccatgcaaaatgaagacaatcaacttgagcagagtagattacattgtyaaactgtgggctacagagtgattcactcagctggcatcagaatcgaggcctttaatgacctgtacaatacaaatattaaagttttgatctaatttcccccttataccccctcaaacttaaaaaaccatcaaccaggggttctagatttgctattgttcctcattcatccctgagtcaaggcaccaggtcagagtcct

SEQ ID NO: 792219 - DNA, 554 bp, Homo sapiens
aacctccgcctctgcctcctgggttgaagcgattctcctgcctcagcctcccaagtagctgggaatacaggcacatgccaccacgcctggctaattttttgtgtttttagtagagatggggtttcaccatgttagctaggatggtctcaatctcctgacttcgtgatccgcccaccttggcctcccaaagtgctgggattacaggcttgagccaccatgcccctgacccattctgtatcttttaggtggagcatttaggycatttacattcaatgttagtattgagatgtgaggtactgttctattcatcatgttagttgttgcctaaataccttgttttttatcattgtgttattattttataggccctgtgagactcatgctttcagaatgcttgattttactgtattttcaggttttgtttcaagacttagaagcccttttagcatttcttgtagtgccggtttggtagtggcaaattctctaagcatttgtttgtttgcaaaagactttatctctccttcatttacgaagcttagttttgctggatacaa

SEQ ID NO: 792220 - DNA, 487 bp, Homo sapiens
ctttttctgctgatttgagtgtagcctaagaatcttgtggcagcactctctgtcaatcagaatcatcacacagcttcattgattaggacattttttgtctattcactatccctgaatcaagattgtttgtttttcttcctcagcacccttaccaacagtcattgtagaacagcttgcctgccttgttttattattatacaaaacagtgatttttaaaattawgagatattatatagtatcttatagcattgggtttaggcatattatttatttacctaagcattctaaatataaatgtatggtcagactgggctaagcacttccgaaggttgtagggctaccacaagtcatagtaattttttttttttttttttgcaagtcaacaaaaagcaatagcacacagttaccagaaacctttggaacactagtgcattgacaaatgaaggctgtttttcccaatgtatatatagcctagtttcttacaaat

SEQ ID NO: 792221 - DNA, 610 bp, Homo sapiens
atatttatggtatcttaaaatgacaatattttggatatattgggttaaataaaatacagtattgggattaattttacccatttctgtttactatttctaatgtggctatgagaaaattgatgttgcacacatggctcacattctctttctcttgggtctagagcctcaccagccccatgtggtaggtgagggcacggactgcagtgtcagaaccgcccaaggccacgtcctagcctcaccgcttcctagctctgtgaccttcagtgagctactgagcttctctgggtctcacagtggcggtcactttctccaagacctcagatcaaagttcccaagcttgcaggggaaatggtgaactttgtaagattctgatgttgaaggtggtattttctggacagtcttggagatccttctgtggcactcagggctgttgtcactaccaaggtgttacccacctcccttcyccccgtcccctctgctcccagagagaacaaagtgttttttctcaatgggtccagtcaaagacatctccccggccctgcggcgtgagcaggaagcaggtgggattgctttccccaacatgcacctctttccagggtggcacctttac

SEQ ID NO: 792222 - DNA, 634 bp, Homo sapiens
tcaaaaataatgatccttggcaaggtacatcctcgttccatgctttcatatcatgatctgttccttctcaaagcaaggatcaggcttggattaacaaacgctcacacttcatatgttagcaaagataaatgagactgtaatgaaggcatgtgtcaatagacattctttccctagagtcagtgtgatgaaggataagtttaagttttcatttgttgaatacattagcctcaatcactgggaacttgcagtaattaaaactgggcatatctgaaatttacctttgcaccatctgtgaagaaagcatctaggaagggaaataatagtgtcaataaaattacagagaggactttggcctagataaggataataactggttaaaggcccacaattcattaatgatatcaatagagagaagaattgaccgttaattaaagcagattgggaatggccctattgaatcatttatrtaacacccattatgtgcctactattttccagacaagcttggatagcactattttattcttaaatattggaaagaccctattaagaggatgaaaagacaaggtcagatgcagtggcatgcacctgtaatataagctacttgggaggctgcagtgagagcatcccttga

SEQ ID NO: 792223 - DNA, 577 bp, Homo sapiens
tatttaatctctctgagcctcaacttcctcttctgttaaatgggaatgataatatcgttatattggtgctgaaggagggaataagaaacacatgtaaagagacagcaccgacccagcgcagtggctcacacctgtaatcccagcactttaggaggccgaggcgggtggatcacttgacgtcaggagttctcaagaccagcctgggcaacttggtaaaaccgcactctactaaaaatggaaaaattagccgggtgtcgtggcacatgcctgtaatcccagctactcaggaggctgaggcaggagaacggctkgaacccaggaggcagaggttgcagtgaattgagactgtgccactgcactccagcctgagcaacaaagcaggaccctgtctaaaaaagaaacagcaccctgcccccacacccagtcagtgcccttgttctacttccatgaattgggccataggggtttgctggagcagcgacttcctctatgtccagggagctctggagccatggtcaccaagctcactgctgtcactgttcaacctttcctccatgttccagaaaagcaggtgccc

SEQ ID NO: 792224 - DNA, 406 bp, Homo sapiens
tatatgttatctacccccatgacaccaccttcacccacaggaagagtctggaggtgggcaccgggggtctcagctcacatgtggggctgctgcccagttaccctgggatcagtctggctgcctgcttctccttgctaggaaaactcccaaggaggcaactttgttgggcctgtgtagacatgggcacagtgcttcaaayactcactccaggggcctgtgtagacatgggcacagtgcttcaaacactcactccagggtcctgtgtagacatgggcacagtgcttcactcactcactccaggggcctgtgtagacatgggcacagtgcttcaaacactcactgcaggggccagaacatgtatgtactcgaggcaaggtgcctgggagagtgaggcatacatggagga

SEQ ID NO: 792225 - DNA, 406 bp, Homo sapiens
tatatgttatctacccccatgacaccaccttcacccacaggaagagtctggaggtgggcaccgggggtctcagctcacatgtggggctgctgcccagttaccctgggatcagtctggctgcctgcttctccttgctaggaaaactcccaaggaggcaactttgttgggcctgtgtagacatgggcacagtgcttcaaacactyactccaggggcctgtgtagacatgggcacagtgcttcaaacactcactccagggtcctgtgtagacatgggcacagtgcttcactcactcactccaggggcctgtgtagacatgggcacagtgcttcaaacactcactgcaggggccagaacatgtatgtactcgaggcaaggtgcctgggagagtgaggcatacatggagga

SEQ ID NO: 792226 - DNA, 668 bp, Homo sapiens
gggatttgcaagcctaattgcatcagcaggagcccatctctcagagaacccggactccccaagcagactgggattttgggaagggtgtggggggtgtcattgctggatacccgtctttctgcctgtcctttctcctctctgaatcctggggcccctctccctccttaaagctggagtggacagagggacaggagaggatcagagttcatcccccctgggaaagagcaagagcgaatgaatcccagcgccagcggctgaggctgccttccgtgccttccctccatgggcgacgggtgagtggggcttaggaaactggaacagggaaggttctgttrccacactttggaactttccccctgggattcagcagttgagaagcagagacctttctgccctgggtgaatgggtccttgggggaggggttggtcttttgtctcgcatccccatctttcctttccttctgggccatgctcctccctggctggaaaaaggtggctgtgctgtccctgtgatccactctcagcaaatgcgtgtggctcaaataaacaaagaacttacctgttagagtgaaaatcctcaggagattgtacccaaatgccatgctctaaatattcatggtctctctaatgccctcaagacgtgatttccatgggaaccatcctcccctg

SEQ ID NO: 792227 - DNA, 535 bp, Homo sapiens
aaggtcatcacacggtgcttataagaggtggccaggagggtcagagagaggagatgagctgatggaagcagaggtcagaataatgtggggtccatgagccaaggaatgcaggaagcttctagaagctgggaaaggcagaaaatggattctctccaagtctccagaaggaaagcacccctgctgacaccttgattttagcccagggaaacccaattttggatttttgaccttccgagctgtaagattataaatgtgtgatgttttaagccactaaatttatggtgattgttagatcagccataggacatagcacagggcccaggagtgagagcgggaagagagagatgcaggtgagggtatgtctgagagtgggagggccttgaggggcagcyagtggggagccactgaaggcggcttcccagagcagcagctgctctggattccagtttctgaagggccacccgattcagggtggaggatggctgggatgagggaatggtaacaagaccagaacaacagccatcagccaggagct

SEQ ID NO: 792228 - DNA, 630 bp, Homo sapiens
ctgttttattcctgattttagtaatttgaatcttctctctttttttcttggtcagtctagctaaaggtttgtcaattttattgatcttttcaaagaggcaactttcaatttctttgattctttgtatttttttttattttctatttcatttattttcactctaaccttgattcttttccttcctyctgctttctttggacttcattttcttttcttcttttatttttcttaaggagaaaggtttggacattgatttgagatctttcccttttttttttttttttttgagatggagtcttgctctgtcgcccaggccgaactgcggactgcagtggcacaatctcagctcactgcaagctccacttcccgggttcacgccattctcctgcctcagcctcccgagtagctgggactacaggcgcccgccaccacgcccggctaattttttgtatttttagtagagacggggtttcaccttgttagccaggatggtctcgatctcctgacctcatgatccacccgcctcggcctcccaaagtgctgggattacaggcgtgagccaccacgcccggcctttcccttttttaatataggtattttacggctatgcattcctaagtactgttttca

SEQ ID NO: 792229 - DNA, 630 bp, Homo sapiens
ctgttttattcctgattttagtaatttgaatcttctctctttttttcttggtcagtctagctaaaggtttgtcaattttattgatcttttcaaagaggcaactttcaatttctttgattctttgtatttttttttattttctatttcatttattttcactctaaccttgattcttttccttccttctgctttctttggacttcattttcttttcttcttttatttttcttaaggagaaaggtttggacattgatttgagatctttcccttttttttttttttttttgagatggagtctygctctgtcgcccaggccgaactgcggactgcagtggcacaatctcagctcactgcaagctccacttcccgggttcacgccattctcctgcctcagcctcccgagtagctgggactacaggcgcccgccaccacgcccggctaattttttgtatttttagtagagacggggtttcaccttgttagccaggatggtctcgatctcctgacctcatgatccacccgcctcggcctcccaaagtgctgggattacaggcgtgagccaccacgcccggcctttcccttttttaatataggtattttacggctatgcattcctaagtactgttttca

SEQ ID NO: 792230 - DNA, 630 bp, Homo sapiens
ctgttttattcctgattttagtaatttgaatcttctctctttttttcttggtcagtctagctaaaggtttgtcaattttattgatcttttcaaagaggcaactttcaatttctttgattctttgtatttttttttattttctatttcatttattttcactctaaccttgattcttttccttccttctgctttctttggacttcattttcttttcttcttttatttttcttaaggagaaaggtttggacattgatttgagatctttcccttttttttttttttttttgagatggagtcttrctctgtcgcccaggccgaactgcggactgcagtggcacaatctcagctcactgcaagctccacttcccgggttcacgccattctcctgcctcagcctcccgagtagctgggactacaggcgcccgccaccacgcccggctaattttttgtatttttagtagagacggggtttcaccttgttagccaggatggtctcgatctcctgacctcatgatccacccgcctcggcctcccaaagtgctgggattacaggcgtgagccaccacgcccggcctttcccttttttaatataggtattttacggctatgcattcctaagtactgttttca

SEQ ID NO: 792231 - DNA, 544 bp, Homo sapiens
aaggtccaactgatttttttaaatagatattccctggattgctgcaaaccttaggttaattctggagctctgaaaacgttgattctgacaattttttgctgttgttctcaatgcttctacaaaaaataaaaattgcagaagtccttcctccaccatttcattgatgagcaggccagtttttaacctgcttgtgcacacctatmttcagtggcttattaaggaaactatgcttacactcaatggcttatgaggcctcttttcctccattgaattgtttctggattcccttggtaggggccagtgagatctggactgcagccagggcacacatttagtcttgcaccagtcttgactacatgaccttgggacaaaggagctgagatttccaaagcacctgctgtgtgccaggccccgtgtgctgggtgttttatgtacactctgtcatatcattcttgcaacaaccaagaaggagatacctttctcatttaacagatgaggaaaccaataagatgcaaagcacttagcactgtgcctgcagcacatg

SEQ ID NO: 792232 - DNA, 544 bp, Homo sapiens
aaggtccaactgatttttttaaatagatattccctggattgctgcaaaccttaggttaattctggagctctgaaaacgttgattctgacaattttttgctgttgttctcaatgcttctacaaaaaataaaaattgcagaagtccttcctccaccatttcattgatgagcaggccagtttttaacctgcttgtgcacacctatcttcagtggcttattaaggaaactatgcttacactcaatggcttatgaggcctcttttcctccattgaattgtttctggattcccttggtaggggccagtgagatctggactgcagccagggcacacatttagtcttgcaccagtcttgactacatgaccttgggacaaaggakctgagatttccaaagcacctgctgtgtgccaggccccgtgtgctgggtgttttatgtacactctgtcatatcattcttgcaacaaccaagaaggagatacctttctcatttaacagatgaggaaaccaataagatgcaaagcacttagcactgtgcctgcagcacatg

SEQ ID NO: 792233 - DNA, 626 bp, Homo sapiens
agtgtgcacttgtaatcccagctattcgggaggctgaggtgggagaattacttgaaccggggaggtggaagttgcagtgtgcctagatcacgccactgtactccagcccaggtgatggagtgagactctgtccaaaaaaaatgattaaaaagtttaaaataagcacaactaaaaataactgtagtggttccttttggagaatgcttagtaattccaggctctgtgctttgcagatatcatcttgcaatcatcctgtgaggtcaactctgccattatacccatttcacagataatgaaaccgaggctaagaggagtgctttagtttgggtttccccagaagcagaccctgagacaaggatttgagtgcaagtggattatttgggtagtaaccccaggaagcaccagtaggggaaccaagccaggggaagggactgatgccartaaaaggtacattgtcatgagagttactcttgggggcagctggagctgaatcctcctggggaactctgggagccagcgtggaacacacatctcgtggttatcccaccggaagggtgagggagctgtgtattattcaccaactcctgatagtcgtgggtcaaaggctgtggggtgtgaggaggatg

SEQ ID NO: 792234 - DNA, 622 bp, Homo sapiens
gtgagagtcaggagagaaatcttattccagtgtaagaggctcgagcctcatccagcaagtcagtgcttctccaactccagtatgtatacaaatgtaaacaaattacttcaagatgtgattgtgattcaggaggtctgggctaggacctgagtttctctggctccagcaagctctcaggtgacgctgttgcagctggtccatggaccatacattgagtggtaagacatcaggagctaatgaaaagcactgatggattccagaaagaaaaatgacatgtgtttggcccctgatagttaagaaacatttaaaaataagaacagtgaagtatatgaggatatgaacaatgattaaagtttactctatttcacaaaggtaatgaaacaagcatttactgagcaccgtccacatyctggtcactgcactaggcacatgacaaacattatctcttctaataatagaaactaaagccatagcccaaactgtaccacttttaactcaatgaccagtataaacaaacaactcgtttgtgtaatctttaaatagaattaaccatattgaaattaactatcaaccaggaatgtttagagttgtatatatctgtgtatattgtgttttataataa

SEQ ID NO: 792235 - DNA, 606 bp, Homo sapiens
agttatttccttgaggatagatttctacgatggaaaggaaatgagaggttttaagaggtgggctagtggcttgtactatagcatagcctgcctttctggtgtgtggtgattaggcctgttggaactgccatcaataaaccaagtgtgatcagggtgagaaacagggaagaagaaaatgtggggaaatggggtgaacgtcaggtggatcagagagatgcagtcatgagggtcaggtgtggtatcaggaataatgtgggaggccagattgaagtccgggccaggaacaatggtaattgtgggagactcaacaaagagtgagtacagctgaaggagcyggggagcagaaagtatatgcgtcgggtatgaggaagaaaatagattttggaaattatgagagctgtagagagtgagttgagcatagtttgtgattttgagggcctttaaaagtattagggcggcagcagccgcagcacggagacatgatggccagcctaaaacagtaaggtcacgttgtttggacaaaaaggctacaggacgcgatcccggtccttgtgtaagaattctgactgcacagccctgcacttcggctgtgtataatgaaaaggg

SEQ ID NO: 792236 - DNA, 625 bp, Homo sapiens
tgactgtgaagccttgaggcagtacagcccaggtaatttgctgagcctgatgggtgtcagggtcagtccaagtgaaagcaaagaaaggctgggatgaagggtgcaaaggaatagtaaagaaagcatgtttgagatctagaacagaataatgcrttgtagagggaggtattgaggataggagagtatatgggttcagcaccacggggtggataggcaaaacaatttggttgataaggtgcggatcctgaactaacctgtaaggcttgtctggttctaggacaggtaaaatggggaaattgtaaggagagtttataggctttaaaaggccatgctgcagcaggcgagtgataacaggctttaatccttttaaagcgtgctgtgggatgggatcttggcattgagtggggtaagagtgattaggttttaatgagatggtaaggggtgcatgatcggtcgccaaggagggagtagaggtatcttattctcgtgggttaaggtggggggatacaagaggaggacacaaaggaggctttggattgggaagaagggtggcaatgagatgtagctgtagtccaggaatagtcagggaagcagataatctagttaaggtgtcttggcctaataa

SEQ ID NO: 792237 - DNA, 600 bp, Homo sapiens
ggggccaccacgggtaggaccagaccaggcaggcctgcctacaagtccccaacggcagggacaagcaccaccactgggggaatccagtgggcagccaccaagtgcccagaggtgtgcctaggagtttcccagtgtgcctgggaagcctcctcagccttaagttctctgtatgagttgggggttgggrctgtggcctaaactcataatccaggagcatgggtgttcctgatgtctggagatctgcctgggcatgaagtggaaagggctctcctgcacccagatctctgcacaggaaagatggggtggtgcaggctgccaatctgggcaagcaggtactttgaatgccttgggatggagcagagaggatctccctctaccagaatctctgcacaggaatggtggggtggatcaagctgctgatacaggtaattggatgctctgatgcctggagatctgcctgggtgttaggcagagagggtcctgcttcatcacagtctctgcacaggaaggatggggcagctcaggatgctggtccaggtgaatgggtgctctgaatgcctggagagctgcctgggttagaatggaaaaggccttggtgca

SEQ ID NO: 792238 - DNA, 590 bp, Homo sapiens
tgactcaccaattctctgtcctcatggagtttctattctaacggggaaacagaatactggcagaaaacaaaccagtaaatacatcatgtgtcagatattgatgagacacgtggagaagaattaggcaaggtaatttgcataaaaattgtgagatgagatggagtgctgatgttgttattttagttgagggatatggacagggttactcgaaaggtggtattggagtagataactgaaggaagtgagagatacccacgtggatacctgaggcagggctgctctcagaaactcacctagagtttgccattaagcttgccattactactttcagaagaactcagaatattaatttactttctccacattccctacagtatggatgaagaaatatcaccaygttcttttgtttgtctagacacacaaaatatctacagtagttggaggtacagacagagctgggactaaggcttgattcacctattcataagccaggaaggaactcttggttgaatgtaaaaaacaaaaaatatggtcatattgcaaacagaaaaaaaaaaagtcagcttctaaaaggataaaatatagggcaa

SEQ ID NO: 792239 - DNA, 643 bp, Homo sapiens
taaggcttgattcacctattcataagccaggaaggaactcttggttgaatgtaaaaaacaaaaaatatggtcatattgcaaacagaaaaaaaaaaagtcagcttctaaaaggataaaatatagggcaagtttcttggcaggattttaaatgattctgtggaacttcattatgacatatttgtccctaaacattatatgtaagtttttatttttaacatgtgcttcttcctcttagaatgtctgtttacatactcttcttgtgcatttwaaaaaatttatctataatgtgcagttaaacttttcagcgcattgtttcccgaaaactccaagctgaattgttctcggttctttgtgaattattaggtcagtgcaaaagtaattgcgggttttgccgttgcttttaatggtaaaacccacaattatgtttgtaccagcctgatcctaagcaatctcattatcgtctagattctgccacttttcattgtattattatatctattttttcactaacagaaataatttttagtgtccctaatgtttagtgttgtgcatattttaaaatcttaatgttttccaaataaataaatgaacacgagattaacttacaggtagaaaaatgtataaaacctcatcaaaaatgatg

SEQ ID NO: 792240 - DNA, 596 bp, Homo sapiens
ctagtaatctccaactgttgtccagtcagttatttgtatccactagtgactgtctcaaaattctccttgacttcttatcaggaagatggggaataatttttttccatctgataggtgtggaacaaagcagcctcaccctgaggctgacttcagtatgtcaaacaaatggctgttctctcacaaataaatgacaataagcctgttggttgctttctgaattcacactgatagggctcccttccagggccctgagtgtgcagctgttccttcttaacacagactcaacaggttcatgacattattttttaatggagtttctatagaaattatgttttaaaaattcycatctgcatgagatatgtttgaatctcatatattgacatgtacacattaatttaaaattagaacttttcagcattaaagagggacaagcattaaatattgtacattaatttatatacattgacaggaacaatcatattcggagaaattagaagatatcacttgtatgcatatcattttaagaaataacagggagggaacacttttttaaaaactactgtgaagttgtcagtattaagaggatttaatagaat

SEQ ID NO: 792241 - DNA, 596 bp, Homo sapiens
ctagtaatctccaactgttgtccagtcagttatttgtatccactagtgactgtctcaaaattctccttgacttcttatcaggaagatggggaataatttttttccatctgataggtgtggaacaaagcagcctcaccctgaggctgacttcagtatgtcaaacaaatggctgttctctcacaaataaatgacaataagcctgttggttgctttctgaattcacactgatagggctcccttccagggccctgagtgtgcagctgttccttcttaacacagactcaacaggttcatgacattattttttaatggagtttctatagaaattatgttttaaaaattctcatctgcatgagatatgtttgaatctcatatattgamatgtacacattaatttaaaattagaacttttcagcattaaagagggacaagcattaaatattgtacattaatttatatacattgacaggaacaatcatattcggagaaattagaagatatcacttgtatgcatatcattttaagaaataacagggagggaacacttttttaaaaactactgtgaagttgtcagtattaagaggatttaatagaat

SEQ ID NO: 792242 - DNA, 547 bp, Homo sapiens
cttcctgatagttttaaccctcctctccctatcttttctgtctgctctaaggggaattcctttcttcccattgcttttaattatctctgaccctttaagcatcacataaatctttccttaggtaaaatattatattcccccaaaaggttctctctgcttaattctctctgctattgtctcattatcttaggcttagcatcacctcttgacacacctctcgccttgatagcacatctcctcttatattttcttatctttttcttattttttcattactttcttccttcagtgaccacgatagtgcctcatgcaaaggagacattctacaaatgtgttgggaatggaaagcagataaagatgtgatcgagaygaaagagaaaaatggcatttggaattctcccttcagagatcaaagttaacagtatggtgatacggcatccaaggaagacagaaataactgatttcaagacagcgaaatttctacaatttaccagttatttaaaagctagcaaacaaacaacggcatactcaccttcatctgttgggg

SEQ ID NO: 792243 - DNA, 587 bp, Homo sapiens
ttgacacacctctcgccttgatagcacatctcctcttatattttcttatctttttcttattttttcattactttcttccttcagtgaccacgatagtgcctcatgcaaaggagacattctacaaatgtgttgggaatggaaagcagataaagatgtgatcgagatgaaagagaaaaatggcatttggaattctcccttcagagatcaaagttaacagtatggtgatacggcatccaaggaagacagaaataactgatttcaagacagcgaaatttctacaatttaccagttatttaaaagctagcaaacaaacaacggcatactcaccttcatctgttgggggaaaattattttttgtcattgctcacttcaacatgggmgcaatgagagataagagacactaagaaatgagtgtagaaatgaatatttttgctcattctgctagaaaatataatacttagtagaaacagattcctgaattgctacactttaaacatgcaatcacattttactattatatgctatacacatactctaaatgttgtaagcttaatatttcagattgtataagagattttgaggcatgt

SEQ ID NO: 792244 - DNA, 545 bp, Homo sapiens
tgtagagtgaggtcccgcttcctggttcatagatgactatcttctgtgtagtagaaagaggactaagggctctctaaggtttcctctataagtacactaatctatttataaggggtgtgcttcatgatctaatcatctcccaaaggccctacctccaaatgccatcacgctgaagattaggtttcaacacatgaatttgttgggggcataaacattcagtccattscaacacttacgaaaacatataattcagaataagaaaatatttttaaaatttcttgagtagtaggtatgcacagcaaacagtttttgagtgttttaactgtttctcctaatttatttaatttcttatttttccatcagataacattatttgcttattttgctaatagtgaaatgggaaaaataaccattccacaactgtgtagtgtattaatttgttaatctcattaagcaattggaagaatgaaatcactaactgttattgttgtttggagagtgaagatgtctccaccaaagcatagaaaaggatctgtagatgtaca

SEQ ID NO: 792245 - DNA, 624 bp, Homo sapiens
accaaccatatttatgattatatgtgtgaacgtttgtgctcatggacacaggcaattcagagatggtccatatttgatttaaaataatgaacatgaaatttaaaaatagtctgaatttggtagaatgcattcagggaattttaagacacttaattcaactcaaaacaacttcgaattcacatatatctaaaatacarcacttcatttgccaaaagtacatgtaggaactattaatgactctctttaagatttatatttttaatcagtcttttgtcttataaagttagtagcagcctattgagtaaattaacatcttactgactattctgttattttgatattaaaattattcattcagaccataagttaccatctagtcaaataagactctaatgacaatatcatccattaatgttgatggaaaaatggcacagattttagttttgtgtgtaaagacttattttgtttgtgttatgaattgaactgtttcttctaagtgtggctaaaactcctggctattgtggaaagtctcttagattttacacaatctggtatatgaatgtatgttttatgtgtgtaaacaaatatgaatactgtttcagctgtaacaggactttgtcattc

SEQ ID NO: 792246 - DNA, 634 bp, Homo sapiens
gttgattttcccagatagtgactgccacattcactgtaggtcctttcctttctgctgtataatttagattcttaacactaaggaacattgcctaaaggagcacttgctcttaagttctcgaaggatgctacagctcctgaaggatgctgtctgctgtacagttttacttgaatatacaacaggtggctctaaatcactatgcatcaaactatgttctttatctcttcccccaaacttgaagtgctttctcaagtatcagttaatgagttgacattagctaagtttacttcctttccttcagcacctccctttccrtcatccatcctccataatatctctagctttcaacaccttggactagctacataattcatgaggccagtgcaaaatgaaaatttggaactccttgttcaacactactaagaatttctagactgtgacaaagagaacattcaaccaaatgtggacccttgtgagcgtgggtctctgtgcagctgctcagactgctcatccatgaagccagcatttctgtcacctctttctctaattttctgaggactcttgtcctccactcttgaaaatcctttctctgtcatccttttctgtattctctcctcaccctcacagtctatct

SEQ ID NO: 792247 - DNA, 542 bp, Homo sapiens
tgctagactagaaaagtaatcatcctcctttatgtcataaagcacagctatgtttttgaatgccctttaattgtcatagactattcagaacaaaattaaagcaactataaatgcaagcaactacattggattactgaatttgaattattagcttatttaaaaaataagrtcacctaatcgcctcctttcttcctgtgattgattaatttgtcttgaggttttagttctttcttctggcagaaaagcattactattagaggggtagggttgttgtcaactcccacagtcatatccggctgctggatgttggctcagagtattttcttggtacaattgagcagagttttcatgagatgtttcctggatggtgacaggtgaccattgtggggctcttgcctggccagggacagtggaggaagcttggtctcagagtaagaacgtgagggaagtgcacagctgagaacacaggatggttctttcacggtctcgcccctgctgccttgctgggaggaaacagccgtccccagggagctggttttctg

SEQ ID NO: 792248 - DNA, 542 bp, Homo sapiens
tgctagactagaaaagtaatcatcctcctttatgtcataaagcacagctatgtttttgaatgccctttaattgtcatagactattcagaacaaaattaaagcaactataaatgcaagcaactacattggattactgaatttgaattattagcttatttaaaaaataaggtcacctaatcgcctcctttctycctgtgattgattaatttgtcttgaggttttagttctttcttctggcagaaaagcattactattagaggggtagggttgttgtcaactcccacagtcatatccggctgctggatgttggctcagagtattttcttggtacaattgagcagagttttcatgagatgtttcctggatggtgacaggtgaccattgtggggctcttgcctggccagggacagtggaggaagcttggtctcagagtaagaacgtgagggaagtgcacagctgagaacacaggatggttctttcacggtctcgcccctgctgccttgctgggaggaaacagccgtccccagggagctggttttctg

SEQ ID NO: 792249 - DNA, 490 bp, Homo sapiens
tgcaccaatctctcaaggcttttaaaaaatgtgcagtcctcacacaagtcaaaagtgccgaatgtcagccagccatggggtccctgccaaagagagctgctctccaggcccacccacagcatcatcacaattccaacctgaagcagcaacacatatgacacagcctccaccccattccgttaggagcagctgtcatgtggctgggggctgaggtttgtgtgtggactggaaggagagaggtgggggctcgcggtcctcwgagctgaactctccctctcattcggcaccttcacccacaagccacctttgtccttcacaaaagccacctgggctctgcctcagacagacagcagttcacagcatgcaggccaatctcttagctaacttcacgggaacgagcacttacattctccctcctccaggcccaagatttcataaccagaaactccagcatcctctcctgggctgcactgcagttgttcaggtaaag

SEQ ID NO: 792250 - DNA, 642 bp, Homo sapiens
agcagcctggcttcttgctcacggatgtctcacgctccctgttgccttgaagcttggtgtgaggaaggttaaatggcggacagtaaaagccagatcccaattcagtcttcctcatctctgtctttaaaggtatctaatattttggaaatcacctcgctaggaacttgtacaaagctactgtccacagtaacaccgagtgtctgatgctggtcctggaaccactggctaccagggccacytgatggccctagcattggctctggggcgggcgggacgtgtgggccgggtttcaccacgccggggttattgtctgtcgtctctccagttaacaaagggctggtgctatctggacatcctgcactcccccaagactccccggtttggaatgattatttgggcgaatgctgaacacacatccgcaattaaaaaaagaacaacaaaccacaagaaactgatctttctttagtctggtggaaagataatgcatggctcatttgtccagacatgaagcccgggtcctgggtgagaggaaaccaagtgacattaaagtccattccagagaagtgactcagctggcgccctgttctcatgacatgggcgaaaacagcctccagaacactggttcttcccaacagcacttgt

SEQ ID NO: 792251 - DNA, 626 bp, Homo sapiens; identical to SEQ ID NO: 790661

SEQ ID NO: 792252 - DNA, 628 bp, Homo sapiens
tcccttctggaaggtcttggataaaaccggatctacagctcgggtggatataattggcaggcagctcatctccgccaaataaccaaggcagaaggacccacagatgccgcaacgcctgagtcacactggcctgctgcaccctccaattcctaacaatacttaaaacatttggcattcttgcaggcagcctgtccaacagatataatccaagcaactaagttatctgaaattatcttgtagccacatcaacaaaaataaaaagaaacaggtgaaagtaattttaatatgttttatttaaccccatatagccaatatattttcaacatgtaatcgatataaaaatatgattaatgttatattttgtatctttttaaatactacttcttggaagcctggagggtatgtcacactcacaatacatctctcagtcagygacacttcaaagactcaagagacacctgtggctggtgactactgaattggatggtacaatcaggggttctgattcacttgcctttgaattgttatttatttataatacctcatgaaatgatagtaagacagaaatgaagacagactgtattactcaaaacatttgccttttaccataacaggataaacaacgctt

SEQ ID NO: 792253 - DNA, 603 bp, Homo sapiens
gtttgagtcagtgcataggaatgcctatagctgtatgattttcatatttttccataaaaacacacagaaaatacagttttcttaatataaaatgatagaatgcttctaatgctaactaatttttctttttagcaagtattcaagtgtatgatagaacacattgatttatttaattttatgtaagttctctcaattgtcagtctttaatattctgtctagccttgaaggcatcacagtaaatgcaactgtacttcaaaaaattgagaaatcaataaatatgttctgcaaggtgctactgtcagattcaattaatgaatcattgtcctggaacttataaagtttatttccaggttttataggaagtcagtgtaaaaaaattaaaaacttatccattttattattttcctaaattagaaatccacctcyaagcttcatccaagggctcacttctgcatgaagccatccttatgcaggctctgaagtattgtagaaattatcctttttttatttttatttgaccccacttgtcattttagaatctgtagttctacttccacagtctccccaactatttctacaaattacaatggggtgtctcacatg

SEQ ID NO: 792254 - DNA, 603 bp, Homo sapiens
gctttattttactcatggtagcttaccttcttcacatctatatgagtttgtatataagttttatagaaatatatatcattcaaaagcaaaacttcatctcaaaaaaaagaaatatatatcatttatatatgattgtatactttatatttaacataagttatttatattgaaagttattaagatgtctttataaaagattatggtatttcagaaacttttatttttgttttcaggggtcgacagagatcatccgagcaaaatcttagcattgtgagmgagccctctgaaaatcattctaattcagatgtttctcatgagatttttgaacgccacaattatattttcaaccgagagctcttgtaaatttgcagttgttggctacatgataacatctcatttcaaaacgtctttgtctggctggtttatctacttctctaccaggaaatctgttgaacccatagtggtttctgtacaaatgtttctgcatttctcaataaacagtgatggaagaatgggtccacttcactgcctcacccaggagacagcagcagctgaaacaaaaggagcatagccaaagcagaactggtgtaaagataataaaac

SEQ ID NO: 792255 - DNA, 599 bp, Homo sapiens
ctgagattacaggtgcctgccatcatgcctggctaattttgtatttttttagtggagatggggtttcatcatgttggtaaggttggtctcgaactcctgacctcaattgatcaactcacctcagcctcccaaagtgctgggattacaggcgtgagctactgcgcccagcctttgagaaatatttttaacagaatctgagcttatattcttggccmcctataaagaagcctatacttttgaacacacatacccaaacaaaacaatattgtgatgaagagatggcaaaataaatcactatttcacttatgtaaatttggttagaaagttaaaagaaaaatactcaaagaattattttacaaaagtggaaagatcttcaattaagctaccaaaaaatcacctggagaatacaagatgtttctaacaatagcaatgattaattgattcaaaattttaaacatttcaggtttatagttaagctttagatgagttgtataatataaaatgctgcccatttaacactttggctatgctttgtctcaaaatatttcagtttttttaaagaaatttcaatgtgcattctaaaaaatttaactcctgtc

SEQ ID NO: 792256 - DNA, 576 bp, Homo sapiens
acagagacaagtatttggaaaaggtaggagtatttttaattatcttttcaaataattacggctattcttctttgatactacaccagaattccgtaagtgatagtttagtaaaagttagtcgcaatgtggaatctgaaatcatattaatgaaccttttgtactctgtgacattaaaatccaatggtctttcttgcgattaaaatagattttttacctatgtatgattttataacatcatgcattggtcatttggaatatattggttcactgagttaattacttcttccaaatgtggacacattttacttcaaaatatcaaaaaaaaaaaaartgtgtcagtatcacccccagtctcagtaagtgctgggaaagtgttgaactcacagtgacagactcaagtatctaattttatcttgaaaactgaaactttatgattggcaaaaaactgtcggttgttttcttaaaagttgcaggctcctaacaggcaaataacatgtgaagggggaagcacatagcaacttatattatgaaaatagtcttgaccgcaaggatcccctgaaagggtcttggacaacc

SEQ ID NO: 792257 - DNA, 462 bp, Homo sapiens
agaattccgtaagtgatagtttagtaaaagttagtcgcaatgtggaatctgaaatcatattaatgaaccttttgtactctgtgacattaaaatccaatggtctttcttgcgattaaaatagattttttacctatgtatgattttataacatcatgcattggtcatttggaatatattggttcactgagttaattacttcttccaaatgtggacacattttacttcaaaatatcaaaaaaaaaaaaagtgtgtcagtatcaccmccagtctcagtaagtgctgggaaagtgttgaactcacagtgacagactcaagtatctaattttatcttgaaaactgaaactttatgattggcaaaaaactgtcggttgttttcttaaaagttgcaggctcctaacaggcaaataacatgtgaagggggaagcacatagcaacttatattatgaaaatagtcttgaccgc

SEQ ID NO: 792258 - DNA, 646 bp, Homo sapiens
ctgtgtgacaatggaaattcaggcacctccttgcatgtttctgaggctaagttctcgcaagtccttggtgacattttttacctgtcattctgggcactactcttataccttcccacatctctgcccaaagtgtggatacagccttttgtctccacattccaaccacaggtggctactgtagcaaacttcactgacagtgcgggataacatatgtgtttcataatccaaaaagaacaaaattagaaaccagatagcaatgctccaagagctttcattgattgtagaggcctatcaaacaccttgtaagttaaagtgctttgttactgattacgttgcctaccttatataaaaacagccctagttgttgttcaataagtataaagtttcagttatkctagatgaatacgttttagagatccaccatagaacacagcgccgaaattaacaatacacattgtgcccttcaaaatttaataagaggatagctctcatactaagtgttcttatcactaaaaaacaaacaaaaacagaagaacacatagaaattctgggaagcgttgaatgtatcttttcccttgagttgtggtaatagtatcacaggggcttgcatatgtccaacctaatcaaattgcacacatcaaaccga

SEQ ID NO: 792259 - DNA, 646 bp, Homo sapiens
ctgtgtgacaatggaaattcaggcacctccttgcatgtttctgaggctaagttctcgcaagtccttggtgacattttttacctgtcattctgggcactactcttataccttcccacatctctgcccaaagtgtggatacagccttttgtctccacattccaaccacaggtggctactgtagcaaacttcactgacagtgcgggataacatatgtgtttcataatccaaaaagaacaaaattagaaaccagatagcaatgctccaagagctttcattgattgtagaggcctatcaaacaccttgtaagttaaagtgctttgttactgattacgttgcctaccttatataaaaacagccctagttgttgttcaataagtataaagtttcagttatgytagatgaatacgttttagagatccaccatagaacacagcgccgaaattaacaatacacattgtgcccttcaaaatttaataagaggatagctctcatactaagtgttcttatcactaaaaaacaaacaaaaacagaagaacacatagaaattctgggaagcgttgaatgtatcttttcccttgagttgtggtaatagtatcacaggggcttgcatatgtccaacctaatcaaattgcacacatcaaaccga

SEQ ID NO: 792260 - DNA, 661 bp, Homo sapiens
acttgcctgggatcccctttggagctgctggctgctgtctctctgcctccctccttcttcaacgcagcagtcactttaatcttagctgtcatgggcgggtggactttgagggacagagggctgcccagcctgcctggccctgctggaggggtcttgtccatccccaccctggcaggtgcatggaccccatcctcaccctccctgcgttgtgtgcaggagacaccagtgccagcctccggtggccctccatgcactgcagccaccttgtcactgcgagtctggaccgctgtgtgccatgctggcctccctcgattctgcagaccttagacttgcaggcagaggctagctgatcagtgaagggctggcgctcaggcctgggggtctggcaggcgtaggctccaattccgttggaatcagagggtccttgggggttgtgtggacatctcatttaaacactmaatccggaatcagaggaagcccggctttccccacagagcaggcgccaggggagagtttcaaaccaagtagctggatgcatgagggagaaggcggcctaggagcaagagcgagagcggcaggacaggagggatacgagacacagcagctcacgggaggggatgtgggtgaccccagcaagggccaggcaccagaaaaggacaga

SEQ ID NO: 792261 - DNA, 661 bp, Homo sapiens
acttgcctgggatcccctttggagctgctggctgctgtctctctgcctccctccttcttcaacgcagcagtcactttaatcttagctgtcatgggcgggtggactttgagggacagagggctgcccagcctgcctggccctgctggaggggtcttgtccatccccaccctggcaggtgcatggaccccatcctcaccctccctgcgttgtgtgcaggagacaccagtgccagcctccggtggccctccatgcactgcagccaccttgtcactgcgagtctggaccgctgtgtgccatgctggcctccctcgattctgcagaccttagacttgcaggcagaggctagctgatcagtgaagggctggcgctcaggcctgggggtctggcaggcgtaggctccaattccgttggaatcagagggtccttgggggttgtgtggacatctcatttaaacactamatccggaatcagaggaagcccggctttccccacagagcaggcgccaggggagagtttcaaaccaagtagctggatgcatgagggagaaggcggcctaggagcaagagcgagagcggcaggacaggagggatacgagacacagcagctcacgggaggggatgtgggtgaccccagcaagggccaggcaccagaaaaggacaga

SEQ ID NO: 792262 - DNA, 668 bp, Homo sapiens
ggaagctccacgtaggtcgggaagctgtggctccggaggctctagtcataaaaacatgtgcttcctcctcctaaaggagtgacttagccaaacccaagccaaagccagttccagtctagcctgcctcttcctgctttgtgaccttcagctcatggctcgccctttctgagcctcagttgcgtgtgtgttgtgtctagagcagaggtgatgtggtcacggcttcctcagagtcagtcagcccccacgtataccagctttgcccgcagtctggggctcggtctggccaccagctrctgccgctgctgttgtccttggggttgtgtccctctttctttcggctagtttggttttttggttgtttttcattgttttgttttgttacttgtttattctttttagagacagggtcttcctctgtctcccaggctggagtgcagtagtgcagtcagcttacttcaacctcaaattcctgacctcaataatcctctggcctcaacctcccaaagtgctggaattacagacatcagccaccttccccggcccccagtttgttgttgttgttgtttgtttgtttgtttgtagagatggggcctcgctatgttgcccaggctggtctcgaactcctgggttcaatggatcctcccgcccctgcctaggacatatttcat

SEQ ID NO: 792263 - DNA, 638 bp, Homo sapiens
ttgaggaattgccacactgtcttccacaatggttgaactagtttacagtcccatcaacagtgtaaaagcattcctatttctccacatcctctccagcacctgttgtttcctgactttttaatgatcaccattctaactggtgtgagatggtgtctcattgtggttttgatttgcatttctctgatgaccagtgacaatgagcattttttcacgtctctgttggctgcataaatgtcttcttttgaaaagcatctgctcatatcttttgcccactttttgatggggttgtttgattttttcttgtaaattggcttaagttctttgtagattctggatattagctctttgtcagatgggtacattgcaaaaattttctccctttctgtaggttgcctgttcactttgatgatagtttcttttgctgtgcagaagctccttagtttaattagatyccatttgtctattttggcttttgctgccattgcttttggtgctttagtcattaactccttgcccatgcctatgtcctaaatggtattgcctaggttttcttctagggttttgatggttttaggtctaacatttaagtctttaatccatcttgaattaatttttgtatagggtgtaagaaagggatc

SEQ ID NO: 792264 - DNA, 630 bp, Homo sapiens
acattccaaggtaagggggttgagatttcaatataaaaattgggggagaacacagttcagcccataacacatgctaagtgtgtgctttgggaaaattcagagaagagtgagctactctagatattgctaatagtagaattcactcacaaatcaactgattaacaatgacatacttgccatgtgtggttactgataatccaagaatgagctatccttcccagaatgtacggtgacaaatggaggaatcctgatgaagacatatagaaacagtaaataaaatgatggaacacatttatgtcttcatgaaaagcactwagaaccaagtacagaaattctttggtgcagttgttcaattccattctcaggtgacaaacaaagccaacagctatgagccttctgatgattctgcccttttgaagtaactaagtttgcacaatgacatttactatacttttaggaactggcatgcctaggcttaatgcatctttgttgagacaaaaaaaaaagttatggtttctataagagaatctgttccaggagaaagagaatgacatattggatatgttagataagcaaaatatgctaagttccttggggtcctaattaacatattccagagaaaagtcccac

SEQ ID NO: 792265 - DNA, 546 bp, Homo sapiens
agacatataccatgttcatggattggaaaattcaatatcattaaaatggcaattcttcccccaaaagcaagccacagaacaggagaaatgtatttggaatgcagatatctgacaaaagacttgtatttagaatatatgagaaactctggcaattcaataagaagamgacaattacaaaaataagaggcaagatctgaacagacatttcacatcaaaaaaataagaatggcaaaaggtacatgaaaagatttcacatcattagtcattagagaaaagcaagctaaaaccacaatgggaaacccctacttagtaggctgactaaaatttaaaaagcgaataccatatgtttgcaaagatatgaagcaactagattggtcatataccactggtgggactacagattggaacaaccactttggaaaagagttttctagtttcttaaaaagctaaatgtacaggccgggtgcagtgactcacgcctgtaatcccagcactttgggaggccaaggcgggcagatcacctgaggtcaggagttcgagaccagc

SEQ ID NO: 792266 - DNA, 641 bp, Homo sapiens
tgataaaatagactttacattttaaaaaattataagagaaaaatatatacattacatattaataaacattgatactgcaagatacatagcagttataaacatttacacatctaataacagaccttcaaaacatcctctgtgctccattgattcatgcctccttaccctaagggtggctcaaaataaaactataaatgtaatacatcagattaatataacaaaagggaaaaamcacatgatcaagtcaattgatgcagaaaaggcatttgacaaaatcctatacccttccataattaaaaaaaaaaaacaactctcagaaaactagtattatagggaaaattcctcaacatgataaaatacctaaacatgataaaaacacatccaatattgtactcaagggtgaaagactgaaagctttcccttaaaatcagaacaagacaagggtgcctgctttcaccacttctactcaacattgtgctagaagttctagtcagagttaatagataagaaaaagaaattttaaaaattgaaaaggatgagaggaaactacctctaatcacaaatgacatgatattgtatatagaaaattctaaaaaatccgcaagaaatctattagggtgaataaacaaatgcagcaaggt

SEQ ID NO: 792267 - DNA, 611 bp, Homo sapiens
gaaatatttcatgacaaggaagagttgaacttcatttttgtcttattttaagaaatttcctcaactaccccagtcttcagcaaccaccatcccaatcagtcagcagccattaatatcaaggcaagattctccatcagcaaaaagattctgacttgctgaagactcagatgaatgttagcattttttaaacaataaagtctttttaaattaaggtagatayattgcttttttaggcataatgctattaaacacttaatagactacagtatagtgtaagcataatttcttttttttagagatggggtctcactgtgttgcctaggctggagtgcagtggtgcgatcatagcccactgcaacctggaactcctgggctcaagcagtcctctcacctcagcctcataagtagctaggactacaggtgtgtgccaccatgcccagctattctttttttcttagagatggggtctcactatgttgcctgggctggtctagaactcccggcctccaacaatcctcctgcctcggcctgtaagcctaacttgtatatgcattgggaaaccaagcaattcatgtgactgactttattgtgttatttgctttattgcagtt

SEQ ID NO: 792268 - DNA, 718 bp, Homo sapiens
ggattccctttgctccacatcctcacgaacacttgtctttttggtattagccactctaacagataggaagtgatatttcattgtggcattaatttgcatttccctgatgattagtgatgctcagcattttttcgtatgtctgttggctatttgaaagtctttcagaaaatgtatattgaggttctttgttcatgatagtttcttttttgttttgttttgttttttgagaggagtcttgctccgtcgccaggctggagtgctgtggtatgatcttggctcactgcaacctccgcctcctgggttcaagcgattaccccgcctcagcctccttagtagctgggactacatgtgtgcaccaccatgccctgctaatttttgtattttcagtagagatggggtttcaccatgttggccaggatgatctcgatcccttgacctcgtgatctgcccctcggcctcccaaagtgctgggattacagatgtgaactaccgcacccagcccatgatagtgttttaatgttcttctttgtgcattgtctctgtttcttccaagctattttggtcttttcttattaaagrtttttcttaaatatggtgactctaggaaatgtattaatacttaagagtaaagtaccaaaacattgactgtatgatctgtctgtattggcagatctttgcttatagggagatcaggtagggaacaggctctttttttggg

SEQ ID NO: 792269 - DNA, 542 bp, Homo sapiens
ataaagaatgaaataggctaagtgaaataagcctggcatgaaaggatacatattgtatggttccacttacatgaaatatctagattaggaagattcttagggacagatagtagagtagaggttaccagagccttggggaaaaaggcggtgggattattgtgtaacgcaggggtccctgcrtcagcaccggtacgttaggaattgggccgtacagcaggaggtgagccacaggcaagcgagcattaccacctgagctctgcctcctgtcagattagcagtggcattagattctcataggagcttgaacactattgtgaactgcgcatgtgaaggatctaggttgcatgctccttatgagaatctaatgcctaatgaatgatctgaggtgaaacggtttcatcttgaaaccatccaccatctgccccttcccccagcccccgccctgcacctccaccccattatccgtggaaaatttgtcttcctcaaaaatggtttctgatgccaaaaaggttgggaaccgctggtttaatggattcagagtt

SEQ ID NO: 792270 - DNA, 623 bp, Homo sapiens
cttgtgacaaaggattgttaatctttgtgtcactactgtcttctaaagaatgtatattattatcttcagagtgaaatttaaactaagaatgattttgttcttaagatattgggaaatctgaacattttctgggtctmttaagtcctacgtctgtttggtaaatattattaacttgttcccttaactgtaaataccctgttgactaagaatgcctaacctcctacaaacgaaacccagtaggtctcaacctcattttacccagtgcctattcatgatggagtcactctggttcaaatgcctctgacatatattccccctcccttttgcaaggagaccttaatcctaagggttgtagagggatgaagaaccatcttctgtagctttttcagtctcaacaggggtgatgatattcctgcctaactattagagtatcttgttttcagggtatggaggagttcagtcagaaggtgccagtatggtgagggtcattcacaactctgaatcctgataaaacgtgatatctggaagattaataagtgtccaatttaagaaagcattgagtaagcttatctctaattcctatacaaagagtacaacagcaatatatcccacaatagcaaagc

SEQ ID NO: 792271 - DNA, 623 bp, Homo sapiens
cttgtgacaaaggattgttaatctttgtgtcactactgtcttctaaagaatgtatattattatcttcagagtgaaatttaaactaagaatgattttgttcttaagatattgggaaatctgaacattttctgggtctcttaagtcctacgtctgtttggtaaatattattaacttgttcccttaactgtaaataccctgttgactaagaatgcctaacctcctacaaacraaacccagtaggtctcaacctcattttacccagtgcctattcatgatggagtcactctggttcaaatgcctctgacatatattccccctcccttttgcaaggagaccttaatcctaagggttgtagagggatgaagaaccatcttctgtagctttttcagtctcaacaggggtgatgatattcctgcctaactattagagtatcttgttttcagggtatggaggagttcagtcagaaggtgccagtatggtgagggtcattcacaactctgaatcctgataaaacgtgatatctggaagattaataagtgtccaatttaagaaagcattgagtaagcttatctctaattcctatacaaagagtacaacagcaatatatcccacaatagcaaagc

SEQ ID NO: 792272 - DNA, 623 bp, Homo sapiens
cttgtgacaaaggattgttaatctttgtgtcactactgtcttctaaagaatgtatattattatcttcagagtgaaatttaaactaagaatgattttgttcttaagatattgggaaatctgaacattttctgggtctcttaagtcctacgtctgtttggtaaatattattaacttgttcccttaactgtaaataccctgttgactaagaatgcctaacctcctacaaacgaaacccagtaggtctcaacctcattttacccagtgcctattcatgatggagtcactctggttcaaatgcctctgacatatwttccccctcccttttgcaaggagaccttaatcctaagggttgtagagggatgaagaaccatcttctgtagctttttcagtctcaacaggggtgatgatattcctgcctaactattagagtatcttgttttcagggtatggaggagttcagtcagaaggtgccagtatggtgagggtcattcacaactctgaatcctgataaaacgtgatatctggaagattaataagtgtccaatttaagaaagcattgagtaagcttatctctaattcctatacaaagagtacaacagcaatatatcccacaatagcaaagc

SEQ ID NO: 792273 - DNA, 616 bp, Homo sapiens
taatatatttatgttgctttaatcaaccatttacctcgaattattgtgataacatcataagcatgtaatcttgatcacagaaatttaacttttgaaaattttttatttatactgcctttccttgcagagaagtttgatgaggtgattaacaacagaaacacacttaggtgtatggcccacagawcctataaagcaagtactcaatggaaactacaaagcaactagttaacaatttcatcatgggaacaaaacttcacatatcaatactatccttgaggcggggcacaggccggagtcctgacctcccaaatcaatactaactttgggaggccaaggtgggcaaatcacctgaggtcgggagttcaagaccagcctggccaacatagtgaaaccccgtttctactaaaaatacacaaattagctgggcatggtggcgtgcacctgtaatcccagctactcgggagtctgaggcaggagaattgcttgaacccggtaggcaaaggttgcagtgagccgagatcacaccacagcctgggctacagagagagactccatctcaaaaagaaaaaaaaaaaatactaaccttggatgtaaatggccaaaaaatcccacttag

SEQ ID NO: 792274 - DNA, 616 bp, Homo sapiens
taatatatttatgttgctttaatcaaccatttacctcgaattattgtgataacatcataagcatgtaatcttgatcacagaaatttaacttttgaaaattttttatttatactgcctttccttgcagagaagtttgatgaggtgattaacaacagaaacacacttaggtgtatggcccacagaacctataaagcaagtactcaatggaaactacaaagcaactagttaacaayttcatcatgggaacaaaacttcacatatcaatactatccttgaggcggggcacaggccggagtcctgacctcccaaatcaatactaactttgggaggccaaggtgggcaaatcacctgaggtcgggagttcaagaccagcctggccaacatagtgaaaccccgtttctactaaaaatacacaaattagctgggcatggtggcgtgcacctgtaatcccagctactcgggagtctgaggcaggagaattgcttgaacccggtaggcaaaggttgcagtgagccgagatcacaccacagcctgggctacagagagagactccatctcaaaaagaaaaaaaaaaaatactaaccttggatgtaaatggccaaaaaatcccacttag

SEQ ID NO: 792275 - DNA, 552 bp, Homo sapiens
tttcatttgctaatttatatggggtcctattcacaaggtgaagctacttattagtggctatttgtctatttaaggaatgattttgcctctgcagtgattaaactttcaaatgacatttccccacacataaaccagttagtttcgcctgccgtagaagggtgaaagacttctatggaacacggtattttaaattaaactcttctataaatggagtgacaaaattttaactggaagcactttttgagaccatatgtggtaaattgaaaaccaaaacataaccagagaggctttgccaagccaacacaactcctggttttccatctctaaccgtgtagtggtcagcacggaaggctgcacagttcttggctgagatggatcttgtgctgacagcggcaacagrgaggctgcagcaaggccgggactttgcacctcaatctcttaaatgtgggcttcctgcttgccctctttttccttttggcctccaaatataagcaatcactcagtactctaactcaagtcctatcctctttctttcttactacaggccaagag

SEQ ID NO: 792276 - DNA, 611 bp, Homo sapiens
tctataaggcacttaaacaaatttacaagaaaaaaccaagccctttaaaaattgggcaaagaacataaacagacacttttcaaagaagacatacatgtggtcaataagcatatgaaaaaaatgcaatatcaccaagcattagagatatgcaaatcaaaaccacaatgacataccatctcacaccagtcagaatggctattggtaaaaagtcaaaaaataacagatgctggtgaggttgcagagaaaatggaatgtttatacactgttagttggagtgtaaattagtttgaccattgtggaaagcagtgtggcaattcctcaaagagctaaaaacagaactaccattcaacccagcaatcccaatgctgagtatatacccaaaggaacgtaaataattctaccatgaagacacgtggacacacatgttcaytacagcactatttgcaatagcaaaaacatggaatcaacctaaatgcccatcagtggtagaatgggtaaagaaaatgtggtacacatatgctatggaatactacacaaccatgaaaaataacaagatcatgttctttgcaggaacgtcgatggaactggaggccatcatccttaacaaacta

SEQ ID NO: 792277 - DNA, 611 bp, Homo sapiens
tctataaggcacttaaacaaatttacaagaaaaaaccaagccctttaaaaattgggcaaagaacataaacagacacttttcaaagaagacatacatgtggtcaataagcatatgaaaaaaatgcaatatcaccaagcattagagatatgcaaatcaaaaccacaatgacataccatctcacaccagtcagaatggctattggtaaaaagtcaaaaaataacagatgctggtgaggttgcagagaaaatggaatgtttatacactgttagttggagtgtaaattagtttgaccattgtggaaagcagtgtggcaattcctcaaagagctaaaaacagaactaccattcaacccagcaatcccaatgctgagtatatacccaaaggaacgtaaataattctaccatgaagacacgtggacacacatgttcactacagcactatttrcaatagcaaaaacatggaatcaacctaaatgcccatcagtggtagaatgggtaaagaaaatgtggtacacatatgctatggaatactacacaaccatgaaaaataacaagatcatgttctttgcaggaacgtcgatggaactggaggccatcatccttaacaaacta

SEQ ID NO: 792278 - DNA, 582 bp, Homo sapiens
tagattgtttcaaatttgaactactgtatcaattgggctattagtatccacaatatgcaattttgtgcacttgtttaataactcttagcataaatatttacaagggaaatttctgggtcaaaggtttgggactttttttaggggtggagaggtggttgtttttgttttgagacggcatcccactgtctcgcccaagctggagtgcagtggccyagtctcggctcactgcaacctctgcctctcgggttcaagggattctcatgccccagcctcccgagtaggtgggattacgggtgtgtgccatcacacccagctaatttttgtatttttattagagacagggtttcaccatgttaggtaggctagtctcaaactcctggtgtcatgtgatctgcctgccttggcctcccaaagtgctgggagtacaggtgtgagccactgtacctggtcaaagggttttaagtttacaaattttgacacatcatgcccacttaacctccagaaatgtaccaattcacaattccaccaaaatttatgaaaaggtgctcatttccccaccccattctctttactgaatgtatg

SEQ ID NO: 792279 - DNA, 536 bp, Homo sapiens
atttctaaggtacatatgctactcctttcctaagaatgacaactacaaattacttacattggatattcattgttttggtgtgacccaatatgtacacccaatctgtattctttaccggtcaaagccattagcccagtctctcttcacatagccatgtttcaaggccatatcccacacttttagtcatacattcaagcatatagtgataagagggccaaaccatggtggttctgcccatttttcctggcttggctataccaagaaaagttttgtcactcttaattgagtattgtctgagttgtgatttccttcacttactactctaacatatctgtcttcatggatatcaacaaaytttggtccaagaaatctggtaataaattccaagtgttaatggggaatgccttttcaccctgctctcatattcctattactgaagagcaatctggtttcagggtaggagaagataaaaagagcctgaggggaaataaactcaccatgatagaggaaagaaaccagctgtatttcaaggactt

SEQ ID NO: 792280 - DNA, 533 bp, Homo sapiens
gtgggaggacttctgtgccagaagtgacctggggctgtctttcaggatggcaaagcgacagctgagagttggtgacttgttgtgttctgagttgtgtggtgatgagggttcttcggaaggcgtgctctcttttcctagtgatatcttttcatcttttgtcgtgctggggtctttcctagtgctattttctttggcaatgatgatcttctgttttctgcccagtgtctcactttcttttttggactcctctttagtatcattgtgacactgttccacattttctttcttaaaaaatacattgtccagttcatcttctgagctgctaggctgtgctttttcttttggcttcttcctcttgcgactagcagctgcaragatggaggacacgagcagttccctgctatactgatcctttccagatccccaagaacccttagattttgttgagtcactagtagctgaatctgatacatctcctggggagactcctgtccttccaatgttggtgagtaaatgatctatgtttggcactg

SEQ ID NO: 792281 - DNA, 575 bp, Homo sapiens
actcatccctgttcccttccctacggcaagcaagaagtcagccctccaactgaagagattctttggcaatagttatcagaagaaaatttttcatagccaatacatctgagtagtctctcattttctctcagtcacmttctaggttttatttcctccttagtcatttgtttacatggctgctgtctgccttctcaccctcactaaaatgccagccccacaaaggcagggcttttcacccctgtccccagtaccaacatatagtagatgctcaatacatatttaatgaataaataaaaccaacatgacaaccaagacaggtgatttttcatcagtccataagtcttctaatagggaaatgaagatacgtacataaaattgttaagtacattaaaccaattttgtctccagtcttgatgaatactgatatttatatattgtccactccccataccaggaaactatttttctcaagggaagccactagatattattactacatatactataggtaacataaaacatgttatgttttatatgtaatttctagtatgaaccacagtatataagaagagttc

SEQ ID NO: 792282 - DNA, 661 bp, Homo sapiens
gtgagggatcccctcccagagggacgggccaccccccacggatgaaggggacttcatgtcagccccaccttggcgtagccagggccagtcccataggcccggtctcctcccccaacaccctggccttcccagcccttcagaggcacgggttcccctgcacccgcsgccccgcccacgggctgtgcacccggcattgtctctgcagatgtttctcctctttcccttccctgtccgcacacccacagctagttaaggctattcctatttacacgtcgagtaaactgcgccttcctcggggtcctctgccactggtaactgtctaaatagcaggtgggcctgtagcctgctctcccacaggcctggaccttgcctgcatgcattaccattctttgaaacaaaatatttaaatgattaatctgtttttcccactagactgcaaggcaaggcccatgtctattttgcccaccttgagtccctgccactgagcacagtggatgggggacagtcggtgctcaataaaatgccacctgtggaacagatggggggggaaaatggctgacacctccttagctcctccaggacctcctacaggtcatggtgttattctcgttctccttttccctaacgacttatttgtttctttccggctcctttcattcct

SEQ ID NO: 792283 - DNA, 661 bp, Homo sapiens
gtgagggatcccctcccagagggacgggccaccccccacggatgaaggggacttcatgtcagccccaccttggcgtagccagggccagtcccataggcccggtctcctcccccaacaccctggccttcccagcccttcagaggcacgggttcccctgcacccgcggccccgcccacgggctstgcacccggcattgtctctgcagatgtttctcctctttcccttccctgtccgcacacccacagctagttaaggctattcctatttacacgtcgagtaaactgcgccttcctcggggtcctctgccactggtaactgtctaaatagcaggtgggcctgtagcctgctctcccacaggcctggaccttgcctgcatgcattaccattctttgaaacaaaatatttaaatgattaatctgtttttcccactagactgcaaggcaaggcccatgtctattttgcccaccttgagtccctgccactgagcacagtggatgggggacagtcggtgctcaataaaatgccacctgtggaacagatggggggggaaaatggctgacacctccttagctcctccaggacctcctacaggtcatggtgttattctcgttctccttttccctaacgacttatttgtttctttccggctcctttcattcct

SEQ ID NO: 792284 - DNA, 661 bp, Homo sapiens
gtgagggatcccctcccagagggacgggccaccccccacggatgaaggggacttcatgtcagccccaccttggcgtagccagggccagtcccataggcccggtctcctcccccaacaccctggccttcccagcccttcagaggcacgggttcccctgcacccgcggccccgcccacgggctgtgcacccggcattgtctctgcagatgtttctcctctttcccttccctgtccgcacacccacagctagttaaggctattcctatttacacgtcgagtaaactgcgccttcctcggggtcctcygccactggtaactgtctaaatagcaggtgggcctgtagcctgctctcccacaggcctggaccttgcctgcatgcattaccattctttgaaacaaaatatttaaatgattaatctgtttttcccactagactgcaaggcaaggcccatgtctattttgcccaccttgagtccctgccactgagcacagtggatgggggacagtcggtgctcaataaaatgccacctgtggaacagatggggggggaaaatggctgacacctccttagctcctccaggacctcctacaggtcatggtgttattctcgttctccttttccctaacgacttatttgtttctttccggctcctttcattcct

SEQ ID NO: 792285 - DNA, 621 bp, Homo sapiens
cttatggacttgccttactcatcatttctcccattttcttatcttgcccccaaagcacgcccttggctgctgtaaccccgctgaaagcaatgattgaaaagtcctgtgtttgagatgtgccttcaacttgccagaacataattcatgaaatactacatgtttctttttcatgctagattctgccggggttttctggaggttctggctcttaatgagcacgttgccttgtcaacacacccatttatgggttaattatatatctgaaatatctcagaacaacrcagagaaccacaaagactttccctggacagtcagatgaatctcccctggtctacaatttttataaactgtatttagtgttctctagtacaatggacctcagacccagttcagttcggttctctcagactacagatgagaaaacaggccagaaaggatagcagcttgaaaaggtggttagagcaaaacatgaatccaggaatgctgattctagtccctggaaatccaatcatcagtcctgtcacatttgcataacagcaaggaactaaagcaataaaatctaaactaaatcactaaaaaataagcactaaaatctcttagcagattttccgatgagaaaag

SEQ ID NO: 792286 - DNA, 653 bp, Homo sapiens
gtctacaatttttataaactgtatttagtgttctctagtacaatggacctcagacccagttcagttcggttctctcagactacagatgagaaaacaggccagaaaggatagcagcttgaaaaggtggttagagcaaaacatgaatccaggaatgctgattctagtccctggaaatccaatcatcagtcctgtcacatttgcataacagcaaggaactaaagcaataaaatctaaactaaatcactaaaaaataagcactaaaatctcttagcagattttccgatgagaaaagcatgcaggctcctcctgcaagggttttagggcatttaacttggagttcagaggccagatatgctccatatagctctgccacatttcttgatatgtgagttattttaataccatgcaacataaaacatggacaaaactagagaggaaattcagactgtgaattccaaaacacakaggattttgtggatttggaaatttcctcagaaacttgaagtacctcatggttaatatttaagctttcatttttctatagaaagaactctggttttctgggttccaagtaaataggaatttaacactgtccatactccaccagctgtgctctcctgaaaaaattcagctaagaagcctgaaaaaaattt

SEQ ID NO: 792287 - DNA, 632 bp, Homo sapiens
ggccccgtgctgtgcggccattgaacaattttgggtgggaaacctcctaaggcgctccaggaggctaaagatgatcaagattcctctcaggctaaatttgatttaaagaaaagaaatgaacagttcctgtataccttcatttatgggctgagtgtcctacctacaaggaagcgaaaggagacacaatggaccatggccggggagttggccttgccttgaacgtgaggatgyggcaatcaagcctcatgagtttcttggataataaaaatacatgtgaaccaggcaagcctgaacacccttgataatgagggaaagttcctttttgcaattcttttcagctcttgtatctgattcttagcatgcagtatccacaatggaacttttataatgggtgtggttcttcaggccagcctctcacctcctccctgggcgggctcctgtaagtggggtccacctggagcccgacgcaggagcagcagcagtcaggcttttccgcagcattccattgcagcacgtgttctcagaaacctggattcctttcctagaaaaatactgaagtcttggctatttaaaacaagctaaatagccttctgatttgtttatttcatccagcattttttaaaaatctggct

SEQ ID NO: 792288 - DNA, 610 bp, Homo sapiens
agcagcagcagtcaggcttttccgcagcattccattgcagcacgtgttctcagaaacctggattcctttcctagaaaaatactgaagtcttggctatttaaaacaagctaaatagccttctgatttgtttatttcatccagcattttttaaaaatctggcttgattttctttaaaaacagtcttgtctcgtgatgtggatgtttttctgccccacagctgattaccgcagccttttagatggcactgctgtcagctgagatactttttccttctgcttcagtaaaaatagatgaattctgattggagcttgtggaagtttctctgcattgtcagatgctgatcccccatcaatataaatctttgcccttcttaaaaartattttctaatgaacttttgaaaagctagaggaaaaggaagtgctataaatatccatgaatatatgtaattttttaaatctctggatcgtgtgcattgcttatctgatagagcagatctggggacatggctggagtgagatgggatgcccgtcagtcacccctcctcttgggagtggggcacagtggggtggagtgggtggtcagcatgagtctggccaggaacatttccat

SEQ ID NO: 792289 - DNA, 665 bp, Homo sapiens
gaggagcctcaccaagtttgcttaacaagtgtgttatttctattgactggctcatcattgatgaggtgaagaatgggaattggaggatctgtgtctggctttgtcctaggtaatgggtagggggtggagtgaggggagcatccgtcacttttcctttttttttttttttttttggagacagcgcccagcygcatcacttctatcactcttatctatgttatgtggggaagaagggggtctctcgcagcaagccactttccacaactcacagagaggagatttttatcagataaattcagcagcgtcctacccagcctgaagaagccacccagtcatttcctgttgcacttccttgtttattttcgacacagttctccccacccctgagaattcttgtcacttcttcctgtactgcccacttctactcccccacccccacatcggaagctaatgaggagcttcaggcccctcgctggcatgggccccaccaagaccccatatctcattccgtattcacaattttaccttcttgttcttaaagaaggacatccaaatggaaaagctctcaaccccccaaaacttggatgtgaacctggagcatctgtcatctgtcttgttcactacttgtccacctaccaggatcctaaacggaaccctacgtaggg

SEQ ID NO: 792290 - DNA, 665 bp, Homo sapiens
gaggagcctcaccaagtttgcttaacaagtgtgttatttctattgactggctcatcattgatgaggtgaagaatgggaattggaggatctgtgtctggctttgtcctaggtaatgggtagggggtggagtgaggggagcatccgtcacttttcctttttttttttttttttttggagacagcgcccagccgcatcacttctatcactcttayctatgttatgtggggaagaagggggtctctcgcagcaagccactttccacaactcacagagaggagatttttatcagataaattcagcagcgtcctacccagcctgaagaagccacccagtcatttcctgttgcacttccttgtttattttcgacacagttctccccacccctgagaattcttgtcacttcttcctgtactgcccacttctactcccccacccccacatcggaagctaatgaggagcttcaggcccctcgctggcatgggccccaccaagaccccatatctcattccgtattcacaattttaccttcttgttcttaaagaaggacatccaaatggaaaagctctcaaccccccaaaacttggatgtgaacctggagcatctgtcatctgtcttgttcactacttgtccacctaccaggatcctaaacggaaccctacgtaggg

SEQ ID NO: 792291 - DNA, 665 bp, Homo sapiens
gaggagcctcaccaagtttgcttaacaagtgtgttatttctattgactggctcatcattgatgaggtgaagaatgggaattggaggatctgtgtctggctttgtcctaggtaatgggtagggggtggagtgaggggagcatccgtcacttttcctttttttttttttttttttggagacagcgcccagccgcatcacttctatcactcttatctatgttatgtggggaagaagggggtctctcgcagcaagccactttccacaactcacagagaggagatttttatcagataaattcagcagcgtcctacccagcctgaagaagccacccagtcatttcctgttgcacttccttgtttattttcgacacagttctccccacccctgagaattcttgtcacttcytcctgtactgcccacttctactcccccacccccacatcggaagctaatgaggagcttcaggcccctcgctggcatgggccccaccaagaccccatatctcattccgtattcacaattttaccttcttgttcttaaagaaggacatccaaatggaaaagctctcaaccccccaaaacttggatgtgaacctggagcatctgtcatctgtcttgttcactacttgtccacctaccaggatcctaaacggaaccctacgtaggg

SEQ ID NO: 792292 - DNA, 665 bp, Homo sapiens
gaggagcctcaccaagtttgcttaacaagtgtgttatttctattgactggctcatcattgatgaggtgaagaatgggaattggaggatctgtgtctggctttgtcctaggtaatgggtagggggtggagtgaggggagcatccgtcacttttcctttttttttttttttttttggagacagcgcccagccgcatcacttctatcactcttatctatgttatgtggggaagaagggggtctctcgcagcaagccactttccacaactcacagagaggagatttttatcagataaattcagcagcgtcctacccagcctgaagaagccacccagtcatttcctgttgcacttccttgtttattttcgacacagttctccccacccctgagaattcttgtcacttcttcctgtactgcccacttctactcccccacccccacatcggaagctaatgaggagcttcaggcccctygctggcatgggccccaccaagaccccatatctcattccgtattcacaattttaccttcttgttcttaaagaaggacatccaaatggaaaagctctcaaccccccaaaacttggatgtgaacctggagcatctgtcatctgtcttgttcactacttgtccacctaccaggatcctaaacggaaccctacgtaggg

SEQ ID NO: 792293 - DNA, 685 bp, Homo sapiens
ttataggagtcacagaatggggaaagagagaaagggatagagagagaatatttaaagaaataatggctgaaaatttccaaaatttgacttaaaagacatgaatattagcatccaagaaattcaacaaactacaagtatgatgaactcagagactcacactaagacacattataatcaaactgttgaacaacaaaggcaaagagaattttgaaagcagcaaaagagaagtgactcatcacatacagagggatcctcaaaaaatattagcagatttctcatcaaaaactttggtggccagaaggcagcgagttaatatattcaaagtgctaaaaaattaaattaaaaacccatcaaccaagaattctatattcagcaaaactgtactttaaaactgaagaagaaattaagacattcccagataaacaaatgcagggggagtttgttatyatgagacctgaccttcaagaaatgttaaagggagtcctgaagattgaaatgaaagaacactagacaataactaaaagcaacatcaaggaataaagatctcagtgatggtaattatatgacaattataaaaattagcataattccaacaatgacatgtaactccactgtttgttttctacaagagattactgcattaaaaaaaaaattagtttatgtttttggacacaaaatacataaa

SEQ ID NO: 792294 - DNA, 639 bp, Homo sapiens
tggttccctgttggcctcagacagagcttgcccagaatgttattttcttggctgtgttttcaaattgttgtcatgtttatcctaaggtcataattttattctgcctcataattttccacctgaaggggctgcccaaaacctaactacatgcctgggcaacatagcaagactccatctctacaaaaaactataaatatgagccaggtgtggttgtgtgcctgtagtcctagctgctccagaggctgaggtgggaggatcacttgagcccaggagttcaaggccacagtgaactataatcatgctactgcactccagcctgggccacagggcaagacctagcctcagaaaaaacaaaataaaaataaargtgttttatatgtacaaaaattcttcttaatcttttgatccaaggaaagcatcccctaaccttttaaaataagttcaaaacagtatttttgcaaatctgagtgcagtccgatttctactagagttccaaagtcttggtgaaccacccattcttcttaatcaagttatcatatacataattactagaataacagctctcaaaaattaaaattcacttaacaagaaaattatattgaacacaatacattctttctccagtgactccagagccat

SEQ ID NO: 792295 - DNA, 617 bp, Homo sapiens
tgtctaactttaatgagattaaaaggaattcattctacattttatgatttgttttccgagttcattggtaatacattgcattagtttccaagggctgccctaaccaaatacacaaactgggtggcttaagacaacaraagtggattgtcttgcattctggatgctagaaccctaaaatcaatgtgtctgcagggctgtgctccctctgaaacctgcaggagaaccctttcttgtcctttccagcatctggtgttgctgggaatccccagggacccttggtgtatagatgcgtcactccagtctctgtgtccaccgtcacgaggctttctccctgtgagtccgtatctgtgtctcttctaaggatgccagtcatgtcattgagttttcatgactgaaaactcttggaacattattcttttttcaaaaggaaataggtcaaaattgtaactggatataaaatacataatggggtgatgatattggagatagactagatttttgctctacctttcttcagcacatttatgtttgatatttaagtagaactgtcttgcacttcaatgtttaatgatggccggtgtctggtattctatctggcacatggcaaacactaaata

SEQ ID NO: 792296 - DNA, 617 bp, Homo sapiens
tgtctaactttaatgagattaaaaggaattcattctacattttatgatttgttttccgagttcattggtaatacattgcattagtttccaagggctgccctaaccaaatacacaaactgggtggcttaagacaacagaagtggattgtcttgcattctggatgctagaaccctaaaatcaatgtgtctgcagggctgtgctccctctgaaacctgcaggagaaccctttcttgtcctttccagcatctggtgttgctgggaatccccagggacccttggtgtatagatgcgtcactccagtctctgtgtccaccgtcacgaggctttctccctgtgagtccgtatctgtgtctcttctaaggatgccartcatgtcattgagttttcatgactgaaaactcttggaacattattcttttttcaaaaggaaataggtcaaaattgtaactggatataaaatacataatggggtgatgatattggagatagactagatttttgctctacctttcttcagcacatttatgtttgatatttaagtagaactgtcttgcacttcaatgtttaatgatggccggtgtctggtattctatctggcacatggcaaacactaaata

SEQ ID NO: 792297 - DNA, 610 bp, Homo sapiens
gacaggggaattgttcaaaagaacaacaggtagtgctccacagagcaccactgactgctccacagagcaccaacccaaatgcttgggttgaaacatggaaaaaatcaccaaggcctctcactccgagtccacgccccaaacacaaacacacatttctggaggctttctcagatgatgctgtggtcacctcaaaccatgattcaaatraggcagattttgagtttgtgcataaatgagattaaatgtgtgtgcctttcagagtaaatggtgaaaaggaatagagaaaatatatatttctttgtaatgttctctaatacaagtcagaaatcagacctgaaggccaaaaagtgacattatttcttcccctgctgctccccccttagcaccatgattaaagctctaaatttgaaaatgttaccaggggacagtgatattccccagcctcaaaactcaagactcatcatggtggcttagtctggcaattatgtgtattatgcatagatcaccactgtaaggttagatggggaacacagatccatataactcaacaaagaaacacacacacgcatgtaaacacacacacacacacaccctaaaccataaaacagta

SEQ ID NO: 792298 - DNA, 695 bp, Homo sapiens
cttcccaaactaatttatcccagttaacaaatgcccaatctgaggacagccaggaaggacagagatacttttctgaggtggagagttgcttttgacttgacaaatctctgcagggtataacaaggcaagcatcaaaggtaatagtttggggtgagcttgacttggttacattaatgataaggggattagtgatagaagggggaaggaaagaaatacagaataagagggttaaaccactttagccttagcttggtaggagttggtcctggaacaatggtccatgattctgggaagggtggtgcccacttaactcgagtgtgatgagcccagcccttcttggtggtctgaactgctgctgtcttagttgttaagagcactaaaaaaggtccttcccaagtgggcttgagcctcctttctttccaactcctgatgaggacgtgatctccaggctggtggtggtgaactggaaattcaagaggtggagtctgggctagaatgccttgagtcttgagggaggagagggcagaagacagacctaatatcagtttttgagraattgagtgatggttttcccaattaaaagcaaataggtcccagctgtcctctgctaatggacaagcccagaaggcatcttttaaatctattactataaaccactggtggctgtatgggatcctactgataacagtgtaagg

SEQ ID NO: 792299 - DNA, 614 bp, Homo sapiens
tagaaattctttttttctgcttgatttcatcttagctgttaatttcattgtttatttccctcatgaaattcttcagctccaagatttctgtttggtattttatatctctttgttgaatttcttattcaaatcattaattttcctgatttctttgaattgtctatctgtattttcctgtatctcattgatcccttaagattattattttcaattattaatacttctctggcattttgtacattttcrtttctttaggactctgttcctagagaattattatgcttctttgaggtgtcctgtttccttgctttttcatatttattgtgtccctatgttgatatctgctcatctaacggaacagttgcctctttcagttttataaaatagctttcataaggacttattcctgtagctagatcctagggtattggctggggaaggcacactgattttggttctggaaagatagggtagtgcaatgttcatgcagtgtcttcagctataatttatgttagtgacgcttgcgagtgcctcagtgacctaggctacaggagtttgtggtggcagtgttgtggcttagccagaggtgggcttaccaaattggcttataggca

SEQ ID NO: 792300 - DNA, 614 bp, Homo sapiens
tagaaattctttttttctgcttgatttcatcttagctgttaatttcattgtttatttccctcatgaaattcttcagctccaagatttctgtttggtattttatatctctttgttgaatttcttattcaaatcattaattttcctgatttctttgaattgtctatctgtattttcctgtatctcattgatcccttaagattattattttcaattattaatacttctctggcattttgtacattttcatttctttaggactctgttcctagagaattattatgcttctttgaggtgtcctgtttccttgctttttcatrtttattgtgtccctatgttgatatctgctcatctaacggaacagttgcctctttcagttttataaaatagctttcataaggacttattcctgtagctagatcctagggtattggctggggaaggcacactgattttggttctggaaagatagggtagtgcaatgttcatgcagtgtcttcagctataatttatgttagtgacgcttgcgagtgcctcagtgacctaggctacaggagtttgtggtggcagtgttgtggcttagccagaggtgggcttaccaaattggcttataggca

SEQ ID NO: 792301 - DNA, 579 bp, Homo sapiens
aacttcacacacgttggatgactattgtaaaaataaaagcaacaacagaaaacaagtcctagttgaggatatggagaaattagaacccagaacccttgtgcattgttgatggaaatgtcaagtggcacagctgctgtggraaacagcatggtggttcctcaaaaaattaaacataaaattaccatgttatccagcaattacacttccactttgggtatataccaaaaagaattgaaagcagagacttgaagagatacttgtacactcatgttcatagcacctgtattcacaatagctaaaatgtggaagcaactcaaatgtccatcgatggatgaatggataaacaaaatacagtttatacataaaatggaatactattcagccttaaaaagaaatgaaattctgataaatgctacaacatagacaaaccttgaagacattatactacatgaaataagccagatatgaaaggacaaatattgtatgattctacttatatgaaatacctggaatagtcaaatcccatagagatagaaagtagaatggtgcttattaggggatagggaggaatggggaaat

SEQ ID NO: 792302 - DNA, 579 bp, Homo sapiens
aacttcacacacgttggatgactattgtaaaaataaaagcaacaacagaaaacaagtcctagttgaggatatggagaaattagaacccagaacccttgtgcattgttgatggaaatgtcaagtggcacagctgctgtggaaaacagcatggtggttcctcaaaaaattaaacataaaattaccatgttatccagcaattacacttccactttgggtatataccaaaaagaattgaaagcagagacttgaagagatacttgtacactcatgttcatagcacctgtattcacaatagctaaaatgtggaagcaactcaaatgtccatygatggatgaatggataaacaaaatacagtttatacataaaatggaatactattcagccttaaaaagaaatgaaattctgataaatgctacaacatagacaaaccttgaagacattatactacatgaaataagccagatatgaaaggacaaatattgtatgattctacttatatgaaatacctggaatagtcaaatcccatagagatagaaagtagaatggtgcttattaggggatagggaggaatggggaaat

SEQ ID NO: 792303 - DNA, 538 bp, Homo sapiens
agtttcaggttctaactatgatatgaggatgaaactggcagtgaacatgtatatttacttcagggaccaagagtaatatatataaagataggttttcatgggactctctactgtgtataccacatctgggatcaaacacatctaaaaccagacaaatgactgtttcgtttgtttggaaactaatgattagcaaacaagacmgtattcagctgaagaactattaaacaattttttaaaaagtgttttctctcaccagtccataacacaccacagttccttcatgttgttctgaaggatggttccagtgaggccaatgcggacattacatttcaaagctttcataacttctgttactctagcttttggattcttgattctatgagcttcatccacaatgacagctgaccattccaaactataaagtaagaaaaaagaagggtgaggttgagaaaacttcctttcttagtccttacaattttagacagtagctttctctatcaaagttttggaattattttttcctttttactctttgatg

SEQ ID NO: 792304 - DNA, 742 bp, Homo sapiens
ataaataacacaaccatatccatatactcatttgtgcataggaaaaatattagaaaaatgttgactcaattactgaggaggaacatgcgcttttgtatacatttgtactctttgaaattccataatgttcatgtatcgcatttgtaaataaaaacaaaaagtaagatgaaaggtgcgtggsacctccctgtaccttttttttttctttgcaacttcctttgaatctacaaatgatttcaaaatacaaagttgaaaaaaaaaaagtaaatcaatacacttttccatctcaatgtttgaatatctgaacactaaagccggtgataggcagactctagaggactgcctagtgctacaagcagtcccagtccatgagatctgagcagtattctcccttcatgctttcagaaggcagagaataagataaaaaatgaaagcactagtgaaggcggagtaataatatactgccatgttgcccctttctaacaaggcaaatcttgccaagcgataggcgggtttcacaaataagcctcctaaagccactcagggaggctggtgcaagttcaacacatgagtaacacagataaacatgaaacccccaagccttgatggaaagcagtgataggtggcctggaatgccctccagtgtgaaagttcttatgaacaaacaaaggccgctgcagatttcttaatgactgacaaagtctcttactgctgggctccttaagggcagggttatctcttt

SEQ ID NO: 792305 - DNA, 742 bp, Homo sapiens
ataaataacacaaccatatccatatactcatttgtgcataggaaaaatattagaaaaatgttgactcaattactgaggaggaacatgcgcttttgtatacatttgtactctttgaaattccataatgttcatgtatcgcatttgtaaataaaaacaaaaagtaagatgaaaggtgcgtggcacctccctgtaccttttttttttctttgcaacttcctttgaatctacaaatgatttcaaaatacaaagttgaaaaaaaaaaagtaaatcaatacacttttccatctcaatgtttgaatatctgaacactaaagcyggtgataggcagactctagaggactgcctagtgctacaagcagtcccagtccatgagatctgagcagtattctcccttcatgctttcagaaggcagagaataagataaaaaatgaaagcactagtgaaggcggagtaataatatactgccatgttgcccctttctaacaaggcaaatcttgccaagcgataggcgggtttcacaaataagcctcctaaagccactcagggaggctggtgcaagttcaacacatgagtaacacagataaacatgaaacccccaagccttgatggaaagcagtgataggtggcctggaatgccctccagtgtgaaagttcttatgaacaaacaaaggccgctgcagatttcttaatgactgacaaagtctcttactgctgggctccttaagggcagggttatctcttt

SEQ ID NO: 792306 - DNA, 614 bp, Homo sapiens
atttccaataaaggatagacagttgtgtacacattttagaacacacattgaagagaaatgtgcttcagtctgattatatatagctttgaggaatttgttcccatacttactgcatggtattaaacaacccaagataaatctttggtgactccaagaaagaggttcgactgtaattatggattaacacacacccacagttaataatagttgcttcagtttagcatcagtgcaaccatttacactgataatatattaaacactacttttttctcccaggcacagtgaatgactactagggcaggatcaccttccactaagcagatgtcatagctccaagcctctaatcatttgtaaccattagggaaaacatggggctgaaccaattaaaaaaataaaaactatcccaaagctcacaraaccacataattacattgcatcacttagcattttgactgactgtttggaaaacctgatacaaaggctcacaggctgcctcaaatgcctcataaacgtggtaactttacctgtgtaaacccacctaaaaaatttgtttccacatcatgtacggagggaaaggtgaataaatacagatacacggagattggtagaaaagt

SEQ ID NO: 792307 - DNA, 563 bp, Homo sapiens
  misc_feature 538, 555, 556, 557, 558, 559, 560, 561, 562, 563: n = A,T,C or G
gattcaactgtttaagcaaagagatttcatgggtggtgcagaatccttcctatcccattccatgaacacgtgcacgacgtcctctcgcccacaacgctcgaagctcaatcaagcttcggggacaggtagtgacagcctgagtcttctgttgtaaaattcctcacctgtctatcattgatgatgtggctcgaacgaattattttcttagaggttgtaaaaggttgcttttagaaattcattaccctttcacatttattaggttagatgcctcccacacagtgaatgtgtccgcatcagtgagggctatttggatactctcaaatacagttcatccaggaagggccagggaggtgcttaattctttcctcttaactgctcattttcagagtagggattcaggccttagttaattgcagtagygtccagagagaaatcttgtttatttgcttttttttttttgctcttttttggtgggggataaagacttctctctaatgatgatgatgatgatgattgatatggttaggctttgttctcncacccaatcctctgttnnnnnnnnn

SEQ ID NO: 792308 - DNA, 706 bp, Homo sapiens
tcccgaatatttttgctggatgtaggatcctgtgttgaccagtattctctttcgacatttgaaaaatgtgccattttcttctggctttgatggtttcttatgagaaatctatcattcaattgtcttcccctataggtaagctgttatttctttctcaytgctttcaagagttttccattgtcttcaattttcagaagtttaattatgatgtgacttgttcatttctttgaatgtttcctgtttggagtcattcagcatcttctatctgtcactttatgtctcttgccaaattcaggacattttcagtcattatttcttcaagtatattttcagcccttccctcatgatatgatacagatgctagatcttttgctgtagtcccacaggtctctatgactctgttcatatttttcagtgaattttttctcttttgctcagcttgtatagtttctattgctctgtctacaaattcaccaattctttttctcctccattctgccattgaactcatccattgaatttttttttaattttggttattgtattttttcatgcaacatttttcatttggtttttctttatatcttctatttctttgctgagattttgtatttctttgctagactttctatttgttcacttgctttgagtgtgtttgtaactgcccattgaagcacttttatgatggctgctttacagtctttgt

SEQ ID NO: 792309 - DNA, 564 bp, Homo sapiens
tgaatgaactgataaactaacatggatgcttatgttgttaatattctttaatttgtacacttattttacacatactattttaaataaatgatatagttcacaatttgtaaaagctttgtaaaagtttttttttttttttttgactcaaagttatgctctgtcaccagtctggagtgcagtggcctgatctcagctcacggcaacctctgcctccaggtttaagcaattcttgtgcctcagctccccaatagctgggactacaggcacctacmaccacacctggctaattttttttttttttttttttttttttgtattttagtagagacagggtttcaccatgttgcccagggtggtctcaaactcctgagctcaggcaatccgcctgcctttgcctccaaagtgctaggattacaggtgtgagccaccgagcctggccatttgtaaaagttcttaagagtggtagatcacagtggataaccttataaaaccatctaacatcagaatttctggcacttcctgacatgttaccctgagcaaacattaagctctctgcatttccgt

SEQ ID NO: 792310 - DNA, 632 bp, Homo sapiens
atacagaatttactgtatagaaaaatagctgaataaatttctcttgttattttagccaaatttcatatgcaaaatcccaggagtggcctactattctgatgtgtcaatatctatctttcatcatgtgaataaacaacagagaaaatccattgtgytcttatgagtttggaaaacaaagtgttatcacagatattcttgtcctcagttccaatgattttgaacctgttattcagaacaagaagccgcctgattcaaatacaaaacaaaacattctatttagtgcaaacacaaagatctgaaactccattttaaagtcatttctgtacagtaagaatccagcctgcatctgtcagtggtagagagaatagtaaacagaggagtccctgaagaggtcacagtgttgacaaagttcaacatgatagtggagtctgcacaaatacagggaacaaagcttggcccttccacacagctgtgaggccttgacttcgttttaagtcaacgtcatttcatgtctcacatatttcccagtgtctgcatgatgaaataccacagtcaccaggaggtccacttttctgcagtcttgtgtagattttcctgccaccccaaaacccaaggaatgtctgccatggagc

SEQ ID NO: 792311 - DNA, 577 bp, Homo sapiens
cttatgaatgggctggtgcctccctcacaataagtgaattcttgctctatgagttcatgtgaaatctggttatttaagagtctgagacctccttcccacccttgctccttctcttgccatgtgatatgcccgctcctgcttcaatttctgccatgagtaaaagctccctgaggcctcaccagaagccaagcagatgccagcaccatgcttcctgtacagctcgctgaacagtgagccaattaaacctcttttcttggccaggcacagtggctcatgtctataatcttagcactttgggaggccaaggcaggcagatcacctgaggtcaggagttcaagaccagtctgggcaacatggtgaaaccccractctactaaaaatagaaaaattagccaggtgtggtggtgcatgcctgtagtcccagctacttgggaggctgaggcaggataattgcttgaacccaggaggaggaggttgcagtgagccaagatcatgccactgcactccagcctgggtgacagtgagattccatttcaaaaaaaaaaaaaagcctcttttctttataagttacccagtc

SEQ ID NO: 792312 - DNA, 596 bp, Homo sapiens
actacataagcaacctcgtttcatccactggaatatctgccatgtcaaaggacttactgggacttattgagcacagagatgttctcaatgaatattcgctgaatgaataaacttagtaagtagtggtgaggctctgaacccagatccctatgaatccaaagcctatgttctttcsagcacacaacagacagtctatatttctgaagaaaataattgagtacgaacccaattacatttctttttgtcaattaacttacttcaaaattattatgtattaagataaacaatatggctcagatagtaagtaaattgaaaagcaccattgttgaaagaagaaacctacttacactcctgggttgagttaaggcaacaagatatataaccatccacatttatacataaaaataaaaaggatttttaaaaagattcccttaaatatcaagttgtgctaaagcagttaagccgggatttgatctacaaaattaaatatatatatatacactttatttttaaaagctcacctattattaaaaacatgtcttttgcaagtttaactgccttgaaatttccattaaaaagaaaattatgtgttaaac

SEQ ID NO: 792313 - DNA, 633 bp, Homo sapiens
ataatgtttttggatgatttgaacttcctctggtaagtacttctgatgctctaaatgagttaaccagatgagaacaaacattttcttcaaaccatttaacttggctatagttaactcattaaggataataacaatgacattcttcaggtttgtgtttttttttttttaaaaaaagatagtcctattctgaacatttcattaatcaaaaacaagaccaaaccccccccccccccaaaaaaaaaaaaaaaacccacgaaacttcaaaaggtgaaaatactgactaggttctaaggatatggtaggaaatgrttgcttagggctatgtacctaaaatgaacttctgttctgaaagcccaacaaaaactgtgtggtacatgtatctatctacatatattttctcacgtcatgtctactctgctaattcctaggatagttaatgcaaacatttggtaagctcttattttgttatgcatgtaaaatttaaaagcatgaagctctagtaacattaaaaaatagttgcagtctaaggtggatagaaagatgatgtatggaaaaatgggacaagagtaatatggaatacgcttagaatttcatgcaatacactttaatacatagtatactttgggaacaatt

SEQ ID NO: 792314 - DNA, 484 bp, Homo sapiens
agtgattcagagcacacacttgtctcgatctgaaaacgtctccatgctaaccgcgcgggcggcaggtacgcaccacgtaggtgctgaccgtctcagtcaccacgctgcgcacgggggctttggcactggccccggaggcggcgggacccggggagggcagcagggcagggcccgcggcggcctgggcgagcagcggcagcggcacgggcgcagggctgacgagcatggggccgggggcgggcgcgggggccggcggtggggtcttcggcctgttctgcgagggcgccggcttggcctcgggggcagggaccaccttgctgatgacactgtcaacaaaagaagakaaggtaaaagtcaaaacaggatcatcatcgaaccaaacccgtgcttaaaaacatgatcgtaaaatagcttttcttccagtagcgaaatacttcaacgtctagaggcagctcaagaactgagttccaggccctgcatgaag

SEQ ID NO: 792315 - DNA, 618 bp, Homo sapiens
gatgttgatagtgggggaggctgtggagggagcaggcagtgggtgaatgggaaccctcagtactttctgttcaattttactgggaactcaaaactgctctaaataataaagtctattaagaaaaaaaaaaaaagatgcagctcaggtcctaccctcttctgatatgccaatccayagaaatctctgctttttcttaactctaaaagaatttgctgacatttgatccttaatcgtataatgctttaaactgtaagagaaatccccgtcttatctccccaactagaagctcccagggatgacattttatagcttttgacagaccccacaatgcctagtaaattacaaaaaagaaaaagagaaatgaaaaatttcaattaagcaaggattgttttacttcaggaaaatattgttactgtgcttgtttcattcccagagtcttgaaagcaacgcgcacacagctaatgctctgtcttcagggcccgtcttccttgttgtcccctgggttcacgtgttatttgaatactgtggttagagtcacgtcttctctctgttttacgatacaatcacactagtccaggacaccgccgtgtctcttagattatccccacagcctccatc

SEQ ID NO: 792316 - DNA, 610 bp, Homo sapiens
aaacataataaatagatccagccactccaagtaagtgggagtgtaataaaagagcaaacaaggaaatgaaaatccctgtttttctttttgcacaacaattaagctctcaactactgccttaatacatttaacatattaacagaaaaatgtaaatggaaaataaattaccaaattcaaagtgaaagcacaacagcttttaataactattttcactagttaatatataatattacaaatctcatggcagtctacactcaaagcagaaatataattcatgtgtgcttgatattttccagttgaaaactcgtaattttatatagattatatcagtgtctcacacttgaccccttttaaagctaaaaagaagtaagaaaaaagggaaggaaggaagaatatgaaggaagaraggaaggaaagaaaaaaattcaaacacccaaagtaacccatagatgactttaattaaaatgccagaacagctatcattttggacaggcctgtgattgggaggagacttagtggatcttctgtggtgccagcaagtttctattgatttacatgaatgtttatggatgatggttacacagaagtgtccattctgtgaaaattcatc

SEQ ID NO: 792317 - DNA, 606 bp, Homo sapiens
taaattgaattttataaaaactaaaacttttcactccataaaagatactgttaagagaatgaaaagacaattcaaagactgagggaaaatatttgcaaatcacatctggcaaaagagttgtatccagaatatacaaaaaacattcaatattcaaaaataaacagcaaaactaaaaagcaattaaaactaggcaaaagatttgaaaaatacttcaccaaagaaaatgaaagtataactaataagcacatgaaaagatattcaacgtcattagccattaaggaaatgcaagttaaaattaccacaagataccacyacacatttatcagaatggctaaaataaaaaatgttgacaggaccaagcactggtgagaatgtgcaacaactggaaccctgagctttgctggtcgcagcacagaattgtacagtcactctgaaaaacagtggcagctattataaagatgaatatacatccaccctgtgacccagcaaccctacttcctggtatttatgctagagaaatgaaaacttatgtttgtgtaaaacttgtatgtatgttgatcacagcagcattatttataagtaccaaaaactgtaacaatccatatc

SEQ ID NO: 792318 - DNA, 682 bp, Homo sapiens
atcctcctcaagcacaggtaagcagagcctgccttagctcttggaaaggtctcatggggagcagacgtctagtttcataaacgtggaagcagtgattctgtgaccacgtggttgttctgcacaggcagaaagggagcagggctgcccacagcagcaaagaatggcgagccttggggtggagcatctatgttaaaagagctgcttatgattccctaaagagtacatgatagtctgctagcttttaaataacattttctttctacttttctctatttgttttgtaactgctcagattgtgcttagagtttgatttttgtccgcaggcaggagacacctgtttgcacgttgctgcgcgctataatcacttgtccatcattaggctcctcctcactgctttctgttctgtccatgaaaagaaccaggtcagtgcatgtatyctcttcatggctgccagcacccttcccacaaggctaccggacaggtctgttagtgcaaacgggagcagaggctgctgggaagctgccatgtcacctacctgggactcagccagcagtgggctttgcatgggtgtcacactgagttctagtggccctggcttatctggcctgctagagaaagtgtgcccttataattcctgtgcatatcaccacatttgcatattgaacattttctggagatcctg

SEQ ID NO: 792319 - DNA, 516 bp, Homo sapiens
cacatccatgccaacatctattttttttttttaatttttaaattatggccattcttgcaggagtaaggtggtatctgattatggttttaatttgcatttccttgatattagggatgttggaattgctctgctttaaaaaattaggctgggtggggtggttcatgccctgtaataccagcattttgggaactgagcgctgatggatcacttgaggtcagtagttcaagaccaaacctgcccaatatgatgaaaccctgtctctactaaaaacacaaaaattagctgggcctggtggcacacacctctagtccgagctactagggaggstgaggcaggagaatcacttgaacctgggaggaggaggttgcagtgagttgagattgtgctgttgcactccagcctgggcgacatagcaagatcctatctcaaaaaaaaaaaaaaaaagagtgcctgtgcccaggctccctccctaaagacctgcacccctggccttgagagctctcagatggcagcaag

SEQ ID NO: 792320 - DNA, 654 bp, Homo sapiens
tcacaactggagtattgtattctgagggtttttcgttttgttttaatatagaattaaaaaatatcacctatggagggaaacatgttctgttctgaacaccacattttaagaacacttacaggacagaatccttggaaggagggatatcaaactagtgagggatcagaaaccaaatgtcaagtgtataatgactgaagaaactgggtgtgtttagcttggagaagaaaacactttytagccttccacctcacctctaccatacagaccagtgtaatattttccagaggatttcaagagttgttaatgcacattccataattaaagaagattgagataaacactttttttctctaaatgacttaaagtgttcaatatcctaaaatgctttgttaatgtccaagaaaatgatgatcggtatttctcaaatatgaccattcattcattcattcaacaaatatttattaagcaccaattattagccaaccactcctccaagtgctggggatacaacaacgaacagttttaatatcctggaggatagtgtggggaacagccaagctgggtctctattcctctaacttgcattgtgcttcctcatttctaagtctttgactatgctctcagcctagaatgctccatgtctaatcttaatcc

SEQ ID NO: 792321 - DNA, 654 bp, Homo sapiens
tcacaactggagtattgtattctgagggtttttcgttttgttttaatatagaattaaaaaatatcacctatggagggaaacatgttctgttctgaacaccacattttaagaacacttacaggacagaatccttggaaggagggatatcaaactagtgagggatcagaaaccaaatgtcaagtgtataatgactgaagaaactgggtgtgtttagcttggagaagaaaacactttctagccttccacctcacctctaccatacagaccagtgtaatattttccagaggatttcaagagttgttaatgcacattccataattaaagaagattgagataaacactttttttctctaaatgacttaaagtgttcaatatcctaaaatgctttgttaatgtccaagaaaatgatgatcggtatttytcaaatatgaccattcattcattcattcaacaaatatttattaagcaccaattattagccaaccactcctccaagtgctggggatacaacaacgaacagttttaatatcctggaggatagtgtggggaacagccaagctgggtctctattcctctaacttgcattgtgcttcctcatttctaagtctttgactatgctctcagcctagaatgctccatgtctaatcttaatcc

SEQ ID NO: 792322 - DNA, 477 bp, Homo sapiens
aagaaatgcggatgcgatgtcaagttaaaattgctgtttaactgtttccccaactacattcaaaatcaaatcttcatattctatcatgcccttacttgaaatattatcctctattaattcgtaacacagtaaacagaacagtgtagtgattaagagccacagagttctgaaaatagactacaagggttcaaatcctggctctttccattcctagctatgttcccttagtcaaatcaacctctctgtgcccatttcctcatctgtaaaactaccgtatttataaaatttacaactacaataaacttataaaatctacgatatatttataaaayctacttataaaatttataaaatattaagggttgtaagatatggataatgaatgtagagtacttagaacacttttaggcccatagtaaggcttcaaaaaatgttagctattattatcattacattatcatcacatgaactccatga

SEQ ID NO: 792323 - DNA, 607 bp, Homo sapiens
gcagaagaatgacattagacccctattccttgccatatacaaaaatcaaaccaaaatggattaaagccttaaatctaagacctcaaactaaactactaaaagaaaacattggggaaactatccaggatgttggagtgggcaaagattacttgagttacaccccacaagcacaggcaaccaaagcgaaaatagacaaacgggatcacatcaagttaaaaagcttctgcacagtaaaggaaacaatcaacaaagttaagagacaagccacaaratggctgaaaatatctgcaaactacccattcgacaaaggattaataaccagaatatataaggagctcaaataactgtataggagaaagtttaataagctgatttttaaaatgggcaaaagatctaaataggcatttctcaaaagacatacaaatggcaaacaggtgtatgaaaaagtgctcaatgtcactgatcatcagggaaatgcaaatcaaaactatagtaacatgtcatctcaccccagataaaatggcttttatctaaaagacaggcaataacaaatgctggagaggatgtggggaaaagggaacactggattttgtacactgttggtggg

SEQ ID NO: 792324 - DNA, 511 bp, Homo sapiens
actacattatttattttgaataacaagttactccaactcttagtatttttttttttgcagatggagtttcacttttgttgcccaggctggagtacagtggcacgatctcagctcactgcaacctctgcctcctgggttcaggtgattctccagcctcagcctcccgagtagctgggattacaggcacccaccaccacaccttgctaatttttgtgtttttagtagagactagttttgccatgttggccaggctggtctcaaactcctgacctcaaactcctgcttgcctcagcatcccaaagtgctgggattacaggtgtgagccaccatgcccagcctcttagtggttttaaagaataacrtttattatctcacactttttgtgggttaggaattgccatggcttacttaggtgggtcctctgcttcctggtctcggacaaggctgcagtcaaggtgctggccaaggtttttggtttttggtctcatttgaaggcatgactggggaggaa

SEQ ID NO: 792325 - DNA, 625 bp, Homo sapiens
agcattttacaagaagtctttgaccaaaatgttctttgggtatatcaggaacactaagccgttctattggttcttcctacaaattgaaaagcaacaccaaaatgaatatgcttatcatattccaactctttatctttttcagaacttactttactaatctaacacttttagtcttcacaatagaacatagagaagaatgacctatttatccacagacagaagtcatttgattataacttactcattaagaatagtaaattcactagtataaaatgtattcatttataaaaattacagctgtttcagttgctttatccyctacattttgtaatactatatatcaatcataatcccaaaagatcaattttaataatcatttgcttctttatatgcaaacatctatacctcatctggtgatggatgcaaagcaaaaagttctttgtgacggtttgatttcctttggtcatcattctgacggtctatttcttcatttggagttcgatcaagtaaattgggaagcaaagcatcaggaagtgaatttttcaagtcaaagatactacaggcccagctaccccttggggtatcatctattgacattgaacgtcttttaaggtcatcctgtcat

SEQ ID NO: 792326 - DNA, 656 bp, Homo sapiens
gcataataaggtcctttatttcttgccattttcattcctactataacagtcatacttctcaaggcagcatagatacctctgagttacaggcaaaagatcaagtgcaagaaagtgatgtaggacaggcaagcaccaaagtggagcttagccagagagggttcttggccttgcccagaaaagaattcaagggtaatccagagaaagaagaaaacagctttgttgaacagtcagtgttacagctcggtgactgctcccgcagaacagggcttagagtagcagctcggggtagttttgcagtcatatttatacccacttttaattgtatgcagattaaggggcagtttatgcagaaaaggggtagtaactgttgaatggttaggtaccatggaaaggggtgataacaaccctggtgttgccatggcaacggtaaattgacatggcacactggtgggtgggtctgattgaaaactgctttctccttggcaacaccagggagaaagtgtgaaaaagtrtcttggctagtcctcagtctagtccagtatccaagtcccacccctagaatcaagtcccgcctcctaccttaaaagtacagaggagaaaaagcacaaatattaatatttcaagatattataacatttccaacagtgctggagcca

SEQ ID NO: 792327 - DNA, 556 bp, Homo sapiens
aaaattaaataaacagaatatttattataacataatgaaataaattatattaaaaacagacaatactcaaaacttatcacttcctaattattgtagtgaatcctactattatctatcttcttgaggttctttacatctatcgtgtctgtatcacagaaatattatataatggtgttccatatatttatttataaataaataaattaaataaaacaaaaccaggtattattccggctgtcaaaaaacatttgcctctaaactttctttttttttttttgagacagagtctcgctctgtcacctaggctggagtgcagtggcacgatctcggctcactgcaacctctgcctcccaggttcaagcgattctcctgcctcagcctccccagtagctgggatcacaggygcatgccatcacgcccagctaattttttgtatttttagtagaaatggggtttcaccgtgttagccaggatggcctccatctcctaaccttgtgatctgcccgccttgggctcccaaagtgctgggattacaggtgtaagccactgcgcccag

SEQ ID NO: 792328 - DNA, 605 bp, Homo sapiens
ccgtgggctacctgcagtggcgatggggtatccagtcagccatgaacactagcatcgtccgagacactaaaagcagccacttcactgtggccctgcaggtgagccgagcagccatcatctcctgcagacagagctctgggaggacccctcctccaagcactcagtgctccccttaaatcctgcgtcctgatcaccactaagtctaagcccatacagggccctgaggggcaggctctcggtgctcacactcgagtgacctggtggaaccttcgagtatgaaatgcatttgccttcaggcgcctggggcagctttgttggatcatcttaaagcagaacaacatcttaatgtctggtgggagccacccacggaattgggggcgggcagatgaagccccatagcagaatcatgccctcggaygcccctgtggccacaccagggctggtacatgagaagccccacacgggccactgctccttggctctcaccagccgctgccacctaggagcataggctcagtgtcaccagagttttttatttcttgtgagaagctagaaaactgggttttcagtgaagtctcccactttttaactactggctgctaata

SEQ ID NO: 792329 - DNA, 625 bp, Homo sapiens
gtgtcattatgcctacaccgctgggaagccacaaagtagacccaggactgtgcaactccgagaggaaaagagaaaatgctgcagataagcggagaagcaggtgagcccgacacggagggcaaaggcaagctgcctctggggcccagggcactgaacaccatctcctcaaaggctgacataactgagaagggtccacattttccaccaagtggagcccgtgtagggtcggtgctatctccatgcccctgacacaccatggcacctgcgttcacccagaaggtacctgcccacagcatgcatccatcattgagagtgcgcaaaaccaagttctaatttccaggcactaataccataggacacaaacataaacyaccctccaggaggacacctgacatccctctcctttctgggtagtctgaagtgagaaggttgaaaatagtgcagatgtcctttcttagagcagccccgccatccattcattcactctttcattcatttgttcagccaacatgtgctcactgggcctggggaagcccaggatgaaatgagacaaaccctctgccctctggccacggtgtgctggtgcctgcgctttaggcgggtactaaaagacaagcaaatatta

SEQ ID NO: 792330 - DNA, 562 bp, Homo sapiens
ttagggtggggaaaagatcccaccctggtaaatttgtggtcagaccggttctctgctcttgaacactgttttctgttgttttaagatgtttatcaagacaatatgtgcacagctgaacatagagcctcatcagtaattctaattttgccctttgccttgtgatctttgcttcgccctttgccttgtgatcttcattgccttttaaagcatatgatctttgtgacctactccctgttcatacaccccctccccttttaaagtccttaataaaaacctgctggttttgcggctcaggcggacatcacagacctaccrataggtgacgtcacccccggaggcccagctgtaaaattcctctctttgtacactttctctttatttctcagacctgccgacacttagggaaaatagaaagaatgtacgttgaaatattgggggctggttcccccaatatcagtcccgctgttgaacccatttctccacagttgagaatatccacatgtccaaagcctatctccccctgcccagaatgaggctggaccagctctgtgaatttttactt

SEQ ID NO: 792331 - DNA, 637 bp, Homo sapiens
taagtttttagaaatagcctacataatgaagattatgtattatatagtcacaaatttttattttagatttcacaatgtacacttgtctcaagtaagtctatttaactagaatttttaaagacttgcgattttgctaaatgtatcatcattagaaaaagttttctggatgtgtatatgagcagggtttgattattctgacatcagaaagccaacactagattccacagcaaggacactggaatttaaaaatctggaatactttaacagtagactttactcaaatatctaaaagacgtatcagactcactcagtaaaaaatatactatacttactacaaatacattatcttctaagcccattcttatttytaaaaatatgtacaactagactaatgatgccaaatacttacacaagttcatgcattttaggtgtgctttattcaaaatatattattaaaaaatgtcaatacctagttacttcaaaaaataccttcaaaatgtttaccattcaaaacatataaaaagcactgactttattgtactgcaatataaattcttcacataaagattttatgtaaaacactctgcagttagaaacaatcttatttacattttctataaaagtattttgaagtttt

SEQ ID NO: 792332 - DNA, 538 bp, Homo sapiens
atgactcagtccacaaacttaggaatgcaacacatttaatttaattttattttctctagaaactcaatttctattttaagcccttgaaaaagagaggaaattccaacggactggaattaggcctctaccaatcccatagaatgggcacttaaagtagaaagctctaggaggtttatattgtgctcagacattgggtccrcatcatgcatatttcagtgtcctcagcaaagtcaccactgaaacattacttaatgtctcttatgtaatagctaacatttatttgcactttcatgtcatatcattctctcacttaatcttgatgtatgtgtctaagagtaatatagtgtctttcctgaaatattttatgacacaaaatgaaaacaacttatcctagtgtttcctcttttgaaatctcagaatcaaatttgctgttcaattagagaaacaattttattccactataacctaatctccatgtgatcagggtgatatctccttttcatccttgatgccaagcacattgcctggcacatagggg

SEQ ID NO: 792333 - DNA, 623 bp, Homo sapiens
acaggtgataacatttttactctttcagtagacaacagtcaacgctctggaattcagccacttgctaaaattggctgcccaattttctagcaccaggagcttttttttaaggatatcgtgtcaccactctgagttttgtttcttgtacattacaaggtagcaacattgggaagggcaagaggttttaaaaaatgaataatttgttttctgcttcctgaagtcctctcttttagtgtctgtttcacaaacaaggaaatctgccaaaatcatgccaaaaaatttctctgtttcaggcctgcaaatgaatggtagaatctatgtgtgtgtgtatatagatatatatttatatgtattaatttaacatatgtacatatgatacataatatatatctaacatatgtatacatayattagcatatatagtatatacgtctgacatatgtacgtacatacgcacacatacatacacacatacacgtaagcacaattcaggtgacttaatataagtcatttccaggtcaattatcccactatctgatggtgccgccttcttgtagctgttactgatgtcaagaagcaccacggtgattgtctgccttggagggaatttgttttctatgctg

SEQ ID NO: 792334 - DNA, 623 bp, Homo sapiens
acaggtgataacatttttactctttcagtagacaacagtcaacgctctggaattcagccacttgctaaaattggctgcccaattttctagcaccaggagcttttttttaaggatatcgtgtcaccactctgagttttgtttcttgtacattacaaggtagcaacattgggaagggcaagaggttttaaaaaatgaataatttgttttctgcttcctgaagtcctctcttttagtgtctgtttcacaaacaaggaaatctgccaaaatcatgccaaaaaatttctctgtttcaggcctgcaaatgaatggtagaatctatgtgtgtgtgtatatagatatatatttatatgtattaatttaacatatgtacatatgatacataatatatatctaacatatgtatacatatattagcatatatagtatataygtctgacatatgtacgtacatacgcacacatacatacacacatacacgtaagcacaattcaggtgacttaatataagtcatttccaggtcaattatcccactatctgatggtgccgccttcttgtagctgttactgatgtcaagaagcaccacggtgattgtctgccttggagggaatttgttttctatgctg

SEQ ID NO: 792335 - DNA, 623 bp, Homo sapiens
acaggtgataacatttttactctttcagtagacaacagtcaacgctctggaattcagccacttgctaaaattggctgcccaattttctagcaccaggagcttttttttaaggatatcgtgtcaccactctgagttttgtttcttgtacattacaaggtagcaacattgggaagggcaagaggttttaaaaaatgaataatttgttttctgcttcctgaagtcctctcttttagtgtctgtttcacaaacaaggaaatctgccaaaatcatgccaaaaaatttctctgtttcaggcctgcaaatgaatggtagaatctatgtgtgtgtgtatatagatatatatttatatgtattaatttaacatatgtacatatgatacataatatatatctaacatatgtatacatatattagcatatatagtatatacgtctgacatatgtacgtacatacgcacacatacatacacacatacaygtaagcacaattcaggtgacttaatataagtcatttccaggtcaattatcccactatctgatggtgccgccttcttgtagctgttactgatgtcaagaagcaccacggtgattgtctgccttggagggaatttgttttctatgctg

SEQ ID NO: 792336 - DNA, 556 bp, Homo sapiens
acagtgtccccactatacctcattgtctcagactgttcagactgctaaaacaaaataccttagactggataatttataaataacaaaattactgttcacagttctggagactgagaagtccaagatcaaggcacccgcagatgcarcatgtagtaagtgcacggtctctgcttaatagatggcttcttgttgctgtgttttcacatagtggaagcgggaaggcaactcccttcaacctcttttattaggacactaatcccattcacaagtggagagtcctcatgatttaatcacttcccaaaaggccccaccttttaatattatcatattgggtattaggttccaaactatgaatttgtaagagatatcaacattcagaccatagcactaatggattatgagcagttagcccagtggattcctatgttctgaacaaacacgcaaagactcaaatagaagagcatcttcctcctaggctctaaggtacacatctgaagctggaccagaagcatgattaagagtcagcttgtttagtggcaaagctaaccctgagcag

SEQ ID NO: 792337 - DNA, 556 bp, Homo sapiens
acagtgtccccactatacctcattgtctcagactgttcagactgctaaaacaaaataccttagactggataatttataaataacaaaattactgttcacagttctggagactgagaagtccaagatcaaggcacccgcagatgcaacatgtagtaagtgcacggtctctgcttaatagatggcttcttgttgctgtgttttcacatagtggaagcgggaaggcaactcccttcaacctcttttattaggacactaatcccattcacaagtggagagtcctcatgatttaatcacttcccaaaaggccccaccttttaatattatcatattgggtattaggttccaaactatgaatttgtaagmgatatcaacattcagaccatagcactaatggattatgagcagttagcccagtggattcctatgttctgaacaaacacgcaaagactcaaatagaagagcatcttcctcctaggctctaaggtacacatctgaagctggaccagaagcatgattaagagtcagcttgtttagtggcaaagctaaccctgagcag

SEQ ID NO: 792338 - DNA, 564 bp, Homo sapiens
ccaaaaaggtgctatgttatgtttcaaagctaaggtgatttttatttccttgaatttttataaatacatatatgcaataaagcaatttaggaaatgtggggcctaatagataaacaaataacacttttcaaaggggcctggaatcaatgccataggctttctttcctttgtactgacttccttcattccttagccccattttcctagcaaatgaaggaagagactggaaataagtcttgggggatgagaacacaaatgcctaggaggggatcacatgtgattttttcaggaataaggagtctagatcaactagagccagtcagtgacacagcaggtgtcttgcaatcagatgcagcaaccctgagatgtgccagtttacacctgttctctagggttatctctcaagtttcccagaggaaaaamgagctatctttctagcctatgaacactccatacagccgtgctactcaacctgcagtgtggtaccaggagcaagggtatcaccagggagtgtgttaaaaatgaacaatctcagtcgccacgcccggccggctgaatcagaaa

SEQ ID NO: 792339 - DNA, 507 bp, Homo sapiens
cacagacccaacaccatgtggaagtcaccaagtcttggggcatatgctctctgaagcagtggcctgtgctgtacttgaccccttttattcatggctggagctggagcagctgggatgcagggcaccatgtcctgaggctgcacagagctgtgagaccctgggcctgtcccatgaaaccatttttccctcctagggctccaagcytctgatggaaggggctgccatgaaagtctctgaaatgtcctggaggcatttttcccattatctccgatgttagcatttcacctctctttacttaagcaaatttctgcagtcagcttgaatttctcccagaaaatgggtttttcttttctaccacatgaccaggctgtaaatttttcaaacttgtatgctctgcttcccttttaaatatgtttcagtttcagactgtctttttttgtgtatgcatattggcatatacagttagaaccagccaggtcacatcttgaacaatttactgcttagaag

SEQ ID NO: 792340 - DNA, 507 bp, Homo sapiens
cacagacccaacaccatgtggaagtcaccaagtcttggggcatatgctctctgaagcagtggcctgtgctgtacttgaccccttttattcatggctggagctggagcagctgggatgcagggcaccatgtcctgaggctgcacagagctgtgagaccctgggcctgtcccatgaaaccatttttccctcctagggctccaagcctctgatggaaggggctgccatgaaagtctctgaaatgtcctggaggcatttttcccattatctccgatgttagcatttcacctctctttacttaagcaaatttctgcagtcagcttgaatttctcccagaaaatgggtttttcttttctaccacatgaccagsctgtaaatttttcaaacttgtatgctctgcttcccttttaaatatgtttcagtttcagactgtctttttttgtgtatgcatattggcatatacagttagaaccagccaggtcacatcttgaacaatttactgcttagaag

SEQ ID NO: 792341 - DNA, 596 bp, Homo sapiens
aatgtaaaaacaaaaccattgaacataagggaacacagggtaaagaaaatgaataattacgtgtaagtaacatgggtacgctcctctgtttaaccacaggaagcctgggaagtcagggaagaaagtaatagaagtcaaggcagaaatctgcctcctgcacaaggcagcataaaaattatatgtaagctaaggcctgaaagaacagtcggagttggccaggagaatgggggatattctggtgacaacagcagaagcccactctggctgagaaaaatagaaatcagtttatgggaaaaatgtcagaagttcacggatgcagttaaagggcaggaaggttagattcagaacgagayagacacagtgacacaggagatgtaataagcttgtcaggcactgcctccgagataatgagccctaaccatgtttctgcctgtgtgttattccttctgagacccaaagtccctgaagagagagccagattgaacaagctcaggcctgttgctggccagaggaaggcaagactgtccctgatggccccacagagacagctcacagtccataggagccacaggaaggaaactgaaatgctgttaccc

SEQ ID NO: 792342 - DNA, 539 bp, Homo sapiens
aacataacttttggcttcacagtttttcttcttttccgatcacagtttgtttaaaatgtaccactgaatatgagcacaggagcccagctataggtatgtcaaccttagaaataaagtttctatggcctatctcattaattcattgtacaagtttgttgttttttttttcttgccaacagcactaaaagtgacatcatttaaactgtaggggtttcactgctttgtttcatctgagtgatatttgctytagtgctgctaatacctgacttttgctgtataaacagtttcaatgtttctgtgaggccacacaacatgctttataatgacacggctgactaaagctgccttttattctgctaacacccttcaaatactgttgacaatatcgcctctcaagtgtttcctcccacaaaatctgctgcttatagcacaggcaccaaaggcctgcttttccaattgcactgtactggcatcaggttaactagaaagcacaaaacaaacggtgattaaaaaaaataagaacagtatacattctatgt

SEQ ID NO: 792343 - DNA, 539 bp, Homo sapiens
aacataacttttggcttcacagtttttcttcttttccgatcacagtttgtttaaaatgtaccactgaatatgagcacaggagcccagctataggtatgtcaaccttagaaataaagtttctatggcctatctcattaattcattgtacaagtttgttgttttttttttcttgccaacagcactaaaagtgacatcatttaaactgtaggggtttcactgctttgtttcatctgagtgatatttgctctagtgctgctaatacctgacttttgctgtataaacagtttcaatgtttctgtgaggccacacaacatgctttataatgacacggctgactaaagctgycttttattctgctaacacccttcaaatactgttgacaatatcgcctctcaagtgtttcctcccacaaaatctgctgcttatagcacaggcaccaaaggcctgcttttccaattgcactgtactggcatcaggttaactagaaagcacaaaacaaacggtgattaaaaaaaataagaacagtatacattctatgt

SEQ ID NO: 792344 - DNA, 531 bp, Homo sapiens
aaggattaattgaagggtgctttttaagagtaaatatcccttagcatgggatgtttgaaatgaatatttatttaattctgtttaaactcaacttaaaaaaaaacttccctatgatgtggtgtttcatctgttttacaatgaacgtaacaatgctactatttaaaatgtgaatattgatcccattaacgttaacagcaaatggatttttttccccctgagaatgcaatgaaagcaagtgtaatttagattttatgccttataacacrtataattttgagggacgggaacatttctttagtgattatttgagctcccaaactcttggtttatgtttctatactagtgcctggcaaatttcattagctgcttacggagcagagctgtgtcctccagtaactcctagagagcagggggctattactaggttggtgcaaaaataattgtggtttttgccattaaaagtaatggcaaaaacctcaataacttttttaccaacccagtatctttgtctttctgtaaacagcatctgac

SEQ ID NO: 792345 - DNA, 606 bp, Homo sapiens
aaattggcttaacaaggtgtggagccttgtgcacatttatgtctgaaatccatatcaagcccttaacaggcaagattctttaatataaatgagaaataggctttatcttgccataatgacctgcagcctcttagacatgactctctacagaccgatcactccacagaaaggttggccagctcactgaagccattatcttttatttatgcagatcagattgtgacaatccttggaattctttgttttatctctctctctctctttaatcctcttgatacggttttttctttctgtttctatrtgggcaactccccaaacaagcattttcatgacttcccaagtcattgaatgaaaatattagagcataatttggttagcttgtattattacacaaagaaaagaaaattgttttaattttggaggctactagataaagggagaagggaaaattccctaattttttaagccacacagggagctatgtactgtgccaacatagtaaccagcaccaaatcccaatagtttacattttcattatttaatatgccctctagagttttggatgtggctcagaaatttttttaaaacaaatttcttacatatgac

SEQ ID NO: 792346 - DNA, 570 bp, Homo sapiens
ctgtgtctttactgcatttcctctctctaccagctggaaagtctttgtgttcttcagtataacttttggggggattttctaattagcttcacgcatactgttgccctgtattcatcagctattgccaaaaaaaaaaaaaaaaagcataatgaaacattcaacaactcagtggcttacaataagcttccawtctgcacatctgcaggttaactgcagttcagctgatctaccctagggtcaactgagaagatttgctccaagcctgtggggcttgctttacttctgtcccacgtgtgttcacactggggctcaggcaggaggagcagcagagtcttgggcattctcctttcctgcatgtagttgtagaatgagaggatgactagacacatgtcatatctcaggaggcctcagtctggcacatgtcacatccacccataatccatcagccaagccacatacactctgcctactctcataaagcaatgtcaactggcaaaagccatggatgcagaattctaaggcaggaaattttgaagaatggcaaaagaggtttgaaacaactataatcca

SEQ ID NO: 792347 - DNA, 633 bp, Homo sapiens
tgcacattttaaatttcaaaagaattaaggaaattataaaataaacataacatatcaatataaaatacagtaagataacaaaatttcaaactggaaatacatcaggtattacaccttttacacattttctgaaaattcaagtaaatttttttaatacattcatatgattttcaaattatccaggcactcccagaaccatttgataacatatacctttttttaacaattaaaatgtatctcaattagagtatattgatgtaaaggtagaattatttagattcactcaaaaacctaaattcttatactgaatcaaacatgtaaggtaccaaagtctctattttgtrttctgcagtaacagcacttattaaaatagaataaatcaagagaaacattttatttatattacgtttagccaataatttttcaatgtcatgatttaatattgattaactttaggatttaaaataatatttaatgataatttgaaattaatgttatataggcaaaaagtaatgatattaaatctgccacttaccaaagaaggaatatgtagctgacatttcaccttcccagaacctgggactttgttaccagacaacatttaaacacgtgagactcagctccaagttcttt

SEQ ID NO: 792348 - DNA, 585 bp, Homo sapiens
tgttcactaagtaaaacccctgtgtttcctctttatgaccaaccataattatattataaatcttataattctttatgtacatgacttgttagggtcatgggctatgtttcttctatttctgtgtccagtgaatgacattgaaataatctcaattgttaacttcatgaatgataaataaaaaagrttgttttcatgtaacttttggagaattaaggagaactgtataataataccagagaaaggaaaacagttgaaaatcaaatgttataggtgggcaacttttatctcaaatccaatttaataagttcaagtttccagaaaaatgaagaacagcgtttgaaagatatgaaagtaaaaacatacccgtgtcagtttgactcctcattaatctgagaatataaaagattttacaagatcaaagaatattctttcctttttaaatcaatatgcttttattttaaactttttcttaagtaattttacaattgctgaaaagtaaaagagcctcaatgaattcctgaataccctttacctgttttcctgaatgttcctaaaaatacctagcaatgatattaccaaagtgat

SEQ ID NO: 792349 - DNA, 670 bp, Homo sapiens
tgaaactaatttctcaaaattatttttttaagaaaaggtaattacttgttacaaatgccattgataaaataaagatgaggatagagaattattttctattagcaatttggaggtgactggtaaagaaaaacaaaacattatactatatatataatatatataaaatatatattatatatattaaaaaatatatatatattatatatatatatgttgttgttgtttgagacagagtctgtctgtcacccaggttagagtggaggggcaaaatgacagctcacttcagccttgacttccctgggctcaagcggtcctcccatctcaacatcctgaatagctgggactataggcatgtgccaccacacctggctaatttttgtatttatagttgagaygaggtttctcatgttgcccaggctggtctcgaactcctgggctgaagcaatccacagccccctccaggccttccaaagtgctgggactacaggtgtgagccactgtgcccagccatgtgaaaataattttgatagagtgtttggtaaaagactgactagagaaaaaatagatggagtagaattgtagtaatggagcaatcaacaattaatgttgggaaaggggaaagggtaaatgtaacagatggggtatattgcaggatcaaagcagttttgtt

SEQ ID NO: 792350 - DNA, 626 bp, Homo sapiens
cacatgtaagtcttttgtggaaactctctatcaggttaaaaacgtttctttcttgtttggttggaatttataacttaaataattattgcattttgcaaaatacttttttggcatctattgaagtgataaaatagtttactccatttgtttttctacgagtgtggtgtgttaaaatattttctgttgwtaaaacaaacttacatccctggtataaaccacacatgcttatgatgcactatcctttttatattttgctaattgcatttattaaaatttaagaatttttgaatatgtattcatggaaaatagatatgttttgtctgttttaaaattatgcccttgaaaataaattggtaagtgccccatcttctgtttcctaacagactgatagagaatggattattattattatcattatttttgattttaggtatatcagtgaagcaaaccatgtctataatcttctcttttttaaagagttttaattgtaaatgcatttctttaagtaatataaacctattcatgttttctatttatttttctgccgggtttcagaaagagtggtttcaaggaatttgttcagtttttctaagttgcttatggttctctaataatgtcttcataac

SEQ ID NO: 792351 - DNA, 626 bp, Homo sapiens
cacatgtaagtcttttgtggaaactctctatcaggttaaaaacgtttctttcttgtttggttggaatttataacttaaataattattgcattttgcaaaatacttttttggcatctattgaagtgataaaatagtttactccatttgtttttctacgagtgtggtgtgttaaaatattttctgttgataaaacaaacttacatccctggtataaaccacacatgcttatgatgcactatcctttttatattttgctaattgcatttattaaaatttaagaatttttgaatatgtattcatggaaaatagatatgttttgtctgttttaaaattatgcccttgaaaataaattggtaagtgccccatcttctgtttcctaacagactgatasagaatggattattattattatcattatttttgattttaggtatatcagtgaagcaaaccatgtctataatcttctcttttttaaagagttttaattgtaaatgcatttctttaagtaatataaacctattcatgttttctatttatttttctgccgggtttcagaaagagtggtttcaaggaatttgttcagtttttctaagttgcttatggttctctaataatgtcttcataac

SEQ ID NO: 792352 - DNA, 619 bp, Homo sapiens
aattatgcagtatgacacctttactttctgcctgcatttgctctatattatatttgtgatattcatctctgtggttggatgaagctgttcattcttttcattgacataatatggtattttattaaatgaatgtaccaccacttacttaaaaagtttatgatttattggtgtcattattggttttcattgytcccagtttggggctaatactaaaatatgatgtgaacattcttatccatgtatttgggtgaacttatgattacatttgcgtatattattcatcttggggtggcactggtgattcacagatatttttttgttcaatacttaaatcctgccaattgctttccaatgtagttgtataaatttacaatattaccagcaatgagtaaaattttcaatagcttcacaacattgcaaaccctgggtgttctctcccttttgctttttagtaaatgctagtattctatgaagatgtgttattgtggaaactaattttatgttccgcatgacaaataaggttgaacacttcatcactatattggtcacctagaaattgctctttttgaaattgccaattcaagattttgcccatttaaaaaaaatcaggttgtctctt

SEQ ID NO: 792353 - DNA, 545 bp, Homo sapiens
cttaacaaaaataaaaatttacctaaatagatgaagcagattcatcagtaatatgaccacctgtcataacaatactataacataacaatacacaatacctaaaaaaaaataataattcaggcgctttagatgatagcatccacaatgtcaaatattaacttaacaaaataaaaagtrtaaagtaggaaaatgtaactactattgccattactactaacaataaaatattaaaaataaagcaccatcaaaatagactctaggatgacccagatattggaatcattagaaaagaacttaaaatcaggtattaggtagattgtgataagttaatgatacatattaaaatgaatagtgcaaacaatacaattagtaaaatagaaaaaatgaaaatagaatgtaaaaaatattaaaaataattgattaaacaaaaacaatgcataacagaaagaaaaaaattgaagtaaactacactaatataaatgactgaaagtgtcatccatgtcatatatactgaaaaatttaaaaatataatagccaagatattt

SEQ ID NO: 792354 - DNA, 695 bp, Homo sapiens
aaaagtccacgcttgtgttcctttcagagtttccactagaaaccatacttgttttccagagcaacacttctcccattttttttttttttttttgcccaaatgcctgagcatttgattaagccagaagtggttccaggattaaaaatgaaaggtttctgggtttcaatcagagactaagttgttcacttttttttttttttttttgagacagggtctctctgtcacccaggcacgtgcagtgtcacggtcatggctcactgcaacctctgccttgtgggctcgggtgatcctcttgcctcagcctccccagtagctgggaccaaaggtgcwtgccactatgcctggttaatatttttttaaattttttgtagagacagtgtcttgccatgttggccaggctagtctcgaactcctggcctcaaggaatcctcccaccttggcctcccaaagtgctgagattacaggtgtgagccatttcactcggcccctaaatcttaagaaaattctgagttcttgttttagagttacttgtttaactatttgtgttgttttgttgctgctataaagagtttttatagcagttgaaacacaagtaactagaaacagctaagtttactaagctattggagagtggcttagtaaagcagagtataagtataccaaagagccaatgacactaaatagccattaaaaag

SEQ ID NO: 792355 - DNA, 571 bp, Homo sapiens
acaccataaagttataatcagcaaaatctaaactgtgggaagccctacagtatcaactggtttatcccaaaaataaattgcaagggaagcaaatggttttgaagaaacccaaagattaaaagaggtctaaaagggccatgtgcagtggctcatgcctgtaatctctgccctttgggaggcagaggcaggcggatcacttgagctcaggagttcgagaccagcctgtgcaacaacatggtgaaacctcatctctacaacaaatacaaaaattagccaggtacggtggcatgcgcctgtaaccccagctactcgggaggctgaggcagaagaatcacttaaacctgggaggtggaggttgcagtgaactgagatcgcaccattgcactcaagcctgggcaacaagagtgaaactccatctcagaaaaaaaaaaaawaataataataatggctaagcccttcctccagagattctgattcaattaaactgggctttgggtatcactttttaaagttttccagataatgctaatgatttcttagaggaatatttttaggaccaagtgacacagtc

SEQ ID NO: 792356 - DNA, 530 bp, Homo sapiens
ggcctaacaaaagctattcctgaagctaggatatgggaagcctcagaaattgtatccttcctattcatataagtgaggacaaaaggtgtcactcttccaactctggagatcccttccctccctcagggtatgggcctccacttmatttttggggcatgacatctctataggacatgggtaaggtcccaatactaacatgagaatgcttaggactctaaaaagttttgaagaatgcatcagtcagggccattaaatccgatttttctcagtcctccttgtggtctaggaggacaggcaagggtacaggtttttgagaatgcatcagtaagggccactaaatccgacctttctcagtcctccttgtggtctgggaggaaaactagtgtttctgctgctgcgttggtgagcacaactattctgatcagcagggtccagggactgttgtgggttcttgggcaggggttgtttttgctgctgcattggtgagcgcaactattccagtcagcagggtccaaagaccattgcgggtt

SEQ ID NO: 792357 - DNA, 530 bp, Homo sapiens
ggcctaacaaaagctattcctgaagctaggatatgggaagcctcagaaattgtatccttcctattcatataagtgaggacaaaaggtgtcactcttccaactctggagatcccttccctccctcagggtatgggcctccacttcatttttggggcatgacatctctataggacatgggtaaggtcccaatactaacaygagaatgcttaggactctaaaaagttttgaagaatgcatcagtcagggccattaaatccgatttttctcagtcctccttgtggtctaggaggacaggcaagggtacaggtttttgagaatgcatcagtaagggccactaaatccgacctttctcagtcctccttgtggtctgggaggaaaactagtgtttctgctgctgcgttggtgagcacaactattctgatcagcagggtccagggactgttgtgggttcttgggcaggggttgtttttgctgctgcattggtgagcgcaactattccagtcagcagggtccaaagaccattgcgggtt

SEQ ID NO: 792358 - DNA, 658 bp, Homo sapiens
ccagaggatggggaaccaatcgagcatgactgccaacaaattacagtcgagacttatgccacccgagatgatctctgagacatccccttagctaatcctgaccttaacctatataccgatggaagttcatttgtggagaaygggatatgaagggaaggttatgccatagttagtgatgtaactgtacttgaaagtaagcctcttcccccagggaccagcaccgagttagcagaactagtggcacttacccgagccttagaactgggaaagggaaaaagaaaaaatgtgtatacagatagcaagtatgcttatctaatcctacatgcccatgctgcaatatggaaagaaagggagttcctaacctctgggggaacccctgttaaataccacaaggaaattatggagttattgcacacagtgcaaaaacccaaggaggtggcagtcttacactgctgaagccatcaaaaaggggaaggagaggggagaacagtagcataagcagctagcagagacagggaaagaccagcagaaaggaaagagagaaagagataggaagtcagagaaaaagaaagagaggaagaaacagacaaaaagaaggagacagagaggaagagacagagagacagaaacagagagacaaaagtcaaagaaggagaaa

SEQ ID NO: 792359 - DNA, 561 bp, Homo sapiens
aaagaaaaaacagtgtaccctattcctttaaaagccaggataaatttaaaacctataattgataattgaaggtcttctccatgaccctataacactccaataccactttgttgtcagcgcaaacaagggcatagccaaaaagcactgaggccactgacaacccgtagccttcctatcaaatatccttaacccagcaggtttcctaacaggggatctaaatttgaaggtctgaccagacctagtaggaactcccttcaggagaggatgatagatggttcctcctgagcgattatggaaaaagacacaatgggcattcagtaagtgataaggaaattcttatagaagcagagttaggaaaattgcctaataattggtctgctcaaatgtgcgagttgtttgcactcagycaaatcttaaagtacttacagaatcaggagggagacatctataccaattctaagttaatatggactgaacaaggttttattaatagcaaagaaaaattaaaatcccaaacttacaaggttttcaactaaagtaaagtttgctaaaagttaacag

SEQ ID NO: 792360 - DNA, 570 bp, Homo sapiens
tctataaaccactgcaatgacttccccaactgcttcaccacttcaacacatttcccatctgaatacttctagtatttgattcggttctgcctcatgttgtactggccttagagtctagagcagctgaagacatttttgaagtctggaacaaaaatcaggattgagacagaaaaatctggctgcggacaatgaggacgtgtactagggggttaggattcaatttgaatgtccaattacatggttacaagcctgtttatgccttatgcttttcagataagaatcagattttggaaggaagaacacaatctttgccttgctcaattaaaaaaacagatttttagaacttcaggataagtrgcaaaaaataaaaataaaataaaaaatagatttttgtcttgttcattctgctgtttttcaggatctcaaataaaaagtttgatggggccgggcacggtggcacatgcctgtaatcccagccctttgggaggccgaggcaggtggatcacttgaggttaggggtttgagaccagcctggccaacatggcaaaaccctgtctctattaaaaatac

SEQ ID NO: 792361 - DNA, 610 bp, Homo sapiens
actaagagccacagacaccagagtgaaagcccaagccctgatttgccaaagccatttgagatgtagaatattaccttccccaaatcactgtgagtgaagtctttcctcgaatgcaaccaagcttttcaagaaaccactttttaaaatgtgactctgacattgtaaaatggttatttttaaagtaaaatcaatttttagttagtatttgtgttgccagacacatcagattgtttcttggttttagtttcttcttctttttaatgtataaaatacaggttaagtagatctaaattatgtgaaatatgatwctcactagctgttataaaatccaagtattattttattatagagtgaaaagtcaagttaaaaatctagttaatgcctggcctgatttgatatgctgagataatccttttttttttttcaatagggctgatattagaggaaatgagctttatacaatgcctttggggtagagtgcacttactgtgtagataactgtaacagctcactattgctgcataacaagcaaccccaaaactcagaggcttaaaaaacataaacatttattcttattcatgagtctgcaagtcagctggcagttctgctg

SEQ ID NO: 792362 - DNA, 519 bp, Homo sapiens
tacagacgaaagcagatggtgttgcaagcgcttagtacacagagggagcttctgcatgctgtctcgctcctgcattgtcacagcacactggggctcagcagacaggaggctatttatggattcacaagttaagaagtatgtgtctgttggaacaggaaragtcccaactccctattgacaccttccaaatggcagcagagtaaccctcaaattgcaagctgtctctaggctcagcatccaatttccaggactcattgacagacagaggaccctgtcacatttatccctattgaaatattcctgccttagtgagggatgcctctcggtccagacgataggcccttgctcagacctcagcatatttggcagtggacaaattcatctgcagactgaaagttgaattgtgttgaaattcaggacaaatctcaaagcagatttataaagcttaaattagcatttaaaagctacaaacaaaacactgagtccaaataaactaagttaaaaaagtcttaatctttt

SEQ ID NO: 792363 - DNA, 532 bp, Homo sapiens
actctgttgcccaggctggagtggtaccatcatggctcattgcagcctccacctcccaggctcaggtgatcctcccgcctcaggctcttgagtagctgggaccacagatgtgtgccactatgcctggctaatttttgtattttttgtagacatgggttttcaccatgttgcccaggctggtcttgaactcctgggctcaagcaatctaccagcctcagcctcccaaagtgctggaattacaggcatgagctactgcacccagctgacagtatattttaaaaatcatttctatgtcttctctattcaattggcaggtcaacaatgtagcgtcattaacatcaacaggtggaatccagcccctgtactagtgtaggacaggtgcrctggatatcctgtctttaagcccaggaggactagattggattgcatctttaagcatctttcttgctgcagaaagggaagtggataggggaaagttaggggaggtggggagataaattaggtggcccttaaaggagcccagatgtcctaa

SEQ ID NO: 792364 - DNA, 625 bp, Homo sapiens
caggccggcgtgtgcctattttcgcctgggtcacgggtctaggctgggattccgcgtctgtgcactgcttgtcacggtagtgtgagccgaggagacgctcatcaaggtatgtagggtggggaccaggacagggcacgccctgtctctccagacacacactgaagggacttccttcccatatcagtctctctacagaagacagttttagtttgagcttttgattttcattactccttttcgaaaatttgaaaggtcctgtcaatgtttgccacaaaaagacttcatcatcggcttgtccgcattcttgtgattaagcctctgtcacctggacccagtgtgctaggcagacttgcttctcatccaccaagcgagttcctggagatagcagtggtctcaggttcagatcargtggtgggtgacagctcgtggggcagggcagtggggagctgagggaggttagaattagaaacagtgccatcggtcacaaaacatcagtgtccaggactggtgggtgagctggcaccagagaaggaggaatgcaataaaagtgggaatagtcaggtttctgcctccaggagcagtggacacggaagcagatgaaagggtgacggtcaccacaaacaca

SEQ ID NO: 792365 - DNA, 625 bp, Homo sapiens
caggccggcgtgtgcctattttcgcctgggtcacgggtctaggctgggattccgcgtctgtgcactgcttgtcacggtagtgtgagccgaggagacgctcatcaaggtatgtagggtggggaccaggacagggcacgccctgtctctccagacacacactgaagggacttccttcccatatcagtctctctacagaagacagttttagtttgagcttttgattttcattactccttttcgaaaatttgaaaggtcctgtcaatgtttgccacaaaaagacttcatcatcggcttgtccgcattcttgtgattaagcctctgtcacctggacccagtgtgctaggcagacttgcttctcatccaccaagcgagttcctggagatagcagtggtctcaggttcagatcaagtggtgggtgacagctcgtggggcagggcagtggggagctgagggaggttagaattagaaasagtgccatcggtcacaaaacatcagtgtccaggactggtgggtgagctggcaccagagaaggaggaatgcaataaaagtgggaatagtcaggtttctgcctccaggagcagtggacacggaagcagatgaaagggtgacggtcaccacaaacaca

SEQ ID NO: 792366 - DNA, 531 bp, Homo sapiens
aggagctcccttgtggccccgccggctcttctgcgtgagacaggtgtcaaatgaagaaggccagctctgggttctaaacaggcccgaggcgaggatgccgccggctgccggcaaatcgccccaccgcacatcacagagtttttccttgacctgtgagttttagagtcagatgtaaagcsgtcaggccacacctccttacagacaaggagagactgcgaaggactgggggaggagcagggctaggattccctctcctgtgtctgggcttagtaatcgctaagcgactgcgcgtccttttctttctgtgaatttgggggagacacacaggcgtggtctgggcaaaggctctctctcctgttggtcagggcctactcgcaagtggtgcccccttctgagcagggctcagggtgtcatctccctagcacgtctagggtggtcgctggagctgctgaggagcagggagggcccactcagccccacctcaaaaagacatcaactgtctcccaccgaaggggtgccggaggggaaaag

SEQ ID NO: 792367 - DNA, 612 bp, Homo sapiens
tttcctgtcttgcttcctcagttccagtgcacagctcctcaattgcagcttcctggctctactgcacttaccagcctgtcctgccaccagatcacccctcctgaccgggacagacagtgggcatgtggcacccacagaggagacatgaatctttatcaaactcctgttctaacagaatttcttgtctaacaaaaattgccttcacaaaacttacwgcaatcacaattgttgtgtttgttgatttactttttgtcacctcccctacgaggtgatgagctttcagggatggaggccttttcattgtgctcactgttgtatttctcatgtccagagtgctcaatgcttacttaccgagtcaagttaaacatgccttgatacacatcaaaaggaatatggctttctgcagaataatcaccttggtagacatttttcccctaaacgttttaaaacaaggcttctaaaattgtcttcaggaaattaaatttagagtattcataagaaaaagaagacttgatgctttatgcatccaagagtaaatgaaacacagggctatattaatatttaccaaatcagctgaaatccaactgcttagagagatgcttttcagtggct

SEQ ID NO: 792368 - DNA, 575 bp, Homo sapiens
ctgatggcctcattttaacttaatcatctctttaaagaacctgtctccaagtacagtcccattctgaagtactgggggttagaatttcagcatataaatttaggggggacacgatttagctcttaacatgatctgtgcctttgctggcactaaggcaagtcacttaaaaaagacaaaagatgcaagcaggacttgcctcaaacctggccctgtagattagcacgtccaactctgacatgactttcccaggcatggcggacgccgcagcagaggccctcccagctggtccggggagaggctctcagggccaccagatgcttagcttcccaggccccgggaagggcccgccctgccaccagsctcgtgctgccgctgtcttaggccaacctctcaacagtcgattttcctagctccctattccaatttcattgaccgattcatcaaaaataaggcccttctatctgccaggcagtgttctagggccttggagttacagtcacataccaaatagacaaacatcccagcctttgtcaagcttgtatcctggtggaaaagtggagaggagacaacacgag

SEQ ID NO: 792369 - DNA, 575 bp, Homo sapiens
ctgatggcctcattttaacttaatcatctctttaaagaacctgtctccaagtacagtcccattctgaagtactgggggttagaatttcagcatataaatttaggggggacacgatttagctcttaacatgatctgtgcctttgctggcactaaggcaagtcacttaaaaaagacaaaagatgcaagcaggacttgcctcaaacctggccctgtagattagcacgtccaactctgacatgactttcccaggcatggcggacgccgcagcagaggccctcccagctggtccggggagaggctctcagggccaccagatgcttagcttcccaggccccgggaagggcccgccctgccaccaggctcgtgctgccgctgtcttargccaacctctcaacagtcgattttcctagctccctattccaatttcattgaccgattcatcaaaaataaggcccttctatctgccaggcagtgttctagggccttggagttacagtcacataccaaatagacaaacatcccagcctttgtcaagcttgtatcctggtggaaaagtggagaggagacaacacgag

SEQ ID NO: 792370 - DNA, 629 bp, Homo sapiens
catttctcaaaaatttgcatttttttcctcttaagttcaaaggacaatttattttagtcatattcactcatgtctttgattacagccccattgatgtttgcagttttcaaggactctcaacgctttcttttccatgtgtttcttgttcattggatatcaatatacacacatcattcatcatttattttctacaagtgctacmttctctccattcagtagccttcccaaatggccatggagacattctcccttgccttatacatcatttattattgactttattcctttcacttaacttgagacttgatttttcatgtctattcatttcgcctattgttgagcctttctggttcacatgtgttcggccttcaatgcaattatttgcaaaaactactttggttaactctctttccacttccagtgggaatttttcttcccaaacagctcaaatttgtttcagggtatttttttatattacagcttttttaaaagaccatttggggaatgtgttttggataaatcaggctgaagtgtattgaagttctttgaagttggatggcccctggctgggtggattgaactctggtacagtatatttaacaggatctcagaagagataaataccaata

SEQ ID NO: 792371 - DNA, 561 bp, Homo sapiens
agtctaaaactatatttttaaaaagacagagaaggtcattatgtaataataaagagatcaactcagcaagaggataaaggaattgtaaatatatactcacataacagtaaagcacatatatatgtgtgtatatatatatatatgtagggggagwtagacttcaatacaatcatagctggagactttcatacactactcacagcattggacaggtcatctagacagaaaatcaaaaaagaagcactcgatttagactgcactatagaccaaatggacctaacagacatttatagaacatgccatccaacacctgcagaatacacattcttctcatcagcacatggaacattctctagaatacaccatatgttaggccaaaaaaccaagtttcaacaaatttttaaaaactgaaatcatatcaagtctcttttctgaccacaatgaaataaaactagaataacaagagaaactttagaaactgtacaaatacctggaaattaaacaacatggtcctgaatgaccatgagtcaatgaagaaattaagaaggaaactaaaacatt

SEQ ID NO: 792372 - DNA, 467 bp, Homo sapiens
atatgcagctggaaatactataataaataacacagctcccattttaaaggagggcaaagctgggcacggtgactcacgcctgtagtcccagcctttaatcccagcactctggggggcctcagcaggaggatcactaagctcaggagtttgagaccagcgtgggcaaaatagtgagaccctgtctctacaacaaataagataattagctaggtgtgggagcatgcaccctgtagtcccagctacttgggaggctgaggcatgaggattgcttgagmccagcaggtcgggctgcagtgaaccatgatcatgcccctgcattccagcctaggtgacggagcgagaccctgtctaaatatatatatgtatatatcccacagttctggaggctgggaagtccaagatcaaggcaccagcaaagtcggtgtctggtgagggctggctctgtttccagctgtgccttcacatgg

SEQ ID NO: 792373 - DNA, 544 bp, Homo sapiens
tcttttactcagcataatgcctctgagtttcacacaagttattgcaagaatgaatgcttcatttctattatttctgagttacagttcattgcgtggacgtaccacagttggtttatccattcatcccttgaagggcatttggattatttccaggttttgcctattatgaatacagctacagtaaaatgtwcatatatcggttttatgagccaaaatatttacttttctagagtaaatgcctaagagtgggactgctgggtcagatggtaattgcgtgtttaattttataaaaatctgctagactattttctggagtgactataccattttgcattcccaccagcaacatatgagggttctaattgatccacatatttgccagcacaggagtgacagtatttttaaatttatccatcccaataggtgtgtagtggtatctcattgtgcctttcccttgcatttccttaatggctaatgctgttgaacatcttttcacttgcttattttccatctgcatatcctctctagtggagtgttaagtctt

SEQ ID NO: 792374 - DNA, 567 bp, Homo sapiens
tctcagtaataattttattttaattctatgtgaagcagaaaattcttcatggttgggacgagtgaaaaggtgccacaccataaaaatccaggaggtaaagtcccttatttcaccagctgtttagacatctgtgtacccatccttgatttggagggtctgaactaattctgtccctcaaaaccagcccttacaatctcatgcacccacctcttccatgatagtccccgggcccagagggagggtgcctgtacrgttttagtagctgggtatttgcagtgaaaaacagatcaggccaagtgggattccaagtacaggagacgcacaggctttgtcaaatcatctctagtcttcagaagaccatgattctggtgttcttgcatgaagtaaaactatgagagataagtaatgttaacaatttgacaattaaaagagaacgtgtgtgtcagaacagaagaaggaatctattccattagggtgccaactaaaaacatgaagaaaattataacctggattcttgcagccagaaataactcatgattcaatctgtacgcaaaaacaaaacccagg

SEQ ID NO: 792375 - DNA, 464 bp, Homo sapiens
ttaaagtttgagaattatggctataaaggtataatggtccaaaagcactttttcagaaaatctaaatagttaacaaaagtcatatttggtgccacagatctaaaaatttagttatttagcaaccaaggcctcggagaaagataatggagctgataagcagagcccaggggcaagttcagccctaaaaggaagctgagggatgttgtgccttgcgccakctcccctttagatagagataggcgttggcactcaggcactaattggtaccctaaaatgcctagagacctatggacaagccctgccctgtttcagaacagggcatgactgaatgacatcctgtttaattaattgaattcccttgcaatttgaggatctgaggtgaaagaaagagaggcagggagggagagtccgagagaaaggttttcacataaatttctaatacatctgggattttgattttcttc

SEQ ID NO: 792376 - DNA, 541 bp, Homo sapiens
aaaatgggaaatattcaaatagtatggaggtttactttttttgatttgcttcttacttaacagaccatttctttttctttattggttcgtttgtttgttagttagacacattgtctgggaaagggtgattgagagaakgctggatacactggagagggaattccaagattgaaattctctgagatgggcagaaaggggactgaagggcacaggacagtaaacatcaatggaaacatccctttctccctcagttagacctgggcttggatcctggctcttccatttcctagttggatgcccctgggcaatttaatgaacttttgaatttgtcgatctttaaatgacagtaaacatagttacttagtgtgcaaacatcctgttacattctgttttactgggaaacgatatctttgaatatctgctgtatatttcataaacgaatgtacttttgcataatgtctaatttacttggtggtacaacataatgacttgagaagacaaatacacagaggaagatttcttgggagagtttacaacagat

SEQ ID NO: 792377 - DNA, 602 bp, Homo sapiens
  misc_feature 1, 2, 3, 4, 5, 6, 7, 8, 9, 10, 11, 12, 13, 14, 15, 16, 17,18, 19, 20, 21, 22, 23, 24, 25, 26, 27: n = A,T,C or G
nnnnnnnnnnnnnnnnnnnnnnnnnnnactcatatattgtttgatcttgtttcactgcatgtacatacatggtatattttctgtgttcatgctattaaaaaatcccataatgtcccatgttctaaggagaaaaagtatttttgggtttaggcaccatctctatctttgtgacttagtcaatttactccaactttctataactcaatttcttcatttgcataagggggataaaaaggtttgccttgtgtattagtaagaattatgtaagatgatatttacaagtgctctgtatgtagttcttgctttgtgartgttcaaaccaaccattatttggtcatgccaagaagcaagtgaagggtgagaagagactattttaaattaagattgttaaaatgtttttcttcattcagctggcaatgaataccaaaatgtgtatctacactcaagaaagatttgtctacattaaagattaagtagttccataattgttttcttaacataactagggacttgggaattattactaatctttttatttgctctttcagtaaatcatttcaattatcctttgctctttaagaagttaccctaatttggccggg

SEQ ID NO: 792378 - DNA, 629 bp, Homo sapiens
tttctttcctccaaagtatgtttactcattttgaaattcaaagtgtcataattagttttcacaaaaaaacttactgcctctgggtttttctttaaatttattgaggaagaaactgattactaaattgtcacactgataccttcatatatccttgttcaatcccccaccctgaaaatcacatttggatttttcaaacctgtcctacctgttcagttttctagttatggagatgcaatgatggtaatcatatatgatcgtgacagacaagaacactgttcataattatttctttcctctcctttcctaatatagtgtatagaatccagaaactattgacttagaccaaggactcaacttttgtcaaagccttaagagctctgtcctcttctccctattgggaaccccagcagagggaggacataggcatatggcagtaacagctggcttggaggtcccagatgcacccagaaatcctcacttgtgacagaggatrtatgctttggagacaataacagatttggatcaaaatcttggctctgcccttggttggtgggacttaagaacattgttacctagcttcttgagcctgtttccacatttacaggagtatggattagacgaggtccatc

SEQ ID NO: 792379 - DNA, 612 bp, Homo sapiens
cagaagtagaaattggaggggtcacaacgtgggtttctagggaactggtaatattttatttcttgatctaggtggtaattttacaaatgagttcactttctgataattcattgagctgtacatttatgatttgcacacttatctctatggtcatacttcaatctttcaaagtttaagaaaatccaaatgctaacaacaacaacaaaactctttcmcctgtttacttgccacccctcatttcccctcccctgttgaatagccttatttagcagcttcaatacttaataaactttggtagtccttagtgccgttccacttctctcattccaggcacatgatcccattgcatttccttgctgtcctgtggttgggcagggttgtgtgactagttctggccagtgagttggaagaggaaatgatgtgtgtcactcctgggctacagcatccaattgccagtatgcgatccatgggatgtattttgttctctgctgaagtgacatgcaatttttcaagttagtgctccccatcagtcttggtcccagagagaggatgacatagagccaactcacagtagacatgaacagcaggcatgcatggcaggaaataaacatt

SEQ ID NO: 792380 - DNA, 610 bp, Homo sapiens
ttatgtctagattgttttctttactgctgttttcttattcaaagcaatatctggagcatgaatctttgtttctggactctgtttgcacattgcagttctttacaaagagtttctttacctagattctaattagccaaacttctgaatagacagcaaccgatggcagtatctgcctcttaagagtttgaagtcagccaggaaaacggcrattgagtgaacaatgcaaggccctggagttgcaaggtcacacagacttagggacagagtcaggctcatgacaagccattgcctatgcaagtcacaattatgagaggaagtaattaaaatctcactgaagggcggaggttgcagtgagctgacatggtaccactgcacttcagcctgcgtgacagagtgagactccgtctcaaaaaaaaaggctcactgaggaaacagttatgaaacaaagtcatgacatgatcaggaagggcaaatatatactttttaattccaaaaaagaataagaaagtaagattgcctgaggacttttcagtcctatgaagtaaaagtctttattctgcatttgattctaaggaattttccggtattcctaaaatataacgtttatatt

SEQ ID NO: 792381 - DNA, 610 bp, Homo sapiens
ttatgtctagattgttttctttactgctgttttcttattcaaagcaatatctggagcatgaatctttgtttctggactctgtttgcacattgcagttctttacaaagagtttctttacctagattctaattagccaaacttctgaatagacagcaaccgatggcagtatctgcctcttaagagtttgaagtcagccaggaaaacggcgattgagtgaamaatgcaaggccctggagttgcaaggtcacacagacttagggacagagtcaggctcatgacaagccattgcctatgcaagtcacaattatgagaggaagtaattaaaatctcactgaagggcggaggttgcagtgagctgacatggtaccactgcacttcagcctgcgtgacagagtgagactccgtctcaaaaaaaaaggctcactgaggaaacagttatgaaacaaagtcatgacatgatcaggaagggcaaatatatactttttaattccaaaaaagaataagaaagtaagattgcctgaggacttttcagtcctatgaagtaaaagtctttattctgcatttgattctaaggaattttccggtattcctaaaatataacgtttatatt

SEQ ID NO: 792382 - DNA, 596 bp, Homo sapiens
acgaaactaataatctataggaaacccagaagcaaaaccttttattcctttgtaggatagtatcaatatatgaaccattgtgtttataatgataataatattaccatggtacatatttacagtgtttgttatttgcctgacatcatgctaagtactttcctttccttatttcattttatcctcaaaattattctatatggtggtttcttctattatctccaccttacagatgaggaaacaatattagagtgctgagtacttacttgaccccaggctgtattagaagtcagtgggggaggggctatcccagatgtgattcctctccaaagtcctcatcttgaccacggtaggaggtgggggctgcctcaccaycactacacctgtattctacttgtaattctcactagcaagggagactctttttaacttcgagaccgggaatgaatataaccaatgcatacagcaaagattcccagagacataaatttcaaagggatatgatatatcacagtgactcttacaggggaagtggtcattgggtatagcataaaaggagaaataggaattcactgtggaggaaactttagtatagaggg

SEQ ID NO: 792383 - DNA, 538 bp, Homo sapiens
tctcaaacaaacaaacaaacaaaaaaagtaaagacattggattatattagatgacagaggagaaaaattaaaccaaccatggaaaatttttaacaattaatgtctctaggagaaggatatcagttcattgtatgcttataatttttataggtttgggttgtttttaaataaaaagctaaaattttatagtattctattgcaatatacgtcattatatggtgatggttgcaaatttggatttctttcaaaaatacagctattcaatatatctgaaaattttatatttctaaattatttcttctaaagataattaaaagagaaactatattccgcctgttcataacgccttaggcattgttgtttacagmaataggtgacatattatgctacaggttctgatgatggccaatgaaacaaagtaatttacaaagtcctttgccctgtgtcctatatttgcagcaattcattgctttgtgagtggcagaagctattatgttttgttcacatctcaatgtgggtcatttacagaaacctagtg

SEQ ID NO: 792384 - DNA, 558 bp, Homo sapiens
actatactgcagaaacacctaacccaaagactaactttgggtaagtggtggggtctagtaacatctttttgacaaacctcgaagggacaatactgaagaaacaacccgaccaaaaggaaataaactgcagcactgattgtcccattttgggtaagtggtggggtacccaggtaaaggacgcgattgggttagaggcccaatttagaggagttaaagtctctcataagacagagtgggttagaggcccctcttaataaaaggcaaggacacttgaccaaccttgggttagaggcccaacttargaaaattaggttcccttctaagacttagggggttagaggctcctctcagtaaattcccttttggctaagaatgagtttggcactacaggatgttaactgctattatctttggaataatctgccttgcaccctttgctgtgggtgacaggattaggcatgtacaggatagtgggatatggggggcttttttctccccaaaaacgagaaagttgagagctgatgggactgctggaaaatatgccttcacaactgaaaa

SEQ ID NO: 792385 - DNA, 558 bp, Homo sapiens
actatactgcagaaacacctaacccaaagactaactttgggtaagtggtggggtctagtaacatctttttgacaaacctcgaagggacaatactgaagaaacaacccgaccaaaaggaaataaactgcagcactgattgtcccattttgggtaagtggtggggtacccaggtaaaggacgcgattgggttagaggcccaatttagaggagttaaagtctctcataagacagagtgggttagaggcccctcttaataaaaggcaaggacacttgaccaaccttgggttagaggcccaacttaggaaaattaggttcccttctaagacttagggggttagaggctcctctcagtaaattcccttttggctaagaatgagtttggcactacaggatgttamctgctattatctttggaataatctgccttgcaccctttgctgtgggtgacaggattaggcatgtacaggatagtgggatatggggggcttttttctccccaaaaacgagaaagttgagagctgatgggactgctggaaaatatgccttcacaactgaaaa

SEQ ID NO: 792386 - DNA, 607 bp, Homo sapiens
tctttgtatgtctttctgtattgttctgtcataaaagaggagtaccttaggatggaacatggccctaggaccccagagcccactattcaagatggcccagaaaactggttacaaactttgctgcagttccctgaaaaaaaactggatgaggtttccctcttgccttttatgtccttggaagcttgacattataaccacgtggccatgctttctctttttacaatagtagcccaggttcaggttttaattcctggcttgcagaatgagtcctttatcttctgtctgtctgtataattatatgtgttatgtgtgtgtaatataaaagagcattaattaattggtttaataataataagagcttaaattaaatattttgtcagaaaagtaaaagtgtaatgccttttatttagttcatgtgacttaaatctttgggaaataaagacctttctaaakattattggtaaaataaaaatatcttcaaaaatgtaagcatttggtctaaattaagcaggttagacattaagtttgctaaatgctttaagtccataaactgcttctttgacttttgaaaattgttcaatttacctaacttggacattagattcta

SEQ ID NO: 792387 - DNA, 579 bp, Homo sapiens
cccatccggcatggactcggaacctggcaggtgccaggcctcatacccagtatcagcatgccaggggggcagggagtctacaactgagaatgaccttctgccaagctaggtatcccagggatggcccgcgctggccacctctgtttggtatcggttgcagcctttgcttctgaaggacacaggatttaccttcagccttaagacttggggccactagggtggtaggtgcagggaggaggcccgaactccakgcaaggaagagtcttctaagcatggtgagctccccactactggtggtagggaagcagagggaggaagccatttccaccccctcccccggggagtgggaatccgtgtccctcagcagcctctgcccactgagtttcattaatgggcaatctgccaggccgcgcctcgcccctggggagcaggcaccagccgagccggggtgatttctccagcactgctcggaggccccaccccgccccagaccatctgtttgcgcagctccaggtcgtttttcaacacgtcagcagcacgaccgagaaacgtctctggctccggaccaccccgccagct

SEQ ID NO: 792388 - DNA, 579 bp, Homo sapiens
cccatccggcatggactcggaacctggcaggtgccaggcctcatacccagtatcagcatgccaggggggcagggagtctacaactgagaatgaccttctgccaagctaggtatcccagggatggcccgcgctggccacctctgtttggtatcggttgcagcctttgcttctgaaggacacaggatttaccttcagccttaagacttggggccactagggtggtaggtgcagggaggaggcccgaactccaggcaaggaagagtcttctaagcatggtgagctccccaytactggtggtagggaagcagagggaggaagccatttccaccccctcccccggggagtgggaatccgtgtccctcagcagcctctgcccactgagtttcattaatgggcaatctgccaggccgcgcctcgcccctggggagcaggcaccagccgagccggggtgatttctccagcactgctcggaggccccaccccgccccagaccatctgtttgcgcagctccaggtcgtttttcaacacgtcagcagcacgaccgagaaacgtctctggctccggaccaccccgccagct

SEQ ID NO: 792389 - DNA, 558 bp, Homo sapiens
accaatttcttggaagttgaaaaagtattaaacttactcaagaataatagataactagaacagtcctatatcaaatcgaaaaattgaattaatagtttaaagtatcccttaaaataaaacctacagcccaaatgattttaccggtaaattgtcgtaacatttaaggaataaataataccaattctacacaatttcttccagaatatagaaaaagagaaaatactccccaactcattttttgaggccagcattattctaatgtcaaagtaagacaaagacattacaagaaaaaaaaaaactacagaccaatatttgtaatacacagagacgcaaaaattctcaaaaatattgacaattttaatccagcaatatgttaaaaagttaacatgctgtgattcagtggggctcagcaaggakggtttaatatttgaaaagccaatcaatatgatttaccatgttcacacattaaagaagaaaaaacatagaatcattgcaatagttgcagaaaaagtattttgtaaacttcattattgattcatgataagatctttcagtaaa

SEQ ID NO: 792390 - DNA, 585 bp, Homo sapiens
tctccatccagtctctaagagaggatccttggctcatgtgcaggaggaaacgcaagcctagtcgcagagtgtagtgagaagagagtttattgaaagctgctcctttacagagtgggggcgtctgtccacagaaagcaagccaaggaatacaccgcctgtgttttcagtttttcttatataggggtcttatctttgtaaacactagggccaggcacggtggctcatgcctataatcccaacacttttggaggctgaggtgggcggatcacctgaggtcaggagtttgagaccaggctggccaacatggcaaaacyccgtctctactaaaaatacaaaaattagacaggcatggtggtgcatgcctgtaaccccagctactcagaggctgagacaggagaatcgcttgaattgggaggcagaggttgcagtgagccaagatcatgccactgcactccagcctgggcaacagagctagactccatctcaaaaaaaagaaagactaaattaagctgtgcctatgtgcgggtgggctgataacatgataacgtttattactttattgatttaaagaaagctatccccgac

SEQ ID NO: 792391 - DNA, 585 bp, Homo sapiens
tctccatccagtctctaagagaggatccttggctcatgtgcaggaggaaacgcaagcctagtcgcagagtgtagtgagaagagagtttattgaaagctgctcctttacagagtgggggcgtctgtccacagaaagcaagccaaggaatacaccgcctgtgttttcagtttttcttatataggggtcttatctttgtaaacactagggccaggcacggtggctcatgcctataatcccaacacttttggaggctgaggtgggcggatcacctgaggtcaggagtttgagaccaggctggccaacatggcaaaaccccgtctctactaaaaatacaaaaattagacaggcatggtggtgcatgcctgtaaccccagctactcagaggctgagacaggagaatcgcttgaattgggaggcagagkttgcagtgagccaagatcatgccactgcactccagcctgggcaacagagctagactccatctcaaaaaaaagaaagactaaattaagctgtgcctatgtgcgggtgggctgataacatgataacgtttattactttattgatttaaagaaagctatccccgac

SEQ ID NO: 792392 - DNA, 552 bp, Homo sapiens
ttctatgggggtggatccccgtctctatggagcatccttcctcctgcaagatttgcttccaaagagtcaaagtcatggagctccaatccctgaaacagaggcagccccttcctttcattccaagacaggagggacaggaattgggtcccagatacggagtttgactgctaccttggaaataaagagcaagataagatctgcagaccagtgtggaagagagacygctttccttgaggacactgcgtggcaggatggatttaatatggggaggcagggggcagaatggacagaaggccactctggtgattcaggagacggtgacagggactgttgcttgagccttgttcgtcagaacgaagcgaatgagggccaaatgtgcccacgcccctggtcttgtaggagccgccttagaggaagtctgacaggcctgcccagctcccgcctgctgacttatgtttgttgttgggtgagcatcgggcggtgcccatccagacacaggcattgggcctggcgcagagtgaggcagggcgggttcggaccccccactgtgcc

SEQ ID NO: 792393 - DNA, 609 bp, Homo sapiens
acaccattaggaggaaaaggtttttgaatcttactttgaatatcatgtcaaacattcttaagaaaagaaactgtgaggccgggcgcagtggcttatgcctgtaatcccagcactttgggaggccaatgcaggtggatcatctgaggtcaagagtttgagaccagcctgaccaacacggagaaacctcgtctctactaaaaatataaaataagccgggcatagtggcgcattcctgtaatcccagctactcgggaggctgaggcaggagaatcgcttgaacccaggaggtggaggttgcggtgagccgagatagtgccattgcattccagcttaggcaacaagagcgaaactccatctcaaaaaaaaaaaaaaaaaaaaaaaaaraaagaaagaaagaaaataaactcattggaggtaattttatcaaactcaaaaccacacagcgtctctagaaaatgttcaaggatatcagatacttatataatagagttgtctggtgtgtcttcttttttctgttaccagcttttcctattggacagttgattgcaaaccatcctgaaacagtaggatattacaccttttacatattgaattacatattgaatattg

SEQ ID NO: 792394 - DNA, 628 bp, Homo sapiens
ggccaggaggtgctactaggatcccacggtctgtgagcaaggaatcagttgcctcaatgggagctgactcaggagatgactttgtaagtacctttacttaagaaataaagatacttttgcagggtattcttccaataaatattttaaattgcttgattatttcatacctttcatggtttatagctgtacaagagcctgtacatctgattcttcttactctgaggtacctttttgttaatgtttggtttgtaaatgttaaggtactctatwtttttttccttatttttctgtgagttcctctccatattctctccagtgtcctcttgtactgtttttccgtctatataccttatacatcttcttttgcatttcatttctgaaaatgtctgggcctgttttcattgcagacatatatacttatataacaactaagtcattgctgcttaacaaggtctctgagttgtggtatggggttagcaagagtgcattgttgtattgggacgattgttggaaagatggccccagtgattacagtatgttgctttttttcttttttctttcttttttttttttttttgagatggattctcgctctgtagcccaaagtggagtgcagtggcctgatctt

SEQ ID NO: 792395 - DNA, 578 bp, Homo sapiens
acaataaagcattaaggataaataccagatctggttttagtcacagaaatgagagcgaatagaagtaaagataacaaaatggagtatcaggaaataggcaagaaaaggaacacgaaagaggaatccatttcacccaattttacctaaggtcagacatttggtgtgccactgaatatacgagatcttaagttagtctgtcagttccagactcaggcctcttctcttcccccaaatcatgccacwctgcatctacagactctcacatattacattctggaaagacaggctggtagccttaaaaacaaaaaacaaacatccaaatattgcccatagagtcaaagacctgaattcaaatcaaacttcaaaacatcctccttccaatatttaatacacccttttatgtataagcctgggtgctggtgctgggaagcgagttacagtgatgaataagagacatgtgttatcttcaggaagcttacagtgtatcaactgtgccaattaacacttctgtgatcaggggaaagtcacttatttgagcctcaactataccaaatgttaattcattggcaacatctata

SEQ ID NO: 792396 - DNA, 636 bp, Homo sapiens
gagcctttacttttcttcttattgccctcaacagcccagctgctgctatagcagtcagtccttaggaagcctggagaaaaaactaagggccttttgacaaactgaagttactggttattccatgagttccatggtgaaacatcaagctataccaagctaaacaggtttccctagccattcacttaacaaatacttattcagtgctctgcatttgtgttgttccctagtgaggaggccagaaaaataaacattttaacagttgacttaattgactgattttaaattgtgataggagtttgaaggaaacagagtcctaagatatagctacactacaaaagacctacattggctaagatggtcctctgtaagaaagtgagactttggctgatgcctagaagagaagaaattacccacgcagagacacaagtaaggtattccaggcagaagaaaccttacatgcaaatagctcaygtgggagaagaactgagtgtgttcagaactaagtacttcaaatgagcttgaagggaagaggttatgaagtgggaagggttggagaaagctacttccctactcttacaggctcgtaccctagacctcctcagagcctgtgttatactaatgagtatcatgaaggtt

SEQ ID NO: 792397 - DNA, 542 bp, Homo sapiens
acacaagtaaggtattccaggcagaagaaaccttacatgcaaatagctcatgtgggagaagarctgagtgtgttcagaactaagtacttcaaatgagcttgaagggaagaggttatgaagtgggaagggttggagaaagctacttccctactcttacaggctcgtaccctagacctcctcagagcctgtgttatactaatgagtatcatgaaggttaagagaaagatccagtatgtagttactcccaaatctaaagctggacctctaaaagacggatggccccattcgtctttgagaaatgctcttctaatgtaccaattgtgctggtaagacacagaagagttgagaggggcatcaataccactcttcttataaggctgttgacatctcagctaaatattcagagtgtctcaactgcttctctgaattctggcaggacccacctgcaaatgagaagatttccacagacaggctggtggatgagcccaggcaagtcagttatacgttcaaactgaaagagactataaaaacttgatttttaa

SEQ ID NO: 792398 - DNA, 607 bp, Homo sapiens
ttctacgaaagaaaatgttgttttcgttgggatagtctccaagccagagcttgctgggaacattatctccctttgtcagacgaaacttagttgttttttagtctcctctctttatcttgacacatttacaaattatcatatggacactgttgtggagtcactcagaatgagcatgatatcacagaaatgtcatgctttattcttatgataaaggaatttctatkcggagtgggaaggagagaagactagggaagaaaagagattggcaaggaaaagactggactactttagttatgctaggttttggactcaagtcagggagaatattagagagttaccagttgggaacaaaccactttcacagatatttagacaatttataagaacatagactgggacaaataataaagacatgtgaactttcataggacaaaatgaaaaattacttgttttgatctgccttgcttgtaagtccttacaaactaccatgcctccaacgaacttgaggaatttgtaaataaaatactgagatctcatgattctaaatgtaggactgatataatcaacagctttttttgttgttgttgttgagatggagtctcgctct

SEQ ID NO: 792399 - DNA, 502 bp, Homo sapiens
ttgcctttaggcaaacaggtaacttgagttacacatctcttttctcatctgtaaaaggggaatatagaaagtgtcacttctggattcccagtggatttaaaaggcaaaaatgagattaacgatgtctatggccaagcatggtggctcacaactgtaattttggtactttttgaggccaagatgggaggactgcatgatccgagagaccagcctgggcaacatagcgagacgttatctctataaaaaaaattaggcatggtgtcatgtgcctgtagtcccagctcctcaggaggctgaggcaggaggatcgcttgagcccaggagtttgatgttacrgtcagctgtgatcccaccactgcactccatcctgggcaccagagtgagaccctgtctctaccaaaaaaaaaaattgtctgtgaatctcccaaattgctacagtttaataatttgcatccctatagaaacccaggagaactttaaagaacagaaagtaaactttagt

SEQ ID NO: 792400 - DNA, 555 bp, Homo sapiens
tggaagacttatgaaagaagaacatgattagttttaactttttcaggattaataagtagaaaggataggagatgaattttgaaaaaaccattgcatcacatcatataatgatatagttaccatctctgctaaaatacaaaaattagccaggcgtggtggcaggcacctgtagtcacagctactatggaggctgaggcatgagaattgcttgaacccgagacaaaaattaaagactgttctttcaaaatattctgagaagaaaggaaagtagatatgttkaggaaatatttaatcttatattaattatttaatcttatcagtctgcaaagagatgcccctccctgtctttgttctttgtcttcatgtatgatgtgctagttatttaatattgtgtctcttttgtgcttcggatcctgaatgacctcagctgaagtttcttcccttcttccaggtttgtttgatacttaaatattaagtatttaaatattaaaaaataatatgggtaatatttaatcttaatcctaatgacctgaatggcaaagacactgtactctt

SEQ ID NO: 792401 - DNA, 555 bp, Homo sapiens
tggaagacttatgaaagaagaacatgattagttttaactttttcaggattaataagtagaaaggataggagatgaattttgaaaaaaccattgcatcacatcatataatgatatagttaccatctctgctaaaatacaaaaattagccaggcgtggtggcaggcacctgtagtcacagctactatggaggctgaggcatgagaattgcttgaacccgagacaaaaattaaagactgttctttcaaaatattctgagaagaaaggaaagtagatatgtttaggaaatatttaatcttatattaawtatttaatcttatcagtctgcaaagagatgcccctccctgtctttgttctttgtcttcatgtatgatgtgctagttatttaatattgtgtctcttttgtgcttcggatcctgaatgacctcagctgaagtttcttcccttcttccaggtttgtttgatacttaaatattaagtatttaaatattaaaaaataatatgggtaatatttaatcttaatcctaatgacctgaatggcaaagacactgtactctt

SEQ ID NO: 792402 - DNA, 852 bp, Homo sapiens
atgtaatagtaccttttcttcctctaatagatatgatgagtaagaacaaagtcctcctggtgatttagaaaatcagctacctgttgatcctaagcagtggcttgagctctttcattgcactgtagttcacagagagaagcaattcactaattataaaagttggaataaggcaagcttttttattccatggaaccattatagctacagatttggaaataacaaatgctactaggtatgaaaagtaaaataagtgaaagccttttatattttatascttagactgcctgaagttccttgtatgatttttttttttttggagatggagttttgctcttgtctcccaggctggagtgcaatggtgcaatctcggctcactacaacctccatctcctgggttcaagcgattctcctgcctcagcctcctgagtagctgggattacaggcatgtgccaccatgccccactaattttttgtattattagtagagacagggtttcaccatgttggccaggctggtcttaaactcctgacctcaggtgatccacctgccttggcctcccaaagtgctgagattacaggtgtgaaccatcacgcccggccaatatttcttttaaaatacatttcatatccattcattaacattgttttatttctgtgctttcccctactccccccactctgtgtattttctttttggtataggagcagagctccatattaagaattaaatggatatattcaaaattaattagtctctcctttcatgtatctatgtgtttattttctcttggccattttagtcttaccaagtcttctgtaaaagatgctctctaccacttctccctctgcccc

SEQ ID NO: 792403 - DNA, 624 bp, Homo sapiens
gctttcataatctttcatgtaattttgatgaaaagcctaacatatatcctatccttgctcctctatagatgtggttccctgtgtatccatcaacccccagcttcctttaggtttttgtctttatgttgattcattgtaacttaaattttatctcatgactagatttagtttttttggtgtttataytgttttgtattttctgagcttcttggatctgtggtttgatatctgtcattaattttggaaagttctcagtcatataactgataatgatattgcaaagatgacatttttatgtatatttcttctttttctgatatttcaattaggcgtgtgtcacattttttgaaatagacccacaatttttgggtgttccatttattttttgaagtttctattaatctgtcttcaaaaattcactgtttgtttcctcagccatgttccctctactaattaatccatcaatgacattattatgtttgaagatttttgattttcagcattttcttgtactccttagcatttttattctttagcttatatacccatttgtcactgcatataatctatttcttccattagagctcctaacataataatcataattattttacatttactgtt

SEQ ID NO: 792404 - DNA, 630 bp, Homo sapiens; identical to SEQ ID NO: 772605

SEQ ID NO: 792405 - DNA, 566 bp, Homo sapiens
ataaataaaatatatgaattatcacaaaatgataagcataataaaaaccaaaaataaaaaagggtatgaggaactggtagtgtttctgtaaaggcacagattataattgtagtagagtggagaaggctgagtgaaatgagaggtggaattttaatgaagacctgagagatatgaagaaattagcagaaaaatatacgggtgaagagttctaggcagaaaaataatccagtatataaggacactaacacagaacacacaaagattgttcaaagaacagttaggaaaccwcagtggctcagtagaatatataaagggcagaaatgtaagatgaggtcaaaaagatgctaagaggttagactctataaggtcagagcatatgcaggcttttaatctgagtaaaatgaagaactagtgcagggttctaactgaagagtgacctgttgtactcagattttaatgggatacctcctgctgctctgcccagaatattcttttagaatcaaagagcaaaatcagagagatgtgtaggaagtaattagagtacactagtcaagagatgattactt

SEQ ID NO: 792406 - DNA, 601 bp, Homo sapiens
aacatcttccctttgggaagactaaagctggcaccttaagcaaggcgagtttcatttggttaaaggcccttttagcctctggttcccaaattagagagtgagtcttagctgcctgagtttactttatttgttgatagaagggacgagctatctcaccatacccaggtatccataatctgcagaatcctgtaatgcccaagaattccctcagttgctagagggttttggggagggtgaaggargagatgagcttaatcctttctttgcctagttctctggtcccgtctgacaagattagaactgagtacttcactgaagtcttacagaggtcagccttagattttgagaccttatatcctctgttagccagaaaattaagaacagccttactgctctcctgagagatatactcagttggggcacaaaggacaatatcatttacatattgtaaaactttaacctgaagataaaggaattcagagagatcttttgacaatacctgcccaaacaggtgggggtgtcttagaatccttgaggtaacacaattcagcttagcttgatggttggttgaagggatcctcaaatgcaaacaaatcctggg

SEQ ID NO: 792407 - DNA, 601 bp, Homo sapiens
aacatcttccctttgggaagactaaagctggcaccttaagcaaggcgagtttcatttggttaaaggcccttttagcctctggttcccaaattagagagtgagtcttagctgcctgagtttactttatttgttgatagaagggacgagctatctcaccatacccaggtatccataatctgcagaatcctgtaatgcccaagaattccctcagttgctagagggttttggggagggtgaaggaggagatgagcttaatcctttctttgcctagttctctggtcccgtctgacaagattagaactgagtacttcactgaagtcttacagaggtcagccttagattttgagaccttatatcmtctgttagccagaaaattaagaacagccttactgctctcctgagagatatactcagttggggcacaaaggacaatatcatttacatattgtaaaactttaacctgaagataaaggaattcagagagatcttttgacaatacctgcccaaacaggtgggggtgtcttagaatccttgaggtaacacaattcagcttagcttgatggttggttgaagggatcctcaaatgcaaacaaatcctggg

SEQ ID NO: 792408 - DNA, 601 bp, Homo sapiens
aacatcttccctttgggaagactaaagctggcaccttaagcaaggcgagtttcatttggttaaaggcccttttagcctctggttcccaaattagagagtgagtcttagctgcctgagtttactttatttgttgatagaagggacgagctatctcaccatacccaggtatccataatctgcagaatcctgtaatgcccaagaattccctcagttgctagagggttttggggagggtgaaggaggagatgagcttaatcctttctttgcctagttctctggtcccgtctgacaagattagaactgagtacttcactgaagtcttacagaggtcagccttagattttgagaccttatatcctctrttagccagaaaattaagaacagccttactgctctcctgagagatatactcagttggggcacaaaggacaatatcatttacatattgtaaaactttaacctgaagataaaggaattcagagagatcttttgacaatacctgcccaaacaggtgggggtgtcttagaatccttgaggtaacacaattcagcttagcttgatggttggttgaagggatcctcaaatgcaaacaaatcctggg

SEQ ID NO: 792409 - DNA, 519 bp, Homo sapiens
tgaataaaaggtggttctattcccaaagaggggacacttacatgtatttgatgaaaattaataatcaccaaattctctggccatgccattgggttctgtactgctggtggcattaggggggtctgctggtataccctctcgtcctctacagagtctacccgctgaggcaatgcctctcacaaaccccagcccaaacctccctggaagagcaggcaggacaaaccaactctgggctgtactagttcatgccaggactcaagattcccycctccactcttaagatgattgtatgagactcaccaatccagctaaacccacagttccttgtcttttaatcagtggttaacagagtgtggtctccagaccagcatcatcaacattgcatgggaacttactaaagagtaaattctcaggtctgacctcagacttcctgaattggaaatcctggagtgggggagggggctcagtgatctctgttttaataagccttccaggtgatcctgatgtcctctcaagttt

SEQ ID NO: 792410 - DNA, 552 bp, Homo sapiens
gggaggggaaccatctctggaagtacatttgcatttcacctctaggcatgggctgaagacctactagctcttccccccaacccccaagccctcgtcctatattagtttagagctttgattgtacctttattgtcagctctatttatttacttttcttttttggtggccattgatccttcagtgggctaactcacccaggctggaagcaaacttaatttgggagagtccaattttatcaaatgtatcacagaatctgtttttgagctaaaatgaaactacggctataattcaccaaaagttagttagcgttctgtcctgcagttattgcaaaccaagttgcctgccagatttcttcaatactctsgggttgttggaaatagaatttcatgcgttcccaccttaggagttggtggaagccaggtaggggcctcagattaatgtcagaatgtccactttcatctatgattatgacagtgttgttgctgcccttgctggaaaaatctcgttgttagctacatctctccagagccagatggaagactgctttggtat

SEQ ID NO: 792411 - DNA, 618 bp, Homo sapiens
gaaacacactgtcccatgggaaaactcattcttcttacactttctttcctcccttcacttccatgtcatcattctcatttgggtgttttcctctggctcctccctccagtcactcactggctcaggttcttccacgtacacctcaaccttggcatttcccaggtctctgccctctgccatttctctccagcctgtctttggggttctcatctacctgtggtttccaccttaggttccacagtcagatctgtcagatgctctcttcttcacttctgccagggggtgcagagaaacctcaaacataagaggtcctcggttagacgtgatctctgtgttctgtcctgttctccatctcagacagtgactctgccattcatccagtcatccatgctgaagccatcggagtcacccaagagcctctttccatagctcccctgtggtatcctcctagttcctstcccttccgctcctagagtctctgctcctatccatccctctcagtgtctcccctctcactccctcagtgggagcccttctctttcatacagcctgcttttcagactcctaagtggctcctgctcttgtccattctccaaatggccaccactatgtctttca

SEQ ID NO: 792412 - DNA, 627 bp, Homo sapiens
tccttgaaaccagcatcagagcagagaggagagccgcgcagtgactgcaggtgtggcctttggaacacggcgttgatctctctgcaggaaggggaatcaaggagtttctggcctaaaggttgggctggtggcctccagggtttcttcctgggcagcccaacaccctcctgggcccctcctgggaggcgctcctttccccagaggccaggccaggctgcccacaagctctctgacatctctgccctctcggtgtctccccaggtgcaagtgcaacctgcaygccaacctgtgctccatgcgcgagggcagcctgcagtgcgagtgcgagcacaacaccaccggccccgactgcggcaagtgcaagaagaatttccgcacccggtcctggcgggccggctcctacctgccgctgccccatggctctcccaacgcctgtacgtgccatgccccggggccacgagcccacatggctataatcttccctgcccgtcaatcccaggagctgtggatcatacacacgcacacaaacctgcacacaggcacatacgtgtgcacatgcatgcaaacgtgcacacagaaacatacgagcatgcatgcacaggcatgggcacacatatgaatgcaaaa

SEQ ID NO: 792413 - DNA, 589 bp, Homo sapiens
aggggttcagattagatacagtgagtgacgattagaaatagccaacatctagatcatagagagttgtgaatgtgttgaatagttctatgcaaacctaacccaaaaagcccaaggaagctgagaggccaaagaaagaggctgacaaattcaatttctcagaaagaaacattgaataggaacttagcaacagaagtcatgtctgtgttgctggcagtggcaagacaagatagaagatccccatgccattaccatccagatctagggcttatataccatagggaaggaatctgtaggacaatcatagggaaagggaaggatgctgtgtgaatctgcctaaaggcaggatttgtagtcaagtgtatttggacctaagggcagaatttacagtaaatacatgcccttacacaaggaatcaaggaacagtrgacagaatagaaatcttagaggcattttctgaactggggttcatcagaagccaacatggcagatgagcatccaacgtggggttgctttagtctccacagactgccaggctggggattttagaattaatgtagatgaatttggaagatattgagatgtttaaata

SEQ ID NO: 792414 - DNA, 685 bp, Homo sapiens
agttcattcaattaaagcatacaactccataatttttaatatgttgtcaaggttgtgcaaccatcatcacaatctaacctaattagaatattttcagtttccaccctcaaagaccaggcacccattagcactcactcctcataaccctcctaaccagccctgccctaatcaacgcctaaactactttctgtctctgtaaacttgcttatcctggacatctcatatatacagaatcacaaaatatgcaggcttgtgtgactggcttctttcacttagcataatgtttcaagttcatcatatcgtagcatgcgtaagtatttcatttcttttcatgccaataatgttcccttataagaatatactacatgttatgtatccatttktcagttgatggagaattggattgtttccactttttcactgttataaataatgctgctgtgaacattcgtgtcaagttcttgtatatgtgtatgtttttaattcccttgggtataaatacctgaaagtagaattactggaacatgtagtttaacattttgagtatctactaaactgttttctacagcattcccatcagaaacagaggaggattccaattcaccgatcttgttaacactgttattgtctgtcttttttattgtagccatctagtgggtaagaaatggtatctcattgttatttt

SEQ ID NO: 792415 - DNA, 685 bp, Homo sapiens
agttcattcaattaaagcatacaactccataatttttaatatgttgtcaaggttgtgcaaccatcatcacaatctaacctaattagaatattttcagtttccaccctcaaagaccaggcacccattagcactcactcctcataaccctcctaaccagccctgccctaatcaacgcctaaactactttctgtctctgtaaacttgcttatcctggacatctcatatatacagaatcacaaaatatgcaggcttgtgtgactggcttctttcacttagcataatgtttcaagttcatcatatcgtagcatgcgtaagtatttcatttcttttcatgccaataatgttcccttataagaatatactacatgttatgtatccatttgtcagttgatggagaattggattgtttccactttttcactgttataaataatgctgctgtgaacattcgtgtcaagttcttgtatatgtrtatgtttttaattcccttgggtataaatacctgaaagtagaattactggaacatgtagtttaacattttgagtatctactaaactgttttctacagcattcccatcagaaacagaggaggattccaattcaccgatcttgttaacactgttattgtctgtcttttttattgtagccatctagtgggtaagaaatggtatctcattgttatttt

SEQ ID NO: 792416 - DNA, 607 bp, Homo sapiens
tagattttattaggattttgtgtctataaagtcatatcatctgataatttacttcttcctttttaatctggatttttttctctctacttgtttctttcttttgttcttttttcccctgactgcctccagtccattgttacatagaagtggtgagagcagacatccttatcttgtttctgatcttagaaggaaagcattccttccttcacccttaaatatgatgttagctgcaggctttttgtaacattcctgtctagaacactgaataagtttgcccctattgctcaccagcattcttctgttttctgaagctgratgtgctcgtagcgtgttagtaaatgtataacaactggttcttcaaaacattttttgttgcatttggggatttctgtggtgtaaatactcccaccatggtttaatcaagctacaaacctgacatcactgaatacagagttgggaagagatactcagtatcacatcagtatatagtatttccactacacagatacaataaacatatataattttaagaacataaatggactgggttcccctctatttctagtttgttgaaaagtttttgtcatgaaagggtgttggatttctg

SEQ ID NO: 792417 - DNA, 598 bp, Homo sapiens
ttagagaaaaattttggttataaccccctacattttaaaaaaatttatggagcattattttatagtatgtggttatcaaatcttctgtttattctaataatgtatattctttgagatgtacaggattctatatgcttatatatgtacacacatatgtacacacaactatgtatatttatatatatgtgtatatatacacacacacacgtgtgtatatgtgtgtgtgtatatatgtgtatatatatatgtgtgtgtgtatttatgtatatatacacacacacacatacgtgtgtgtgtatttttttgagacagggtctcgttctgttgcccaggctgaartgcagtggtacagttatagctcactgcagtcttgacctcctgggctcaatctattctcccacctcagcttcctaagtagctgggactacagatacatgccaccttgctcagctaatttttgtattttttagtaacaccgggtttcaccatgctgaggctggtctcgaattcctggggtcaagcgatcctccctccttggccttccaaagtgctgggattacaggcgagacccactgtacctggctggattctatatatt

SEQ ID NO: 792418 - DNA, 437 bp, Homo sapiens
tgatgagggaatgccatcactgttacagatgcattttcagacacagatctgaggggattgttgggagaaagctcaggaccagctgcaggctcaggtgggtgagcaagcctgcactgttactggctttggcttgaagatgaccagactcaaaggaatgcagtgctaacataggtcctggactcataaagtcaatccacaggtcctacatttcacattattatggtgaactacagtgactggaggaagacacattttctgagtgatttytaaaaggctgtctatgcaatctggtataaagcaaagagaggtttgcttaaaaaaaaaaaaaaaaaaaaaagaaaaagtccaaatgagggttctgcatcaaaactgccccctggaagtgtgtgtgtttaggataccaccactagaaaccattctggagctcttctggcact

SEQ ID NO: 792419 - DNA, 558 bp, Homo sapiens
tcgataggtttagcgcacatgaaatacctagcatatactaggtggtaatttctcgaagccaaggagaaagagtagaagtcaagggtagtgtcatgggagccctggaggtcgatgctaggaagtgggaataaacatactcttttttagccttccattctgtggaatacttgaattatttaagaatcaggccaggcacggtggctcacacctgtaatcccagcactttgggagcacgaggtcaggagatcragaccatcctggctaatacagtgaaaccccatctctactaaaaacacaaaaaattagctgggcgtggtggcacgcgcctgcagtcccagctacttgggaggctgaggcaggagaatcgcttgaacccaggaggcagaggttgcagtgagccaagattgcgccactgcactccagcctgggtgacagagtgagacactgtctcaaaaaaaaaaaaaaaggaatcaaaatgtttgttccaattattctttcattcagtcttttctcttgaaattgactgtggcatatcttaataactttcttgctgcttta

SEQ ID NO: 792420 - DNA, 545 bp, Homo sapiens
agatatttttgcaggattttgaattctagattgacattttcctttactttcagtactttaaagatgttgctcctataccttctggattgcattgttaccaatggaaggtgttcaggttcttggcgtcttgaacaaagaattggacaaaacacacaaacaaagcgggaaaagaatgaagcaaaaaaaaagcagagattattgacaatgaaagtaaacttcacagtgtgggagctggttggagcataggggctcaagggtgccattacagaattttctggggtttaaatcctctttagaggtttcccattggttacttggtgtacaccctttgtaaatgaagtagtggcccccartgagaggctgaagttaagttacaaaagttataccctatgcaaacctctggttgtggaaagcaaccaatcaaaggctaaagtgaagttacaaagttatacttctgtgcaaacaaagacttagccaggaatcagtctgaatagttgcctggtaagttgcagaaagcaaccaatcaaaggctaaagtgaagttac

SEQ ID NO: 792421 - DNA, 661 bp, Homo sapiens
attaaaaaatcccattcataatatcacaaccaatcttataataaaaaccttcagtattgcaaagttgtcaagctcaagatggcaaatacaacttttccaaaattctcattttatgtgaaagcttggatttattattggcagtgaatactatcggttgttttccatgaattaatggtctcayttcactcacttttgagaaaaatgccaaatacccgtctgtataaccatagtttatctgtcagtcattcttccaagcaaaaatggcattttatgaaaaaaagggcccagcaaggtggctcatgcttgtaatcccagaactttgggaggccaaggccagtggatcacctgaggttaggagtttgagaccagcctggccaacatggtgaaaccctgtctctactaaaaatacaaaaattagctgggcatggtagcgggagcctgtaatcccagctacttgggaggctgaggctggagactctcctgaacccaggaggcagaggttacagtgaccggagatcgcgtcattgcactccagcctgggtgacaagagtgaaactccgtctcaaaaaaaaaaaaaaaagaaaagaaaagaaaaaaaaaaggagctattctgttcctagaactagatccaatcccacaagtgcttttccttgaagtagtt

SEQ ID NO: 792422 - DNA, 458 bp, Homo sapiens
tctctactaaaaatacaaaattatacccaaaatacaaaattagccagggatggtggcacacgcctgtaatcctagatactcgggaggctgaggcaggagaatcgcttgaacctgggaggtggaggttgcagtgagccaagatcccaccactgcactggagcctgggcaacaagagwgaaactctgtatcaaaaaaaaaaaaaaggtaattgtgactcatgttacaacatgtgtcagaatgttcaacatggtaccacaaggttcaacatgatgaaccttgaggatacactaaagtatcatttttaccttaaaaatgaaggcaattctaacacatgctacatgtatcagaatgttcaacatggtacaagaaggttcaacatggttccacaaggtacaacatgatgaaccttgaggatatgctaacgtacacacagttactaccatagtcaaactcttaga

SEQ ID NO: 792423 - DNA, 662 bp, Homo sapiens
ttaaatatcaatttatgttcaatatactccaaaatgaaaaagaattcaaaatttaatcatgtatcaaatagatttaaatgcatataacagttttagatatcatcataattactaagcctcaaatacatagtaaataaatttatccaaagtatttcagtccctcagagtttgggacactgatgttttactgaagaaattaaccatgaaatctatatttaactgttgatatttgcattgcatatatagaacactaaaagcagtgaatttacaatataaaaataccgtaaagcactaacatgagacattcctcactgcagacaaaatytcttctttaatcctaaaatgttctaagaatctgtactgggattccctaactcatgacaattttgtagcaatgtaagttgctaaagaattaaaagggtgcactttatttccttaagttttataaaattaagattgcttagtgctattatttactatcaacatcaacccttccagtttatttttaagtttattgaactcacttgtatgtcctaaacaaattatttatttagcacctcaccccagtttaaaaaaaataagctagaatgctagtattttctatgagtttttattttgattttgaatagtttaccatctaattagaaaagaaaatgaaaatg

SEQ ID NO: 792424 - DNA, 630 bp, Homo sapiens
tttcattccttattaagtcaagaacttttagccttttcacataacagaagcaatttacatattttctttggcatatctgaattgccagcatcactattcttgtgctttggggccacaactaaatgaaataaggatgacttgaatacaagcactgcaattctaataccaagataattgatttgatgattgagatggctactaaataactaatgggtggggagcatatagagcatggatatggtggacaaaggggagaattcgtgtctgggcaggatggagaagaatgatgtgagatttcatcatgctactcagaacactgttcratttaaaatttataaatttgttatttctggaactttctacttaatatttttggactgcaattgattgcaggtaactgaaactgtggaaagcaaagctgtagataatgggggaactactgtagatagaagcaaaacaaatactgaataaaaataagttcctgtgatttagtcaaagcatttctgatgagtgtcagagaagacagtcacatgttgacaattgaggacaaaagctgggcacagcagaaaattatgcttgcatcttatgacaggatattacatttgcttcacttgctccttatgtctgaga

SEQ ID NO: 792425 - DNA, 603 bp, Homo sapiens
cactgcaattctaataccaagataattgatttgatgattgagatggctactaaataactaatgggtggggagcatatagagcatggatatggtggacaaaggggagaattcgtgtctgggcaggatggagaagaatgatgtgagatttcatcatgctactcagaacactgttcaatttaaaatttataaatttgttatttctggaactttctacttaatatttttggactgcaattgattgcaggtaactgaaactgtggaaagcaaagctgtagataatgggggaactactgtagatagaagcaaaacaaatactgaataaaaataagtwcctgtgatttagtcaaagcatttctgatgagtgtcagagaagacagtcacatgttgacaattgaggacaaaagctgggcacagcagaaaattatgcttgcatcttatgacaggatattacatttgcttcacttgctccttatgtctgagacatattgaatgttccttaatatgtctttgttcccccaagcaagtgtgccttgacccagttacagaacatttgtggcaattttagatgaagggttgagagagagggtcatgggatggagatag

SEQ ID NO: 792426 - DNA, 630 bp, Homo sapiens
tttcattccttattaagtcaagaacttttagccttttcacataacagaagcaatttacatattttctttggcatatctgaattgccagcatcactattcttgtgctttggggccacaactaaatgaaataaggatgacttgaatacaagcactgcaattctaataccaagataattgatttgatgattgagatggctactaaataactaatgggtggggagcatatagagcatggatatggtggacaaaggggagaattcgtgtctgggcaggatggagaagaatgatgtgagatttcatcatgctactcagaacactgttcaatttaaaatttataaatttgttatttctggaactttctacttaatatttttggactgcaattgattgcaggtaactgaaactgtggaaagcaaagctgtagataatgggggaactactgtagatagaagcaaaacaaatactgaataaaaataagttccygtgatttagtcaaagcatttctgatgagtgtcagagaagacagtcacatgttgacaattgaggacaaaagctgggcacagcagaaaattatgcttgcatcttatgacaggatattacatttgcttcacttgctccttatgtctgaga

SEQ ID NO: 792427 - DNA, 610 bp, Homo sapiens
tgtgttttcaagttcatcaatcctttcttctgcagtttctaatcagctgctattttcaaacactgcctttttaaaaatttttaactattgcatttaagtttgttttaaagttacagattgataattccatcaactctgttattactagatctgtttactgtaatagatttttcttaattatgaatcacattttatagcaattactcatatctgtaaatttttattggaagctgtacattatgaatagtaagacaggatatttttgtctcttttgaaggtgttaaagttcaytttttcaggcagttaagtgttgatagaaaaaaaattctgcatggaaaatgttctggtacagtattcccaaatggttgcaaacatattaaatttaactgttggttctgctatcccccaccagatggctctaccaaatttaatgctattccctctaaccttaccaagaaatttacaggagacagcaagggatggccaaacatcctgtatctcctacacaaattacctgctaacacctccagatgttttccctatcctcattttgatggccttagatcagccttcatacattttttgtcatattctggctaataatcagaat

SEQ ID NO: 792428 - DNA, 676 bp, Homo sapiens
gttaataacagagtgccctaaatagaccactgttttactgccttcctcaacatttccttggtgacctctaacacggttgcgtagtgtattggcataattttcaaatgtatccacgtttgctatctgtaaatgtcagaagtgactattaaggcctactaaatccttcaggctccaaatattgatatgcaaggcagtgttccatggtttctaatgattatataagctacctcttattgagtggcttagaaatcataatattagaaccacattattttatgagtcatggttaaaaatgtcaagatctgtagctgtgaagcaaagtccacatgtagrgtggttagcctcatggtcaaaactgacaaaagctcttgttttttggctttagttaatttggaaagcatatgtaggttttcaggattttattttgcttgcacttgaagaaatatgtttaattggggcaacatggaataaacagatccagataactgttttcagctaaagttgaagatcctcagcatttcttgttccaggcagcagaatgctgaatgggatatttcctttcatttgggcactagaggtagggaaatatctgttccatcaatatcgataattgcttgccttgaataattgagaagaaatcaatagttaattacatatcactcccctttagaaaaaa

SEQ ID NO: 792429 - DNA, 676 bp, Homo sapiens
gttaataacagagtgccctaaatagaccactgttttactgccttcctcaacatttccttggtgacctctaacacggttgcgtagtgtattggcataattttcaaatgtatccacgtttgctatctgtaaatgtcagaagtgactattaaggcctactaaatccttcaggctccaaatattgatatgcaaggcagtgttccatggtttctaatgattatataagctacctcttattgagtggcttagaaatcataatattagaaccacattattttatgagtcatggttaaaaatgtcaagatctgtagctgtgaagcaaagtccacatgtagggtggttagcctcatggtcaaaactgacaaaagctcttgttttttggctttagttaatttrgaaagcatatgtaggttttcaggattttattttgcttgcacttgaagaaatatgtttaattggggcaacatggaataaacagatccagataactgttttcagctaaagttgaagatcctcagcatttcttgttccaggcagcagaatgctgaatgggatatttcctttcatttgggcactagaggtagggaaatatctgttccatcaatatcgataattgcttgccttgaataattgagaagaaatcaatagttaattacatatcactcccctttagaaaaaa

SEQ ID NO: 792430 - DNA, 527 bp, Homo sapiens
actagagggagcagagaaagtaggaggcatggaagatcctgtttccttgactctgtttgatggtgctctaacagtactgcccagcaacggcccttcacatcaacagcaacatgtggttccagtgttgagctttattcataaccagcttcatcacaccgttagaggttcctacaccagcctggtggcactccttccctagaggtttaagcctcagctccaaggaggctctactcagcatttcagaggcagctgcagcagccagccattaccccaccttagaggtgcaggtttcagctctgtgggggtcccttttatccaaacttttactttctgataactcmatcctctttcctgtaatccctcagtcccagagtgatagatggttcctgcttacttaacacaggaattacttcagtatcctgttctcactttaaaatttcaaatactttttaaaccatttcttttaataaattctctctgttgaaatacctagaaatggtttcagttttctgcctgaagcccaactg

SEQ ID NO: 792431 - DNA, 634 bp, Homo sapiens
ttaacatagaataccagccctatgtgggtgggtctaagagaaggaacaaagatttcagagtgagaaaaatctcctatgttcccaaaggtgtgtttggacgatgttaaatttatatatcaaatctaatttcaacccattccattcttttctttacttagtagctagaataatctttttaaaaacaaatctgttcctttcatktctctgcttaaaaccatatgatggatcacatatcttctccagatgatgattccgattttcctccctgacaacataaaatgtcttagcttgggattcatgaaaccacataatctagtccctggatgctgtttaacatcttcccttactcccaacacatgtgcatgctcacacacacacacacacacacacacacacgcaagttctggaacacagtgtgttagctcaatcacgtttacccaagattcctatcctggaaagctccactgatcctttagtgcttaactacatgtcacttttctgggaagacttactccccatgttgggcttcactaacaaataacatgtacattcctcttattgagctctgattaccttctatcgtaattgttgggcctctcattcggatgtgaactccatgtccacatgtccacag

SEQ ID NO: 792432 - DNA, 634 bp, Homo sapiens
ttaacatagaataccagccctatgtgggtgggtctaagagaaggaacaaagatttcagagtgagaaaaatctcctatgttcccaaaggtgtgtttggacgatgttaaatttatatatcaaatctaatttcaacccattccattcttttctttacttagtagctagaataatctttttaaaaacaaatctgttcctttcatgtctctgcttaaaaccatatgatggatcacatatcttctccakatgatgattccgattttcctccctgacaacataaaatgtcttagcttgggattcatgaaaccacataatctagtccctggatgctgtttaacatcttcccttactcccaacacatgtgcatgctcacacacacacacacacacacacacacacgcaagttctggaacacagtgtgttagctcaatcacgtttacccaagattcctatcctggaaagctccactgatcctttagtgcttaactacatgtcacttttctgggaagacttactccccatgttgggcttcactaacaaataacatgtacattcctcttattgagctctgattaccttctatcgtaattgttgggcctctcattcggatgtgaactccatgtccacatgtccacag

SEQ ID NO: 792433 - DNA, 630 bp, Homo sapiens
agaatgcctaacttcgttaaactactaaaactcagaaccaccagcagccatcatatgaaaatccggatcaaatccatacatatctccagtgggacaaaattttatgtgctctgccttccttgggaggaaaaatgttatcctgtaaaaatggatattgaaatttgtggcctctaaactcctatagtgtgttaccgactgcacatatacattttaacatttggccatcacgagactttttaagttaatatctcatcttaattttttaaatgtattttgttttataattgcaaggccaagtaagaaaacaacttaaaattagccaattactctctgagtaattttactttttattctaataccttagcatgtagtaaatgctcracaaatattactaacatttaattcccagaagtaaattaagcatattagaggctactttaatagtatgtctgagagcaattctatcttatcacatccaattccaatgaaagtttttgtagaacatgaagcttctgagaattcttagtgagaaaaattctcagcaatggaaatgaattataatacgtcaacaatatttgtattgcttctttgtatgaactgttgtggaatgtattaatttcattttttttt

SEQ ID NO: 792434 - DNA, 606 bp, Homo sapiens
tgcttaattctccatttgtcacaaacacacaacgaggacatttaaaatccatttttgcttggttttattttttcctcccagaatgaaaaagagctcttttacctctgagggtttatgttccattatttcattggcattgatttctttgccacgtagcccagcttatttcaaaagtgtgaaatctgtccttgctatacattgccattggagttcattttctatactagttctcaggcattgctttttttggaaaaacaaagaatcctgactgtacagtgatcttgctcrcaaactatttcaggatgacacctgacccaggagttttgcattctggctcagctgttcctggtactgtttattatacaagatttcccagtgagcaaagactcttgtgccccctgtggatcacaaacagcatataattggatagacaagaagggtaacaatggccatccggtatctaccgagcccctctcctttggaaatcgttggcatttcatcttcatgatcatttgcaaatattcaatgaggggccctttgatgaaggagatgatgaaaacattaaacaaaatgaagaagaacctgtctcagacatctgatcattaa

SEQ ID NO: 792435 - DNA, 606 bp, Homo sapiens
tgcttaattctccatttgtcacaaacacacaacgaggacatttaaaatccatttttgcttggttttattttttcctcccagaatgaaaaagagctcttttacctctgagggtttatgttccattatttcattggcattgatttctttgccacgtagcccagcttatttcaaaagtgtgaaatctgtccttgctatacattgccattggagttcattttctatactagttctcaggcattgctttttttggaaaaacaaagaatcctgactgtacagtgatcttgctcacaaactatttcaggatgacacctgacccaggagttttgcattctggctcagctgttcctggtactgtttattatacaagatttcccagtgagcaaagrctcttgtgccccctgtggatcacaaacagcatataattggatagacaagaagggtaacaatggccatccggtatctaccgagcccctctcctttggaaatcgttggcatttcatcttcatgatcatttgcaaatattcaatgaggggccctttgatgaaggagatgatgaaaacattaaacaaaatgaagaagaacctgtctcagacatctgatcattaa

SEQ ID NO: 792436 - DNA, 606 bp, Homo sapiens
tgcttaattctccatttgtcacaaacacacaacgaggacatttaaaatccatttttgcttggttttattttttcctcccagaatgaaaaagagctcttttacctctgagggtttatgttccattatttcattggcattgatttctttgccacgtagcccagcttatttcaaaagtgtgaaatctgtccttgctatacattgccattggagttcattttctatactagttctcaggcattgctttttttggaaaaacaaagaatcctgactgtacagtgatcttgctcacaaactatttcaggatgacacctgacccaggagttttgcattctggctcagctgttcctggtactgtttattatacaagatttcccagtgagcaaagactcttgtgccccctgtggatcacaaasagcatataattggatagacaagaagggtaacaatggccatccggtatctaccgagcccctctcctttggaaatcgttggcatttcatcttcatgatcatttgcaaatattcaatgaggggccctttgatgaaggagatgatgaaaacattaaacaaaatgaagaagaacctgtctcagacatctgatcattaa

SEQ ID NO: 792437 - DNA, 603 bp, Homo sapiens
ctagttagaggtgtgtgagacaatagctataacaaaggctattccagacacagaattcattgctcataaatgatccctggaaatgagcatattgacacatagtcaccaataaactcgcatgcagaactgttcggaaaaatttatcttgcacttattcaaagggccataaggaattaaaattagcatacaatcttgagaggaatatttgtaatagattttctcttttttacaaataggagatgacaaataattcatacatatattaataattccacctttgagttttcttcacttctgttcatataaccaggtcctggaggatacrcaaatatgtgatttccacgtgctgctgtggttgcacgtggcacgggtgttatgccctagcagacctcatgtctagatactattgctgttatcattcctcttattaaaacatccaaggttttgccctagaagatgaagctccaggcaggaagaaatagtttaccaagtggatccaatattgtctgacagagttttaccttccccctgggacttgctcatatcaaattcctctgccaccagactgcccccagaaatggctgcaactccttgaatgctctg

SEQ ID NO: 792438 - DNA, 624 bp, Homo sapiens
aatacacaggaaaagcgctcagttctgaagaagaggatttcacgtatccaagctcagaagtagcaatgccaataacaaaggttagttaggaaactagagccactgtgactttggataagatatttattatagaattatacctatctagttgtggcaaatactagcgaagtaatatgcagaggggagagttggaggaaaggagacagagtcaccatccagtccttctaaagcactggtgcagggtggacaagcatargcttgcagggaaatctaagagagtttactgagacagcaaagggaatgtccttaatagggctggggaaactatggcctctgattagttccacctctggggaaccgccaaacttctgattttgaaactggttttgaagccaggtctagtagtcataaagaagaactagacaaggaatgcaggagagaagtggcaagtttgaatctcttgggcacttctgaatctgtctattctccacatatttgactgcaagaccttccaagattatgactagtgatttacttccactttctaaaccttgtacaaattccccccaactccaattgtgttcaggagacataaagggaatgggattctgagaaatgtagttc

SEQ ID NO: 792439 - DNA, 627 bp, Homo sapiens
atatgcataactgttgttaaactaaataacaaacagggaaagaccctaaaaaaaaaagatatttgtttgggaatagaacattgcaatgggaatatgtgtgtgattatgaattgtgtgtatattcaaggaagtaaaagaagacaaaggtttttaaaggaaaaatatgaggattacataattgttttagaataattatccttggctacaaagaccaataacaaggrtgatgccagtttgaggttatacaggcagatgccggaaggatgttcttgtagggttgcagtggcttttgtgcacggttgtggtttttcagtcttttatgatagtttgggttaacaggtatacaagcatgagaaccctattttcatggccttccctggctttctgaaggtgttttttgttgtttttttttttattacattagtgactctattttgattctgacaactttcacatcatcattcaaaacttgcttatcaaataggcaggaaacccagtattaaggtatttgattatatgaattatcagtctcaataatgattttccctcctacctgctttctgactaaaatttcagttttatttttattatcctatatgtttgtttttcatccatttcaaatggatt

SEQ ID NO: 792440 - DNA, 618 bp, Homo sapiens
cattccataaaatattgccctattttagactttcattctaaagatcaaagttttcaggataattggtaacaaggcagaagcagagaagaggttttagcctctcttggtttttatgtttctgtagcctttgtctcaggtcctcaggtcagggtaagtttctgccaaggtttccttttgctaagcctaaaattcagagtaaccaatcttaagtttgctgttgagatatcttgcaaatacaaatgctttcttgggtatatcaagaggcattctttrtcacctccctagagatcttcaagtggtcagatgctcagcagttctgtaaaggtgagtaatcctgtaatagaggcatatttgggtctgtcgctgtatctggatgagataacatgttatgtttaagataaaagaccagtaaattcacatgtcatctcaagtgaagagggctcctgagtgctccatgcttccttttactcctaggggcactgggtatgagggttaagtcatgatagctggccaaacctattcatcctgtgatctttatgactttgatctatggtatccatactgtgttagggtgaggttagaagttagagacaagagatgttaatattacctcatcct

SEQ ID NO: 792441 - DNA, 548 bp, Homo sapiens
tcctccgctgaagtcttgaacctctcaaagtcagccatgagggttggaattaacttctaccaaactcctattaatgttgatattttaagctcttcccatgaatcacgaatgttcttaatggtatgtagaatgatgaattctttccagcagttttcaacttattttgttcagatccatcagaggaattactgtctgtggggactcaccttacaaaatgtatttcttaaatagtgaaacttgaaagtcaaaattactccttcagccatgggctgcagaatggctgctgttgttagcaggcaggaaaactccattcatctccatgtccwtctccattagagctcttggctgcttaggtgcaatgtcaatgagcagtaatattttgaaaggaatctgtttttctgagcactagatctcaacagtgggcttaaaatattcagtaaactatgccgcaaacatacctctgtcatcaggctttgttcttccatttatagacacaggcaaggtatatttaacttaatgcttaagggccctaggatttttagaatggt

SEQ ID NO: 792442 - DNA, 702 bp, Homo sapiens
agtacaagaatagttgattctggatccaacctggatgtctgtgatcacatgcaccatgccattcactggatctggaggagttttacatgatttacctgtgggaaagaaaatgttttggagccaggtagagtaatctgaactctcttcagtacgtaaggtctcaacctgcatgtagcttcctgaagaaaacacgcggttctgatggttccacagattttggcaccttgagaaaactcatcagagcgctgaggatcagccacctactaagccccactttcaaaaagaccttccctccagatctatctagatctagatttagatctgtgtagagaccttgcatcccttatcaaaatgtaaaggtcatttatggcattatttactatcaatatatttcaaagtttgcaaaggatttcttcccacctagttattcaaacagaatttgtcttcctacaccatttttttcctgatctagtcatttattattttctttcccatagggaatgaagattttctctacaactatttcttgaaacattctcrtgaagttaacatttcaagcaacaatcaaggatgcctacaagaaaaactcttacatccatctatccgaacacttttcagaaaaggtttctcatatcccacatttgaaataattccataagaagcttttgcagacatgggaaagatccaacgcaagtttacgca

SEQ ID NO: 792443 - DNA, 610 bp, Homo sapiens
tgcaagatggatagctctgactctctctttctctgggcacaagtgcacctgctatgttgagccaagccaagcccacgagccgctgtatagcattagcagggcaattatacctttcacaggcaatagtggctcagagcaaagtatgaacttatacaaacaggttatataacaagtggaggtttgcacctgtgcaccaaacttgctgattcctgcaggcctggatatccgccttggtctattcttcgaccaaagcacatccgtgtaccttacattccatcccctaggccgagggagacataggccttggacacacaggtttgatacacaggtttggcacacaggcctgatatataaactttgggcatgcaaacccaatacatacacataggcttgacacataagcctgacccataarcattgggcacgcaggcccaatgtatatatacagatttgacacatacataagctgtgataaactgcccagctattggcacagattaccatcagtgttaccttcttggtgattaccatttacattgctgtgagtttagctcattagctactttgcgtacactggttttaaaccatatggtgtcagtactaggctgga

SEQ ID NO: 792444 - DNA, 587 bp, Homo sapiens
gttttattaaaccataattcatataccatgcaattcatccatttaaagtatgcaattcaatgacttttagtatatttacaaatacatttagtcattactagagtccattttagaacattttcatcacctgaagaatactcttttagtgtcatcctctatccactccctattatccatcctccctttatactcccctccgctgctaagcaatcactgatctatttcctgtctctatagattttcctgttgcagactttcacgtgaatggaatcatataatgtgtggacttttgttattggcttcctccagttagcataatgttttcatgcctcatccaagttgtaacatatcagtacatcattccatcttatggttttttccgttatrtggatgtacacactttgtttatccatcaatccgttgattgacatttgagtcatctctaccttttgactgttatgaataatgctgctatgaacattcatgtacaagtttttgtgtgaacatatgctttcatttctattgggtatttacctaggagaggaattgctgggtttaatcatttgagaaactaccagattgctttc

SEQ ID NO: 792445 - DNA, 649 bp, Homo sapiens
tccttaccccaaggtcataaaagtactctcatatataggttcttctacattttttaatgtcttacctttcatgtttaagccatcatccattgggaatagaattaatatgtatgaggtttggattgattttattattccattatatgtaatgaattgtccccaaattatttgttgaatagtctctctcatctttcaccagcaatcttcagcactacccatgccatgaagctactttctatatatgaggtctttctcttttttcttattaatctatttttctactcattcatcaataccacactatcctaaatattaagaatttaggtcttgatacctactagaacaagtatcaggaagtgtcacttttactgtttgtgtccctttgctatgatgtattttagaacgacattgtcaggttcctttaaaaatgttaaattttgacaaaaattgcattgactatacatttgatcagtttgtagagagctcatatattttttaatcaagttgtcctrtacatgaatgtgcttatttcttgatttatttaggtcacattcactttacctgaataaaatgttataattttctccataaagattcttcaactattctgttagatttattcctattacgcacttttagtaagcatcct

SEQ ID NO: 792446 - DNA, 616 bp, Homo sapiens
aatgtgtagcagctcatttgagcaaaactaaggacaaaccagaaactactgaaattgagtacctatggtggagaggatagaggtgatggagagaagtgacatttcccttttattgtgtctttttatatcaatctgacatttgggactaygttaatgttttatttaagcaaaaaaaaatcaaaaagattgaggggaaactaaaatagaatacaaagagaaacaaattaacagtattttgaatgaataacaatcacactgaagagggggaataatctgagtaactttggaacacaacaatgctgtttttatattttcgggctataaacaaaataaaactttaaaaacgagtagatttgatttccatcatagtatagaaatagcaattttaaacttctttctgtgtattctaggattaagcaaataagtaaatatattgtggatctaggtgtctcactgttgaagaagggagttacacatgcagaaagagggaaggacagaatgaactctatgctaacggactgaaattggaagaatcactgtgaattcatgacatatataaatatagatatgggaatggatatacatatatatatataatacatatccttgctctgtc

SEQ ID NO: 792447 - DNA, 578 bp, Homo sapiens
gtgtttgggtgatgggggcggatccctctggagtggcttgctgccgttctcacagtagtgagtaagtcctcgctctcagtgaaagagcctggcacctcctctttctctctctctcccctttttttttgtttgagacagagtctcgctctgtcacataggctggagtgctgtggcacaatctcagcttactgcaacctccgccttccaggttcaagcgattctcctcccaagtagctgggattacaggggtgtgccaccacgcmcaaccaatttttgtatttttagtagagacagcgtttcaccatgttggtcaggctggtctcgaattcctgatctcaagtgatccatctgcctcagcctcccaaagtgctgagattacaggcgtgaggcaccgtgcccggcctttctctatcttttcctttctctcttgacgtgtgatctctgcacaagctggctctccttcctcttccaccatgattggaggctccctgaagccctcaccagaagcagatgctggcgccatgcttcttgcacagcttgcagagccatgagccaaataagcctcttttctttataaa

SEQ ID NO: 792448 - DNA, 581 bp, Homo sapiens
acatcaagctaggtcacagggatcctccaccactcctctccatctgagcctccatcttggacaggacctaatcctggaaggtctaagagctaatcattctagatggcttccaccatctccctggcatcactcagcattgcttacccatactcagcccttgttgtcgaaggtctgatgggcctgaagaaactcgggaccaagacagaaacatgggtttctgctggagagcctgatagtaagctcttgagtgcaggatgattggagaaagagaacttggcctatatttttccaccctgtaatckctctcctagaaactatgtaatcatttggatggcaggagtggctccatttgccctgctgtacccagtggagagatggactgggctggaagatagcaatctccttcagatgtatgcaaagcaccaatacagtggctgaaaactagcaggccctccgtaacgggcacacatccacgcatctgtgtctttcccagctccaaccctacctcctctgactggtcccaccacctccctttcctgcttcctccccacccagaccctacattcaatgtggccacccta

SEQ ID NO: 792449 - DNA, 642 bp, Homo sapiens
catagcattcacccattacaaatgtacaatgaatgttttttagtatattcagagctgtacaatcaattttagaaccaatttagtatttagaaaccagtttagaaccaaacttagaatcaattttgggagatgtttttatcacccaaaaaagaaaccccatagccattactccccatttgccccaagctctcctcccatccacgcycctggcaatcactaatctattttctgtgtgtcctgaacatttcatataagtggaaccatacgatatgtggtctttgtgagtgacttgttttacttagcatgatggtttcaaagttcatctaagcttagcatgtgccaatacttcatttctcattattgctgaataatattccatggtacggatagccttattttattttgccttttattagttggtggatatttgagttgtttctcctttttggctattattaataattctgcatgcgtataatcccagtgccttgggaggccaaggcaggaggatcacatgaggccaagagttagagaccagcctgggcaacatagcaacaccccatctccacaaaaaaatacaaaaatcagctgagcatggtggcagatgtctgtagtcctagctactcatgaggctgaggtggg

SEQ ID NO: 792450 - DNA, 642 bp, Homo sapiens
catagcattcacccattacaaatgtacaatgaatgttttttagtatattcagagctgtacaatcaattttagaaccaatttagtatttagaaaccagtttagaaccaaacttagaatcaattttgggagatgtttttatcacccaaaaaagaaaccccatagccattactccccatttgccccaagctctcctcccatccacgcccctggcaatcactaatctattttctgtgtgtcctgaacatttcatataagtggaaccatacgatatgtggtctttgtgagtgacttgttttacttagcmtgatggtttcaaagttcatctaagcttagcatgtgccaatacttcatttctcattattgctgaataatattccatggtacggatagccttattttattttgccttttattagttggtggatatttgagttgtttctcctttttggctattattaataattctgcatgcgtataatcccagtgccttgggaggccaaggcaggaggatcacatgaggccaagagttagagaccagcctgggcaacatagcaacaccccatctccacaaaaaaatacaaaaatcagctgagcatggtggcagatgtctgtagtcctagctactcatgaggctgaggtggg

SEQ ID NO: 792451 - DNA, 473 bp, Homo sapiens
ctttgttctcttgctggcgaggagctgtgatcctctggaagagaagaggtgctctggtttttagaattttccatttttctgctctggtttctccccatctttgtggttttatctacctttggtctttgatgttggtgacctacagatggggttttggtgtggatgtcctttttttkttttttttttttttttttttttggttgatgttgacgctattcctttctgtttgatagttttccttctaacagtcaggtccctcagctgcaggtctgttgaagtttgctggaggtccactccagacactgtttgcctgggtgtcaccagtggaggctgcagaacagcaaatattgcagaacactaaatactgctgcctgatccttcctctggaagcttcttcccagaggggcacctggctgtatgaggtgtcagtcagcccctactgggaggtgtctcccagttagggtacacggggg

SEQ ID NO: 792452 - DNA, 626 bp, Homo sapiens
gccaaaaaaagttatatgtattagtgtcttgtcccaaaatttctgatagaaagggaaatatgtgtatttgtaagcagatttaaaatgactgttgaaacagagatgggactccaagaatttaagtatcagcagaaacctaagcaagaaaaaatgactgttaaatttctttgtgaaagaaattttgtttgttttgaaaaaccagatagtgagtagagggaagaggatagaacatgggagaggactgttgggaactagcaaggtagaagtgggctgggctgggctattgtggagtgaaggcttgtkgttctcctccaggttacgagatcaaagaaatctttttttttttgagacggagtttcgctcttgttgcccaggctggagtgcaatggcgcgatctcggctcaccacaacgtctgcctcctgggttcaagtgattctcctgtctcagcctcccggagatcaaagaaatcttggggaacaaactttccacgcccacatctttaacaaaatctcctacgctcgaatgtactgtttcaattgtcttacacttgggagtgagggatagatgaggcaccatgtccagctctatctcagattaaactgccagccccaaactgagaggtctt

SEQ ID NO: 792453 - DNA, 481 bp, Homo sapiens
gacaaataaggtcattacataatggtaaagggatcaatgcaatgagaagagctaactatccaaaatatatatgcacccaatacaggagcacctgacctaaaaagagacttagactcccacacaataatagttggagactttaacagcccactgtccatattagacagatcaatgagacagaaaattaacaagaatattcaggacttgaactcagctcttgaccaagcagagctaatagacatctacagaactctccaccccaaatcaacagaatatgcattcttctcagcatcacatagtacttattmtgaaatcaaccacataattggaagtaaaacactcttcagcaaatgcaaaagattggaaatcataaaaaacagtctctcagaccacagtgcaatcaaattagaagtcaggattaagaacctcactcaaaactgcacaactacagggaaattcaacaacctgctcctgaatgact

SEQ ID NO: 792454 - DNA, 601 bp, Homo sapiens
ggggtgcacaccttcgacatttatcttatgtagaccattgttatttaggttctattataggcagtgaaacttaaatacactatgggttgccctcgtgaattcttactacccacagatgttacagtcactgtttttacaattgaagaaacaaagtttcagggaggcaagtaatcagctttggaaasagcaaggagacactaagacaataggactggaaagagactgaggccaaatcatagcgaatcctcaatgtcctctgaccagtgatggacagcatcagtgttcaagaaaggttttcctcatagttccatgagggataaattgtgatcaatttaaagattattgtgttaatctatgcacaagataagagtacgagtagaaatctgcagtcaggtaaaagtgaaaagactttgtgatccattgaatgtgatgtgggagccaagataaatcatttttggagtactgctcctttatgtggtaaaaaagatatctaataagacttagtgctcagttttgtactttgaaaatatatccattacaataaatatattaacattgaacacttgcagaattaagtgccatattttttagtgaatttcca

SEQ ID NO: 792455 - DNA, 601 bp, Homo sapiens
ggggtgcacaccttcgacatttatcttatgtagaccattgttatttaggttctattataggcagtgaaacttaaatacactatgggttgccctcgtgaattcttactacccacagatgttacagtcactgtttttacaattgaagaaacaaagtttcagggaggcaagtaatcagctttggaaacagcaaggagacactawgacaataggactggaaagagactgaggccaaatcatagcgaatcctcaatgtcctctgaccagtgatggacagcatcagtgttcaagaaaggttttcctcatagttccatgagggataaattgtgatcaatttaaagattattgtgttaatctatgcacaagataagagtacgagtagaaatctgcagtcaggtaaaagtgaaaagactttgtgatccattgaatgtgatgtgggagccaagataaatcatttttggagtactgctcctttatgtggtaaaaaagatatctaataagacttagtgctcagttttgtactttgaaaatatatccattacaataaatatattaacattgaacacttgcagaattaagtgccatattttttagtgaatttcca

SEQ ID NO: 792456 - DNA, 586 bp, Homo sapiens
aaattcagttgtgtcaggatacaaaatcaacatacaaaaatcagtagcatttctataaaccaataacaagctagctgaaaaagaaataaagaaagcaaccttatttccaatagctacaaaaaaaaaatctgggaataaatttaaccaaggaagtaaaagatctctacaagaaaaastacaaaacacggatgaaagaaatggaacaggacacaaatgggaagatataccatgcttgtggattaaaagaattaatattgttaaaatcaccatattaccaaaagcgatcttcggattcaggacaatccccatcaaaataccaatgacactcttcacagaaacagaaaaaacaatcctaaaattcatatggaaccacaaagaccctgaataatagccaaagcaaccctgagcaaaaagaacaaagctagaggcatcacactatgacttccaaatatactacaaggctatagtaaccaaaatagcatggaatttgtttaataacaggcacaaagaccaatggaacaaaatagagaaccccaaaatacatttacatgtttacagccaactgatttttgacgaaggtgccagg

SEQ ID NO: 792457 - DNA, 578 bp, Homo sapiens
atgaaataagcacactccaccttattctttctgctaattacaaccaaaaaccttgaattggaaacaaaaagcaactaccagaagactctgaaaggtgaagaaaataaggtaaattggatagagacatcagatcttgacggatgactcagcagtgagktccctagagattttttttgctacagatgtaatctactttgggtgctacagcagcccaaaacctgaaactgctcaaaggcatagaacaaaaacaacaacaaaagccccaagaaaacatactttctctaaccaaaggcctgagaaggcaagagtctttcagaataaatcttttcaactggttactgtgtaatcagcaagaaagaactttactgaccatcctcgtcttgaaccaatgagagcagaggtggtggcccttccccctcccactaggggttacagccacagaaactgtggcacagagccctgctgaccattcctgtcctatagaaggcaaatgtttgcaaggaggcagtactcttcctccctccccagtggctgtctattaacatagaagatttaaataggaaacagagtctcataat

SEQ ID NO: 792458 - DNA, 595 bp, Homo sapiens
cccagaaataaagccaaatacttacagccaactgatcttcaacaaagcaaacaaaaacatagagtggggaaaggacaccctattcaacaaacgatgcttggataattggccacgttcagaagaatgaaactggatcctcctctctcaccttacacaaaaatcaactcaaggtggatcaaggacttaaatctaagacctgaaaccataaaaattctagaagataatattagaaaaaccctactagacattggcttaggcaaagacttaatgatcaaaaacccaaaagcaaatgcaacaaaaacaaatatagatgactaaaatgtttcttcacagcaaaagaaataatcagcagagtaaacagacaacccacagagtgggagaaaatatttgcaatctatacatccaacaracaactaatatccagaatctacaaggaactcaagcaaatcagcaagaaaaaaacaaagaatcccatccaaaattgggctaaggacatgaacagacaattctcaaaagaagatatacaaatggccaataaacatatgaaaaaatgcccaatatcactaattatcagggaaatgcaaatcaaaaccac

SEQ ID NO: 792459 - DNA, 669 bp, Homo sapiens
aaatccctccaaccttggcattccaggaaaggactttctgcaaataaccatctttcttcatatgacttagataggactcactttccactttttctcatgactcccataacagttgaggataactccaccatttacctgtgtcaggaacaaacagagaactttcccctcttgcatgaatttgctgacaaggccaaacacagatcctcaacttcttgttccttggctcatgattactgaaattagaatcgtttgtcccctggaaaaactagctaatacagagaaaaacactttctgttcagccaaccaactgatattacccctgcttgcaaaaacactctactgtaaatcacttcacctgaaatttgattaccattctttctgaaactctaaggcaaaatcacctgctgagatacgctgatctttgaattggggatgctctaccattgcaatagcctgagtaaaattaaaattaatayccttacttgtccaatttttgtttttcacaatagcaaaagggattttgcagatctgtttaaggtcccttttggttgactttaagatagtgaagagaaatcagtaacactgattccatcttttctagccaggcatggtggtgtacacctgtcatcccagctacttgggaggctgaggcaggaggatcccttgagc

SEQ ID NO: 792460 - DNA, 667 bp, Homo sapiens
aaatatggtcaatattggtccaaaaggaaaggaaattttcatttctgagaaaaaaaaatatacgtatatatttttgagacggagtttcgctcttgttgcccagctggagtgcaatggtgcgatcttagctcaccacaacctctgcctccagggtaggaaggaagttatggcaaccagctggtaaatgcatttccaagttaaatgtcaataaaacatagcacctatgaacaatttttggaattttaaacatgttagatcaggaagcagtctttaacacacagcatgtagcctttccaccatctgacttacttttgtcaagacattagattgtgtagtagtcttgggtttgatgctgtggctctcacaggcctgttgaatggtttgatggatttggcagaagtttgacctccagtgttccatgtaaagtgtactccatttctaagtgttgcaggatttttctcagmcactttgctgactgaggacatccacagctggtgctgccccctgactgcctgggccttgcttggccctgggcctgctgctggaggcaccctgcccactcggcctgcttgtgttatgacttatacccgcattaggcagttcccgagctcttctcctgcatccaagaagaatgaggatacactgacaatttgaagggtgaagaggg

SEQ ID NO: 792461 - DNA, 621 bp, Homo sapiens
ttcaatcaaatagagaatcttaaatcactgggaaatcctttctgttaagtattcttccaaactgacattaagaaactccaatttattattgcagttggaaaacatttctaaatattactgaaatcatatttctgtttcacaatatttttccttaagcactttgttctcactacaaataggctatgaaggtgaggtatataattgcaaaaaagggggaatgacagatataaactatagaataaaaattattcacctatgactttcaaaaaatggtttttaatcaaggctacagatcatacaacagatttagagcccaagacattttgattggcaataattaggtacaagaaatagaagtggcttttgtttagaatttttttwaaaaaggctccatatatcagtagttggtaatatcagagaggacactatgcattgagtagggaatgataaagatatagtttgccagaccaaaagcaaaagtagcatttgacttggtgggaggacccctaagaacgggagaagcaacatggttagatgttaagtatggtccctgacacagccagccccttcactctttgcagtgaaaaccttcatttgggaaagtaatagaagcgtcataga

SEQ ID NO: 792462 - DNA, 621 bp, Homo sapiens
ttcaatcaaatagagaatcttaaatcactgggaaatcctttctgttaagtattcttccaaactgacattaagaaactccaatttattattgcagttggaaaacatttctaaatattactgaaatcatatttctgtttcacaatatttttccttaagcactttgttctcactacaaataggctatgaaggtgaggtatataattgcaaaaaagggggaatgacagatataaactatagaataaaaattattcacctatgactttcaaaaaatggtttttaatcaaggctacagatcatacaacagatttagagcccaagacattttgattggcaataattaggtacaagaaatagaagtggcttttgtttagaatttttttaaaaaaggctccatatatcagtagttggtaatatcagagaggacactatgcattgagtagggaatgataargatatagtttgccagaccaaaagcaaaagtagcatttgacttggtgggaggacccctaagaacgggagaagcaacatggttagatgttaagtatggtccctgacacagccagccccttcactctttgcagtgaaaaccttcatttgggaaagtaatagaagcgtcataga

SEQ ID NO: 792463 - DNA, 625 bp, Homo sapiens
tgagaatcacctgaaggcaaaagaagaaatcatggttagtctcaaacaattacaatctcttagaactgaaatggcccaagggagggcttaggattcctttaatagtcacttaacataattgaatgaattgttacagcatttgccrcactgactggggaaaggttggcttgtctttctgccttccactgaattgcttaggcctatcctctccccagctttctccctgtcaccctgcagcaagggttacctgctcctgcaggcatttctttccctagtgggtttagcgcttttagggaaggctggcagagctgccaaatatgcacacaactcaggtactcactgagcagatgcctgggagaaaggaaggtcaatgattagtttccagccctagtagctgggtgcattgagcagattacccaatgtgcctagctaccatctttttgggagacagcaaagaattatttgaaagaatgtcagtatgctcatttattaagggggatgaacagtaatgctatctcccaaaagaattgctgtttgaagttaaattaggaaataaatacaaattacatatctattagcatgtggtttttttttgttttttttgtttttttttttggagatagag

SEQ ID NO: 792464 - DNA, 625 bp, Homo sapiens
tgagaatcacctgaaggcaaaagaagaaatcatggttagtctcaaacaattacaatctcttagaactgaaatggcccaagggagggcttaggattcctttaatagtcacttaacataattgaatgaattgttacagcatttgccacactgactggggaaaggttggcttgtctttctgccttccactgaattgcttaggcctatcctctccccagctttctccctgtcaccctgcagcaagggttacctgctcctgcaggcatttctttccctagtgggtttagcgcttttagggaaggctggcagagctgccaaatatgcacacaactcaggtactcactgagcagatgcctgggagaaaggaaggtcaatgattagtttccagccctagtagctgggtgcattgagcagattacccaatgtgcctagctaccatctttttgggagacagcaaasaattatttgaaagaatgtcagtatgctcatttattaagggggatgaacagtaatgctatctcccaaaagaattgctgtttgaagttaaattaggaaataaatacaaattacatatctattagcatgtggtttttttttgttttttttgtttttttttttggagatagag

SEQ ID NO: 792465 - DNA, 553 bp, Homo sapiens
gcacaatttattttccttttttgtacttttctgtaccctatgtattttccacaataagattattttactgttgtaatcatggggaaattttatttaatgaggtgggaccatacaatattttaaaatgacaaaaataggcayatgattctcacatattttgtgatattaaaattatatgaagatttcagtcccatttttattcgtttgttgacacctaactataactatccaaatgagaacctataattatttggaatcaataaatatttcaatttctataccaccatgatagaaaattatatcaattgcccattcttgattttgtggtaatttgttgaggactgaggtgtgtcatctttaggctgtattttgacccacctccccttcatatttccctacattgtccaatttaatacatatcacagcacagcagctttatttctttatgcctctcctattagattttgagttatttgaagactgaactctcatttatgtactcaatacatacttattgacaccttaatataccataaaccctattctaggtcct

SEQ ID NO: 792466 - DNA, 553 bp, Homo sapiens
gcacaatttattttccttttttgtacttttctgtaccctatgtattttccacaataagattattttactgttgtaatcatggggaaattttatttaatgaggtgggaccatacaatattttaaaatgacaaaaataggcatatgattctcacatattttgtgatattaaaattatatgaagatttcagtcccatttttattcgtttgttgacacctaactataactatccaaatgagaacctataattatttggaatcaataaatatttcaatttctataccaccatgatagaaaattatatcaattgcccattcttgattttgtggtaatttgttgaggrctgaggtgtgtcatctttaggctgtattttgacccacctccccttcatatttccctacattgtccaatttaatacatatcacagcacagcagctttatttctttatgcctctcctattagattttgagttatttgaagactgaactctcatttatgtactcaatacatacttattgacaccttaatataccataaaccctattctaggtcct

SEQ ID NO: 792467 - DNA, 601 bp, Homo sapiens
aaccaccatgccctgacacaaaaaaattttctgaccttcctctgaagcagctcataagactctcatgagacaggtgcccaccctatacccagaggaaatgaatgtccttatctctaaagacacagtggcacagagaagaatctgaataaactggtcttgctaagttccccctagttgattttcattagatcacatgccctttgtccaagcacacttctccacaactctccacttttttttttcggagacggagtccmgctccgtcgcccaggctggagtgcagtggcgcaatcttggctcactgcaagctctgcctcctgggttcatgtcattctcctgcctcagcctcccgggtagctgggactacaggcacccgccaccacgcctggctaatttttttattttttttttgtattttaagtagagacggggtttcaccgtgttagccaggatggtctcgatctccttacctcgtgatccacccgccttggcctcccaaagtgctaggattacaggtgtgagccaccatgcccagccaactctccactctttattaaacctaagcataaaaaatacaaagggttccctgtttctctgagtt

SEQ ID NO: 792468 - DNA, 634 bp, Homo sapiens
caattactcttcatgcattaagttgggctcgcttcttgtctgccctggtgtgtctagcatattcttttgaacagagaatgttttcaggccaaaaaacaaagaaagcttcaagcatgtctgcaagttctattgagggtgggttgggcgaaggtgggcagggtacagatagtgtctgctacagcttcttttccattgcttaatttacatgttaacagcagcaacrcatgtgatcctttgtgaattcaagggtgagtacaaagagtatcaaccaagaaaaacttttatacatttcaaaggatttttctaaaaagagaaagttacataagcaagactgagaatattcagaagtgacagtatcggtattggcaaaataatattttagtacaggatagaaatgctttcaatgatcctttcagaagtgcaatcaatctttattattcacagatcctgtatctgcaaacttgcctcctcattaaaatgtatttgtagcccccaagtcaatactcatcgtgctttcaaggtcattcacggacatgtgcagagtggccaaaattcgagtcagcagctgaggctgaacaaggcgacattttgccttcttgtttcagctctcataatgtaaacaagtgtccttctt

SEQ ID NO: 792469 - DNA, 634 bp, Homo sapiens
caattactcttcatgcattaagttgggctcgcttcttgtctgccctggtgtgtctagcatattcttttgaacagagaatgttttcaggccaaaaaacaaagaaagcttcaagcatgtctgcaagttctattgagggtgggttgggcgaaggtgggcagggtacagatagtgtctgctacagcttcttttccattgcttaatttacatgttaacagcagcaacgcatgtgatcctttgtgaattcaagggtgagtacaaagagtatcaaccaagaaaaacttttatacatttcaaaggatttttctaaaaagagaaagttacataagcaagactgagaatattcaraagtgacagtatcggtattggcaaaataatattttagtacaggatagaaatgctttcaatgatcctttcagaagtgcaatcaatctttattattcacagatcctgtatctgcaaacttgcctcctcattaaaatgtatttgtagcccccaagtcaatactcatcgtgctttcaaggtcattcacggacatgtgcagagtggccaaaattcgagtcagcagctgaggctgaacaaggcgacattttgccttcttgtttcagctctcataatgtaaacaagtgtccttctt

SEQ ID NO: 792470 - DNA, 630 bp, Homo sapiens
caccaggcactgttgcaattgtggcagagacaacagtgagtgagaggatgctggtcctaatgtcatggaggttctattttgtggaggatggagagaagcaaagcaagtgatcagtccatcagacaataaataacaacgcaaattaacaagagaagtataagtccatgttaagtactatgtagagaaaagactaacctcatacaatgcggtcagtctggcagctgctatagcgtgggcatcccagcatgactgatttggttgaggtttgcagctttccacactggatggtacacacagcctctctttaagtttctctggcccatttgctagttttgcattgtcacaatttacaaattgcagatcccacatacctttagttacaaaattccacatatcctattgctcagagttccactgtgaccccctctccacagcccacaggacccgcccacggctgtgctgmgcttgtgctccacccagttccaccaagcacattctatcgtgggaggtgtggactccacgtgggatgttgctgggttttcgtgttacatgactgaaaattaacatctgaactcaacatgccctaaacctgcatgtcctttacagaagggacatgaaacaggacctata

SEQ ID NO: 792471 - DNA, 662 bp, Homo sapiens
caaactttggtggaattcctgtgccaataacctccaccttccaaatttcccgagcattttgattgaaattgcactaagcctacagtattggctaagtttgaaaggaaataagatccttgtaataatcgatttgctgtattttcagctttcctttatttaagttttcttgatgtccttttgggaaaaacggtagttttgtgacactaaaatttttgacaactggtatgataataaactatattaatatattttcatacaaattaaytaaatatatgcctcgaaagtaaaatataccctcctttatccattaactgactgaattaaactatatatatatatttaagtgcttaccatgtgatacatttagcaccattttctctaaaatcatcaattccaaattatttgtttataaatgaaaaactgtttttgtcatttgtttgtcactactctcaccagctaaatgcagtgagtgtaatgatttgactgagggaactgcatcaaagtcttcccaagacgactcattgaatgggtggacatgagataacttgtagtttaagcagaaaaggtgtgtcatcgatgtcatccatcatgctgctgattgctctctcacgttcttttgcacaaagatattatactcaaaatatttgctagcctcagtatac

SEQ ID NO: 792472 - DNA, 644 bp, Homo sapiens
caaaaatatagctattttgaggaaaacttcaataagacacagaaaaggttgggcacggtggctcacacctgtaatcccagcactttgggaagccaagaacgggcagatcacttgacgtcaggagttcgagaccagcctggccaacatggtgaaaccccatttccmctaaaaatacaaaaattatctgggcatggtggcatgtgcctgtaatcccagatacttgggaggctgaggcaggagaactgcttgaatctgggaggcagaggttgcagtgagctgagatcacgccattgcactacagcctgagtgacagaatgagaccacatctcaaaaaaaaaaaaaaaaaaaaaaaaaaaaaaaaaaaaaaaagacacagaaaagccattcagaaacttatcagattaatttaatgaaagattgaaataataacaataataacaataataaatcctggggctgaaaaacataattaaaaactgaaaaattaatcagagtgtctcaacagcagaattgatcaggcaggagaatcaggcttgaatacaggctgatatagtttgaatgtttgtcccttccaaatctcatgttgaaatgtgatccccagtgttggacgtggggccttctgggaggtgtttgggtcatgaggg

SEQ ID NO: 792473 - DNA, 610 bp, Homo sapiens
gtgtgcatgtctgtgcatggctgggaatgattgtacatagttgtgcatggttgtgcatggttccacatggctgtgccttccatgtgcatgacggtgaatgttgtaaatgtgcatagttgcacatgactgtgcctggttgtgcatggctttgcatggttttgtatgactgtgaacggttgcgaacgtgcatggttgtgcatggctatgcacagctgggagtggttgcacatgattgtgcatggttgtgcatgactgtgaatagctgtgaatatrcatggttgcacatggctgtgcatggctgtaaggttgtgaaagtgcacaattgcgcatgtctgcacatggatgggaatggttatgaatatctgtgaatggttgtgcatggttggttatgcagctttgaaggactgtgtatggctgtgagtggttgtacatggttgtgcatggttgtatgtggttgtgaactgtcttaacagttctcatgtgagcagggtttatgagtttctacaaacactgtatttcctcacatcctccataatatgtgccacatcttcatcataaaccttatactctctgtctctctctcttttctcactcactctttctctctccc

SEQ ID NO: 792474 - DNA, 610 bp, Homo sapiens
gtgtgcatgtctgtgcatggctgggaatgattgtacatagttgtgcatggttgtgcatggttccacatggctgtgccttccatgtgcatgacggtgaatgttgtaaatgtgcatagttgcacatgactgtgcctggttgtgcatggctttgcatggttttgtatgactgtgaacggttgcgaacgtgcatggttgtgcatggctatgcacagctgggagtggttgcacatgattgtgcatggttgtgcatgactgtgaatagctgtgaatatgcatggttgcacatggctgtgcatggctgtaaggttgtgaaagtgcacaattgcgcatgtctgcacatggatgggaatggttatgaatatctgtgaatggttgtgcatgkttggttatgcagctttgaaggactgtgtatggctgtgagtggttgtacatggttgtgcatggttgtatgtggttgtgaactgtcttaacagttctcatgtgagcagggtttatgagtttctacaaacactgtatttcctcacatcctccataatatgtgccacatcttcatcataaaccttatactctctgtctctctctcttttctcactcactctttctctctccc

SEQ ID NO: 792475 - DNA, 595 bp, Homo sapiens
gactctgtctcaaagaaaagaaaaaaaaaatgaaagtttagaaaagcacacttccacagcacatggctttagtagggctcttctactgaaggagcacccaggggccagggctggaaattttaaactaagaacaataatagtaataataataaattctattccatagaatagaataaatatccatgagcttaagctgataaaaayaggtaatcaaataagtacatagggtggggagagacagccctttctcacaggagactcccagttactcagtgtggaaggaaagaagaaacgggaaaagcaggagcaccaccatttggcaagcagcacgggaagaagcgtagaaggcagtgttctcaagggagctgagatcggcaggcaaaagtatgagaaactggctatttccgtagtccccagataccttttcataagacaccaaatcatggcaaaggggaaaatcccaagctgacaggggagatgcccggcagatgccacctacctgtgtggtcaaagttgcaccaccaggagtgaggctgggggacgtcacgtgcctgccgggaggccccagaaggacatttggcattctggccaaaaa

SEQ ID NO: 792476 - DNA, 573 bp, Homo sapiens
gactctgtctcaaagaaaagaaaaaaaaaatgaaagtttagaaaagcacacttccacagcacatggctttagtagggctcttctactgaaggagcacccaggggccagggctggaaattttaaactaagaacaataatagtaataataataaattctattccatagaatagaataaatatccatgagcttaagctgataaaaataggtaatcaaataagtacatagggtggggagagacagccctttctcacaggagactcccagttactcagtgtggaaggaaagaagaaacgggaaaagcaggarcaccaccatttggcaagcagcacgggaagaagcgtagaaggcagtgttctcaagggagctgagatcggcaggcaaaagtatgagaaactggctatttccgtagtccccagataccttttcataagacaccaaatcatggcaaaggggaaaatcccaagctgacaggggagatgcccggcagatgccacctacctgtgtggtcaaagttgcaccaccaggagtgaggctgggggacgtcacgtgcctgccgggaggccccagaagga

SEQ ID NO: 792477 - DNA, 720 bp, Homo sapiens
agatgattggatcatgggggtggatccttcatgagtggattagcaccatccccttggtactattctcctggtagtgagtgagttctcacaagatctggttgtttaaaagtgtgtgcacctcccccatctcttggtcctgcgcctgccatgtgagacgcctgctcctgctttgccttccacaatgagtaacagctccctgaggcctccccagaagcagatgctgccatgcttcctgtacagcctaaggaaccatgagccaattaaacctcttttctttgtaaattacccagtctcaggtatttctttatagcagtgcaagaatagactaatataaattgaattggagaaagatgacattataatacttattctackgatctatgaacatagtatatctctccatgtttgcctaggtctttcttaatgtctctcaagattctataaatttctacatgatgggtttgcacaatttttgttaaatttattcttagggactttattttcttaacaccattataaatggtatctttaaggtataattttctacttgttgctgatgcacagaaatgcaattacattttatcctgtattttttttgagatggtgtctcactctgtcacccaagctggagtgctgtgatatgatcttggctcactgcaacctctgcctcccaggctcaggcagtcctcccacctcagcttcccagtagctgggaccata

SEQ ID NO: 792478 - DNA, 653 bp, Homo sapiens
aaacactgctccaagaaatcggagaggatacaaacaaatgaaaaaacatcccatgctcttggataggaagaatcaatatcattgaagtggccatactgctcaaagcaatgtacagagtcagtgctattcccatcaaactaccaatgacattcctcacagaactagaaaatctatcctaaagttcatattggagccaaaaaagagcctaaacagccaagscaatcctaagcaaaaagaatcaagctggaggaaccacattacctgacttcaaactatactacaaggttacagtaaccaaaacagcatggaactggcacaaaaacagacacgtagaccaatggaacagaatagagagcccagaaagaaaaccacacaccagcaacaatctgatctttgaaaaagtcagcaaaaacaagcaaggaggaaaggaatccctcttcaatatatggtgttgggagaactggctaaccatatgcagaagatcaaagttggaccccttcattacaccatatacaaaaatcaactcaagatggattaaagacctaaatgtaaaacctaaaactataaaaaccctgaagataacctaggatataccattttggacatagaaactggcaaggatttcataacaaaaaagccaaaagcaattgcac

SEQ ID NO: 792479 - DNA, 653 bp, Homo sapiens
aaacactgctccaagaaatcggagaggatacaaacaaatgaaaaaacatcccatgctcttggataggaagaatcaatatcattgaagtggccatactgctcaaagcaatgtacagagtcagtgctattcccatcaaactaccaatgacattcctcacagaactagaaaatctatcctaaagttcatattggagccaaaaaagagcctaaacagccaaggcaatcytaagcaaaaagaatcaagctggaggaaccacattacctgacttcaaactatactacaaggttacagtaaccaaaacagcatggaactggcacaaaaacagacacgtagaccaatggaacagaatagagagcccagaaagaaaaccacacaccagcaacaatctgatctttgaaaaagtcagcaaaaacaagcaaggaggaaaggaatccctcttcaatatatggtgttgggagaactggctaaccatatgcagaagatcaaagttggaccccttcattacaccatatacaaaaatcaactcaagatggattaaagacctaaatgtaaaacctaaaactataaaaaccctgaagataacctaggatataccattttggacatagaaactggcaaggatttcataacaaaaaagccaaaagcaattgcac

SEQ ID NO: 792480 - DNA, 653 bp, Homo sapiens
aaacactgctccaagaaatcggagaggatacaaacaaatgaaaaaacatcccatgctcttggataggaagaatcaatatcattgaagtggccatactgctcaaagcaatgtacagagtcagtgctattcccatcaaactaccaatgacattcctcacagaactagaaaatctatcctaaagttcatattggagccaaaaaagagcctaaacagccaaggcaatcctaagcaaaaagaatcaagctggaggaaccacattacctgacttcaaactatactacaaggttacagtaaccaaaacagcatggaactggcacaaaaacagacacgtagaccaatggaacagaatagagagcccagaaagaaaaccacacaccagcaacaatctgatctttgaaaaagtcagcaaaaacaagyaaggaggaaaggaatccctcttcaatatatggtgttgggagaactggctaaccatatgcagaagatcaaagttggaccccttcattacaccatatacaaaaatcaactcaagatggattaaagacctaaatgtaaaacctaaaactataaaaaccctgaagataacctaggatataccattttggacatagaaactggcaaggatttcataacaaaaaagccaaaagcaattgcac

SEQ ID NO: 792481 - DNA, 555 bp, Homo sapiens
gggtctgagggcccggcagccgcccttccgtctgctgccaggagtgtgtgtgcccagcactggagagcagtgagaggcactggtttcccagcacacagtgtgcgcctgcccgctcactctcccggctccgtgtgtgsgcccctcatcagccaggtgctcgctttcccggctctgtgtgtggggccctcaccggccagtgtgtagctgcatggtgtttctggggggctgctggcctgccaggcatggcctctcagtggccagcatggggtctgggggtggtctgggatggccaggcgaggggctaggggctcgggggcagctgtcagcccttgggtgtcaccctgcacttcctgccctgtggccacatcctcccaccctcttctctgtacatcacgctgaagaacaaacaaaaaatctcaccaaacgcgtgttggaggtggccaggctggctccattccgggggccctggtgataggtttcaggatggcagcagcagggccgtgggatggggagagtggactcagctcctaccgccgtgaggatggggagggaggg

SEQ ID NO: 792482 - DNA, 555 bp, Homo sapiens
gggtctgagggcccggcagccgcccttccgtctgctgccaggagtgtgtgtgcccagcactggagagcagtgagaggcactggtttcccagcacacagtgtgcgcctgcccgctcactctcccggctccgtgtgtgcgcccctcatcagccaggtgctcgctttcccggctctgtgtgtggggccctcaccggccagtgtgtagctgcatggtgtttctggggggctgctggcctgccaggcatggcctctcagtggccagcatggggtctgggggtggtctgggatggccaggcgaggggctaggggctcgggggcagctgtcagccctygggtgtcaccctgcacttcctgccctgtggccacatcctcccaccctcttctctgtacatcacgctgaagaacaaacaaaaaatctcaccaaacgcgtgttggaggtggccaggctggctccattccgggggccctggtgataggtttcaggatggcagcagcagggccgtgggatggggagagtggactcagctcctaccgccgtgaggatggggagggaggg

SEQ ID NO: 792483 - DNA, 634 bp, Homo sapiens
cttgaacggcagtgtcgactctctcaggttcccgaccagttcctgaaaatctccccctctgtgtgatgtgtgtgtgcgtgtgtgggtggtcccacagcttctgtctcctggagcccctcaccactgcaggcgtggggctgcccttggggctggagggtgcgtgatgaccacagggtggcggtcgtgtgtcctcactgcctggtgccgtcgccttcgggtggatgagacgtgtggctcygggtcagcccccagaagtggcggaggggtccgttgttcttattattaactacctccttcacttcctcagacctactgttttcgacgtctaagtcagccctcaccaccaccccacgagctgaaagatcttgcccctgactttgagacttgaaccctggaactcccttcctggagcctgcgttgcctgggacaggggtggccagggtgaaattggcagcacctggttgctcactcccggccagccctgcctgctccacccagccccggggacggattcctggtgtttcggggctgtctgccggccatctgcttggtagggccgtcggaatcaccttttacaaagctcttctatcagtgattcaggatcaaggagtaagagtgctttctgggttgaaaa

SEQ ID NO: 792484 - DNA, 634 bp, Homo sapiens
cttgaacggcagtgtcgactctctcaggttcccgaccagttcctgaaaatctccccctctgtgtgatgtgtgtgtgcgtgtgtgggtggtcccacagcttctgtctcctggagcccctcaccactgcaggcgtggggctgcccttggggctggagggtgcgtgatgaccacagggtggcggtcgtgtgtcctcactgcctggtgccgtcgccttcgggtggatgagacgtgtggctctgggtcagcccccagaagtggcggaggggtccgttgttcttattattaactacctccttcacttcctcagacctactgttttcgacgtctaagtcagccctcaccaccaccccacgagctgaaagatcttgcccctgactttgagacktgaaccctggaactcccttcctggagcctgcgttgcctgggacaggggtggccagggtgaaattggcagcacctggttgctcactcccggccagccctgcctgctccacccagccccggggacggattcctggtgtttcggggctgtctgccggccatctgcttggtagggccgtcggaatcaccttttacaaagctcttctatcagtgattcaggatcaaggagtaagagtgctttctgggttgaaaa

SEQ ID NO: 792485 - DNA, 634 bp, Homo sapiens
cttgaacggcagtgtcgactctctcaggttcccgaccagttcctgaaaatctccccctctgtgtgatgtgtgtgtgcgtgtgtgggtggtcccacagcttctgtctcctggagcccctcaccactgcaggcgtggggctgcccttggggctggagggtgcgtgatgaccacagggtggcggtcgtgtgtcctcactgcctggtgccgtcgccttcgggtggatgagacgtgtggctctgggtcagcccccagaagtggcggaggggtccgttgttcttattattaactacctccttcacttcctcagacctactgttttcgacgtctaagtcagccctcaccaccaccccacgagctgaaagatcttgcccctgactttgagacttgaaccctggaactcccttcctggagcctgcgttgccygggacaggggtggccagggtgaaattggcagcacctggttgctcactcccggccagccctgcctgctccacccagccccggggacggattcctggtgtttcggggctgtctgccggccatctgcttggtagggccgtcggaatcaccttttacaaagctcttctatcagtgattcaggatcaaggagtaagagtgctttctgggttgaaaa

SEQ ID NO: 792486 - DNA, 622 bp, Homo sapiens
cagatcgtttacatttaaactcatccagataaaatgaagagttcagttctgcagtcgcacctactggaagtgctcaggagcccaccgtggtccccgtgcagggagggactgcagggcgggcttctcctcctgctgagaaagctcccgtgggtgcagctcccacctaggtttgtaaataaagcttcctgggacacagccaagcccgtggttcatggatcccctctgctggctttttttttttttttttgagatagagtcttcctctgtcacccaggctggagtgcagtggcgtgatctcagctcattgcaacctcggcctcccaggctccagtggttctcctgcctcagcctcccgagtagctgggattacaggttcccgccaccacgcctggctaatttttttttaaaaaatatwtttaatagagacagggtttcaccatgttggccaggctggtcttgaactcctggcctcaggtgaaccaccgcacccggcctctagtgcttttgtgctataatccggaggttgagttgccacagggaccagagagcctgtgaagcctcaaatgcttttcatcccgcccttgatggagaatctttgccgacctctgccctcaagcacagc

SEQ ID NO: 792487 - DNA, 546 bp, Homo sapiens
tttttttctacagtgctcaattgccgcagcaccatttattaaaacatctatctttcctccattgtttttatgtctttgtcactaattagttggcaaaatatgtcttttcctctaccaactccaccaataccacacaatcttsgttactctagctacacagaaatccttagtatcaaacaggatcattccttccactttattctttatttttccaaaattcttttggctatttcagctacagtgcctttctatatgaattttagaatatgtttatgtcaacaaaaagtttacctggggtttcttataggaattgcattatatctacagatcagtttggggagtattaactttttttttttttctgtaaggaggtttcaaaacaatgaacatggaatgcctctttacttgtttaagccttgtttaatttttttcatcagcattttggaatttttaccatatattgtaaattttttagatttgtatttaggaatttcattttctctggagctaatgtaaatggttttgtatttttatttcagtttcatt

SEQ ID NO: 792488 - DNA, 546 bp, Homo sapiens
tttttttctacagtgctcaattgccgcagcaccatttattaaaacatctatctttcctccattgtttttatgtctttgtcactaattagttggcaaaatatgtcttttcctctaccaactccaccaataccacacaatcttcgttactctagctacacagaaatccttagtatcaaacargatcattccttccactttattctttatttttccaaaattcttttggctatttcagctacagtgcctttctatatgaattttagaatatgtttatgtcaacaaaaagtttacctggggtttcttataggaattgcattatatctacagatcagtttggggagtattaactttttttttttttctgtaaggaggtttcaaaacaatgaacatggaatgcctctttacttgtttaagccttgtttaatttttttcatcagcattttggaatttttaccatatattgtaaattttttagatttgtatttaggaatttcattttctctggagctaatgtaaatggttttgtatttttatttcagtttcatt

SEQ ID NO: 792489 - DNA, 546 bp, Homo sapiens
tttttttctacagtgctcaattgccgcagcaccatttattaaaacatctatctttcctccattgtttttatgtctttgtcactaattagttggcaaaatatgtcttttcctctaccaactccaccaataccacacaatcttcgttactctagctacacagaaatccttagtatcaaacaggatcattccttccactttattctttatttttccaaaattcttttggctatttcagctacagtgcctttctatatgaattttagaatatgtttatgtcaacaaaaagtttacctggggtttcttataggaattgcattatatctacagatcagtttggggagwattaactttttttttttttctgtaaggaggtttcaaaacaatgaacatggaatgcctctttacttgtttaagccttgtttaatttttttcatcagcattttggaatttttaccatatattgtaaattttttagatttgtatttaggaatttcattttctctggagctaatgtaaatggttttgtatttttatttcagtttcatt

SEQ ID NO: 792490 - DNA, 637 bp, Homo sapiens
ccagcctgggcaacacagagacaccacatctccaaatacatgcgtatatacatacgtacatacatattttgtttctcaacccgtttcccagcctttcgctgagggcagaatattaacaattaaagggcgagactgagatcaaagagktacaggcttttaaaatgtgcgtaatagatcagtgcggaaggttgtatcccggggtctatttactttttctcaagatctggaagcctgagtcccctcccaagcggttaagaggcgggcttgggcgccctctagcggtgatctgtggtaaccgttccctactcagcggcagcgccttgagttgaaaatgcatttataatgacggagggatgctcatgatgtcattttccagagtcgaggaaggagctttgtggttttgagggcctccttcccgagaaccgcaggtaccctgccaggcttgctccgaccaccactttgtagaacaggtcagagcagcacagtttgcagacaaaagccacagcatggctgggtgggcagtaggcacttcgggaccttacagggatttctgctgaaattacattctttgaaaatgtgatcgtgatgggagatgatggtgttttctggaatctttttcattagctcagggcaatga

SEQ ID NO: 792491 - DNA, 626 bp, Homo sapiens
aaaaggtgctgagagcttccattaggactgacctctggaatgggcccctcaccgggcctgcgtccaccccactgctgtcctctggatgaaaactagcagttaggtctacagggtgatgcttccattgagcgcttttgttccctccggcactgttgtcagagcagatgacacccctcacccctcaccctctggaagctcagggtggtccctccagtgtctctaggccctggagtcacacactggcccctccaggctcaatggcccctggggccctgtaaaaaggaggtaggctctgcagtcaaggtgacctttctcagctgcaattttgatttcccctgaggaaggccccaaggaatccagggctgtgtaaggaatcctggcccttcatgctgggagccaggattaagaattcctatacacagggctgcctagttccatgtctagtcaagggcaggtagaaaggcacaccctatcaraagtatcaaccaggcccaatggcatgagcctgtagtcccagattcttgggaggctgagttgggaggatcattgagcccatggggtgaggctacagtaagctgtgattatgccactgcactccagcctgagtgacagagtgagacccccca

SEQ ID NO: 792492 - DNA, 492 bp, Homo sapiens
cttttgagagcatcatttatgtgggctgattgagatcatgattttccattatttgaaggatttctctcaaatcattgattttctgtttaagctgaaatcttttcttcctatctcatgcaaccttgatgctcaccaatctcagtggctttcctcattactgctgctatttcagttatcaggtcaacgtgggcttgtaataccttggaatgttgtttgttaaatttcatgattctaccaaggtcagccttctttttagctaactcttcagccctcaacatttgttctcagtacttgctcattatgaatcccaaagctgataacttgaaytgctctggaaagctgcggtttgctcataaagagactttttctgcattgtcatggtcttttgatatttcaacaagagttttggcatcagcaaagatcttcttcattgtacaactcattttctggtctccattgttgtcagccaacagctgaaagcttttgtaaatg

SEQ ID NO: 792493 - DNA, 499 bp, Homo sapiens
tttaaaaggccttttgccagctgcagccaatctctagtgccatctccagccacttccctccacctaccttttgtcaaggcccccatgactggtcatcatttcctgagcacaccacactcatgcaagcttctgagccctcgcatgtgctgttccctccaacccagaatggaccaatagaactttgyatcatgatagaaatgtcctgtgtctatactgtctaatatggtaaccactagccataggtgggtattgatcccttaaaatgtggccagtgtgactgaggagctaaaattttaacattatttaattttaatgtattaaacttaattaaataaatttaatttaaatgtcaatggctacatgtggctagtggctaacatattggacagtggctagtggttaccatattggacagaaaaactccagacaacatgttttctgttcttctctcccacctttccccatgctgggaatctagaaaacgtccatgtatcatcaa

SEQ ID NO: 792494 - DNA, 618 bp, Homo sapiens
taatgtgttctcatgggtcatacttgtgagaaactgattactcagtaaatttacatggggaagtaaataagaatgtgacttcaaggtaactgagttttatagaagaaagacagtctttttaggttcagaatcatgggacactgactattgtaaaattctcatctttccttgtcccaaattttagaacttttctggatagctcttttgccagtgaagaggcaagatagttcccagctttaataaataactgcggccaggcgcrgtggctcacgcttgtaatcacagcactttgggaggccgaggcaggtggatcacttgaggtcaggagtttaagactagcctggccaacatggtgaaaacccgtctctactaaaaatacaaaaattagctgggtgtggtggtagctgggactactctggaggctgaggcaggagaatcacttgaacccagcaggcggaggttgccatgagccgagatggcgccactgtactccagcctgggtgacagagtgagactctgtctcaaataaataaataaataaataaataaataaataaataaataaccaaagtttttgccacaaaactaaatttaaaaatagataaagcaagaatagaa

SEQ ID NO: 792495 - DNA, 581 bp, Homo sapiens
gttgaattctgcatttaatgtgttctcatgggtcatacttgtgagaaactgattactcagtaaatttacatggggaagtaaataagaatgtgacttcaaggtaactgagttttatagaagaaagacagtctttttaggttcagaatcatgggacactgactattgtaaaattctcatctttccttgtcccaaattttagaacttttctggatagctcttttgccagtgaagaggcaagatagttcccagctttaataaataactgcggccaggcgcagtggctcacgcytgtaatcacagcactttgggaggccgaggcaggtggatcacttgaggtcaggagtttaagactagcctggccaacatggtgaaaacccgtctctactaaaaatacaaaaattagctgggtgtggtggtagctgggactactctggaggctgaggcaggagaatcacttgaacccagcaggcggaggttgccatgagccgagatggcgccactgtactccagcctgggtgacagagtgagactctgtctcaaataaataaataaataaataaataaataaataaataaataac

SEQ ID NO: 792496 - DNA, 618 bp, Homo sapiens
taatgtgttctcatgggtcatacttgtgagaaactgattactcagtaaatttacatggggaagtaaataagaatgtgacttcaaggtaactgagttttatagaagaaagacagtctttttaggttcagaatcatgggacactgactattgtaaaattctcatctttccttgtcccaaattttagaacttttctggatagctcttttgccagtgaagaggcaagatagttcccagctttaataaataactgcggccaggcgcagtggctcacgcttgtaatcacagcactttgggaggccgaggcaggtggatcacttgaggtcaggagtttaagactagcctggccaacatggtgaaaacccgtctctactaaaaatacaaaaattagctgggtgtggtggtagctgggactactctggaggctgaggcaggagaatcacttgaacccagcaggcggaggttgccrtgagccgagatggcgccactgtactccagcctgggtgacagagtgagactctgtctcaaataaataaataaataaataaataaataaataaataaataaccaaagtttttgccacaaaactaaatttaaaaatagataaagcaagaatagaa

SEQ ID NO: 792497 - DNA, 584 bp, Homo sapiens
aattttatgtcctatctttgactttagtttttgttaagtgtattaaacatcactttttttctgatgaaatgagcaatccagtaaatgcagtctcttatcttgtgcttattaactacagaccacgctggtttaaaatatgaagtggtttatgggacactaaattgaaaccatcttgggtgaaatacatttgaaagacacaacacaggcatgtatcactttattttcatttccgactgtcagcagaaattggagacaacactcttcctttctgtttgattattctattatcgacagaatgaggagtgttggagacatacatgctgatttagtgttgtgctgatgaaaccattcaggttgtgtgatgtgtcatttttcactgctgccttatcaaggtgtttyagctgtgcctaaaccagccctggtaattgctttagttgcttgtggcaaagttatgtcaatgtcagtccctaaatgacttggctgcttcatgtcagatgttctctccaaagaaagacagtgtaagggactttttatacctgggtatgggtgttaattcaaagtctaaaaagaaaaggtgttgtttt

SEQ ID NO: 792498 - DNA, 583 bp, Homo sapiens
cccaccctatgcaccagatgtccccattcctattgactgcttgtccctcatgctctacttgctgccatttaccaaaaccatcaagaattttattctgaccacctgcttgaagatgccctcttgaaaggggatttggaccacaattagcccaacagcctgcaaggcccccttggcagacaccagcacttccgcttgtatgagggcttaaccaagaaggacttgcttttgtggagttggggaaataaagggtttttttkggggaaaagaagttcaaatgactgagctagaaagaaccttaagaatgcttaattctttgcagcacttagctgtaaatatgcctgcaaaccttttctggagttttagccccctgagggcaggacagtgtctcatgatcttcatcttggtatcccccctcaataagtgtttgctgaatgacaacctcctccttgatgccgctctcatgagctaggttgtacatgaaaattgttaatcagctggggactagatggcttaaaataaatggccccatgtgttacagaagacactggaccggcaatcagaagacaggttctcatccctactc

SEQ ID NO: 792499 - DNA, 583 bp, Homo sapiens
cccaccctatgcaccagatgtccccattcctattgactgcttgtccctcatgctctacttgctgccatttaccaaaaccatcaagaattttattctgaccacctgcttgaagatgccctcttgaaaggggatttggaccacaattagcccaacagcctgcaaggcccccttggcagacaccagcacttccgcttgtatgagggcttaaccaagaaggacttgcttttgtggagttggggaaataaagggtttttttgggggaaaagaagttcaaatgactgagctagaaagaaccttaagaatgcttaattctttgcagcacttagctgtaaatatgcctgcaaaccttttctggagttttagccccctgagggcaggacagtgtctcatgatcttcatcttggtatcccccctcartaagtgtttgctgaatgacaacctcctccttgatgccgctctcatgagctaggttgtacatgaaaattgttaatcagctggggactagatggcttaaaataaatggccccatgtgttacagaagacactggaccggcaatcagaagacaggttctcatccctactc

SEQ ID NO: 792500 - DNA, 598 bp, Homo sapiens
aaaatagtaactgttaatgtataaatgtttcttttaagtacaattaggtaactctcctttactgaaacccttgatttctaacaatttcagtacggttatttatattaaaacatcaatccaacaactcatagtggctctgtccattagactggcttgagaggagagaccctgacttaaccacttgcacaaacccaacacttggtacaattgccacacagtagtcattaaaccaacctgaatcacaaagagctgcagtagttatttttcctattcctaaatggtgtcttacttcttttttcactgattttacagattaaaagcaagcaaacaaacaaggcttactcaagtgwttaccagatttctgacttagcccctcaggaactgtgtaatattgggtagatgatttaacctctctgtgtctcagtttcctcttctgtaaaacagaaattaattttagcactttagcacttgtcttctagcgttgttagaagactgaatgagttaatagtgtgctgctttgtgctggctactgtgtcatcataaccatcactatcactgccaagaagatgaacaaaatcatagcgggaagggctccatt

SEQ ID NO: 792501 - DNA, 598 bp, Homo sapiens
aaaatagtaactgttaatgtataaatgtttcttttaagtacaattaggtaactctcctttactgaaacccttgatttctaacaatttcagtacggttatttatattaaaacatcaatccaacaactcatagtggctctgtccattagactggcttgagaggagagaccctgacttaaccacttgcacaaacccaacacttggtacaattgccacacagtagtcattaaaccaacctgaatcacaaagagctgcagtagttatttttcctattcctaaatggtgtcttacttcttttttcactgattttacagattaaaagcaagcaaacaaacaaggcttactcaagtgtttaccagatttctgacttagcccctcaggaactgtgtaatattgggtagatgatttaacctctctgtgyctcagtttcctcttctgtaaaacagaaattaattttagcactttagcacttgtcttctagcgttgttagaagactgaatgagttaatagtgtgctgctttgtgctggctactgtgtcatcataaccatcactatcactgccaagaagatgaacaaaatcatagcgggaagggctccatt

SEQ ID NO: 792502 - DNA, 624 bp, Homo sapiens
cttaaattctcctctgcttcactggatgccactggatacttgcaaaaacaaacaagcttatactgagtacgtccttgcaaacatttactatgtgtagcagtttggctatatggtgcttcagaagaatcctatcaaggaattcagaagagcaaaaaaatagcctgtaaacacttaacactttaaaataaccatacacacagaatgacatttatttttwtttatttatttatttatttatttatttatttatttatttatttatttattttaagacagggtctggctctatcgcccaagctggagtgcagtggtatgatctcggctcaccgccacctccacttcccggcatcaagccatcctcccgcttcaacctcctgagtggctgggactacaggcatgtgacaccacgcccagctaatttttgtattttttgtagagacagggtttcaacatattgtccaggctggtcacaaacccctggaccccagagatccacctgccttagcctccaaaagtgctggaattctaagtgtgagccactacacccagccatagaatggatgttgttatgaaaagttctgattcagaaaagtcattttgctctcacatgaagatcctctgcct

SEQ ID NO: 792503 - DNA, 494 bp, Homo sapiens
tctaaccggccccagtgagttgaaccgggtacctcagttggaaatgcagaagtaacccaccttctgcattggtcttgctgggagctgcagactggagctgttcctattcagacatcttgcccaggaatcctctatttttgttttatatgaattttaggattgttttttctaactctttgaaaaatgacattggtaatttgatagagattgcattggatctatagattgctttgggcaatatggtcattttaaygatattaatccttccaattcatgatcattggatatttttccaattgtttgtgttatctacaatttctttcatcagtgttttgtagttctacttatagatctttccatctttggttaaatatattcctagtgttttttttttatagctattgtgaattggatagctttcttgattttgtcctcaggtagattattatgggtgtatggaaatgctgctgatttgtgtacattaattttgcatc

SEQ ID NO: 792504 - DNA, 602 bp, Homo sapiens
cattgagtaagatatatgctccgggcctttcatatatatgacctttattgtcttagggtgatttccttctattcctagtttgttgagagttttaaattaggaagcagtattaaatttaatcaaatgcttgtatgcatgtatcgagatgatcatgtgatttttagccttcattctgttactgtggtgtatcacataaattggcttttgtatgttgagctctccttgcatcctggggtaaacccacttagttatggtgtttggtcattttattgtgctgttgaattcagttgcttgtattttgttgagkatttttgggtctatattcactggggatattgacctatagttttcttttcttgtgatacatttgtctggctttagtaacaggataatgctggcctcataaaatttatttggaagtgttcccttttcaatttttttggaagagtttgaggaggactaatgttaattcttctttaaatgtttggtagaatttatcagtgaagccatttggtcctaggcttctcttgttgaaaggtttttgattactgagtcaatctgtttactagttatagatcttttccttttttttaactaatttg

SEQ ID NO: 792505 - DNA, 633 bp, Homo sapiens
atataattaggcagcagatttcttgacagcaacaacagatattaaaagtcaagaagatgacatacccaaagcactaggaaaaatcactatcggtttgcaattatatagccagctaaactattactcaacaacacatataaaattaaagttttgtttggttttggtcaccaaaaatgtaaagtagttgctaagggatttatttcaagtagaagaaaattgaactagaaaggaagggatgagctctaagaggggaagttaaatttaaacaagcattgtctgtagaagttaataatcttgacagattttaagggtataaaagtgaaaataatatatttgacaacaataatagataaaatgggtgggagatgtttggagctstgaagattgataggtaagtagaaatgacattttgtacttttcaaagtcaagtatgtgtgttaaaaatgtaagggtaacatctaaaacatctgtatgtatatacagaaatacaaataagactgataattaccaaatcagtagaacaggaaaagaggaaataaagaaatcagaatcaatcccactaaaagtttggaaaaaagaaagcaaagatcatatatagcaaagtaaacacaaagctcaaactaagatggcaga

SEQ ID NO: 792506 - DNA, 569 bp, Homo sapiens
ccacctcccggcatcatggcagcctcgcctgagtttttggtgtgggagggtgtcatgtacagggaagggactgggggatacaggcaagtaagggctcacatgtcagccctgccacttacatgctctgtgtctagtcaggttactggacccatccgcrcctcagtttcctgtccttgatgaatgtttgtttgaggatatgagggtgcatggcacataggtgaagaagtgattgcctcttttctctcatctcctgctcccgtgcctctccataaagcaatccgctgtcaacctgcctcctgagcacggcccctctccatcaatggtggcagcagatgctatttgccacgaaggctgaatcaccaaaggctgcagtgtggggccggagaaagctcctgatgtgagtctggcacctcaagatggtgtctccctcactggggctgcaccacttcatttcacaggctttgcagagtgatgggttttaaagcacagtttcacaactattccactagaaggctttgggtccatagatgagtaaatctgaacatctcttctcatggccatgctgcctg

SEQ ID NO: 792507 - DNA, 685 bp, Homo sapiens
ttgcctcctttggagaggctaatcagaaactcaaaagaatgtaactgtccctctcacgtatctgtaacctggaacccctcttgttcaagtcatccccgccttgcttcaagttgttccgcctttccagaccgaaccaatatactgcttacatacattgattgacgtcgtcgcatgtctccctaaaatgtataaaactaagatgtatcccaactgcctcgggcacatgttgtcaggacttcctgaggctgccatgggcacatcctgaggactaagctctgattttttttatcttgcccaaattcctatctaargggtctgggaagtcatgccctacaaaccataaattctcatcagatgggttttatttaaccctatatatcgtggcttactttccaatctgactctggcataacattatgagacaaggaagaaaataaaaatatttaacctcaaaatatatttccttgccataccttaaaattgctctgcaaagtctcttgtgggaaaaatccacattctatagagaatccccttcccctttgttttccttccttccttccttcccagatccaggagatcatcaactaagagccaggcacccttttaggtcccataagaaacattttacaacctgctttctctctgaagtctgctatctgagagcttcttctgcacaataaaactt

SEQ ID NO: 792508 - DNA, 592 bp, Homo sapiens
accgcgcccggccagggattttcacagctgctagtcatgttacactaaatagtgggacagggagcccatctctggtccttctcctttgagctcccagtaactgaacatagggaccaacgaagaaccaggggttcttgggccacaggccaggtgaggcagagttgtctggaactcatccctgttcactaggacctcatgcagtctctagccaaggggaataagggatacagcrcatgcacctcatcagtcaggacacacatcctagtttgaataataataataataggactgtcttcctatttgtgcgctactctccttcctctactgaaaaggaaaccagccttttcagagccttccactgagaaccagcaagaatccacacctgtcgcccgttcatgaggtagtataaatggaacaggagcaaattcttcacctccacagtaacacaaagtacagaggacgggccatgagctagctgacgagaggaagtgggtctgaagacctgagcttccaccaaagggcaaacaattcagaacaactcaggaaacccaggccctgtgttgcctgaacttccccattctgcccccacccc

SEQ ID NO: 792509 - DNA, 589 bp, Homo sapiens
cctatatccaggtatttaagttgcaaatcgaattaaactgtcagagaaaacatgctctatcttcctagcttgacaaatgcgcccttctaaaacattaaacttttttttttggcggggggttggaggggacggagccttgctctgatgatgcccaagctggagtgcagtggcatgatcttggctcgctgcaacctccacccccccaattcaagcaattctcctgcctcagcctcccaagtagcaggattacaggcatgggccaccacacctagctaatttttgtaattttttagtagagacagrgtttcaccattttgaccaggctggtgtcagactcgcaacctcaggtgatctgcccacctcagcttcccaaagtgcggggattacagaacattaaacttttaaaattggtttaaagctctatttctcctaaggtaaaaaaatggagctagtgcaatggtgtgcacctataaactcagctacccaagaggctgaggcagaaggattgcttggctcaagagtttgagaccagcctgggcaacacagcgagaccttgtctcaaaaaaaaaaaaaaggcaaaatgtcaaga

SEQ ID NO: 792510 - DNA, 674 bp, Homo sapiens
cattccccttagtgatgattcatgtggcagtgagcaggagaagcagctgactgccacgtaggacaactgctgttttactcctagctatctctcttgcccaagcagtagtatacaagtgggcatgtcatatattaaaaaatatatattcaatatatacaaatatgtatcatatattatttatattatatatatctataggtatccatctatctatctaggaaacaacataagaaatgtaagagctggtcccttgcattggagaagtttatacagcagtgaaggatataaacaggagaatcagacttagggaaagtgaataaggaaaaaacatcacgaaatgccaggtragtgagtgacctgcatcatacttgcacttaaagcttcatctcttcactccctgaacaaccagtgaaacagaaagcaaggataggggaactggctaacagctggttttgatgtcttgtcccaagaactcctttctggcctggcgcaatggctcacgcctgtaatcccagcactttggagactaaggcgggcggatcacttgaggccaggagtttgagaccagtctggccaacatggtgaaccctgtctccacaaaaagtacaaaaattagccaggcatgatggcgcacacctgtagtcccaactactcaggaggctaaggcataagaa

SEQ ID NO: 792511 - DNA, 674 bp, Homo sapiens
cattccccttagtgatgattcatgtggcagtgagcaggagaagcagctgactgccacgtaggacaactgctgttttactcctagctatctctcttgcccaagcagtagtatacaagtgggcatgtcatatattaaaaaatatatattcaatatatacaaatatgtatcatatattatttatattatatatatctataggtatccatctatctatctaggaaacaacataagaaatgtaagagctggtcccttgcattggagaagtttatacagcagtgaaggatataaacaggagaatcagacttagggaaagtgaataaggaaaaaacatcacgaaatgccaggtgagtgagtgacctgcatcatacttgcacttaaagcttcrtctcttcactccctgaacaaccagtgaaacagaaagcaaggataggggaactggctaacagctggttttgatgtcttgtcccaagaactcctttctggcctggcgcaatggctcacgcctgtaatcccagcactttggagactaaggcgggcggatcacttgaggccaggagtttgagaccagtctggccaacatggtgaaccctgtctccacaaaaagtacaaaaattagccaggcatgatggcgcacacctgtagtcccaactactcaggaggctaaggcataagaa

SEQ ID NO: 792512 - DNA, 501 bp, Homo sapiens
agctttgttaggtaggcataattgattaaaccattgaccgctggtgatcaacttaaccttgagcccctttttcctctctaaaggatgggggtagggccaaaagtcccaaccgtctaatcatttctggtgaccagcccccatcctgaagctacctaggagctgccagccatctggcaactcattagcacacaaaaagacatcactttggagattccaaggatcttaggagttgtatgccaggaaattggarcaaagaccaaatatatatttcacagtacaacaatacccaaaagaattgaaagcagggaatcgaacagatatttgtatacccatgttcatagcagcattattcacaatagccaaaaggtagaaggaacccaagtgtccatgcatgaatgaatggataaacaagatgttgtatacacaaacgagagaatattattcagtgttaaaaaggaaagaatttctgacaaatggatgaaccttgaggacattacatta

SEQ ID NO: 792513 - DNA, 643 bp, Homo sapiens
catggtgaaaccctgtctctactaaaaatacaaaaattagccgagcgtggtggtgtgcgcttgtaatctcagctacctgggaggctgaggcaggagaattgcttgaacccaggaggcagaggttgcagtgagccaagatcgcgccactacactccaggctggcgayggtcagacccgcctcaaaaaaaaaaatgtcccccaaaactccaaaaattaacaacctccccccgccctgccaaaaaaaagaaaagaaaaaacaaaaacaagaaggtaggttgttcaagttgtgcccataaggcttggccaacagagtagtgagggacagctttcttctacagcatgggaaatacctgttgagatactcatttttctgcaatatttgatttttgtttctcgctttcagctgggaaacccttcacacagctgttgtgctgagcagtagtgctttcaggaaagatttaagagagttctaaccagaagcgcctgtgacttaattaccctctccagctcagctcctcattgtataatggcagttagggttaatatctactcacaggggcattgagagcaatcagtgagcgcacacatccagactgagacggcacttagctgaagtgtgctcccagccagcagaagcaactca

SEQ ID NO: 792514 - DNA, 625 bp, Homo sapiens
gagttcaggatacgtttagagaaatattactagagcctgtctttgaaagagttgtgtattataggaggaggatgtgtgctaaatggaaaagaagctatagggatatggcagtgaagtacctgcctctgctcaggcaagtcatgggatatccgcagctgctcagataataaattatatgagtatatttgtgatatacccatataattggtatttgtgaactctgcrttgggttctatttattcaaagtggagttggcgccaggcgcagtggctcacacctgtaatcctagcattttgggaggccgaggcagacggattgcctgagctcaggagtttgagaccagcctaggcaacatactgaaaccccatctctactaaaatacaaaaattagccagctgtggtggcacgcacctgtagtttcagctactgggaaggctgaggcatgaaaatgtcttgaacccaggaggcggaggttgcagtgaggtgagattgcaccattgcacttcagcctgggcaacagatggggagactctgtctccaaaaaattaaagtaaaatgaaaacaaagtggggtggggttggcaaactttttttgtaaaggacctggtaataaatgttgtagggtt

SEQ ID NO: 792515 - DNA, 625 bp, Homo sapiens
gagttcaggatacgtttagagaaatattactagagcctgtctttgaaagagttgtgtattataggaggaggatgtgtgctaaatggaaaagaagctatagggatatggcagtgaagtacctgcctctgctcaggcaagtcatgggatatccgcagctgctcagataataaattatatgagtatatttgtgatatacccatataattggtatttgtgaactctgcgttgggttctatttattcaaagtggagttggcgccaggcgcagtggctcacacctgtaatcctagcattttgggaggccgaggcagacggattgcctgagctcaggagtttgagaccagcctaggcaamatactgaaaccccatctctactaaaatacaaaaattagccagctgtggtggcacgcacctgtagtttcagctactgggaaggctgaggcatgaaaatgtcttgaacccaggaggcggaggttgcagtgaggtgagattgcaccattgcacttcagcctgggcaacagatggggagactctgtctccaaaaaattaaagtaaaatgaaaacaaagtggggtggggttggcaaactttttttgtaaaggacctggtaataaatgttgtagggtt

SEQ ID NO: 792516 - DNA, 625 bp, Homo sapiens
gagttcaggatacgtttagagaaatattactagagcctgtctttgaaagagttgtgtattataggaggaggatgtgtgctaaatggaaaagaagctatagggatatggcagtgaagtacctgcctctgctcaggcaagtcatgggatatccgcagctgctcagataataaattatatgagtatatttgtgatatacccatataattggtatttgtgaactctgcgttgggttctatttattcaaagtggagttggcgccaggcgcagtggctcacacctgtaatcctagcattttgggaggccgaggcagacggattgcctgagctcaggagtttgagaccagcctaggcaacatactgaaaccccatctctactaaaatacaaaaattagccagctgtggtggcacgcacctgtagtttcagctactgggaaggctgaggcatgaaaatgtcttgaacccrggaggcggaggttgcagtgaggtgagattgcaccattgcacttcagcctgggcaacagatggggagactctgtctccaaaaaattaaagtaaaatgaaaacaaagtggggtggggttggcaaactttttttgtaaaggacctggtaataaatgttgtagggtt

SEQ ID NO: 792517 - DNA, 608 bp, Homo sapiens
taagtgtcagttcatgtgtttcatcagtttttaaaaaattgggttgtgtccctttttcttatttgtaggagttctttatatattctaggtacaatttttttcatgtgtacgtttgtctctatacgcacacatatacttattattgatatmttttccttattcttggattgtctttcttccttttttttttttttctagatggagtcttgctcttgttgcctaggctggagtgtgcagtggtgcgatatcggttcactgcaacgtctgcctcccgggttcaagcagttcccctgcctcaacctcccaagtagtttggaatacaggcgcgtgccaccaagcctggctaatttttgtatttttagtagagatggggtttcaccatgttgggcaggctgatcttgaactcctgacctcaagtgatctgcctgccttgacttcccaaagtgctgggattacagatgtgagccagaatgcccagcctgggattgcctttctgttctctctctctctcttttttttttttcagggtaggtaggaaagtatttttattataaatttcaggatctaaaaaatgatttattacatttgctacgattaaggtgaccttt

SEQ ID NO: 792518 - DNA, 608 bp, Homo sapiens
taagtgtcagttcatgtgtttcatcagtttttaaaaaattgggttgtgtccctttttcttatttgtaggagttctttatatattctaggtacaatttttttcatgtgtacgtttgtctctatacgcacacatatacttattattgatatattttccttattcttggattgtctttcttccttttttttttttttctagatggagtcttgctcttgttgcctaggctggagtgtgcagtggtgcgatatcggttcactgcaacstctgcctcccgggttcaagcagttcccctgcctcaacctcccaagtagtttggaatacaggcgcgtgccaccaagcctggctaatttttgtatttttagtagagatggggtttcaccatgttgggcaggctgatcttgaactcctgacctcaagtgatctgcctgccttgacttcccaaagtgctgggattacagatgtgagccagaatgcccagcctgggattgcctttctgttctctctctctctcttttttttttttcagggtaggtaggaaagtatttttattataaatttcaggatctaaaaaatgatttattacatttgctacgattaaggtgaccttt

SEQ ID NO: 792519 - DNA, 608 bp, Homo sapiens
taagtgtcagttcatgtgtttcatcagtttttaaaaaattgggttgtgtccctttttcttatttgtaggagttctttatatattctaggtacaatttttttcatgtgtacgtttgtctctatacgcacacatatacttattattgatatattttccttattcttggattgtctttcttccttttttttttttttctagatggagtcttgctcttgttgcctaggctggagtgtgcagtggtgcgatatcggttcactgcaacgtctgcctcccgggttcaagcagttcccctgcctcarcctcccaagtagtttggaatacaggcgcgtgccaccaagcctggctaatttttgtatttttagtagagatggggtttcaccatgttgggcaggctgatcttgaactcctgacctcaagtgatctgcctgccttgacttcccaaagtgctgggattacagatgtgagccagaatgcccagcctgggattgcctttctgttctctctctctctcttttttttttttcagggtaggtaggaaagtatttttattataaatttcaggatctaaaaaatgatttattacatttgctacgattaaggtgaccttt

SEQ ID NO: 792520 - DNA, 378 bp, Homo sapiens
ctgcatagtgacgtcgtgaccctcgggcatggaaaaagacataggtctacccagataacccggataaccttctgaggtctcttcagcccttttcgctagtggtcacccaccactatggttacttgccagcaacatctytattgctggatggtccctgtgtataaccctggtctagtatattttttccaatatgtgacctcagtcttactactgactagttctgtgggtctcttgctaggtggtaaggatttttatacttgggcttatagagccagttagatcataactcttatgaaatatagagtgtcctaaatatcactgaaataaaaagtaggaaaaagaagcttgaattttaagactgaggctgctctgaagatt

SEQ ID NO: 792521 - DNA, 378 bp, Homo sapiens
ctgcatagtgacgtcgtgaccctcgggcatggaaaaagacataggtctacccagataacccggataaccttctgaggtctcttcagcccttttcgctagtggtcacccaccactatggttacttgccagcaacatctttatygctggatggtccctgtgtataaccctggtctagtatattttttccaatatgtgacctcagtcttactactgactagttctgtgggtctcttgctaggtggtaaggatttttatacttgggcttatagagccagttagatcataactcttatgaaatatagagtgtcctaaatatcactgaaataaaaagtaggaaaaagaagcttgaattttaagactgaggctgctctgaagatt

SEQ ID NO: 792522 - DNA, 589 bp, Homo sapiens
tgtgacttttgtaagtcacactttctaatattttttgcaggcctcatacattttgatgaaagctggatgttttagatataacattgtttcaacaataactttccatttccctttttttaaggctattttgatctttgattgtttctgtttttgtttttttgttttggctgtttagtaatttccatcaattttatctcagtaaagtaataaaaagtaaatactttggtgagtcacataaattaaaccagattacctctgagttgaaaattcctgaagctcagacatgtgaaattactactcaaactagtgttgtatatgtttgcaattttcataataaaactaacatatattaacatagtaaactttgattagttatttgaaggtatgatttsacattaggattatcatcatacagtaagtatatctatacaaatacaataaaatactactactttgtcagtcatcatagtaagaaagagttattttgccttgtaaaataaagctaacagcaataaactacctcatggaaattctttaaatatgtaaattggttggttccttggatatattacccactcaataacaataa

SEQ ID NO: 792523 - DNA, 474 bp, Homo sapiens
ccttaagtcatctttagattacatgtaatacttaatacagcagccaggcgtggtggctcacacctgtaatcccagcactttgggaggctgaggagggcggatcaggaggtcaggggttcgagaccagcctgaccaacatggtaaaaccccgtctctactaaaaacacagaaattagccaggcgtggtggcacacacctgtgatcccagctactcaggaggctgaggcaggagaatgacttgagcctgggaggcggaggttgcagtkagctgagatggcgccgttgcactccagcctgagcgacaaagcgagactccgtctcaaaaaaaaaaaaaaaatacagcataaaagttatgaaagtagtcattatactgtattgttttaggaataatgacaacgaaataatatctgtacatgttcagtagagactcaaattttttcctaagtatttttgatccaattgtggaatccatgg

SEQ ID NO: 792524 - DNA, 665 bp, Homo sapiens
aacatcaaatatgtgaaacaaatggtaagaggatactgactttttgtttatttgttgattattttcgaagaaagttactaagtaaattttaatcttctttaaaaaatgagatttataaactaaaatgcaaattattaggctttctgtaattgacaaaaggctttagggctcstgggtaagtttcagtggttctatgttgcagtaaatgttttaattcaaatgttgatatttccaccttgctcatttacaatgatttcaaaatgtcaaaaatacaaaggtcaatccttagttgacccctaatattattaagattgttttcaagtggtaaacctaaggtatagcatcctacttctatacagctacaactatacaggtccatgaacaccaaacaccatttaaaagtacacatacagatgtacatctacacgcacacacacatgcacacacacaaatttatagagaggcagcaaagtctgctgtcagtaattatggatttcaaaaaaatagcaaaccatttcaaagttgacttatgctgatttttagtttttatttgttatttatcaatgtggcaagggtattcaaggaaaatatatatttccaaagaaaattcagtacattaaggaaaacagtagtattatttataaaccaaacaaaaatcaaccaga

SEQ ID NO: 792525 - DNA, 421 bp, Homo sapiens
atccaaattcttcgccatgtcattttctatataaacccaattaattccaaataatttttctcacacctgctttgaagaatatttctataggaactaccatactgtaaagataatcaaactactttgagaaaataaatgattcttcccacaaacctgctgttccacagactttcctatttaatgaaattggccactgcattgtttctctttctccactcaaaaattatttaatcattcttgtttyctgtcactcagtccattcaacaagttctgtcaactttgtctttaatattttgctattttttcatatgcatctgcccacaataagatgcaaatttcatgtgatcagggacttgacgtgttttgttcactgctcactctctatatcgagaatgctgcttgcaacaaaacagtaaacaaa

SEQ ID NO: 792526 - DNA, 505 bp, Homo sapiens
aattccctatttggaacaatattatgcagcctgtcatgaaaatttataagttattcaataagtgcatggatggtaatgctaaaaaaaagcatgcaggaagggaaattcatataaaaatactgaacaactgtctaattcaagaaagacaaatcattggcctcctataatgaaatgggtccaagttttgtcaatctgcttccaataactgtttgattatcatattgaagaatcaagttttattgcttctttttgtaattttgaaacttggaagggtgtattcctgttttgagcacatatccaacagcaatccttgcctggtattcattatatatttctggtgatctttatgtgacacaraaatgtgcccttttcctgagtacattttctcacccttaattcaaaccacatctttcagtaaacatggatgataaggtatataactgatttttcccattggatacatatgtccattccaagttcattcatgggcatcctgtgcaatgat

SEQ ID NO: 792527 - DNA, 525 bp, Homo sapiens
agaatgcctagcagggcttgaaatgtaactgacattgtacttggcaacccagcaggctcaacagatcaatgtttgatttgggttttcaggtatctcagttttgcagcttcaagagataagggattcttttatcactgtcccagacaatttcttgwtttctaccactgccttgagctgctatttgaacttttattctttttttaaagtttccttatttttgaggctgcatcccacttcatggtccttgatttccttcttagttcacactgctgaatggcagtcatgatgcagtccccataatcttagaacccattgggttctttattccagatgatcactaaggctaattaaattttctcttgctaccatagagcaaagtttactacattcctattgaggaatataaaggggaacatgactggctaactatataatcaatccaagttacctatattctcctaagagacttttttttcctgtataatatactgtggtgattaagcctgtgtaatagtttcagggacc

SEQ ID NO: 792528 - DNA, 601 bp, Homo sapiens
aatataaaaaattcaattgtttgcttatatagcagcatgaataattagagttttaagttaaaaacacaataatttttttttttttttgagacggagtctcactctatcgccaaggctggagtgcagtggtatgatctcggctcactgcaaactccgcctcccgggttcacaccattttcctgcctcagcctcccgagtagctgggactacaggttcytgccactgcatccggctaattttttgtattttattttattttttttagtagagatggggtttcactgtgttagccaagatggtctcgatctcctaacctcgtgatccacccgccttggcctcccaaagtgctgggaaaaacacaaaacctttcatattaaaacaaaaagttgaaatatttagtaatctaataaaatatgtatcagatctatatgagaaaaactatgacctctgataaaagaaatcaaaaggagctaaatatatattttatattcacagtaagaaaattaaacattgttaagtatcatttctctccatctgtttttcatgtatagattaaatatcatgtcaattaaaatatctgctagatattgtgtggatatcg

SEQ ID NO: 792529 - DNA, 601 bp, Homo sapiens
aatataaaaaattcaattgtttgcttatatagcagcatgaataattagagttttaagttaaaaacacaataatttttttttttttttgagacggagtctcactctatcgccaaggctggagtgcagtggtatgatctcggctcactgcaaactccgcctcccgggttcacaccattttcctgcctcagcctcccgagtagctgggactacaggttcctgccactgcatccggctaattttttgtattttattttattttttttagtagagatggggtttcactgtgttagccaagatggtctcgatctcctaacctcgtgatccacccgcyttggcctcccaaagtgctgggaaaaacacaaaacctttcatattaaaacaaaaagttgaaatatttagtaatctaataaaatatgtatcagatctatatgagaaaaactatgacctctgataaaagaaatcaaaaggagctaaatatatattttatattcacagtaagaaaattaaacattgttaagtatcatttctctccatctgtttttcatgtatagattaaatatcatgtcaattaaaatatctgctagatattgtgtggatatcg

SEQ ID NO: 792530 - DNA, 601 bp, Homo sapiens
aatataaaaaattcaattgtttgcttatatagcagcatgaataattagagttttaagttaaaaacacaataatttttttttttttttgagacggagtctcactctatcgccaaggctggagtgcagtggtatgatctcggctcactgcaaactccgcctcccgggttcacaccattttcctgcctcagcctcccgagtagctgggactacaggttcctgccactgcatccggctaattttttgtattttattttattttttttagtagagatggggtttcactgtgttagccaagatggtctcgatctcctaacctcgtgatccacccgccttggcctcccaaagygctgggaaaaacacaaaacctttcatattaaaacaaaaagttgaaatatttagtaatctaataaaatatgtatcagatctatatgagaaaaactatgacctctgataaaagaaatcaaaaggagctaaatatatattttatattcacagtaagaaaattaaacattgttaagtatcatttctctccatctgtttttcatgtatagattaaatatcatgtcaattaaaatatctgctagatattgtgtggatatcg

SEQ ID NO: 792531 - DNA, 524 bp, Homo sapiens
agacaagagctaatattcaagacctcaatcccatttacagtggctaccaaaaattaaaatacctagaaatacatttagccaaagaggtgaaatatctctgcaagtagaaccacaaaacactgatgaaaggaatcatagatgacacaaacagaaaagcatcccatattcatagagtggaagaattaacatcattgaaatgaccatattgcttaaagcaatctacagattcaacacaacccctatcaaattcacagtcatttttaaacatgcatttatttattgtttgttttttgagatagggtctggctctgtcacccatgctggagtgcactggtgccatcactgytcactgagatctagatctcctgggctcaagcgattgtcccacattagcctcgtcagtagctaggactataagcatgtgccaccatgcctggctaatttttaaaatttttactagaaacaaggccttgctttattgcccagtctggtctagaactcctgggcttaagaaatcttcccac

SEQ ID NO: 792532 - DNA, 584 bp, Homo sapiens
agacaagagctaatattcaagacctcaatcccatttacagtggctaccaaaaattaaaatacctagaaatacatttagccaaagaggtgaaatatctctgcaagtagaaccacaaaacactgatgaaaggaatcatagatgacacaaacagaaaagcatcccatattcatagagtggaagaattaacatcattgaaatgaccatattgcttaaagcaatctacagattcaacacaacccctatcaaattcacagtcatttttaaacatgcatttatttattgtttgttttttgagatagggtctggctctgtcacccatgctggagtgcactggtgccatcactgctcactgagatctagatctcctgggctcaagcgattgtcccacattagcctcgtcagtagctaggactataagcatgtgccaccatgcctggctaatttttaaaatttttactagaaacaaggccttgctwtattgcccagtctggtctagaactcctgggcttaagaaatcttcccaccttaacctcccaaaatgctaggaatataggtgtgagtcaccacactcaagcctatttttt

SEQ ID NO: 792533 - DNA, 623 bp, Homo sapiens
gttttttgagatagggtctggctctgtcacccatgctggagtgcactggtgccatcactgctcactgagatctagatctcctgggctcaagcgattgtcccacattagcctcgtcagtagctaggactataagcatgtgccaccatgcctggctaatttttaaaatttttactagaaacaaggccttgctttattgcccagtctggtctagaactcctgggcttaagaaatcttcccaccttaacctcccaaaatgctaggaatataggtgtgagycaccacactcaagcctattttttacagattaagaaaaaacaatcgtaaagttcacatggaaccaaaaaataatctgaagaggcaaagcaattctaaccaaaaagaacaaacctggaaacatcacattgcctgacttcaaattataccagaagcctaaagtaatgaaaacagcacggtattgaagtggctacgttgtcttgggtaaatacccagggtttgttttctcgtgtcgagaaaatttaggacgaggagtttaggaatggaggtttaataggcaaaagaaagagaaagaaagagaagggaaaacagctttctttgtctagtgagaaagagcggacttcctagag

SEQ ID NO: 792534 - DNA, 519 bp, Homo sapiens
gctgaggagactgcccctcctgggtctagccagttcttacacagtaaaggggtcagatggagcctgcctgtgatgtgcaatctagccaatccagaggtgtatctcctttatgtgaccactataccccagaaggcaatatttctttgatttactcacctttaaatgatattttgctatttgtataatgcctccactaaatgtaacaaatccacaagtataggatgaggctttaaggytaagcaaattttaattatattaagttgatatttaatatctttttttggtatgtttcgaattcccaatcataaatggtagaagggaagagctactattccttttaaaataacaataaacttttactaccaccaaatagaggcaaaattactatggccaatgttccttctgaaaatgaaaggaaactttagtcccccgactcttattattcttccaccattatcagtcttggaaactaaatagagtaaggcatccataaattaacatgatgacaatacaaactta

SEQ ID NO: 792535 - DNA, 655 bp, Homo sapiens
catgggagcactggaggttgaccgtggaagagggctgaacacacacatcccctggggttgaagggcggttacctgggttaaagagtacaatggctcgcaggcatcccagttccgacttgtccatctgcatgtctttcattttggaaaccagctcagttagractctgttaacaggaaacaagcaggtaatgagaaaaccgtaagtaacaggccaagagccaataaaatgaattcaaccaaaatttttataagcccactctgtttccagatgatgtaccagttactaggggtacagaaatgaaaaagatgcaacccctcattgcaaggagattacagtttaactaaagaaacagacattaaaaactagcagcagcacgatgcccaggaatataactgccatgagcaaagtccaagtgggttccaaagaggaagcaatgaactccaagcagggaaatggaaaggcatcatggaagtcttggaaattagaaacgcaacaggcacagcaaggtaaggggattgcatgtctagaaaaacacagcagagggcagcattcaatgaactggtagaaaggtccggttaccacgaagggggatgagtcattccaaacaccatgttgggctctacatggaacatgtgggaaagggcagggaagtaa

SEQ ID NO: 792536 - DNA, 376 bp, Homo sapiens
ttgcattccaacctgggtgaccaggcaagactgtctcaaaaaataaaaataattaagtgatatattgtagaggtaaagagtgtggcattaagtctggcacacagtaataatggatggcatgttattattgttcatcccttctactctgactggtaaaatagctccattacrtccctgtccgagacactctgggaaagaggctgccaatgagagggaatacgctataggcttctgcatcccacaggacccacccggagctctgcacagggaaagtgccccaaaaatatggactgaaatgaatgtacccagggctgtgacatgggcagaccaatgatcccaaagcaaatatggaaactatttcttttactatatttac

SEQ ID NO: 792537 - DNA, 551 bp, Homo sapiens
acctcagtacagagtcccatacagcacccgagcttgacccctctgggagtgtctgatgaaagctctggactctccccaggaaatggatcataaatacacacacacaattttacacttaattttaaggaattcatggctgctctcccaggaagcccaggcacccgagattaaacaccacagtgctatgaagtggtagaagcagaggcacaaaacacgagtgattgaagaagggaagagaaaagcagaaagaaagggaggggcactgatgtcctcatcttacagagctgggaatcagcgactgctgtcagaagaggaaatgctcatgcaggagtcaaaaatagtcatgaaagttcagacattgggagyagtgagctaaatgctcatcttaggtattggggagtgaatagctgttgtctaaagatggtaactgaggaacggaggtataagtatgtgatttggagtgtggagaaaatccataaacagcaactggcaaaagatgctgtcttgggggagtaggactgggagtgaacaggggcaagtacagcaggaga

SEQ ID NO: 792538 - DNA, 586 bp, Homo sapiens
agtgcgctgatgattaaacgagacgaagcctcttactcttatacatggtgcagatcggagcccccagcgggtgccccacaggtggtagcccagccaggaagctgaccagggcagcaacctggaaatatgacaagatggagcaaatcacactccccagagattggaaggagcactttgtccaactgtggggatgaagrtggggcggagcagtaccaagcatcactaggctgccttctggggagagaaggactctgtaactggagggcctttccttttctgagtagagtttccaagtttggattctgaactgaaccacctgagaagataatgctgaggcaaaggcgcatccagccgtttcactcctctccgcctcccttctaaataccatcaggcgctgcatacactatggtggtcccataagatgaccatggagctgaaaaattcctgccaaggaagttgaggctgcagtcagccatgtttgcatccctgcactccagcctgagcaacagggcgagaccctgtctcaaaaaaaaaaaaaaaaaaattcccgttgcctggtgacgtcatagctgtcatcatgttgtac

SEQ ID NO: 792539 - DNA, 586 bp, Homo sapiens
agtgcgctgatgattaaacgagacgaagcctcttactcttatacatggtgcagatcggagcccccagcgggtgccccacaggtggtagcccagccaggaagctgaccagggcagcaacctggaaatatgacaagatggagcaaatcacactccccagagattggaaggagcactttgtccaactgtggggatgaaggyggggcggagcagtaccaagcatcactaggctgccttctggggagagaaggactctgtaactggagggcctttccttttctgagtagagtttccaagtttggattctgaactgaaccacctgagaagataatgctgaggcaaaggcgcatccagccgtttcactcctctccgcctcccttctaaataccatcaggcgctgcatacactatggtggtcccataagatgaccatggagctgaaaaattcctgccaaggaagttgaggctgcagtcagccatgtttgcatccctgcactccagcctgagcaacagggcgagaccctgtctcaaaaaaaaaaaaaaaaaaattcccgttgcctggtgacgtcatagctgtcatcatgttgtac

SEQ ID NO: 792540 - DNA, 542 bp, Homo sapiens
cctttgggcagttgttatttttattttgagataattacataatcacatgcaattgtaagaaataatacagagatactccctgtactgtttactcagtttcgcccagtggcaacatcttgccaaactatagtacaacatcaccacaggatactgacactgacatagtccagatacagaacacttccatctccacagggacccctcatgttgcccttatacagccacacccactttcctcccacattactyttcctttaactccttgtaaccactaatatgttatccatttctaaaattttattatttcaaaaatgttatataaatggaatcatacagtatgtaaccttttggggaatttttgttgttgcttttttcttagcatgatttcctggagattcattgaagttgcatgtatcaatggttctttcctttatttcatggtgtggatgtgccacagtttaaccattcactggatgaagtccctctgggctgatttcagcttttggctactataaacgaagctgctatgaacattcatgtcc

SEQ ID NO: 792541 - DNA, 565 bp, Homo sapiens
agagttttatgtgttttcttaaaaacaagtggcttttaagaaattctctggagaataatttctccattggacaatccttcccagtgtctcccaagcgttcgggaagtgctttttcatatttaatccacttttagagaagcagggaagagaaagaagaaaatggaaaacatatgttgtccttctgactgcagagccccagttcttgtcgttcattgttatttttaacataagactcatgggcagtagtgggggtggggcatcaaggctggagatgtcatgaatggtcatgagtccattgtcacaggaccgaagtgagyggagcctcctatgctgacctctcaactctggtgtcccagcaaccagagcccagtgtatgtccggttgctcaggaactgcaagaaaaagtgtgggagaaagttcacggcagcagcacttactgccaaggaaaaagcacaactctgagtgctgggtatcatgggcctcagtggacctgggttcgaatcctgacttgaccactttttcactgagaagctcaggcagagcactgacattttctgagcctcaa

SEQ ID NO: 792542 - DNA, 563 bp, Homo sapiens
ctactgtttctggtgttaaagcaagttaagatggacaccaggtcagaagaaactctaaacagacaaagccagttaggcctcataagtaacaataaccttgctagatctgcaaacagaagcaaaacttaagctatgttttataaatgyctatagaaagaaaaatgaaacttaaggctagccaatagaagctgctaactaacttaaagttatataactgcagacttttcagcagaataggtcaaagaaggcaactgaataaccataaccaatcaatttttttgtctgtttgttttacttctgtgtttactctataaaagcattcgctttgtgctccctcaatggagccccccaaccacttctgttttggaagaggaccaatactgaatcactgtttcagcaaataaactctttaaaaaatttacctgcctcagtttccttttcatactggtgatgatagttttaaaagagtttgggcaaaagtaaaaggaaggaaatgtacgctgatgatcaaagaccagagaaacgcagacttatccatgtgatatattatgcttactgagatc

SEQ ID NO: 792543 - DNA, 602 bp, Homo sapiens
accaccatctctgtgtaagtatgcttggggtcgattaattcaaatttgaagttcttatgccagcttttgtgcttccaagatatgaacagtgaaaacaatttatgcaagtgaagataggctctgaagtgccagggcctaattgatgagtgattaatgaccattaatcaaaatttaaacaataaaactagaaaagaaaatgaaacacctaaaccttaccatatctagttataatatttccgtagaagaagttaactttaagactcagtaaagtgttgtgtcattttatttkatttgatttgattttctactttgatttgaaatattcatgcaagtacatgtcaattttggatcttttgtgcagaaaatatctaaaaactctttgggcttgtcaggagagcaacattgctgaataattctagtaggcctgattctgttaaatctctgaatagccatatgttcactcatgacaaaacattttgtgagaaaacaaaatatcttataaaagacaattgtacttatggtgtcctaatatagaatattaatataaataaaaattcaccctatttttagcatcttttaatttgtatagttttaattttttc

SEQ ID NO: 792544 - DNA, 593 bp, Homo sapiens
attaaaattaaccaatcggccagacgcagtggcccatgcctgtaatcccagcacttcgggaggctgaggtaggtggatcacctgaggtcaggaattcaagaccagcctgaccaacatggtgaaaccccatctctactaaaaatataaaraattagctgggcttgctggcacgtgcctgtaatcccagctacttgggaggctgagacagaagaattgcttgaacccaggaggcggaggttgcagtaagccgagatcacaccattgcactccagcctgggcgaccagagcaaaactccgtctcaaaaaaaaataaaaattaaccaatggactccattatattggcatagtaaaaagaaaagttgtatgattatattaatatattcaggaaataatttgacaaaatccaacacccattcattatgtaaattgtaagcaggttaggaataaagggagattacctccatttaataaaatgtgtcaccttcagagaataccacacaataatgaaagactgaatgtttttcctctaagaatgagaacaaggcaaggatgataatgctcatcatcactctttctcaacttattgcaaaaca

SEQ ID NO: 792545 - DNA, 615 bp, Homo sapiens
tttatatttcttatcttatagccaattgaagttattattaattttaattgtttaatctttacatttaagatataagtggttcaattcctccaattaaagtattagaatatgctaaattagtctgttttatttcttttactagtgagtttaataccttcagtttttttttagtacatattagcatccatttcttcccgactgatgaactcctgttagtatttcttgtaagagaaatctggtgttgtcgaattccctcagttttgcttgtctgataaagtttttatcttgccttcgtgtttgaaggataactctgctaaayattatatttttggttggcagtttttgccttcaatactttgagtatagcattctattttctcctgacctgccaggcttttgctgagaaattgctgaaagccatattggagtttcattgaatgtaatatgtttcttttctcttgcgaatttgagtactctttctttgtttttgaattttgctaatttgattatgatatgccttggggatttcctctttgggttgaattttattggtggcctttatgcttactgtacctgcatggtgaagtctgtctccatatttggggatttttcagg

SEQ ID NO: 792546 - DNA, 615 bp, Homo sapiens
tagacttaagcattatatcacaatattttttcacctttagaattagaaatccaaagaaaagtcctccctcccaccttattttctgtcagtctcagctggaggtatgcttggggtttggacagtttcaagaatttttaataactgcagaaccacctgtctcttgcactaaaaggactagctcccttaatatcagaagctaaatttataacaggtagcctctttttagagagttcaaatggtaaacaggaaacaagattattaccacactggtctcatatatatccaacttagaaaagtcaccagctgcctgaagttgatacttgaggctaaagtgtgtttccataatacccagtacaccgtcccatcccaactcatggtacacattcaacagagaaagagaaaaccatcttttggaccttayaggttgctagtacatctgcgcctgtacctggaatcaaaccaaataggagaatccttcttcacaaggaggttctgcagcatcactttggcattactcacgtatcttatatcaggggtggggaggttggaggtgtagtaagcagaacactccacatacaatctcctcctttagaaagtggcttttcaaatattgtt

SEQ ID NO: 792547 - DNA, 500 bp, Homo sapiens
ataaaacaatatgagagcgtctctctcttccctcacccttaatgtgaccactggtttcactcatgcctaatacccaaatcccaaatcctactgctgtgtgttcacattctgcattctgatttcgttgttttctctttttcattcaaatgccttgtctctcctcctgccccagggtctttgtatattatatcaccctttccaggaatattyttcacgctgctcttagtctagttaactcatactggtgtttcagatctcagttcagaattcaatgcttttccttaccacccaagctaggccagatttatctatgtgatctcatagaaatcattccttttcttataagaacctttcttaatttgtaataatacgatcattagtgtaaacatttgtctctcattagactgtacacttcaaaaaatggtaaactatgtcaacttttgcttattctaacttctcaagatcaagaacagtgatggctaaatactaggatctcacta

SEQ ID NO: 792548 - DNA, 594 bp, Homo sapiens
tgggaaggagggaaggtgcaaaggcaaaaaactacccattgggtactatttatttgcttttaactatctatgtgtgtcccatcattaagtgtacattgttaaaataaatacaccacctagacgttaaacaccaatttccataaagctaggtgcattcttcacacttcagcatgcctcattgtccctttttggaaaatttttaatgccttatacctgagtccaccataaaggtrttggttaaatagttctgggcttatgttggagaatgagtattttatgtaaggatcctggtgattttgatgcaacttgatcttggatcacattatgataaatatagatgaagaagtagaaaagagtaattagccgtaaatctgcagaaccttgcaattcattatatttgtttttatgtgtaccaactataacgtgaatttggtatcgatatttgtgccaaagatataggtgcttgcatttgaaagtgcatgctgtgttttcttttgttctatcaataagtcagatgaagtaaagaatttgcaaaatgttgatgaaacatatttgctaacacacaagcattagctctttttgtaagtggctgta

SEQ ID NO: 792549 - DNA, 594 bp, Homo sapiens
tgggaaggagggaaggtgcaaaggcaaaaaactacccattgggtactatttatttgcttttaactatctatgtgtgtcccatcattaagtgtacattgttaaaataaatacaccacctagacgttaaacaccaatttccataaagctaggtgcattcttcacacttcagcatgcctcattgtccctttttggaaaatttttaatgccttatacctgagtccaccataaaggtgttggttaaatagttctgggcttatgttggagaatgagtattttatgtaaggatcctggtgattttgatgcaacttgatcttggatcacattatgataaatatagatgaagaagtagaaaagagtaattagccgtaaatctgcagaaccttgcaattcattatatttgtttttatrtgtaccaactataacgtgaatttggtatcgatatttgtgccaaagatataggtgcttgcatttgaaagtgcatgctgtgttttcttttgttctatcaataagtcagatgaagtaaagaatttgcaaaatgttgatgaaacatatttgctaacacacaagcattagctctttttgtaagtggctgta

SEQ ID NO: 792550 - DNA, 465 bp, Homo sapiens
cctaatatgctgtaacctataaattagtgaccaaaggtttgagaatttattaatatatcaatcccaagttattaaattttgactcagaagaaataaccacggttgtgttggtggccccttctcttcaactctaaaaaaaaaaaaaaagtaaaatttttagcatatggccttagtaactccaactctatctggaaaaccatgatggcattttttgttgtgtggtgtcagtgtcagaaaagacaacttatcaaacatttcttacaaagtcttgacattttttaaaattatgctggtaaatccatgcatgtcctttggcatwacagggctcttcctcaaggggacctgatctctacctgtggaaatgacctatggatttgtgaactagaaactgagggaagaaccatacttttcccttttttccatgtttcccggctttaatgaaaggtacaattggtatgcaaaaaa

SEQ ID NO: 792551 - DNA, 592 bp, Homo sapiens
ggggtttaaggcaattttccaagctgtacaaagagagagataatcagaaaaacaaagccaaagttcattataaaaatgaagcaaagtagcagagaaacatggatttttattaggagtatctccagttggcaacggtttgtaaatctaatctagaacaaaaataagaatagtatttttggactctgcatattcttgataatgaaaattataaaccttttttaagttagacacagaattggcaattctaaggcaagactaacatattttggcaggtctaagaagaaagaagctaagaaaataattcctgctccttagttctgcttgtgcgtgtgtttttttgaaacaaaattaagtgaaattattagaaaattagaacatcttgcctaaattataagtatgcayttttctagtaattcctttgatgtttagatcgacatgttatgctaatatgtaaaataacttctaaataaatgtcacctctaccattttccagggcctatgaagaaagaaatgtaatattaacaataattttctgtttttaataaatggttagctaaacgtataccaatctgaaaaaaaatgcttattatat

SEQ ID NO: 792552 - DNA, 598 bp, Homo sapiens
taacttaagaaaattattatttaagctattggaaaattactgaatctaaaacagatttaaaattgattatgttggctgtctacattagcttgattaattcaatatgatatattactctctttactagtcatgtaaatatgtcagcaatgtttacatgaaatctgaaaagtgttttatgagacatgttaaaaccattaaaactgcaacttatatgccttcttttagatactcaatcatttataacctctaattttcagatgaagttgagtcataagcaaagaacaaatctgtcttaacagtgcttattttagtaattagctattataagtgacttcttacytaatcagtacacaattgtttaaaaaatgaattttctatcatgtgctaaaatagaaaacacccattttactatcatgctaccaaacatatgttaaataaaattaaaattattttgtaaaatgtagtttatgttttcagttaaagaaattttggtaaattgctttttgcgcgaataaatttaaaatataatcttgattaacacagacaaggacttacacttaataatttatccaggtcaatcatatgaaataatcgtttc

SEQ ID NO: 792553 - DNA, 598 bp, Homo sapiens
taacttaagaaaattattatttaagctattggaaaattactgaatctaaaacagatttaaaattgattatgttggctgtctacattagcttgattaattcaatatgatatattactctctttactagtcatgtaaatatgtcagcaatgtttacatgaaatctgaaaagtgttttatgagacatgttaaaaccattaaaactgcaacttatatgccttcttttagatactcaatcatttataacctctaattttcagatgaagttgagtcataagcaaagaacaaatctgtcttaacagtgcttattttagtaattagctattataagtgacttcttacctaatcagtacacaattgtttaaaaaatgaattttctatcatgtgctaaaayagaaaacacccattttactatcatgctaccaaacatatgttaaataaaattaaaattattttgtaaaatgtagtttatgttttcagttaaagaaattttggtaaattgctttttgcgcgaataaatttaaaatataatcttgattaacacagacaaggacttacacttaataatttatccaggtcaatcatatgaaataatcgtttc

SEQ ID NO: 792554 - DNA, 613 bp, Homo sapiens
cctcctactacacagccaacaaagtcagatgcagaatagtactgattgtcctatacaccctctcaatcaaaagaaaatatgtttgtaagtagacaggaaaaatactttgggccttatatactgtctatgtgtaggcacagagttcaatatttgccagacataaaaccctgtataaaaatagtagagtttttgaaatagccaaggttttctcctgtattctcccaccttaaaagctgtcaaatagagtaaccatacaatccatcaatcccaatactgggtatatgtccaaagaaaakgaaatcagtatataaaagagatctgtgcattcccatatttaatgcagcactcttcacaatagccaagatatggaatcagcccagatgtgaatgaggaaatgtggcccatatatagtattaatacatatacacaatggaatataattcagccattaaaaagaatgaactcttgtcatttgcaacaacgtggatgtacctagaggaggttatgttaagtaaaataagccaggcaccaaaagactaattttgcggttctcactcatatgtgcaagctaaaatttttttaaaacattgaagtcatagagatagggtagtat

SEQ ID NO: 792555 - DNA, 388 bp, Homo sapiens
tctacaatcattcagacattttattaaggccattttacattgtgtcatcctccagcatcactctcttacttgaaataaaataggccttgtaatcactgtgctctattgtctcactttctgggcctacttactggggctttgagtatttcaggcactcttgccccatcccctctgtcaccacccgcaagcctcatcaagcctctaatcyggaggtgggtggtggtaaatgagcaagagggaacttgcttagtctcgggatccatctgtaggaacataacgttcttctaatatctgcagatacccagtttctgcaggataaatttcctcatggtctccccatagaagggcctttcctgctgttctcgatgagcagattaatgtagggcac

SEQ ID NO: 792556 - DNA, 645 bp, Homo sapiens
atggataaaagccaatcagaaaagcacttgagttcttgttttggatcagttgcagtaggtgccatgtggggcagaaagtaacgtggcccctgctctggagtggttttcagttgagtggacaggatgtctaagagcattactaactacgagaagccacacagttagcatgcagatagasaacagctttaaaatttttgaggaaggtgaactcttgaaacaaaaaggaaataatttattgtattgccctcttaaacagcttcttctttctaacaactacagtattgccaggatttctctccatttggatatgcattatcagagataaagtagcatagcagtcatatgctgcttttttacatgtggaaggaaatggaaaagctagtggtgctcctcttatactctcaacagaaaagtttcattttggaaaataaatcctgactgatttaaatgtcattctaatttctaatttaatatattttccatgattagcattttagtaccaagcaagtattagttatctgttgctgcctaacaaattatgacatgtaataatatcaacctcttaccatacttaaaaactacaaatcatataatctcctcagctaatatttgatgacctatagtcaacatgtattttttggagca

SEQ ID NO: 792557 - DNA, 644 bp, Homo sapiens
tatccttcattaggggattaaatattttatggcatagccatacagtagaatacaggaatacagccatgcagtgaatacagtgcagctctgaaaatggcaacatgaaaatgcctgtttcttgactgggaattatgttaagtgaggaaagcagattatacaacatgccacttttttgggaggtagggaagcaaatacacacacacacgcacacacacacacagaaagatgtctgtatgccaaaacataattttgtatgagtaattttggggctttactcatatattctagatttttaatgctgaacgtttctattcagaatgttcatttctagtcagtgactggaatgaataaataggtaaaaaaaattttaatgggaaaaaattttagttccccttttcttgtaaaaaccttgttatctgacatgcttttcaaagcttgcygttcagtgttcctttttcagatttctgcattgacttactagttgtgtacctttgcattgtgtcatcatgtagaaacctcacagcagccctatgagcttgagcattgctaccccttatctacttcgcaggtgataaaactgacaataaatatcaattttatattttgcacaggaaaaaaattggagtggttcttaaaagccacgc

SEQ ID NO: 792558 - DNA, 589 bp, Homo sapiens
accccctgcagtcgtcaaagggtggctcattgctttctgtggcttttactcctgagtgaagctgcctttcttattaccctccttgtccgttccccgtcacctgtgctgtgatctggtttggaagtttgaagttaccccaagctctcttctacttttttgcagacctccaaccccctcattgttctccttaagcagattgycccccaccccaccctttttggagagtttctaggattttattttgggggaataaataaatttctttccaactgggatggtggtgaaaaggctgtttgtagactgtgggtggggaagggtttgaggccccactgctgtcatgcttgttcggtggcatttgcaccactggagatgattttagacagggtgtcagcccagcagtaaacatcattgaaatagaagtcaggtcatgactcccttttcagttcttttctttttgttttttttttttcttgggggatatgacctttattgagcttatccaccacagtggaaataatgtctgtacaaagccaaatgtttgttactataacttctgcattacaattaaaatccaaacagttttttaaaa

SEQ ID NO: 792559 - DNA, 621 bp, Homo sapiens
gctttcagatttttgaattaaactcaatctcacacatcttcactttacctcttaaatgtgacactaaaaaaggtggaaagccactctaaggtggaactggtcctatttagaatgaataaatctcattgttttacttttttcttttctttttccagtgctcattcttggtcttttcattctatttgtaccgtacacactatcagttcaacaaatttcataaaacattctaccacatagtctttgaggtcatcggctattaagatgatctccccacatccatgaaagcagggagggaaggacttcacttcctatgtcctcatgcacaataaaatatgctgatggtaggctgccrctctaaaattaataacagagatgggtttatttcttctgactgcttggtataattcaatgcaattgtaatacttttatgttggccctttagaaatatacactctgaaagcagagatattgttaaatgtcacaataacacataatttacaggttgtgattaaaaataattaataaaaaaaatttagccaggcatggtggtgggcacctgttatcccagctacttgggaggctgaggcaggagaattgcttgaagccaggagactgaggttg

SEQ ID NO: 792560 - DNA, 584 bp, Homo sapiens
attatgttaggaaggaatgttggagttgaaaacagaatagaactttctaacagttagttctagtgagtccttaatagaagttaaattttgctgagttatttataaaattcattcacatagagtgccttggtgagtctttaatatcattaaaatattattattcttatcattttaccaacagcatcctaaataaaattcatttaactactattactaaatgtatttctcttctcttttacagtagcacaactatttcaaaactttcctaaaaatgcacaagtagagattattttatatatgataatatacygtaaaatcaactctacaaatgtaagttattttctttgtgaaataaaaacatgactcatacagatttaataagctgataagatcacaatatggatgaatatattgataaggtcacaatatggatttatttcctctcagttacctcctgcctctgaagctaatgttctgtccatataatcccagtatcatataaaatagttttgtagggagaaatggttgacttaaattgacactagacttgatgatcttagagtactcattcacttaaagatatt

SEQ ID NO: 792561 - DNA, 584 bp, Homo sapiens
attatgttaggaaggaatgttggagttgaaaacagaatagaactttctaacagttagttctagtgagtccttaatagaagttaaattttgctgagttatttataaaattcattcacatagagtgccttggtgagtctttaatatcattaaaatattattattcttatcattttaccaacagcatcctaaataaaattcatttaactactattactaaatgtatttctcttctcttttacagtagcacaactatttcaaaactttcctaaaaatgcacaagtagagattattttatatatgataatatactgtaaaatcaactctacaaatgtaagttattttctttgtgaaataaaaacatgactcatacagatttaataagctgataagatcacaatatggatgaatataytgataaggtcacaatatggatttatttcctctcagttacctcctgcctctgaagctaatgttctgtccatataatcccagtatcatataaaatagttttgtagggagaaatggttgacttaaattgacactagacttgatgatcttagagtactcattcacttaaagatatt

SEQ ID NO: 792562 - DNA, 558 bp, Homo sapiens
caaatgtattccttactttgttttcataactatcgttaatatgatgttccaagtctgtatttggataaagagtcattattaaagcacctcagtggtgtctaaaatacaaaagtttctcactaaatatttatttcaaattaaataaaatctaaaacatggataattcagacatgcaaaatatcaaagattactttttatagtgatcataggtttaatacataattagaagctaaaataaacatatccgaaattaaaacaatatgataactgtgaggtaagtgtccaatgtttgaaaatgagaacgtggtatttgcttcgatcaaataagtaatattcaagttttaaaacactttcctaaaatcattgtgacrtgaaggctgataagccaatagaagcaagaattttccaagtcaggaaatctgagcttgtccattactatgtgtgtgattctgggcagtttaaatttctgagcctcattatctttattgggaatagcagtattacctgcagcttttatatcaggatgaaactaactatatgcaaaccatctactactgg

SEQ ID NO: 792563 - DNA, 564 bp, Homo sapiens
tacaacggagtactgtttaggaaaagggatgagctaccgacgaataatatttcatggaagaacctcaaaaatcgtatgcaaagtgaaaaaagtaaggcacaacagtcggtatggtgcaatcttattttacatgaaatgcccagaaaaggcaaaattacagatatagaaagtagmttagtggtttcctggggctgggttgggaatagggagtaattctcaatgggaatgagggatactcattgcaggtatcttattggaaaatgaaaatgttctaaaagtcatttacgacgatagatttaccatttagaaaaagtgaactgcacacttgaaacaaatgaatttcattatatataaagtatatcaggaaagttgtgtttgaaaaaagcctgagggccgggtgcggtggctcacgcctgtaatcccagcactttgggaggccgagacaggcagatcacctgaggtcaggagttcaagaccagcctgtccaacatggtgaaacgtcgtctctattaaaaatacaaaaattagctggacgtgctggcacatgcctgtaatcccagctac

SEQ ID NO: 792564 - DNA, 634 bp, Homo sapiens
ttatcatgtaccagacaaaatttaattgcatgtttaatgttataaattatgtcatgtattttactctagaacacaaagtattacaaagtatgtgtatatcaacattattttatataatttagttgtatatgatttataattgaagatttatatatttttatgcattcactatttcttgaattctaaaaatagtaatcatatcaagaatattaataaatgtatattgaccatctttaatggaaaattactttggtaaacactacatatatatatatagagagagagagagagagagagagagtctttacaacaaccctttaaatgatatattattatgatccttactttacaggtaaaaagagtgaaaattagaaaagaaaaataacttgctgagggccacacaamtagtaaataacagaacagaggcatccattcaggtctggctgagtgtaaaagatcatgctttactgccctagtcagttttaatgaaacataaaatgcattagttttgagttacttgacatttaaaagttagacgttaagtaaaatatcaagtgatatattagcataatgtaaatccattaattttcaaatttaaaaacactattggttgtgggttgttaaacatatctca

SEQ ID NO: 792565 - DNA, 616 bp, Homo sapiens
ttgtggatatttttttctctcaaagattcttataacatttctttgagttgagggggagacagatgtgttgtgtggtgttgttttacatctggagaaactggggcacagaggagtattgggggagagttcagctgctctttgtagtgctgttgggtggtgatggatgtggaggcagatgaccaggtcttctcaacagaaaaaaattacacttccatctgtaatcaactcattttttctctatttgctatgatgacaaaacaaaacggaacccaaatttcacaaatacactatttttatcatttaacctgcatgtttccatttttgaaaaatttagttctaattataatagtttttacatctcaaaaaatacaatactgcaataaactccataattcaaaatgaaagagagtattgggaataataaaattagtagagaatcagcaaaaagcaaaaacaaaacaycctgtatctgaataagtaacagtttccaaagagcataaaatactgctgaatataattcagtcgtgtgtgtgtgcgtgtgtgtgtgtgtgtgtatgtgtgtgtcagagagagagaatatgtaatagcaatcaaatgaacatatagctaatgatat

SEQ ID NO: 792566 - DNA, 429 bp, Homo sapiens
ggctctgcagtttataaatcaccccagaacacagccaggctgtgaaaggcactcagccagaagttgtgaaagcaaataattttcattccctgccctgggaattacgtgaagcaacagaacaaaagctgcattccccagagattttctgaaygtaaaatgaaagggaaaacatgaaaatcaccggaaaggcagagttaggaaagctaaggaaagaaggcagagcacagccaagacacctttggccggttcgtctcctgcttccagctgtaggtgcagaataccttctgcaaagaagagtgttggaaatgttctcagaggctatcccaactaggagaagcgaggcatgagatggggctatgcatctgcatttcgtgatgataagaaaataagtattttttttgacctagacattaacgaaaatcttaaggg

SEQ ID NO: 792567 - DNA, 496 bp, Homo sapiens
tctgtctgtgtaaccacagtgaatgggtgtgcacgcttggtgggcctctgagcccctgttgcacaaaccagaaacagagcagagccaagggggcctgacaagagttcctttttagctgaacaaacaagtgctctccataataggtggaatcagacagttaacacatttttatgttgaaaacaaaataaaaggaaaaaattaaaaaaaactatcatgaactgtattgctccagttcccatccccaagtggcccagccctttcttgctggtccagytggacaggagcagctatctagaatcaggatgcggggagtgaggaagtttttcctttgacaatgaaggtgggctttcattgtgatttttgttctgttgcagtaatataggagcacattttggccattgtaattacagggaacaaagggattgcggacacatatctggacttcttttcctcccttattgttgtggaagagacactagaaatgctcaaacacctg

SEQ ID NO: 792568 - DNA, 598 bp, Homo sapiens
agttgtaatattgtttccaacatttgggacatttctgtgcaggtaagagctcaatgagtttccttgaataagattataacccagtcaagagcagtagtcctcaactagaggggattttaccttccaggagatatttkgcaaagtccgcatgaatatcaaggaagacaatcttatttcaagagtcagcctgagctgggaggaaagatttggggcccaattcatctttctcagaaagccaacgtttacatgacggtaggaacaaggaattaagcttccagagtcacctcctgtcatgtgaaatccagtcgggtagttgctacaatcactttggtttaattaacaagtgtctctaaagcatttattattatttcttggaaaaaaatctcattgatattgaatatttgaaaaattaacttgtcaaatcagtactaaattacattgctaatgagagctagttgtagatattgtttctatatatgaaaaaaatggaacttttgcattgtctggatttgaattcaacaaaactatagattaggtctatagattagttcttcaaaaccagacaatacataaatttgcacaggaaaatgataagaaa

SEQ ID NO: 792569 - DNA, 580 bp, Homo sapiens
tattctgttgttaccttgtcataattattgtcatgttttatctattttcttgcttcccaacttagaagtggtttcgttaaaaatgctttcagaatacttatttcactttttaaaagaacgtattgaactttaagaaatccactgactgcaggacctgatggtgctaatggtgcacaggtctcgtctgcacaatgagcatgtactacacacccaacgccttgagttaatttggacagcaatgctttagctgcaattacagccatgcacagcgtaatgatgttttggtcaacaagcgaccaaagatatatgagatggtcccataatattataacgaagcttaaaaatatttattgactgatgacgcagtagccttcctaatggtatagcacaacacattacytttttatgttcagatatatttggttacagctgcctgcagtattcagtacagtgacatgctgcatagggattgtagcctaggagcagtaggccacacacagagcctaggtgtgtggcagcctgtaccatctaggtttgttaagtgcactcagtgatactcacaccatcaggacgtcaccta

SEQ ID NO: 792570 - DNA, 636 bp, Homo sapiens
ttatctttatggttttttatttaaatgtagacaaaaccaggaaatgaattcaaagtgtaatatgtactgtgaactaatgaaattacttacaggatttatgtttctttttttcagaacatattttgataacatagttgcaatagattctctacttgaacacataatggtaggttgtttttgttctgagtatgattctgtttaacccttaggcccatggtgctartatatggcataacatttaaacttattcatccacaggcactttcaatattatgaaaatgtggtggcttaggaattcaccttgatctgtttgtcacttgcgttaattttgggggagtaagtttgaataacatttttaaaaatctcagagcttttctttattaatggagagctatacttagaaaagacatttggtttctttttatgttcttcaaaacacctcttacatatgggacatgtggggaattctcgattgattttttcctgatcttcaagttcattctacttagttctagtcttaattattcctctctcctagatggctgtcaggcacttttgagcctaaagctgtatgacgtagagttataggcatatttccctatgctactgagtacttttaggtctctagtgagactt

SEQ ID NO: 792571 - DNA, 648 bp, Homo sapiens
ggcattgaagtattgttcactttatggaatagtatttgggttggagattggtgcatctcctgttgtacgaaggatagctgtattatgttaggcgtaattatgactttattattgtctttatttgaacattgcctatgatcgcaggagacgtgtatgggttcaagttgacaaggggtggacttgtgatggtttatactgagtgtcaacttgattggattggaggatgcaragtattaatcctgggtgtgtctgtgagggtgctgccaaaggagattaacatttgagttagtaggctggggaaggcagacccacccttaagctggtgggcaccatctaatcagcttccagcaaatataatacaggcagaaaaacgtgaaaaggtgagactggcctagcctcccagcctacatctttctcccatgctggatgcttcctgccctggaacatgggactccaggttcttcagttttgggactcagactggctcttctttctcctcagcttgcagacagcctactgtgggaacttgtgattgtgtaagttaatactttaagtaaaatcctctttatatatgtgtgtgtgtgtgtgtgtgtgtgtgtgtacacacacaccctattagttctgtccctctagagacccctgaaacaa

SEQ ID NO: 792572 - DNA, 594 bp, Homo sapiens
tttgttccaaggatttggtcctttatgtcaatcctgtgtttcttcttcttcttcttcttcttccttttttttttttttagaataagagtctcactctgtcacccagggctggagttcagtggcgcaatctcggctcactgcaacctctgcctcccaggttcaagcgattctggtgcctcagcctcccaagtagctgggactgcagrcgcccgccaccatgcctggctaatttttgtattcttagcagagatggggtttcaccatattggccaggctcatcttgaactcctgaccttgtgatccacctgcctcagccttccaaagtgctgggattacaggcgtgagccactgtgcctggccaatcctgtgtttctttactgacagtttcaatcgtatgcagcctgccggagatcctattttgaaggggaaaggggtttttcaattccagaaagaataggtttgactttctaaattttgtatcataagcattatagggaatgctttaaatagtttacgaagcttagtttttttttttgaaagcttaaatttgctaggtgaggattcattgaacataattccttttttttagttcta

SEQ ID NO: 792573 - DNA, 569 bp, Homo sapiens
ctgggaggatcccgaggaccccctagttgcagccatgtcgagactgacgctgaggaggtccccaactgtcacgagcaacacccgtcaaacacagccacccacatggggacagatcaagaagctgtcacagatggcagaagaaaacctgaggaaagcagtacaaccagtcacaatgagtaatttaatggtagctatgatagcagtgatcaccactgccatgagtattccttcarcaagggctgacacagagaacaattatacttattgggcatatttatcaatcttggctggcaataatgcctagatgcaatcactctataacacagttacacatgctttctgatctcagtatttaccataataaatctgctactataattgaggcataccaccctcaaaaacctttttgtaaacaggattggacccagttagaaaaaatgaacatacttgtttagtaagattgcattgcagaacaggcagaggtgctgcacaacgattcctatggaatcattactaattggtcccctaaggggatgtttagcttgaattgcacctctcagtctgcgagc

SEQ ID NO: 792574 - DNA, 569 bp, Homo sapiens
ctgggaggatcccgaggaccccctagttgcagccatgtcgagactgacgctgaggaggtccccaactgtcacgagcaacacccgtcaaacacagccacccacatggggacagatcaagaagctgtcacagatggcagaagaaaacctgaggaaagcagtacaaccagtcacaatgagtaatttaatggtagctatgatagcagtgatcaccactgccatgagtattccttcagcaagggctgacacagagaacaattatacttattgggcatatttatcaatcttggctggcaataatgcctagatgcaatcactctataacacagttacacatgctttctgatctcagtatttaccataataaatctgctactataattgaggcataccaycctcaaaaacctttttgtaaacaggattggacccagttagaaaaaatgaacatacttgtttagtaagattgcattgcagaacaggcagaggtgctgcacaacgattcctatggaatcattactaattggtcccctaaggggatgtttagcttgaattgcacctctcagtctgcgagc

SEQ ID NO: 792575 - DNA, 569 bp, Homo sapiens
ctgggaggatcccgaggaccccctagttgcagccatgtcgagactgacgctgaggaggtccccaactgtcacgagcaacacccgtcaaacacagccacccacatggggacagatcaagaagctgtcacagatggcagaagaaaacctgaggaaagcagtacaaccagtcacaatgagtaatttaatggtagctatgatagcagtgatcaccactgccatgagtattccttcagcaagggctgacacagagaacaattatacttattgggcatatttatcaatcttggctggcaataatgcctagatgcaatcactctataacacagttacacatgctttctgatctcagtatttaccataataaatctgctactataattgaggcataccaccctcaaaaacytttttgtaaacaggattggacccagttagaaaaaatgaacatacttgtttagtaagattgcattgcagaacaggcagaggtgctgcacaacgattcctatggaatcattactaattggtcccctaaggggatgtttagcttgaattgcacctctcagtctgcgagc

SEQ ID NO: 792576 - DNA, 545 bp, Homo sapiens
acgcattttaacaatcacttatttttaaaaaatgcaagttttaaaactgaccacaagcttaataggggccaaccacgacagagctgctaaaaatcataagcagtgttggggaggctgtctggtagaaacatttagctccttggaatcagaaaaaaacaaatgggttcacatcccagctctgctatttagtagctatgtaaccttgrgttatccatggccctctctgagaccaagaatctagctgaaagaagatggcaatgccatccttgaagggttattttgagaattagcaatagggtacatggaggacctagcccagtgcctagtagaatttggcagaacttagaacatagaaagtccccagtaaatggtcattgttagtaattcacctactacaaaaatatagagcttaaatttttaaaaggtaagaggagccctactctactctatacctttcagacccatggaagtattatgtcaagacctagccttcacacttaagataaatgggaaagtaaccaggtcactgagacttcaggtgaggg

SEQ ID NO: 792577 - DNA, 608 bp, Homo sapiens
tgagtgtagttccagcttcagataaggaaaggaagtttagggtgacaggaagagaacacagtagccagaaagccagatgacaaataataagattgtccaggcaaggtatcagaatcaaggcagtccaggaaagggctaacagggcatctcccagagcaaacgcagatgaaaacagatgtcacatcagcaagcactggtcagagtcgtttgtgtcyggacttcagatgctagaaacagcaaactagagggctttggccttttcagtttggctcttgacaaagacattttccatttgtagacgctgtcaaacactcattcttttcatctgtgcactctcacatgtaaaattaatggcaacaattagaagcgaatgaccggacctaacacataaaatatcgacttaaagaaaacatataggaggagctggctgaagaaaatatgagaaggtttaacatatggtatttaattttttctaacattgcacaaatgcaatattttctttaaaatgtttcatataaatcttggcagaatttatattgttaattgacttctgtctttttagataacttaagtgcttgtatattacccccggccaattgtaaatgctt

SEQ ID NO: 792578 - DNA, 608 bp, Homo sapiens
tgagtgtagttccagcttcagataaggaaaggaagtttagggtgacaggaagagaacacagtagccagaaagccagatgacaaataataagattgtccaggcaaggtatcagaatcaaggcagtccaggaaagggctaacagggcatctcccagagcaaacgcagatgaaaacagatgtcacatcagcaagcactggtcagagtcgtttgtgtctggacttcagatgctagaaacagcaaactagagggctttggccttttcagtttggctcttgacaaagacattttccatttgtagacgctgtcaaacactcattcttttcatctgtgcactctcacatgtaaaattaatggcaacaattagaagcgaatgaccggacctaacacataaartatcgacttaaagaaaacatataggaggagctggctgaagaaaatatgagaaggtttaacatatggtatttaattttttctaacattgcacaaatgcaatattttctttaaaatgtttcatataaatcttggcagaatttatattgttaattgacttctgtctttttagataacttaagtgcttgtatattacccccggccaattgtaaatgctt

SEQ ID NO: 792579 - DNA, 637 bp, Homo sapiens
ttaaaaacaagtcaggattcaatctatgtttgctatataaaggtattaagtatatgaggaaaataagtgtatatatattaatattgcaattatatgtctttggagctcagagagattaaattatcaagcctgtgctcagccaggattagaaacaattctttttaattccaattactttaaattttactaaaaccaattgactaaatccaaaagtaaaaaaaagtactgaattttgcaagaaatgaaattttataaacatttttagaaaacattatktcacacatactaaaaagttgcaaaaattatacaaagaactttaggaggccaaggcgggtggttcacttgagcccaggagttcaagatcagcctgggcaacatggtgaaaccccatctctactaaaaatacaacaattagccgggcatggtggcttgtgcctgtaatcccagctactcaggaggctgaagcaggagaattgcttgagcatgggaggcagaggttgcagtgagccgagatcacgccaccgccctccagcctgggtgacacagcgagactccatctcaaaaaaaaaaaaaaaaaaaaaaaaaattatacaaagaatctctgtcaacactttgctaaaggcctcaaatgttaaca

SEQ ID NO: 792580 - DNA, 620 bp, Homo sapiens
gatcacctgaggtcaggagttcaaaaccagcttgactaacatggtgaaaccccatctctactaaaaatacaaaattagctgggcgtggtggcgcattcctgtaatcccagctacttgggaggctgtggcagaagaatggatcacttgaacctgggaggtggaggttgcagtgagacgagatcttgccaccgtactccagcctgggtgacagagtgagactctgtctcaaaaaaaaaaagaaaaaraatctgtgatccaaaaaagagtctctaaagggagagcaaatcctgaaatggaaacagtatgaggacaaagttaagcaggtttgagactggtccagccagcttttgtgagcaggatctttccctgccttctggaccttacatctgggtgtcaagccagaggattttccttcttcattttatagccaatcctttgggcctttcagacagtttctgggaagatggactgagtttttgctatcttcctatgtttcccctttttcttttgaaaataggcaggagtaaatatatatgaagcaatcttgatagctacctctgtggcttcagagttactcttctgttatgacactccatggggtctggcaagtattctgttgt

SEQ ID NO: 792581 - DNA, 547 bp, Homo sapiens
ggacaaacatcatagcaactgacatatttggagaaaaagaaggggtagataattactcttgacaggtcatgacagatacgatctctatcttaccaccaagtttcaagacctaccctagacttgtttcagtatggttgctggtctttaggtcccattttaacttcaaatayggctgtgtcccctcttagcttaagttaattcgtggtactaaaaaattcacaaggttaagatgaaagcaagcggtgaaagttcagaatggagttagacaaaacagtaactgatcaattaccctcatagtatgccaacctcagccacacataatactattattataaatagctttcattaataatgttttattacagtttttatttcttacccattaaacaagttttttccatcttcttccatattattccacagtcattggttaggtttcctcttctctattacctacaagtgggaaacaatctgtaagattgggctaatacatggcaagaaaaaagcaatttcattaattgtaatacaaattcaaaaaaggaccagt

SEQ ID NO: 792582 - DNA, 547 bp, Homo sapiens
ggacaaacatcatagcaactgacatatttggagaaaaagaaggggtagataattactcttgacaggtcatgacagatacgatctctatcttaccaccaagtttcaagacctaccctagacttgtttcagtatggttgctggtctttaggtcccattttaacttcaaatatggctgtgtcccctcttagcttaagttaattcgtggtactaaaaaattcacaaggttaagatgaaagcaagcggtgaaagttcagaatggagttagacaaaacagtaactgatcaattaccctcatagtatgccaacctcagccacacataatactattattataaatagctttcawtaataatgttttattacagtttttatttcttacccattaaacaagttttttccatcttcttccatattattccacagtcattggttaggtttcctcttctctattacctacaagtgggaaacaatctgtaagattgggctaatacatggcaagaaaaaagcaatttcattaattgtaatacaaattcaaaaaaggaccagt

SEQ ID NO: 792583 - DNA, 556 bp, Homo sapiens
aggccctacattggctgtatctatacatgaactgtttctttgacttaatgcaaaacagcaacatcgacaacaacaaaacccctattagctagttgcaaagtgcgcagtgggaagaagcagactgsaaagtttctagaatccaaaaggtcgactcctaaatattttttgaggaggaagcatgtgcatgtttcgtgcctgagaacatgagagccaggcagaggggcgttgggagggctgaggcaccacagggcagattggagaaggcaggccgaggctctcggcagcaagggccagcacgacaaatggctgcccgccttcctagatcgagcactgcggtgctcgccctagcagttgaatggagcagacagggcaagagacaggttcatgggccattgccacctctgtctagatgctcagaactttgcttctgcattcttttgacttctttgtatttgtcaacttcttaacttttttctgcctcccctttaaatgtgtttctaatgaaaatcatcattggtttattaaaatgtaaatgcttcatcaaaatgtgtatttc

SEQ ID NO: 792584 - DNA, 615 bp, Homo sapiens
acattccttgttgaactgcccagaatcaacgtatgtgcagatgagacaagggagaatgacaacaaaaataaataaataataacaaaaataccacaaggcacagacaccccccaaaaaaacccttattatttatttatttatttatttatttgccttcttatctctgttcctaaatgtatggcatgggcactccatgcactgtgtttccaatttgtgcatgtgaatctgagtctcagaatatttgaatgagaagggatctggtgtaggtccttcatttcacatgtatggagagtgcagctggcagcgggtaaaccactgaggatgtggaggaactgggggaacagaggcctcataactctcagaccaggactctgccagtcctcatttstagcactcagtgcatcctagaattcatagatcactgcttctcctctgagaacatccatattagaccaactctggattgtgataaacacagttcctgtcttacctggttaacgttatgcatctcaaacattattatgctaggattgatccctctctgagaaatatcagctaaagaacaccagacacatagatggttgacttctcaatttatagttcacttcataaaga

SEQ ID NO: 792585 - DNA, 351 bp, Homo sapiens
acatgaattttttaaattgcacgttctccacaaacgttgctttagtctgctcctttcacatttatatatatagcgtacagccttccagggtagttaatttcaagacagcatcctttttaatgctgcattgtatttcacaaagggtggtacggactttactcaacactcccctcttgytgggcatatagaatgtttccaatctgagcccaaagcctaagtggtggctccctctagtgccctgctgtggtgcccagccacccacaccagccctgtttcacttacagcaaactcctctggggtcactttcaagacatcgaagacaacggcatcatagctcttgctggcatagtc

SEQ ID NO: 792586 - DNA, 569 bp, Homo sapiens
  misc_feature 467, 468, 469, 470, 471, 472, 473, 474, 475, 476, 477, 478,479, 480, 481, 482, 483, 484, 485, 486, 487, 488, 489, 490,491, 492, 493, 494, 495, 496, 497, 498, 499, 500, 501, 502,503, 504, 505, 506, 507, 508, 509, 510, 511, 512, 513: n = A,T,C or G
  misc_feature 514, 515, 516, 517, 518, 519, 520, 521, 522, 523, 524, 525,526, 527, 528, 529, 530, 531, 532, 533, 534, 535, 536, 537,538, 539, 540, 541, 542, 543, 544, 545, 546, 547, 548, 549,550, 551, 552, 553, 554, 555, 556, 557, 558, 559, 560: n = A,T,C or G
  misc_feature 561, 562, 563, 564, 565, 566: n = A,T,C or G
aactggctatccacatgcagcggaagaatgaaactggatccctacctatcaccagatatgaaaattaactcaagaaggattaaagacttaaatgtaagacctcaaactataaaaattctagaagaaaaccaatacgattttggacagtggccttgtcaaagaatttatgactaagttctcaaaagcaattgaaacacaaacaaaaattgacagtgggacctaattatactaaagagcttctgcacagcaaaagaaacaatyaatagagtaaacagataacctacagaatgggagaaaatattcgcaaactgtgcatccaacaaaggtctaatatctagactctataaagaacttaaatcaacaagcaaaaaacaaacaactccataaaaactgggcaaaggacatgatcagacacttttcaaaagaagacatacaaccagccaacaaacatatgaaaaaatgttcannnnnnnnnnnnnnnnnnnnnnnnnnnnnnnnnnnnnnnnnnnnnnnnnnnnnnnnnnnnnnnnnnnnnnnnnnnnnnnnnnnnnnnnnnnnnnnnnnnnaag

SEQ ID NO: 792587 - DNA, 603 bp, Homo sapiens
tatggcattaaagttcaacatgaaaaagcaaaaaaaaaaaaatgaagttgctctcttcaataaatgttgaagacagattgcaaaggactggtaaagaaaaccattcactggccaggtgcagtggctcacatctaaaatctcaacacttgtcagggccaaggcagaggagtgcttgtggccaggagtttgagaccagcatggacaacataccaagaccactgtctctacaaaaaatattaaaaatattaaaaattaagaataaattttattaattaagttgctttttaattaacaggtgtggtggcatgtacctgtagtcctagmaactggggagcctgatacagaaggatagtttgaacccagtaacttgaggctgcagtgagccatccatgatcataccgatgcactccagcctaggaaacagagcaagaccctgactctaaaaaataaataaataaataaataaataaaactcacttgattgacttacagtatgtttcattgcataccacaaacttgaaaatgcacagatgttcctcccataatataccagaaaacctggtgattcactctttagcaagaaagatcctggaaaactttgat

SEQ ID NO: 792588 - DNA, 492 bp, Homo sapiens
agtaggtcagttgagactcagattgtctttaaattaaatctccggatttgtcacactttcccatctatttcccagtaatactgggctaagacaggcctcctcacgttggggcagatctgtgccaacaactagctcctgagaggaagaaaatgcagagaatgcccaattattaccaaatccatcagttggataagctcttccatatcccctggggagaaatgagtaaaggggagaaaagtagaaaaagtttcatggagtgttagaggtgtagggtaaccatgttcccttctacatagaattattggggattttgtccttcattgctcttgayggaccatgggaactccaaggccaggtaaaaagcaagggtcagcaagcttccactctgtggaatcacagataatagcaacattcaacacaacataccttgtttcaggtgagatcaaatctacagtgtttgctaagaggctatgatgggtatcatgataaggt

SEQ ID NO: 792589 - DNA, 615 bp, Homo sapiens
tggtgttggcggttcaggactgtctctctgaccctcttcaatgcctttttcagtgataggaagtcaaaatcaggtactgtgatagctcatctgagttttggttcttgtgacggtgcttttctgtgtatagatagttgttaaaatttggtgttcctgccaaygggcagggggcaaacagtgtaggcttctgttccaccatcttactcccctttcttatacaatattttaaataatgttgtgcttgaaacaaagttttaactgcgttttggctgtgactcatcatatgaggtcaggtgtggaattttccacttgtgccatcgtttcgggtgctcagaagtttcagattttgtatttttcaaattagggatactcaacgtgtacttttctgtggtagaaatttgttatttgtagatttgaacactgtccctacatttcggtagtttcccacgtaatgatattcatcttacccaaatggaagcctcatccccaccacctaaaacattttacaacccaagacccttgaagctggaaataacctaggctcaatccattagatacgtggatttgagaattagattcagaagccagtcatggtggtatgcatctgtaatccca

SEQ ID NO: 792590 - DNA, 670 bp, Homo sapiens
caaagttttttaaaaattaaaatttattctttaaactaaaaggatacctgctgagtttttctgaagctgtatcttctttatcagctgtatcaagatttggctcagcgattttctgctcaatttcatcacatggctctagaatactttcaactcctgttgatgtgcttcccactgaggtatttctcctgtggcagagctcagagaaactagatgaccgggagtgacacgtgctataccctgtcagagaaaatcaccttggatataatactcatatcaaacactctgcaatctgacatcgttcccccacaccacagcagtttcaagtccctttggaacaataaggaattcaacttcactgttagcctctacctgatacttttgactgctgacttgcatagcttgatgttctagaatgtccacaggcaccaagttcgtctggaacagaggcactctttgctgaaagatctgtaatatgtcataacatgatgtcattcttattgccaaaaarttaatggtcaatttgtattctactctgcagactttataaactctgccaagttcattatcaaaacaataagttacaaaatgagggacatccttttaagtcagtgcaatggaagtaactgtattgcaagatatacaaagtatttaaataccttagttcgctgaa

SEQ ID NO: 792591 - DNA, 596 bp, Homo sapiens
ctcttactttagcacttgccgcttcaccttgcacttttatgttatggaaatggcttctttccttaagccctgtgaatcaacctatgctagcttcaaacttttcttttgcacttccctcacctcttagacttcatagacttgaggagagttagggagtaggcttaagggaatttggtttaagggaatattgtggctggtgtgaccttctgtccaaccactaagattttctccatatcagcaataaggctgttatacttycttatcattcatgtgttcattggagcagcacttttaatttccttctacaacctttcctttgcattcagagtttggctaaatgttcagtgcaagaggcctagcttttggcctatctcagctttcaacatgccttcctcactaagcttaatcattgctagcttttgacttaaagtgagagaagtgcaactcttcctttcacttgaacatttagaggccattgtagggttaattagcctaattttaatattgttttgtctcagggaatagggaggtcccagaaggggaagggagatgaaggaatggccagtgagtagagcagtcagagcacactcaacact

SEQ ID NO: 792592 - DNA, 623 bp, Homo sapiens
gatttgggggccttggtctcatgagaagtggaatcgtctctaacttgctaaaaatgggtcacacagtgactgtctggaaccgcactgccaagaaacgtgatttgttcatctaggagggggcccgcctgggaagaacccctgctgaagtcctctcaacctgtgacatcactttcgcccgtgtgttggatcccaaggcggccaaggacctggtgctgggccccagtggtatgctgcaagggatctgccctggaaagtgctacgtggacatgtcaacggtggacgctgacatagtcacttagctggcctgggtgattgcgtccaggtcggggggtcgctttccagaagctcccatctcagggaatcagcagctttctaatcacrgaatgttggtgatcttagcagctggagacaggggcctataggaggactgcagcagctgcttccaggcgatagggaagacctcctccttcctaggtgaagttggcaacgcagccaagatgatgctgattgtaaacatagtccaagggagcttcatagccatgatcactgaggtgctgaccctggcctaggtgacagatcaggcccagcagacactcttggacatcctcaatcagggacagttg

SEQ ID NO: 792593 - DNA, 526 bp, Homo sapiens
ttggcctgggccaccttcaacgtgatagaacacgtacatcagctacagttgagccaggttgtctggcaacagagtccactgtagagtttcagctgcatctgctcctgacagcatggctgccctggagctgagactcactggtgctgcccagcattgagatagagtatctcactgcatacccctagcccagaaaaggatcaaaattcaaaaccggaggtatagttgctactgaacgcatgtcgcttttgcaccagcataaaggcaaaccattgtaagttggggactgtctgtatttggagayatagggcctttaaagaggtaatggaggttgaaggaggtcattagggtggacactaatccaatctgactggtgtccttataagaagagggattaggacacccacacaggagacaccaggtgaagacacagggacaagatggctgtctacaagccaaagagagaggcctcagaagaaaccaacaacactgccaataccttgctcttggctttctagcctctaggact

SEQ ID NO: 792594 - DNA, 592 bp, Homo sapiens
  misc_feature 278: n = A,T,C or G
tccttcaggaacttttcctttgcattcacaacttgcctaactgtttggtctatgatgtccagctttcagccaatttctgcttgcagcctgctttctttattcagcttaataatttctagttttcatttaaagtgagagatctgcagctcttcttttaacttgaacacttagagggtattttagggttattaattggctggatttcaatactgtgtctcacggcatakggaggcctgaggagagggagaaaattggggaacagtgtgtcagtggaccanccagagcacaggcatttatcaattacatttgctgtctaatatggatgtggtcatgatacccctaaaacatttacaatgggaaaattaaagatcactaatcacagatcaccatgagagatagaaaaataatgaaaaagttttaaatgccatgagaattaccaaaatgtgacacagagacatgaagtgagcacacactgttggaaaaatggcaccaacagacttgcttgacgcagggttgccacaaacctttaatttgcaaataatacaatgtctgccaagtgcaataatacaaaatgcaataaaatgaggtatgc

SEQ ID NO: 792595 - DNA, 531 bp, Homo sapiens
tgtttcttcctatacatactcctacctaccctccttctcttatttttttacacaaatagcatcatactttacactctgtaccttggttttttcatacatgttgtgcattttaaagatgtagttcaggtgccacctcaggcatgtcctggcttccttcctgacaagtatgaagcctcttatgacaatctagtgacatggaggcagacctgcatgatgtcctgggtttgtgacctgaggtcccaaggactagagggcaagrtagcagcacctggtcctcatctcctcctggcttaattgagctttgggggcttgcgtattgtcttgagtgtttggttgaacctgtatatcctgttggatcaatcttgatattgcttccttttcatttctctcgatgaaggccgtcttactgaatcttgtctgctggggaagttcctcattgctgagagcagcagttaaaaaagctgttagccacgtggctgggctcctatttctgcagaggcaggctgagttacagcttggtggtgtggatcc

SEQ ID NO: 792596 - DNA, 601 bp, Homo sapiens
acgtcatccatgtgttaacttggctgagcccctactgggtgcctttgttagaccctgagggtgggacccaggaggccaggagaagacaatccctggcctggaagagccaaccctgtagtgttatattcaccccagagtgcaggatcagtggtggtagcggaacatcacaaggccagtgctggagtcagtcatgcgttcatttcctggctccgtcgcttacttgctgggcaactrtggccgagtcacttctgtgtctgagcctcagctttctcagctgccaaatgggaatggatggtaatagtatctcaatgtcacagtttcatctcaagataacagtgtgtgcctcctagatctttgggaaggactggggagctaaagtgagaaagtgagtggactgggcctgatgttttgtagctcatcatcctcactaactggggagacaagagtagcgcatcttccagtgaccctggagtagtgtgaagccccgtgttcccaagaggcttcctgtcaggaactgagctggcatcttctttctctgttctctggagcttcatgtatctggtggtggtcctgcactggccccccagcctgggggcgggga

SEQ ID NO: 792597 - DNA, 539 bp, Homo sapiens
agggaggatcctttgggcccaggagttcgagtctagcctgagcaacaggctagattctttaaaaaacagagatgaaaaagaaagaaaaaaaggatgtgaagggttaaatttgaacactttccaggtagttttcagcatcatgctttggtggaatcatggttttgaggctaagtggggttgctgcatgttacattcctgcctcttccttcccccagctttagtcgtcttcattacattcatgcctgggaagcsttcccagtgacctgagttaggcattaagatcatgggaatccaagattttcccatgtcttctagcatatttgttcacaagaaaaggaaaatttcctccttgcagcaaggggtttttaaccactgtcagtaccatggaatctttcactaaaaatcctttgaatagaaatgtggtcaaggagaggaaaggtatcagcagtgataataccttacaatagtgtatttcatagcacttgaagtagcttcttatttgattatggtaagaaggtaggcagagaattagtgacttg

SEQ ID NO: 792598 - DNA, 744 bp, Homo sapiens
agagatctttgcttttctacgccttcagaaggagcaatgaatgaaaaggctcccagcctccggtttagtgagagcaaaccctcctgtttgcagggctctctctggtagggaaccccaagctttactgtgcagtgaaaaaaagccaggtgcagaatcctgtgtgtgttttgggtctacggtagcaaatgcaaagcaacccctgcaccgtgcacgtgtgtctgagtcagcacagccagcagcggggygtggaaggagccccccgcaagtgggggaggaaggggctgtggaggtgattacctcactctcatgcagggctgaatattactgtttcccctgttaaacaagggtgtattacttccgaaatctgacaaccccaagcaccaaaaggtttaaaaatatctcgagattgtaaagcctccgacagaatgctgaaacaggattgcacagttgaccaggagcttctgaggttgtggcggaccctccatgtttctgactgccggacagtcacagccccctcttccctaatgccaccagatgttccctgggacacctgcccccagctctagtccacataatgctgccctccacctccagacccaggggaggggagtggtcagggccggccaagccaagcaccgtatggcccctggttcaggacatcgctgggacccagaggccagagaccttcagctgggatccccaaggatcccttgggacccctgggactgttgtccacctctgtgc

SEQ ID NO: 792599 - DNA, 744 bp, Homo sapiens
agagatctttgcttttctacgccttcagaaggagcaatgaatgaaaaggctcccagcctccggtttagtgagagcaaaccctcctgtttgcagggctctctctggtagggaaccccaagctttactgtgcagtgaaaaaaagccaggtgcagaatcctgtgtgtgttttgggtctacggtagcaaatgcaaagcaacccctgcaccgtgcacgtgtgtctgagtcagcacagccagcagcggggcgtggaaggagccccccgcaagtgggggaggaaggggctgtggaggtgattacctcactctcatgcagggctgaatattactgtttcccctgttaaacaagggtgtattacttccgaaatctgacaaccccaagcaccaaaaggtttaaaaatatctcgagattgtaaagcctcygacagaatgctgaaacaggattgcacagttgaccaggagcttctgaggttgtggcggaccctccatgtttctgactgccggacagtcacagccccctcttccctaatgccaccagatgttccctgggacacctgcccccagctctagtccacataatgctgccctccacctccagacccaggggaggggagtggtcagggccggccaagccaagcaccgtatggcccctggttcaggacatcgctgggacccagaggccagagaccttcagctgggatccccaaggatcccttgggacccctgggactgttgtccacctctgtgc

SEQ ID NO: 792600 - DNA, 528 bp, Homo sapiens
gtgttaaagaggcatctctcacgctgctcgagggtggaaaaatcttgtcaactggcaaaagggaaatactcactaatcactgggcattatgaaaaagtacaaattccttacaggtacacatttgccttatctgattttatgtttcttctcactctgccaattattttacaaatataaaaagagtagttttagcagaaaaaagggttatggagtgaaatactaataagcaataatggaatgtaaccagggcaatttcatacctgccaaggagcataattaaaagagaatacaaaawtctaaaggtgaaccttgctcctataccaaagtaaaatcgatttattccttattttctagtctaatctagtatttcatttcctactcagttttcctttttataagagtaaaacattttttggttgaatttagaactaattaaaagcattatggtagctttaaattttgtagaaaattcatttgtataaaaacatttgtctttaatgtttaaaaccatatattattagaaatatc

SEQ ID NO: 792601 - DNA, 442 bp, Homo sapiens
agtggcataatctgagctcactgcaacctctgctttcgagttcaagcgattctcatgcctcagcctcctgcatagctgggactacaggcatatgctaccatgcctggctaatttttgtatttttagtagagacggggttttgccatgttggccaggctgatctcaaactcctgacttcaggtgatccagccaccttggcctcccaaagtgctgggattacaggtatgaaccactgcacctggccccttattgttggtttttaaaagagaaamtaagctgtgcttccagaacccagtttgagaaagtttgaagacctggcatagagccagtgacatataattgttagttgaagaaagagagctccttgatctgcaaatagagcacggccccatatttaaattctgcacattctagaagcattttgcaagaatcaaatgctttg

SEQ ID NO: 792602 - DNA, 567 bp, Homo sapiens
ccacgcaaacacaaagacaactggacaaccaagtcatctaatgagtatgcatgctatggtctctctcattttgtctttcagggctataccctaggagagctaatcattcttggttagataagaaatagccaacacttctgcagcatggtaggccaaataccaccagaataaactcagacccaaagagatgctcagaatgtgtggagttaatacttcactatacagctctaaggtataagccttgtccatctgtcacattatgacatgtgcttgctcccacctcaattcctgattccacattacaacaaatacaatttcaggctttgaactaacaatgccaatgttwctgaagcccatattaaatgccaaaatctgagtcagctactggaggtagagacatgaataagatggtccatattattttagaggattctttggttgcaaagggcagacacccagcttgaattcactttggagaaattgggatttttttggcttgcataagcaaagcatgagaaagaaagttccagggatgatgaaaaccaggaatgcaaatgtctccagaat

SEQ ID NO: 792603 - DNA, 639 bp, Homo sapiens
ctcactctttagcctggattgaatgtgggggggtctgggatgggggttggggcctgggttgcaatgatgctttgacagttttctgctgcattccccaacttcctttgaacgcttggcaggttattcacttgtggagtggcccataggcccctctgcccttcgaggaggtaagtgtattttctggctgtttcacagttgggcagaccgtggcatgggaaagtgtaccaattktcagaagccacggcttctgagagctctgagagagagagttgacttctggggtaatcatgcaatctggaattctgagctattcttcctcctctgggcatcccaccccatgccattctatgttcctagcccaaggttgggtgcctcattcaggctactttgggacaatgcaacctctaaagcagaaaattgagagttcctgaagggaaggaaatagttccaggtatgaaaattcccgtagccaggggccccagaaaaggactgacattgggcaggcctggagtgttgacttgtggattttccaacagaagagactctaaatgatgcagttggtgctgatccctgacagacaggtgttggaaaggtcacagatgtctgcctttgcttggcatctgcaagagaaagtaccgc

SEQ ID NO: 792604 - DNA, 639 bp, Homo sapiens
ctcactctttagcctggattgaatgtgggggggtctgggatgggggttggggcctgggttgcaatgatgctttgacagttttctgctgcattccccaacttcctttgaacgcttggcaggttattcacttgtggagtggcccataggcccctctgcccttcgaggaggtaagtgtattttctggctgtttcacagttgggcagaccgtggcatgggaaagtgtaccaattgtcagaagccacggcttctgagagctctsagagagagagttgacttctggggtaatcatgcaatctggaattctgagctattcttcctcctctgggcatcccaccccatgccattctatgttcctagcccaaggttgggtgcctcattcaggctactttgggacaatgcaacctctaaagcagaaaattgagagttcctgaagggaaggaaatagttccaggtatgaaaattcccgtagccaggggccccagaaaaggactgacattgggcaggcctggagtgttgacttgtggattttccaacagaagagactctaaatgatgcagttggtgctgatccctgacagacaggtgttggaaaggtcacagatgtctgcctttgcttggcatctgcaagagaaagtaccgc

SEQ ID NO: 792605 - DNA, 594 bp, Homo sapiens
tttccagtgtgtgtccttctggcctgggtggcagataaacgactgctcttctacaaatacatgcacaaaaagtaccgcacagacaaacaccgaggaattatcatagagacagagggtgaccaccctaagggcattgagatggatgggaaaatgatgaattcccattttctagatgggaacctggtgcccctggaagggaaggaagtggatgagtcccgcagagagatgatccggattctcaaggatctgaagcaaaaacacccagagaaggacttagatcagctggtggagatggccaattactatgctctttcccaccaacagaagagccgygccttctaccgtatccaagccactcgtatgatgactggtgcaggcaatatcctgaagaaacatgcagcagaacaagccaagaaggcctccagcatgagcgaggtgcacaccgatgagcctgaggactttatttccaaggtcttctttgacccatgttcttaccagtgcctggagaactgtggggctgtactcctgacagtggtgaggaaagggggagacatgtcaaagaccatgtatgtggactacaaaacagaggatggt

SEQ ID NO: 792606 - DNA, 660 bp, Homo sapiens
gttacataaattacttggaatatttctttatggaagatatatctatttttctcctattaaatttatttaacatttatttataatagtatagatgcatagatagttattttatgttttgagctaaaaatccaatactactttattttgttagttaaattgtttcagctttgactkctgaaagctcttttagttgatgtctgtgtcattttgacatatcttatcattgtattttttaaagctctttctttgtggtatgactgtatgctccagggtcatcttgtgtatttcttgccccagtcctagattcagcaattcatccaaggagcccttgtccttttattgaagaatagtattagaaaccaagatttgggcactaagtgggcttattgctactaaatgtcagtgtttctaggttctttcagttgacagagcaaggaaatatatgtgtatatactaacccctgatcatatgcataactataaataataaatatgtaaccatctgtatctgcattaagctaaatttgagttcatgctgatgtctttaatctattgcttcatggatcattttagtttacacctctggtttatttgtaaccttatactttaacagtgagaaacctgattctcatcattcactatgtatttatttaatttcttc

SEQ ID NO: 792607 - DNA, 550 bp, Homo sapiens
taaatttgagttcatgctgatgtctttaatctattgcttcatggatcattttagtttacacctctggtttatttgtaaccttatactttaacagtgagaaacctgattctcatcattcactatgtatttatttaatttcttcaattccaatatatatatatatgccaggtcagacctgcagaccctgaaccagcgacagatgaaagacgtgcactgacacagatattttgcctgtcagtgtggctacgggtctctgctgcctgcatccgcagctttggcctcaattagcyggcgaagtttgcatttatttagtacagattaaatgacaaaggtctcaggtaaacaccactagagggtaattaacattgccgacctcatgagtagagagcaatcatgggcccacagatgatcaaaggtcagtcttaggaccacatgagtaaacaagctatttagataaactcccccacattcccttgttatttgctcttctgctatcaactcaaggtaaagaggattaggctgccttcagccaaatcttttactgaagcta

SEQ ID NO: 792608 - DNA, 622 bp, Homo sapiens
atttaacacaatattacacgcataacatgatgtattaagagagtttttaatggcaatggaaaaacaaatgtaggacataaaacttgtatatttaatatgttctcaattacataaaacatgaatatgtatctatatctggaaggatatacagcacaatgttcatggaagttatctttggggatttaaataatgggtaatagttactccttaaattgttttccacagttttcacacaggggaattakgactttcacaatgaggaaaaaacaagcccaaattatttctaaatcatgaatcatgctctaggtttggtagggaattgcagttacacatattcagggaaatctttggaattttcctacacttctctccatgtcttgcaggttgtttttctgcatcagttcttctatgctccaggttaatttttattcttctggctctctaaaaactctaagggtttttatgcaactttgttttcccttcacaccttcctctccaactctcattaaaaccatgatgaatattaccagtcagactctctccttttcccaatagcagcaatacatttgacctatgtggtagttagaaccctcatttcctagaataacttacataccatatt

SEQ ID NO: 792609 - DNA, 481 bp, Homo sapiens
aaaaggagtttaaaaagtcatgacaactaaatgtaatgtggcattctggatggaatcctgcaacagaaaaaagaacattcagtaaaaactaaggaaatctgaataaactatggatttttcttaattaaaaaaaattatgatacaccagtcattttcttatatcacaactgatttaattctaatagtgaaactatgtcttctttaaggaatagaatatatggstgggagcttaatatcctaaacctatgcttagagagaggtaaagtgacttgtccaaagttacacatttcctgaataagcctaagactacataacaacagagaattgtaggatttgccacaaccctatgatgatttatatattaattttctattgccactgtaatgaattgccataactttagcagcttaaaacatcatccatctattatatcaccatctattatatcatccatctattatatcatcatctattatatctg

SEQ ID NO: 792610 - DNA, 645 bp, Homo sapiens
ttctcttctgccatttggaatctttttattcccaacacacataattgaatatatctctctctactattatatgaaataaagaaattaagcatattcctcaaccaaggctatctaccattcccaattattaagttgagacctacagatacaggatggtcatatgtcttgatttacttttgaaaatcccagtttatttctgttaccctgtcataattagtaattgtaccctcttttaatctaaaagtgtttcagtttgtatgtgaaattatatgtatacagttaaatgtgcatgataaacatcttagattgtttttgtcttcccacccttctcctacatacacaggaatatatatgtagaggaatgcatacaagcaagaatacatgcaakaatgcctttcattttcttgtgtttacagcatagtacagtagttaaaagtagactctagagctgtgtgcaagctctacaatattgagcaagttgtctctgcctcaatttactcatctttagaaaggggataatatcatttgcttcatagggttgttgtgacaatttaattaaataatgctacacatattatgtgctacaaaatgattggctataattccctgttccctccaaagtcatagttagttgattacatttag

SEQ ID NO: 792611 - DNA, 645 bp, Homo sapiens
ttctcttctgccatttggaatctttttattcccaacacacataattgaatatatctctctctactattatatgaaataaagaaattaagcatattcctcaaccaaggctatctaccattcccaattattaagttgagacctacagatacaggatggtcatatgtcttgatttacttttgaaaatcccagtttatttctgttaccctgtcataattagtaattgtaccctcttttaatctaaaagtgtttcagtttgtatgtgaaattatatgtatacagttaaatgtgcatgataaacatcttagattgtttttgtcttcccacccttctcctacatacacaggaatatatatgtagaggaatgcatacaagcaagaatacatgcaagratgcctttcattttcttgtgtttacagcatagtacagtagttaaaagtagactctagagctgtgtgcaagctctacaatattgagcaagttgtctctgcctcaatttactcatctttagaaaggggataatatcatttgcttcatagggttgttgtgacaatttaattaaataatgctacacatattatgtgctacaaaatgattggctataattccctgttccctccaaagtcatagttagttgattacatttag

SEQ ID NO: 792612 - DNA, 631 bp, Homo sapiens
agattacttataaataaaataagaggaccatggcaaacgggaggcaggacaagattgcagcttcaactcggacagacagaatagtgtgtggagacccacatcatgaattttagctccagaatgactgcaggaataaatcagaaaacccaagaggacccacagaccctctgaaggaagtggattgctcctgcaggacatgggacacaccccaaatactgtgagtgtccaaactgtggaagtgggaagggagatcctccaccccggaacacacacccccactggggaaactgaargtctagtttatgggagaagattctaaccttacctgtagctgagtcaatttagagagctgagcaaaatacaggagtagaggaagcagcggaaaaggtcttatgaactcgctgggtccccaagcaggccattcctgcctggcaccagaggaatccttcaggagggcagccagagaggcaggaaaaatgccacaggaagacggaagtctccagctgaactttataacaatttgaacagggtgagaagcctcctggccagaactcgggggagggtgtgaatcctgtgtgcagactccaaaggcagggaaagaacgaaaaccctactttcttttgtagctgga

SEQ ID NO: 792613 - DNA, 628 bp, Homo sapiens
atggataaatttctagacacataaaacctaccaagattgaaccatgaagaaatctaaatccttaacaggccaatgagaaataacgagcttgaaaccataatacgaagtctcccaggctgggcatggtggctcatgcctgtactcctagcactttgggaggccaatgtgggcggatcacctgaggtcaggaatttgagaccagcctggccaacatgacaaaaacccatctctactaaaaatamaaaaattagctgggcgtggtggtgggcacctataatcccagctactcaggaggctgaggcaggagaattgcttgaacccaggaggtggatgttacagtgagccaagatagtgccactatacttcatcctggacaacagagtgagactctgtctcaaaaaaaaaaaaaaaaaaaagtctctcagttcctcccctcttcttttctccccttcctctcctaaaaaaaaaaaaaaaaaggaaaaagaaaaagtctccctgcaaagaaaaccccaggacccgatggcttcactgctgaattttaccaaacatttagagaagaactaataccaatcctactcaaactattctgaaaatagaggaggaggaaatacttccaaattaattctac

SEQ ID NO: 792614 - DNA, 504 bp, Homo sapiens
ttaagactgaagactaaaaacaaatattaaaataacctaggccaggcgtggtggctcacgcctgtaatcctagcactttgggaggctgaggcaggcagatcacctgaggttaggagttcaagaccagccgggccaacacagcaaaaccttgtctctactaaaaatacaaaaattagctggtcatgggtgcctgtaatcccagctactcaggaggctgaggcaygacaatcacttgaacccaggaggcgcaggttgcagtgagctgagatgcccctgcactccagcctgggcgacaagagcaaaactccatttcaaaaaaaagaaaacaaaaaacaaaaaaaaaagaatccagagaaaagaaaattactttcaaaagagtcctaatatactaacagctgactttccactagtaaaaatgggaaagaagagacagtggaatattattttcaatgtgctgaaacaaaacagttaccataaaataatgacatttgagatatactagag

SEQ ID NO: 792615 - DNA, 644 bp, Homo sapiens
ggatgacatagaaagcccagaagtaagtgcaaacattatggtctaataaatctttgacaaagatgtcaaggatattgtgtaattggaaaagatcagtctctttcaataaatgctgtttagaaaactggatatttatatgcataaaataaaattggacccttatctcacatcatatacaagaactaaaatatattaaatataaaatatattaaagacaaagaaaataagacttaaaaactactagaagagaacatatgagaaaacatcttaacactgctctgggtaatgattgttttggataagacatcaaaagcatagtcaacaaaagcacagrtagacaaatgggactgcataagactaaaatgcttctgtacagcctagaaaacaatcaatagagtgaagaaacatcctgcagaatgaaagaaaataaatatttgcaaaccacacaactgataaagggttaatatccaaaatatataaggaactcaagtaactcaatagctaaaaaaaaaacctgattaaaatgtgggcaaagcatttctggacatttatccaaaggaaaggaactcaggtatatcaaagagtcatctgcacacaaatgtttattgcaccactcttcacaatgccaaaatatgaaatcaacc

SEQ ID NO: 792616 - DNA, 592 bp, Homo sapiens
cttatgagaaattaatcgttccatgattttgtcatgtgtgaacaccatagagtgtacatagtacataaacctagatggcatagcctactatacacgtagacaatatggtatagtctagcactcctaggctacaaacctatatagcatgttamtatactgaataccgtaagcaattggaagacaatggtatctgtacatctaaacataggaaatgtgtagtaaacatacggtataaaacataaaaaatggtacctctgtataggacacttatgaatggtgcttcaggattagaagttgctctgggtgagtcagtgagtgatgaatgaatgtgaaggaccaggatgttactgtacactactgtggaatttataaacaccgtacagttaggctataccaaatttgtaaaaagtatttctttcttcagtaataaatcaaacttagcttactataactttttttaaccttataaagttttaaaatattttaaaactttttgactgttttgtaaaaatacttagtttaaaatacattgtacaggtatgcagaaatatagtacagctatacaaaaatattttttctttatatccttatt

SEQ ID NO: 792617 - DNA, 592 bp, Homo sapiens
cttatgagaaattaatcgttccatgattttgtcatgtgtgaacaccatagagtgtacatagtacataaacctagatggcatagcctactatacacgtagacaatatggtatagtctagcactcctaggctacaaacctatatagcatgttaatatactgaataccgtaagcaattggaagacaatggtatctgtacatctaaacataggaaatgtrtagtaaacatacggtataaaacataaaaaatggtacctctgtataggacacttatgaatggtgcttcaggattagaagttgctctgggtgagtcagtgagtgatgaatgaatgtgaaggaccaggatgttactgtacactactgtggaatttataaacaccgtacagttaggctataccaaatttgtaaaaagtatttctttcttcagtaataaatcaaacttagcttactataactttttttaaccttataaagttttaaaatattttaaaactttttgactgttttgtaaaaatacttagtttaaaatacattgtacaggtatgcagaaatatagtacagctatacaaaaatattttttctttatatccttatt

SEQ ID NO: 792618 - DNA, 615 bp, Homo sapiens
aaaaatacttagtttaaaatacattgtacaggtatgcagaaatatagtacagctatacaaaaatattttttctttatatccttattcataagctttttccattttaaaatgatttatttctttactattattttttaaaaaacttttttgttaaataaacaaaaataacacaaatacacacattagcctgggcatactgatatggtttggctgtgtccccaccccaatctcatcttgaataatagctcccataatccccagatrtcgtgggagggacctggtgggaggtaacggaatcatggggcaggttttccccatgctgttctcgtgatagtgaataagtcttatgagatctgatggttttataaagggcagttcccctgcacatgctctcttgcctgccaccatgtaagacgtgcctttgcttctccttcaccttctgccatgattgtgaggcctccccagccatgtggaattgtgagtccatgaaacctctttttctttataaattaccaaacctcgggtacttctttatagcaatatgaaaatggactaatacaaatacggaggatcagaatcatcaatatccttgttttccacctccacgtcttgtcc

SEQ ID NO: 792619 - DNA, 607 bp, Homo sapiens
acagtgttgtgatctcaactcactgcaacctctgcctcccagttcaagcgattctcatgtctcagcctcctgagtagctgggatcacaggcatgcaccatcatccccagctaattttttgtatttttagtagagatggggttttgccatgttggccaggttggtctcaaactcctggcctcaggcaatccacccacctcagcctcccaaagtgctgggattacaggtgtgagccaccacacccagccctcttgtatttcttttaatgtctgttggatctgtagtgctgtcttctcattcatgccagatattggtgattttrgtcttctattttttaaaatcagtctcaccagaggtagatccattttattaattctgtcaaagcttttagttttatctctttttcgtccattttgtttcatttatttatgctctcatttttattatttctttcgtttttattttttaggggtttagtttgcttttctttgtctagtttcataaggagaaaactgaggtcattgatgtgagatcttccttcttttctaatttaagcattaaatattacaaatttctctcgaatcattgtactggttgatttcacaaga

SEQ ID NO: 792620 - DNA, 527 bp, Homo sapiens
ataccaattctaagttaatttggactaaacaagggcttattaacagcaaaggataattgaaatcccaaacttacaaggttttcaacaaaagtaaagtttgctaaaagttaacagtgtaacatgtattatcctaacttstaatcttacggccttaggcagtctagtccacagacatgaagaaagttcactttggaaaagaatggttatcatctttaggggaaaaaaaggcggggggaggggggaggagaatttatgtaaaagaatgttatatggtaaattattttcctaaaataactggttatttaaagaaagggatgtttgcaagaagtcagaaagttgaggcatgtcgaagaattgtctgtgaaagtcgtgaaagaaaaaaatgtgttataaaaaggaatttatgcaagaaatgttgtataatttaaaagtaattaggcctcctgaatgtaaaactattgaagaaagtttatgtgcaaggtgtataaggaaagtaaaatatacttttagtaaaaggattataagga

SEQ ID NO: 792621 - DNA, 527 bp, Homo sapiens
ataccaattctaagttaatttggactaaacaagggcttattaacagcaaaggataattgaaatcccaaacttacaaggttttcaacaaaagtaaagtttgctaaaagttaacagtgtaacatgtattatcctaacttctaatcttacggccttaggcagtytagtccacagacatgaagaaagttcactttggaaaagaatggttatcatctttaggggaaaaaaaggcggggggaggggggaggagaatttatgtaaaagaatgttatatggtaaattattttcctaaaataactggttatttaaagaaagggatgtttgcaagaagtcagaaagttgaggcatgtcgaagaattgtctgtgaaagtcgtgaaagaaaaaaatgtgttataaaaaggaatttatgcaagaaatgttgtataatttaaaagtaattaggcctcctgaatgtaaaactattgaagaaagtttatgtgcaaggtgtataaggaaagtaaaatatacttttagtaaaaggattataagga

SEQ ID NO: 792622 - DNA, 600 bp, Homo sapiens
tggtgtttggctttctttggtctaaaaactaataaaaataggtgctaaaggaaatttctcagtaagaaggcaccaaggactataaagtccactgccgatgtccccacatttaaaacaaaatgtcaatttcttataaattatatacttggtttrttttccactttcctttccctcaaaactaaaaggcttttagcacatgtaccacccctagaatttccagtaaaccagcaccagcctgaagatcacattctcatcaaaaggtggaaagaaggaaaaatcgagccagcctgggaaggaccctaccttgtgctgctaaccaccgagactgctgttcctacagcaaaaagggatggactcatcacatccgagtcgagaaagcaccaaccccttcagagtcgtgggccatagtcccaggggaaaaccctaccaaactaaagctaagaaaaatttaactctttcatctattgtattactcttttttctttccttgctctattgctgaccatctagacataaccaagtcaatttcacctcaaactattgcatttaatgcttgtcttgttataccctgtggggacttgccaagtcaaagacagctct

SEQ ID NO: 792623 - DNA, 600 bp, Homo sapiens
tggtgtttggctttctttggtctaaaaactaataaaaataggtgctaaaggaaatttctcagtaagaaggcaccaaggactataaagtccactgccgatgtccccacatttaaaacaaaatgtcaatttcttataaattatatacttggtttgtyttccactttcctttccctcaaaactaaaaggcttttagcacatgtaccacccctagaatttccagtaaaccagcaccagcctgaagatcacattctcatcaaaaggtggaaagaaggaaaaatcgagccagcctgggaaggaccctaccttgtgctgctaaccaccgagactgctgttcctacagcaaaaagggatggactcatcacatccgagtcgagaaagcaccaaccccttcagagtcgtgggccatagtcccaggggaaaaccctaccaaactaaagctaagaaaaatttaactctttcatctattgtattactcttttttctttccttgctctattgctgaccatctagacataaccaagtcaatttcacctcaaactattgcatttaatgcttgtcttgttataccctgtggggacttgccaagtcaaagacagctct

SEQ ID NO: 792624 - DNA, 305 bp, Homo sapiens
tgcacttgtatggaatcaagaatttggcacaggtaactgtgcacttcccagccccactttccccgggctacagcagaacagagcaaaaggagatggaggtatttatttccttctttaacatgtcagtccagtatgttttttaagatcamctttatgttttagtgacagagattttgaaaatcactagttgggattagtacagaattttgttggaattgacacagtactaaaatttaaggactttattgtagcaccgtgtgtggtggtttttttttttttttggtatatacaggaaaaaaaacatt

SEQ ID NO: 792625 - DNA, 603 bp, Homo sapiens
ctttaagatgaagatggccaaacatcatttcccgagcactgaattgaagaccccttccctttattatagcctcttacagggttagccagtgatatgcagaacaatattttggaagtccttaactaactgatatttatactttgaacaattggtttgcaccccataaaggtaaaagaaaatcatgaacctgtatgcaggttgtggaccaactgacttccctccctccctccctccctctctctcttctaccctaccttctttcttttctctgtgggcaggcagagaggtcacgcaaggaggtgcgggtttgccacccttttgcctgctgaagagcattgctgttaacatttttcttccacatcataaataaacrcttttgagtcctttccatgatttttcccatttattgtcaccatttctgaaagaagggcactaaaaatgtggtgaaaaagtaaaattgctcaaatttaaagagcaacacatctttattttggaataagctgatacaactgcagcactgaataacaggggggaaaacccagtttaagttgaacataattaagaaccctggagggagcctggtacgagccagggcaccagctc

SEQ ID NO: 792626 - DNA, 644 bp, Homo sapiens
gtcaaccaaccttgagagcctaatgatataattggtcttctgctgggggattgcatatgatggagctgggaaggaaagtttgcatgagtggattaacatgggtcccactcaggttgttgctttggaatgagtctattcacaggagtgggtgttcagcatgactttttaaaccgtagaatgagtacaggtagtgaacaaaaagagttagagagttgaactttgcacactcgagtatttgtaatctcctgtgtgaggtagaactataaactaacttggataaatstgatgtattgggcaacttggagttgatcattttatattttcaggtgtcatgtactgatttctcctttgactctgggcactcactccatcatgcaatatatgtttggggactgatctgatgccttcttatggcttaacatggagctgtggaaggaagcagaggccctgagtaatttcagagtctctccaactcttcagacctttccattgatttctggcatctgtgtacccaaatctgccaaaccgccatgtctggtttgagaactccagagacttgattaggaggatagaaaaagttaaaggctgtgaggaacccatatatttataagtcggttggaggcacagaaagagaacccagccaa

SEQ ID NO: 792627 - DNA, 618 bp, Homo sapiens
aggctaaggtggttccttttgcctccttagtggacagaaaaaggaataactcagttctctgtctgtgtagtatcatcaacactatttctgttggcttgtctttgagatgacataacatctttctccaagacacacacaacaggaagcatgccttttatttgtctttacttatttgtctttatttatgaaataaagacatgctccccatgtaggtgtcactgaagaaattatgcccacctagaaaccaagacacccagattttgttcagcaagccagagtcagacttttaggccctctcctcagaatccaygcttgttcccatactctttttattacactttgtggatctgtgtccccttccatttttataactaggtagtgtataccgtataataaataggaattattgtcattgctgtattaggcactctcacaacatgtaatagccagaatacttttatttaacagcaactggaaggtacactctattcttgctttttctcattaaaaggatacctcatttctttctgatccccagttattccatttccagcaatcctttatttacactggagaattccagggatgaaaaaatatgcccaagaattgatgaaagga

SEQ ID NO: 792628 - DNA, 542 bp, Homo sapiens
tacgaagcttagtttggctggatatgaaattctgggttgagaattcttttctttaagaatgttgaaaattggcccccactctcttctggcttgtatagtttctgccaagagatcagctgttagtctgatgggcttccctttgtgggcaacctgacctttctctctgacygcccttaacattttttccttcatttcaactttggtgaatctgacaattatgtgtcttggggttgctcttcttgaggagtatctttgtggcgttctctgtatttcctcaatttgaatgttggcctgctttgctagattggggaagttctcctggataatatactgcagagtgttttccaagttggttccattctccccgtcacttttaggtacaccaatcagacatagatttggtcttttcacatagtcccttatttcttggaggctttgttcatttctttttattcttttttctctaaacttcccttctcgcttcatttcattcatttgatcttcaatcactgatactctttcttccagttgatcaaatcagc

SEQ ID NO: 792629 - DNA, 542 bp, Homo sapiens
tacgaagcttagtttggctggatatgaaattctgggttgagaattcttttctttaagaatgttgaaaattggcccccactctcttctggcttgtatagtttctgccaagagatcagctgttagtctgatgggcttccctttgtgggcaacctgacctttctctctgaccgcccttaacattttttccttcatttcaactttggtgaatctgacaattatgtgtcttggggttgctcttcttgaggagtatctttgtggcrttctctgtatttcctcaatttgaatgttggcctgctttgctagattggggaagttctcctggataatatactgcagagtgttttccaagttggttccattctccccgtcacttttaggtacaccaatcagacatagatttggtcttttcacatagtcccttatttcttggaggctttgttcatttctttttattcttttttctctaaacttcccttctcgcttcatttcattcatttgatcttcaatcactgatactctttcttccagttgatcaaatcagc

SEQ ID NO: 792630 - DNA, 580 bp, Homo sapiens
ttggagttatagattagtttgggaagaaattacatcttcctaataattttatttagatttacaaatttccctctgggtgtaactttaggtgtgtcttaaaatgtttgatatgcaatgcttttattgttggtcaattctaatttccaaaaattgctgcaatttttcatttcttggaaattgcatttagcttttagattactcacttctgttgagatgtcagttctagaattrgaaacctcaggaggttttgtggcatgtgggagggaagaatgcttttcagattcattttcatttctttgttccagtcctgagttcaggggtgattttctttttccctgatattaaggccattgccatagcccattctcttactctacacatttgcctgtgaacagatgctggattctccaggatgcgagatgggacatttggccccatcatttagcgtcttttttcttatgttctcaaaatatttttcaggaggttagcagggtgtagatggattaagggaacagacagaataaatctcagcagttctctatttttgaaacattgattctctgtagcaggaaggtttgct

SEQ ID NO: 792631 - DNA, 627 bp, Homo sapiens
tggctttatccaaagttctagctattgaagaactctagcttccctgctttcataaagcaactttatgtgaccatataattgatttgtaaagattaagacctgaaaaacatggccatctgtccaggccttggtaaaggactcattttacttaaaattaaccataacacattatttagttccatagagatattaatacaaggaagatttttttttttttttgagacaatgtctcactctgtcttccaggctggagtgcagtggtgcgatctcggctcactgcaagctccgcctcccgggttcatgccattctcctgcctcagcctcccaagtagctgggactacaggcgcccgccaccaygcccagctaattttttgtgtttttagtagagacagggtttcaccgtgttagccagtatggtttcaatctcctgacctcgtgatctgcctgcctcagcctcccaaagtgctgggattacaggcgtgagccaccgtgcctggctggtacaaggaagatttttgataggtccaatacctagatgaagaaaatttttctgtaaacatagtttgacattaatgtagtaatgacattcaacattataaagattttgtagtgacatcatttaaaca

SEQ ID NO: 792632 - DNA, 664 bp, Homo sapiens
ttcacaaaaaataatactcttatcccataattggctgggcatatactttcttttgtcatcataaaagagtattccattttcatgtcacatgtttaataaatgtggtcacagaaaagatgaaaattaaatggctcaaaaaataaccaaaactatgtctttagatcatatagctttatgttttaactagtgatgctactatttgtataatcctatagtttgaaaagtgcttacactaaagagaatagcagataccaaggcttggtacagcaatacatatcttttattgagttaaagatatggctcatcatttctcaaagctagttccaataaatcttctcaagatatacatgggttttctttcaactgccactgtataaacaaaagaactcctcggtactttcataatcaaagacctacatgtatgtaaaaataagcattttttaagccagatacagtctttacctatcattactacaaagttagaaagaartcagtggaatgctgaaaaaataatgagatctactaattaagaacaaaaattttaactttattatcagaattgatcaacgaatttggaaacttcatgaatgatacagcccttttctaaaatgtatttacatactgctaaacaatgcacaagggcaatttagctttgaatttgaga

SEQ ID NO: 792633 - DNA, 658 bp, Homo sapiens
ttcttgtttttgttcttggggtctctgactttttctattgctttttagtttcttggactcgatttacccacttttttttcacagtatattctttccactattttcttttgttaagcaacaacagtttctggatcagcctttcattcaatagttcacattttaaaatsagaccaagaaatgatttgctccatctagcaacatctgtgcctgcgcttttcaagtatacaaatacccacttgctcccatgagagagactataaccatctctccatccctcacaaaagccaggatcccaggttcatttccagaatggatatatataatatgactgttgaaccacagggccagccttacattatacctttcaacaaaatatatttcatggctcatggctcataaatgtagtttcactgtagacagtgcacaatgagtaaatctaccctttttcatggcaaggagcccaattcatatttttattggcttactactaactaaattaagccccaatttctttaaaaaagaaaaaaacactcatgactgaaaataaacgccatttcaatatggctgccaaggacagacttctaaaagaacgaatgtattccaggctcaatctcaagagacctaacaagtccacagaaaaattaatgtactaaataaa

SEQ ID NO: 792634 - DNA, 612 bp, Homo sapiens
tggtactgggatcttacccagtggggtttgcactaattccggttagtgtcagaattgggttaaactgtaggaaatcctattggtgtctgctgcagaaatggttggtgtggtacagaaaagaaaacgaaataacaaccaaaaaaaaaaaacacattttggtgaccaaaagtgttctgtgctggatatgtgcagcaggggaaaatgagttgtttttttcctactatataggagtctatagataaaataactagtaaaaactacacggtacaaaattaacagttataagtcacaaacyctaccttcaatcacaatttactgggctattatagtttttatttgtatctatacctatttatacttagtatctttacaacgagccaggcatcctgagagttttataaaattacttcacaaaatactcaggaactctataatgtaggcataatctcttttttaagagttgagtaattaaggcttaaagaggtaaagtgatttgcccaagaccaaacaattagtatatatagtagagaagccacaattcaaacttctaataatataataaggacgacctgttttaaacaattctgaaataacaaaattcaaatttacagt

SEQ ID NO: 792635 - DNA, 612 bp, Homo sapiens
tggtactgggatcttacccagtggggtttgcactaattccggttagtgtcagaattgggttaaactgtaggaaatcctattggtgtctgctgcagaaatggttggtgtggtacagaaaagaaaacgaaataacaaccaaaaaaaaaaaacacattttggtgaccaaaagtgttctgtgctggatatgtgcagcaggggaaaatgagttgtttttttcctactatataggagtctatagataaaataactagtaaaaactacacggtacaaaattaacagttataagtcacaaactctaccttcaatcacaatttactggkctattatagtttttatttgtatctatacctatttatacttagtatctttacaacgagccaggcatcctgagagttttataaaattacttcacaaaatactcaggaactctataatgtaggcataatctcttttttaagagttgagtaattaaggcttaaagaggtaaagtgatttgcccaagaccaaacaattagtatatatagtagagaagccacaattcaaacttctaataatataataaggacgacctgttttaaacaattctgaaataacaaaattcaaatttacagt

SEQ ID NO: 792636 - DNA, 602 bp, Homo sapiens
gaatacatgcctgcaactcctgaagccccagtgggcatgctacagtgctcttttagctctgccttccacagattgcttaagtattaaccagcccagtgccctcttcgtacccagattcttttcctgtgtccaggaagaatcaggtcacagacggatttgaaggatggtgaatgtgggaattgtattaggtgatggaggtggctctcagtgagatggatggggagctggaaaggggatggagtgggaagatgatcttcccctggagttctgctgtcccatggccaatctcctctccagctgtccccaaccgacctctccttgacgttcaaacactccttctcttctctcctttactgtgctcctcttctgctcctctgtttgtctgctctcctgcctgtggacctggaatttggggtttatatgggtacaggatgcggggatggcaggcaraaggcaacatttggacatgaaaacagaaatgcctgttcccaattagggccatgggtttccaggcttggggggtgggggcctttgctggggaaccaccctcttctacccagtatttccctgcctcctgcccatatcaaagtcactctctcttc

SEQ ID NO: 792637 - DNA, 529 bp, Homo sapiens
ggaaagcaggtaaaaatgctaattacctcctcccatcctgtgcttggatattcccccacagtattgggtctgtatatcctggtttttcaaattctccattccgatcaccctatctaataaaaatgtatgctcactggatattagatttgagacatccarttctatatgtagatacaaactcaagagactcctttattaaatgaagcagcataacatttttactcacctgtctgaatacacatactaagcagaagatggactgagtaagaagccaggagagcaactgtcagcagcaagaagctaaaacataaaagaacacctggtcaaaacctcccaaaagtttgtcttttgtatggtgtctcattacaaaaacaaattgcttaacagtcaaatattcacaggaactatctctgagtagcagaattatgttcattaaggaaattaagaagatacttttctacttttttgtatttaccaattttatttaaatgaaaatatactgattttaaaataaaaaaaaataaaaacc

SEQ ID NO: 792638 - DNA, 520 bp, Homo sapiens
tatccttcaccaatgagggacaaagacttttccagacaaacaaaactgagggagttcatcactattagacttgtgttacaagaaatgcaaaagggagttcttcagactttaacaaaaggccactacttagaaacatgaaagtatagagtgggcayggtggctcaagcctgtaatcccagcactttgggagggtgaggcgggcagatcacctgaggtcggaagttcgagaccagcctgaccaacatggagaaaccttgtctgtagtaaaaatacaaaattagctgggtgtggtggtgcatgcctgtaatcccagctactcgggaggttggggcaggagaatcacttgaacctgggaggcggaggctgcagtgagctgagatcgtgccactgcactctaccctgggcaacaagagtgaaacgccatccccaaaaaaaaaacatcaaagtataaaactcactgacaaaggtaaatatatagtcaaattcagaataccctaacactgtactggtagtgtgtaaa

SEQ ID NO: 792639 - DNA, 520 bp, Homo sapiens
tatccttcaccaatgagggacaaagacttttccagacaaacaaaactgagggagttcatcactattagacttgtgttacaagaaatgcaaaagggagttcttcagactttaacaaaaggccactacttagaaacatgaaagtatagagtgggcacggtggctcaagcctgtaatcccagcactttgggagggtgaggygggcagatcacctgaggtcggaagttcgagaccagcctgaccaacatggagaaaccttgtctgtagtaaaaatacaaaattagctgggtgtggtggtgcatgcctgtaatcccagctactcgggaggttggggcaggagaatcacttgaacctgggaggcggaggctgcagtgagctgagatcgtgccactgcactctaccctgggcaacaagagtgaaacgccatccccaaaaaaaaaacatcaaagtataaaactcactgacaaaggtaaatatatagtcaaattcagaataccctaacactgtactggtagtgtgtaaa

SEQ ID NO: 792640 - DNA, 587 bp, Homo sapiens
gcttaattgcactgactgaatttttcattagctgatgaaatattttattagctttgggaaactgctataatcatatttacagtaagagttttctaaatatttatttccttggagcaaagagttaacactttttaagagctatgtttgcatgaaaactctttgagtcctctcattatttgtacatctatgaataattcagacaataaaatggaataaaaattaaaaccagagataatttctcctagaaaattatgagttctagaaagtgaaattaaagtgcctcgcttaccaaaatcttgacaatttgaagttttataagtttataaaattttataatttargcacttcttgtatattgttcctgataatttataacaaccctgaacaggccacatacctttcctgagaccagtactatgggggtaggatttaacattaaatgtttgattctaaagctatatggtaatagtctatttgtctacttcaactgctataacaaaataccacacactcagtggcttaaacgatagaagtctatttctcataattctggagtctaggaagtcctggctgatttggttgctggc

SEQ ID NO: 792641 - DNA, 605 bp, Homo sapiens
ttacattccagataggaacataaaggaaggatataagaaaagattactttcaatactaacttgtggtgataaatgtctattaataaaaaatatatttttaacccagacatttatacatctttttaaatatggtaatkgatcactactatgtggagaattaaataagaacacagatatattaaaataatgttgtccaaagatcatttattagttaactcaaatttatattatctcaagtactagaagtttaactaagggtctagaaaatacaatttaagttaatatgttgagtcttttgtagaattataaaaattaacctatttttataaagactacatgttatcaagttatttagttgaacacataattttacaattttataaatttaaaatgattttagttcattcaacctcaaaactagtagaggaaatttagaaaattcaaattaattaaacttttcatgaaaaagtaaacccaaggctttcataaaccaaaatgttgtgctaatgttatttttatatggtagaaggtggggaaagatatagagctatttttaaatcaaaattattaaacctgtataatttttccaaagggacaccataatt

SEQ ID NO: 792642 - DNA, 482 bp, Homo sapiens
tggccatgtaagatgtgcctgcttccccttcatcttccactataattgtaagtttcctgaggcctccccagaaggaagccagcatcatgcttcctgtacagccttgaaaccatgagccaattaaatctcttttctttgtcaattacctagtctcaggtacttctttatagcaatgtgagaacagaacagactaatacatgtggctaccacactggacagcaaaactatagataactatagataacacaactrtatcaagtggccttattaaaaattcttcagttaaagaataaattaaaacataaattataaatacttagaaatgaacaataagaacaggccacacttttaaagtgtatttaatatagccaaagcaatactcggaaaaaatagatagatatttagttttagatatattcattggaaatcactttaaaaagatggaaaattgtaaaagcattattttaaaccacgcagcttcc

SEQ ID NO: 792643 - DNA, 641 bp, Homo sapiens
gaggtgcagttttataaaggggtcaatacaaaggtgacatttgaataaagatctgaatgaggtaaggttgcaaaccatgcacttatctaagggagaagtgtcccaagaagagagaacagctaatgcaattgtcctaatgctggagcaagcctggcctatcgaagaaacagaaagagaacaatatggttaaagtacagtgagtataattgcccaaaaggttcttcctgcctgcagcacagacaaaaccaattcactgagactgtggtattgcaatagaaaaagaacttaattatcacaagccagcctagtggaaggacaggggttattactcaaatcagcctacctaatgactcagaggctagcatttttcaaagatagtttggtaggcaggggrctagggaataggtactgccgattcattggggatgaaaacataggggtgtagaaaatggtcctgtgtgctgagtcagcctgtgggtaggtgccataggactgattgagtcatgagtcaagggtccaggtggactcagtcagtctcaggatgtaaaaatcagaaaaacatctcaaaagaacttaccattactattgtagaaactacaatagtgatattatctatgggagcaactgggaaagttgcaaag

SEQ ID NO: 792644 - DNA, 643 bp, Homo sapiens
ccggtttcagccaactgtggtggatccaagacacaacagctgcaactttaacagcagtgggaaaggacaagattactgtatggggcccatcccacatgagtcttagagaagttgggttctactttttaacctagagttaccaggtttaaaggggtatcaggtttttaggcatttttttcatgtacctaattatgaacactttgcatggctatttctgcatttgttttcttaaagttaattcccctagttcctggagatcatctttaatttgacttatgatttgggggtggcccaccgaacaaaatctcatagggtaaatacccagtttgtttggtgggggtgcacctgactcagaggaggaccataggcaaaacctgatcctatctcagatgaatttcctggcaatatttcttcagtagctgcttgagtgtccggttcrtggttccacttttcctgaactttgtggccgataggctgtgtgtaacttccattttatttttaacagtcttgttaaatcttgcactatttcagctacaaatgctgacccattgtctgactttaaagttagaggcagtccaaacccggggataatgtctcttaacagtactttagtcacttctcgtgctttttctgtcctagtggg

SEQ ID NO: 792645 - DNA, 595 bp, Homo sapiens
ttaagttaaccattttatatgggttcagtttgtggcacctcaaaacaattgcaatagtaacatcacagatcaccataacgaatataataataataatgaaaaagtttgaaatattgtgcgaattaccaaaatgtgatgccaagacacgaaatgagcacatgctcttgggaaaatggtgccaatagacttgcttgatgcaagtttgctacaaaccttcaatttgtaaaaaacgcaatatctgcaaagtgctagaaagtgaagaataacaaaatgaggtttgcaggtactttaatgatgaataaatgtcattatacatttgtaaacacccatagaatatacaacacctagaatgaactytaatgtaaattatggacttggggtaattaagatttgtcaatgtaggatcatcaattataacaattgtatttctttgatggggaatgttgataataggggaagctatgcaggtagggggacagtggatatatggaaaatctctgtagcttcctcctaattttgctgtaaacctaaaactgctcttaaaaaaactttttaaaatgcatggaacacattttttgaaaagttaattgaaatc

SEQ ID NO: 792646 - DNA, 610 bp, Homo sapiens
ttttttaaaatgcaagagaataatagtctattatatttaaccactattaatcatttctgtagcctttactttgttcctaatgttcaaagtctctttcttgtatcatttctcttctgcctgaaggaattcctttagcaagtctgttggaacagatatgctggctctgaattctcttagttttcctttatctgagaatgtttattttaccttcaatcctgaaggacactttcactgaatatagaattctgggttgacaggtcttttctttcagaattttaaaaaatgctgtgtcacttccttgtggctccacagtttctgatgagaaatctacagtcatttgagttgtcccctctaggtaatatgctgttttcttctggtggcttttgagattttttgtcttcagattacagcaattggcttaygatgcctcaatgtagcttgttttatttgtttgtctttctgttgaggattctcttactctcttgaatttgtaggtttatgtctttggtcaaatttgggaagttattagacattctttctttttttcttttttttttaagtcccatctcgttctgggactatcttcagattcaattactgttctgttatt

SEQ ID NO: 792647 - DNA, 591 bp, Homo sapiens
tatactttaccaagttgctgtaagctacagatagcttgagagagaaaatttctttaaatctgaaaaacaaaacattcaagtaaaggatcaaaaatgttttattgttttgtagtttttttttttttttgctttttttttgaaatggagtctcactctgtcatcaggctggagtagagtggtgcaatctcggctcactgcaacctccacctcccaggttcaagcaattctcctgcctcagcctcccgagtagctgggactacaggcacgcgccaccatgcccagctaatttttrtatttttagtagagatggggtttcaccatgttggccaggatggtctcgatctcttgacctcgtgatctgcccacctcagcctcccaaaatgctgggattacaggcgtgagccactgtgcctggccaaaaatgatttaaataaagaacacaaaagcattatctttgtcagttattcagtctcacataattaatttttgtcttgcttgatcttgattagcaagttcatgaactcatcagtttctttactagagttctgggaaattttaatctagtccattgatcttaaagttattaaaaac

SEQ ID NO: 792648 - DNA, 619 bp, Homo sapiens
taagaacccccaggtgaccaggtcctgcctctctttcctatctcatctcatttcctgggctgaggtcacggtactctccttccatctccctcatctcaacaagctcttcctttccttcctgcctttgtgcacacctgaggtcttcctttctctcttcacgtggctattccaagctaactgattaaacatcacttctttcaatggatgccactgacctcccaatgtaaattaggtgcttcttgttttgtttcctttttactcttcctttcttcacagcacttaccacagttttgyatcatatgtttatttgggcatttatctttatatttatttaatgcccatatacctttaaattgcattgatgacaggatcacatatgttttccttatgatggcttatctaatcctaacatagccccagcatatagcgggtactaaataattatcattcaatgagaattgaagccagcaaaagccaatgcagtcagaacaaaaagagtattcagagcatgtattctgggtcaattcactgctggataaagattgttaaaagtgaaggcaaagcattcttcaagaacacttgtcaggttcagtatgatcagaggcagatggtaagcttt

SEQ ID NO: 792649 - DNA, 562 bp, Homo sapiens
tacatggtgcttttcaaaatgcaggttcctgagccttatggtaaacctaaagccagaatctgtgggcatggacccatctctataaatcaccccagatgattctggcacacttaaaagtctaagaatcttccacataacctatgccaaacattaaactacaacaccagcaaagaattctctaggagagattagctaataaagattatagagcttatwtttcaacagaaatccaatgaaataaaatagttaacctgtatagcaatatgtgcaagatactttcacatgctttactgtattgaatctttagaacaattgtgagctacatacaggtgactatttatactggtcctctttccaaaataaagaaactgagtttcagaatttgtccaacttgctgagcatcacacagccaataagaacctgagctagtgctcccagtcaggtttggggacttgctcaaaaaatgtttgcagggtattgaaggtcaaagtcaaaaggaaagattaggtgatggcatcagagaatggcattatgctccagataactggtctgttgggtatca

SEQ ID NO: 792650 - DNA, 562 bp, Homo sapiens
tacatggtgcttttcaaaatgcaggttcctgagccttatggtaaacctaaagccagaatctgtgggcatggacccatctctataaatcaccccagatgattctggcacacttaaaagtctaagaatcttccacataacctatgccaaacattaaactacaacaccagcaaagaattctctaggagagattagctaataaagattatagagcttatatttcaacagaaatccaatgaaataaaatagttaacctgtatagcaatatgtgcaagatactttcacatgctttactgtattgaatctttagaacaattgtgagctacatacaggtgactatttatactggtcctctttccraaataaagaaactgagtttcagaatttgtccaacttgctgagcatcacacagccaataagaacctgagctagtgctcccagtcaggtttggggacttgctcaaaaaatgtttgcagggtattgaaggtcaaagtcaaaaggaaagattaggtgatggcatcagagaatggcattatgctccagataactggtctgttgggtatca

SEQ ID NO: 792651 - DNA, 603 bp, Homo sapiens
atttcctccctactatgttatatttgaagtagcactgggacacaaatgtagaaaagcaactagttgaaaatgggaaacaggaggatatgaaagagaacagggtttgagataaagaactcagctttgtctccccaaaggctggtattagatgaatgagaataaaaatcgtcttcagggaagagaggaaagagaagaccagaggacaatgacctttcagaagacaggaggaggaaatggcaccagcaatggagagaactgtcaagaaatccatgaaaggytataaacctactgggtgacagaaaaggtggccacatcaattacactagatggcagatgtgaaaatttgtcatgcacaagattttgagataacttgactagcacaggctactatataaattgtatatgtgcttgcttagaatagaaataacaggcattcctcatctgaattaaatttaaaaaatactttgaatagcagttttcaggtggtaggagcttatcatatataattttaattgggaaaattaatatgttcccaactcatccaaatacctgtccaatgtcctcaaatatgaataaaatcactgtaaacacctgcatagccat

SEQ ID NO: 792652 - DNA, 488 bp, Homo sapiens
ctgcctgtggttatgtgagttcaggcctatgttgctccatcgtccacacttttatcaacatgccatgttgaaagaatagggttgaaaatacagtcacaggaaatcatcaccacgaaatattattcttgccaagaaatgcaagctctaccacctacagcaatgtgttattatttagatggggttctgcctctaaaattccttaacaaggatgataaaactatattggaagggraaatgggcaaacagaaggaaagaaaaacaccaagcatttaacaagggaattatgtaaggtgacagctttaggcagaaggtgaaagcaaataactaagagagtggatgttaagtattcacaccatgaataaatgagaagtaggtgaggttatatacatgttagctcgatatagcaattccccaatgtacacatgttacaaaatatcagatagtacaccataattatatacaattcttattaatttaaaatttttttg

SEQ ID NO: 792653 - DNA, 610 bp, Homo sapiens
aatgactaaatgtacataccttaaacacctacatgctacatccacatacaaaactgattccaggagttttcctagttttctctccttttataaagaggcactgttaatgtggttcaccattccctgacattaaaatgtcctgcacagagtgagctgagaccgtgccactgcactccagcctgggcaagagaacaagattccatctaaaaaaaaaaaaaaaaaattgtcctrcacagaggcagtcggccataggccaaagggtaggagacatgaatttgcttcccttggtgttcagctcagctgtcatagtacaggtaggaacaaaggagacctcacaagcacaaagtggaatctttaatactggacaaaacaaacagttaaaaatatatccccagcaaaatcagagaaaaaagcaaaggaacacagggaccacaaaaaagggtcataagtgtggacaccacagtggcacagtccaacactggatcatttcctttatatggctacatgatagaaactctatgaaaactacatatacaagggaaccaaaattttaaggaaaacctggggccatcttataaaaccccaatgggttaattcaggtttcttaaag

SEQ ID NO: 792654 - DNA, 550 bp, Homo sapiens
tcatttttatcatcattgatgttgattatcaccattcaattagacagtacctattgaacactctctatgcctatgcgctatgcttagcatgaaaccaagcagatgctaaagtaaatgccaccccctccttcttcaaaaatgtatggctaagtgagaaaaacaaataataaaaaccagaaggtggtaaacactaagagtagatgcaagtaccatgggatcccggtacayaacctataacaatattagaataaaatttgaggaaaataaatatttgcaaactatgccaagtgtgtatttgatctcaaattcacttagaaaatatttaaaattgtttttccacagttgaagtctatgtaaatattttgtacaaatatagaggaaatatgccaaatataatttctctccttaacgctagacaaaggttaattttcctaatcttcccaggaagtttcttgatttcctatcggtaaaactctcttcagtcaacatgtgtatgcaattttcccattataacagactatatcatgcgtaccactagacagcaaattgt

SEQ ID NO: 792655 - DNA, 556 bp, Homo sapiens
aggtcatttcatttagataaaaacacaaacttgtaataagtgatataaatcaccctttatcacagaattagctgttttaataatccagaataagcagttctttttggcactctaattcaccatggttcctatacatgatcaccccaaagggacctagaatgactagccctgctgttcacgcagcattgagatgaccctagagaatcagagtcactgacattttggaactacagccagttctctcttgctgccttttcctctacccatacgcattcttcttcatttaaaagcttgtttttcttcctttctttctttctttttaaatacaaaagcactttcgttttcaggaatataargctgagttgtggggtggcttcttgctacggtacatttgaaaatactgccaaacagcagcaaacacacactcagaaacatgcttgagagcaaacaagccatctataaatacactccagaagcttttaaaacaatgtaaaagtggcatctggcatgagtaaaacggcagtttaaactccttgactcgccatcaaaatttatg

SEQ ID NO: 792656 - DNA, 603 bp, Homo sapiens
attatagctttattttattcaagtactcataaaagtttttgatactagaaaagtatcattgaaagaaattacatagtttttcttttatacttctgggtttaaaagtttatatgccactatgaatgtgctcaggctcatgaaggatgatggtgtaatttttttttcttttgagacggtctcactctattgcccaggctggagtgcagtggtgcgatctctgcttactgcaacctccacctcccggattcaagcaaatctcctgcctcagcctcccgagtagctggaattacaggtgcacacaaccacacctggctaatttttgtatttttagtagagacagggtttcaccatgttggccaggctggtttccaactccaggccttaggtgattcacctaaatcagcctcccaaagtgctagaaatataggcatgagccaccatgcctgrcgatagtgtaatttttaaatgtaaattatttttgttttttctctatgtgtatatatatgtatgtaggtgtatatataagtatgtatataacataccacttggatttttaaaatattcaccaagtggaaaattagaaaaaatatgtatgatgtgatt

SEQ ID NO: 792657 - DNA, 650 bp, Homo sapiens
cttattccagagccttaactgaaattatttttgtttaacattagagagactgtagatctcaaagtgtgttattatttttagaacttcactgtacttttcttccaaacttcgtgttagatctggcagtggttatgaaatgactcagtttcaacttctttctcccttcagtgcttcctaaaatgtttcactttgtttctcctccaatgactttgtaaatttataacatgtttgaactcaagtattaatttaaatgagttctacatccctttggtgcaatggaatttaaaatcacatatgttctttatttaaatgactttaaaatattataaatgtacataaaagagaaattcaaaataaaatctatgttttatctacacaaaacacttcatgaaaaatgcaagaggtgaagctaatacagtgaagatttttcaaayttaaatctattttgtcataaattacaaaagctaaggtttctaaacctccaactacaaatattttcatgtttcattgaatatgttgattgccgtcatttgaaggacttgctgccaatgttgttctcttactgttacatgtagattttagcttatatgcccaacaatctgagatggcagccacagcctttgaattggctcagcatttccttcaaggac

SEQ ID NO: 792658 - DNA, 459 bp, Homo sapiens
actctgtaatttagtaaaataaaataatactatgaagcaaagaaattctaaactttggaaataaaaacataaggagcaggacattttatattagcccataaaacaccatattmtttggctactggttttgagaatcacactctagattactggaaaagaaggggttattcataggaaagtcctgaaataaattctctgggtacccagagatgaagtgagcctatgtattaactattataaaacatgcctgtgaaataaatgtgtgctttttttctttactcaatttagaaaaaagacatgatttttatgagtgataggagaaatgatgcagcatctttttaaaactgtgttatgaaacacttttgtgtgttttttgtttctttttttaaaagtaagctgcttttcactttctctttggcaattaaatttatacatatctgaacaataatatttactaaa

SEQ ID NO: 792659 - DNA, 631 bp, Homo sapiens
caggaagacttatctgttaggttcctgctgaatgagagccaatcagtccatgagacctagagagaaataaaaatatattcacattagattgacaaatagaacttctcaggagaaaaaagtggtaaacacagatttatttgtcatttctataytattatttcattcaatcaatagttttctcaaaaaacctttctgatcagggctcctcctggccaaatacaaaaattaaacatcaaaatgtttaatgttagaaatggattataaatgcatgtgagatcttaaatctaaattttaaacatccacaagtctatactgatactgatttaaaaggatggaggagaagtaagggctcttctttacagaagaatatcaacgaatgtagaaaaaaattatagaatttgaaaaatcactattttgcaatcgctacattcataattatcttacacaagggatgccaaaggtacaaacattgggtaaaagattgttggggaacaagatattcatagatgcttaaagtatcttcccccaggctacttcatttcttacaaaacgaaaattttatctttacaatggagagatctggtagacaccacattaaccacgtgatcaaatttaacatcactagtaatga

SEQ ID NO: 792660 - DNA, 624 bp, Homo sapiens; identical to SEQ ID NO: 787568

SEQ ID NO: 792661 - DNA, 624 bp, Homo sapiens; identical to SEQ ID NO: 787569

SEQ ID NO: 792662 - DNA, 617 bp, Homo sapiens; identical to SEQ ID NO: 787570

SEQ ID NO: 792663 - DNA, 609 bp, Homo sapiens
aactgtggctacttgttgaagattacaaggaggcaatctgaactcatagagagcacttcctaaggagagcctcagaggtggcttctgcgtaaagcggaaccctctctagctcttaagagcattcccgcaggggctggctgacaacctgggaagcctgaggggcctctcaagtcagctctgactctaagatttgctttactaatagaaagaaaatatattcaaatcatgcatatatcttccctgtatatggcagctttaagaaggaaatagagtagaaagaacaccagcccaggacccagggcaagtcaacctgatctcagtttgctcagctgtaaaatgggtggtaaactgratggtaagataccttcaagttctgaggacctatgaacataattcatttccctgtgcctgtcttgtttgccacaaccttgtggaaaaggtaaaaagacatagaagagcacctgacttagaaagcctctgctcaatggggttgggctaatggcctgaagcctgagcccagggtggatgcggactctatgtggaacagctgagaccccaaatggtcctgccatctcatgtccagggggatgcatggggctcccgtttcca

SEQ ID NO: 792664 - DNA, 518 bp, Homo sapiens
atgtttcttaaaatagaaaacaattctggatagacattcatataaaagtgtgacttttagtatgaagtctttaaactgggagttattttctctggcacatacagctcttatcccctgggtgctcaggggtccctctctagtatcctctgaagcagaggtgagaagaaatgtcctaagcgcacctgcaattattctgtccagacctgtcagctctctgtcagcaaaagctgctgtcatgtggacatggctcatcttgccttgaggttaattttttttaagacatcaaaatcttaactcctttgttggaaagatatatatcatatgataagtttttccttcawactactttctctaaaaaagaaacacgtcatcaggaattttattaataaaaatgatgataaatagttgctcctgtattttcaaatcatcagactgctaatatgcacatgcatatctcaaaacatgaattacacatttgcaaacagttctttattacattcatgtttcagattttgaga

SEQ ID NO: 792665 - DNA, 518 bp, Homo sapiens
atgtttcttaaaatagaaaacaattctggatagacattcatataaaagtgtgacttttagtatgaagtctttaaactgggagttattttctctggcacatacagctcttatcccctgggtgctcaggggtccctctctagtatcctctgaagcagaggtgagaagaaatgtcctaagcgcacctgcaattattctgtccagacctgtcagctctctgtcagcaaaagctgctgtcatgtggacatggctcatcttgccttgaggttaattttttttaagacatcaaaatcttaactcctttgttggaaagatatatatcatatgataagtttttccttcatacwactttctctaaaaaagaaacacgtcatcaggaattttattaataaaaatgatgataaatagttgctcctgtattttcaaatcatcagactgctaatatgcacatgcatatctcaaaacatgaattacacatttgcaaacagttctttattacattcatgtttcagattttgaga

SEQ ID NO: 792666 - DNA, 504 bp, Homo sapiens
agccaagaaaaacagaaggctcaaattactaaaattaggaatgaaagagggaacatcaccacttattttgcaggatcatatgggaatattgtactatgaacaactgcatctcaacaaattagacaacctagtgaaatggactaattccacagaaatacaaactataaaagctgaatcaagaagaaatagacactctgaaaatctaaaagagagattgaattagaaataaaaaaaaaaattcccacaaagaaaaatccaggcacagatgtcattagtgaattctatcaaacatttaaagaagaattaataygaattattcacaaattacaccccccacccaaaaaaagaagagggaatacttctaaactcattctataagtccagtataatcttgatgctaaaaccagataaagacatctcaagaaaactataaatcaataactcttatagattcaaaatcctcaccaagatactgcgcactgaagctggcaacatatacaaaat

SEQ ID NO: 792667 - DNA, 675 bp, Homo sapiens
aaggattttaataatcaagtggataggatgacccgttctgaggacactactcagtctctttccccagtcacccctgtcattgtccaatagtcccatgaacaaagtggccatggtggcagggatggaggttacgcattggctcagcaacatggacttccgctcaccaaggctattctggctacagccactgctgagtacccagtttgccagtagcagagaccaacactgagcccttgatatggcaccatccttggggtgataagccagctacctggtggcagttggattatattggacctcttccatcatggraagggcagaggtttgtcctcactggaatagacagtctggatatgggtttgcctatcctgcatgcaatgtttctgccaagactactatctgtagactcatggaatgccttatccaccatcatggtattccacacagcattgcctctgatcaaggcactccctttatggctaaagaagtgcagcagtgggctcatgctcatggaattcactggtcttaccatgttccccatcatcctgaagcagctagattgatagaacggtggaatgttcttttaaagtcacaattacagtgccaactaggtgacaatactttgcagggctggggcagagttctccagaaggccgtgtatgctctgaatcagcg

SEQ ID NO: 792668 - DNA, 375 bp, Homo sapiens
gctggactggaaaactgctcccatttttaaaaagcatgcaggttatacagcattttcacttagcaacaacttccatttaacccaaaacaaagggcctcgatcccccatatggcctgtgttgcaagggatgggccaggcgctccgatgtccttcacagatgtggactgaatctcagggttkgccactcccagactccttagctcagaaggctgaacacacattcttcttggatcatagagtcattctcagggattgcctgagttattgcagtcaggtgcatctccatacaccgggtgaatgtgctgggataaacatccatggacgctgttagtacaacaagaaggcacatgggtttccaagctcctccccagccca

SEQ ID NO: 792669 - DNA, 538 bp, Homo sapiens
aatggatagggctccagatgtgaagcactatacttgttttggtgtaaatatctgctttcatatgcttctgaattcatgatccccagtttgttatttaaaacaaaatgaccttaaggacagataatctgtcttctacattatgtgattattgtcatagcatataatatagtgaatcgaacatagtgtcttcacgatattcttcatttcaaccaacrtttattgtcatgcctagtttgggtaggccattatcaagagtctgagacacaaagatgataaatgcaaggataatgcccaaaatgagttaatatcatatgatttttgaaaaggtgagtttgagaaagaacaaaacagaccttttagaaatgacatttaattctatctaagaactcaaagaatgagttataatagttcgaagttatctgtctgatactgactttggtatgccacttttggtttcaatgtttttctggtacaaatttccaccactttgctttcaacagttcattcaacatgtatctacaaagcttttttcagtgtt

SEQ ID NO: 792670 - DNA, 585 bp, Homo sapiens
ccaaatccagcagcacatcaaaaagcttagccaccaagatctagttggtttcatccctgggatgcaagattggttcaacatatgcaaatcattaaacgtaatccatcacataaacagaaccaaagacaaaaaccacatgattatctcaatagatgcagaaaaggccttcgacaaaattcaacagccttcatgctaaaaactctcaataaactagatattgatgggatgtatctcaaaataataagagctatttatgacaaacccacagccaatatcatactgaatgggcaaaaactggaagcattccctttgaaaactggcaaaagacagggatgccctctctcaccactcctattcaacatagtgttggaagttctggccagggtaatcaggcaagaggaagaaataaagggtattcagtgaggaaaagaggargtcaaattgtccctatttgcagatgacatgattgtatatttagaaaacctcatcgtctcagtccaaaatcttcttaagctgataagcaacttcagcaatgtctcaggatacaaaatcaatgtgccaaaatcacgagcatccctatacacc

SEQ ID NO: 792671 - DNA, 650 bp, Homo sapiens
gttttctgagaactcaaatatttttcatttccctctcttcttccttctccagtttccctgcttttctgctcccgctaggcttgttcactcattccccttccctgttcctccacctgctaaatttttcatacagtgcatatatttaatttcctgtgtgttttttctatagcgtgctttaaacactgaaaaccggagatgttgagtgccagatcatcacgtttgctaattcgcaaatctacttccagttgccagttcctttgaattaggcatctttgaaatggtttccattatatgcttgattcagaattataaaatgttatttgcttgattgtgtatttattttacaacaattaattcaccctgagcttttatttggaaaaataattgcctgcaagaagtaaacagttctaagtattctagaatattatacttaattatccctttatttttgtactgtataccattttcttccaagtttagcattttgattgatttaactyttgcaaaaattaaaactctttttgaaaaatgttgtttagaaaaattcagtattgtgaatttgaaagggctaggctgaattagacatatgcttcctggaatgagagttttgcctatacactatagtaatgaagtcataataaatgtgttca

SEQ ID NO: 792672 - DNA, 535 bp, Homo sapiens
atggagtgagctaaggggtagaagtttactatttttctgtcaatgatctaatttgatttccaaataataacattcccataataatatcctctctacccagacaaggtaataaaagtctagagaggctagaggaccgtgcaatatcagacagccaggtctttttccactgggatttctctttttttttgagagggagtcttgctttgtagcccagcctgcagtgcagtgtcgccatttcggctcactgcaacctccgcctcccgtttcaagtgattctcctgcctcagcctcccgagtagctggaattacaggcgcccaccaccatgccygactaatttttgtatttttagtagaaacgggctttcaccatgttggtcaggctggtctcgaactcttgacctcaagtgatctgcccacttcggcctcccaaagtgctaggattacaggcgtgagccaccatgcctggtcttcctctgggatttctaagctgaaggtaatagattcttagagctatctggatccacattcctccttt

SEQ ID NO: 792673 - DNA, 592 bp, Homo sapiens
ccagaaagtgtcagtaacagtggaaattgtggtatattaaatcttttaaaaatatacatgtgagtttccagtcaaaatattctgtcatttctagcagagtttaacataaacagtgaattattaaagtaaatgtgagtgtctgggagttgcagtataacatatactaccctgattattttattgattcattataaaggaaatataggttctgctaaggaaaaaaagagatcaagcaatcttacagataaaattaggtcatcacaattagtgttagaatgctatataactatatagttttttacagacatatttcrtataggttgaatttcataacactcagcatcactgcatccatttaattttaaaatactgacatttttgttagttgtaactagtctctctctttctctttctcctcctctcctccccccccatatatatatatatatatatatatgacagcagatcccttctgaatagattaatgccctccctgaggggatgattaactcactccacacctgaagtccaaaattatatacagtatataattttatataccccaggagtggagtaataataatatataatg

SEQ ID NO: 792674 - DNA, 592 bp, Homo sapiens
ccagaaagtgtcagtaacagtggaaattgtggtatattaaatcttttaaaaatatacatgtgagtttccagtcaaaatattctgtcatttctagcagagtttaacataaacagtgaattattaaagtaaatgtgagtgtctgggagttgcagtataacatatactaccctgattattttattgattcattataaaggaaatataggttctgctaaggaaaaaaagagatcaagcaatcttacagataaaattaggtcatcacaattagtgttagaatgctatataactatatagttttttacagacatatttcgtataggttgaatttcataacactcagcatcactgcatccatttaattttaaaatactgacatttttgttagttgtaactagtctctctctttctctttctcctcctctcctccccccccatatatatatatatatatatawatgacagcagatcccttctgaatagattaatgccctccctgaggggatgattaactcactccacacctgaagtccaaaattatatacagtatataattttatataccccaggagtggagtaataataatatataatg

SEQ ID NO: 792675 - DNA, 637 bp, Homo sapiens
aatttctttcctttttatcccagtaatcattgaatactaagtcataacagtatcttttcatttacaatgttttaaattctatttgctttatattttctatgttgctacatgacttcaaagtccatgtatagagcttttgtaacctatgtgtctactataacaatagcttcttttttaaaaacagaaaccaagtaataatttcaacgatgtcaggagaattatatcatgggcaccccctgtgacaaccttatgataaaggtagaaaaaagtttgtttctttttcttcttacacaataacttcttaattgtatctagcttcattctcctcaaatcctgacaaagaccataaaagagacttgaatctaaaaaagagacatttcctatgaaccatttttgccatttggagtttattaaataaagaccattcaatttcwttgaataaacagagaaaaataattagttttttttagaggctgcctctgcaagttgaatctaattccagaggtaactttagtagagatcttaatttgactctctccatattgtaataatagcttataagaacacatgacttctgtgtcccaaactgtctgtttttaagtttggcactttttccaaacaaaatattattttcagg

SEQ ID NO: 792676 - DNA, 580 bp, Homo sapiens
gcacaaaggcacattttcataaacttatgagcactgaagcccacagtgcaaagaaatatatttttgtgtttcaaatggctctcatatggtgatattataaagatagaaaaatctttattttgcgtagaggctacatgacagtatttaaaagtggcctgataattgacattatcttattttctccttccaaaggaccccaccagggacatgtatcttaaaaattatgatttaaaagaccacggtatagtcttgaaaaacactgtgcaaaagagaaggaatctgaatctaagtgtaggttttgtaacaatggtggtgcaaaaacttgggaaagttatttcatttctttaaacttgatttactatatttagaactgtatagatttgtattaaggtagtatttattgaggaaagatatacatttatttcgtrttttaatcatgctaaaagggccttttctatgtgtcatatctgggatcatgatttgatctttgctatttttgaatctacatagaataaaatctatagtgggatttggttaatataacactatcttgtttcactagagggcagtatgacaaatt

SEQ ID NO: 792677 - DNA, 550 bp, Homo sapiens
tggcaaggacaaattctattgctttttgatatctgtgagaaggcaacagaagagttagaactaacaaagacggcaggaattacaagatccaagcaaatagtttccttgctttggattagagttggacacccaagtgtgtaaaactcctggcaggaggattgaggtgaagagcgggaaagtacaggaggattccrccaaattttagctgctcagcagacaaaataaggtatgacaggcacctagccagggctctagaaaaatatttgaccactgccagaatccagaaaaaccaatgctaccaagcatctaaaatgaaaagtacgaggccgggcgcggtggctcatgcctgtaattccagcactttgggaggccgaggcgggtgcatcacctgaggtcaggagttcgagaccagcctggccaacatggcgaaaccctgtctctgctaaaaatacaaaaattagccaggcatggtggcaagtgcttctaattccagctactcaagaggctgaggcagggagaattgcttgaactcaggagatggaggttgcag

SEQ ID NO: 792678 - DNA, 562 bp, Homo sapiens
taccactggcgtgtcaggactgatgtgcacggatggaaaatgacacctggagagttgctcacttcacctaacatacaattctaaataaaatgtttcactcttctgtgaggtctttgattatcactagcgaaatctctacaaatacagaaacatgaactgctgctgtctggttaggcctgtctttcaggggttgaaaagttgctctggaagccgggggtttcctgacttgccctaaaggtttctcagactgctctataataatgatgattgaaaagcatattatgtcaacagatacttctttggaaggaggaaaacaggaggacaatacctcactcatcagaaagagccagacatacytatagggtatgcaaagcaagccaaaactcctttgtgtggttttggggggggcggattttttgagacagggtcttgctctgtggcccacgctggactgcagtggcataatcacggctcacagcaggctcaagagatccttccacctcagcctcctagtagctgagactataggtatgtgccaccacatctggctatttttattatt

SEQ ID NO: 792679 - DNA, 648 bp, Homo sapiens
gtttcctcccagagagctctacttagagaacagggcatttcttgcctactgtggtagtctccttcatcttctcctttttaaataattattttgctgggtgcaggggctcacacctgtagtttcagcactttagaggctgaggtaggaggatggcttgagcccaggagttctggaccagcctgggcaacatagtgagaccttgtctctattaaaacttttaaaatggccaggcacagtggctcacgcctgtaatcccagccagcattttgggaggccaaggcgggaagatgacmtgaggtcaggagttcaagaccagcctgaccaacatggagaaaccccgtctctactaaaaatacaaaattcgcatggcatggtggtatatgcctgtcatcccagctactcgggaggctgaggcaggagaattgcttgaacccaggaggcagaggttgcagtgagctgagatcatgccattgcactctagcctgggcaacaagagtgaaactccatctcaaaaaagaaaataaaagaaaaaaacattaaaattagttgagcctggtggcacgtgcctctagttccacctactcaggaggctgaggtgggaacattgcttgagtccaggaggttgaggctgcagcgagccgtgctcac

SEQ ID NO: 792680 - DNA, 616 bp, Homo sapiens
ggcctaaatagcagttcttaaagtttggttcataaacccccggggttccttttcagtggatctgcagtgttgatgtattttcgtaacaatactaagttgttatttgttttttccattctttttctttcacaagtatacagtgaagttttccactgtatattcagaacccctgtataactcagcaagtcgctatttcctaaacaaccgatgatcgatgttacaaaatgatatattggtaaaagatccattcaaaatgctagataaattaatgggttttaatatatcagagtatgtaaagttcactgataggtgttccgattcctatacaaacttccagttgttgagtttgggtgtagtatcaaagaaagaatatccacaattatctgaaaggctatttcatcaatcctgcatttgccaactaggcatttgtgtgggaatgggttttctacacacrtcaaccaaacatgatgccacaacagattggatgcaactatcttcagttatgctgggcattaaaaaaacgcaaagtaaaacagtaccactcttctcactaaatgttttaggaaaatctaattatcccttataaaaaaatatatattatttatgttaacagtaa

SEQ ID NO: 792681 - DNA, 469 bp, Homo sapiens
cacagggaggggaacatcacacactggggcctgtcagggagttgggggaaaggggagggagagcattagaacaaatatctaatgcatgcagggcttaaaacctagatgacagcccaggtgcagtggctcatgcctgtaattccagcactttgggaggcgggtggatcacggggtcaggcgttcgagaccagcttggccaacatagtgaaatgccatctctactaaagttacaaaaaattaaccgggcgtggtggtgggcgcctgtaatcccagctattcgggaggctgaggcaagagaattgcttgaaccygggaggcagaggttgcagtgagccgagaccgcaccactgcacttcagcccaggtgacagtgcgagactctgtctcaaaacaaaaaacaaaaaacaaaaaaaccctagatgacgggttgataggtgcagcaaaccaccatagcacatgtatacctatgt

SEQ ID NO: 792682 - DNA, 629 bp, Homo sapiens
taaagctctgagtcattcttatgtcatcacttggtagactggatctgctcttgagaaaataggccggttactttatataaattgaacctaatatctgtccaggatggaagagggtatgctcaggtccttccagtaattcattcttctgaatcatgtggctggacttcttattccagatcttgatgggagatccagagtcccagaaatccctctcacagttgtggcagcaacagagtatagcagctgttcttagagtggctccayggccttcatcgttaataaattttttgtgtgtgtttttgagacagggtctcacactgtcgcccatgctggagtgcagtggtgctctctccactcaacgcaatctcctcctctcgggcccaagtgattctcttgctctagcctcctgagtagctgggattacaggcatgtgccaacagacccggctaatttttgtatttttgtagagactgggtttctccatgttggccaggctgtctggaactcctggtctcatgtgatccccccacctggcggttaattaatttctatagaaatgttaagaaccctggagagtggctaccaaacttcttctaatagatttaccaatctattaataagcacctgtg

SEQ ID NO: 792683 - DNA, 445 bp, Homo sapiens
gatcgaccagtgcttatattctacataaaacaaaaatgtaagcagttaaaaacaataggtggaaaaaatgttaagggataaaatatagctttgcttgagaagaaaagagataaaaggtgaataacatagagattggtggctattagagtaccaggctgcagctccccagtcacagtggtctgcagcgtcttgagctgcacatgagattgatggtggagagggcatctccagacatgtgctttccctagagcttgctgacggggctttctcagcagcatatmctatttccccatgttggttggattcttaatagtttcaatagtttaatgtgaggtagaaagactcaaataattatattggaggtggaaatggtaaaggaaagacatatattattaatattgtgaagaaagaaaaatcctctaattgaagaggatccccttaactg

SEQ ID NO: 792684 - DNA, 619 bp, Homo sapiens
  misc_feature 579, 580, 581, 582, 583, 584, 585, 586, 587, 588, 589, 590,591, 592, 593, 594, 595, 596, 597, 598, 599, 600, 601, 602,603, 604, 605, 606, 607, 608, 609, 610, 611, 612, 613, 614,615, 616, 617, 618, 619: n = A,T,C or G
cctgatcaccctgttaaggaaaaaataataacaaagaataatctcttctagcatcagctgtagttgagagcaaaagttctggattcatactggcacttattagctgttgggccttgtataaataacttaaactctctgtgtcctagcctcctctcctacaaagtgggcatattaatagtatccattagatagggcgattttcagaactaaatgaattaacccaagtaaagtgctcagagcaatgcctggcaccttggcagtacttaatacataaaagatagagagaatgttaggtgtgcttkgttgcccatctaggatgatggcagttttgagtcaataccagctgtcacttgaggtctgggtctcctttgcaatgataaaggaagattgccaagaggatctcattactgagacttttcacttaaaaaaactttaggacattcaaaatctctcctaaatcatgtgctctccccacccctggctttcccctgtttgtttgtgctttattagactcttcaggtttgttttctgtatttgtgctttacacgtgtatgcatgtgtgtgtgcacgttgagtgtnnnnnnnnnnnnnnnnnnnnnnnnnnnnnnnnnnnnnnnnn

SEQ ID NO: 792685 - DNA, 475 bp, Homo sapiens
tccattctccccgtcactttcaggtacaccagtcagatgtagatttggtcttttcacatagtcccatatttcttggaggctttgttcgtttctttttattcttttttctctaaacttctcttctcacttcatttcattcatttcgtcttccatcactgataccctttcttccagttgatygcatcagctactgaggcttctgcatttgtcaggtagctctcgtgccttggttttcagctccatctggtcctttaaggacttctctgcaatggttattctagttatccatttgtctaattttttttcaaagcttttaacttctttgctgttggttcaaatttcctcctgtagctcggagtagtttgatcatctgaagccttcttctctcaactcgtcaaagtcattctctgtccagctttgttccattgctggtgaggagctgcgttcctttggaggaggagaggcgctctgcttt

SEQ ID NO: 792686 - DNA, 548 bp, Homo sapiens
tgcaaaaatgttctcaactctaagcaaaagctccataggcaaagtcagcatacgatctttcaaatgcaaacagtgtgactctgtaggagtctaactcaggaatttgagaaaaggactttgtgagagtggtaagtttgtggcatttattactgtttttaaatctgacccaaaaaagttactaaaactcccataaaattactgtatttaactctcagataagacttctgacatacgaagttcatttaatttaccaaaatttctcatagactaaatacatatcattagctatactgcaaaagaaatrtcaaaagcttggagcaagttgttcaggggcaccctatgttagtgccaagttggacatacaacttctaggcttctaatccaaagttgatagtactgggagtatccctatagtaaaatattgataacacacagacttttcctgatagattgaatttatttcctgttatctcaaaaagcactggaatttgatgtgttggaatttgaataaaatgaaaatttaagaaaagttctgcagatgttgcata

SEQ ID NO: 792687 - DNA, 545 bp, Homo sapiens
ggacatacaacttctaggcttctaatccaaagttgatagtactgggagtayccctatagtaaaatattgataacacacagacttttcctgatagattgaatttatttcctgttatctcaaaaagcactggaatttgatgtgttggaatttgaataaaatgaaaatttaagaaaagttctgcagatgttgcataattatcatcttgtcaaagaagtctgatgaaaataaaaccaaatttatttcctttatcttcatcaaattttgcaaagacttaaccagctgctctctaaactacaagaacctgacaaatttcagtggaagtgggtcctgcaccctgaacatgattcaaaaggactctaaactaagacaacatcagcatcaggattttattgccttctatttataatgatcatgctgcaaagtaagtgattctacctccccctcgcaaatgtttcttttcatttgctctcaatttattttattaaattatcatgaaactatatcctgtattgcaaaatgaaatttcattacacaatgggtttaca

SEQ ID NO: 792688 - DNA, 783 bp, Homo sapiens
gacagcccgggtttagaggattaaatgagatgatgtatggggaactgaccagcacatggtaggtgttcagtagatggtgtctattgttgttactgaagcctagagttgcttctgatgaaatccaatttctaacgtaatctttcatgcgtatccactgccaggtataatggaaggatgcagagaaagatcttggtcagggaagagaaaaaatggaggagggatgagatgaagacacctcgtacttctgtaggcctttcatgggctgggctgccactcaggagcaccttcactctcctccattcaatgctcctgaccgtcttccttcagggcaggcactgttacttacccctgtgcacagatagaaaaccggggctctgagagttgaagccatgggaaggcagggagccttgagttcccacccagccactgctggtctcattctgaggtatggatcctcatcccctcttggggcctcagtttccccaaaggggttaagtaaatgagagtgaggttggtttggattactggatctgtctctgaaattttaggattattcaaacaggggacatttggctggccctcaycttgcaaaattcacccaaagctgatttgtaaataggtaaatagatgagagcgagagtgagagagagagagaaagtgagagagagggagcgcacatgcactcgtttttcgattcacagttgggggtcgcggctgccatgtagtttgtaatatttgtgtccacagcaggttgggacaccctcttccagtcttgaggtgcct

SEQ ID NO: 792689 - DNA, 598 bp, Homo sapiens
agcaagcactggacggcggaggcctttcctgttctttgctacatccttcagctgaaatggttttgtggatgcttcattgcatgcaaagataagtggtttcatggaattcaatattgtgaggagatacttggtatctataaggcatttaagttttcatcttacatratttcagaaaggatttgaggtggctaagtgtgggtttattttaagattatacatcagacaagaccttttcttctttgagtcttaaagactcttaggataaggataagagaactctggcccaggtggcaggtggtaaagcccaagaactgcttctccttcaagtaacatgggctgaaaattcgaggtctgtaaccagttgagctgagttcctgggttgttagggcggctggcattggaaaccgactcctccctcctgcaggacattcctgggcccaggagagcctgtgggtggggctgggccacgtggggaactggcagcagtaccaaccttgggttctcgtgttctgtaccgaagctacctctccgtagctggagctcttgggcccagcagtcaggggtccaggctttggccgagggcagaaccttgcctttt

SEQ ID NO: 792690 - DNA, 555 bp, Homo sapiens
tggagctgcacaacctctaccgggcccaggtatccccgacggcctcagacatgctgcacatggtaagtgtggccacggcccttgctggctgggatggaaggggtgctggccagggtctgtcaccaggctctcttaccctgctcctcatgctgaagctatttcagaattcctctcctttttctggtcagtgacagagtccccgagtccctgacatggtattacattactttaaatggcaaaaaccacaattacttttgcacccgcctaataaaattcacaggcccctataagcagcctcataatacagataaggaaagtgaggctcagagggatttgttggggtcacacagctggtagagccagmcccaaagccctggcttcccactccaatgagctttccccagcacttcctcaaatgcatgtgccctcagtgggggaacccgggaagttcttaacacctttgtgaaaacggtctttcacatgcctgccaaggagaggacaagaggaagcagggcagcaggatgggcgtgggcacgtggagtaggaggcaggtgc

SEQ ID NO: 792691 - DNA, 525 bp, Homo sapiens
acaaaaacaaggccgggcacggtgactcacgcctgtaatcccagcactttgggaggccgaggtgggtggatcacgaggtcagaagttcaagaccagcctgaccaatatggtgaaaccctgtctctactaaaaatgcaaaaattagccgggtgtggaggcactcacctgcaatcccagctactcgggaggctggggcaggagaatcgcttgaacctgggaggcrgaggttgcagtgagtggaggttgcgccactgtacaacagcctgggcgacagagagagactccgtctcaaaaaaacaaaaacaaaaacaaaaacaaaacaaaaactctgtatgcttacctgttcccttaccccttattccccaaagtggggtccaacaggacctggaagcttattagggaggcagaatgtcagacccagagcaggtgaattaggatcattactgtaagacgtttatgtgcacattggagtgtgagaagcccgcaataaataatgttaaatgaatgaaattgggcattctaata

SEQ ID NO: 792692 - DNA, 548 bp, Homo sapiens
cgtggctcagcttagctcagccacagtacccggcaggtttggatcccaacacagattaggtgtgtgcaggcaagaagtagctgagagtgtcaaccaggaggatcttgatggctgccccagtgagtttgagatgacttcagtgcaataatggtgctggctttagagagttgtgtgttgagttggaagcaaaggtaggcatctacctggtgatatcctgaaggtgttggacatatccactgggtagaagggcaggaaraggtaccagtgggacctccaggataaattctgaattgggtgggaggtgtgtgtgaatcaggagaccagaaggccgaggctgagtctcaggtgatgcctgcaggtacaggcagaaagcctggcagactgtgaggggcccaagtcagagtggtaggggacaggggaggcagagccttggatgatgagggaaggttgttttgggggtgtagacatcttggcctctttttcctggagggaagcagctctgatggtgcctgtgccatcttcagggttagggtattggaggcctcttg

SEQ ID NO: 792693 - DNA, 482 bp, Homo sapiens
ttcagcagttgaaattgcaggacattacatgacacttgtgaaaaatctctattttgtgaaaagttaggtgtaaaatataatcttccagaactgtttgatagatatctctgtacatatatgcgcataagactttgaaattcctcattcaaatattcagttcattatgagaaaaaaaagttaatcatttttctacatgagagcatgatgagatgtatgtagatacaattctgtatttatcaaaacaaaatatcatatcggtctaaactctaagttgcatttaaagagagtaaattcaaaccttctcaaagggaaaayggaaaataacagctcacatgattcaaaagtccaggggtatgtatctggctcagctcactaaaggtgctcattggatatctctctctcatgctttctttttgaaatgtcttccaggacttacagagttttctttgttcggtgttttatagtaagttataattgtttac

SEQ ID NO: 792694 - DNA, 619 bp, Homo sapiens
accacgaagccaagttggctggtgtcccacacaagatgttgtactgtttaaggggctttaggaagtataagtgagaatgggagtttgggagtctgagaggtgggatggaagacttaaacaggaagtggatctctcatgtgtctgcatattgcagtggacaagctctgcagagtcccttgaagaattcacaacttctctgaaaaggtcagcatttgaaatcttgcctcaagaggccaccaagggccatcaatattggtcaatgaggcagtgaaaaattcggattagtcaattaaaaataaaatccaattatttcacgctgttgcttaaaatgctactgctaccatgactttctgtttcttttagcaacactcaaattccagactaggcaggcaacactgggtcacaagaagccctactgatttgtatatacagcctcagcgctctgccctccagccagattgggcttytaattcccaattacagtacatttttttttaagctcattgggatttgtcatacttttctactatctggattgccctttcttgaaccttttcctggcttgttctcccaggatttagcttagatgggacattctgagatgatttatgggatactg

SEQ ID NO: 792695 - DNA, 636 bp, Homo sapiens
tatctttagaggacatagatgagaactagattctgagtggaagagtcatgctggaaataatttccattttcaggtggacaagtcacttccattagcgggtacatgagtttgaatgatggtcataaactgagagcaagcaaaaacctgaccttgatcagacaaagacaagttagaaaccagacatgcaggcacttattagtggggccctgtaaagagcttggatttttggaataggacagcagtacttctagtaaataactgtaaatttatctgtagtgtcatcagaattttaaaatattttagattgtggatagattttgttaactgtcttgttaacaaaaagattaaactaaaagtttttttcttttactacatataaaatggagaaaagaakgtatgcctacatttgaaccaaaatattgtagaagagagcaattgcagcttgagaaaatctagattcaagatgtttgagatgacatgctgcagaggagggcacgcaggacagagatctacagccagacagcagagagccagctaagaatgcaactgtgagccaggacacgtttgtggaacatgttaacacttcctggggatgtctatagtcattgttaaagaagactgtgataatttactaaa

SEQ ID NO: 792696 - DNA, 609 bp, Homo sapiens
tttccagaaagataatcatgaggaaacaataaatccaaaatatggtacgttattttttcactgttcatacaaatcactttttaatgcaaataaacctagaatgaacttctggaaattcctttcttgttctggtctccctttgttgggctctctgttcaaatgtttttgtttttcttctttccctcctgccagagactgattcccaccatggaaaagtcctctaagaagtgagcatgacttcaggctccactcaggagggagagtggaacctccttgaccacatcattacagaggcggcttggatctgtcggattcctccgaggcatcacctgtcacattcccctctggaggaaaataactgtagtgaaaactgggccaggcgcggtggctcacgcctgtaatcccagcactttcagaggccgaggtgggcagatcacgaggtcaggagatcgaggccatccyggctaacacggtgaaaccccgtctctactaaaaaaatacaaaaaattagccaggtgtggtggcgggcacctgtaattccagctactcgggaggctgaggcaggtgaatggtgtgaacacaggaggcggaggttgcagtgagccgaga

SEQ ID NO: 792697 - DNA, 551 bp, Homo sapiens
aataaataaatggcttaaatttaaaataaccacagatctcatgcataactgataaagagtatcatgagtatataaaaatctcttgtaaattaatattaaggggacaaacaacccaactaaaaaaaatggacaaaggtaaaaacaaacacttttttgtyactgaatatttgaataaatgttcaacctcatgtgtaattaagaaaatgcaatcaagaatattatgagatataattttatattaatttgaatggaaaaattatgaactctaatattctaagggatggattagatatagattggtggcatttgttcaggtttgttacctgaataaagatagagtcactttggggaacaactggagtatctaaatttaactattcatataccccaagcttcaacatttttcttctaggtatatagcaaagagaaattcttacaaatgcctttgaggaaatatgcatatcagtggtcgaggcaataatattcaccattaaaaacacctggacacaaataaagtgcccttggctaaataaattgtgcaccttctatta

SEQ ID NO: 792698 - DNA, 551 bp, Homo sapiens
aataaataaatggcttaaatttaaaataaccacagatctcatgcataactgataaagagtatcatgagtatataaaaatctcttgtaaattaatattaaggggacaaacaacccaactaaaaaaaatggacaaaggtaaaaacaaacacttttttgtcactgaatatttgaataaatgttcaacctcatgtgtaattaagaaaatgcaatcargaatattatgagatataattttatattaatttgaatggaaaaattatgaactctaatattctaagggatggattagatatagattggtggcatttgttcaggtttgttacctgaataaagatagagtcactttggggaacaactggagtatctaaatttaactattcatataccccaagcttcaacatttttcttctaggtatatagcaaagagaaattcttacaaatgcctttgaggaaatatgcatatcagtggtcgaggcaataatattcaccattaaaaacacctggacacaaataaagtgcccttggctaaataaattgtgcaccttctatta

SEQ ID NO: 792699 - DNA, 567 bp, Homo sapiens
cagagtgcacaatctttataaattactagttcactccttccttttggcaggggaaggttaaaaaatgtttgatattatggttttgcttcatgttatgggtgattgcattggaataaaaaattaaagtacttcttatcaaaattataactagacaaggtaaaagtatcaagaaacatgaaatatttgaaaatacttctctggaatgaaccatatmagaaaaatctttacacgggcagagaaggctagataaactaaacgtcatttctcaagattgatacaaatgagactagcattttaatttgcacaggaagagagggatggggaaatgaaaacggatgcaatatgaaagcaattccttgacatgcttcaattggattcttgtcccttctccctaacaaagagaaaaccacatatttaaaacagacaccctctcagaaatgataatcatattgcaatctgggttgcctcatgatgatctgctggtttccagtgagccctgttcttaatatgatggtacccttctccgatatatatcttgctgagaaataaaagaaggagtcatctgtt

SEQ ID NO: 792700 - DNA, 567 bp, Homo sapiens
cagagtgcacaatctttataaattactagttcactccttccttttggcaggggaaggttaaaaaatgtttgatattatggttttgcttcatgttatgggtgattgcattggaataaaaaattaaagtacttcttatcaaaattataactagacaaggtaaaagtatcaagaaacatgaaatatttgaaaatacttctctggaatgaaccatataagaaaaatctttacacgggcagagaaggctagataaactaaacgtcatttctcaagattgatacaaatgagactagcattttaatttgcacaggaagagagggatggggaaatgaaaayggatgcaatatgaaagcaattccttgacatgcttcaattggattcttgtcccttctccctaacaaagagaaaaccacatatttaaaacagacaccctctcagaaatgataatcatattgcaatctgggttgcctcatgatgatctgctggtttccagtgagccctgttcttaatatgatggtacccttctccgatatatatcttgctgagaaataaaagaaggagtcatctgtt

SEQ ID NO: 792701 - DNA, 579 bp, Homo sapiens
ccaaggaaggaggacagaggatcccagaaagaaagggaatggttacagctggaagagaggaaaaagctttaccatttatccagtctcggtgaaataactatttcatggaagcgactgtggatcttgctgtttatagggttggaagcatatatttaatcagagctatcagagctgcatatggttaagctgacatacatatgtgggctgtgtgtgtgtgtgtgtgtgtgtgtgtgtgtgtgtttatatgtaaacctgtgatttatttcaaaatgaaatgattcctagttaaaaacaacttgattgtgtagtgcaatacttcctattagaagacttgttaaattagtatttgctaagaagtacttcttagcaattccgagaaacataatcttgggtaaaattttcaggcrcctccatcctgttcacatgtcttttcgtaacagtacctgaaaggttttttcaacttaagattttataatagcaacaaaaaaattagctaagaattactgaacccactctatggaatgaaatctggtgcttagtaaacattgaacttagcatcaagcaacaactagaatttat

SEQ ID NO: 792702 - DNA, 644 bp, Homo sapiens
tcatgaaaagctggtgttttttgaagaaatgggtgaaactgttatgcgcattttctggaattatagcaaagtataagaaaaaaattatgtctatatatctcagggagaaatgatgacttggtataactagcttaagagaagaagcaagtttttcttcattctttatatttacatcctcatataaaggaaactaaatatgtgataaattgtgaccttaaaaataaagcctccaacactttgaagacgtcagatatcaagccatcccttataattaccttcaatgaaagccaattagatcagcttttaattataattttgaaaatccaacactaggaaggatcagaggaatattgcccaggcatacacaattttgggactcatactaataacagaaacagtgtataatcctaatcccactgtgaaccagtgtgatgcattaatgcatttttttwatttaggggcctagcattacaaagtttaaaggctgcataactaaaatttaaagaaaaactttctaacttatccataattagagaattcaggcacaagcaatatagcacacaaagaagcactctttcaaaaaatttatttctattgatggaaatatttgaaatcagcaacaaaaaattaacatggcaaatagc

SEQ ID NO: 792703 - DNA, 646 bp, Homo sapiens
ccggcatgcaccatatcaggatatgcaccatatctttaccaagcaattccattttcccactaacctcagattggtgttttctacaaatactgctgaatcctcatacttccgcccctatcaaacatgtattcctacatcyttttccctaacttatcagtctcctgttatcctcaaatttcaacttgccataacatgttataaatgtatgagtaaagccttctaaacttctaaatttccccaagaaggtggtgaatagattggtctaataaagccaacattgctatttagataagtttattttgccacctttatagggtgggcccatcttcttagaattgccctctactctatccctctggcatagaaacacatccaaggattatagcctgcacacagtaggcccactcacaaagttcttgatttgagaaagcagtatgatttcctctcaatttttctcctctgtttccagggagccaatatctgcagatcatttcttccaaatatcaatcattcaaataatctcaaataattatttcattaactattccctggggtaagaagagttggggatgttctggtcgagaagggggatcatctgctttactggcttccagaagaaaacaaaaagaacaaagaatttgccaat

SEQ ID NO: 792704 - DNA, 616 bp, Homo sapiens
ataaatgaccacatgaaagggcataagggtagagactgaaactttggacaaaacattgctatgccctaaattattatctcatgtatatggaattcaaactcttattccagggctaataagatacatgttttagcagttcttccaaatcaaataataggtagcatgtgcatccaaaatttcytgaatggcaaatgctatcatttgtttgttgaattcttataccttcctaccatattttattatatgctattcaatatttcttgaacatccactcagcaatgagctaagtaattgcaactatgcaatatgcagtgcaaatgtattgttgtttggttgtaaagcagaacttaaaaattacatatggtcaaattaccattatgtgaaaattcctaacatcactgtcaaattaccattaaactactaggatctgagttcttggaagcttagaagcaaaaaaaataatcatttcttttgtttctgttagcatctcaactgtggctttcccttccctggggcaatggaagccaaggtttagcttcagagggaacacaatgtgtaaactgaatttaccatgtgctaaattataattaatatacatataaatttgtaatataca

SEQ ID NO: 792705 - DNA, 631 bp, Homo sapiens
gtttgctctggggttgagcgtattgagcatctttagagattttgaagatcctcccctttaacgggtggagaatcttaggaagaaacattctctacgtaaggaaaattggcagaaacctggatgactttccagttttctataaatcagatgtgcctggatttgataacgtggataaattaactaggtgcagttccagggaayggaaatatttcactgggtttagtttggtcagagatttgagaggagcaaattgcctaaccaggaggttcttatgtagcaattttgccatcagtgatagaaggctactgtgtgctcaggccacagctaggggcttggatgcattgtctcatctatcctcacaaaccatgggagatacatgaggagaccaaggctcagagatatttagccacttgcccaaggacacggagagtatttgaaacagagccatgtttccactgaggtccctagctcacagccctggcctgtcaccactgggccacattgccatgtcagcgtactctccctgccagatcgtctggagcacatttccatacagcagattcatgtgaattcctgtacttttttcctcttcccacctcccgccccaacaacaggagtttggcccagaatg

SEQ ID NO: 792706 - DNA, 589 bp, Homo sapiens; identical to SEQ ID NO: 744358

SEQ ID NO: 792707 - DNA, 609 bp, Homo sapiens
tcatgacttccaagtctcttccttcttcctcttatttctcccagttggcaatttcctttgatcatctggcaagttgatggaaaggtttacctggagatgctctcttatgtgcagggctgagctactcactgggaagtccaagagaaaattagaataaagcacctgctctgggcacacgaagccctgcggtgcacaacttggccagcctccggggatgcctgccccactcacctcctctgggagcccttgccatcttcctgctgacaagtgacactgtagcttccttccagactgggagatctagcctggtgtccccatgccctagtcataaaaacagcctgaggaggagggggcgctgtacaagggaggttaatctatgcaggggccctagggatggatttatcccaaaacagattttcctgctgagtgggaggtcctcttcccagaccsggggatgaagtgctaactcccatcaaggcaagctggttcattttttcccttaccctctttctgccccactctccagctttattaaggcgtacttgacaaataaaaattgtgtctatttatagtatgcaaggtgatattttaatatatgtatatgttgtg

SEQ ID NO: 792708 - DNA, 578 bp, Homo sapiens
accatgccagttgatgtacttggcatccccacatctgctctcagagcatggggcaccagctctcctggggagcccggttacaaagcagagggcgggatagaaggtgtcagctttagtgcacactggctctgtgggctgggggaagcaggaactaactgaggcacaaataggtctgctctctcctttgggtgggtkccttcattgctacatcagccctgctcaaccttgagcgggctttccaatttttgtgcaatgatacactgttttctgaataagaaagagagtcaattctcaactaactatactatttcatggatcaatcacagcaatgtttgtttgctaaactaattcctgaattaactaattgctgaattttaaaaataattacatttttacatatgaaagtgtacagcatatccttgagccagcaggctgcctggttgcttctgccactcccttcaaaagcaagatcggtgtttgggacttcccttccccatgtctgtgctctgctgttggcaggaggatgagggacaatgcttactggtgtttgtcagattttataaacagttttgatccag

SEQ ID NO: 792709 - DNA, 621 bp, Homo sapiens
acacagcctttgaaagaaggggacctttgggacacaataaggaagggcctgcaaagccacagctaagagaccctctgagagtgaaactgaaatctacgcccagtggaatatgatgggaaacacagtcagggtgaaatccagccccaatgtcgaggtaatggttccaggttggtgtcagacttctgcagaggccccacccaccactctaggtatgtctggagaagagggggtgctacagagaggctcaggggcagacctgcctaccaggccttacagtcccacccgagggcaggcaaccagcagcagccaccccttcctgggagtttccccaaatctagcccagatggcagaggaaaggccccgtgcggagttgaggaagcttgtagacaaggacctggtctttaacatacagttgacccttgaccaacatgactttgaactacatgggtccaactatacacaggttttyttctgcccctgccatccatgagacagcaagaccaacccctcctctttctcctcctcttcagcctcctcaatgtgaagatgatgaggatgaagacctttgtgatgatccacttacatttaatgaacagtaaatatattttttcttccttatga

SEQ ID NO: 792710 - DNA, 621 bp, Homo sapiens
acacagcctttgaaagaaggggacctttgggacacaataaggaagggcctgcaaagccacagctaagagaccctctgagagtgaaactgaaatctacgcccagtggaatatgatgggaaacacagtcagggtgaaatccagccccaatgtcgaggtaatggttccaggttggtgtcagacttctgcagaggccccacccaccactctaggtatgtctggagaagagggggtgctacagagaggctcaggggcagacctgcctaccaggccttacagtcccacccgagggcaggcaaccagcagcagccaccccttcctgggagtttccccaaatctagcccagatggcagaggaaaggccccgtgcggagttgaggaagcttgtagacaaggacctggtctttaacatacagttgacccttgaccaacatgactttgaactacatgggtccaactatacacaggttttcttytgcccctgccatccatgagacagcaagaccaacccctcctctttctcctcctcttcagcctcctcaatgtgaagatgatgaggatgaagacctttgtgatgatccacttacatttaatgaacagtaaatatattttttcttccttatga

SEQ ID NO: 792711 - DNA, 373 bp, Homo sapiens
cgcacaaaggacacccacttcatgggctcattgtggtgctaacagataataggacccagtgaagtgcataccatgcagtaagcatccaacatgtaagtggtgggtgttaaaattattcaactgatcagttagtctactggtttcaaggctggtcttggggaawccccttctgagaagcagggaaggggcagtggacctaatggtctctcaagtccctttcaagctcacactctgtgacctacatgagctgttgccctcctgtcactcctccttctagccctaggctgtggccctccagaaggccagggtcactctgcctctggttgcccagcaaacagaaagtcctctgtcagaacggaccagccaagtgggc

SEQ ID NO: 792712 - DNA, 531 bp, Homo sapiens
atgaagcagatgtatgtgtgcggacatatttgcatataaatatccatctcccctcctctctgctatccataatgtgttcttccttccaggcccacctctggaccgtccacctccagggaaattgtcccgacaatttcaagccccagtaatctctcccctctggaactccatttgaactgcagtttggacacaggatcgacctcttaatatacactgtccgggaaaggaaccggaaaaaaccttgaggtcactgactgctctgtgctggcttatttctgtgtctttgctcttgctgttcatgccacctggaatgtccttgcccactcccttcccctgagtgattcttattatcccccaagtctccacgtagacagtgatttctttgcagtgcttttmtcaattccttgcctccttccagttttctcatgctcggttacggatgcttcttttatgctcaaatagatccatcacgattaattacactaagttgtaattgccgcttcagaacgaccacccatctccagactacgg

SEQ ID NO: 792713 - DNA, 618 bp, Homo sapiens
ttgttatgattaccttcaaacgcacaatattcaactttcccttgttgcttcgaaggaaaaatcttgaatacgtgagataggtgcagaaaggggaaatggaagggctgggatgggagaaaccttaccatttaaaaaatgattaaaggactctggaacttctggcacaaataagaagctcaaaagatatgattttctaaattcacttctcagaagagagtcctgggacagaacattttctgcaggactccagagaacaggtgcagggggaaaataaaagttatggagsagagtttgtgtttcataagaaaacataggcagagctttaaagctgttcaacataagaaaaggctgtcatgtgagatagagagtcccccagcgtaggagcattcaagtgggcattgcatgcgtaaatatatcaggacataagggaatgaaaaatatgatgtgtgtttaataatttgcagagagaaaactggagtttgaggttatagaggtggcagtggccagaagagatgaggaatatgcagaactgagtgggagaggctaaaactgtagcttacagactgagcacagaaaactgtgttttgcattttttttttctgcaggaattggggacca

SEQ ID NO: 792714 - DNA, 530 bp, Homo sapiens
gagcacttgccaagtgctaggaactgtgctaagcatttcacacatattatttaatttaatcttcataactaccatgtgaggaatacattatcacctccatgtaacagataaagaaacttcaaaccagagaagagactgaacttgccttgtgtcatgttgcaaactggtgrcaaactgcagtgctaacagaggtctctgtgattctaaacattatgtcctaatcctttcactttatttatttctatttcaaggctcaatgtgaggtcctactttagggcagtgtgagagtgttggctctatagtgaaacaaacagactacagtgaggaactgattgtctcttttctactttgtaacccagcaaatttgaggcaactttcaaaaatatctacaatgaaatgtaaaactacaaatacaggcaaaacagaagatctagaccaaactaaaaagtactggaatctagatatgcaatgtctagcattaaaaagttattaaatataaacagtaaaatcagcattgagcatcttttctg

SEQ ID NO: 792715 - DNA, 530 bp, Homo sapiens
gagcacttgccaagtgctaggaactgtgctaagcatttcacacatattatttaatttaatcttcataactaccatgtgaggaatacattatcacctccatgtaacagataaagaaacttcaaaccagagaagagactgaacttgccttgtgtcatgttgcaaactggtgacaaactgcagtgctaacagaggtctctgtgattctaaacattatgtcctaatcctttcactttatttatttctatttcaaggctcaatgtgaggtcctactttagggcagtgtgagagtgttggctcyatagtgaaacaaacagactacagtgaggaactgattgtctcttttctactttgtaacccagcaaatttgaggcaactttcaaaaatatctacaatgaaatgtaaaactacaaatacaggcaaaacagaagatctagaccaaactaaaaagtactggaatctagatatgcaatgtctagcattaaaaagttattaaatataaacagtaaaatcagcattgagcatcttttctg

SEQ ID NO: 792716 - DNA, 530 bp, Homo sapiens
gagcacttgccaagtgctaggaactgtgctaagcatttcacacatattatttaatttaatcttcataactaccatgtgaggaatacattatcacctccatgtaacagataaagaaacttcaaaccagagaagagactgaacttgccttgtgtcatgttgcaaactggtgacaaactgcagtgctaacagaggtctctgtgattctaaacattatgtcctaatcctttcactttatttatttctatttcaaggctcaatgtgaggtcctactttagggcagtgtgagagtgttggctctatagtgaaacaaacagactacagtgaggaactgattgtctctwttctactttgtaacccagcaaatttgaggcaactttcaaaaatatctacaatgaaatgtaaaactacaaatacaggcaaaacagaagatctagaccaaactaaaaagtactggaatctagatatgcaatgtctagcattaaaaagttattaaatataaacagtaaaatcagcattgagcatcttttctg

SEQ ID NO: 792717 - DNA, 539 bp, Homo sapiens
tgtctagcattaaaaagttattaaatataaacagtaaaatcagcattgagcatcttttctgctgaagtgaaaaggaaaacataatttgttacttgcccagtatttatgaagaaaaagcatatccattctttagaggaagcaaaagcttatcatcccataagcttgagagttcactatgtgtcagtcacagagtgagtggctagaaatatggtgggaaacaaaacaagcatgatacctgcctcttggagcctgcagtctagtgggaagacggcccttaaaaacacagtcaaattttaactatacaaagaggtatcaagacaccagcattactcaacccagtctgggaggagtgatgaagatttcctagtgaaagtgatatttaactggggcagaaatgayattcaagcagaggtagaagaatgaatattagatagataaaaggtaaggacttagggaattgggcaaggagaatgtgactgacagaggaatgccatttgcaaatgcccagagctgtgtgatacggtttggctgtgtcccca

SEQ ID NO: 792718 - DNA, 529 bp, Homo sapiens
gaataagcaaataagaagccccacagactgagtattatcatactggctgcaatgataggctcttttttgtcatgttaggcatacatgataagcagaggagaaaatccataagaaggaaatcagttaaagatcaataattgacatatataaagattgtgcagttgataaagcatgtaatagccttggatcaagtttagccattttctgtcacacaaaattgtgattatacatctgattggtacagataatatggatagttgttagttggtagccaagataaatgactggtaaatatcaatttcagagatacgaaamattacacataagtgtcacagatactcttaatgtttatgaaaagtgcttacatgacagctagatatttgaaagttcttgttatcagaggtaaatgcttgtaacaggtgataggagcgagttttgtggaaaaaagtgaaaattatgtgctataagagttcacatccagagaaccgttgtggaccaagaaaatcaaagtaggtttctctgagaacac

SEQ ID NO: 792719 - DNA, 587 bp, Homo sapiens
acccaggctggagtgcagtgatatgatcttggctcattgcaacttctgcctcccaggttcaagtgattctcctgcctcagcttcccaagtagctgggcctacagatgtccatcaccacacccagctaatttttgtatttttagtagagtcggggttttgccatgttggccagacagggtttaaactcttgacctccagtgattcacctgccttgacctcccaaagtgctgggattagaggtgtgagccaccatgaccggccctctgccrtttacttttacacctaccacaacacaggagttgctttctataacctctgtgtccttcttgtcccactgtctctttctcagtgatgaactcttaatgtcctcacacataaccactgctctgtgtagctgaagaggccccagaggagcctgaggagagactcacattttggccatacgttgaacctagggtgaaatttgaagtgagagttttcagcagccatgttttcacagaacagctgaccctagcagggggtagtaggtttgaattttgctgttagtttctttattgctagattagggggaaaaaaaataaaacaaa

SEQ ID NO: 792720 - DNA, 612 bp, Homo sapiens
gttttcttccagcttttcctttcatatttattggtttagaattttcccaatcattttggatgcctggaaactattagttgatcctttactgctttttcaccttctaggtacaaaaaaactaatttgaagctttgagcaaattggaggggtttctcactgggctttattatcaaagtgaaggagtagggaatcactaatttcactaactgatcacagtaaccatatttgaaagtcctttttctagggccattcagatttattccatccycctgcctctgatctctgggcacaacttctctgtggtttacgagaactcaggagatggagtgatgttcaactccttcatacacagacattcaatcagccccccaatttttaccatcctcatatatctgttgttatatattgacttcttaggatgaattggtttgtttttcatcagtatctccctctgcagacacttattttgtggttctgcatctctttgttgaatcttccatcttcaattcctaaaactttttgaagtctcttatggagtgccttttcttcttcaatttttttggttcttgtagatttgtatgattttttatttctttactatcacttgagaga

SEQ ID NO: 792721 - DNA, 612 bp, Homo sapiens
gttttcttccagcttttcctttcatatttattggtttagaattttcccaatcattttggatgcctggaaactattagttgatcctttactgctttttcaccttctaggtacaaaaaaactaatttgaagctttgagcaaattggaggggtttctcactgggctttattatcaaagtgaaggagtagggaatcactaatttcactaactgatcacagtaaccatatttgaaagtcctttttctagggccattcagatttattccatccccctgcctctgatctctgggcacaacttctctgtggtttacgagaactcaggagatggagtgatgttcaactccttcatacayagacattcaatcagccccccaatttttaccatcctcatatatctgttgttatatattgacttcttaggatgaattggtttgtttttcatcagtatctccctctgcagacacttattttgtggttctgcatctctttgttgaatcttccatcttcaattcctaaaactttttgaagtctcttatggagtgccttttcttcttcaatttttttggttcttgtagatttgtatgattttttatttctttactatcacttgagaga

SEQ ID NO: 792722 - DNA, 612 bp, Homo sapiens
gttttcttccagcttttcctttcatatttattggtttagaattttcccaatcattttggatgcctggaaactattagttgatcctttactgctttttcaccttctaggtacaaaaaaactaatttgaagctttgagcaaattggaggggtttctcactgggctttattatcaaagtgaaggagtagggaatcactaatttcactaactgatcacagtaaccatatttgaaagtcctttttctagggccattcagatttattccatccccctgcctctgatctctgggcacaacttctctgtggtttacgagaactcaggagatggagtgatgttcaactccttcatacacagacattcaatcagccccccaatttttaccatcctcatatayctgttgttatatattgacttcttaggatgaattggtttgtttttcatcagtatctccctctgcagacacttattttgtggttctgcatctctttgttgaatcttccatcttcaattcctaaaactttttgaagtctcttatggagtgccttttcttcttcaatttttttggttcttgtagatttgtatgattttttatttctttactatcacttgagaga

SEQ ID NO: 792723 - DNA, 578 bp, Homo sapiens
ctgaaaagccctgggcaagtcagctctttaactgatctgaatctcctcatctgtacagtgggtcagggaaggttgggacaagaaatatgagggatcccttcaggacttacagtcatctctgctccttatctttatcttcttttaaaaaaaaataacaaataaatttaagaataagggagcccagaattttcttaaagcactgrttctcaactaccggggtgccacagaccccagtgagaagctgataaatttgatgtggtctttaggagcatgtacatatacaaggaaacattcagtttagaatttcagagttctcaggcatctgaagactcacaagaggattgccatagccatgaaggaatgttgaccttagagcttttgttctcctccaaggtgacctctggactttgtcttccgcaggggactgctgatgtgtgtttccttgggattttgaggcatcccagaacatagtgaaaaaaatgcaaagattttccttgcatgtaaaccttgtcattcaggtgaactaattttctctttgtaaatcaggacatttgcaaatgtttcattagctttggccc

SEQ ID NO: 792724 - DNA, 596 bp, Homo sapiens
aaaccatgcttcctgtacaggctacagaaccatgagccaattaagtttcttttctttataaattatctagccttaggtatttctttatagtaatgcaaaaaggacctaatacatttgttattgctatatctctggtgtttagaacagtttctggcacacagtaggtatttaacacatatgtattaaatggatgaatgctagcacatatttttttctatttaggaaataaggcaatttggcaattgcacagaatttcaaaacrcatagatacattaaaaccaggcagaggcagctgggaaaaggaagacaagcagacaagcttggagttcatctgttcagccaaaaggccagtgttgggagtggaagctcctcccaaccacctggcaccaatcagagcagcaagacttctttttcaaaggcagcaaattcatttgcaaatgaaaataaataaaactttattgaaatatgaaattgcaaatggaaatggctggttggggccctttgcagcaattatgcaaaaagctttcatttgcttgtttttatatgcaagtaaaaaagatacttatttttgtaatttatttacttagggacactta

SEQ ID NO: 792725 - DNA, 560 bp, Homo sapiens
cccccttttttctagttctaccaaattatactttacataaaattataatgcatttactcattttagtgcatattttcatgaggttttgaaaaataaatatactgtgatcggatatagaatatttttggtcacccccaaaagttctctgaggcccactcctcatcctacacaacacattgatctgctttctataactatagattagttttcctcttctcaaattcataaaaaytgaagtatacaaaaagtaatttttttgtgtctggctccgttcattgaatataatttcaagattcattcacattcttctaatgattagttgtttgtttctttttattagtaaatagtattccattgtgatgaatatatcacaattaatctactgacctgttgatgaacatttaggttgtttctaggttggggctactataaacagagccactatgaacattgtgcacaagtctttttgtgaatatatattttcatttttattagataaacacctagaagtagaattgttactaggtaataggttaagtgtatgtttcacttatctctaa

SEQ ID NO: 792726 - DNA, 560 bp, Homo sapiens
cccccttttttctagttctaccaaattatactttacataaaattataatgcatttactcattttagtgcatattttcatgaggttttgaaaaataaatatactgtgatcggatatagaatatttttggtcacccccaaaagttctctgaggcccactcctcatcctacacaacacattgatctgctttctataactatagattagttttcctcttctcaaattcataaaaactgaagtatacaaaaagtaatttttttgtgtctggctccgttcattgaatataatttcaagattcattcacattcttctaatgattagttgtttgtttctttttattagtaaatastattccattgtgatgaatatatcacaattaatctactgacctgttgatgaacatttaggttgtttctaggttggggctactataaacagagccactatgaacattgtgcacaagtctttttgtgaatatatattttcatttttattagataaacacctagaagtagaattgttactaggtaataggttaagtgtatgtttcacttatctctaa

SEQ ID NO: 792727 - DNA, 429 bp, Homo sapiens
aacccatcgctgtgattttacctgagtctgcaaataagattgtgtgactggtaaaaggataactattatcccatttcacagatggacaaacagagactcaagggagaaagtggcagaactagggctagaacacagagcttcttcctcttaatccattatttttttatttgcttttttctcccttgaattgaacagaaaggagacaatccaggatatagatcaaaacrttaaaggagtcaaaccaaattgtgttttagaagaatatttaatgacctggggaaatgtttacaatacaaaatgtagttagaaaataactatatgtgcacatgtgtattataattctgattatgtagacattttatatagacacatacacacgtcatatatcaaccaggaagtatctctggatataatgaatgactttggctt

SEQ ID NO: 792728 - DNA, 490 bp, Homo sapiens
gtactgggcataggaaagctcttgtgactaaaaggtggcatttttgccagatggcaagtttccctgggtgactattacccatgacacagggaactgagcttgtggcacagcccagccacaggcagacagagaggactgggctgaatggaagargaaggaaggaaatctcactttgggagaacaagggtgggctgaaatcctccataatgaggcagagtgtgatggcagctagaacccattgccctcaagcccctgggtaaccataattagctcaaggagcatttgaaatgaacattttagatgttgttggcaatggtgcaccccatacaaagggagtcaggcaaaaggcaggctcaagcccaaattatagtagaagaggccttcatgaagattttatgagcacccagtggaactacttttcatggtactattctacaaagaataggtttttccattgcatattttaaactagttgttattagtgtatata

SEQ ID NO: 792729 - DNA, 490 bp, Homo sapiens
gtactgggcataggaaagctcttgtgactaaaaggtggcatttttgccagatggcaagtttccctgggtgactattacccatgacacagggaactgagcttgtggcacagcccagccacaggcagacagagaggactgggctgaatggaagaggaaggaaggaaatctcactttgggagaacaagggtgggctgaaatcctccataatgaggcagagtgtgatggcagctagaacycattgccctcaagcccctgggtaaccataattagctcaaggagcatttgaaatgaacattttagatgttgttggcaatggtgcaccccatacaaagggagtcaggcaaaaggcaggctcaagcccaaattatagtagaagaggccttcatgaagattttatgagcacccagtggaactacttttcatggtactattctacaaagaataggtttttccattgcatattttaaactagttgttattagtgtatata

SEQ ID NO: 792730 - DNA, 627 bp, Homo sapiens
gtatatgcatgacagtcaaatttcctttttattaatgacagttgtcaaacttgacaggagaattgatccgtcaatgtgaaatagagaatgggaaagtttagtgtgtacaacaaagcaccctttctcagatatttgtcttgcagttagaattgcaaagaaaagtcctgatcaggaaaaaaccctgatcctataagatagattttttttaaaagaaggaattctgatccaaatataaggtaattcctagtaacgagcagatatggckgtaaagaacaggcaccgtgatctaaagaaagagaaagcaagtcaatactagcactccaaaacttctaaacatcacctgttagcgctttcctaccatgctgaataatgaccctcaaatccactgtgaatctttgcttacagactaaaatcttttggggaattgtgcttttcattacactggagcccattaaattatctagtaatttaattttgtataagcaaaacaaaacattttgtatcaaaatgtgtcacttgagccacttgtaactccatctagtcagaactctgtctttactaatatttttcactacattttcttgtaattttatttaccagacctttacactggagaaaagtaccaac

SEQ ID NO: 792731 - DNA, 625 bp, Homo sapiens
catgcttttcagaatgatctgaatgttgttctgtggttttaaaccaaccattgactagcacaaatggtcttttaaataataaatatctcacatattttacttgattcacattttcgaaatattggtttcaatgaatttttaaaacttttttttggtaactctttttctgtttgtttttgtacaaaaatggaacattcaacagagctcttgaatcctttctgccattacctcatttttctcaaacaagatagtaagaaattataatggtgttgacagtacctgggacattttcatattatttctcatcatgccttttattaattacaagtgaatgattctaggttatttgtatgaaatttcaatctatgcatcccattattatactttgtcactcttatttctaaataacttatgtttgataagagagctaaatttacttttacgtaatcaaagatataatgtatttmagtttcacatttgagcttctacattaacagtccattagtccttttattcttcctttctaacgttgtttaaagactacatggccatgaaatacatggagacaaaaacattatatttttatttcttcagtcacagctttaaaatttccatgttgaatttc

SEQ ID NO: 792732 - DNA, 639 bp, Homo sapiens
actactttaaatttgatatggatccaaaaaaagagcccgcatagccaagaaaatcctaagcaagaagaacaaagctggaggcatcacactacctgacttcaaagtatactacaagactacagtaaccaaaacagcayggtactagtaccaaaacagatgtatagaccaatggaacagaacagaggcctcagaaataacaccatacatctacaacaatctgatctttgacaaacctgacaaaaacaaacaatggggaaatgattccctatttaataaatggagttgggaaaactgcttagccatattcagaaaactgaaactggaccccttccttacactttatacaaaaattaactcaagatggattaaagacttcaatgtaagacttaaaaccgtaaaaaccctagaaggaaacctaggcaataccatttaggagataggcatgggcaaagacttcatgactaaaacaccaaaagaaattgcaaaaaaagccaaaattgtaaaatggggtctaataaaagagcttctgcacaacagaagagactatcatcagagtgaacagccaccctacagaatggaagaaaatttttgcaaaccttctggcaaagggctaatatccagaatctacaagaacttaaa

SEQ ID NO: 792733 - DNA, 625 bp, Homo sapiens
aaatatctattttcccctattcaatctaaatgacactatcatgctgctaactccctttatatctccaaccctcaactttctattaatctccgaaactgaaatttatctattaaatctgtccacaaaatcttactattacttcaaactctgtaagtccaaaacaaaacacaaaattgtcctttttgttctccaaacttaacttttctattctcttgtattactgagtcagtggatgatgttaccatccaccggattccaagtaagaaatytaaactgcagaaaggcagtgtggactatggaaaatacactactcacaagtggtttgatattgacacatcacttcctgtaactggagttcaattccttattattataaggttctgtatgtatctcacattttcatcattcattaaaacaccaattaatgatcactcagcgtgcacccaaaccatcaaagttaggtaaagttaaaataaatatgcatacacatatacaaattttaaaatgaaaaataatcctttttacaagtataggtgatgttgacatttgttttacattgttttacatgacactgtttacaatttttgtaatttgtcaccataatgggtagtttgaatcagattcc

SEQ ID NO: 792734 - DNA, 586 bp, Homo sapiens
agatgtgggttcttacatttttttatctgcccttaaagaatcactagctcttgaaaagcaagaattatgtttaattcatcttcatatgtgatcaagatacctcccacaggttttgcctttaggatgtgctttcaatatattagttgaagctgatattgagcagtacactgctgataaatagataatgaacaaatgactgactgaatgaatgactaaaaatataataataaatccgttttttctatggctgataacagtttcaatctccycagaatgcctggggttgaataaggatctgagtccaaaagttaaagaaataaagttctactgacaaacaccaaacgttcttgtcacagaagagtgatcatcacagaagaggtggtcctttgttcatttggtagtttgttttttgggaagggggagtaagggcactgagcctgaccatgcgtcattcatatgtgttctttctgatgattgagataggcaattttaataaatgaacacagaagtgcttgtagggttgaggaggtggaacaagatggccaaatagaagcctgcactaattgtcctccctgcaggaatacca

SEQ ID NO: 792735 - DNA, 536 bp, Homo sapiens
aatgcatcagagtctcttaacagcaaaattgattcagcagaaagaaaaaattagtgcgcttaaagacaggtatctgaaaatacaaagtcagaggagacaaaagaaaaaagaataaagcatgcctgtaagatctagaaaatagcctcaaaagaaccaatctaagagttattggccttaaagaggaggtagagagataggggtagaatgtttatgtaaagggataacaacagagaatgtcccaaacctatagaaggctaccaatatttaatattgatacactctatacaagagtgttacagaacactaagcagatttaacccaaaaaaacactatcttatggtatttaataatcaaactcccaaaagtcaagaatgaaaaagaatcctaaaagcagcaagagaaaagaaacaaataacatacaatagagctccaatatgtcttgtctctcagcagacttttcagtggaaagcttacagaccaggmaagagtggcatgacgtaaagtggtgaagaaaaaaaaagaacttttaccctaga

SEQ ID NO: 792736 - DNA, 602 bp, Homo sapiens
ccatccagggattatgtgggcttggggaggtgccaaggtatagaggttagcatggaatcatttttctccataatggctcttgaatgtgactctgacagagttgtgtgtctctattattcttaattacctgtttcctactatagttctaagcttttcattttcctttgccttcccataaacaaggagtttctgtggggtaggacactaagaagagtgaaagaaaaagaaactctttggatgatagataccctgaagaaagtgctgttctaacatagttagagcagccccctgagggccttgggttttgcatcttaacctgggacacttgtcacctgttarggcggttgctgtgagtgacaataaaaatagaaagtactgtagtaagctatagtcaagtggctttggtcactgaagctccctcccccagactttgccagcccttggcagtggtcagggctaacagcagatcttccctgacagtcactggtccagtctcggaaggcaggaatcacttctgcaatggctacacgcacttctcttaaggacgaagagctggtaagtgtcccaagtgctttcgtaagtccactggcctcaggactggt

SEQ ID NO: 792737 - DNA, 612 bp, Homo sapiens
tgatgatttccttgagccactcagaaaatcatttagccagtttttgctcacttcccctgagacttgttcaaaggaaagtttgtcagaacctgtgaaaattcgccaggtggaggaagatggtttagaaaggggctctaagaaagatggtcrttccttttcctttagtggaaaactaaatcttccattttttagaagtcttggtcattctgaaaagcaacaggagttaaaagagaaaggaagcatttttcctttgtttaaattttctttcactgacagcaaggttactgttaatgaccagagtttacgtggctcagcagtaaccactgatgaggagagcaaaaaaaattgccatgaagataccaaacatagttcaataaaatctagttctgttccaaatattcatagtgatctaggaaaatttgacagtacagaggaatttaaaaagaatgaccagataaattgtcctgaagatgccaaacttaattcaataaaatctagttcagttccaaatattcatgatgatctagagaagtttgacagtataaaggaatttaataagaatgaccaagtaaattgtcctgaagatgccaaacttagttcaataaaatctgg

SEQ ID NO: 792738 - DNA, 553 bp, Homo sapiens
ttttatattacagatgtagaacaatggttatgtttcccgacatgaacattgtcctggaatgaagtgtgatcagccacttgtggaattctttgaagagctcagaggcttccaagtgatctgctcctgaacaagtttgaagacctattgtttcatagacccaagaccaaacgcatctaaaggatccccagcccccaggacctagcctttgtctgcgattttggcttcatctcccacaaaacccctttatgagttcacgctctttcctggrctgacatacctattcctttccatttgttggactcctattcatgcttcaaagtccagctttcttaagcccttctttaggaagccttcccacacagccaaccctgctgctctctgcctcctttaaattcttgatacagctgctgcttgttctgatgttttatggtattgattctgttttcctgtgtatatgccagtttttctagctagactgtaaactccttaaggacagagactacaccttgtactttttgtgcatgacctggacctgctaaggaaaaaaaaatct

SEQ ID NO: 792739 - DNA, 606 bp, Homo sapiens
cagaggagagaagaagcatctgaacgtggtgaggagtttggctatggacagtcagaaaggagttcatcctgggacggctgaactccaggggaagattatcttcccattgcatcccctttccagctccctatgccactgaaagccaccctgtcactcaataaaaactccgcattcatcacctttcaaactgttygtgtgacctgattctttctgaacactggacaagaatttgggacccactgggtgtgggaacctcaaaaggctgtcacactggccctttgcccttgttggcagggggcagctgctctatacgatgaggcaaaagggccactgagctggtaacatgccctctggggctcaggggttgcaggcaccccatcctggatggcagagctaaaagagaattgtaatatgctttgatgcagccatgaggcctatacagggcctgctcctgctggaaagaatggctgggggttccagcctttttttctctggttcctgcacccatctgctcatgtgctccctcctgtaagggatggagcatggtagccgagtaaacaagccacccccttcatgaggggtcccatgaaggggtcaagggaattg

SEQ ID NO: 792740 - DNA, 545 bp, Homo sapiens
gcagccaaaccatatcattctgcctctggcccctccaaatctcatgtcctcacatttcaaaaccaatcataccttcccaatagtccaccaaagacttacttcagtattaacccaaaagtccacagtacaaagtctcatctgagacaaggcaagtccctttgcctatgagcctataaaatcaaaagcaagctagttacttcctagatacaacgggggtacagatattgggtaaacacagctgttccaaatgggagaaattggccaaaacaaagcagttacagggcccatgcaagtctgaaatccagcagggcagtcaaattgtaaagctccgaagtgatctttgacttcaggtctcacatccaggtcacgctgatgcaaraggtgggttctgcccctgtggctttgcagggtacagcctgcagtggtcttgggcagctctgtccctgtggctttgcagggtacagcctccttcctggctgctttcatgggctggtgttgagtgtctgtggcttttccaggtgcatggtgcaagctatcagtggatc

SEQ ID NO: 792741 - DNA, 586 bp, Homo sapiens
tcagaggattttttcttctgacttaggcccggtttcctgacaaacagcatgtgatctgtctgacttccagcacacctcctgccaagcacagctatgtatttagtcccaagctctcacgtacagttagtctacctctcccatagtggagtccgtcatttgaggatgtgacttccgggagctgaaatcaatgtaatggagccactagcaacggaacattctgtgggacacactttcggaaataatttctaaaatagctcacatttattaacatcaactttataccaggtggcattcaaggtactctatatacataatctaattttcctaccatctctatgaggtaggtattatyatttctattttgcagattaggaaactgaggctacagggtcacagagccaatttgtggtgaagtctggatttaaacccaggtctgtctgagttcccagcctgaattactaatactgcattctttggttcaatttgttcaggccatggcaatgttccaagtagtatgtctccatgaaaagtttaggaagttagtgaatctataactggcacatgagctccaaaagaaaaaaaaaaa

SEQ ID NO: 792742 - DNA, 574 bp, Homo sapiens
catttgagtcaatggactaggagaagcagaatcacaccctcagtctggatgggcacaatctaatcagctgccagtgtggccagaagaaaagcaggcagaacgtggaaagaccagactggtttagtcttctggtctacatctttctcccatgctggatgttttctgcccttgaatattggactccaaagttcttcarctttgggattcaactggcttccttgctcctcagcttgcagagagcctattgtgcgacctcaccttgtgatcgtgtgagttaatacaccttaaaaaactcccctttatatatacatctatcctattttttctgtccctctagagaaccccaactaatacgcccgtagactggacatgtctaataggatacttgcatccagaatatgttaaaaaaattctgaaaaccctacattataaaaacaaacagccaacttaaaaaatgggcaaacatttgaacaaacactttattagaaaagatctataaaagacaaataaggataaagtaatatgctcaacaatcattagttttcaagagaatgcaatataagataacaatgag

SEQ ID NO: 792743 - DNA, 621 bp, Homo sapiens
tgtatattacaaatttatatgtatattaattataatttagcacatggtaaattcagtttacacattgtgttccctctgaagctaaaccttggcttccattgccccagggaagggaaagccacagttgagatgctaacagaaacaaaagaaatgattattttttttgcttctaagcttccaagaactcagatcctagtagtttaatggtaatttgacagtgatgttaggaattttcacataatggtaatttgaccatatgtaatttttaagttctgctttacaaccaaacaacaatacatttgcactgcatattgcatagttgcaattacttagctcattgctgagtggttgttcaagaaatattgaatagcatataataaaatatggtaggaaggtataagaattcaacaaacaaatgatagcatttgccattcargaaattttggatgcacatgctacctattatttgatttggaagaactgctaaaacatgtatcttattagccctggaataagagtttgaattccatatacatgagataataatttagggcatagcaatgttttgtccaaagtttcagtctctacccttatgccctttcatgtggtcatttatgaaac

SEQ ID NO: 792744 - DNA, 629 bp, Homo sapiens
gggcggattgcctgaggtcagaagtttgtgaccagtctggccaatgtggtgaaactctgtctctactgaaaatacaaaaaaaattagctgggcgtggtggcatgcctttgtaatcccagctactcgggaggctgagacacaggaattgcttgaaccaggttggtggaggttgcagtgagctgagattgcaccactgcactccagcctgggtgacagagtgagactgcatctcaaaaaaaaaaawtttttttttctttaataataaattaatcttaactttctgtcacttttttctattatctacttctaaatttttaaaagtttttgactcttgtaataacatttaacttaatatgcaaagacactgcacagacatacaaaaattgttctctttatattcttattctattatagtttttctattgttacaatttttaatttttatttctactttttaaattttttttaaaaactgagacacaaatgcacattagcctgggcctatacagggttagggtcatcactattaccatcttctacctgcacatcttactgaactggaagggcttcaagggcagtaacacacagggagctgtcatctcctgtgataataatgccttcttctggaa

SEQ ID NO: 792745 - DNA, 599 bp, Homo sapiens
atgatagtcacacaacaatgagatggcctaatgatgcatttctcaaattgggcggtagatgggaatcaatttcccctttgaatgacgtataaactttgcacctcctttcctcctcattgaactaatgttctgggcagttttttcatttatgggtccctgagtagtgaggtttctctgtagccattccatccccctagtagagggaatctgagaaagtgtggctacttcctcttctccrgatttcataagaaaaaagaagtcttgaaaggctttacataaaagttcacacattgtctcaaaagacatttgaccagggctacctggttccctttcatcatcaatggaacgtgccccactgacgcaggggtttctgtcctaatcaggagggcccaccatctgtcacctggctctgctctagctcaccctgtggtaacctggtatctggtctccatttccaaggagtcacatcaccgcactgtggaactgcaggccccagcacaatgagtcctgatgcagatctccaaatcaagggctgatgttcccactcagggagaacaggtcaccacaagaatggtgcagctcttagaagtctgtagctt

SEQ ID NO: 792746 - DNA, 598 bp, Homo sapiens
gtctctgagttccctcagtatttattgatcactatctctaccatctcggagagggggatgtggcaggactatagggtaatggtggggagagggtcagcaggaaaacatgtgagcaaagatctctgtgttacaaataagtctaaggaaaggtgctgtgccttgatgtgcacataggccaggtttatgtttgactttacacagacatctcggtgcattaaggagcagtattgccgycagcatgtctcccctccagccataaggcggttttctcctatcttagtaaatagaatgtacgatcgggttttacaccgagacattctatccccagggacgggcaggacacagatgccttcctcttatctcaactgcaaagaggccttcctctttcactaatcctcctcagcacagaccctttacaggtgtcgggctgggggatggtcaggtctttcccttcccacgaggccatatctcaggctatcacatggggagaaaccttggacaacacctggctttcctgggcagaggtccctgtggtcttctgcagtgtattgtgtccctgggtactcaaaattagagaatggcaatgacttttcccaag

SEQ ID NO: 792747 - DNA, 598 bp, Homo sapiens
gtctctgagttccctcagtatttattgatcactatctctaccatctcggagagggggatgtggcaggactatagggtaatggtggggagagggtcagcaggaaaacatgtgagcaaagatctctgtgttacaaataagtctaaggaaaggtgctgtgccttgatgtgcacataggccaggtttatgtttgactttacacagacatctcggtgcattaaggagcagtattgccgccagcatgtctcccctccagccataaggcggttttctcctatcttagtaaatagaatgtacgatcgggttttacaccgagacattctatccccagggacgggcaggacacagatgccttcctcttatctcaactgcaaagaggccttcctctttcactaatcctcctcagcacagaccctttacrggtgtcgggctgggggatggtcaggtctttcccttcccacgaggccatatctcaggctatcacatggggagaaaccttggacaacacctggctttcctgggcagaggtccctgtggtcttctgcagtgtattgtgtccctgggtactcaaaattagagaatggcaatgacttttcccaag

SEQ ID NO: 792748 - DNA, 634 bp, Homo sapiens
cctgactcaagcattttgccagaggctggggatcacatgcaccaccaggggacctgacgacaggcctgctgagcttgacttcacaatcccctaagagcctgaatatgctgtctggggacctggggatcacctagcccagtccaccaccactggcacctgagcactcctcttagtggcctgaggtcacgcccatccaacctaccactatcatcacagctggcactcacctgtatatgccacctgcagggctaggtactggcctgcctagcccattgcagccactgccaacatcagcacagattgcttgggagccagagggctgtctcattatgactactgccatcactcacaccacgcctgctgcccagggaactgagaacctgactacccacctggcccactgctactactaccagcacttgagcaagctgyctggaggcccaagaatcaacctacctggacccactagtatcagtaccagcatataccaccctggggcccaaggacaggcatgctcagcccaccactgccaccactaggttctgaggactggcccacgtggtatccccatctccagaaaaactttaccacagcctccactaacaaccataccctaagccactgagaaaattac

SEQ ID NO: 792749 - DNA, 721 bp, Homo sapiens
atgggagatattttgcaaactatttatgtgacaagggattaatatccagaatatacaaggaactcaaacagctgaacagtaaaataacaaacaatcccatcaaaaagtgggcaaaggtctacagtaaccaaaacagcatggtactggtacaaaaacagacacatagaccagtggaacagaatagataacccagaaataaagctgcacacctacagccacccaatctgcgacaaagttgacaaaaataagtaatggagaaaggactccctattcaatcaatggcgctgggatagctggtaagccacatgcagaagaatgaaactggattcccacctttcaccatataaaaaaaaaattcaagataaattaaagctgtaaatgtaaaacctcaaaactataagaatcctagaagaaaatctaggaaacaccattttggatactgaccttggggaagaatttataactaagtcctcaaaaacaattgccaacaaaaacaaaaattgacaggtaggacctaattaaagagcttctgaacagtaaaagaaattgtcaacagagtaaacagacaacctacagaatgggagraaatattcacaaactatgcatccaaaaaggcataatctaagatccagaatctataaggaacttaaagagttgaacaagtaaaaaccaaataaccccattaaaaagtgggcaaaggacacgaacagacacttctcaa

SEQ ID NO: 792750 - DNA, 633 bp, Homo sapiens
atgtatctacaatactgggtctgcctgtagcactccagaaagaaggataagggttgaggacccttcttgggctgctattggatctgtgctatgcttggactgtttgagtttgagctctttttgtctctaaggccagagccctgagtagaatgcaatgcaatttgcaactgtgtccccaaagctgactgtgcaaattctgcagtttgcacatttatgaggatggacctttgtgtctgtggctgtgatttcagtgaggcccttgttttgctactgccaagtcagtctgttmctgctggacaacaggcagcacacacaaggctaccagccaacctggacctgaaaaccactaaggccacagggtccagtataggccaagtgacccaaacacaactcccttcccccctagaccttgaaaggagagagtgcggaagccaacacctgctggagagacggggccagcatggaggttcctacctgtgggcttagaagccaggggtgaaggtgggaacctgctggagttggtggaagacagtctgggccgacgccttctgaaaaagctcctcagcagcccacacttgagagattctacaagggtggttttcccggatcccgagtggccaaacagcttgagct

SEQ ID NO: 792751 - DNA, 646 bp, Homo sapiens
cctctctgtgtggaggtgtctggatcctttagggcagtaatgggacaagaggatgagagaaggggcactccaacgtacaagctccatgctgcagagggggctgggaacacaatatcctcattactttcttctttttccatctgatatggagaagcaggaggctccacagaatgaaatagttcgctactcactcactccttcattcatcaaccagcatttagggaggccctccaaccccatgctaagcgcagtgckgacaacaggaaaatctagattcagcccagatccatggtcttggggagatacagacatgtgaacaatttcacatctaataccaagtaagagcttttaacaggatagtgtaggcaaggcgttcagtgcacccaagggaacctgctcaaggtttacgtgatgtggctctgaccatgccaccctggtgtcacaccccctcacaggccaccatcccttcccaccactcctgccctgctccctaacaaggacctgtttggagccgtgaggtgcagcctgaagcctcttcctcacccttacccaggaggaccccctctgctttaacctgctttgtgggttcccacaaacccacaaaacctgtcttgcctgccatctcctcctggttgcttcttcccac

SEQ ID NO: 792752 - DNA, 588 bp, Homo sapiens
agaaaggaaccctggaaataccttcaggacagacagctgctgatctcttcctggaagcgctgggcctcagaagcttgctggttcctgcctatttgctcccacggcaaattcttgattctttatcagaaaggagggaagaagtgtgtgggtgtgagggggaagaagccacaggaatgcccacagcagaggtcctcggggacgctgggctatccctggtggcaacactcttggggctggtgctgggtgaggacggcctcccaagcaccctatgctgtgactccagcccccaggattctcctcagggtagagagaaggagctcaggtgagctctggatgaatgataccatcttttccattgaaatcacagaattttacarctaaagagaacttccagatggtttgagtcaaccgcactctggcagctggaagcagagatgaaaagattcaggcaaaattacacagttcaattattaacaattcagactaagcatcaggccatctgaccccaactgagggcccctcatcctattctactaagtatattacactgcagtctgtatgtgtgtgtgcatgtgtgtgtcatgagag

SEQ ID NO: 792753 - DNA, 366 bp, Homo sapiens
agaattgaattgttctggttaatttcatgtgtcaacttgactagtccctggggcatccagatatgtgttccaactttattctaagtgtgtctgtgaaggtgtttttggatgatattgacatttgaatcagtaaactgaggaaagcagattgctctgcttagcatgggtggccttcatctgatcartgaaaggcctgaatgaatcaaaaaggctgacccttccatgagtaagaagaaattccttttgcctgattgtgagctgggacattactcttcttgggtcttgagactgtcagcttttagactagaactataccattggcttgccagggtgtctacctggccaacttcacatcttaggacttct

SEQ ID NO: 792754 - DNA, 518 bp, Homo sapiens
aataatacatttatctgtaactatatctctcttcctttatctacttcctgttggttctgtttctctggagaaccctgatgaatacaggctttatgaaatctttccatgaatccaagaggtctgtgaatacaaaattatgaatccccacctgaagactttttagtgctaggactccttcacaaggcagagaatatatcagaccaatttagagtcaagtcttcaaggatccattgccttctcttaccttattcaactgttcaccactcacaaactttccatttttaccctcttgccttagctccctcttaccccagtgcacatatttgggtcagggctgcatgacctctcatgcctcatcctcagctatgataggcagatkgttatgatcctagagacctgcaaaagagatggcttgtgggaccttttgctactgccattgcagcctttcctgttgaccccaacctcctcatcccccaagccccctcagttccttgcagttgtcatctcaagcactggga

SEQ ID NO: 792755 - DNA, 543 bp, Homo sapiens
aatttagagtcaagtcttcaaggatccattgccttctcttaccttattcaactgttcaccactcacaaactttccatttttaccctcttgccttagctccctcttaccccagtgcacatatttgggtcagggctgcatgacctctcatgcctcatcctcagctatgataggcagatggttatgatcctagagacctgcaaaagagatggcttgtgggaccttttgctactgccattgcagcctttcctgttgaccccaacctcctcatcccccaagccccctcagttccttgcagttgtcatctcaagcactgggaaagggtcaatgttttgggtaatatgcatatggcaacaatgtaggcttctcatgcccctaattactgcctgcagttgtggagttattgctcaayaatctgatttatgaactaaaacactggggttttaacaataaataaccaatcacgtttaggcatttggaaagaacaatcatgtgattggagggtaagggaagattgacaccagctgatattttcttgagaacatt

SEQ ID NO: 792756 - DNA, 525 bp, Homo sapiens
gcaggaggtgggtggtgtgggggacccagctagaaggtctctatgtgcatggagtggacaggttcagagtcttggtgggtgggtttggagtggtagaactaagagcaaagcaaacaagcggaggtgctgctttcctgcttgggagccatcagctcttccacattctactactaacttcaaaagactactaagtattaatattttctaaagaaagtacaactggccaatttyaatttaagttctgcatttaaaaaatcctttaaaaggaagaagtgggatatatggaatcggcagccatccctctgcattttggatgctacttcttgaggcagtcctatgtagtactgtgtctcagcaacttggtatttagcattcagaaaatgaaatgtctagaaacaaaagagcaggaggaatgtgtgtgcatgcctgcagacatatgtatgtgtccttgtgtgtttgtgctgggatttgtgtgtttgcatatgtgtgaattaagaggataagcacagacatggcagtgtggca

SEQ ID NO: 792757 - DNA, 634 bp, Homo sapiens
ctactcatagggcagaggatctatctgtgccaggcatagtagaccacctcacctacaaggcagagattttatgccacaatagacaagctgaaatagcagaggttaacattactgcccagagccctgtttgtaaaccaggagtattattcctgctttcagctctggagcatagctctgagttttgtgtaagggaagaggtaatacaaaagaacagagaactctgaggctctccccaaaagaaactgattttatctgaaacagtgtagggaagttcaagcctaaagrcattctaaaagacaatggagactttagtggtatgcagttaagaggaagctgctagctccatgagagcatcaagtaaatcacaggactgctagtttaccagagagaaccaaaaaaaaaataaaaaaaataaaaaaaataaaaaaacccagcgagtcctcctgggattaaaagaaaccccaaagactggcctcaaaatttgcccctgaaaacggccctgagtttaactggactagcttgggggaaaatttaagcccaagagcattgccaaaagcaacagagcaatttggtggaaattagtgaagcctaataatgtaacaatgaaaggatccatgaagatttaactattaga

SEQ ID NO: 792758 - DNA, 595 bp, Homo sapiens
cttgtctcaaaatattgctcactgtcaatgatctggtcactcaagaaccctgatggagatttagaaggagattaatattgttttcacacctgctaacacatcaatctgcagtccatggatcaaggagtaattcctccttccaagtcttatttttttaaggaacatatcttgtgaggctatagctgccatagattgtgatccctccagtgcatctgggcaatgtaaatttaaaacctttttgaaaggattcactattctagatgccattaagatcatttgtgattcataggaggagatgaaaacagcaacattaataggagtttggaggaagctgattccaaccctcgtgaatgactttggggattcaagattttagtggagaaagtaactaaaattatgctagaaataacaaaagaactagaactacaagtggagcctgaaaatgtgcctgaaytgctgcaatctcctgagaaaactcaaacacattgagttgctttttatggatgaacaagaaagcggtttcttgagatagaacctattcctggtagagatgctgtgaacactgctgaaattacaacaaaggatttagaatatt

SEQ ID NO: 792759 - DNA, 617 bp, Homo sapiens
gtttaatagaaaaagatcagctttggttttaaaagtgaattgaagcaagcaaaaacagcaaagaagcatgctgtcatcatgaggagttagactgctagaagtaaaaaatagtcttgtgtttgcacagatctccataatgtgctttgtactgactgtatgaggccggcttcaacgtgttctcatttttcttctcactcataaacccgtgatttctagtccttcacataaagactagaagagtgtatctgagcccgactcagggagcaattctttggaagcagaactggcgtgtttaagacacaaaatgcgactttagagaccaaactgccctgcctccctgaaattcagtctcctcatccatgaaataaagggtccgacagagtctttaggttccctttcaattctaaacctaatgatgacagcactgtagctattagcctaacttccccagttyactttttaagtgtcttcttttttatttattcattggagcatattgtaaagaacatgggctttgaggtcaataaacctgggtttgaatccccatttggctctttcctagctctgtgaccattgacaagttacttaacctttctgagattcgaattgcctcccct

SEQ ID NO: 792760 - DNA, 617 bp, Homo sapiens
gtttaatagaaaaagatcagctttggttttaaaagtgaattgaagcaagcaaaaacagcaaagaagcatgctgtcatcatgaggagttagactgctagaagtaaaaaatagtcttgtgtttgcacagatctccataatgtgctttgtactgactgtatgaggccggcttcaacgtgttctcatttttcttctcactcataaacccgtgatttctagtccttcacataaagactagaagagtgtatctgagcccgactcagggagcaattctttggaagcagaactggcgtgtttaagacacaaaatgcgactttagagaccaaactgccctgcctccctgaaattcagtctcctcatccatgaaataaagggtccgacagagtctttaggttccctttcaattctaaacctaatgatgacagcactgtagctattagcctaacttccccagttcrctttttaagtgtcttcttttttatttattcattggagcatattgtaaagaacatgggctttgaggtcaataaacctgggtttgaatccccatttggctctttcctagctctgtgaccattgacaagttacttaacctttctgagattcgaattgcctcccct

SEQ ID NO: 792761 - DNA, 658 bp, Homo sapiens
agtcccacaagactgtcctacttcagacaccaatcacaagtccaggcctctgtacttctggccaattggctataaatcaggggttggtttatagggatttttatggatacatcatcacataggcatgatgatcatctcaatctgcagcccctcttccctccccagaggatgagggtgaggctgaaagttccaagcttctaatcacagcttggtctttctggtgatcagccccactcctgaagctatccaggagcccatcaagaatcatctcatggtcaggagattgagaccatcctgactaacacggtgaaaccccatctctactaaaaaaaaaaatatgaaaaattagccgggcatggtggtgggcgcctgtagtcccagctacttgggaggctgaggcaggagaatggcatgaacccaggaggcggagcttgcagtgagccgagatcacgccactgcaatccagcctgggcaatacagcgagaytccatctcaaaaaaaaaaaaaaaggtcatctcattagaacaaaagatgctcctatcacccaggaaattgcatgggattaagagctctgtgtcaagaactagggtcaaagaccaaatattagaacaacagatgttcctggcacccctatccactcaggaaattacaagaattt

SEQ ID NO: 792762 - DNA, 498 bp, Homo sapiens
cactgtagatttagtcattcttgttaagaaaggaaaaatatctacttaaaaaagaggaacttaagacaatggaagtaagaatgggatgaagaggaaaagagaaagtaaaataaataaagagtaaaataaaataaaaggcatgaacaagttaaattttaaaaacataaaaaggatgttataccaaaacaagagggaaaacatactttattctcttatagtaatggaacttttacaaaattccttcaaataacttggccaccaaaaaatctgataaatgttttaatgttgggaattgacaggtttacattctctgatcgtaacataagatgttcaacaacatcagtcattargaaaatgcaaatcaaaaccaaaatctttcatgtattaggagaccatgtcacatccactaaaatggctaacataagaagaaaagacagtaacaagtgttggtgagctgtgaataaattggggctctcatacattgctggttggattgta

SEQ ID NO: 792763 - DNA, 494 bp, Homo sapiens
ccatgtctatcaggatgtgttaacacaatgcttgctttgtggtcatgctcctctggcttaggcaagacctaacttcagtggggacttcagccagtagaaagcatgcactttaattttacttgtccttggactgactttttgctcattatactagtgaaaaacacactgctggrtggagatttaagatgctaatgagatgtgatgtatgaacaaacatgtacagttaccgaacatgtgcacctagaggaccacccataacatacttactagcaatgccctttcccaccctcttaagaataatcatgtaaaactcccctaaagggagcttccctagtgtcagccaggggtgtctcactcttgagcagcccactctgactcagctctcagagtgctctttcaattttgtaataaactggtttatggctgtatctcccttgctgtgtgtctcttgcttaaattctttaaaccaagaagacaagaactgaggactcaca

SEQ ID NO: 792764 - DNA, 659 bp, Homo sapiens
aaaaggtaggcaggtggtcctgctgaagtttgtcaggtaatagtatatggcctaggtgatggagggtttggttaggaattgagtcaaaataactgcagggaggcagaaatgggtcagggattcacagattcaaggtctctagaagacaatgtgcagacctatctcccaggctactcccaaacagccatatcaagaggtggcattcccagcccttctagagcctcctgttgtgacatccatcgcaggatattttcaggagtctgtccagacttactcaagtccaagtcgcattaaacagacttgaggtgcagtaggtaacatttgcagacgtgcctatgagtgatcatggacagagggaggaaaaaagcagcggtcagcaagaaagttgggtggagtccaccttaggagctttcaggaacaaagatgggaagttgaggcatgacttctcccagcccggcytgccatctgcctctagcagaagacaaggattatctcagagagcatctacgtctcttgattctcagaggcctgtgaggatggggaggggatctggaccctgtgttccagtggaggaagggacactgatctagttccctgaacacaatggccccatctctgttagtgttttctctccataaacattcatcaggaagcccaac

SEQ ID NO: 792765 - DNA, 519 bp, Homo sapiens
cttcccacatttagtacatatgtagagtttttcatctctatgaactctcagatatatactgagtagtggcttctgtgtaaaaacatttacacatttgctaagctcatgaggtttttccacagtatgaattttttgaggagcaaagaaatgtgacctctgggtgaagatcttcccaaattcagtacatgtgtttgctttctctccaatgggaaatttcacattttgactgagtgagtgtttgaggctgaggacttttccacattgattacgttcacagaacttcactcctgtatgtgtattttcgtggtgactataagaagagttctgggtaaaaacttgaccatgcccaatagttttatccaggttctttgctkcattgcttttattatgaatatgtaagtctaaattatgcttaaaactcttcccaaatgaatcacgtttatggggtcttttctgtgaaagaatgagatttgggcttggatgaacaaattttccaaagtctttatattcataatccca

SEQ ID NO: 792766 - DNA, 579 bp, Homo sapiens
aaatagagtataatgaatcatctcttgtgtcttcaccctccatttcactatgaaatgtagatttcccagaaattctcctctgggaaggcttaattccaaatttcccatctaaaaagagaaagaaaaagtaaaattgacacaaacaatagaccgcaagagattaaaaggtacacataagctaatacaaattgaacacatggaaatcagtaaatctcatgatgacaatgatgacaggaaatacatatatagcacttttatgtgccaaactcttacacgacacttacaatattccaggcaccattctaagaaatatatgcagtcaaacattgcttgacaacagggrtacagtctgagaaagctgtcattaggcaatttcgttgttgtgcaaacatcatagagtatacagtacttataaaaacccagatggtataacctactacacatctaggctatatggtatagaatattgcacctatgctacaaacccatatagcatgtgactatactgaatacggtaggcaactataatacagtagtaactatttgtgtatttaaacatatctaaacatagaaaaggta

SEQ ID NO: 792767 - DNA, 521 bp, Homo sapiens
gatatataaacatcaaggatcctatctccctgtcaccctgggagtttagcctaggtgctatctccctgtcaccctgggagtctagcctaggtgcctggctctagtctgtaactacctgcatgtcatatatagaagtttgatttttgcctttggataagggcaattaactagcacagatggccactccaattaccaggtaaacttaggatgaattatgaaagaatatacagcaaatggtgctatcagttcttcttacatgagacaagttatttatcttgagaacatgaatcygcccggctacatacaagggtgagatttccttctgtctttgcaatttcattagcagatttcttgtgatgcacactgcagtgtggtttagtgcatattcaataataaaactcttttctttctattctatatttgaggagaggatttcctgggttgccaggaattttatttttaatcttttctccaacatgcagccaagctgatgctggctacgtctttttctctgagtaatg

SEQ ID NO: 792768 - DNA, 611 bp, Homo sapiens
tggttcttaagtattttatggagatcagggtatcttcctaaatccagatgaagagatcaggttaagaactgctcgctttcaggctccacctgaagaaactatgtagtaggcttctctccctctacttattttatcatcttctttgatctaataaaatgttttccttatcaataagtaatgttatctagtttggctctaccaggtgctagagaaggcattcatcattgtattgtacttgcaataactctaatacaggaaaatgttcaaaccacccataataaaagtagctaaaaagcagatttcttaaagactttgtgaccgtttaagctcagctgacctttctaagttgcatgattcttagaaaggtcccagagagatgtctatctggtgctatatagcagttgctaattaaatrttttttaattgaatgattgatatgagttgaacacccagtaattatatttaaaaagtgatgacttcagtgttttgacgcctttaaaaggctacagtggtacaaaatgtaggtgctaccatgtgaaatttgaatgtacagtgaagtacatatattcactgcaatatctagaaataaatatgtattcttataggtagag

SEQ ID NO: 792769 - DNA, 487 bp, Homo sapiens
ctgtcctgggcctgaggggatcccactggcctgaaaggtgagtcccaggccaggcaccattgggacttaagggcacatcagtggtagtctggaagtactgttagtggcctgggatggtggtggctatgaggtgaggctcctctgcctttggaaaaaggaggaaagagtgggaaggcctgcatcttgtggtttcagcgccagctcagcagcaataaaacagagcactaagatagacttctaaggtttcgactctagtcgctgactccctggtggcaccactggacccaygcagggcctggggaacctcaccaccccaaagggatgaacacagccctggctggctctgctgattgcagcgccccagtgccttgagcacacatagacagtagccagaaattgcttacaacaggttttgggtgagaccagcgctgtgctggcttcaagtctgatccagtgcagtcatagtggaagtggtcacaagggtgct

SEQ ID NO: 792770 - DNA, 584 bp, Homo sapiens
attacaagaatgagcgagccactatgcccagcctaatattccactctttaagaaagtgacccaattatgttcttgatcttttccaattcacctcagtgcttcagtgtttctactcttcaggagacatagtgaaggaagagaaagcttactgagctccttcttcaaagataaaaatttccaatgtttatggggcaactaaataaggaaatacatgaagtggacctggaggagactggcaaatcagaatacaacccttatctgaagaaggcagccaatattcacctctagtcaaattacagccctcaagtgtatragcccaatgtagccagatcatttaattttgaaagagaattttgaaatctggatttgtaggggagattttccgagttttaggtgtcggcaggccaaagccagcccaggaattgccagtttgtaatttgtgtcctggaagttaaagtggatatctaacactagaatttctgggcattcaagatagcctgatttgtacattcttgcttaacaggcaaactaaatgaaaaagcaaaattattagcagattatagggaacatagggtcagaacaaa

SEQ ID NO: 792771 - DNA, 571 bp, Homo sapiens
gtcagctagactgtatctctgctctgatcctttctaggttttttgtgttgttttgttgttcattttttcatttcctaatttaacctaccaatggtaaacttatttcatttgctttattttcagagaggggtgtgtgtcagagcaattattgtctggctcatgtacttactgcctgtgactacaaccctgaagggtatrtgtattaatcccacttttgctgatgaagaaactgaggttcaaagaaatgaatgaactactcagtcacaaaactgtaagtgaccaagttggagttgaaatactggtctgtttggctccagtttaatctcttgctacaataccacaatactgtttctctggttctgactttattatttgcccccaaatgcatcaacaggagtagggaataatcatgggatttctcttaggttctgtagttacactgcaggaagaaaacacatttagtataatcatctcaagacgccaagagcaagaattactgcctccagataaattcctaaacgtagaattactcagtgaacttgtctgcacattttcttaaacttttagtgtt

SEQ ID NO: 792772 - DNA, 622 bp, Homo sapiens
  misc_feature 523: n = A,T,C or G
ttaagttttgtatttttagtagagacgggatttcaccatgtgaaatcccagctaggctggtcttgaactcctggcctcaagcgatgcacccaccttggccttccaaagtgcttcgccttccaaagtgctggcatgagcaactgtgccaggccagagataactactatttcatttgtatatattttttcaacttttattttagattcagttggtacatgtgcaagtttgttatctgaatatagtgtgtgatgctgaggtttggggtatgaatgatcccatccaccaggtactaagaatagtactcaacagttagttttccaacctttttctcyctcccttccacactaatggaccccagtgtctattgttgccatctttatgtccatgagtacctgatgtttagctcccacttataggtgagaatacatagtatttgattttctgttcctgattcacttaaaataatggcctccagccacatatatgttgcaccaaagtacatgatttcattcttttttcttgnctgtgtacaattccattttgcatatgtgccatattttctttttccaatccactgaggatgggcacctaggttgattctatgtctttggtattgtgaata

SEQ ID NO: 792773 - DNA, 521 bp, Homo sapiens
tgtgctgtttggtgatgagcaggtggagaagtagttggatcccatgggagatggactggcctcctcttcttgggttgactgcagcttgttggaggtgtggataaggcacttagtgtctttgctccttcattagtatgagggtagcaagggaagtttcactgcagaggtggtggcagagaggctttcagttccccaggagctctgttcaaggagttgcagagctgctaatggctcgataacccggcaagggatgactagaggccaaggcctggaggatctgcctggtgaagagttatgggaatgggcacccatgcaacagtctgtccacttttgttgtatgccttgtgtaatatgctggggttctactccagtccatagtygccttgaatattgcagtacctggaggtattaacagtgaaggctgtgaaacagtcaaggtgtcggccttccctttcctctgggacctctgtttcatggatgtatgaacatgttgctgatctaaacacacttgtaggaggtgg

SEQ ID NO: 792774 - DNA, 627 bp, Homo sapiens
ttcaggcttttttaaaggttccataggaattttaaaatagtttttgtctactgtttcaaaaccaatcatgccttcctaacagtccctcaaagtcttaacttatttcagcattaactcaaaagtccaagttcaatgtctcatctgaggcatccttctacctaggatcctgtaaaatcaaaagcaagtttgtttcttccaagatacaacgggggaaacaggcattgtgtaaatgtttccatttgaaaaaggagaaattgctcaaaacaaagggactataggcccgatgcaagtccggtatccagcagaacagttatgaaatcttaaatctccagcataaactccttttactccatgtcttacatccaggccacattgatgcaagggatgggctccayggccctaggtggctcctctgcccctctcctgtggctctgcagggtacagcccttgtggttgttttctcaagctggtgttgagtgcctgtagcttttccaagtacatggggcaatctgtcaatgaatttaccattccgctgtctggaggacagtggccctcttctcacagctccactaggaagtgccccagtggggaccctgttgggggactccaaccccgcatttcccttct

SEQ ID NO: 792775 - DNA, 604 bp, Homo sapiens
aagaaaaccttggtgtaggctcaagatttcatccagttttcttttgtggagaatgaagattataagttcagattgggacgctacttggtacatagtagatgtcaaataaatatttttcgtctatggaatactaaagtagaagagtcttgtaggcagattgataggagggtcaggagtactagaatgagttctggacagggaatcagcagtgcatagatggtaactaagtcacaaaaatatgaagacaagaggccctggggcagacagtaatgattttaaagcccacaaagctgcactgcctcctcaacaaacacgaaaaggaaggacaaacgtttgtgacatcccactacgtcctcatagcagtggtttggaccawgttcctcttaatattttggactttttaatcttcaacgaacgcctgaaagtctttggaccccccttgttgaatccttaattccagagatagaacctcttttcctgtgaggcttcagccactctgggtgccattgacattagagataattctttagggtgaacaatatgtcagaactaagagattatttagggggttcttgagtcaagtggggttattccctgctaagaa

SEQ ID NO: 792776 - DNA, 607 bp, Homo sapiens
tgtagcctctgccccctgggttccagcgattcttctgcctcagcctcctcggtagctacgattacaggtgcaggcgaccatgcctggctaatttttgcatttttagtagagatggggtttcgccatgttggccaggctggtcttcgactcctgacttcaggtgatccacccgccttggcctcccaaagtgctggtattacaggtgtgagtcaccacatctggttggatgttggtttcttaatgcccacacagagataagagatttggctaataagcctatgcaaggtacagaacctgaaattgttgcccctgtatacagcctagaacttagaggttcttacactcacargttagaaaaactcttcctcttcctctgtcccagatatgtggtaaagaagtttgccatctgtctgggggcattgccatctgtccagggaactgaaatctcaggtttatgctgtatgtatgtgtggggcttaaatttattctacgtgcgtgatgtaggattcataattcaagaaataatccaggactattgataccattggaagaaacatgtctgcagaaacaactgaaaatattgtgtcattgtccatacctttaaaac

SEQ ID NO: 792777 - DNA, 611 bp, Homo sapiens
ttttgtatctgtttatatggtgatctggaactatttctgctctcatatattgaaaattgtttaagacacatgcattattttcctctaattgaaggcacaagcagaaatgattaaagagtaaatatttgcggtgagyccaggtctgaatggcgtacagtttctttggtatgcagattcttttgcagttcagtatccttcagtcagtaaacttgtactgaatgcctcctgtggtctaggacagatcaattcaggtacagagagacaaagcaacgttagtgaacctgagagaaggcatagcgagggtggggctccacatgttgtttgcttttgctgaattttagtgtgcactgagtgacaggtaaagagctggagaggtaggaaagagacagagatgatggggctgtgagaaatggagaagatgcctccctggaggcccttagacactgagtgggtatttttggggggtaagtgggcataagggaagagagagacttaaggaactgctatccttggaaattctgcctaatggcctgataatcaaaacatttatccaactcactatgggctccaaaagagattttgtataaagagacaagaaatttatcttctga

SEQ ID NO: 792778 - DNA, 629 bp, Homo sapiens
gagtctcaatctgtcgcccaggctggagtgcagtggcatgacctcagctcactgcaacctctgcctcgcaggctcaggtgattctcatatcttagcctcccaagtagctggggctacaggtgcgtaccaccaagcccaactaatcttgtagttttagtagagayggggtttcactatgttggccaggctggtctcgaactcctgacctcaagtgatccacctgccttggcctcccaaagtgttgggattacaggcatgagccattgcacccggccccagactacattcttaacacccagtttctaggatgccaaatgtctagcacagatttttcctttaagttctattctaagcctccaatataggcattggatacgttgtcctagtttaaatatcatgtgatactgctataagtatccagacatactgcaaaatttgtagaatatgtaatgaaacctgtttttatttaaaggttgtgtgtattggcttattttagattctcttacatcttgactaaaatctgtgcatgtggaacaattatcgatagagaactggtattctctgtaccaattaaccttagataccatgattttttttttttttttctagatggagttttgctcttgttg

SEQ ID NO: 792779 - DNA, 626 bp, Homo sapiens
aattagtgctgcaatatgcccacaagcagttctcaatatttctaatattagaggctatttttttatttttgctttcatctccaacctgtggtctgttcccaggacagttcctggtgcaaaggatagtactggaaagacatctactttccgtttttctctgtcagtcctatctccacctgcccctcagcaaaarcagtgaagttagccaactgctcgcagcccctggccctaggtacagggacattaaccctatagagtgtgaattcattttttctactcctttcaactctgaactggcgaaaatgtcatttattacaagtctgacaatcagtccttagttttaggtttgaatgcatgtgagagagttttcatgaatttttaaaatttcatcttcttatattctgaatgtacttttatcctgataatttgaaaactggaccttttctagatttaggaagataaataagcaaaccacccaaaaagcctacttgttaaactagagaggttacctcaatatggaatgtgggactttagttttgtccattcccacgaaagtcttgaggattcggttaaatccagaactgagaagttttaattatttaaggtagagaatagctacataaagt

SEQ ID NO: 792780 - DNA, 618 bp, Homo sapiens
acaccctgagctagccccgcttgcggctggcactggcggacagcgtgttcagggtgcctcttctcctgtatatcgcagcctgtgccttcgctgtctgcacactcgtagatgtgagagccacaggctggctctgcagaacccctttgccagccctgactggggctggctttggtgcacatgctacagttcagtgtggtccacatgggacatctctgctcttctcaggcagctgggccttcacttgccactatcacctcttcctagcaaaggcatggctgccacaggcagccctgagccatgggtcggtaatgcgctagtagctgacaccctgcatcacccccataccctgagctgacaagtctgctaaaaaaaccctgccgatctatctggtttattttagaagggcctggatacaacaagactgagagctgtgacttgggcaggagaaagcacaaatggattcatcctccttccaccactgcccaacaactgaagmccaccaactgaagagcaccaactgaagagcaccaactgaggaccaccaactgaagagcaccaactgagggtaccaactgaagagcaccaagtgagggtactaactgaaggcaaccaatgagg

SEQ ID NO: 792781 - DNA, 501 bp, Homo sapiens
ctccctggttatcagtgcaggagtgttgagggtagaagccaaactgaactccttcagaagtgggtgggaaatagagataaagacatgaagagaaggtgggtccatacagaccatagcgattgtaaaatgctttcctttctattattgggcattattccaaagccactttcatggctccargcctctttcctgtggatgcactgcactataatttaatcagctctattgttgaaaatgtgtagcttgctcttcttttcaagatatgatgatctgagccagatgttttcatgtgcagaaaaattacatgcggtgtggctcaaggataaaactggaactatcaaccaactcttgcttttctgtggggtgagggattttctgtttttcttccccccgcagcccccacccatcttggtcaacgttctgcatctgtcactgaaaaccccagaggattagagctgttagtaaaaatcccagtcaagtctgctaaagtttgcatgaata

SEQ ID NO: 792782 - DNA, 639 bp, Homo sapiens
atatgacttgacattatagggtaggcttagctcatggcaatgttttttttgtgaaagtacctgcagaaatctctcttatttctagtttgttaatgtttcagagattatgggggaaaggggattctatgaatccctgacactgcatgaagcagttttggtttcagtaattttagtatcattcattgtaaggtgatgatycctaggaacttcttcacagtgagaaacctgaaagttcctagcagccagcaatgaatgcaagcgggggcagggccactggcagtgaggggccttgtgagccatgtgcctgtgttctcaagttccagggttctggggatgcatgcaggggattctggacctgattgtttcctctgaaccaggatgcattctggttggcagggcaactggccttcacttggtggccttcagtgggtgccctcattggttgccttcagttagtgccctcagttggcaccctcagttgtttctcttcagtctgtggtccgcagttggtggtcttcagttgttgggcagtggtgaaaggaggatgaatccatttgtgctctctcctcccccagacacagctctcaggcttgttgcatccggacccttctaaaataaaccagacaggttggcaagttt

SEQ ID NO: 792783 - DNA, 646 bp, Homo sapiens
aggtcataatagggactacagggctcattttatacccggtgaaccagccaactttcatgcagttgagaaaaagtaaactgtccaggtgaggcggctcacacctgtaattccagcattttgggaggccgaggtgggcagatcacttgagcccaggagttggagaccagcctgggcaacatggcaaaaaaccatccctacaaaaaatacaaaaattagctgggcatggtggcacatgcttgtcatcccagccacttgggaggctgaggcatgaggatcactgagccctagaggcagaggttgcagtgartcgagcttgcaccactgcactccagcgtgggtgacacagcgagatcctgtcacaaaaaaaaaaagaccaggcgcggtggctcatgcctgtaatcccagcactttgggaggcagaggcagggcagatcatgaggtcaggagctcaagaccagcctgaccaacatggtgaaaccccatctccactaaaaatacaaacttagctggacgtggtagccagcacctgtagtcccagctactcgggaggctgaggcaggagaatcgcttaaacccgggaggcagaggttgcagagagccaagatggcgccactgcactccagcctgggcgacagagcaaaactct

SEQ ID NO: 792784 - DNA, 641 bp, Homo sapiens
tgccttcttaagtcttggtgaccttagattttcagctctacctctgcgaccttcagaattttcaggaaaatagaggaaaacgagaaaacatgacaatctctttctctgagattcctgttgcttgattgcttggagccctggacacaggctgttttggtttcgccttttttttttttttttttttttttttttgagagggagtcttgctctgttgcccaagctggagtgcagtggcgcgatctcggctcactgcaagctccttctcctgggttcacgccattcttctgcctcagcctcccaagtagctgagactacaggcgcccgccaccacgcccggytaattttttctatttttagtagagacggggtttcaccgtgttagccaggatgtggtctcgatctcctgagctcgtgatccacccgcctcggcctcccaaagtgctgggattacaggcatgagccaccacgaccggcctggttttgcttttttaatgcttgaataacagtaattttaaaaatagttattcagatagtttttgaattctctattattacagtgctgtaagtaccctgtaaataagaatgtagggccaggtaaaagcaatcttactgatgtatatttcaatctggaatgttttccc

SEQ ID NO: 792785 - DNA, 641 bp, Homo sapiens
tgccttcttaagtcttggtgaccttagattttcagctctacctctgcgaccttcagaattttcaggaaaatagaggaaaacgagaaaacatgacaatctctttctctgagattcctgttgcttgattgcttggagccctggacacaggctgttttggtttcgccttttttttttttttttttttttttttttgagagggagtcttgctctgttgcccaagctggagtgcagtggcgcgatctcggctcactgcaagctccttctcctgggttcacgccattcttctgcctcagcctcccaagtagctgagactacaggcgcccgccaccacgcccggctaattttttytatttttagtagagacggggtttcaccgtgttagccaggatgtggtctcgatctcctgagctcgtgatccacccgcctcggcctcccaaagtgctgggattacaggcatgagccaccacgaccggcctggttttgcttttttaatgcttgaataacagtaattttaaaaatagttattcagatagtttttgaattctctattattacagtgctgtaagtaccctgtaaataagaatgtagggccaggtaaaagcaatcttactgatgtatatttcaatctggaatgttttccc

SEQ ID NO: 792786 - DNA, 641 bp, Homo sapiens
tgccttcttaagtcttggtgaccttagattttcagctctacctctgcgaccttcagaattttcaggaaaatagaggaaaacgagaaaacatgacaatctctttctctgagattcctgttgcttgattgcttggagccctggacacaggctgttttggtttcgccttttttttttttttttttttttttttttgagagggagtcttgctctgttgcccaagctggagtgcagtggcgcgatctcggctcactgcaagctccttctcctgggttcacgccattcttctgcctcagcctcccaagtagctgagactacaggcgcccgccaccacgcccggctaattttttctatttttagtagagacggggtttcaccgtgttagccaggatgtggtctcgatctcctgagctcgtgatccrcccgcctcggcctcccaaagtgctgggattacaggcatgagccaccacgaccggcctggttttgcttttttaatgcttgaataacagtaattttaaaaatagttattcagatagtttttgaattctctattattacagtgctgtaagtaccctgtaaataagaatgtagggccaggtaaaagcaatcttactgatgtatatttcaatctggaatgttttccc

SEQ ID NO: 792787 - DNA, 612 bp, Homo sapiens
ggaaagaaacttgtttaactttgttgaaccaagtattccataacatgctatttttttttttagatggagactcactctgtcccccaggctggaatgcagtggcatgatcttggcttactgcaacctccgcctcctgggttcaagcaattctcatgccttagactcctgagtagctggaattacaggcacttgccaccacacccggctaatttttgtattttttggtagagacagggtttcgccatgttggccaggctggtcttgaactcctgaccacaagtgatctgccagcctcagcctcccaaagtgctgggattacaggtgtgagctaccacgcctggccccgacagcatgcttttttgagtaattgactatggsgaaatgtaaaaccaagtgactgaagggcttaaaagaccatggagctagaatttacttttttcactaaattttgtggacatttttttggaggcagcatgtcgtgatgaaaacactgagttaggaggaaggagccctctctccggcattagcaatgttgataaaaggtgacaatttctgtggatctaagctttctcacctgttctatttgacagggttgctctaaaaaaaaattgt

SEQ ID NO: 792788 - DNA, 468 bp, Homo sapiens
ttcctcgtactttctttttctattgtccttctttcctttttttttgtttttgtattacttagtacattgaagtacctagcactttaacatgctattaatgtatgtattatttcagtttgctatcaaccgttactacaatataaacttcacgagaacatagaatttttttttttttttttttttttttgagacagagcttcactcttgttgcccaggctggagtacaatggtgcgatctcagctcactgtgacctctgcctcccaggttcaagcaattytcctgcctcagcctcacgagtagctggcatgtgccaccatgcctggctaattttgaaattttttttttttttttttttttttttgtagagacaggatttgtccatgttagtcaggctggtctcgaactcctgacctcaggtgatccactcgccttggcctcccaaagtgctgggattataggcgtgagcc

SEQ ID NO: 792789 - DNA, 632 bp, Homo sapiens
aggtcatcatgacgttatagttactgctatcttggaccagatctttttcttttttaaaacaaacaaacaaacaaaaaacctcttgtgattatagcaaatcgaagtgcatttctgtctaaatactaaataaaggcagagtagttctaccctgagtggcagggagtgcayttgcacacacaactttagcctctctaaacttcaaaattttttatctacaaaaagggggtaccatattatctcagaggactgagaactaattttaacctatgtaaggcctaagtgcatgcatacctagcgtgtgatcagcactcaggaaactttgctgtcagggaggaacagcagttctggatatctgaaagagggtgtccagaagtttgtagcagcccacgagctcattatcatacccggaggacctgatgcaaaacggaacggcaaaccaaggcaaatcaagactgtgtgctcaccctaacagcaagaacagttcctgcatggccagagaatgctcctgaaactctgcacattgtggtcttttaagtcccatgtaaaaggactcattgactgaattaaattaaccattctccaccctcttctagcgcaagagcccagatgaaatgagatacggtagacataag

SEQ ID NO: 792790 - DNA, 684 bp, Homo sapiens
cactcttttgtgtctggcttcttttgttcagcatcatccctgttgcaggtatcagcaggtcatgcgtttttgtccctgaacagtattcctgtgtgtggctacagcacaatttgtttatctattcaccttcaatggatatttgaggctactaccaataaagcttttataaatattcttgtacaagccttcttgtggacatatgttttcatttcctttgcataaatacctaggagtggaatttggattcagatagtaaatctctttaactttagcagaaactgccaatatgtataaagtggttatacaatttttcactcccaccagcaatgtgtgagagttccagttgcttccacattctcaccaacacttcatatcatcrgtctttttaatttagccactctagtgcatgagtagagaatctcattgtgatttgaatttgtgtttccatggtgactgctgatgttgagcgtcttctcatacacttattggtcctttatgtatcttcttttgtcaaatatattttcaaatatttaaaaaattaagttgttttattattgagttgtaagagaactttgtaattctaaatgaaaactttgtctatgaaaacttttgtctaagattttatatatataaaaacttataatgacataaaatatatatgttatatttatgggtttggtttgt

SEQ ID NO: 792791 - DNA, 684 bp, Homo sapiens
cactcttttgtgtctggcttcttttgttcagcatcatccctgttgcaggtatcagcaggtcatgcgtttttgtccctgaacagtattcctgtgtgtggctacagcacaatttgtttatctattcaccttcaatggatatttgaggctactaccaataaagcttttataaatattcttgtacaagccttcttgtggacatatgttttcatttcctttgcataaatacctaggagtggaatttggattcagatagtaaatctctttaactttagcagaaactgccaatatgtataaagtggttatacaatttttcactcccaccagcaatgtgtgagagttccagttgcttccacattctcaccaacacttcatatcatcggtctttttaatttagccactctagtgcatgagtagagaatctcattgtgatttgaattygtgtttccatggtgactgctgatgttgagcgtcttctcatacacttattggtcctttatgtatcttcttttgtcaaatatattttcaaatatttaaaaaattaagttgttttattattgagttgtaagagaactttgtaattctaaatgaaaactttgtctatgaaaacttttgtctaagattttatatatataaaaacttataatgacataaaatatatatgttatatttatgggtttggtttgt

SEQ ID NO: 792792 - DNA, 541 bp, Homo sapiens
cctcagctgaagttcgctcgatttggctgactttttaccattccttttacatcctacttctcctgtttacctttcggcccaacccatccctttatcagccaaagctgtgccaacgctctcctcctccctcctacccctctaagggttcttcctcgcagccagaggaagcacactyatccctggtttccaggttgaagaaattcagctgcacttccattcctggtcctgagcatggtgagggacaggacaagtcgggaatacttgtcagctcccttctagggcagagaatcagtgatgttattatgagaaaacagaggggtaggagcagacttgaaggatgcaggatggtgagctgagggagggcaggcggagtgtgagccactaggagacaaccagggtgatgacgaagaagaggatggcagtgacagccactaatctttgttgagaactgaccaagggactctccaaagtgctttctattgctctgtttgatccacaaaacaactggctgcggttgtgttttctctcctattttacaggt

SEQ ID NO: 792793 - DNA, 588 bp, Homo sapiens
ctctgtagaggccgcgttctttcttaccacagtgagcaataaacagctttgtgttatcaacagcttgtgttgatgttatttggggaaccagcattcaacagagaaattcaataagtattgcggaatggtgagtggatgtgcagatggatgggtaaagatggatggatggatggatgggttggtgggtggatgggtggatatgtggaagggtgggagggagggagggaggatagatrgttggatggttggatggttggatggatggatggatggatggatggatgtgggtggatggatatgtgagtagatggattagttactggattcctaccaatgctgataaagcaggcttcgggtctggggtgaggcaaggctggggtaggccccatcctggtctcatgagcacagaagtctgtttggtgagagaagcagcattccctctgcaaggaagccccttgaaattataaaaattaattctcaaatagcaaatcaagatgatttcagttgaaatttgcaactgaaaagccccatttgaaaacagctctagagatggctgcccgtcccaacttgatatgatgcgtgtagatc

SEQ ID NO: 792794 - DNA, 650 bp, Homo sapiens
caacccaaatgtccatcagtgatatactggataaagaaaatgtggcacatgtacaccacggaatactatgcagccataaagaatgagttcatgtcctttacaggaacatggatgaagctggaaaccatcattctcagcaaactaacacaggaacagaaaaccaaatgccacatgttctcactcataagtgggagttgaacaatgagaatacatggacacaggcaggggaacatcacacaccagggtctgtctgggggttgaggggctaggggagggatagcattaggagaaatacctaatgtaggtgacgggttgatgggtgcagcaaaccaccatggcacgtgtacatctatgtaacaaacctgcacattctgcactaccccagaaattaaagtataattaaaaaaaaaagtggggggtggtaatagaccytgttacctaaagattgttatgatggttaaattaaaactcctcacccctgtcaagctggaatgtagcccctgttaacttgagatcccccttctttggctagctaacttctgctctcccaacagaatcctatctttcatgtctcatctcccaggacacccccctccccaccgggcctgggaaggattaggagggccctgtccagtgaattccttggcctt

SEQ ID NO: 792795 - DNA, 602 bp, Homo sapiens
aggaagtagcacagccctgatcagcttcccagcggtagagtccagggaatggaaaaggccagcaggttcaacacggctcccagaaaccaacgtgtacatctgaggaagtgtccagtgcctactctcctagaggaaaaacccaacagagaaataagggccgggctcagatcatgcctttaatcccagcactttgggagtccaaggcaggcagatcacgaggtcaggagtttgagaccagcctgaccaacatgatgaaaccccatctctactaaaaatacaaaaaaaaaaaaaaaaattagccaggtgtggtggcacgtgcctgtaatcccagctactcaggaggctgaggcaagagaattgcttgaacctgggaggcggaggttgcagtgagctgagattgctctactgcactccagcctaggcaacagagcragactctatctcaaaaaaagaaaagaaagaaaagaaaagaaagaaagaaataaggacattgtctgagaaggggaggtacccagtcctgataatagggagatattccctggcatagagtcgggggcttcctgaggaagcaaggagctgagatctgaaggaaccaggatccc

SEQ ID NO: 792796 - DNA, 607 bp, Homo sapiens
aacctgcagtgtgccaccaccaaatttggtaaggaagtgtcagtattgtctcagacactgtcgatgcaaaagaaaccacaattcacatcctgcaaaaggcgagccccagaccgacagggcaggggagaatttatttttttcccttttctccttagccgaagttattatcacaactgccggggaatttgtgagattgggagataaggatcgtaatgattctttggagacccgtcaatcactgcaaactgctaccagaatcgaaattacatctgcatttgaattagcaacattactcgccaatttagatcagagtgaacatttttccattgaagatggaattaaattagaaaatgagtgagtctttaatttccagattataaatcactgaaaataattcaactcctgtaccttaaggccaattacattatcctaagcgacattttatctccyagccttccgagtgatttggtgacgggagccttcacacaaatcagtcttgctctagtagcaagaaatatatctgcccaccgagtcacacacataaaacaccaggaaccattttaatgctgaagcttattttacatgaaatttgattgtctgtttgata

SEQ ID NO: 792797 - DNA, 588 bp, Homo sapiens
ccttaagcagtgtccaggaggatgacaggaacagtgatggcaccacctggcgtcacagaggcatgcctaacttgggaaaagaaggtcaatcaggacacctctaagcttgagccacctggtgaccgtggtagctcagagacaacatcaattcatcctgactcgagggctcccacattatgacaactcagcaawgctctgctcctactgccccttatgcaggatttctgctagctcatggcttccacccctccatgggtcctccctctgccttctccatttctttgtttctgttctctagaatgaaccatcagcccattattctctgtatatcttgagttccagcaccttgccatagcctccagtttgttcatcaattaccaccatctctgttggggaaaggcatcacatctgggatataacagggcctatgcattgggtgcctgaccaagttagctgaagccaattcggtgaaaccacaggctcatctgactggatgaccctcgagagggcccagatctcattagccgcatgtttgatggcgcctctgtgcagcctcctccttgggacagcctcattttcacactccct

SEQ ID NO: 792798 - DNA, 615 bp, Homo sapiens
cggctggaattaagactatatatatattgatttttttttcttgaaatctacatggatttaagaatcattagtatattgaacgggaagaaacaagatggcggctgaaggtgatccagagtggggccccagcgattcggattgagccttctccctccacccgcttcggcaggccgggtctctaccgcccaggcgcccggcccctcgggcctcctcgtcaggccccggcgctccccactgcctccactgcgcccgccgctcctcgtccgctttcccttctcccccrgtctcagccgccgccgccgcacacgtccgaacccatcgggggctcagctagcggcaacgcagtagcagccggggcaggtgggccgccgccaggatgaggtggcgcccaagacgcggctgagctcggccagggtgggcagcagtagttggcggaagctgccgctgccttccgcccccacacacgcacaccacaccacacacaccagcgcccctggcggcggcggcgggggcggcggggctggggcagccacctggcgtgcaccaccgaggccctcggccgttaacaaagtggtatacgatgacctcaagagcgaggaggaggagtacggcgac

SEQ ID NO: 792799 - DNA, 627 bp, Homo sapiens
tgtctctacaaaaaatttaaacattaactgggcatgatggtacatgcctgtaatcccagctacttaggaggctgaggcagaattgcccaggagttcaaggctgcagtgagccatgactatgccactgcactccagcctgggcaacagaaagagatacatatataaccttggccctaattcactctttttcaaaactataaatgcttataatattaataagccctaagatattattaaataagagatttttaaattaaactgatcctaaagatcctataattaytaaaagactattcataggaaagaggctggacacagaattatttggggacaataccttggtgaatgcaaacagcagattttccagtttgccccaagttttcatcaatgggctttacttcttcagtgcttctgccattcagggaagaactggcatgaatgtcattctgtatatcctgaacaaagccatctttatcatagccattagtgacaatgacttccaaattcttatggtctgctgacttcttcatcattttcttatcttttacgagaaaatgggaaagattcataaaagttcacagtaggtcaccttctgcataccatgttttaatatccagctgttatttc

SEQ ID NO: 792800 - DNA, 618 bp, Homo sapiens
tctaaatgttatttttacatataaattcagttgcttgcttcactttttcctaaataaatagggaacacttttttaaaagcaaatagtagtagatccctttagacagacatattttaatcagtatgggattaaataattaaagttatttgaaagaaaaaaataaggaaaaagagtttgggaaaagtaaattgtattcttatacttttcaggcaaacaaagaaccatyctgtatactaaagacagattatttcttatttaaaacactgtgaacatatgatgttaaacccaacatcatacatcttgagaatgcttaaaaattatttgctacaggccaggtgcagtggctcacgcctctaatcccagcactttgggaggccgaggcaggcagatcacctgaggttgggagtttgagatcagccttaccaacatggagaaaccccgtctctactaaaaatacaaaattagccaggcatggtggtgcatgcctgtaatcccagctacttgggagtgaggcaggagaatcacttgaacccaggaggtggaagttgcagtgagccaagatcacgccattgccctccagcctgggcaacaagagagaaactccatttaaaaaaaaaa

SEQ ID NO: 792801 - DNA, 438 bp, Homo sapiens
aaacttgctttcactttactttatggacttgccctaaagtttttcttgtgtgagatccaagaactccctcttggggtctggattgggggcccctttcttgtaacaataataatttaggccaggcatggtggctcagtcctgtaatcccagtacaagaaaggctgaggtgggaggatctcttgagggcaggagttcaagactagcctgggcattatagtgagacccccatctcaacaaaaataagamagttagttgacacctgcctatagtcccagcttctcaggaggctgaggcagcaggattgcttgagcccaggagtttgaggctgcaatgacctctgattgtaccactacactgcagcccaggcaagagagtgagaccttgtctcaaatagataaataaataaacaaagtaatagtttaagagtagtttcttaga

SEQ ID NO: 792802 - DNA, 601 bp, Homo sapiens
tgcattaactatttctttagagggttattagtctctttgctgaaattggtgcctctcttttatgctttaagttttcctcaaatatgtggattcttggtaatccatttgtatttataaataagaatacagtgatcagggccaggcaccgtggctcatgctgtcatcccaacactttagaaggccaaggcaggcggatcacttaaggtcaggagttctgagaccagcccggccaacatggtgaaaccccgtctctactaaaaatacaaaaattagctgggcctggtggtgggaacctgtaatcccagctcctcaggaggctgaggcaggagaattgcttgaacccaggaagtgccactgcactccagcctgggtcacaagaggaaaactccatctcaaaaacaaaayaaaacaaaacaaatacagtcatcagtattgactacaaatgggtatcctcaacactagcaaaagtaaatatacttagaatataaaacatggactatgctaaatgagcagaatactttagcgaatgtgtaattcaaaaccaaagtaatctggggtgctagcttctttctttccttggcatcaatgctcaaaccaggag

SEQ ID NO: 792803 - DNA, 600 bp, Homo sapiens
tactgaacctctaagcctcagtttcttcatctatatcctgaggctaataatgtctcgatcctagaactgggccttaaaggatgggttccatgtcctttcattatttcctggcctctgcggatttgccttccctgggtgggagtgggagatcccctgacacacgctggtacccagtgtagggtcggaggcagctgagtcctcatctagttgaatggagggagccagcattccaggcaggaataagaatggctaaggtttggaagtggggtctggagcatggcattgagaatccggggcctgcaaggtggacccaggatgtgtgtggggagatarctcttaggggggttagtgctgtgggcagccccacagggcagaccccaaagtcccagcttttcagacttcagtgcccacaagcaagagtggcccaggtggcctgtgttgcctccagggctggggagcgctgtgtcaggggaggttgcgtggacactgagaaggggcattcctgaatccactgaggatggggcttgtggacaccccagacagctctgggaatctggttgagatgtgggttctaagacacgccccacattacaactggga

SEQ ID NO: 792804 - DNA, 600 bp, Homo sapiens
tactgaacctctaagcctcagtttcttcatctatatcctgaggctaataatgtctcgatcctagaactgggccttaaaggatgggttccatgtcctttcattatttcctggcctctgcggatttgccttccctgggtgggagtgggagatcccctgacacacgctggtacccagtgtagggtcggaggcagctgagtcctcatctagttgaatggagggagccagcattccaggcaggaataagaatggctaaggtttggaagtggggtctggagcatggcattgagaatccggggcctgcaaggtggacccaggatgtgtgtggggagataactcttaggggggttagtgctgtgggcagccccacagggcagaccccaaagtcccagcttttcagacttcagtgcccacaarcaagagtggcccaggtggcctgtgttgcctccagggctggggagcgctgtgtcaggggaggttgcgtggacactgagaaggggcattcctgaatccactgaggatggggcttgtggacaccccagacagctctgggaatctggttgagatgtgggttctaagacacgccccacattacaactggga

SEQ ID NO: 792805 - DNA, 542 bp, Homo sapiens
gcagggctggacaggtgaggcagaggcctttctaggctgttttgaaggggacagaggcaggcagggccggtggcaccgaaacggcagctatggagaagagtcgacccatttccaaaaatagaccatccactgtcaggggaagcatctctttgtcttcccaaatctgtctttccgttggctcccaggttgtaaggcaagaaggaggcccgctcttgtctaggaatcagaggctcctttgagcgcggtgctcccccgcccgccacaagggcccgattgtgtgggrccctgaatgcgcccgcctgtcaccgcgcacggcaccggcccggctccctaatgagcccgctctgggagtggccctttgtggcgggttccggccacactgcccatgccaaggctctgtttcccggctgcttaatatccctcagcggctggtggaacaatgggacgctccccccacccagccaccctttctccagaaaattaagaagctagtttctccctctttcggcaccttctgtcctggctggcaggggaaggctccc

SEQ ID NO: 792806 - DNA, 571 bp, Homo sapiens
atgtgtgtgtgagggtgaggtgtgcaggagggatggaggaggaggtggctcctttgtgaccttctgtttccgtgagaacccttgggacacacctctcacccaggttgggggttccctgtcctggattaacttttgtttcacccagaggccaggccaacctaggcaggtttcggatatcgcctcctgtgtgggccagccctggttcaaacccsagctctggccctatgtggctgtggccaactgcccttcctcagaagcttggtttttgtgcctgtacagtgagggtggccatgtccatctcatgcaccatgtgcctgatgtccagcagcgcgttactgttcctcagtgattgtgtggcattgcgctgtggctctgtggcacttggttagggcttgtggaggtagaagggtgaaactggctggccactgccctcaggggtgccagaggagggaggggcaggagccaaggtgatgggcagagatgaaatggggagcaggacctggggacccccaggtagccagggggtttgcataggcccgggggcagagggtcagcttgctggagggcgtcg

SEQ ID NO: 792807 - DNA, 571 bp, Homo sapiens
atgtgtgtgtgagggtgaggtgtgcaggagggatggaggaggaggtggctcctttgtgaccttctgtttccgtgagaacccttgggacacacctctcacccaggttgggggttccctgtcctggattaacttttgtttcacccagaggccaggccaacctaggcaggtttcggatatcgcctcctgtgtgggccagccctggttcaaacccgagctctggccctatgtggctgtggccaactgcccttcctcagaagcttggtttttgtgcctgtacagtgagggtggccatgtccayctcatgcaccatgtgcctgatgtccagcagcgcgttactgttcctcagtgattgtgtggcattgcgctgtggctctgtggcacttggttagggcttgtggaggtagaagggtgaaactggctggccactgccctcaggggtgccagaggagggaggggcaggagccaaggtgatgggcagagatgaaatggggagcaggacctggggacccccaggtagccagggggtttgcataggcccgggggcagagggtcagcttgctggagggcgtcg

SEQ ID NO: 792808 - DNA, 613 bp, Homo sapiens
ccctgccctgtggagactgagggaggcaggggaactgtcctgtggcccggcccaggcttctagtggacacaggcagctttaccctggcaaggctccctgtgggcctgggggtggaggccttgtgggagccctgttctctgaggaggcccgtccctctccagaccttgcttcccttctgcagagatggcttggctcccatgggccctggtatcgggcagaggtggtctgtggctgttgatgaacaaacctgctcgcttggtgttctgcgactccgcccaggcggccactctctcacctgtttccctgccctcaagacctttctctaggccatagggttggggcagcagggaggaggcgtgcattgagtacaccgggcccagcgagcacagcccactctgcaccctcctccagtggcatttgaatgcccaggtggacagagcctgcgcagycccttccctgtgaggcgggcgtgatgctggcggtctgggggctgctctgagaatagagaagcagtgctggggccgggcctggcgcctggcatacaggtgccctggagtctctgtgtgtggtactcatggctctcctgcctcccctgaggttccactgatggtgc

SEQ ID NO: 792809 - DNA, 544 bp, Homo sapiens
cagatgggaaaactgaggcccagaagattcatgggctgtcctaggctctcccggcccagaccctcccacctcctggctgccccttcaccctacccagccctggctgcagcgttggtgcccgcaggcatgaggcaggcatgagggctgcgtgtgtgggtgggcagacccccttccttgctaagagggcagsctttggtggaggccactctgggctgaaaggtcctgggtccctttccctggtgtccagggagcatctatccagggggcagctggtgtgagtaggttcctacaaggagggaaagaacacctggctgtgtgcagggggtgagtggggcctaggtgcaggtttgatttttttttttaatttcaaaggggatgtgttccctagagaagcttaggaagatggggaaatgtagaagaaaaacccagacccatgcaacccagtcccgtggcctctgctgggaagatttctttcccctgagattgatctgtgtgttctctcccgggcaggggtgtgctggctgcgggcccacctgctgtgggt

SEQ ID NO: 792810 - DNA, 544 bp, Homo sapiens
cagatgggaaaactgaggcccagaagattcatgggctgtcctaggctctcccggcccagaccctcccacctcctggctgccccttcaccctacccagccctggctgcagcgttggtgcccgcaggcatgaggcaggcatgagggctgcgtgtgtgggtgggcagacccccttccttgctaagagggcagcctttggtggaggccactctgggctgaaaggtcctgggtccctttccctggtgtccagggagcatctatccagggggcagctggtgtgagtaggttccyacaaggagggaaagaacacctggctgtgtgcagggggtgagtggggcctaggtgcaggtttgatttttttttttaatttcaaaggggatgtgttccctagagaagcttaggaagatggggaaatgtagaagaaaaacccagacccatgcaacccagtcccgtggcctctgctgggaagatttctttcccctgagattgatctgtgtgttctctcccgggcaggggtgtgctggctgcgggcccacctgctgtgggt

SEQ ID NO: 792811 - DNA, 592 bp, Homo sapiens; identical to SEQ ID NO: 785562

SEQ ID NO: 792812 - DNA, 553 bp, Homo sapiens
tggtggactgccatgtgccctccctctccacagagaggatactgtgcagagtgaaggtgggtggtccctcccagtctttctggcctccccttgagacccagattgcaggttggagttgtagtaactgaactacaccctggggtttcaccattctcctccactcaggatggatgctgttcccttgctcttgtcctaacagttccacaggtmctctgttggtcactgtggcccttcagccctgacctcaaagggacgtgacagtgtagaaactttgggcctcctacagtccatgagagggcaatcccggttcccctcctgccctctactcccgttgcctgctctccttacctgccctgccctgggcaccagctgcagcattttgttttcccacttcactgcctgtccttgagcaatcatggtgtccaactctatgtggaaatgagtcctcagataccattcgcaccccagagctcccaacccacagggctccctcccaggcacagagcttagaaagagatatggaagaatgcactccaaactcacaaaaatggca

SEQ ID NO: 792813 - DNA, 595 bp, Homo sapiens
acttagactgatacatgtgccccacgtgcaaggtcaggtcagacccattttgaaaacagttggggcataaatcatccacagagtgcaggctctgcaggccttgttgagaggagcaaaagcccagaggcaggaacagatgaacttcagggcaggaaggagagcaagttccctgaggcaggggattcaggtgggaaaaaggacccagtggggctcaagaatggcaccttcggccgaggcgggcagattgcctgagctcaggagttcaagaccagcctgcgcaacacagtggaacccygtctccactgaaatacaaaaaattagccaggtgtggtggtgtgtgcctgtagtcccagttactcaggaggctgaggcaggagatttgcttgaacccgggaggcggaggttgcagtgagctgcgattgtgccactgcactccagcctcggcaacagagtgagactccatctcaaaaaacaaaacaaaacaaaaaagatggcaccttcaggccagagcgaggcaggctggggcagagggcgggctttggagacaacagatcagggttccagctctgaccctccctccccgtgtgacccaaca

SEQ ID NO: 792814 - DNA, 609 bp, Homo sapiens
gcaactgcacccagccaggtatttctttatagcgatgagagaagagactaatacatactccctgccatttcacacctctgagcctcagcacaggctgttccctttgcaggcatgccctttccctgctcttctctggcaggcagaattctctttattcttaaatcatggccatggccgtgggggaagccatgctaaccaatcacagcagctcctggggtttggggcaaattgtggaccaggcaccagggcagtgtgcccatgaatctgcatttcctcctcaaggcaaccatgggagggaggcctgttcttattaccactgcacagaggtggaagcagagacagcagaagggagcccaaagtatcatgtcacatgccagtgggctgrggtttgagccacgtctgctcagctctactggccagctcccaactacccatccccaacgccagttaagtgtccccacaccacagcaccctccctgcaccctacccctacagctccaggctgtctgcgggcctccctgttagagccgccggcctgtggcgtggtcattctttctatctgtgactgacaccctcccccacctgtgagtccaccaggccaagcctggg

SEQ ID NO: 792815 - DNA, 657 bp, Homo sapiens; identical to SEQ ID NO: 785552

SEQ ID NO: 792816 - DNA, 680 bp, Homo sapiens; identical to SEQ ID NO: 785553

SEQ ID NO: 792817 - DNA, 435 bp, Homo sapiens
tggtgttgtgaagttttacaataatgtgcccagtatggtctattttccacttctcttctggccctttttatggagagacttgtgtccatgagtcccagataattttttgattttatatctttattactttctttcctttcattttatcccattagatacgggacaaaaaaatcagggcattaagtgaacgctatcctggcctccggaaaccctcgtcccctccagcgtcactaggtgtatgcattcgaagtagcacatttgargattatttggggaatctggataacgttagagaaagatctctaaggtcagatgcttggggaggggtgtaccccacagcaatgggagtgtctcctagctcagcctgatgccaacaaacaagtgcctcatgtagctcagagcagatctggctgctaaatcactgtctcccaagat

SEQ ID NO: 792818 - DNA, 504 bp, Homo sapiens
aagtggtcaggtgcaaagacgtccttcaacgcacagtgataagaacatgatttcacagcaaaagacagataaagagaacatcatttgccagctacctggggcagcagtgacatagatttctgaagtcaaggagaggaggatctaaatcatsacagcttgacaacaaagcacaagctgagtttgtcagaggcattttcattgtctgggatgctcatttcaaattcctctgggaaggcaaagttactgctgctaaattttgtaacatctgaaaatctgtgacttttacaaccataaagaacagtcctgcaaaccttgataagaaagtttgcatcgacttcatcattacaacagatttaaaggtgagaaaacaaaggcaaacgataggtactaaccctctagtggaagttccaatccaaagcatgttcattatcattaccaaagcatgtagcaagagggccacagagaattttcctctcatttagaacattttgccttcacacaaaa

SEQ ID NO: 792819 - DNA, 616 bp, Homo sapiens
gggtcatcccacaccttagaggaggagaaacctaagggattctgtaatagagacacggggcatggtatgaaagtattacctcccagttgcaatttggcaaaggaaccagagtttccacttctccccgtacgtctgcccatgcccasagtttcctgatgctcactaaagcctcggtgggacccagagtgactgtcactaattctgatttctgggtccctagtgcccaaacacgggggacagatttaatggtaaggaagctttcaatcactgctgtgtccctagggatctaaagcactagagcacatgtgcttctgcagttcattttgaatttaaaggacagcttaggatctagaatagctgaatttccacctcaaaacattggttccgtcttgccaagcctaccttctgatatcatcagtgatgggatgtgtttttcttactagggtagaataggatgtctctccccaaaggactctggcagacagacccctaaacacctccaaattaaaagcggcaaagagataaggttgaactagacgtacatggggataaaaagtataaaaggtacatgggaatgaaaggataaaaaggctaaaaaaattaagtacctctaact

SEQ ID NO: 792820 - DNA, 616 bp, Homo sapiens
gggtcatcccacaccttagaggaggagaaacctaagggattctgtaatagagacacggggcatggtatgaaagtattacctcccagttgcaatttggcaaaggaaccagagtttccacttctccccgtacgtctgcccatgcccacagtttcctgatgctcactaaagcctcggtgggacccagagtgactgtcactaattctgatttctgggtccctagtgcccaaacacrggggacagatttaatggtaaggaagctttcaatcactgctgtgtccctagggatctaaagcactagagcacatgtgcttctgcagttcattttgaatttaaaggacagcttaggatctagaatagctgaatttccacctcaaaacattggttccgtcttgccaagcctaccttctgatatcatcagtgatgggatgtgtttttcttactagggtagaataggatgtctctccccaaaggactctggcagacagacccctaaacacctccaaattaaaagcggcaaagagataaggttgaactagacgtacatggggataaaaagtataaaaggtacatgggaatgaaaggataaaaaggctaaaaaaattaagtacctctaact

SEQ ID NO: 792821 - DNA, 489 bp, Homo sapiens
aatttttctaaattaccggaaattacccagcagccatctgagaaccccacccttttccaaattagactggtggaggccatacataaatatacaaatttagatcctgaaagccctgagggccagttcactctggccatacattttataagtcaggcttccccagacatcagacaaaaactccaaaaattagagcaaggcccacagattccctttccgactttattaaatacagcctttaaggttttcaataactgggaggaaacctcaaaaataaaaaagactcaattggaggaagaacaatgccatcgccaagctaattaygtggtaacacagcattgacacgttctttttcgttagttaataaccccaaggcatgtccctataatactaacagaatgggggcctgtcatcactgcagaaatccaggatattggcgtagagaacattccaaacctccaggttacaaagctgcccccaggatcctgtcct

SEQ ID NO: 792822 - DNA, 608 bp, Homo sapiens
tagaccaagatctggagccctctaagtgccctacagaatatttttcaaaaactttagacttggtaccccagggatggcacccctacttaaaaatagcagtggtccaagcacggtggctctcgcctataatcccagcactttgggagactgaggygggaggatcacaaggtcaggagttcgagaccagcctggccaacatggtgaaaccccgtctctactaaaaaaatatataaaaattagctgggtgtggtgtgcacctgtaatcccagctactcggggggctgaggcaggagaattgcttgaacctgggaggcggaggttgcagtgagccgagattgtgccattgcactccagcctgggcaacagacaaaaactccatatggggagggaaaaaaaaaaagctgcagtggccctcttagtccaaaaagcctccaactatattacctgctcctcctgggctcttagggctttgtggcactgccaataattatttaaactcttttcaagctttggccctatcccaccttgataattctcttcattatggtgattgcactctgagaacaatagttcccatccaaatcactgtcttgaatataacttccaat

SEQ ID NO: 792823 - DNA, 608 bp, Homo sapiens
agtaagcaacggggaaagatataccaggctggagtagctatattactttcacactaaacagacttaaaaattagaagatataaagagcagcactacatgataaaagggtgaaatttctaagaagacacaacagtcctttatatatatgtacctagcagcagtgtcaaatatgtgaggcaaaaactgacagaactccaaggaaaaatagataaaccccctatgttacagacttcaatgcacctctgtaatggaaagatacagcaggcagaaaatatgtaaaakagtggttgaactaaataacagcatctaacagacatttgtagaacagcagaatatgcgatcttctcaagctcacatgaaacactcaccaagacacatcacattgcaggccataaaactgaccttaacgaatcaaaaaaagaaaaaaatcagacatcatgaaaagtatgctctcagaccacaatgtaattaaaataaaagtcaataaaaaaggataactggaaaatctccaaatatttggagttattggagactcctaactaacatatagatcaataagaaattttaaggtaaacctaaaaatattttgggctaaatggaaacaaaaa

SEQ ID NO: 792824 - DNA, 608 bp, Homo sapiens
agtaagcaacggggaaagatataccaggctggagtagctatattactttcacactaaacagacttaaaaattagaagatataaagagcagcactacatgataaaagggtgaaatttctaagaagacacaacagtcctttatatatatgtacctagcagcagtgtcaaatatgtgaggcaaaaactgacagaactccaaggaaaaatagataaaccccctatgttacagacttcaatgcacctctgtaatggaaagatacagcaggcagaaaatatgtaaaatagtggttgaactaaataacagcatctaacagacatttgtagaacagcagaatatgcgatcttctcaagctcacatgaaacactcaccaagacacatcrcattgcaggccataaaactgaccttaacgaatcaaaaaaagaaaaaaatcagacatcatgaaaagtatgctctcagaccacaatgtaattaaaataaaagtcaataaaaaaggataactggaaaatctccaaatatttggagttattggagactcctaactaacatatagatcaataagaaattttaaggtaaacctaaaaatattttgggctaaatggaaacaaaaa

SEQ ID NO: 792825 - DNA, 598 bp, Homo sapiens
agctgtagcctctaaaatctctacagccagggttgggactaatattcaacccttaaactatcattgcattgatcagtaatcaatcacctagttatgcctcacttcgatagagctaggagaggcagtttatggctgtatcagaaataggatgaaggtgcctgggcatggaggctcacgcctgtaatcctagcactttgtggggctgaggcagaaggattgcctgaagccaggatttcgagagcagccttggtaacatrgtgagaccttgtgtctacaaaaagtaaaaataataaaatttaaaaaatacccagatgtgatggtgtgcgcctgtagtcctagctacttgagaagctgaagtgggaagatttcttgaacctaggagttcaaagctgcagtgagctatgaccatgccccttaaacagtgaaacagtgaaaaaaatagcataaaggaatatgtactgtaatatttaagtattggatttttagtaatgaaaagtttctaatggttaactgtgtttccccacaaagatacgtttaattcctaatgccatgtacctgtgaatgtaacaatatttggaaattaggtctttgcagatat

SEQ ID NO: 792826 - DNA, 524 bp, Homo sapiens
tctgaaggaagaccttaacactatggtgccaactccttgcctggatgaatggtgaaagaaaatatatatacaatgggatattactgggacatgaaaaggaataaaagtttgtcatttgtagcaacatgaatagaactaaaggttgttatgttaagcgaaataagccagaaacagaaagacaaatgtcacatgttctctctcctattgggagctaaaaaaaaaaaaaaaatgatgtcacagagatagagagtagaatgatagtcactagaggatgggaagggtgcatatgcgtggggcggggcagtggcaggggataaagagaagttggttcatggtacaaacatacagaaagatagaaggaataacttctaatktttgatagcagagtaggataactatagtcagcaacaacatattgtatatttcaaaatagctagaagagaggatttgaaatgctcccaacacattatataagtgataaatgctccaggtgatagataacctgaatcccctgacttgatcat

SEQ ID NO: 792827 - DNA, 649 bp, Homo sapiens
cattttataaatgcctcaaaagaactcttttcttatcctcattctatctccacatctggacttgagtattgtgaacaattgcagtttggtctaaagaattagtccatcactatgaattaccacacatcacaaaatgacttaaatcaccagtgttaagtaagtggtaggaccttatgattgaataaatattggttttctagaattgtaaaaacctcagaaagtgtatagttttgcttcaatcattttacaggtgtgggaaataaacatgaggtgaagggacttgcccaagatctcctaagttcatggcagagtggagactacaaacaagtttatttaagattgaaggttgttctacgatrccataatatttcaagtcaaaacttaaaatggacttgattttcggctttgtttaaacctgcaatttaaaaaactgagcaagatccagcccaaaatggcaaaaaggttttatgaatacacactttttgctaacagtcaactagaaaccaaatagaatagcaacgttactatcagagcagatcatgggtatattattgaaagcaagtgtaatgatgccagccttcagattccctaggatattttaaaactctcaagcacttctattacatagtttagggtcactggagaaaat

SEQ ID NO: 792828 - DNA, 588 bp, Homo sapiens
aaaaataaactttagttttctatttttaggaactattcctgtggtatcagttttgagctccttgctttcgggaatatgatttttcatagttaatacacaccatgggcgacagtcaataaagttacctattgacttgtctagacttttttggcaacttacaaaacttatactaaaaagactgtttctcctatttaatcttaaagagacttttgtccaattgatatatgtaaagatctctagaatacatccttcaacagcagtatagatatcttgttcatttgtggtcataatacatagtattatgtctacacagtaggactataatagctaatattaaatctacatagtctatatagtaggactataatagttaatattawatcaggcactatccctttctgctagatttttaaaagagaatttcacattcatatgggtattttctaatgttctgatttgttctgaatgttaggaaaaatgggtaagtcaatattttaatattagtacatatgagaatatcaaccaaagcaaacattaaaagccatggagacttgattaaaagttcacaaatcataaatgtaccaatcc

SEQ ID NO: 792829 - DNA, 602 bp, Homo sapiens
ggataattggcaagccacatgtagaagaatgaaactggatcctcatctctcaccctatacaaaaatcaactcaagatggatcaaagacctaaatctaagacccgaaacctaaaaaatctagaagataacatcggaaaaacccttctagacattggcttaggcaaagacttcatgaccaagaacccaaaagcaaatgaaacaaacaaacaaaaaaagataaatagatgggagttaattaaactaaaaagcttctgcacagtaaaagaaataatcagcagagtaaatagataccccgcagagtggaagaaaaatctttgcaatctatattggacaaaggactaatatccagaatctacaagaaactcaaacaaatcagcaagaaaaaaacaaacaatcccatcaaaaagtgggmtaaggacatgaatagacaattctcaaaagaagatatacaagtggctaacaaacatatggaaaaatgctcaacatcactaattatcagggaaatgcatatcaaaaccacaatgcgataccacctcactcctgcaagaacagccataaaaattaaaaaataatagatgttggtgtgggtatggtgaaaaggg

SEQ ID NO: 792830 - DNA, 646 bp, Homo sapiens
aagtcaaggatgtcttggagacataaaaggacaacttgttagatctccgtggctcacaagattgggttttcttagtgatcagttagctggtcagacaattaaagctacatggggaagaaatgaaatcagattcaaacttgatttgttgacggagcagatggagccacatcctgcgttccttttctgttgctaaactgctctgagctcatgagaatcacagaattttaactgcrgaaccatttcattgagaagaaaaccgcaactccccatatactgacgagtttaaaacatatttaaactttctgtacctgtctttggaagataagtatcaggatgtgtctgaattatcaagtatctgccctttgagtatcctcaattgtgaaaacttatccaagccaagagtgaaatatccctggaattctggagctaagcatacgaatcctaagattatcttaaaatatgtcaccactaggtagtgtctgagttcatctgctcaataaaaatatactctttcaatacattcttgagatgaaaacaaattaggcagtactatcaggaacgttaacctataagtgagatgtgccataattcttgagaaagtctgtaaagtactgatattttatgcatgattaaagtcagtgaatga

SEQ ID NO: 792831 - DNA, 646 bp, Homo sapiens
aagtcaaggatgtcttggagacataaaaggacaacttgttagatctccgtggctcacaagattgggttttcttagtgatcagttagctggtcagacaattaaagctacatggggaagaaatgaaatcagattcaaacttgatttgttgacggagcagatggagccacatcctgcgttccttttctgttgctaaactgctctgagctcatgagaatcacagaattttaactgcggaaccatttcattgagaagaaaaccgcaactccccatatactgacgagtttaaaacatatttaaactttctgtacctgtctttggaagataagtatcaggatgtgtctgaattatcaagtatctgccctttgagtatcctcaattktgaaaacttatccaagccaagagtgaaatatccctggaattctggagctaagcatacgaatcctaagattatcttaaaatatgtcaccactaggtagtgtctgagttcatctgctcaataaaaatatactctttcaatacattcttgagatgaaaacaaattaggcagtactatcaggaacgttaacctataagtgagatgtgccataattcttgagaaagtctgtaaagtactgatattttatgcatgattaaagtcagtgaatga

SEQ ID NO: 792832 - DNA, 578 bp, Homo sapiens
tccaattttctagagctggagtgggttaaaaagaagcagaacttggctaggcatggtggctcacccctgtaatcccagcactttgggaggcctaggtgggtggatcacgaggtcaggagtttgagaccagcctgaccaatatggtaaaaccccacctctactaaaaatacaaaaattagccaggcgtggtggcacctgcctgtcatcccagttactcaggagactgaggcaggagaatcacttgaacccgggaggtgcaggttgcagtgagccgagatggcgccactgcactccagcctgggcaacagaacgagactctgcctcaaaaaaaaaaaaaaaaaaaaaaagaaaagaaaagaagcagaacttatgtggaactgcaagacgaaacaagaacactggaggtggtggtttctggacccagtgaatycagaaggccccatggctccaggagacacctcagtccccagctaacaggacagagagctaagagtgctcacttccttattagtgtctgccactacaattaatgaactctggaaagatgtaccattttaatgatacagttattaaaaagg

SEQ ID NO: 792833 - DNA, 569 bp, Homo sapiens
cataataaaatagttaaaatacacacacgttggctggaagtggtggctcaggcctgtaatctcagcactttgggaagctgaggtgggaggatcacgtgaggccagaaggttgagaccagcctgggcaacatggtgtgtctggaattggtgggtttttggtctcactgacttcaagaatgaagccgtggaccctcgcggtgaatgttacagttcttaaaggaggcgtgctcggggtttgttccttctgatgtttggatgtgttcrgagtttcttccttctggtgggtttgtggtctcgctggcttaagagtgaagctgcagaccttcgcggtgagtgttatagctcttaaggcagcgtgcctggagttgttcgttcctcccggtgggttcgtggtctcgctggctcaagagtgaagctacagaccttcgaggtgagtgttatagctcttaaggcaacgtgcctggagttgtttgttcctccccgtgggttcgtggtctcgctggctcaagagtgaagctgcagaccttcgtggtgagtgttacagctcttaaggcagtgtgcctggagtt

SEQ ID NO: 792834 - DNA, 569 bp, Homo sapiens
cataataaaatagttaaaatacacacacgttggctggaagtggtggctcaggcctgtaatctcagcactttgggaagctgaggtgggaggatcacgtgaggccagaaggttgagaccagcctgggcaacatggtgtgtctggaattggtgggtttttggtctcactgacttcaagaatgaagccgtggaccctcgcggtgaatgttacagttcttaaaggaggcgtgctcggggtttgttccttctgatgtttggatgtgttcggagtttcttccttctggtgggtttgtggtctcgctggcttaagagtgaagctgcagaccttcgcggtgagtgttatagctcttaaggcagcgtgcctggagttgttcgttcctcccggtgggttcgtggtctcgctggctcaagagtgaagctrcagaccttcgaggtgagtgttatagctcttaaggcaacgtgcctggagttgtttgttcctccccgtgggttcgtggtctcgctggctcaagagtgaagctgcagaccttcgtggtgagtgttacagctcttaaggcagtgtgcctggagtt

SEQ ID NO: 792835 - DNA, 607 bp, Homo sapiens
gtgcaccaaggccttttccattctaacccaggcagctctccaggcattcagagcacccattcacctggaccagcatcctgagctgccccatccttcctgtgcagagactgtgatgaagcaggaccctctctgcctaacacccaggcagatctccaggcatcagagcatccaattacctgtatcagcagcttgatccaccccaccattcctgtgcagagattctggtagagggagatcctctctgctccatcccaaggcattcaaagtacctgcttgcccagattggcagcctgcaccaccccatctttcctgtgcagagatctgggtgcaggagagccctttccacttcatgcccaggcagatctccagacatcaggaacacccatgctcctggattatgagtttaggccacagycccaacccccaactcatacagagaacttaaggctgaggaggcttcccaggcacactgggaaactcctaggcacacctctgggcacttggtggctgcccactggattcccccagtggtggtgcttgtgcctgccgttggtggacttgtaggcaggcctgcctggtctggtcctacccgtggtggccccttctt

SEQ ID NO: 792836 - DNA, 614 bp, Homo sapiens
ttatgtatgtatctatacatacatacatacataacactatttggaacttagaatcttttattttgattttcatgatggcaatcacaagcatttccctctgttattaaatattcccagaaaatgttattctgatggttggatagtattttgttgcatgagcatctcagattgtaatattgtaatgcacatcagtgaacataaatatttggcctctgattggttccttaggatatgccccagaagtatattgtaaaagctgtgactatttgtcagactctcaacatttattmtgaaagtgtaggacagtagcttatccattagtaaacattcattaagccaaaagccattcacttggggtgtggggctgggggttaggttgataagaagcaagaggagagtaaagaacagaaaaatgggggaaagcttctgctgaagaagtgaaggagacaggatgagctgggaccctgaggcaccgacaggttaatggcctgtgtttttgatctcctttctttggcagatccatcaaatcttcctttacatatcccccctcatagctctggctaattctcaaattaggatttgaagtggcatgaacagtctagagaaaggagagg

SEQ ID NO: 792837 - DNA, 524 bp, Homo sapiens
cccagtcttcaagattgagatctgtaatcttaaatctgaattttaaatattactgttaaccaataattttctcccttttaaaaaaatatatatttcctatctctaactgaaccagactagaagaaatgataaacctgcagcaataaacatcctagcatctggattgtggtttttccacttagtctgtgtacggtatgctgctataacaaaatctgtagttaggtaatttataaagaacagaaatttattttttcacaattctggaactgggaagtctaagatcaaggcaccaggaggtttggttgtctggyaagggctgctttctgcttttaagatggtacctcattgctgtcctccaaagggcaggaacactgtgtcctcacacacatctattcatttgcttatttgtttatttaatgagtgccctagtaaacttcagtgttgacaaatcagtttattttcttttctcctactttttcttttctttttttaagacaaggtctcactctgtcaaccaggctgga

SEQ ID NO: 792838 - DNA, 552 bp, Homo sapiens
taattaaagccagcatagatttctttttttaaatttgccactcagactgcaggatctgatgccctcattaatgatttcaagaactacttagaatgtattagagcagggtgaccagtttaaataatttacaatctgcttagattatgctcttacatccaggatggaagagagtcttggaagacctgaggctgagggtatttgatttgaataaattaagcaggaaaaaaatctacattaatttgcaatggagtaattgatacagtaatatatattattaatttccatttgcaactggattaactatgtaaatatatacatgccttgcagtgtgtcaggatgacaggamaggtagggaaatgatttctggtccagtctacctgtacagatttcttgagaatgatggccttaactgtcaagttaactacacaaagcaattacgttgagttaccatattttacagacacatgtttagccattaattggctcatcctcctgcatccagtcctcctgagtaaaaggaattttgaaaaacagattaagaatttatgtcag

SEQ ID NO: 792839 - DNA, 440 bp, Homo sapiens
attttatttcttaaaatttcttttatagaaggctagaagtttaaaatcaaggtgttggcaggcccaggcactctctgaacaccctaggggagaattctttcatgcctctttccaagtactagtggctgccagcaatttttggcattctttgcttgtagaagcatccctytaatctatgtctccatctgcacatagcactctccatttgcatgtgtttctacatccgaattctcctcttcttataggaatataagtcacattggatccaggactcaccctagtccagtatgacctcatcttgccgtgtttacatctacaaaggccctattttcaaataaggccacatgcaggtggtttcaggtggacataaatctggagggagatactattcaacccagtacagcaacctcaaattccatctgcagccttaattcccctta

SEQ ID NO: 792840 - DNA, 435 bp, Homo sapiens
cagagccagcgagaagaaagctctgctgttggcgccatgtcggtgctgctgtgtgaaagcagccgcaggaagcaaacacgcccgtgttgatgacttcgctgggacaataaaccgagcaaagatacttccaaatcttcaacacctgtccagtattcccattagaaagcaaccccaaataaaacaacacgaaggccggaggagcacgccaggtctgtcacactgtagactggaggtgggcctggggacacaccagagcctgtggcccccaccctgagcaccagggcaccasagggcaacgccatctcaggcctggctttcctgcattccctacatgctgctgccaaccacacaagacagctgattccatttacacccaaatccttcgccacagcatggggtgacagcaggccaccaacttcacaggcagaccctcac

SEQ ID NO: 792841 - DNA, 613 bp, Homo sapiens
atcttgattgttttcagggaagggggcagggttgagggcttcagcaaaggggcccacaaaggtggacgtgttccaccagtaacttgctctctagtgactgaggagtcaccaaaggagccacaggcagcaaagacccagctgcccagaaagcgtggctgccgggaggccgctctrtgtgccgcttcctcctgaggatgaaagctaagaagtaggcgtgcctccggccaaacctggcttttagtgttattttgtggggtcatccattctgcctcacctctgcaagggatggtccgggccacgctggaaacatcgtgcaaagagactctgccagttagggccgctgagccccatctgcacagctctaggttcttgccaaaacccattcccagtcattggccaaggctttatttgaagacagtctaaggagtgctcagatcccaggtgactgacctccaaaacacatttttttctttttctttcttctttttttttttctttctttctctcttttttttttttttttttttctgatggactctcgcccaggctggagtgaagtggcatgatctcagctcactgcaacctctgccccccaggttcaagcaattcacct

SEQ ID NO: 792842 - DNA, 533 bp, Homo sapiens
atcccatcacctcccaccaggtcctgcccccaacaccggaatcacagctctgagatttgggaggggacacggagccaaaccacatgacccaggagcaggagtcccagactcaacaaccccggaagggaagattgcttcttatcttagaggaatgccccaccaccaccaccgaacggaagaaaagaaagcatccatctgggttttaatgtaactttaggaaaaaatagcagaggtacaacgattttytttcccccaaaataacaaaaaaacaaaaaacactctgaaaatctgaaatagtaaagcaagaggcaggaggaacgagcattggaatttttttggtgtggttatattatccctaaaataaccctccagttccaggactatttcagggtttgacttggccttcgaattaggcagttagttttcttatttcagggagatgagtcagggtgtcactaagcctcccttctttgtgaagctaatctgatgcctgggagaggcctcctaggtgagcaggcccctggcaccaggaa

SEQ ID NO: 792843 - DNA, 651 bp, Homo sapiens
acacaggatcctaaattttgcatgaaagggaggtagagccaggcgctgtggctcacgcctgtaatcccagcactttgggaggctgagacgggcggatcacgaggtcaggagatcgagaccatcctggctaacacggtgaaaccccgtctctactaaaaaaatacaaaaaaattagccgggcgtggtggcgggagcctgtagtcccagctactcgggagactgaggcaggagaatggcatgaacccgggaggcggagcttgcagtaagccgagatggcgccactgcactctagcctgggcgacagagcgagactctgtctcaaaaaaaaaaaaaaaaaaaaargaaaagaaaagaaaagaaaaaaatgtaaacacaatatagcaacttttgtgatacagcaaaagcaatgctaaagggggagtttatagctataaatacatcaaaaaccaagaaaatctcaaattaacaacctaactttacaacttaatgaactataaaaagaaaaactaaatccaaagctggcaaaaagaaggaaataataaagattaaagccaagataaatgaaatagaaaatagaaaacgatagagaaaatcaatgaaaccaaaaattggttctttgaaaatgtcaaagcattattcacaatatcttga

SEQ ID NO: 792844 - DNA, 546 bp, Homo sapiens
acatttggagtattagctaaaatgggtatttaaaaaattatggcttttcatgaagccatacaagcctcagagtatagagtcatagaaagaaatggacttaggaatcagacagggtttttatttccagctatcctcgtaggtgtgggacttgagttaacctttatagcattggttttctcattttgaaaaggaaaataatatgtcatagagtttttatgagaattaaagaaaataaggtatgtaaatatataatacacatgrtttgtcctattttgacactttgaaaatgatcattattaaatgttctgcggcacatcttgaatttttgtatttgaggctattgtcttgagatcaaaatattaaaatttttgcttgggtagtagttctgctctaaagttaaattatatgtttcctcttttgctgatttagagcagcttttaacatttcctagaggcatgttccagagcttggcattatagttagatttttttttctctgacagatatatcttattctaaaaaataatctggaattgtatccttgtct

SEQ ID NO: 792845 - DNA, 608 bp, Homo sapiens
ttacctacattgtttttgaacaaatgtcaggtataagaaatactgctcttattaaaaatgaaatgaaaagggaaaaaatgagattttggggaaaagattttgtattataaaagaacgagataattatggcaagctaaacagaggaagaacatatttttaaaatatgtactacaagcaagaaaataagctttagacagcatttgctttgtactctcaagttaatgaaagaaaatagggcctctttggaaaataaaaagagataaaataacagattttagtaaagaaagatctggtagtgctgaggaaaggattcaaggaaatggaaaactagaacatgcaattagcaaaattaaaaataatgtgagatgctatagagagtggaatggatttcaatgaaaatggatcagtgatatgtatatcaagattttgaggctttgtctactcaaactgtaaaaacactrtagactgggtggcttaaacaacagacatttattttttacagttctggagtctggcaagtccaagatcaaggtgcctgcatatttggttcctgatgagggctgtcttccttacttgcacatggccaccttctcactgtatcctacata

SEQ ID NO: 792846 - DNA, 651 bp, Homo sapiens
ccagagtggcagctgacttctctctgcatggcagacttcagcctcatctttgggaaaacatgctcaataaaacagcacttagcacagcatagatgatccatggccactggaaactggtgagaataattaagaaacgatcaggtcataagaaagaaagaggtgccttctttttttttcttttttatttgagacagagtctccctctgtcacccaggctggagtgcagtggcaccattttggctcaccgcaacctctgcctcccaggatcaagtgattctcctgcctcagcctcctgagtagctgggattacaggtgcccgccaccacacccagctaatttttctatttttattggagacggggtttcaccatgttagtcaggctagtctcgatctcctgacctcaggagatccgcctgcctcggcctcccaaagtgcagggattataggtgtgagcyaccatgcccggtcagaagtgcttcattttttgttagtctgttgatttggcctggcttatggactatgaatttctttattcttttgctaaatattctttctaagaagaagagaagggacagggtacttgtgttgcttctggctatttaaagcagaggaataacatctgcatgctgccccttcatgcccaccctctg

SEQ ID NO: 792847 - DNA, 616 bp, Homo sapiens
taatagagaatttgccattttaaccatttctaagtgtaatgatttagtggcataaattacattcacaatcttgtgctaccatcaccactatctatttccaaattttttcgccttcacaaacaaattctgtaaccattaagcaataactccccactccttccaacccaactccctggtaacctctaatctgctgtctcttaattcatctgttccagatattttatacaagtgcaattatacaacatttattctctttctgtctggcttatttcacttagcatactgttttcagggtctgtagtatagtacatatcagaacttcattttytatggctgaataatatttcattatatatatatgtacctcattttattcattcatctgttgatggatatgtggatttctgcttttgactattctgaataatgttacaattcagagcattggcatattaataacctgtttttaattctttggggaatatacctaggagtggaattactgggtcatatgatagttctatctttaactttttgatgaactatcaaactgtcttctacagcatctgtgtgattttacacttccgccatcaacgtacaagggttctgatttctc

SEQ ID NO: 792848 - DNA, 614 bp, Homo sapiens
gtgcccatctctgaaatgaacatgatagctaggggaatagagtactcaaattagccagtctgggtcaccctgccatccctctgggcaggggatcagagcaacatgacttaccagcttcactgacactgcaggaaatggaccctttcccaaataaaaatacaggccttttgtccaggcctgtaaaataatgactctctattagcagagggtacatccttatctattttttgttgtgtttttactcagctacattggctctggtgtctgagtcatacttggttgtttcacgaggcatcacawtttttttgaggtcacagggagatcattttttacatttttactctggaggtaaatagcacttcagccagtcagtgatctaaaagtgtgtttcccaaaatatctaatttactaccaggcataacctaggttttgggagaaatgaatatattatcacttagattctcattacagagcaagatgattacctttcttataagaaaaatgtagaactattggaggaaaaatatttttgctagtcccaaagaattaccctcacacatttttgcaggtgcttattggttgaatcataagatatttggccaggatcccaaatt

SEQ ID NO: 792849 - DNA, 655 bp, Homo sapiens
tctctgaaatgaacatgatagctaggggaatagagtactcaaattagccagtctgggtcaccctgccatccctctgggcaggggatcagagcaacatgacttaccagcttcactgacactgcaggaaatggaccctttcccaaataaaaatacaggccttttgtccaggcctgtaaaataatgactctctattagcagagggtacatccttatctattttttgttgtgtttttactcagctacattggctctggtgtctgagtcatacttggttgtttcacgaggcatcacaatttttttgaggtcacagggagatcattttttacatttttactctggaggtaaatagcacttcagccagtcagtgatctaaaagtgtgtttcccaaaatatctaatttactaccaggcataacctaggttttgggagaaatgaatatattatcacttagattctcattacagagcaagatgattacctttcttataagaaaaatgtagaactattggaggaaamatatttttgctagtcccaaagaattaccctcacacatttttgcaggtgcttattggttgaatcataagatatttggccaggatcccaaattttgttctggcaccaactgtcaggtgtctgtggctgaagggacattcga

SEQ ID NO: 792850 - DNA, 573 bp, Homo sapiens
tccaggttacttccagcctctcctacatctgacattggcaaaatgctccacatcagcttgtgtgttatgttttgccttaaaacagagctatcggtctcttaggtttcctaatgacgttctattatgctcattctgcaccgcagtctcctcgtcataaaaaagtcaatctgtgtgcctgggtagtagggtagtttgagtagcatgtactatatatatttggagttatccttctccrgaaaacaactagcctagtgagaataaaacaagtagacaaccatctgcaaaccaggaagtggggcctcatgagagaccatagctgccagcaccctggtctcggacttcctagtcttcacaactgcaagaaataaatatttgttgtttaagccacccaatctatggtaatttgttatagctacccaactgaccaagaaaatgcttctaagttataaaatttccatttgttcttctttgtgtcgtttatttatttgttcttttaagagtgtttacaattgcttgctggagcatttttataatagcagctttaaagtctttgtcagataatcctaacaaatg

SEQ ID NO: 792851 - DNA, 430 bp, Homo sapiens
gtaataaaaagtctcctgcaacaaaaagaaagggggaaaaaaaaaaaaaaaacaaaaccgtacctgagagcttctctactgaattctgaattttgccaagcatttaaagaagaactaatgccaattctactcaaactgttgaaaaaaatagggaaggaaatatttcaaaacttgttctatgagacctgtaytaccctcgtaccaaaatcagaacaacacatcaaaaaacaaaaacaaacaaaacacacacaaaaaaaccctacagctcagtttttctgatggacattgatgtaaaaattctcaacgcatcagcaaactgaactcaacaatacgttaaaaagatcatctaccattttcaagtgagacttatcccagggaagcaaggatagttcaacatatgcaaatcaattattgtgatacattgtatcaa

SEQ ID NO: 792852 - DNA, 618 bp, Homo sapiens
attgtagaataagattctttctcggccgggcgcggtggctcacgcctgtaatcccagcactttgggaggccgaggcgggcggatcacgaggtcaggagattgagaccatcctggctaacgtggtgaaaccctgtctctactaaaaatacaaaaaattagctgggcatggtggtgggcgcctgtagtcccagctacttgggaggctgaggctggagaatggcatgaacctgggaggtggagcttgcagtgagccgagatcatgccactgcactccagcctgggtgacagagtgagactcygtctcaaaaaaaaaaaaaaaaaaaaaagattctttctcaactgagtagtctccagaggctggaggcatggggtcaagtatgagctggtctagttgctgccatttatcttctaagagcataatctctcttgcttcctcatcacacaaatgtgctagctgtgtctctaacagatcctcagtccattgatcaaactggccttggatttccctcctctcctttttgctgtaggtggatatcttagtattctgtattgaggtgtgatgcactccagagcttgttctagttgcagatgttaaaacagggagcagttgtgctttcc

SEQ ID NO: 792853 - DNA, 584 bp, Homo sapiens
gaaacctatgaactcaagtatttggtttaaaaaaataaaccctgtgttgcctctaccaaagaaagcccccaagaggtcccctgcgtaggtctccagaggtcactgactgcttctctgttgctgtccacagagaacgtgtccatgagaagcacttgcaaatcatgatgaggcagatgtcaagcacacaggaaatcacattacatgtcagctcaaggaactcccaaatacacgytgggttttggaagaaattttccacatgtgtaatgtgaccctctgctgctgtccgcccaggcacttgccttggccagcattctcagttaactgaggtgcagaggtcacagaacctatagaatttgttccatatcactctgggcccttatttcctcaaggccaagatgtctcgattcaccaaaaaaaaaaaaaaaaaaaaaaatcctttaaagataaaagaatgtaagctggggagacagttacactacgcctctctcctgagcaatctcgctacttgaaaaacctgtcaacattgtgcaactgcctccctgcttagacacctcaccgctgctgcccctgtgaccacagaatgc

SEQ ID NO: 792854 - DNA, 584 bp, Homo sapiens
gaaacctatgaactcaagtatttggtttaaaaaaataaaccctgtgttgcctctaccaaagaaagcccccaagaggtcccctgcgtaggtctccagaggtcactgactgcttctctgttgctgtccacagagaacgtgtccatgagaagcacttgcaaatcatgatgaggcagatgtcaagcacacaggaaatcacattacatgtcagctcaaggaactcccaaatacacgctgggttttggaagaaattttccacatgtgtaatgtgaccctctgctgctgtccgcccaggcacttgccttggccagcattytcagttaactgaggtgcagaggtcacagaacctatagaatttgttccatatcactctgggcccttatttcctcaaggccaagatgtctcgattcaccaaaaaaaaaaaaaaaaaaaaaaatcctttaaagataaaagaatgtaagctggggagacagttacactacgcctctctcctgagcaatctcgctacttgaaaaacctgtcaacattgtgcaactgcctccctgcttagacacctcaccgctgctgcccctgtgaccacagaatgc

SEQ ID NO: 792855 - DNA, 442 bp, Homo sapiens
atcgatatagcagagactctgtgcctcaaaggcaaggcaatgtctttccatcctcaagagacccagcatccagcaggcactcaagaaaggatgggtgaaccatttattagtgggtaaagcaatggatgaactgaaacacagtctgtttttagttgatgtcccagtaagagtgttagggggaagtcaaggtgttggaggggttgctctagatttcaatgatccacaccatctctaatttcttactaatyaatcaaatagtgaatgtctaacaaatggggaaggtactatgctgggccaagtagccatgtaatgggtttctgaatctcataattcaacatcatcttcttcaactgacacttgtctttccaggtcaattaagcaggcagcctcattagttcatgggtagacaacacgcagaacagacaaagcaggacctgagggc

SEQ ID NO: 792856 - DNA, 618 bp, Homo sapiens
aacttcatcaacttgattaaaaaaatctataaaaaatctacagctaacatgatacttaattgtgggaagcagggcattttcattctccctatgatcaggaataaggcacggatatcccctcttactatttctattccagatcatactggaagtcctagccrgtgaaatgggttataaaatgtaaatacagttgagagtaagaaataaaactttccttgtttacagatgattatataagtaaagaacctcaaagaagaagacagaaaaactcctagaattaactagagattatagtaagtttgcagaattgaattactttcttccacattagcaaaaaagattgaaatttgagattttaaaaattaaattagcacccccaaaaagagaagtgcttaggtataaatgtaataaaatatgtataggatctatacacagaaaactacaaaacaccaatgagataaagcaaatttgatctaaatattaataaacagagacatagttcatattctttggtaggaaggttcaggactgttaagatgttgattcttcctaaatttaccagtaggtttacctcagttttaatcaatattccacaagctattacataaatacctacaa

SEQ ID NO: 792857 - DNA, 618 bp, Homo sapiens
aacttcatcaacttgattaaaaaaatctataaaaaatctacagctaacatgatacttaattgtgggaagcagggcattttcattctccctatgatcaggaataaggcacggatatcccctcttactatttctattccagatcatactggaagtcctagccagtgaaatgggttataaaakgtaaatacagttgagagtaagaaataaaactttccttgtttacagatgattatataagtaaagaacctcaaagaagaagacagaaaaactcctagaattaactagagattatagtaagtttgcagaattgaattactttcttccacattagcaaaaaagattgaaatttgagattttaaaaattaaattagcacccccaaaaagagaagtgcttaggtataaatgtaataaaatatgtataggatctatacacagaaaactacaaaacaccaatgagataaagcaaatttgatctaaatattaataaacagagacatagttcatattctttggtaggaaggttcaggactgttaagatgttgattcttcctaaatttaccagtaggtttacctcagttttaatcaatattccacaagctattacataaatacctacaa

SEQ ID NO: 792858 - DNA, 618 bp, Homo sapiens
aacttcatcaacttgattaaaaaaatctataaaaaatctacagctaacatgatacttaattgtgggaagcagggcattttcattctccctatgatcaggaataaggcacggatatcccctcttactatttctattccagatcatactggaagtcctagccagtgaaatgggttataaaatgtaaatacagttgagagtaagaaataaaactttccttgtttacagatgattatataagtaaagaacctcaaagaagaagacagaaaaactcctagaattaactagagatkatagtaagtttgcagaattgaattactttcttccacattagcaaaaaagattgaaatttgagattttaaaaattaaattagcacccccaaaaagagaagtgcttaggtataaatgtaataaaatatgtataggatctatacacagaaaactacaaaacaccaatgagataaagcaaatttgatctaaatattaataaacagagacatagttcatattctttggtaggaaggttcaggactgttaagatgttgattcttcctaaatttaccagtaggtttacctcagttttaatcaatattccacaagctattacataaatacctacaa

SEQ ID NO: 792859 - DNA, 606 bp, Homo sapiens
taaaatatgtataggatctatacacagaaaactacaaaacaccaatgagataaagcaaatttgatctaaatattaataaacagagacatagttcatattctttggtaggaaggttcaggactgttaagatgttgattcttcctaaatttaccagtaggtttacctcagttttaatcaatattccacaagctattacataaatacctacaaactgattctaaagttcatatggaaaggcaaaagccaaaaatagttaaaaaaaaaaaacaagtcaagaatgatggtttccagtttcattcttgtccctgaaaaagacatgaactcatcctttttatggctgcattgtattccatggtgtatatgtgccacattttctttatgcagtytattattgatggacatttgggttggtacaaagtctttgctattgtgaatagtgtcacaataaacatacatgttcatgtgtctttatagtaacatgatttataatcctttaggtatatacccagtaatgggattgctgggtcaaatggtatttctagttctggatccttgagaaattaccacactgtcttccacaatggttgaactaatttacactcccac

SEQ ID NO: 792860 - DNA, 644 bp, Homo sapiens
agctattacaccatgaataggacaaaaaatttagaaaacattctttcagtatttgataactattattagattcaacaaagaattcattcacatcattgatgaatgagtgaaattctagcatgtcttcactgtttcatttttgtcttactcattaacataaataaaattatcaaccaatattcacatcagaactacattcacttgtcaatgacatgaagagtttctttgctgaattggatagtaatcaagcatttattcatagtctgatattgtgatgctgttgttggattataaaaatgatagtggatttataaagaaatggcaaatcacatggaaattactatggttaggtgcactttgcaaaaaataatattgcgtatcttattatttgtactgtctatatcaaaaatttataataaagttaaatrggtataaatatggaaacactttccagaaagagtcaattgttaattatttaccagcacaccactggtatgagtattattacctgcatcttacagagtaggagactggggctcagaaagtgtacttacctgcccaaggttgaaccactagtaagtgcaagagatatgactgactagaactcaggattgcctgaataaaacacatactcctttcttcaa

SEQ ID NO: 792861 - DNA, 663 bp, Homo sapiens
ggtatttctttatagcagtgtgagaacagacaaatatagaaaataaacaatagataatagggactactagagaggattggaaaggggggtaagggatgaactacctattggacatagtgctcactacctgggtgttgggatcattcttaccccaaacctcagtgtcacacaacatacccatgtaactaaactgcrcgtgtactctatgaatctaacataaaagttgaaattattaagaaaaagaaataatccaataaaaatgggcaaaagatctgaaaaaatacttctcaaaagaagacatatgaatggccaacaggtatgtgaaaaactgcccaacagctctaaccatcagagaaatgcaaatcagtgtcagaatgagatattattttacctcagttaaaatggcttgtatcaaaaagacaggcaataatagatgctgtgaggatatggagaaggggaaaccctagtatactgttggtgggaatgtaaattagtacagccactatggataatggtctagaagtttctcgagaaaactaaaactataactaccatatgatccagcaattatactactgggtatatatccaaaggaaatgaaattccaggctcaaagtattgtctgccctcccatgtttattgtagcaatatttacaccaacca

SEQ ID NO: 792862 - DNA, 608 bp, Homo sapiens
aatgtattgtatattataaaatagctagaagaaaagatattaattgttctcaccacaaaaaaagatacatttttgagatggatatgctaattatcctgacttgatcattacacaaggtatacacgtattgccctaaatatgtgtaattattattattgtcaattaaaaataaaataaaactttaaaaattatgatgtattttagactacatctaattttatttcttggttcacaaaattatgcagctgatttagttggaatcaattagatctwagggctataaaataagtattttgcaaggaaacaaacaaaatcaccaaacttatgtaactctccctatagagtgatgtgagtagaggtcaaaaaacttcctatcttccctgataaccagtgactccactttattcctggacttaacactcctatagcttctaacatcccaaatctacttttcaaagtttgaggattctgcctcttttgacaatttctctgtatttaccacctagatttattaactttctgtaaattctttcatttgccaatactaccactactgttttgaaatgtgtattttcaaatgttagaaactaattttctatatatctggt

SEQ ID NO: 792863 - DNA, 506 bp, Homo sapiens
ttttgcattttacatttaggtctgtgatccatgttgagttaatttttgggaaaggtgtaaggtgtctagattaattgttcttgcatgtggatattcagttgttctaggttcgtgttttgaaaagactatctttgctccattatattgcctttgctcctttactgaacatcagacatttatgtaggtstatttcttggctctccattctgttctattgatgtatttgttctttcaccagtactgcactattgtgattactgcagctttatagtaagtattgaagtcatatagtgttagtccttcaacttctccttcaaatggtggctgctctaggtcttttgcctctccatatactttcgaaacagttatcaataaacacaaaataacttgctggaattttgactgggattccattgtacctatagatcaagtcgagaagaactgacattttgatgtactcagtcttcttttctataaacatgggctatctcttcatttatttatta

SEQ ID NO: 792864 - DNA, 658 bp, Homo sapiens
gagggaagtataaattacaatactatactgcagcttgaccttttctgtaagagggaaggcaaattgagtgaaataccttatgtccaagctttcttttcactgaaggagaatacatgcaaagcttgcaatttatatcccacaggaggacctctcagcttacctccatatcctagcctccctatagctccccttcctgttagtgataagcctcctgtaatctccccttcccagaaggaaataagcaaagaaatctccaaaggaccayaaaaccccctgggctatcggttatgtccccttcaagctgtagggggaggggaatttggcccaacccgggtacatgtctccttctccctctttgatttaaagcagaccaaggcagacctggggaagttttcagatgatcctgataggtatatagatgtcctacagggtctagggcaaactttctatctcacttggagaaatgtcatgctattgttagatcaaaccctggccttcaatgaaaagaatgcggctttagctgcagcccgagcatttggagatacctggtatcttagtcaagtaaatgatagaatgacagctgaagaaagggacaaattccctactggtcagcaagctgtccccaatatggatccgcactgggatctagactcagatc

SEQ ID NO: 792865 - DNA, 658 bp, Homo sapiens
gagggaagtataaattacaatactatactgcagcttgaccttttctgtaagagggaaggcaaattgagtgaaataccttatgtccaagctttcttttcactgaaggagaatacatgcaaagcttgcaatttatatcccacaggaggacctctcagcttacctccatatcctagcctccctatagctccccttcctgttagtgataagcctcctgtaatctccccttcccagaaggaaataagcaaagaaatctccaaaggaccacaaaaccccctgggctatcggttatgtccccttcaagctgtagggggaggggaatttggcccaacccgggtacatgtctccttctccctctttgatttaaagcagaccaaggcagacctggggaagttttcagatgatcctgataggtatatagatgtcctacagggtctagggcaaactttctatctcacttggagaaatgtcatgctattgttagatcaaaccctggccttcaatgaaaagaatgcrgctttagctgcagcccgagcatttggagatacctggtatcttagtcaagtaaatgatagaatgacagctgaagaaagggacaaattccctactggtcagcaagctgtccccaatatggatccgcactgggatctagactcagatc

SEQ ID NO: 792866 - DNA, 528 bp, Homo sapiens
aaatatgcgattatgtaaagcaaccaaacttatgaattattggcattcctgggagagaaggagaaaaaataaacaacctggaaaatatatttggtggaataattcaagaaaatttccctaatcttgccagagagatagacatccagatacaaaaaaatccagcgaacacctgtgagatactatacaaaatgaacatcactaargaatacagtcaccaggctgggtcaatgctaaagaaaaaaatctcaaagatagttagagaaaaagggcaaattacatactaaaggaaccccatcaggctaacaatagatttcttagaagaaaccttataaaccaagagagattgggggcctgtgttcagtagtctgaaagaaaagaaattccaaccaagaatttcatatctcatcaaactaagcttcataagaaaagggaaatataatcttttccagacaagcaagtgctaagggaattttttttcccactagaacagcttacaagaaatccttaagggacttctaaacatggaaa

SEQ ID NO: 792867 - DNA, 634 bp, Homo sapiens
catctctcctggatagcattggatgaacattgccaaattcccatgtttatatcttacagtgctttccaattttcccatgcttcttttctatatctaatgccatagattcatctcaagatggtgaagcagaactacagactggcttgcccaattcyattccctcttctcgtgcgtcttcctgccctgtagtaggggaaactcattctccacactcacttgcagctcgagctcctcatgtgacttaggcactgctaagcagatgcagtgatgtgagtcttggaaggagcgagtgagaaaagtcagctgttggccttgtgcagggagaggggaccttctgacaagcatagtggcaatagccagcaggggcagggcagctacggacccagaagcttcctgatcatggcagaggcctggtgcttccggggccctgctggcaacagctcccttagtagaccggttcttttgagaggttcagtctagattgtgtaccttcaaccctcccaatgattttttggagctattagtagccctttatacctctccttttgcatacactagccagaggattctgtaatttacaacaaaaatcacagcctcacacagatggatcctatacataggatgccatcatcaa

SEQ ID NO: 792868 - DNA, 644 bp, Homo sapiens
cagagacagaaaaacaatttggagaaagagatattttgaagactatgtgacagaaagaaagaagaaagaaaaaaggaggaagaaagagaaaacgtgaaggaggagcagaatattcttcttttggaaggaaaatacttccagattgtgtctgtttttttaaagattccgtgggaggatatccagagacactccttgatttaaaacttcagccttccctcccgcaaattcggctctgggtgcctatcaatgctacaggacagacgtgggcccagataaggctgaaacacacctcaactctccgtctcgggttttgggctcaccttagatgcactctaactctgctctgtcagrcatccaggaagaactacatgcatttgggtcaatttggatggaggaaatgaagaattatcgagtaagaaatcaccattcctcttttgtgtactggcaggctcaaccctgaatgtaccttcctactttaatgtctgaaatgtattaataaattacgataaagaatgaaacagtgaaaacaaaaccccagaataaaagaaaagaaaacgtgtcctgtggaccgaattatggaacggtcctgctcaggagggaataaagtctcatgttttcctgacctgggactggtggagaaagaa

SEQ ID NO: 792869 - DNA, 644 bp, Homo sapiens
cagagacagaaaaacaatttggagaaagagatattttgaagactatgtgacagaaagaaagaagaaagaaaaaaggaggaagaaagagaaaacgtgaaggaggagcagaatattcttcttttggaaggaaaatacttccagattgtgtctgtttttttaaagattccgtgggaggatatccagagacactccttgatttaaaacttcagccttccctcccgcaaattcggctctgggtgcctatcaatgctacaggacagacgtgggcccagataaggctgaaacacacctcaactctccgtctcgggttttgggctcaccttagatgcactctaactctgctctgtcagacatccaggaagaactacatgcatttgggtcaatttggatggaggaaatgaagaattatcgagtaagaaatcaccattcctcttttgtgtactrgcaggctcaaccctgaatgtaccttcctactttaatgtctgaaatgtattaataaattacgataaagaatgaaacagtgaaaacaaaaccccagaataaaagaaaagaaaacgtgtcctgtggaccgaattatggaacggtcctgctcaggagggaataaagtctcatgttttcctgacctgggactggtggagaaagaa

SEQ ID NO: 792870 - DNA, 644 bp, Homo sapiens
cagagacagaaaaacaatttggagaaagagatattttgaagactatgtgacagaaagaaagaagaaagaaaaaaggaggaagaaagagaaaacgtgaaggaggagcagaatattcttcttttggaaggaaaatacttccagattgtgtctgtttttttaaagattccgtgggaggatatccagagacactccttgatttaaaacttcagccttccctcccgcaaattcggctctgggtgcctatcaatgctacaggacagacgtgggcccagataaggctgaaacacacctcaactctccgtctcgggttttgggctcaccttagatgcactctaactctgctctgtcagacatccaggaagaactacatgcatttgggtcaatttggatggaggaaatgaagaattatcgagtaagaaatcaccattcctcttttgtgtactggmaggctcaaccctgaatgtaccttcctactttaatgtctgaaatgtattaataaattacgataaagaatgaaacagtgaaaacaaaaccccagaataaaagaaaagaaaacgtgtcctgtggaccgaattatggaacggtcctgctcaggagggaataaagtctcatgttttcctgacctgggactggtggagaaagaa

SEQ ID NO: 792871 - DNA, 627 bp, Homo sapiens
agccttttctgagcctctgcagctaggtgtggccatggttaagttctatccaatggtatagaaagagaaatattacgtgggacttcagagaagcatccctaaaaggtggagcaccccattttttggtttcttttctgctgctagaataaggacatgctagstccaaactgagtggtcctcaaggaccataaggaagaagctacatgtggacaatagtgggtgacaacatggaaggagctatagaacttgacacctcggagcaccaggtcagccctgcactatttacttctagtctttttatacatgagagagaaaaagaaataaacttctacattttgtttgttgtctcacgcgtccgtgtgaagagaccaccaaacaggctttgtgtgagcaacaaggctgtttatttcacctgggtgcaggcgggctgagtccgaaaagagagtcagcaaagggtggtggattatcattagttcttacaggttttgggatagggggtgaagagccatgttttgcgggcaggggtggatctcacaaagtacattctccagggtggggagaattacaaagaaccttctaacacacatatctagggctaatcctaccggatacattagacaaattact

SEQ ID NO: 792872 - DNA, 627 bp, Homo sapiens
agccttttctgagcctctgcagctaggtgtggccatggttaagttctatccaatggtatagaaagagaaatattacgtgggacttcagagaagcatccctaaaaggtggagcaccccattttttggtttcttttctgctgctagaataaggacatgctagctccaaactgagtggtcctcawggaccataaggaagaagctacatgtggacaatagtgggtgacaacatggaaggagctatagaacttgacacctcggagcaccaggtcagccctgcactatttacttctagtctttttatacatgagagagaaaaagaaataaacttctacattttgtttgttgtctcacgcgtccgtgtgaagagaccaccaaacaggctttgtgtgagcaacaaggctgtttatttcacctgggtgcaggcgggctgagtccgaaaagagagtcagcaaagggtggtggattatcattagttcttacaggttttgggatagggggtgaagagccatgttttgcgggcaggggtggatctcacaaagtacattctccagggtggggagaattacaaagaaccttctaacacacatatctagggctaatcctaccggatacattagacaaattact

SEQ ID NO: 792873 - DNA, 547 bp, Homo sapiens
accaacatcaataattcaaaaatagtcaaggcaatatagaatgcctttgcttagctttctttgttatctccttctggtaataataataataataataataataataataatgtttttctcaagggaagaagagaatatacagttacctaatgtctaccaatcactgtgctgaggcacattaaaaagaattatcatagttaattccaaagcagtccaacaatgctgttattattatccccaagttaatgatatggaatctaaggtaactcagagtttaaccaatcagtgacaaggtcttaggccaaatctctctgtcttcaaaacctgttttcaggaacattgargtgaagcccaagtacagaggaaacagtagaacctctgtgatttagtcaagtcctggccaaagtgcctttctcaatgcctattttacagtttaacctctgaatatgaaataaagaaatggaacaaatcattgtctttgttcattcctactgctataacaaaatatcttaggctgggtaatttataaacattagaaatttatttc

SEQ ID NO: 792874 - DNA, 559 bp, Homo sapiens
tgaaacccaggtggaaccaagaaaataagatgaactaattaattctcataatttaaggaacaattgaacagccaaactctagtcaggacagtaatgtgtgaaacctcagaaacacttgagaccagggaatcacagtggagacttcagggcactgtctmcatttctaaccttgcttttctacatattggcttcattcttctttcttaccaagatgttttctctacacagcaaaaagcatgactactggaagctctaagcttaggaacaagagcagagagagatggtgtctttatctttgtcacctaaatatgaatcccagggagtgattttgatatatctgagtcacatgttcaccttttgagtgaatcattgttgccagggaaatgggttactctggtcagatccaggtctcttttacatgttaatcatacctcaagaaaatgtttcattttgttttaatgaactcatttcttattatggggttaggtgaagaacaggctttataaaagctgaaatttcggatggaaaagggaaaactttaaaacaaattatttagtag

SEQ ID NO: 792875 - DNA, 559 bp, Homo sapiens
tgaaacccaggtggaaccaagaaaataagatgaactaattaattctcataatttaaggaacaattgaacagccaaactctagtcaggacagtaatgtgtgaaacctcagaaacacttgagaccagggaatcacagtggagacttcagggcactgtctccatttctaaccttgcttttctacatattggcttcattcttctttcttaccaagatgttttctctacacagcaaaaagcatgactactggaagctctaagcttaggaacaagagcagagagagatggtgtctttatctttgtcacctaaatatgaatcccagggagtgattttkatatatctgagtcacatgttcaccttttgagtgaatcattgttgccagggaaatgggttactctggtcagatccaggtctcttttacatgttaatcatacctcaagaaaatgtttcattttgttttaatgaactcatttcttattatggggttaggtgaagaacaggctttataaaagctgaaatttcggatggaaaagggaaaactttaaaacaaattatttagtag

SEQ ID NO: 792876 - DNA, 629 bp, Homo sapiens
ccatgaaaatggggatttgtgattaccctgtgtctgtgtcttcttttgtcctctgtccaccatcattgtctcccagtttgagaaatatgaaaatagtggaagtatggagctcattaaaaactcagagaaatatcctaaaatgtttttaaaaggctacataggccaggaacggtggctcatgcctataatcccagcattttgggaggctgagtcaaggggatcacatgagccccagagttcgagactggcctgggcaacatggtgagaccccatctatacaaaaaacaaaacaaaatataagtaagccaagcatggtggcacatgcctgtggtcccagctactaggaggctgacatgagaggattccttgaacccaggaggtagaggttgcaatgagccaagattgcaccactgcactccagtgtgagtaasaaagccagcctctgtcaaaaaaaaaaaaaaaaaaaaaaaaaaaaggctacataattttcatggaaaactgtgaaaatttttatctctgcatttttggaagtgaagattaaaaaagacatatccgtatgacaagtatatggatacagttctttttgttgttctttgtttgtttttactttgttttgagatggagtctca

SEQ ID NO: 792877 - DNA, 408 bp, Homo sapiens
acttcacctaacctccctttttccacagctgctatgacatgctacattgacagcagtgtcatttgtaaacagctgaaaaacctctctcatagacccaagtacttggcccatgctttctttcccttggatgttatggaaaatatcagtagaaaagwtatgatggattttagttctttcttgaaaactcttggttcatcattaaatacaagttacagtacttgcttacaaggtatggcacaaggttatgatgaggaaacatcatctcttcaaccctttacacaaccttcaatttgtgaaaattttgaagcaggttattttctacataattaaaatatctgttacaagactaactctgaacagaagaaactgtcaatataaagttatgtgagatacaaaatgactgatgaa

SEQ ID NO: 792878 - DNA, 509 bp, Homo sapiens
cagggtgcagtcacctgtttaggccctttcagcaactaagtattcccaagacaagtgtgagaaatccatactcatctaggatttccttaacttgtttttgtttgtttgtttgtttgcttttggtggtccatcttgccacaatagaataaattgaaggagataaatttgtgatatatgactgtacatttaagatattggaaatgataatattatggtgcttcaaatgctctgtgaatgtgtccacagatatttgctggtgaataccacgtgtcctttgcttattgaattattgcctttgaatatgaaygtatgcagtgaactacatggcatatgaagtatccttcactcctcttttctaagagctttatggtattttagtttattatgtatatattttggagacaggttcttgctctgttgcccaggctggagtgcagtgatgcaatcacggctcactgcagccttgacctcccagcctcaagggatcctctcgcctcagcctcctgagt

SEQ ID NO: 792879 - DNA, 597 bp, Homo sapiens
ttcgagatctcatccctaggtttggactgcccttacggattggctcagacaatgggccggcatttgtggctgacttggtacagaagacggcaaaggtattggggatcacatggaaactgcatgccaactaccaaccttggagttccggaaaggtggagtgaatgaatcggactataaaaaatagcttagggaaagtgtgtcaagaaacaggattaggcttagggaaagtgtgtcaasaaatgggtacaggctctccccacagtattgtttaaaatcaggtgtactccttctaaaagaacaggatattccccttatgagatattgtatcatagaccccctcccatattacgaggacttccaggcactcctcaggagctaggagaaattgagctgcaatgacagctacaggctttagaaaaagttacacaaacaatttcagcttgggtaaatgagagatgccccattagcttattctccccagtttaccctttctccccaggtgatcgagtgtggatcaaagactggaacatagcccctttgtggccacggtggaaaggatgccagaccatcatcctgaccactcccaccaccatgaag

SEQ ID NO: 792880 - DNA, 597 bp, Homo sapiens
ttcgagatctcatccctaggtttggactgcccttacggattggctcagacaatgggccggcatttgtggctgacttggtacagaagacggcaaaggtattggggatcacatggaaactgcatgccaactaccaaccttggagttccggaaaggtggagtgaatgaatcggactataaaaaatagcttagggaaagtgtgtcaagaaacaggattaggcttagggaaagtgtgtcaagaaatgggtacaggctctccccacagtattgtttaaaatcaggtgtactccttctaaaagaacaggatattccccttatgagatattgtatcatagaccccctcccatattacgaggacttccaggcactcctcaggagctaggagaaattgagctgcaatgacagctacaggctttagaaaaagttacacaaacaatttcagcttgggtaaatgagagatgccycattagcttattctccccagtttaccctttctccccaggtgatcgagtgtggatcaaagactggaacatagcccctttgtggccacggtggaaaggatgccagaccatcatcctgaccactcccaccaccatgaag

SEQ ID NO: 792881 - DNA, 597 bp, Homo sapiens
ttcgagatctcatccctaggtttggactgcccttacggattggctcagacaatgggccggcatttgtggctgacttggtacagaagacggcaaaggtattggggatcacatggaaactgcatgccaactaccaaccttggagttccggaaaggtggagtgaatgaatcggactataaaaaatagcttagggaaagtgtgtcaagaaacaggattaggcttagggaaagtgtgtcaagaaatgggtacaggctctccccacagtattgtttaaaatcaggtgtactccttctaaaagaacaggatattccccttatgagatattgtatcatagaccccctcccatattacgaggacttccaggcactcctcaggagctaggagaaattgagctgcaatgacagctacaggctttagaaaaagttacacaaacaatttcagcttgggtaaatgagagatgcccmattagcttattctccccagtttaccctttctccccaggtgatcgagtgtggatcaaagactggaacatagcccctttgtggccacggtggaaaggatgccagaccatcatcctgaccactcccaccaccatgaag

SEQ ID NO: 792882 - DNA, 580 bp, Homo sapiens
tgatttcagggaaatttacagcattgaaggcatttatttgaaaagatctaaaaccagaaacaagcttctatttttgaaaattctagagaacgagcaatttaaccttaaagcactcagaaaaaaagaaataataaaaattagggcagaaaycaatgaacttgaaaacaggaacaacagagaatatcaataaaaccaaagccttggttatttgaaaagatttttataaattgataaatctctagccagactaatcaagaagaaaaaaacagaaggcatacatttaccaataccataagtgaaagaagggacatcactattaatcacatggatattaaaaggataataaaagaacactaagaacactctatgctcactaatttgataatttagataaagtggatcaattctttgaaaggcacaagctaccaaaagtcatagaaggagaaacagataatctaacaaggccaatatttattttaaaaattgaacctataattaacctttccaaaaataaagcactaggcccagatattttcactgggtgtattatacaaacatttaagaaatgacatcaattttc

SEQ ID NO: 792883 - DNA, 629 bp, Homo sapiens
aaatattatattcaatgagaataaagagaaaataatgtctactacatttaagaatacataaagcaaaggaaaataaatcagtgaaataaagtgcaatgccaaccaaagcaggagtgcagaagtttggttgacactttatatstagcaagtgagctttcctaaatttcttttcctatgtgtatttatcaaattcttgcaattaaggaccaaggctacaacatgctgtgaaaacaagagaaagtagttaaggagcagaagctactaataataactgcatggtaggataaggagtttggacaaagtaaactattttattacagaatacttttctaaaggtataaattcatcctttttatcatttcattggaataaagaaaaagttgaaatatattattggcttataatctttcatgataaacatctgtccttaattgcttaaagaacagtggccaggagtggtggctcacacctgtaatcccagcactttgggaggctaaggcaggctgatcacgaggttaggagttcgcgaccagcctggtcaacaaagtgaaacccccgtctctactaaaaatacaaaaaaattagccaggcatggtggcgcgcacctgtaatcccaactacttgggagg

SEQ ID NO: 792884 - DNA, 638 bp, Homo sapiens
gttccttatatattattatatttatttctcacaagtacatgagggagatcttaatcttcctttaaagatgaagaaactgattcaaagatgtgaattttcttgtcaaaagtcacacagtttgtatttccacgagtaacccaaagacattttcaaaaatactgtaaacagatatagkttgacttcttctcttcctatttagatgcttttatatttttctcttcccttattgctctggctaggatttccagcactgtgctgaataggagtggtgagagttggcatccttgtcttgttctggtgttcaatgggattgcctccagtttttgtccattcagtatgatgttggccatgggtttttcatagatggctcttattatttttacttcactaattattagagaaatcaaaatcaaaatcataatgagatatcatctcacttcagtcgaatggctattattaaacgtgaaaaaataacagatgctggtaaagttgtggacaaaagggaatgcttatgaactactggtggaaatgtaaattagtttatccattgtgaaaagcagtttggttatttcccaaagaacttaaaacagaattaacatttgacccaggaatcccattattgagtatacgcccaaagg

SEQ ID NO: 792885 - DNA, 496 bp, Homo sapiens
tggatgatagtattcttgagcatttattttgcatccagtcgctctatatgtatccttgcatttcatcttcaaaaactccatgaatgagggataacattattattttcactttacagatgaaaaaaatgaggtgcatgctccagttaggtaactttcccagaaacacataatttgcaaatggtggagccaggatgcaaatccagatggaataactttakagcgtattaattaacttggatagaaagaggcaacttaagaggggcattatttgggggcaaagaagatggtcatatttgagacctgacaaatataagaaggttgtaggttaagtaagtgaagataaggaggcagacagcgtagcacagtgataaagaacatggttgtgaaatcagacgtggattgagatctcactctgtcaattatcacctctgaccagaggcaaattacttaatctctctgggcgttacagtaccttatgtataaaacagagataaca

SEQ ID NO: 792886 - DNA, 605 bp, Homo sapiens
ggggatatcacactctggggactgttgttgggtgtggggaggggggagggatagcattaggagatatacctaatgctaaatgacgagttaatgggtgcagcacaccagcatggcacatgtatacatatgtaactaacctgcacattgtgcacatgtaccctaaaacgtaaagtataataataaaaataaaataaaatttwaaaaaaagaaaatgtggcacatatacaccatggaatactacacagccataaaaaaaggatgagctcatgccctttgcagggacatggatgaagctggaagccatcattctcagcaaactaacacaggaacagaaaaccaaacaccgcatgttctcactcataagtgggaggtgaacaatgagaacacatggacacagggaggagaatatcacacaccaagagtctgttgggggtgggagactaggggagggatagcattgggagaaatacttaatgtagatgatgggttgatgggtacagcaaacctccatggcacatgtatacctatgtaacaaacctgcacattctgcacatgtatcccagaacttaaagcataataaaaaataataattaaaaaaaaaagaa

SEQ ID NO: 792887 - DNA, 605 bp, Homo sapiens
ggggatatcacactctggggactgttgttgggtgtggggaggggggagggatagcattaggagatatacctaatgctaaatgacgagttaatgggtgcagcacaccagcatggcacatgtatacatatgtaactaacctgcacattgtgcacatgtaccctaaaacgtaaagtataataataaaaataaaataaaatttaaaaaaaagaaaatgtggcacatatacaccatggaatactacrcagccataaaaaaaggatgagctcatgccctttgcagggacatggatgaagctggaagccatcattctcagcaaactaacacaggaacagaaaaccaaacaccgcatgttctcactcataagtgggaggtgaacaatgagaacacatggacacagggaggagaatatcacacaccaagagtctgttgggggtgggagactaggggagggatagcattgggagaaatacttaatgtagatgatgggttgatgggtacagcaaacctccatggcacatgtatacctatgtaacaaacctgcacattctgcacatgtatcccagaacttaaagcataataaaaaataataattaaaaaaaaaagaa

SEQ ID NO: 792888 - DNA, 596 bp, Homo sapiens
caaggaatttccctctggagcctccagaaggaatgcagccttgtccacaccttgattggagccctgtgagacccatttaggacttctaacccccagaactgtaagttaaagtatttgcattctttgaattcactgaacttgtaataatctggtacaatgacaataggaaacaaatacatgatctaataactttattatataattataaagaatctttggggcaatatatatatactatatatatacacttatatatacatatatatacacacacatatgtaacctaatttaatatccattactaaaatgattatcaacatattycagttgattcaaccttcctttacttttcaaagacttagatcactgttggatttagtgaagaaccatgactaaaatatcaaattatttatctcttagtcaacttaacataatccatgttacctgccttaaaagtacttgcaactgtattaaccctttacaattactgatctaaaattaagcttactttatttaatgttacttagtttattgttgacaattcagaaaacagtattctaaataagagatgatgttgaaattttgttttattttga

SEQ ID NO: 792889 - DNA, 605 bp, Homo sapiens
accctccagttttaaaactagtcacccaaactttcagagaattattcccaaatgagcatcgtggctgtgtctttaagaggccattcaatgttccactagattggcaaattctggttgattcagtatgtggtagtatttgtctctaggcagtgactcccatcttcatatcttcattatcacacatctttcattataaaagctcccctggtccagtataatatctgtaatatcccatgctgataatctagatattccctgattcttccatgctgttgcttgccaaaatgctgtcagcagggaaggcaaactcataaaaaattatgtatctattccagtgaggatgaatagtytctcctccaacttaccaaaaactgattcactggtcttcaattgatggtgccaaaagtaggacttggcatcagtccttgctgttgatagcccatgcaaggaactgatacacggcccctactgatacatgtaggggccatccctccatcccagacaccatgattattccattcattttttcaccaaggttgccaaaggtggagactggcttgttttctccaccacgcatgtcttctgatatgtttccaaatactaga

SEQ ID NO: 792890 - DNA, 648 bp, Homo sapiens
ggtttaaaagcacagattatttaaaacttacttaaaactaagaaaaaaagagaaatgaatgaagaaaaaagaattacaactccaatatctgataacagaagaattatttggcatctgtaggtcaagagtatttagaaggcgaagaaaatttcatcaaataaaggagagtcgagcaagaatgtttacacatgaaatgtaaatactattttaagaagaattttattattgtaggaatcattaattcttataataccaaactggataaaacattttatagcaatatatagttgcctatttytactgtattaagtagtgatataacaaaacaacaaaaaaagacttcccagtctctttcattaaaatgaaaattgcattgaatctaaatcagaaaggttttgcataaatttgtaaatcagatatttgggcatgtaaggaagaatctaaatatcttaatatgcattgtgtccaccaactcctgggttctgcctgtttatattaaaccttatttttaacatgaaaattgattgaaaaatgtaacccaaacaagtgaatatattagcatacggtaaaacaaatgtcctagtttgaacacagttctgtagtctacatctacgtaaaatacagcacctaaatgtcaaaaatatttct

SEQ ID NO: 792891 - DNA, 607 bp, Homo sapiens
agaaaaaaaaattttaaagtattgtaagaaaaatacaactaccaaaattgacataagaaaaaatgaaaaatctgaagcgtcctaaactgttttaaaaaataaatgtataaattaaaaaaaaaaaaacttaccacaaagaaaactgcaggtccagattgctcaccagaaaattgcagcaaatgcctaagtaagaattagtgcaaatctcagttctagccagagctctctgacaagagaatgaaagagcattcaaattggaaaggaaaaagtcaaattagctttgtttgcagatracatgaccttattttgagaaaaccctgaatactttaccaaaaactgttagaatgaataaatgaattcagtaaagttacagaatacaaaatcaacatatgaaaatcagtagcatttctatagaccaacaggaagcaatctgaaaaataaatcaagaatgtgatcctatttacaatagctacaaaatatatgaagcttcagatttctacaagcaaaattataaaactctgatgaaaaaaactgaagaggatgcaaaaatggtatgatgttccaagctcatggattggaagaatattgttaaaatatcaatactatc

SEQ ID NO: 792892 - DNA, 616 bp, Homo sapiens
caccaccgagcattcaattatgccctttcttctgctcagagcaggttccttctatgagtaattaattctaactaaacctccagagtccgtttgaagtaccatttcctcaaggcagccttcactgcctgcataatctagatcaaaattttgtccattttagcaatagcacaattgtaaataactgattgtgtgagttgttattagtatctgtttctcaaaaaaaaaataagttccacaaattctgggacttcatcttggtcattactgtattcctacttcccagcacagagaagtactcaatctcagtatctatatgaatggaatttacaaataaaatttataatgagtacaatttataaatgaaataaaagcgggagtacataaaatgttttcacatagattatcatatttaattctaacagaaaactctatagtaaataacaatattatcatcttacagagaagaaaaggagaaaactgagtcctctgctgtattatgagagtaagyatatgcctgtctttcttggtgagaccaatggttcactctgcacaatttctccaatagtatcaagaattgttttgttaataaatatgattgtcaaccactaagataagt

SEQ ID NO: 792893 - DNA, 632 bp, Homo sapiens
taccaaaggtatctgaaaccgtattaacattggtatgttcccaactttgatatgttcccaactatgcacagtgtattttttaaaagggactcttggatgaatttctagcttctccaaaaaaatgaaaacaactgaactttacattaagttatgtaagtctcagagactgtgctaaattcttcaaatacattattttatttaatcctcaaaacaaccatctgaggtggatattatttccatctccatttaatgggtgaagatattaggcactaagcagtaaattaattttcctaagactagaatgtgtacaaagctataatttgaaccaaagtagtctgattttccagaactttgctcttcctctttgcctaagaattcaaaattagagtgctcttctgacaacaattatttacatctggaacattaagaactrtgaggcttaccaggacctccttttaacccatggatatgacaaagcttgcttaccctagagatttaattgtagatctctgtgctagttatttatttgccttacttcctccatttctcttgttcttttattctcattaagcatttgtattatcttgctatattttatgcattctctgttagctgtcttacatcccttctgt

SEQ ID NO: 792894 - DNA, 596 bp, Homo sapiens
cgcccgcccgcggggcagcgcagcagcgcagcgccggtgttcccttcggaacaccgcgcaaagtgatcgagtgcttttcctccactttccctcacttcgcgccccacccggctgtcccgaccaccctcaggatgttttcctctggtgtgcctctgggccaaatcgtgctaaaaatcattttttttcttttatgcaaggacactttgtcacttggtttccgtcagtctcctgagaatggggaatttaggtctagcgtggttcacagttctggttttttaggagttatacttgaaagctcaatgtcggacacatagcatgaaatccgtcactggtgctttgcatttgtcttggaaaggacatacrccccgcctgtcccttttactaactagggagactgtgaatattcccaagcccagcaccacgtgcacacgccgccagctggctcgcgcgttttccacggagccctctggaggggagggagcgcggttcggactagcctctcccgaacaccaagtgccgctcttagccccgtccagcccgccctgttcatcgggggcctcgccgcgccagtcgccccggctgccttatgtaggtat

SEQ ID NO: 792895 - DNA, 505 bp, Homo sapiens; identical to SEQ ID NO: 765214

SEQ ID NO: 792896 - DNA, 594 bp, Homo sapiens
tagcagatagccagaaacgagcagcccagggagccccctgggaaaagaagtcttggagatgttgcccactggcagtcagcaaaaagggcaagatcacatctggtcttgtggttggggctcctccagccctgaaggggatttatcaagccctagctggaggtaaccacgctaaggactttccccactgamgagcacgtgcactcctccaaaaactcactctagaatagctttttgctcattataatagtaaaaagaacacccctggatggagattttaaatgctaatgagacacacgatgtgtgtactggcatgtataaccacagagcatgtgcgcccaaagggacctcctgaaacaggattgtaaagtgacaccccctcatgccccttcatgaataatcatgtaagagtctcatgaagggcatttccccagcactagtggctgctggctctttcttttgtgcagcctactctctcgtctttcagagcttactgcttctttagataaacactgctactatgctactatgacttttccagctggaccagcctggaacattttccattgctctctaggcatgtactttatcttcctt

SEQ ID NO: 792897 - DNA, 660 bp, Homo sapiens
ataatgtatctctgagtgttcttttttgggtttatcttatttgggatcctttgagattcatgcatctgaatgtccatatctttcttaaaatttcagttgttttcagacagtatactttaaaataagctctcttctcctttctgtctctcttctcctcctaggactgccataatttatatattcatatgcttgatagtgtcccataggtcccttatgctttttatttttttgctctttttcaatatttttctttttctttcctctaattggctaatttcaaatgacccatatttgagtttgctaattttttcttctgcatgattktatctgcacttgaagctctctattgaagttctcagatctgtcactatattcttcagctccaggatttgtttggttcctttttatggtttctatttccttattaaacttctcattttgttcacacatcatttttctaatttcatttagcaatctatctgcattttcttgaatcttattgtgcttctttaagatgattattttgaatttttttcagccaatttagtgatatccatttctttggtgtcagatattagagctttattagtctccattggttggtgttaacttgattgttatctctgcagccttgcattggtttctgtgaatctgaaggag

SEQ ID NO: 792898 - DNA, 575 bp, Homo sapiens
taacacagaacatcaatgccttagagcaaaggaatgcataatgtggtgaatttcagcaacctgactgctggagccattccatttctatttttattgtatagggtgagttatccccaacactcatattattccacagagcattgccttcttaacctatatataagctcaatcctgctgacaaaactctataaaatgtccagggatattttcttctgaaagaaaaaaaaaaaaaaagaggctgggtgcagtggctcacgcctgtaatcccagcactttgggaggccgaggagggtggagcacctgaagtcaggagtttaagarcagcctgaccaacatggtgaaacccagtctctactaaaaacacaaaaattagccaggtgtggtggtgggcgcctgtaatcccagctacttgggaggctgaggcaggagaattgcttgaacccaggaggcggaggttgcagtgagccaagatcatgccattgcacttcagcctgggcaacaagagtgaaaccccatctcaaaaaaaaaaaaaaaaggattaaggcaaatctacataatcatctgcatgaactgta

SEQ ID NO: 792899 - DNA, 608 bp, Homo sapiens
ttacatccaaacctggggaatgcctgtatctttccgccccagatagggccaggatgattcatctcaacccagtggtgtgcccttgtgaaaattaattaacctttttggaccacaatggcctctatcaaatgacagtaataaagcttcaccttgtgcgttggcgtgagatggagtgggagggggtgtgcagcccctcacgaggcatataaaggagcctcgataactgggagctcgtgttttaatcaaagccccattgtcacgggtttattcacatcctcttctcatttcaaagagggttccttgggctcacaatggctcatcagttagagtggcaggatcggaactgcagtttggaggaggaaagaaaaggacaggctgggaaatgaacaggaagtgagaacaggagcagggcccaggcggggctggtgcacaggacgtcacccccaggctgggatgcrcccggggctacaggatacacgctgggcccggagcctacacctgggccactgactcccagggatccgagtctgtgtgctgggccttatgtaaaaccacagggcaaaccagggcatctcttcattaaggatgaaaaacttatttatgaaaaa

SEQ ID NO: 792900 - DNA, 600 bp, Homo sapiens
gatttatctgttcccattatttacaaagcctgagataaagagagatattcatctaatttaagaaaagcaccatgcaaccaactgataattggcaagaaaaaatagactcagggaaacaatagagaatggtggggattgtggcaaaattggagtgttcacattttatccaaagggagctcagttacaactgatagctgccatgtgaaaaagaagaccctatgttgttatgttttcctattttcaagaagaagctggagacccaaatatgagaaatttcscaattttgaagtatattgaaagagagagtctcattttgaagaatttcaagaaattatatcagttaagtgtcttggtttgggtttccccagaaacagaccatgagacaaggactcaaagacaaatggtctatttgggagacaatctcaggaaatacccctgggagagtgggaagggagagtcggggaggagaagaagaacagatatgctctcgaacagtaacttctggaagcagcaaaggttcagattggtcagagatggtatagaacagtgctttccaaatggtctatggtgaaagatttgtttctgttgccaagccatgga

SEQ ID NO: 792901 - DNA, 600 bp, Homo sapiens
gatttatctgttcccattatttacaaagcctgagataaagagagatattcatctaatttaagaaaagcaccatgcaaccaactgataattggcaagaaaaaatagactcagggaaacaatagagaatggtggggattgtggcaaaattggagtgttcacattttatccaaagggagctcagttacaactgatagctgccatgtgaaaaagaagaccctatgttgttatgttttcctattttcaagaagaagctggagacccaaatatgagaaatttcgcaattttgaagtatattgaaagagagagtctcattttgaagaatttcaagaaattatatcagttaagtgtcttggtttgggtttccccagaaacagaccatgagacaaggactcaaagacaaatggtctatttgggagacaatctcaggaaatacccctgggagagtgggaagggagagtsggggaggagaagaagaacagatatgctctcgaacagtaacttctggaagcagcaaaggttcagattggtcagagatggtatagaacagtgctttccaaatggtctatggtgaaagatttgtttctgttgccaagccatgga

SEQ ID NO: 792902 - DNA, 539 bp, Homo sapiens
ggccccactccagacctaccaaagcagaacctgtgagggtggaagcccaaccatgtggattttgacaagcctcccagagaattctaatatatgctcaagtttgagaaccacagctcgattgcattttaaagcaattaggccaaggggaaatatccttgttcttacataaaaccaagatgaccttaactagcattggctcctttctttcaacaggctcaaagtgaactcattttcataagaattgcattgtttaaataaatatgaagtttaaactgtatatatcctgtcccatgccaataagtccaatgcatacaaatcactttaaaatccacccatggagatctgtactcagygatgttgctagaatcactcctctgttagatatcaatagtggcagatgataaactctcttctgcaatgtgacaccttctttactaatagaccattacgctgtctgaatcagagtttcactgattaaacaggaaatgccatctgtagagtctggtatccttccagggtctgcaaaggttgggaccaga

SEQ ID NO: 792903 - DNA, 534 bp, Homo sapiens
gtgcatggcaggtcccttttgtgctggatccatctgcaggtcttcagctgcggggtagagaaacccaggaaatactaatcaccattgtcctttggaggcttattagaaagtaagtaactctgaagttggctgatagtattcatacgtgattctctggctggtaggacccaggtccaagtatggagtaccaagtgaatttgtcctctcaccctttcctattctgttctttctttttgtcctctcccrtgggttcttcaaaataaattaagtttagattctttcaaaagtatgcttggccttttacccggctctctatcgagtcttgtagtggtgcagatgtgtgtctacggagtagtccccatacccccatcactttgtattatttacaatctcaaaggcatagtcatacgtatctgccacccagccccaacaaccattaacccatggccagtcctgcccagccacactcccaccccttgccccatgcatgattctgaagcaaatctaggacatcataccatttcaaccataaat

SEQ ID NO: 792904 - DNA, 607 bp, Homo sapiens
ccacctttggtagcctgcctttcacccctgtaaaatggagatatcgatgtgagttctagcgaggctcaaaacggatccctggctggaagtattctgagaatcatgatgcatggcacacacgcggggcctgccacagytcagccccttggttctggctgctggaatgtggttcttgtggccccacaatgagtattttatacttctctcttgggacataagcctgtctctggatagcatcgtgttcctcctgagacacaaaaaggagctcattgcctttagagctgacccgagcctcgtactggagcctggcaggcaagcatcttcctcttctgggacctgcctcagttttctgacttaggaagtgggaatccaggttctccccagttccagttcttcacagagtcctgggggtgcccttggcctcttgtctcggcctcactgcttctatctgagaaacacctggcctccatgctttcccgcctgagctccattgtccacacctctgccagagtgatccctccaggagaattctaaggactctacttccctgctaagaaatctccaactctgaacagaatgaaatccagactcctcatctctcatcttg

SEQ ID NO: 792905 - DNA, 607 bp, Homo sapiens
ccacctttggtagcctgcctttcacccctgtaaaatggagatatcgatgtgagttctagcgaggctcaaaacggatccctggctggaagtattctgagaatcatgatgcatggcacacacgcggggcctgccacagctcagccccttggttctggctgctggaatgtggttcttgtggccccacaatgagtattttatacttctctcttgggacataagcctgtctctggatagcatcgtgttcctcctgagacacaaaaaggagctcattgcctttagagctgaccygagcctcgtactggagcctggcaggcaagcatcttcctcttctgggacctgcctcagttttctgacttaggaagtgggaatccaggttctccccagttccagttcttcacagagtcctgggggtgcccttggcctcttgtctcggcctcactgcttctatctgagaaacacctggcctccatgctttcccgcctgagctccattgtccacacctctgccagagtgatccctccaggagaattctaaggactctacttccctgctaagaaatctccaactctgaacagaatgaaatccagactcctcatctctcatcttg

SEQ ID NO: 792906 - DNA, 606 bp, Homo sapiens
ggagaattctaaggactctacttccctgctaagaaatctccaactctgaacagaatgaaatccagactcctcatctctcatcttgatgggcttcgtgtaaaggcctttacaatgtgggtcccatcttcaaatccccatcctatctcagcccatcccagcccatcamgtcctatcccatcacatcctatcacagcccacctcagatcagcccatctcactccaacccatttcagctcatcctatcccatcccatcttaacccattcaaccctatccaggttaccacccaccctcccaacagacttatagaatttactatctgcaggctgggtgcagtggctcctgctcgtaatccttgcacttaaggaggccaaggtgggaggattgcttgaggccaagagttggagaccagcctgggcaacatcgaaagactgtctccccaagaaaatttaaaaattagccaggcgtggtggtgcgtgcctatagtcctagctacttgggagactgaggctggaggatcgcttgaacgtaggagtttgaggctgcagtgagctatgattgtgccactgcactccagcctggacaagagagcaagacccggtctcaa

SEQ ID NO: 792907 - DNA, 606 bp, Homo sapiens
ggagaattctaaggactctacttccctgctaagaaatctccaactctgaacagaatgaaatccagactcctcatctctcatcttgatgggcttcgtgtaaaggcctttacaatgtgggtcccatcttcaaatccccatcctatctcagcccatcccagcccatcacgtcctatcccatcacatcctrtcacagcccacctcagatcagcccatctcactccaacccatttcagctcatcctatcccatcccatcttaacccattcaaccctatccaggttaccacccaccctcccaacagacttatagaatttactatctgcaggctgggtgcagtggctcctgctcgtaatccttgcacttaaggaggccaaggtgggaggattgcttgaggccaagagttggagaccagcctgggcaacatcgaaagactgtctccccaagaaaatttaaaaattagccaggcgtggtggtgcgtgcctatagtcctagctacttgggagactgaggctggaggatcgcttgaacgtaggagtttgaggctgcagtgagctatgattgtgccactgcactccagcctggacaagagagcaagacccggtctcaa

SEQ ID NO: 792908 - DNA, 614 bp, Homo sapiens
gccactatgcctggctaacttttgtatttttagtagagatggggtttcaccgtgttggccaggctggtcttgaactcctgagctcaagtgatcctccctcctcagcttcccaaagtgctgggattacacacatgagccaccacgcccagccaatacacaggattctaagaatgtgcattctgagtttagcaggaactggcagcatgtccatcagggcccccagtcatgccaggtgggggaccccyttgcctgaggctcctcagtctgtaaacacacttggaattttccaagaacaagatatcagtgtcttctccacaccaacgagctctgcatgctctgggcacaattgtttctggggaagggtgggaaaggaagggtctaccagcttgaagtttacctgaggaagatatctggtgttttcccatccctccagcattcatccttcatcttccagtaactgaactctcattttcttgggaaattgcttcttccctattctcatgctgttctggacaggccagttccacccctcctagcagaggtgggaatttaacccagctaattagaaccctccaccatcttggccatggcgactgtttcaaggacagatgtga

SEQ ID NO: 792909 - DNA, 637 bp, Homo sapiens
tgaatgtccgatatggcagccattaaccacatgtggctactgagcacttgaactgtgtgtggctagtctgaattgaaatgtactgtaagtgtaaattacacaccagattctaaagacagtacaaaaaagttgtaaaatatctcattaatacatttttatattgattacatgctgaaaggataatattttggatatattgggtcatataaatatatggaaattatctcgccttttttttaaattaaaaaaatttttttttttattttgagatggaggctccctctgttgttcargctggagtgcagtggcgtgatctcagctcactgcaacccccgcctcctgggttcaagcaattctcctgcctcagcctcccgagtagctgggactacaggtgtgtgccaccacacccggttaatttctgtatttttagtagagacagggtttcaccatgttggtcaggctgttctcaaactcctgacctcggcctcccagagtgctgggattacaggtgtgagctactacgcccagactgtttatttctttcttaatgtgacttctagaaaatgtaaaaaaagaaaagaaaagacttacgcatatacacatgcagcgttccccaaagaaacagtcaatccttgcc

SEQ ID NO: 792910 - DNA, 358 bp, Homo sapiens
tctattggtctcaattcagctgcattgccaagggtcatgtccatgtacttattaccagcaaacctcagccccagtgcgtatttgcctatggccctttgacaagccagtgatgagacagggcagggaccccttttaggggcctgctaggccccgcaacatggaaataaaggaaaatcctkagtgccttcaagggaaattccaggcacccagcgagccctgagaagtaaatgagtaacatgataaaagcgagaagggaacagtagcctaaaacaagagccccccaaggaagttagaaccacaagatgttcgttccctatggaaacccaagataacatcttgatctacatccctgaactgt

SEQ ID NO: 792911 - DNA, 569 bp, Homo sapiens
taaattaaaaaaaaagaaagaaaaaaaaacaagccagggatgtggtcttttttagacttatataaacatgagtccatcgtcggaggagacatcctgctcctgtgaggggtccggcactcacctgggcgggctgcctccaccgaggatgtcaggaaggctgggtgggggactcgtgttttagaaagggcttcgtttccttctgcataaagttaagtccttggatcctgactcatacagaggccaggcgggtcgtgtttatccctacgaagagaagaatcctcctgcttctgcctgggcagacttctgaaatgctggacagaaccacccggggagggggrggggcaccagcaggagagggacagagggacccatagagactcggaaggaacagccagtgtccacgtccccacccatgtactagccacgttgtcattactgcatgagttttgggagaccatgtgttcttgggcaagataactcgtttcttggaacttctgtttcctcttctgtaaaatggagataactaaagggctaactttgtggccaagctgattggctgaccaccaacg

SEQ ID NO: 792912 - DNA, 649 bp, Homo sapiens
tcggagccagttatgaggatacacacccattgctgctagagacgggcctcctggtgctgcccaggactcctgatcatgtccgttctggcagagatgacagctcctagcacctcctcttcctgccttctcgctctgctgcacactccacgctcacgggccagcagggcaggtrgcatctggaaccctttaggggagtcctgtctttgttgtgtggggtggcgttttcacagttcccaatttagaggcatatttttggactctgagcagctccgatccctgccagtagactgaagggaatgtcagtcctcacgcgattagacagcttcagactcccatcttaccgaagttatatttacatctcataaactatgttggtgtcttactttccacaacaaaagctctatgtctgtgtgtaagacggagagagagagggatgatttctcagctcatgaaaccttctacagaatgagaaggttctgcttgagaacactaccttttaaagcattcacccagcaacgggatcatgagctgttccaagaggaggtcattctccctcggggaaagacacatgagctgttccaagaggaggtcattctccctcagggaaaagacacaccatctcttttatgagcaatgggctggaaggaga

SEQ ID NO: 792913 - DNA, 577 bp, Homo sapiens
ccatctcaggtcagtgcgcccgcgggctgctagagcgtgcgggcggcgggggcggtgcttgcaggaaacgcgcgccggctccaggaagtttccggagttgcctcacttttggcgcaggaagccgggcgctgtcacctccgaacccgccctagcctgccgccctgccgaggccctgcgtggggcacagtcggggcttcctgggtggcagcgacctctcagccccggaactcgctgcagccgccttccaggggcccttcccgctcccagcgcgcagccctcctagaacgccccgggtgggcgtggacgggagcccggagccctctcgcctgagcgcccagcgcgggattctcggggtacctgcggttccaaacttgcccacgataaggatcacctgggcacttgctgcggcgacggcttcctrggtagttccttattgagatcccattgtcagggtgtgtatctggattgaagcctcggcgcgatccttccccgaaacctcggggacctgcattcccactgatttgccaggggatcggagtcttagagttgtgcttttttttttgtccacctcaagttt

SEQ ID NO: 792914 - DNA, 496 bp, Homo sapiens
catgatcttggctcactgcaacctccgcctccgggttcaagcagttcttctgtctcagactcctgagtagctgggattgctttcatgtctttttttttttttttttttttttttgagacagagccttactctgtcacccaggctggagtgctgtggtgcaatgttggctcacggcaacctccgcctcccagaatcaaacgattctcctgcctcarcctcctgagtacctgggattacaggcatgtgccaccacacccagctaatttttgtatttttagtagagatggggtttcaccatgttagccaggctggtcttgtactcctgccctcatcggcctccgaacgtgctgggattacaggcgtgagccactgcgaccggcctcatgtctatttttatactttcattttctgtatatgtttacaaacaacatgtaacattgtttttacttaatttaaatggctcatactctacatatccttctgctacacgcttttt

SEQ ID NO: 792915 - DNA, 629 bp, Homo sapiens
gcaaaccatgatgccgttgagtctctaattttatattcggttaattaattgcctacaagtgaccatttactctattaatcttttcagagaactaatgtttttcgtatgtagtatttggccccaaaagagtaacttttatatttgatattaattggtgccatttaagataacagaaatggcctggctgtatattgggtcctttaaaacttagttcttagggtgcaggttcttgccaagccatggtggtagcagtgccctttttctccagttaggaagatggggccgggcgtggtggctcaygcctgtaatcccaactctttgggaggccgaggcgggcagatcacaaggtcaggagatcgaaaccatcctggctaacacggtgaaacaccatctctactaaaaatacaaaaattagctgggtgtggtggcaggcgcctgtagtcccggctactcaggaggctaaggcaggggaattgcttgaaccttggaggcggagcttgcagtgagccaagactgggccactgtactccagcctgggcgacagagtgagactccatctcaaaaaaaaaaaaaaaaaaaaggaagatggtgcactctctagcagcttagaaaccaggaagccaagcaca

SEQ ID NO: 792916 - DNA, 612 bp, Homo sapiens
tagtatatgtattactgaaccctacttttaacatgtttaaatatttgtgacttctaaagggcaagaaggagcaggaaaagtaaactaaagcaagataatgccgaaaataaatagatgaggttaagtccaacctatcataaaaaattattctccataaacattagaattaacaatttacaatagcatatttaataggaaaaaacacaaataaatatctagtctccatggaaagaaatctgatcacttaagaagaattgtcattcacatacacttgcaatgycaaataaatgtatgttgaagagaagaggagaagtactgagggctagtaatcaggcaccagtcttcaggactcttatttctaaacatgtaaactggagaatgaaatgaaataagtgagatattagtagtaaattcaatgattcaatgacagtgaaatgtatttaaataatatatatttttaaattcacaatttaattggcagagttatcaaagcataaggaatatagaaattgtttaataagttaatcccaagctgactttatgcaaaaatacacaaacaagtgaaaaaaaattgaatcctttaattatctccacactcaatccttatatata

SEQ ID NO: 792917 - DNA, 576 bp, Homo sapiens
ggtttttcttccttattgagttgtttgagcttcttatatattgtggtcattaatctcttgtcagatgggtagtttgcaaatatttcctcccattctgtaagttgtctcattcttttgttgattgttgtatttgccaaaaagcagaaactttttaacttgatgtgatcccattttaccatttttgctttggttccctgtttttgaggtcctacttaagaaatactttgcccagcccaatgttctggagagtttccgcaattatttctttcagttatttcatagtttaaactcttagatttcagtttttaatccattttcgttggatttttgtatatggtgagagataggagtctagttkcattcttctgcatatggaaatccagttttcccagcactctttattgaaaagactgtcttttggcatgttcttggtgcctttgtcaaaaatgagttcactggagatggatggatttatttctgagttctctattctgctccataggtctatgtgtctgctttgatgcctataccatgctgtttgtgttactataactttgtagtataatttgaagtcag

SEQ ID NO: 792918 - DNA, 621 bp, Homo sapiens
gaaactcttttcaggttgtgttgctggagcacttgcataaattctggagatatattgaccctgatctcacatcataaaagtaaaataatttgaaattattcataatcccaaataaaaagctaaaactatgaagcttctgaaagaaaacatagtatacactttatagtaaacaaagttttcttagaaaactgaaaygtcagaaaaagcactaactacaaaacatgataaaactgaactccattaataccataaacttctgctcatcaaaagtcaccattaaggaaataaaaacatagaagccacagactgggagaacatatctgcaaactcacatatgtgacaaaatacttcttttattcaatatatatgaacaactccaataaagcattttaaaaatttcaaccaaattaggacaaaaaaatcagaaaatttaaagaaagacataaattggaaataagtgtatgaaaaagtgctccatatctttagtcatccgtgaaatggcattaaaaatacaatgacataccacttctcatctactagaatagttaaaattaaatgtcagcatcaacattggaaaggatatggagcaactggaacattcctacattgctggggctgtgt

SEQ ID NO: 792919 - DNA, 614 bp, Homo sapiens
ctcctgtaattaggaagtacttcataccttaagcaagttttacaacccactaaaaagctaattaattttaagttcgaattggttctcttgcactgacattgctgtgagtagttggcttggctcaaatataaagtgcacttatctttgaccttatataactgaatgcaagggtagctcattagaagaattgtagcatttctcttgcatggatatattactaatggttggttttcagatggaaaaaaaatgatatggggctgcaaactagtgaaaattcaggcaaggtcaaataccacatgcagtttaaggcctcttttcatttgctmgtgacattgggagggaagcaagcatctagaagtcagatagagtgtttatgccttcttcgctgtgctaatctttctaattttggttttaaagcattcaacctaaggttatttaaccttactgggcatctttacaaagcaatgttcttgcattttcagagaaatatatgtatttacctatgtgcacaagatgcctcttataatcacctcaaatccttctggctccaccgcttcctaagccattgttctggtcaccatgtccttgcaagctttgaccagctttgtgaagat

SEQ ID NO: 792920 - DNA, 614 bp, Homo sapiens
ctcctgtaattaggaagtacttcataccttaagcaagttttacaacccactaaaaagctaattaattttaagttcgaattggttctcttgcactgacattgctgtgagtagttggcttggctcaaatataaagtgcacttatctttgaccttatataactgaatgcaagggtagctcattagaagaattgtagcatttctcttgcatggatatattactaatggttggttttcagatggaaaaaaaatgatatggggctgcaaactagtgaaaattcaggcaaggtcaaataccacatgcagtttaaggcctcttttcatttgctagtgacattgggagggaagcaagcrtctagaagtcagatagagtgtttatgccttcttcgctgtgctaatctttctaattttggttttaaagcattcaacctaaggttatttaaccttactgggcatctttacaaagcaatgttcttgcattttcagagaaatatatgtatttacctatgtgcacaagatgcctcttataatcacctcaaatccttctggctccaccgcttcctaagccattgttctggtcaccatgtccttgcaagctttgaccagctttgtgaagat

SEQ ID NO: 792921 - DNA, 582 bp, Homo sapiens
cttttcatattctttactatccaggatcctgagagctgatcataatcccaaaaaacacaatccccatgccataaccccaaatgttgaaatcccaaaagaaagataaatattcctaaagtctaaaattctggcacaatcccaaaagatgaaaatcttgaaaatataattctggaaaaaataattttaaaattatttaaaagatatttatgtacatttttgaaagaagatttttttttgagaaacataaaaacagcagaacaggctgggggtggtggctcacacctgtaatccctgcactttgggagaccgaggcaggcagatcacttggggtcaggagttcaagaccagcctggccaacatggtgaaaccccgtctctactaaaaatacaaaaattagctgggtttggtggcgggtgcctataatcccagctacttgggaggctgaggcacgagaaccacttgaacagaggaggcgraggttgcagtgagccaagatcgcaccactgcactccagcctgggcaacaagagtgagactctgtctccaaaaaacaaacaaacaaacaaaaacagcagaacacttc

SEQ ID NO: 792922 - DNA, 641 bp, Homo sapiens
cttatttcattcttccattttttttcaaaaaaatgattagaaaatgtgtttttctgttcaaataagggacctgcacactgtctttctttttattcaggaaaaaggaaaatgatgttactgcaaagaaattaggtcatgttgaatgcctaaaatttaccaagctggaaagctagttttcagagtgcagataaaagatccaattttctatatactattttagtagatttgtttttatttataaacagtggacaacttagaaaatttttaggtagttaaaagacttgattatcagcatggctttgacttttgaagaatttctttttaaatagtattaacatagtagtaggagacgtggtagaggtaagtagattttgtaaactaaacacattttgaaatgtttagtttccatcaggtgactgttttgctgtggctttttgctaccagcagttcccagcaagaccctacctctgaagagcaaagtgtttcatcacagatratattctatgaatattatccccctaatgttttccttccttttatagttaggattttttgcatctgagcatgttagtgatgagtgattgactactaaataaacagtccaacaaaataactattttaagatatagagtcttttcagc

SEQ ID NO: 792923 - DNA, 587 bp, Homo sapiens
ttgctaaatccagtggttgattcttagtcctcatcgtactgaatctaccagcagtatttaatatagtatatagttgatacagttagtcactctcttctccttgatgcattttccttcacttgacttacaatacttcttcaagtatgttcttggtttcttaccttaataactattcctgctcagccttatttgttggagcttgttagaatgtcccaaggctcaggccctggttctcttacctatctatactcattcctttaataaaatcagaatgtgtcatrttttagactaccaattatatgcctgttattgccaaatattcatctccaacccagaccttcctcctgaacttcacactcatatccagcttccagttcaatagctcctgtatctcgaatttaacatgtccatgatgaacttttttttcttaaacctgattaatttatagtcttttgtaaatctctgttaatgacaactccaaattcattttttgtttctctctttctcttatgctcttttccaaatatcctgcaatcttattggctataccctcgaaatatattcagaattatcttactttccccatc

SEQ ID NO: 792924 - DNA, 596 bp, Homo sapiens
aacaagattacaaccacatggtgtaaattggcttgttgatgtgcacttgcatgggtatggctgggatatcagagcctatgacagttgttttatagtgtcaccttaaagcctaatacatattgattcacagatagtaattttaagtttcttttcacagttgagaatatgaccttgcatattaaaacccttaaatcaccttacctttccttagataacctgccccttctccacaaaaccaaagattcttatctcctaattcctaggtaacaggaattctcttccattggaaataaatactggtacttatgaacagtaaagatttgcatttgtttgggcacctattttaataagctattttatgagaagaagagatgaataatattataactattttatargaagaagagatgaataatctttggatgtgtgcttacaatgtaccggttattaatctatacatatttctataaacaatctccattttaattctcaaaatacccttcaaagtaaacattccaatacccaatctctaggtgagtaaactgaggcttagataatcataacactagtcaacagttattgcgtacttgctatgc

SEQ ID NO: 792925 - DNA, 642 bp, Homo sapiens
aactgacaactctatcattttttgagggaagatttttagagctaatcatctgatgattacatttattattaatgcttggcattgagccgccattgtacaaaacttcctataggttgcagatcagaagctgcaaagtactttaactgcctttcatcaggaaaatgatttcttctctctggctcaatgactaacgtttaaagacacacgtttgcctctctgctctgtgaaatccctttgcaggagacttggcagggtcaccctccatccttgaagcaaccatatggagcctgctgstttcaagagaaggttttggtttctgccagtttcccgggtcagctattagcacactggggaatgttgaagtttccaagcacagaatgaagagggaggaaagaaatgggtgattaggggaattaagtaactgattccctgtgtacatctgccacccctgcaggaagaaatatctggtaaaaccatttattagcccctatctgcttaaaacagcaatggtatttatgtaaaagaaggcagggagctttattgaacaatctcaaaataatatgtagctctcataattaaaaagatcttagtagaaaatatgtagcatatgctgtatactcattcacatgtatacaagtttat

SEQ ID NO: 792926 - DNA, 491 bp, Homo sapiens
catgctctcttatcatcttgcaggtctaagagactaagaatcaagtgcaatctttccaacgattgtaggttttattccttatatcagtatttttccatccacttattattctctttgataaaggagatacggcaagaaatagaggccagatawcaatttactggtctctttttcagatgtacctttcccagggttcattgttgtaaggtataggatcctcccatttaagcctggatcactattctccatttggcaaaggtctctctaaaaacatagctcagacctcactttctgggtcaattcttcctaggcatcaccaatagagtgagccgttctgagcccatctctggcagacccttccaaacttctagcccccatgagtaccttatcattcattttgatacccccaaacctgtaaaggctcggtatcaagtagtaatctcaaaaacaattcaaatgtatactagtcaccatctttctttaccttgggg

SEQ ID NO: 792927 - DNA, 642 bp, Homo sapiens
aactgacaactctatcattttttgagggaagatttttagagctaatcatctgatgattacatttattattaatgcttggcattgagccgccattgtacaaaacttcctataggttgcagatcagaagctgcaaagtactttaactgcctttcatcaggaaaatgatttcttctctctggctcaatgactaacgtttaaagacacacgtttgcctctctgctctgtgaaatccctttgcaggagacttggcagggtcaccctccatccttgaagcaaccatatggagcctgctgctttcaagagaaggttttggtttctgccagtttcccgggtcagctattagcacactggggaatgttgaagtttccaagcacagaatgaagagggaggaaagaaatgggtgattaggggaattaagtaactgattccctgtgtacatctgccacccctgcaggaagaaatatctggtaaaaccatttattagcccctatctgcttaaaacagcaatggtatttatgtaaaagaaggcrgggagctttattgaacaatctcaaaataatatgtagctctcataattaaaaagatcttagtagaaaatatgtagcatatgctgtatactcattcacatgtatacaagtttat

SEQ ID NO: 792928 - DNA, 614 bp, Homo sapiens
ctattagcacactggggaatgttgaagtttccaagcacagaatgaagagggaggaaagaaatgggtgattaggggaattaagtaactgattccctgtgtacatctgccacccctgcaggaagaaatatctggtaaaaccatttattagcccctatctgcttaaaacagcaatggtatttatgtaaaagaaggcagggagctttattgaacaatctcaaaataatatgtagctctcataattaaaaagatcttagtagaaaatatgtagcatatgctgtatactcattcacatgtatacaagtttataatactcttatstttctacctcattaattctattagttcttctattagaagaagttcttctattagttcttctaattcattagttcttctattaattcttttaataagcattcattgaacctttgctataaccctattacttgctgttacggatatgaacttaagtgattatgtcatgaagaacgcaattgtgtgtgtgtgtgtgtgtgtgtgtgtgtgtgtgcgcgcgcgcacgcatgcgtgcatgtgcgtgcatacatgctttcatgttactccctgtgtgctttccacacaagaaactagatatt

SEQ ID NO: 792929 - DNA, 572 bp, Homo sapiens
tgggttatggagctagactgcccgggtttgaatcttggttccactaatgttttaccttaggcaaaaaattctgcactactcccctcacctaaaacatatggataataggccgggtggggtggctcacgcctgtaatcccagcattttgggaggccaaggtgggcagatcacacggtcaggagatcgagaccatcctggctaacatggtgaaaccccgtctctactaaaaatacaaaaaattagcggggtgtggtggcaggctcctgtagtcccagctactcgggaggctgaggcaggagaatggcatgaacctgggaggcagtgcttgcagtgagccgagatcacaccactgcactccagcctgggcgacagagcgagactccatctcaaaaaaaaaaaaaaaaaaaaaaaaawggataataataatacttaactcaaaagactactgagaaccaaaagagttaaacacacactagagcagtgcctggagtacaaacagctttcaataaaagttacctataatctactgctattattattactatactgtagtaaacatttaataaaattat

SEQ ID NO: 792930 - DNA, 554 bp, Homo sapiens
tttgaaaaaattagtaagaatgaaattttcttgaaactcaaaaaatgacaataattactatatgataatatagtatgtatgataatatattacccactaccaatagagaagatttttttaaagattctaactgtggcttataggtataattctgaaaaatcagaaacacattaaaagtcaaaaaatggctgggcatggtggctcacacctgtaatcccagcactttgggaagctgaggcgggcagattgcctgaggtcaggagtttgagaccagcctgggcaagatggtgagatatttagtatctctactaaaatmcaaaaaaaaaaaaaaaaaaaaaaaaaaattagcggggcgtggcagcatgcgctactcagctactcaggagtcccagctactcaggaggctgaggcaggagaattgcttgaacctgggaggcggaggttgcagtgagctgagatggtgccactgcactccagcctggcgacagagcgagactccatctcggaaaaaaaaaaaaaagtcaaaaaatgggggaagagttaaataatctatg

SEQ ID NO: 792931 - DNA, 504 bp, Homo sapiens
tgaaaattaggtacaaggcttcaggttcaatgcagcaagcacctgcctctatctgccaagacctccaggttgattggagatactcactcacttaaagtaggatactttattctcttcctgccccaccagatctcagcctcctggctggccttgtttgtgattctgataggtttttccaagtcagctgcctgagcttaaaatgatggatgggctgtgaaggtccctcacacctggtgcgtccctccacattctctcctcctcctgtcaactcttgagtcaaccgaagaacaatattgaagtaccagggcagctggtgtccctgctgcaagctatagaggtggtcccacamtgaaggaagcctttggcatatgaccttcgggggaactcacctcctcctagccagcagcaagaaaagagaacttctaacattgggttcttttgggctaatattgctctaagtcagcgtttttcaaacttgaacatgcatcaggcttatctgagtga

SEQ ID NO: 792932 - DNA, 553 bp, Homo sapiens
aggctgatcttgatttcctaacctcatgatctgcccgcctcggcctcccaaagtgctgggattacaggcgtgagccaccgcacccggctttgccattacttttaatctatcatgtgggcagaaaacttgcattctgttttataccctaacgtcatacttaaccatgattgtaaagcatttttttctagtcatgatttaccattaaaaaaaaaaaaagtctgtgtgtgtataagttagggtcttcaacctcattgccttgaaaaacaaccctccaaaagaccaagagattggttctttttttttttttttttttttttgagacagagtctcactctgtcacctaggctggagtgcagtgacacaatcacaggtcactgcagccttgacctccctggcttaarcaatcctcctgcctgagcctcccaagtagctgggactacaggcacgtgccactatgcctggctaatttttgttattttttgtagaggtggggtcttgccacattgcccaggcttgtttccttttaatttagcgacatttatgtatctttaga

SEQ ID NO: 792933 - DNA, 648 bp, Homo sapiens
gaggctatccaggagatacggtttctacaaaaattcccaagcttccaagttctgctgtctgaactggcccatgtttctaatgtttctccacctttcccatgtttctctacttcagttcaatttctcctccttttcctctctatggtcatggcctttacttctcattttcaggattcagtcctcttcagccctgatctcaaaacttgtttgcaagaatggagttaaagctcatttacattatgtatcccataacctgttgtaaacctcamatatatacaataaaatttatttttaaaaagacgtaaataacctccacttaaacaggtaaaggaccttttgtcccagacacaccccggtttcctaactacttgcttttattttccaatcacttttcttccctctttttctgtgtctccctgctgccttctcatcacatagaaggtaacatacactaaatacaaacacatctttgaacattcagaaagcctcacaggggacaaaaagagcaaaacacaaatcacccttaactgttccactcagaaatatccacagataacaaggcagggtttcttatttctatctttttatccctataaactcttgctgaagatgggaaattttcacttaggaaagtaaatgacatattag

SEQ ID NO: 792934 - DNA, 599 bp, Homo sapiens
ggaatgatctgaataaattcatgttttttaaatatcctggaagcagcctaaaagatggttagaggggcagtagcccctacattttacccaaaggctactctgtcacacacactaggccagttttagtaaggttcaagtgattaaaacaaaaatgcgaacatactatttcaggaataccaatctgaagcatcaggaaaagctgatcctaatagttactaaagaaacaaaaaggtacttcataaactatgaaggtactatgctaaaaattttttttaggtatatattacaaatgaaaatattacatggaaaaaaatcaagtcataagaacaaagacataattgagaatgtctgtcttaagaaaacaaaaaaaatttagaaaatttaaacataaaatcgcaaattatgaattttcactttttatttaagcaaatcttaagaaaaamtgattttaaagtaaatgaaatgactaatccttcaagttatggctcaacaaaagtagttgctgtatatggcatatacttctataaagcaaagcacgtaattactttctaataaaagtctaaactgtgatttaaagtgtacttaaatatctgtttaga

SEQ ID NO: 792935 - DNA, 621 bp, Homo sapiens
tatgttaatgtgaaattttatgaagacataataagcaatcttgttatcttctatatttataatagaaatgtatattggtagagaaagtgagaagggaggaggatggtaagaagacagtgctattaatcattttcartgactgatattaaatttaaaaaaagacagctttttataattcaaaagatttatgcttaatctagttccttgcttttctttctctccccatgctcacttttttcatatctttggatactggaagtataaaacagtacaagatttggtacacaaaaaggctacaactaagattgttatgctaaaagaaaaaaaaaaaaggcagtcctcaatcaagaaataggctcccttacagtattttgttagaagtcagatatatctgaaaatattaaaaaagaaataaataaaaaggcctttcactcttacagtggctcacgactgtaatctcagcactttaagaagctgaagcaggaggaccacctgagtccaggagtttgagaccagcctgggcaacatagagaccttattaatattattattagttgttttaaagtcagatataattggaaaatattttctcactgaaacaccacaataagtgatgatttc

SEQ ID NO: 792936 - DNA, 639 bp, Homo sapiens
gagtaaacctctagacctactctgattggactttattttcatgatctaattggttgtcctcaggcttgctctcatccaatcagaacatgtagtccagaaacctcatttgcataacatctgtatataaatgatgctgaaatcagcccatttaaggctcttctgtgtcttcctgaccagctgctctgttcccagcttagaggaccagagggagaagccacctgctacacgctggatgctgcagcctgtgccactgtggctyacatcgctgtggttggtggcagcaacggagactgcagccagctggagtggtaggaggaaggaaatagttttggggtagatggaggagtaaagagggtggtgagtgccaaagggaaaagtggatggcggggcgagcagaagaaggagttgcaaaaagatggtggggaaaagatggtggaaaaaagtgggtagatggaggcggaaaaacagggagacaaacaggagggggagaaggtttgcaaagatggtggggaaaaacactgtgggaagaaaagaaaggcagtggggaaaaacattgtgggtagatggagggcaagaaagagggtggcaagtgggaggagaagagagggtgctgagagggagggggaagagagggtggtg

SEQ ID NO: 792937 - DNA, 587 bp, Homo sapiens
cattcaggacagcatggctacctcaacaaaactgatgagagacacataatgcaataatacatttaatcatgtatttatttattcaacaaacattggttaaacggtcattaggtgcctgaaaggaggcaggactaggctagaagacactacaacttgttccttcaagggagctcacagcttggccaaggtagtgatctccaaaacaccttttgacatagcctggcctaggagtattttagaaataaacaatytagctggtggagggttataagtgtgaccttgaatttcctggagtggaatgaaattccttaagaaattatttggcattcagaaaaagaaggaaaatttaatgaaatagcttaagcgtttaagtaataatatttaaaataaaaataaggcaatcaaaaggttatttattaaaattatttttaaattctggacattcaaggtctggcccaaagatagaaaaatgcttttatatgcttcagtgttctatttacttggagatgatttagcaagcacaagccatacaaataactgagattatgtaccatgggtctggatgctggggtttttaccgtttgcca

SEQ ID NO: 792938 - DNA, 558 bp, Homo sapiens
tcataggaataaacaggattagcctaaattgcagaaacaaactttaaaaacaactgatgagattagaatctaataacagatgttccgtagttcttgaaacataatatttctctctccagtttcctatttttactaaaaacaaatcacggtaagactgatttgttttattatactttgcatgactatttgtgtaaagtgcagcaagaatacttatttttcacataagctttttttaaattggctttgatggaactctgttccacagaaggagttttagataagactttttttagagctgagccctgccatcggtttgtaccctcaaatacctatgagctgggtgaattcctctcctcttgaggttccaagataacttggggctcctggacctgttagaaagtgacattctttrcttaccacaggtcagaaaccctgcacagggactgcataggcaaggtataaggcatttccccaagtggcttttattggctttacaagtcaggtttgattccttaaaggaaagcatgccattccagtcaaagcattggtaaaataacc

SEQ ID NO: 792939 - DNA, 586 bp, Homo sapiens
atgagactcaaaaaagggccatatggttaaggtttaaatgtcctcctcataggggagagaaaacttgggagctgtaacaaattttagaagggtagtaagtgattttcagaggaaatgaatgcacccaggaggcaaatattattttgtaaataattatcttaggaaactgaatgggactggcaagttaagggaaggagaggggyggaactgccttgtgaacaaaggttgtcttagtatgtagaaaaagtctcctaggtaatctctccaacctgccctcaaaagaatagatgaaaagtctaactgcatgtagtgatgacttttatagtcttttcttctctcaggtgggtaatctttctggattatttcatgagattcctggagagtgagtcttcagacaattgcatgtcttttgagaagtttccttagttagataaggaaattccagacagagtccctccttgctcttggagtcaggggagaagaaacaaaagagggttaaaatgttttgggttctgagacagcttctaaggtactccatcttcatttaattcaaagtgttcagtatgccaaagcaccattgtgtggg

SEQ ID NO: 792940 - DNA, 586 bp, Homo sapiens
atgagactcaaaaaagggccatatggttaaggtttaaatgtcctcctcataggggagagaaaacttgggagctgtaacaaattttagaagggtagtaagtgattttcagaggaaatgaatgcacccaggaggcaaatattattttgtaaataattatcttaggaaactgaatgggactggcaagttaagggaaggagaggggtggaactgccttgtgaacaaaggttgtcttagtatgtagaaaaagtctcctaggtaatctctccaacctgccctcaaaagaatagatgaaaagtctaactgcatgtagtgatgacttttatagtcttttcttytctcaggtgggtaatctttctggattatttcatgagattcctggagagtgagtcttcagacaattgcatgtcttttgagaagtttccttagttagataaggaaattccagacagagtccctccttgctcttggagtcaggggagaagaaacaaaagagggttaaaatgttttgggttctgagacagcttctaaggtactccatcttcatttaattcaaagtgttcagtatgccaaagcaccattgtgtggg

SEQ ID NO: 792941 - DNA, 693 bp, Homo sapiens
taaggtactccatcttcatttaattcaaagtgttcagtatgccaaagcaccattgtgtggggtatcattttcttagacccaacaccataaatactaagagtagtttagtggttaccagggatggcggaaagaagtaatcaagggttactgataatgagcatargttttcttttgggggtgacagaaatattctggtattagatcatggtgacatttgcacaactctgtgaatatacttaaaagccactgaattgtaccctttaaacggacgactagtgtatgtcagttatatctcaattaaaaacaaagtctagaacttgacatatcattccaaatactcaaattagacgagtctgcttctaaggtaaataagtggaaagtggtcacaagataagaacagaggctattaggagatgaggaaaatcaggaatgagaagtaggaagccaactcttcataattttttaggtgagcagcagagggagcccttgatagcaaagaaaattacaaaactaatgtttatacttctgatcataaagttaatacagcctttttacagaaaatttgaaaaagtgccacataaaggtaataaaaacccactaatcattccaccatcctaagaaccactattaacatttcatcgacacaaatccttccagtcttttttctgtatgtgtacatatatgcatgtacgt

SEQ ID NO: 792942 - DNA, 693 bp, Homo sapiens
taaggtactccatcttcatttaattcaaagtgttcagtatgccaaagcaccattgtgtggggtatcattttcttagacccaacaccataaatactaagagtagtttagtggttaccagggatggcggaaagaagtaatcaagggttactgataatgagcataggttttcttttgggggtgacagaaatattctggwattagatcatggtgacatttgcacaactctgtgaatatacttaaaagccactgaattgtaccctttaaacggacgactagtgtatgtcagttatatctcaattaaaaacaaagtctagaacttgacatatcattccaaatactcaaattagacgagtctgcttctaaggtaaataagtggaaagtggtcacaagataagaacagaggctattaggagatgaggaaaatcaggaatgagaagtaggaagccaactcttcataattttttaggtgagcagcagagggagcccttgatagcaaagaaaattacaaaactaatgtttatacttctgatcataaagttaatacagcctttttacagaaaatttgaaaaagtgccacataaaggtaataaaaacccactaatcattccaccatcctaagaaccactattaacatttcatcgacacaaatccttccagtcttttttctgtatgtgtacatatatgcatgtacgt

SEQ ID NO: 792943 - DNA, 573 bp, Homo sapiens
ctgccccaagaattatcagcacttgaagtttactctcagatataacacacccaagcatagcattcacctcagatgcaaattcacacataatgctttttgcctcaaaggaaacaatggatagaagggacacaaaagtagatttytgggttgagttgtttcttaaaaaaatagaatttggctgggcgtggtggctcacgcctataatcccagcactgtgggaggccaaggcaggcggatcgcctgagctcaggagttcgagaccactctgggcaacatggtgaaatcctgtctctagtaaaatccaaaaaaaaaaaaaaaaaaaaaaaaaaattagccaggcatggtgacatttgcctgtagttccagctaattgggaggctgggacatgagaatcgcttgatccctggaggcagaggttacagtgagccaagatcgcaccactgcactccagcttgggctacagagtaagactccgtctcaaaaaataataataaaaataaaaatagaactcacttgtaccaatgtctgtaatttacttcatataatcaatgtactatgatgtttgaccagtta

SEQ ID NO: 792944 - DNA, 636 bp, Homo sapiens
ggtggaatgattcggaagctgcaggggcagaagggcaagggatgggagcctggaacagcggaccaggatttgagaatacattttttaaaagcaattgaaagtttctgagaaggggaatgacccagtcaaagcccacattgagaatggtggtgggcagatggaaggcggagagagggggagcagggatgaaggcactgcatctcctggggtgaagacagccagtggcagtgggacttgtaagaaggggacagctgtgaaggtattgaaggaagtagaatccaccagatcaacagycaacgtgagaggtaaagagaagggacagaggccaaggatctttttgtgcctgtctaacagggaggataactactaaagtagcctctaaatacatttaagaaattagtaaattaattaataaattactaaattagcctctaaattggctctttttaatcactggcagcgttgtttctcagaatgttttgacctgtgggcaatttaagtggacccaagaccctatttaatctctatactcttgcttattacaaaaaaaaaaaaaaaaaaaaagaatgaagctgtatttatgagacaatgaaatacataaaattctaaaagtaactcgtgtcaaaagcaaaagac

SEQ ID NO: 792945 - DNA, 636 bp, Homo sapiens
ggtggaatgattcggaagctgcaggggcagaagggcaagggatgggagcctggaacagcggaccaggatttgagaatacattttttaaaagcaattgaaagtttctgagaaggggaatgacccagtcaaagcccacattgagaatggtggtgggcagatggaaggcggagagagggggagcagggatgaaggcactgcatctcctggggtgaagacagccagtggcagtgggacttgtaagaaggggacagctgtgaaggtattgaaggaagtagaatccaccagatcaacagccaacgtgagaggtaaagagaagggacagaggccaaggatctttttgtgcctgyctaacagggaggataactactaaagtagcctctaaatacatttaagaaattagtaaattaattaataaattactaaattagcctctaaattggctctttttaatcactggcagcgttgtttctcagaatgttttgacctgtgggcaatttaagtggacccaagaccctatttaatctctatactcttgcttattacaaaaaaaaaaaaaaaaaaaaagaatgaagctgtatttatgagacaatgaaatacataaaattctaaaagtaactcgtgtcaaaagcaaaagac

SEQ ID NO: 792946 - DNA, 579 bp, Homo sapiens
atgatccagcaattccacctctcgttatacacccagatgaaataaaatcagtatattgaagaaatatctgcactcccatgttcgctgcagcactattcacaacagccaagatatggaagcaacctcagtgtctatcaacagacaaatggaaaagaaaatatggtttatatacacaatggaaggcactattcggccatttttttaaaaaaaggaaattctgtcatctgtgacagcatggattattaacctgtaagacattatgttaagtgaaataagccaggcacagatagacaaataccacatratctggcttatatgtggaatctaaaaaagtcaaactcatggaagcagagaatagaatggtggtcaccaggggtgagggagatggttgggtagatgttggtcaaagaatacaaaatttcagttagataggagaaagaagttcaagagatctattgtacatcatggtaactatagttaattacaatgcgttgtacttctgaagatctctgagagtagatttttaagtgttctcaatataaaaaataagtatgtgaggtaatgttcatgttaattagc

SEQ ID NO: 792947 - DNA, 546 bp, Homo sapiens
tataatatagatatagacatagatatatagatactgcaaatgccaaacatgtgatccaacaggtacacctatagagtgagaacaattgtgatgttgcagtgtctacccaaccacacccacaccccaaatgtgatagtactgttggacacacctcattgacaaagaattcagtatcttttctgttgctgcaaagtcttctatgaatacttkgtgaggctgctcaaatcatatttgccccaggacaaatcagtacagggctcagtgtcataccaactaatttgaataaaacaataagtgtgcctatttatattcagacccatgcccaggagctcccagaggtgtggtaagtgttgctttggaacagacataaaatatacatagttctcatttaagctactgcatatttttctggtgcctctcacagctatattgatagccatggttctaagtaattagatgagtgctggagaaaggaattaagtgttaacattttatatcctcagattggcgaggtttcttccagagctaattaaatcagtgtaattc

SEQ ID NO: 792948 - DNA, 616 bp, Homo sapiens
tgtgtgtccctttctgtcccagggccttttccattgccacaggggcccacttggcctgccctcacacacagcctggatgtgtggagctgttaatgccaccaggggcgactctgaactaatgaggatagaagccggcggataaacacttcagtttctaatccttcagatggacagttgctggaggcattctgcatgcttcccagaagctcccaggagtctcaactccmagttgcccataacaacaacctttataatatacctgtatcttgttttctccttcttccctgaattattttcctgcttctctactcttgttttcttggatctgctcccaataaactacctgtatccaagcctttgcctcagggtctgctttcagagaaatccaaaccaggacacactctgaccacagcagagcccaagtgttgctgacagtggacaagagacaagggaggccagctggtggatggggcacgggtctgtgtgagacattacgaaggcagtagccatggagcacgaggtagggatgaagcctagagacacatgggacataaaagaagtgaaatatgttggcagattcattgaggatgggcgaggacaaatttatggcttgtga

SEQ ID NO: 792949 - DNA, 457 bp, Homo sapiens
ggaggcggaggttgcagtgatcagagatggtgtcactgcactccagcgtgagcaactgagtgagactctgtctcaaaaacaaaaaaaaaggagacagtgaagcgttctctctcttcctctggatgtgcacatgcaccagggaatggccacgtgaggacacaatgcgaaggaggctgtttgcaaaccaggaagggggatctcaccagaacctggccgtgctggcaccctgatcttggattttcaacctccagaactgttggaacataacttgatgtttaagccaccggtgcatggtattttgttgtggctgccsaaatagatgcatccattggctcttttttattttcaatccattgcattgccagaccccactaggatccatttatttattctcctgttcacaggcatttggattatttccagtttggggctatcatgaaaaaaatcctgttatgag

SEQ ID NO: 792950 - DNA, 610 bp, Homo sapiens
gaaaatgctgccacctgactacagtgtgtctgcttccctacatttccggattagctttattccatgtttagactatttctgagaaaataccaaagatcagtcactcaaatagtgttcatctgacatgacctctgagcatcactggacacagctgatctataagacaccataaagcataccaacatgtgcatggtagwaattacagaaaagtaggagagagagaaaaaacaggcaaaagaatattcaaaaaaatggtcaaaagtttccatatttggtaaaatatacaaatctacatatttaagaaactcaaggaacttcttaatatcaataccacaggaggatttcaataaaagatctaagtaggtagaagaaagaactcagcaaacttgacgtgggtctcccatttgagaatccaagagaaataacaataaggaaaaatgagcaaagcctaaaaattattataaaacaccatcaagcataccaacttttgaaacactttcatcacgtggcttgagacaaccctgtgtcttaagtctcctccaactaccccatctacttcttctccatatcctttgccgatttctccgaatccccctctcctcttagtggc

SEQ ID NO: 792951 - DNA, 534 bp, Homo sapiens
cagaggactcttggcaatctacacccactccacaggtgaatgcacctgtctgtcctggcttgagaaatcatctccacattgagaactcctgtagctctgtctgaagcccagacttctgctgtgaactccagattccatcaaactscttaattgacatctccccttgagtgtctcatggtcatctcaaacttaacaaagtcaaaactgaaattctagtttcatctctcatgtctgccccctacccccgccccaccgccgagttcccaccaccaacacatctaaggaaaagagaactctatgcttctcataactcaggctatataccaaaaagccatccttgttgtgtctgttcctttcccataccacatgtaacccatctggaaattttattagctctatcctcttcaaaatattattatatccagaatccaaactcctcaccacctttgcctccacaacctgatcaagccaccatctctcacttgggtgattgcactgggttgcccccatccttgccgttgactctccattcta

SEQ ID NO: 792952 - DNA, 550 bp, Homo sapiens
tagtggcgggatccctgggattccaatccagaggactcttggcaatctacacccactccacaggtgaatgcacctgtctgtcctggcttgagaaatcatctccacattgagaactcctgtagctctgtctgaagcccagacttctgctgtgaactccagattccatcaaactgcttaattgacatctccccttgagtgtctcatggtcatctcaaacttaacaaagtcaaaactgaaattctagtttcatctctcatgtctgccccctacccccgccccaccgccgagttcccrccaccaacacatctaaggaaaagagaactctatgcttctcataactcaggctatataccaaaaagccatccttgttgtgtctgttcctttcccataccacatgtaacccatctggaaattttattagctctatcctcttcaaaatattattatatccagaatccaaactcctcaccacctttgcctccacaacctgatcaagccaccatctctcacttgggtgattgcactgggttgcccccatccttgccgttga

SEQ ID NO: 792953 - DNA, 534 bp, Homo sapiens
cagaggactcttggcaatctacacccactccacaggtgaatgcacctgtctgtcctggcttgagaaatcatctccacattgagaactcctgtagctctgtctgaagcccagacttctgctgtgaactccagattccatcaaactgcttaattgacatctccccttgagtgtctcatggtcatctcaaacttaacaaagtcaaaactgaaattctagtttcatctctcatgtctgccccctacccccgccccaccgccgagttcccaccaccaacacatctaaggaaaagagaactctatgcttctcataactcaggctatataccaaaaarccatccttgttgtgtctgttcctttcccataccacatgtaacccatctggaaattttattagctctatcctcttcaaaatattattatatccagaatccaaactcctcaccacctttgcctccacaacctgatcaagccaccatctctcacttgggtgattgcactgggttgcccccatccttgccgttgactctccattcta

SEQ ID NO: 792954 - DNA, 488 bp, Homo sapiens
gcagtggtgtgatcttagttcactgcaacctccgcctcctgtgttcaagcagttctcctgcctcagcctcccaagtagctgggattacaggygcgtgccaccacgcctcgctaatttttgtattttagtagagacagggtttcaccatgttggccaggctagtcttgaactcctgacctcgtgatctgcctgcctcggcctcccagagtgctgggattacaggcatgagccactgtgcccggctagccattttcattggcaataagatcctctgcattcactgcccttccattcgtttgtgagacctgatttttcctggatgctgaacaagagcttgggtaccaggggtgcagatgcaaaaggctgtcacactgaccatctgcccttgctggtggaaagcagccacctcatgtgaaaaggcagagagtctactgagctgttaacacttaagccatccgtggatggcagagctcaaagagcactgtaac

SEQ ID NO: 792955 - DNA, 488 bp, Homo sapiens
gcagtggtgtgatcttagttcactgcaacctccgcctcctgtgttcaagcagttctcctgcctcagcctcccaagtagctgggattacaggcgcgtgccaccacgcctcgctaatttttgtattttagtagagacagggtttcaccatgttggccaggctagtcttgaactcctgacctcgtgatctgcctgcctcggcctcccagagtgctgggattacaggcatgagccactgtgcccggctagccattttcattggcaataagatcctctgcattcactgcccttccattcgtttgtgagacctgatttttcctggatgcygaacaagagcttgggtaccaggggtgcagatgcaaaaggctgtcacactgaccatctgcccttgctggtggaaagcagccacctcatgtgaaaaggcagagagtctactgagctgttaacacttaagccatccgtggatggcagagctcaaagagcactgtaac

SEQ ID NO: 792956 - DNA, 488 bp, Homo sapiens
gcagtggtgtgatcttagttcactgcaacctccgcctcctgtgttcaagcagttctcctgcctcagcctcccaagtagctgggattacaggcgcgtgccaccacgcctcgctaatttttgtattttagtagagacagggtttcaccatgttggccaggctagtcttgaactcctgacctcgtgatctgcctgcctcggcctcccagagtgctgggattacaggcatgagccactgtgcccggctagccattttcattggcaataagatcctctgcattcactgcccttccattcgtttgtgagacctgatttttcctggatgctgaacragagcttgggtaccaggggtgcagatgcaaaaggctgtcacactgaccatctgcccttgctggtggaaagcagccacctcatgtgaaaaggcagagagtctactgagctgttaacacttaagccatccgtggatggcagagctcaaagagcactgtaac

SEQ ID NO: 792957 - DNA, 600 bp, Homo sapiens
atttatttgtgtacttgttcgtggtttgtcatgccctctagaatggatgatgcagggaccttctctggtgctatggcctgaattgtgtcctttctccccccaaattcatatgttgatgctataactcccaacatgatcatatgtggcctctaagaaagtaattaagttaatacaggtgaggccttgatctgatagggtaagtgtccttataagaaggttagccagaggactcgttctctttgttgtrtgaggacacagttgagacgatggaacctgggagacggccctcaccagaacctgaccaggccggctccctgatctcaaacttccagccttgacaacggtgagaaaataaatgtctgttgtttaaaccacccagcctgtggctttagttatagcagcccaagctgactaatacatctggctttccccctctgaatctatgggatctacagtgctaggcagtatctactagatgaatgaaggaacacaccaaagctacagatgctcaaaggactccccctatgcccacaacagacttgcaataaggctgtgatgttctaaaaaccaaaagatacatccctcttggctcatgggcct

SEQ ID NO: 792958 - DNA, 528 bp, Homo sapiens
ctcagcttgtgcaaaacctgacctgaggggcagccccctggtgaatcaggtacctgctgcctgctctaactgaagtcagtcactttgcccagttccccatggatgtgataaattgaattgagaggtgtgtgagtaaataaaagtagcataaagaacctgcataaagtagcaaataatgaaatgtctaaaaaacaaattaattttcccattttgaaagcaatataagcactttccaggagctctgaaagtaraaaaactaaaccactcataacttaagacctaccataagcctcagtaatcattcaagtgcatatttgtctttttaaaaaaaaagacatggtttttgtttgtgtttttgtccatcatttgttaagaacttactatatgcatgataacagtttatacaacactctacgctaggtgtgattattctcattttaaaatgacataacatgagtgtagagagatcaggaaactggctcaaggtctcacaggcaggttgtggacagggagaggcttgaccccaga

SEQ ID NO: 792959 - DNA, 636 bp, Homo sapiens
cgaccagaccaggcatcactgctccaatccactgaataagtgtatacattttctagttggggtcttctggtcaggaggggagggtattgtttgcctttggctttctttctgctctagggacttccttccatggtgcagtggtcaataaatgtgaagtcaagcgcaagggaaagacagcattctgcagcccctccttccggactgttctytgctggctcatttgtgcaaacttgaatattgtttgtttttaaggttccaccatctctctgagttcttttcttgcaggcattcatccttgtcaaatcaaacggtcaaagttcacattcatgccacaggacttgtcagggctccaaacaggcactttctcaaagtatttttgcccaaggaaccatctcgtgtatcacctcttgttgatctatttcacaagtttgagaacgctgaagtcacttctgcaaagaacaaagtaaatgcccaccaaataatagatgctatattgctattgtcatcatgattatcagtatgtagcaagaataaaagcataaaataaaaatatttaggtcacgaactcttacagacatcattgcattttagagaagccgtttggtactgaggatcctctgtgtgcctttggggcca

SEQ ID NO: 792960 - DNA, 503 bp, Homo sapiens
atgtgcaaatttatgagactgaagaatgtaaataactcagtgactggataaaataaatatcggttggctaatcagataatgttgaaaatttttagtgagcaggtatgtgaaacaagtttcacaggacaaataggagtttacataggaaaggaagaataaagctttgtttggaaatcagaatagaagatgggacaattcccagtgaaaatttcagccaaaagagaaatcagatgtgtagggccacagggccagtacagagaacctcagaaagtgcccccttgctgattaaatccttctacatacaaatacaatttggytaatatgtaatgaatcaataacactgaaattattggcctactaattatttactatcaaactgaataaactttagacatttgtttccagatactgaaatcaataattatagactattaatagatctttcactgtttttaaacagtaaaaaacacccaaattaccctcatatgtttgaaattcttctc

SEQ ID NO: 792961 - DNA, 612 bp, Homo sapiens
gaactcctgataagaagtcaagtcaagatgctaactggaattttacctttttacaatatctgtgaaggtggtaattagcacttacttgatccagggtgggctggtaattaaaagaaggaagaatatgggcagaaagcccaacagaacacagaagactgattttcaacctttattttttttaagcagcagatttccaatgaagcctcatgtagaaggtcaatataaaaatcagatcttaaggtataaaggttaaacagagcttctctaaattaggcagagctggtatccctccaactttctcccctcagggactgttgtggaagtaacactatagaacttattattttaattctatgcaataatgcattttgtttatgtaataatgtatttgtaacaatgcatttatatatgtaataatatatatgtaataatgcatttaatagtttgcaaagckctgtcatttcatcacatcacttgatttttataacaattctatgagctaagcagactagatattactattattattgccactttgcaaatgacttgcataagatcatctggcttataaatgacagatctgggatccaaaatcaagtctttaaagatctt

SEQ ID NO: 792962 - DNA, 479 bp, Homo sapiens
gaagacaagaccaacaggaaacacccaggatgagtggactccacaaaaacctccaatttctcactgcccctaatcctccaccctgaatgatagagatgtctttcaggagaaagtaattcctttgtcatggagaagaaaagaaaggtaatgacaatggtcttaatcacacattccttgtttcacttgtaaagttttaaaaaatgtgttcattggctgggcgtggtggctcatgcctktaatcccagcaccttgggaggctgaggtgggctgatcacaaagtcaggagttcgagaccagcccggccaatatggtgaaattccatctctactaaaaatacaaaaattagcgtggtggcgggcacctgtagtcccagctactcaggaggcttaggcaggagaatcacttgaacccgggaggcagagattgagcaaatatcgcaccactgcactccagcctgggtgacacagtgagtgagaccc

SEQ ID NO: 792963 - DNA, 613 bp, Homo sapiens
gagccactgcacccagccctcattcttttctttttataagaatttacatgaacccactacgctctgcatgtagacctcatggccccagagtctgccacttttcaaaattacttctttaaaaatcacacagaactccagggaccaggtctacaccacagtgatgaggaggatgtcctaaaagccattcctctttgtgtcctgsaggaaggtttaactttcagtgctctgagcagcctccaattcaggaggagagggagaacagaggctgcttcttcctgctaaaccttcaatcaaggccaaagccttttcgacttttgcccacccaagtttgaaggagcagcagcaggttctatggagtgtccacagcatatccattatgccatggagatcagctttggggaattccttcccctgaacatctgcatgttttctttgagcagaagagctggctatctggagggtagagtagggtggacgcagtttcagaagaccttgatttgctgtcatttgggcaagaatggctttttgaaatagtttggtatcataatggaccaaaagctcaactttttgaagcacactattgccctggaaagaatgtgttcagcaagggaca

SEQ ID NO: 792964 - DNA, 609 bp, Homo sapiens
aagaattatacaggccaaaattccaatagtgcagaggctgggaaactgctttgatcataaaggataattaatcaaatcatttggtgcctcatagtaacttcgcgttgttgagggacatgtaaagtttcataaacctacaagttactctgcatggttgctcatgaattggtgtgttgtgaatcggcagctctccccaccttttcctcatggaaattcagccaatctctttgcttccttgtgcacaaaatgaactacagccagtggaattcatcagacacacaggcttagttatgctctgattttcaatcccttcctcgtctccctgcaatcctatgaatggcagccacattctgctgtctgcagtcaccctagygactcagtgggcccgtcactgaccccgtatgcttcttcaaaccttttcagtctctagaagtttcccttctcccctccaatacttatctgctcacttttgtgctattatcacatatctccttattatcattgtatctcctttggcaggatatgccctcttttcctaaatgaagctgccacaatactgtgcatgcccatgtttcattgcaaaatttagtatttagtttgtgtttaagg

SEQ ID NO: 792965 - DNA, 627 bp, Homo sapiens
aagcttttcaacacacacacacacacacacacaaacacacacaatcatattgctttttaggtgcaaacatgcctccttcattggaaacttttctgagaaacaagttccatataaatgtggtcatggcatttcttaagaacatgtttacagtttgaccaaagtgagtggaaaacttacatcaaaatcatttccaagttatcaatgttacaagccatgctacaattaacatcactgaaaatgcctctaacttacaactgggggaaacaaaaaaattgcccaagattcmcctagaaatggaagtgctaagtttctgctcatggacattttcaactgtagtggttattaccaaattactcccctaaaaggttaaaccaatgtatgtacttctaaaagggagtaaagttttccatctctcctggtaaacacttggtttaattattcatttaatttttgccaatatgataaatgtaaaatggatcttattgtggttttattttatttcctggttgccaagcagtattttcacatattctcagacttgttaatccaaatacatccttttcttatttcccaacttgtttgcatgattttcttgatgatgttaggaattttccacatattctggat

SEQ ID NO: 792966 - DNA, 627 bp, Homo sapiens
aagcttttcaacacacacacacacacacacacaaacacacacaatcatattgctttttaggtgcaaacatgcctccttcattggaaacttttctgagaaacaagttccatataaatgtggtcatggcatttcttaagaacatgtttacagtttgaccaaagtgagtggaaaacttacatcaaaatcatttccaagttatcaatgttacaagccatgctacaattaacatcactgaaaatgcctctaacttacaactgggggaaacaaaaaaattgcccaagattcccctagaaatggaagtgctaagtttctgctcatggacattttcaactgtagtggttaytaccaaattactcccctaaaaggttaaaccaatgtatgtacttctaaaagggagtaaagttttccatctctcctggtaaacacttggtttaattattcatttaatttttgccaatatgataaatgtaaaatggatcttattgtggttttattttatttcctggttgccaagcagtattttcacatattctcagacttgttaatccaaatacatccttttcttatttcccaacttgtttgcatgattttcttgatgatgttaggaattttccacatattctggat

SEQ ID NO: 792967 - DNA, 512 bp, Homo sapiens; identical to SEQ ID NO: 788868

SEQ ID NO: 792968 - DNA, 512 bp, Homo sapiens; identical to SEQ ID NO: 788869

SEQ ID NO: 792969 - DNA, 589 bp, Homo sapiens
ttgcctgacagctgcctcaggggaggccatcactgttgcctcaggcagcgcagggtttatctcctcagacaaaggtggagaagctgatggcagcatgagtcgggtgaggggggaatgttgccactactgacgatagggaagctgtttcttctggcaaaaagggttcatcagagtttacaaactcartgtccccagcttcatcatggtcctcccatacattcccattccaagttgcagcgtcccattcttttccaatcaatgccctcattttatcagtagacacctggcaaggctgtgcatgcaccttttgttgcaggtcagccactcacatgataagagtttatgtctgtttttccacaatttcagctctttctctgcaagagataagactctcactcagggcagtcttaacagagttgaagctcagtatctgcttctgaagccaggagacagaatcactgaattcataattttctttaatcactttgtccattgaacttaggagcaaccaaccagcttcattatattccttggttctccatatatggtcaaaggtattatgtatagagtcactaaactcattgcccct

SEQ ID NO: 792970 - DNA, 612 bp, Homo sapiens
agaacatcatcattagagcagcagaacactgttgacacagcatgtggtcactaattttgatgacagctttccagtttggcaggggaggagctggccctggagctggcttccttgttctgcaggcaccttcctgattttgtccaattcaacatctcttgtggcagtctgggcttgtagtacagggatctttccatcasgctcagtctggagactgttcttcagccccacttaaagactctgtaagtcattgaatatcctgtaaaaaaaaagtggctaaactagctacagttgactgtttcttcacctggacttccctcgatacagtaattggtacctgaggtagctggagacaatagactgtcagggaaacgggaatctgaaacgcgtctgaactggttagatttgaaggcagtaaagtttctgccagcattgaaggatgagacactggcagtccacagtatctggtggtgaaagagatacttaaattataccctgtgcttgtgggaaataaagtgcccattgaaggaaggctttggcaggctacatgtctactgtcgagggcaagtatggcaaaaatgagaagcacaatgactatggagtatgtctggctgt

SEQ ID NO: 792971 - DNA, 522 bp, Homo sapiens
aggaacgtgctgttgttactaccgttgcttcaaatttaagaatataaaagacaccaatttcttacctttcagatttataaacattcaaaagttcactaacatgttctgatggccaacacaaaatgctacaaatactatgtaaggcaatttcgtcacatctaacaaaattacatgtgcmcttgaccctgcaatctcatttctactcatttatgttgaagggcaccttttcaaatctaaaacaacatatgcacatggtcaaccattgcagcattatctgcaacagcaaaatattggtgacaatattcaataataggaaactgatggaataaactatgatatctccacacagtgttgtactacatgcatctgtttaaaaagaagaaaggaagatcctacagcttgatagggagtgatttcaaacatccattgtttattgaaaaaaaggaaattggaaaagaatatatgacatatgctatactttatgtcagaaaaaaggaaaactaaaaagactatatattcaaa

SEQ ID NO: 792972 - DNA, 601 bp, Homo sapiens
tcatgatactgagtgagttctcatgagatctgatggtcttataagcagctcttctccctttactcatttgctgtctctctctctcacctgctaccatgtaagacgtgcctttgctcctctctcaccttcctccgcaattgtaagtttcctgaggcttctccaacagtgtgaaattctgagtcaattaaacctcttttctttataaattacccagtctcaggtatttatttataatacagtgtgaaaacggactaacacagtagacttgcaagagtcctgcggttcacaaaaccaagaagtccagagctccagatcatgggtacgtaacaatcyggactgttgagtaaaagaataatagcagtaaggctattgttctagaccaaaatctagccattacgagaacatgttgcttggagatgagattaaataactgatagaacacagaggaggaggaagggtacatcccagtttgccatgtgccatgaaaacttcggagaagtgaagatcaattacgactgatgagataatttaatgcaaagagccaggtaaaacgtctgcaagcattttaaaactgtgtatgcgggacaccaaagaagaaata
